United States Patent Application Publication US 2011/0214205 A1 - sequence listing, part 14

SEQ ID NO: 49340 - DNA, 168 bp, Setaria italica
  Peptide Sequence Number=SeqID_115314
acaaacgccgtcgaccgtcgtcatcttttgctatacatcgcgtcgtgggttgacgagttggtgatgctgatgcgaagaaattcaacgaccttctgcaggatcttgagctcctcgcaggcgtcccacttcatcttcttcacccgcgaaccacctcgccgtgatgttggc

SEQ ID NO: 49341 - DNA, 257 bp, Setaria italica
  Peptide Sequence Number=SeqID_115315
ccctccccaacaatccgacttcacactactcaagtctcccaatccacaaaccctaaagcccaggcgggcagatcgaggcaagcggctgggttaggggactcacaggtcgcagatcttggagtggtcgcgcgtgaggatgctgtatccgacggagaggcgggtgtcggctgcgacgacgcagtaatcagcgccggcgatggccacgcaggtcccgccgttgttctcgtagacccaatcgccgcgcctcgacatcgcgg

SEQ ID NO: 49342 - DNA, 188 bp, Setaria italica
  misc_feature (9)..(9): n is a, c, g, or t
  misc_feature (11)..(11): n is a, c, g, or t
  Peptide Sequence Number=SeqID_115316
tctagtttntntagtattgtctaaattactattcctttgtacttagtattcgtattggtccttcttgtatttccgtactaaaggcgttgacagcatctctggcagggagtaataaagggctaggtgatttaagttgattgtccaagactggcatgatcaaagaagatcctgttccctgagcactgtaa

SEQ ID NO: 49343 - DNA, 467 bp, Setaria italica
  Peptide Sequence Number=SeqID_115317
caattacaatgtcttcatgtgctaattcagtgttgtaccagtcaagaaaaagaacagagaaagtgagaacaaagaagaagaggaggagaaaggttctactgctgctgttgcgctggattgcctgggatagctccttgttcccgcgctccacattattcgtagcttcaacagcctggtcatataaatactgaatttgttgagcttgttgtagaacatgcgttgacataagatgattaagtgctgacatttccatcatctttgtctcagtttcttggacagcatcaagaaggcttgtcaactccacctggagagctcttgtttcatcatccaatagttgttcttgaaccctcatgggtgcagtagatacttcctgatccccaatctttgatacatcagattttagaacaagattagacttggatggttcaagaaagaaaaccaagaaaatacaaaacctgactgaaaca

SEQ ID NO: 49344 - DNA, 244 bp, Setaria italica
  Peptide Sequence Number=SeqID_115318
tttaggtttcttacctgcatcatcatatgagaagcaatggcaaatcaaaacaaacaaccgcagacagcgtgaaacttacttcatgttcgatgttgtccctctcttgctccgtggtgcgatgcaggtccacatagtctcttctgtgcttcactatgaacctctccagttccctgatactctcaagcgtcttgatcgcggcattagtgaatggcgacttgggggacggacttaccggaatagaata

SEQ ID NO: 49345 - DNA, 401 bp, Setaria italica
  Peptide Sequence Number=SeqID_115319
cacacccccagcagcttcttcgtctcctctccctcccccagcaatcgcgaaccggatagatagatcggccctatctttgcctcctcccggacgacgcggctgcaagctcgcagcttttcctctcgatctttcgcggtttcccgttttgatcccccctgctccggatgggggataccggagatcttcgcggcggttcggtgctgagatggttcgccgcatcactcgctgctgtgattcgcaacagttcttccaatccgaggagtcccgatgatgaacagcatgccgatctctgcgtcccctgcggcaggagtcgatggcggcccgctggcggccggcacgcccaggaagaatgcgacggcggcggcctctgtcgccgagatggcgaggcatctcaccgtcga

SEQ ID NO: 49346 - DNA, 262 bp, Setaria italica
  Peptide Sequence Number=SeqID_115320
atttcaggtgtttttcttacgggatttgtggtgtggtctttcttccttccatttttgtagcgtctgtgtagcatgttgcttccgatttggtgggatttttactctatttcttgctctagtgatgacttgcttgactgatttcttgactggttttttgctgttccgtttctcgtcgtccgcttcagttcttccaatccgaggagtcccgatgatgaacagcatgccgatctctgcgtcccctgcggcaggagtcgatggccgg

SEQ ID NO: 49347 - DNA, 404 bp, Setaria italica
  Peptide Sequence Number=SeqID_115321
cagtcatcctctgaccaactatcgttgtcagatctgaagctccggccactatcattgtcagatctgaagctccggccaccacggcggaatcgatcctcgccctctgaatcccaaccaccccgtcctcttgcactgccgccacccctggacctcctgttcttagaacctcggtcattcgaaaagcggccatagctatcagcaggaggaccatcatcttgcaacgcaggcagctttgaaattttggttatggtgtttcctgcaggaagttccatggcaagcaaatcctttgcaatttcctcaggtaaatcaaagactgctccttggacctgttacgatcagcaatgcatagaccaaacagtgaaaattcatcaggacgaaagaacagtataaactatattctacac

SEQ ID NO: 49348 - DNA, 308 bp, Setaria italica
  Peptide Sequence Number=SeqID_115322
tttttttagttaactaactaagtttcttaattagtttgttgtagcgattctgattacgtctctgtcgcaatggtgtagcagcaacaactgtacacggttcatgtggtgttacaattctattgagagttgagaccctgaacaacaagcaacaaaaaatgaaagagtaaagcccgtgtgacatgaactccttttgtaatactggtagtcagcgtgccaaaatcttgctctgacgaaacgaccaaacaaaactgtagctaccgcacggtggctgtcagccagcaataacgtcagctggctctcgggcgtgt

SEQ ID NO: 49349 - DNA, 250 bp, Setaria italica
  misc_feature (246)..(246): n is a, c, g, or t
  Peptide Sequence Number=SeqID_115323
tatttttaactacatactgcaatgtacggcatgacagaccatcaagacaaatatctgtgtatatttcataacatatattggccacaacgaacttgagaagaatgagctgcaaaaattacctttgaaattttggttatggtgtttcctgcaggaagttccatggcaagcaaatcctttgcaatttcctcaggtaaatcaaagactgctccttggacctgttacgatcagcaatgcatagaccaaacngtag

SEQ ID NO: 49350 - DNA, 253 bp, Setaria italica
  Peptide Sequence Number=SeqID_115324
ggcgtgtttgattgtccagccgcctgttggaagccgatcaggaccgaaaggagcgaccccgtgcggcaggaaagaatgcttcatctctaccatctacttgtttgggcagtctgatgcacggtgaccggattcgccgcagttgaagcaagcaccgctgaagtttctgttactgcaaatggtggaagatcattagctttggaaacagaaaggtcatcatgcctagaagtttgcaatgtggtaattaattattttt

SEQ ID NO: 49351 - DNA, 254 bp, Setaria italica
  Peptide Sequence Number=SeqID_115325
cggaatcgatcctcgccctctcgaatcccaaccaccccgtcctcttgcactgccgccacccctggacctcctgttcttagaacctcggtcattcgaaaagcggccatagctatcagcaggaggaccatcatcttgcaacgcaggcagctttgaaattttggttatggtgtttcctgcaggaagttccatggcaagcaaatcctttgcaattttccttcaggttaaattctaaagacttgtcttccttttggtta

SEQ ID NO: 49352 - DNA, 224 bp, Setaria italica
  misc_feature (5)..(5): n is a, c, g, or t
  misc_feature (53)..(53): n is a, c, g, or t
  misc_feature (182)..(182): n is a, c, g, or t
  Peptide Sequence Number=SeqID_115326
cctcnggtaaatcaaagactgctccttggacattctcatctgctgttaggtanattttgccaacttcatctgcagcagctgaacaaacatcagatagaaaaccagtgacagatctaggggaaaagaagcctcttccaaatcccggatctctagttagttgcaatgtcacccatctctgatcnagtcatgagcagggatgggtgacattgcaactaactagagat

SEQ ID NO: 49353 - DNA, 508 bp, Setaria italica
  misc_feature (66)..(66): n is a, c, g, or t
  Peptide Sequence Number=SeqID_115327
aattgcagcaaacatggtgccatcctataacaaggtagttaaaaattcgtacatgatgatatgacnttaaaattgttggtacactcgtgcatgaatcatgatgtagatacagttaagaaaaaaagtaacactaaaaatcagcgcaataccagcccctgatacattgatacctaatctacaccctattctcgttgtgcacgaacggtaaaaaaggtacacccaagcaagatataccaatgattgccaaggtacgccaagtgataaaggtccccaaaacatacgccagcgatgccccacaacagatcataaactggtttacagttgcgaaccctcctctaagattctttggtgttatctctgatatatagactggaacctgttaagattctgcaaagttcagactgaattcgtccagaaaggtaacaagatggagtatctttattgtaatcaccacatatgaaagaaggccaattccacatccaattgagagccttcctaattgttctaa

SEQ ID NO: 49354 - DNA, 189 bp, Setaria italica
  Peptide Sequence Number=SeqID_115328
caaatgcacctggatgtccaaaccttgccagccatctgggggattcaggagtcacaagaaggccaaccaattgcagcaaacatggtgccactccaatgattgccaaggtacgccaagtgataaaggtccccaaaacatacgccagcgatgccccacaacagatcataaactggtttacagttgcgaacc

SEQ ID NO: 49355 - DNA, 167 bp, Setaria italica
  Peptide Sequence Number=SeqID_115329
cctatcccctgtgtgccttgtatcccctgttgcgtgtctcagctttctgtttgcattatatgtttaatttgtgtgaatatgcataagtgattctgggagttgagtgtgctctctcatcgtttctttgtacatagattggaattggaattggattgtatggttgttct

SEQ ID NO: 49356 - DNA, 237 bp, Setaria italica
  Peptide Sequence Number=SeqID_115330
tccagtccgtttgtgtgcgccgatcagatcaatgtctgtgctgttcagatcaatgtacttaacacaatgggacttgcactcgacagccctactttatccacataaacgcatttcagttggatatggtgcagttgggtttaaagcggagtaacctgcgcagccacgcaggtgagagaggctgtctgcttgtggaatcagatcaaaggatggtagatttgcaggaaattcagtttattg

SEQ ID NO: 49357 - DNA, 149 bp, Setaria italica
  Peptide Sequence Number=SeqID_115331
cggagtacttctcgtacgcgctcgccacgcgcatcgcgccgcgccacgaggcgtgcgcggcgcgcggggtcaggctgccgctgcccgccatgctccggcccggaacttggcgtccccgggccggagcatggcgggcagcggcagcctga

SEQ ID NO: 49358 - DNA, 409 bp, Setaria italica
  Peptide Sequence Number=SeqID_115332
agcagcttctattgttctgaaattgaaagcaggaccatgatcgttttatgtacttttatggaaatataaatattttggttctttatgcagaatcttaatcacaaaaatattgttaagtatcttggatcactgaagacaaagagccacctccatattattctagagtatgtggagaatggctcacttgccaatataatcaagccaaacaaatttggaccttttcctgaatcgttggtggctgtctatattgccccaggtgttggaaggtcttgtttatctacacgaacaaggtgtcatacatagagatatcaagggtgcaaatatattgactacaagaggccttgtcaaacttgctgattttggagttgccactaaattaactgaagctgatatcaacactcattctgta

SEQ ID NO: 49359 - DNA, 361 bp, Setaria italica
  Peptide Sequence Number=SeqID_115333
gaacaaggatttggcctcatgcgtactttgagcacattcttaaccccgagggcgagggacaagtacagtcaacaaccaactcgaatcaccatcaatcactgtccggaggcccagttgcaatggagatgagaagcacgggccaagaatcgctggattccatagaagaaggccgcagagctcggtgaccggatgctgccgctgccgttatgaacagaattcagtcgttttttcttgtttgatactagatttttaccgttgtgctaatcatgcggacgcgttggttggtgtggtggccatcatctcctcaaacatacgaacattgtggattgaatttcacctacctttatttacaagacgcaat

SEQ ID NO: 49360 - DNA, 245 bp, Setaria italica
  Peptide Sequence Number=SeqID_115334
tagtttctccttccctccatccttccgtagtatttctcaccttctctctgcatcatatgatgattccttagtggctagccttaagaagagctgcagtttttgtgcaagcctctgtaagtttccctgttcgatcgcatatgaataaggaaacttacagtggctagccttaagaagagctgcagtttttgtgcaagcctctgtaagtttccctgttcgatcgcatatgaataaggtcattttacttg

SEQ ID NO: 49361 - DNA, 345 bp, Setaria italica
  Peptide Sequence Number=SeqID_115335
cgtatctactactactatggaattcaggagtgtattctccatcagaagtactccttaattccatagtagtagtagatacggataaaacagccacaaattttgcatagaagcaaactgaccctcttcaccatatgtaaatgtacatagtacaaggcggagggtagttagaagcatttttattaacaaaacgggagggtaaagatatttcgtgtgttctcagacaggcattggttactggtttactacaggtatacatgtatagctcatagctactcattgtatgctaagcatacaagagactgaggccaccaatctgaatgtatatcatttcaattagtagttcaa

SEQ ID NO: 49362 - DNA, 235 bp, Setaria italica
  Peptide Sequence Number=SeqID_115336
agctgcacaactatctgacaagcgtgtatgaggagcgtgatgcaaggacaacgctactcgtcaatggtgcaagccctgaaccatgccaagcatggcgtagacattgtatcaggcaccagggtaaacacattttatttgagcaaacagagtaccatgacttcacaggtcaggacacattttgcaagaccaaactggaaggaagtcttcgcaagaatcgcttccaagcacccgaatt

SEQ ID NO: 49363 - DNA, 180 bp, Setaria italica
  Peptide Sequence Number=SeqID_115337
cctatcccctgtgtgccttgctcccctgttgcgtgtctcagcacatccagaccagggggactggacccaagagctcaagcgcatcttcgttgagaactacttcacgccatgcgtgcccatacgagctgcattcggggagctaggcgcggcggagcagaagagtccgccaaggttgctggt

SEQ ID NO: 49364 - DNA, 347 bp, Setaria italica
  misc_feature (282)..(282): n is a, c, g, or t
  misc_feature (294)..(294): n is a, c, g, or t
  misc_feature (306)..(306): n is a, c, g, or t
  misc_feature (317)..(317): n is a, c, g, or t
  misc_feature (327)..(327): n is a, c, g, or t
  misc_feature (335)..(335): n is a, c, g, or t
  misc_feature (340)..(340): n is a, c, g, or t
  misc_feature (343)..(343): n is a, c, g, or t
  misc_feature (345)..(345): n is a, c, g, or t
  misc_feature (347)..(347): n is a, c, g, or t
  Peptide Sequence Number=SeqID_115338
atggatgaatggccattgtcaacaatatctaagcatcttccgagggtcctaggagtgctgctgacctctctgcatgatgtatggatgtctgcatggtgtaattcaactagtttgtattatagagttcacacctgtaattgtactaaagtgggcatccgggatgagttggtacaatcggggtgtgttttgttgctttgtatcatttgtattatttgattcatgtatgaaatggttcaaaataataatgattcttttgttaacggttaaaaaaaaaaaaaaaanaaaaaaaaaaanaaaaaaaaaaanaaaaaaaaaanaaaaaaaaanaaaaaaanaaaanaananan

SEQ ID NO: 49365 - DNA, 208 bp, Setaria italica
  Peptide Sequence Number=SeqID_115339
tgcatcgtgtcaactatgttgcggactatattgttagtcaataatgcaacacctcatagacatcacaccacgggtgaggtgtgaagggctttgtttcaacttgcacaccaatttagtgatcgccatgcaagctagaagttctatgggtgaacgctgaacagcagccaaacgcaacctaagtctaaacttggaagcaaagcacaaaggg

SEQ ID NO: 49366 - DNA, 198 bp, Setaria italica
  Peptide Sequence Number=SeqID_115340
atcaagtgcaatcaccaatgccttgtcctcatcgggatcaggtgtgtgcatgatgtaaacaacatcagcgtcatgcaagctcagagcagggtgaacgctgaacagcagccaaacgcaacctaagtctaaacttggaagcaaagcacaaagggtactacttagcatggtgatcactaaattggtgtgcaagttagaaac

SEQ ID NO: 49367 - DNA, 256 bp, Setaria italica
  misc_feature (34)..(34): n is a, c, g, or t
  misc_feature (54)..(54): n is a, c, g, or t
  Peptide Sequence Number=SeqID_115341
taatcgcatgaagacctctgcaaagccaattccntaagcccttggatctctgcncttttctgctcaggcttaacgaatgaccattcttatgataaattgaaaaaataaaaggaaatctgtccagtcagctaattccatgaaatgataccgccgcagagctagcagatgtgcttgaggaggggtttgatcttcatgcacatctgctagctctgcggcggtatcatttcatggaatctgtccagttctagtcttaatt

SEQ ID NO: 49368 - DNA, 145 bp, Setaria italica
  Peptide Sequence Number=SeqID_115342
ggggtgcttgtggacggtgtacagagcaatcctgaagactggacagacaattgcagtaaagaagcttgcttctaacagagaaggttggaaccctggtggtatataaaaccgtacagcttcacaatattacgatgtcttatcttcc

SEQ ID NO: 49369 - DNA, 415 bp, Setaria italica
  Peptide Sequence Number=SeqID_115343
tttactttttcttttccttttgtttcgtttcgtttttcgggtttattttgtttcgttaggttaccttaggttcgttcctaggtccttccttgacacgggtgaagcctttggtcatctggttgatggttatcagcccctcgccgaagcactcctgcagcagggccagtatgcctgcgtcgttctgcttctccatcgccatgaccagcgccttcttcaccacctcgtggttgaagaagggcatcccaaggtcgcggatgcatctgcaggcttctcccaggtcaccgccagtgctgtactcctccagaagcttagcgatcttgtccttggcatcttccacggcccagccggtgccaccgccccagcaacgcagaatccgctcgctggagtggcgagctgacagcagggctcgggccat

SEQ ID NO: 49370 - DNA, 399 bp, Setaria italica
  Peptide Sequence Number=SeqID_115344
gtcatacccctcccagaccagaccaataagacactattctcaacacaagcgacaccacatccaccctacaatccttccggtataaggtaacattttcaagtaaactaggggcagaaaaacttttggtatgatgctgatgacagcacgggtgcaaaatgtacacataggagactcatcaagcctcgcatcgcaggccaaaggaagaggcctcagggaaccgaggtgaaggctggcagcagccagccgcgcccagtcgcgagctccacgtacgccccaaacttctcctgcgcgttcgggatgtcgaggaccaggtcgtccaggccttccttgaacaacgggtagaaagacctttaggtacaatactaggttagaataggttaatacaagacccctacgaca

SEQ ID NO: 49371 - DNA, 218 bp, Setaria italica
  Peptide Sequence Number=SeqID_115345
tcttctacttgggagcatccacaatgagcttgccctcttcctagctagggcagtgattgatgaagtactgccctagctaggaagagggcaagctcactgggagcatccacaatgtcaagggcagtgtcttctgctgactgcaagagcatcatgaaggggttcataatgctcttgctgttcggccgaagcttgctgctgatctcatccaagtttagcgg

SEQ ID NO: 49372 - DNA, 186 bp, Setaria italica
  Peptide Sequence Number=SeqID_115346
tcttggtagttggtcgtagtcttgtactagtctagggtcttcgggtcctattcttggacagttctggctgccactgctgttcggccgaagcttgctgctgatctcatccaagtttagcggaatcagtacttcatcaatcactgccctagctaggaagagggcaagctcactgggagcatccacaat

SEQ ID NO: 49373 - DNA, 243 bp, Setaria italica
  Peptide Sequence Number=SeqID_115347
agcaggtcacgggctgttatgtctgcaggcaatcaaggttatgttggaagctatgggaatcccaaggccaattttgccccaaatccttataacgctgggtacagcatgaatcaagtacgtcttgtggcttctactccattttctgcagaacctcacatcccttaatcctcatttgaagcggcttctctattgcaggcaagtgctgccgattctgcctcccagtatgtacctggtgcaacgcac

SEQ ID NO: 49374 - DNA, 247 bp, Setaria italica
  Peptide Sequence Number=SeqID_115348
ggaaaataatgtttctgtaaacaattggaccaattcgtgtagtttctagcgagcaggtccaagccgtgtatcgtgccatgagaagagataacaggatgaagtacttcttatgaagtgcaactacacatcaggctggagctccagtgaactgaacaaaaatgtgagacgtattctgttgcactcgagcccaaacagaagcggctgaaatgattcgatacaatgtatctttgttggtttgggttacatt

SEQ ID NO: 49375 - DNA, 435 bp, Setaria italica
  Peptide Sequence Number=SeqID_115349
tgaacggcatctgctggactgcctacgcgctcatcaaattcgacctctacatcaccatccccaacggcctgggcgtgctcttcgcggtggcgcagctgatcctctacgccatctactacaagtcgacgcaggagatcatcgaggcgcgcaagcgcaaggccgaccagatcgccatgaccgaggtcgtcgtcgacgccaccaccaccagggcctccaacaccaccgccggctactgatgacggcggaaagacaccggcggcggacaaccaagctactaccgtcctcctctccttcccgaagggatggatcgatgtgtctgcgtatgcatcctatgataacgctgccgtcgccgccgccgccgccgccgccgccgctctgaattttaataattttgcttaactaactaagtaaaccttagaaaggaaaaaacaaaaa

SEQ ID NO: 49376 - DNA, 414 bp, Setaria italica
  misc_feature (197)..(197): n is a, c, g, or t
  Peptide Sequence Number=SeqID_115350
cgaagagcgtggagtacactgcccctgttcctgtctcctggcctcccctggtgaacggcatctgctggactgcctacgcgctcatcaaattcgacctctacatcaccgtaagcatgcaactaccagaaacttttccgtccagttcgctgattcaccgtatcagtagaaaacagcagcactagtactgctagaattcnttttttttaaaaaaaaagaagtattggtaggaatcggtcagcgactatttaaagaccgtgacggaatcagcctgtactagtagggaaagctagccatgtgctctgagcattaacaaacagagcaagttaacaaaatggggttagggttcggtatcgtactctactactactgtaagacgttagctgcctgccatgatgccatcaccgtcgcaataac

SEQ ID NO: 49377 - DNA, 436 bp, Setaria italica
  misc_feature (374)..(436): n is a, c, g, or t
  Peptide Sequence Number=SeqID_115351
agaataccagactcaacctacgtcacgctcttcctcctctactcgacgggggccgcccgccgcaaggtcatgctcctgctcgccgccgaggtcgccttcgtcggcgccgtcgccgcgctcgtgctgaccctcgcgcacacgcacgagcgccgctccatgatcgtcggcgtcctctgcgtcctcttcgggaccggcatgtatgccgcgccgctcgccgtcatgaaaatggtgatccagacgaagagcgtggagtacatgcccctgttcctgtctctggcctccctggtgaacggcatctgctggactgcctacgcgctcatcaaattcgacctctacatcaccagaaataattattgagtatgaaataaaaaacnnnnnnnnnnnnnnnnnnnnnnnnnnnnnnnnnnnnnnnnnnnnnnnnnnnnnnnnnnnnnnn

SEQ ID NO: 49378 - DNA, 381 bp, Setaria italica
  Peptide Sequence Number=SeqID_115352
acccgcacagcatgctcgtcatcaccatcaacggcaccggcatggcgatccacgctcacctacgtcacgctcttcctcctctactcgacgggggccgcccgccgcaaggtcatgctcctgctcgccgccgaggtcgccttcgtcggcgccgtcgccgcgctcgtgctgaccctcgcgcacacgcacgagcgccgctccatgatcgtcggcgtcctctgcgtcctcttcgggaccggcatgtatgccgcgccgctcgccgtcatgaaaatggtgatccagacgaagagcgtggagtacatgcccctgttcctgtctctggcctcccttggttgtaacggtctattcttgtcttggtactttgttcctttacgttcgttcctt

SEQ ID NO: 49379 - DNA, 269 bp, Setaria italica
  misc_feature (145)..(145): n is a, c, g, or t
  misc_feature (218)..(218): n is a, c, g, or t
  Peptide Sequence Number=SeqID_115353
tacagctgctgttagtggagggcctttgcttgttctgatgacgcagcccatagctgctcgatcggttttccagtaatttcagtactattctaatgctctccactaacagcagctgtaacactgcaccggaagatgatcatattanatgatgatagaaggtgagcgcaggagtgcagtgcagccctcgttctgcagttctctttgtttttgtttccttnaaggttactagtagtaagcaaaatataaaatcagagcggcggcggcggcgg

SEQ ID NO: 49380 - DNA, 358 bp, Setaria italica
  misc_feature (149)..(149): n is a, c, g, or t
  Peptide Sequence Number=SeqID_115354
gtggagagctagatttggcaaccagcgcgagcgagcaccgtccccgccgtcgaaagctcgccaccgacgaaccgaccatggtctcggccgaaaccatccgcacggccatcggcgtcatcggcaatggtaccgcccttgtgctcttcctntcccccagtgccgacgttctaccgcatctggaagaagcgcgcggtggagcagtactcggcgatcccgtacgtggcgacgctgctcaactgcatgatgtgggtgctgtacggcctccccgtggtgcacccgcacagcattgcttcgttctattctacctattctaacggttcttaccggttcttatttggttcgttatttccttaagtta

SEQ ID NO: 49381 - DNA, 281 bp, Setaria italica
  Peptide Sequence Number=SeqID_115355
tcgccgtcatgaaaatggtgatccagacgaagagcgtggagtacatgcccctgttcctgtctctggcctccctggtgaacggcatctgctggactgcctacgcgctcatcaaattcgacctctacatcaccatccccaacggcctgggcgtgctcttcgcggtggcgcagctgatcctctacgccatctactacaagtacgaacgacaaggaagaatacaatacgaaggacgacgaacaaagaacgaacaaaaggaaccgaaaccaaagaaaccgaaccaa

SEQ ID NO: 49382 - DNA, 245 bp, Setaria italica
  Peptide Sequence Number=SeqID_115356
tattcctatttggtcaatggcactcctccaccccagtaagggttgaaagctccagttggacccatgccttacatgggttatccaccagctccatttgacccttttggtgggggtgttctcccacaagatccatttatgcccccaggatacatgatgcctggagttcctagggatctttcggaattggcagttaaccctatgggaataaatatgggcccaccaattgtgagcagggaagaatttga

SEQ ID NO: 49383 - DNA, 408 bp, Setaria italica
  Peptide Sequence Number=SeqID_115357
tttgtttttcatgcatgcttgttttaaatttgtccaaaacccagttgatgatttttctgtatattgaccttagtgtttctctttttgtctatgttacaggcaatgggaccgcccttgtgctcttcctctccccagtgtaagaatcaatttaaaacatagcaataattactatgatgaaatatggataacgtaacaaaaattgtatttttccaaaccatagcaacaaatgaacagatgtcagtatacaaatactcgtatacaattcacaatacacacgtatatactatacgcacgtggcacgtacttatacacaaataccttgcaggccaacgttcatccgcatctggaagaaaggctccgtggagcagtactcgccgatcccatacgtggcgacgctgctcaactgca

SEQ ID NO: 49384 - DNA, 338 bp, Setaria italica
  Peptide Sequence Number=SeqID_115358
ctactcgacggggggccgcccgccgccaagggtcatgctcctgctcgccgccgaggtcgccttcgtcggcgccgtcgccgcgctcgtgctgaccctcgcgcacacgcacgagcgccgctccatgatcgtcggcgtcctctgcgtcctcttcgggaccggcatgtatgccgcgccgctcgccgtcatgaaaatggtgatccagacgaagagcgtggagtacatgcccctgttcctgtctctggcctccctggtgaacggcatctgctggactgcctacgtcgtcttctattctaaatttcgttacctttctttacttatttcttaccttatttaccctt

SEQ ID NO: 49385 - DNA, 223 bp, Setaria italica
  Peptide Sequence Number=SeqID_115359
ggcgattttccctatttgtttcttttgttgtgttgtgttgttatacttttgactttcatcgtctttaccatgctaatgtttcttttcctgtgtgtgttcgccttttgtgtggaacagaaaatggtgatccagacgaagagcgttgagtacatgcccctgttcctgtcgctggcatccctggtgaacggcatctgctggactgcctacgcgctcatcaaattcg

SEQ ID NO: 49386 - DNA, 241 bp, Setaria italica
  Peptide Sequence Number=SeqID_115360
cgcttcatgaacgcatatatgcacacggagcagctgcaacacgcagcagaagtgctgtgtggagcctgcctgtggtagatggcactagccggtcatgtggggtgtcgggctcttttcatactccttccttgcttccttcctgcacgcccacgcccgccctcctttaatttccatccatcttcttttttttcttcgtttttattttgccaagctttacacatgtcctcatcacagcacaagt

SEQ ID NO: 49387 - DNA, 168 bp, Setaria italica
  Peptide Sequence Number=SeqID_115361
attttgcttactactagtaaccttgaaggaaaacaaaaacaagagaactgcagaacgagggctgcactgcactcctgcgctcaccttctatcatcatataatatgatcatcttccggtgcagctatgggctgcgtcatcagaacaagcaaaggacccttacctaacta

SEQ ID NO: 49388 - DNA, 140 bp, Setaria italica
  Peptide Sequence Number=SeqID_115362
cgctggcatccctggtgaacggcatctgctggactgcctacgcgctcatcaaattcgacctctacatcaccgtaagctatcgatcataaccaattgttgctgcacgccaaacatgatcaaataacaatgcaaacaaaaga

SEQ ID NO: 49389 - DNA, 188 bp, Setaria italica
  Peptide Sequence Number=SeqID_115363
gccgctgcgcacaaatgagctgctgaacctatggacccatccgtcgccgccgccacacatgggtccgataggttcagcagctcatttgtgcgcaggcggcgacggatgcttggtttgcccgagaagaacttcttcaatgacaacttcgagttggtgctctcagaacctagtgacgccaatacccaata

SEQ ID NO: 49390 - DNA, 168 bp, Setaria italica
  Peptide Sequence Number=SeqID_115364
taatgtctccaatgccagtatacttccaccttgccacccaattgctttcataagcagtggtacaacctgaggagttcctgcacttgttgctgctacacattatgaagcaaatgctgttgatccagagcttcctttgctgctgtccgcggcactagtctccttgctacg

SEQ ID NO: 49391 - DNA, 166 bp, Setaria italica
  Peptide Sequence Number=SeqID_115365
caccataactgggctcgttacagcagcaaaatacagttcacgcctccataccccaccaaagagcagcttatgatgcacttgttgcacaggggctaaaggttggtcttgttgaagtactccttggtattcttgattggcgtgctggtggaagacagggactctgtaa

SEQ ID NO: 49392 - DNA, 245 bp, Setaria italica
  Peptide Sequence Number=SeqID_115366
tctaaagtagcaaatacacacatcgcatcagtcatcggggtattagtctgctatcacctatgtcagtgaaaggataactgtattttctgtttctactaactagcaatttttagaagaacaaacaattgcatttgattcaagtagacctggcattgatctggagtaggttcataaggaaattcagcagcaaactcttccattgccacaggctttgggtatggaggtctgctctgcctcatcctttg

SEQ ID NO: 49393 - DNA, 428 bp, Setaria italica
  misc_feature (385)..(385): n is a, c, g, or t
  Peptide Sequence Number=SeqID_115367
ttaacgttaattagttacgttaacttaaggtaagtaaaaaaggtactaaaagttgtctagtcttggttgcgtgactcgaagaaaagcattgaaatgaccataactgaactacagaagaaccctatcaactatacacagattgctgtgctcgcggatgacatcttgaaaaacgtggaatatgatgctctgagggttattttcaacaagttccagtctgtgatatcatttaagcccacagtggcaacaatactgtcccctgaggttgcagaaaaagaatcagaagctggtgggaagatgggtgacctggattctatgaaattgaaggtggcgagacaaaagcagagatattgcagaatctttctgagttccagttttctgtgtcctntacaatggtgccctagagaatgcgtgcagtgagcttggagccc

SEQ ID NO: 49394 - DNA, 263 bp, Setaria italica
  Peptide Sequence Number=SeqID_115368
caagaacattcagaagatcacaaaggctatgaagatggttgcagcgtcaaagcttcgggctgttcagacaaggactgagaattcgcgtggcctgtggcagccgtttactgcccttcttggggatgctcccagcgttgatgtcaagaagaatgtcatcgtgaccattacctctgacaagggactctgtggtggcattaattcaacatcagtgaaagtttagctagggccctttctactaaatttgtactattcttggtttcctt

SEQ ID NO: 49395 - DNA, 244 bp, Setaria italica
  Peptide Sequence Number=SeqID_115369
tgtctgccatggacagctctagcagaaatgctggcgatatgctagaccgtctcactctcacttacaacaggacacgccaagcatccatcactactgagctcattgagattatatctggtgcatctgcccttgaaggatgaagaaactattgagctcattgagattatatctggtgcatctgcccttgaaggatgaagaaactatttggacaatttcctttgcccttattgggagtaaaaaaggg

SEQ ID NO: 49396 - DNA, 245 bp, Setaria italica
  misc_feature (2)..(2): n is a, c, g, or t
  misc_feature (223)..(223): n is a, c, g, or t
  Peptide Sequence Number=SeqID_115370
anaaacaaagttaccaagtactagtagaataatacaatttaaagacccaacaagtaggcaacaatactgtcccctgaggttgcagaaaaagaatccagaagctgggtgggaagatgggtgacttggattcttatgaaattgaaggtggcgagacaaaagcagagatattgcagaatctttctgagttccagttttcttgtgtcctctacaatggtgccctagngaatgcgtgcagtgagcttgga

SEQ ID NO: 49397 - DNA, 382 bp, Setaria italica
  Peptide Sequence Number=SeqID_115371
taacaatagtacaataatgacagcaagatggatatacatgagattgacaattataaatagaatgataaactaccagttgtaacaaatagggaacagggaacatcagtatgtacctgagaaacgacagtccgcaagatgctttgtctcagttgactcaagccgcatgctttctggcagaagacaattgcaaaaggcccctgaaaataatttggattatcctccaatgtaaaccaaggttgacagaaatacagaactcaaatttcatttcaatatgtgatgtttcttttcaaccaagaaaagaagatacatgtttcatacatgatcgtgtgcttcatctgtacaataaaccggttgcataccaaaaatactactcgaagaatgg

SEQ ID NO: 49398 - DNA, 260 bp, Setaria italica
  Peptide Sequence Number=SeqID_115372
gattgttaagtctaccagcaaacttatcatcatccctaaaattctattgttacaccagtgttgcaggaacatggttttgtagttttgttctgaaacatttccttcatagattagtagtagtttccacatgtgctcttccttgggacagactgatctgaccaactgttaccaaaactccaggtgaaatgaaagagactgactggttccagatgagccttccccaaggccgaagtgctcatcctcaacttcgcctcaagcgt

SEQ ID NO: 49399 - DNA, 157 bp, Setaria italica
  Peptide Sequence Number=SeqID_115373
cggtgggagtgtgatcttctccaaccagaggctcctcaggccgctgccaaagaccacgatcccgctgaagaacctgcgcaagatctccctcgtcctctgcgagctgaacaacagcctaagagggtcgacgatggacctctccatgaccttccccgcc

SEQ ID NO: 49400 - DNA, 357 bp, Setaria italica
  Peptide Sequence Number=SeqID_115374
tcggtctaagttgtttgtagttgtctttgttctagtagtaaggtttagtagtatttgttttccttgattctgggctgcttcccagaggataagaagatccctcttgatgtgttgatcaacatttggatggagattcatgatcttgatgaaccagatgctttcgccatcttggttgagctttcagacaagaaccttcttactcttgtcaacgatgcacagaacaaggctggagatttgtatagtagctaccatgactactcggtgatgcaacatgatgtgttgagagatcttgcactccacatgagtgggcgtgaccctctgaataaacggaggcggttggtgatgccaagaagggaa

SEQ ID NO: 49401 - DNA, 254 bp, Setaria italica
  Peptide Sequence Number=SeqID_115375
tactttcgtccttctaagtcgttttacttaccttccctacctatttctattcgtcaacgatgcagaacctgaaagccttggtgctgatcaactacggcaccaccagcgcaaccctcgacaacctatctgccttctccatgctcagcggcctgaggagcctctggttggagaagatcacactcccaccgctgccaaagaccacgatcccgctgaagaacctgcgcaagatctccctcgtcctctgcgagctgaaa

SEQ ID NO: 49402 - DNA, 201 bp, Setaria italica
  Peptide Sequence Number=SeqID_115376
tgttaaaactagtactattattgtaaattgtctagtttgcttgatgaggaggaggctttttctgtcttctgccgtgctgccttcgatcaggagtgtgttcctaagactgctgacaagagattggttaagcaggtctctgcagagtgcagaggccttcctctagctctgaaggtcattggtgcatcgttgcgtgatcaacct

SEQ ID NO: 49403 - DNA, 151 bp, Setaria italica
  Peptide Sequence Number=SeqID_115377
tccgggtgcaggtggcagaggagtgttaccaacctggactggcttgtagactgatgtcacgttctgggggctctgggcttccaaactgaccatgtacatatgatgtttatatgttgcccagtggattgattactcttgctgcactacacag

SEQ ID NO: 49404 - DNA, 429 bp, Setaria italica
  Peptide Sequence Number=SeqID_115378
cgcgctcatcatcgcctcgctcttcgcgctcaagggccagccaaccagctcgctcacatgacctctaaggaggtaatggaattagctccacacttctgttgcctcacgtttcctccaattacgtctgagttagcctttgggagggtggtatgctgttgctactttaatctgttctaaacttatgacagtacaggcaaactgggtttatgaactgttttccaaaaatcccccagaccttgaagccataaaccagctagtcatcagttcgacccggttatattggttaggatttgttggtggcgctgttgcaactggttagttgaagccatatactactaggatttgaactctacatagcattgagccgtgattttaaaaccagcactaaacattttggaacatgtggaaacaagttgcaaatcttgctcg

SEQ ID NO: 49405 - DNA, 263 bp, Setaria italica
  Peptide Sequence Number=SeqID_115379
tttatttttgtttacgtttaggtttattttctttcgttcgttaaggttaaatttcgttgtagttcaggagtcctacagatggtcagacacggatgttctatgagatagtggttgcgcctggctatacagagaagggtcttgagattctccaaggcaagtcaaagacgctgaggatactcgaggcgaagagaagtggaaaggggatgctttcactcaggcaggtcaatggtgggtggttggcccaagagtctgatgatctaact

SEQ ID NO: 49406 - DNA, 348 bp, Setaria italica
  Peptide Sequence Number=SeqID_115380
cctacctaaccacactaggaaagtgaatccatcatcaaggaggtacaaacctcctgtaatctaaacactgcattgttaatggcaatcgctgcagtgaaccatcaatcttatttggttcctgcaaaaactcaaagatagtttttgattagtgtttggtaaacttgcctaaaccacacagaaatgacatacttgacttcacagacaccaggaaaataactgaccaaatagatatatcataactcaattaatgctaataattcctgaagtatcacgttttaatttatcaaaaaacctcattctaaaagcatgataactaatgacttatgaaattatttcaactgagactgc

SEQ ID NO: 49407 - DNA, 153 bp, Setaria italica
  Peptide Sequence Number=SeqID_115381
cagggtgaacagccaagagaaggatccttctcccgcagggttcttaatattttcatgaagtttcttgagaactcgttgtcacattctctcaactgaatctttgatagatcaggaaaagtttagaccaaagactagaactaccaaagaaatgtt

SEQ ID NO: 49408 - DNA, 316 bp, Setaria italica
  Peptide Sequence Number=SeqID_115382
acctaatgctcctatttcttttgaaagcaaatataggggatctcatatggcccatgcatacgacttctacaagcagctgcaccaccagtaggacgagccggaccttcagcataaaccgcactgtctgtgcaaacaacaagtccataacgcccgtcccatgagttgctttcaacccagttaacacaattaaacaacgcagctgttccaccatagcatgcatttgaggagtcaactccttcaatatcagtgttgccatattcctcaaatatttgcatcagccatgtctttatagacttgctcttgtctataactgttt

SEQ ID NO: 49409 - DNA, 247 bp, Setaria italica
  Peptide Sequence Number=SeqID_115383
gatactgctctgctagccgcctgcgcatgtgaggccgatgggggaggcaggtggctgtggtgctggagccgccgcggcccaacgtcgccgccgaggtacccggacttgtgcggccgccgccggctgcagctggagctccagatcctcaaccgcgaggtcgacttcctcaaggacgagctacaatcacttgaaggagttccaccagtttctagaagctgtaaagagtagggtctctcgtccttcacgc

SEQ ID NO: 49410 - DNA, 437 bp, Setaria italica
  Peptide Sequence Number=SeqID_115384
taagaacggaaaagaaataaagaaagttaactactagaagaagaaaactaagaatagagaaggtcagtgcctttttcttagatgaaggcaggacagaatcagatctctgggcagactgatctgtggatatattttgttttatctgagagaaaaccatggacacgtccagagggccactgttgctgaacagatgatgcttctagggcagaaacttggtgggcaggaagcactgctgctgtcagtggcaaaggtgcaaggccagcctccttctgcagcatggcagcagtggcggtgaaaccagacccaaggaggtgttcatgtattagctgcatcagttcccttgagtggtaggagataggagtagcagcagctatcccagctcgctcaatgcgcctcaatgctggagcagcagcatcagttgctgctaatgtagtttc

SEQ ID NO: 49411 - DNA, 375 bp, Setaria italica
  Peptide Sequence Number=SeqID_115385
atgaaaacaccttttgcacatatcttgagccatttttgagggctcagttgtgcaagtacctgcatctactcatggtttcttgtttttcttaaatattgtatgtttcatgcaattgctactagtgcctagaggagccaaataaggtggagatgtgtgggcttgatcctcgtaagcttcatcgtgctgatcgtctgcaggatcctaataagacacatctagttaatattcttaagggaggaatcgtttactcaaataaagttgttttaatgtcctcaatccattcgagagatgttcttatacagggttcgagacatgggttggaagcaacattaactgcacataaggagaagatattggttgcttctcatggattgg

SEQ ID NO: 49412 - DNA, 377 bp, Setaria italica
  Peptide Sequence Number=SeqID_115386
actaaaacctaggccaagcaaatgcccctttaaatgaagctctgattgtttaccatgagctgccacatgaatgttctcattttcagtgggagtttaatctgtcatgccttgccataattgttgcactccaactttgattccaaagtgggcttgagaacactcgaatattattgacatgccaagacttgaattcccaatgcctagaggagccaaataaggtggagatgtgtgggcttgatcctcgtaagcttcatcgtgctgatcgtctgcaggatcctaataagacacatctagttaatattcttaagggaggaatcgtttactcaaataaagttgttttaatgtcctcaatccattcgagagatgttcttattact

SEQ ID NO: 49413 - DNA, 282 bp, Setaria italica
  Peptide Sequence Number=SeqID_115387
catggatgctacctcagctcatcactgtgttttcacaagagttttacagccttataaacgacgctgaacatcaatgacgacgaacagttacatgtacagatgacatcataaggctgtaaaactcttgtgaaaacacatggatgctacctcagctcatcactgtatggatcttcatctctgttaaactggcagccacatttgcagccatgtttctgcaggaaccattgataatctgctgcacaagttcaggatgtggtcctcttcacatatcatggtcaggat

SEQ ID NO: 49414 - DNA, 289 bp, Setaria italica
  Peptide Sequence Number=SeqID_115388
cccgaccgtccaccccccctcgaagtaatcgaccgcgaaagaatcgagccgccgaggggcgagcgagagcagcgtcgtcggcggcatgggtctgcaggtacgaaatcctccgcctaggcttgtaaggttcagaggggtttccgtttcttggaactgaccgagctgatgcggtagattcggttctagatttgcgattgcctgattttgttttggtcctgtagtagtatgcttgtgcttggtgatgagaagatcagagtctcagttatctctttttatttttcaagtctgg

SEQ ID NO: 49415 - DNA, 260 bp, Setaria italica
  Peptide Sequence Number=SeqID_115389
ggaagtggatgcaccagcctcctccagcagctgcttcaccttggtgatgtaattatgcatgaataagtaataagattgttatctgccagatggcgcttatgatgtcatctgtacatgtaactgttcgtcgtcattgatgttcagcgtcgtttataaggctgtaaaactcttgtgaaaacacatggatgctacctcagctcatcactgtatggatcttcatctctgttaaactggcagccacatttgcagccatgtttctg

SEQ ID NO: 49416 - DNA, 396 bp, Setaria italica
  Peptide Sequence Number=SeqID_115390
aaagaagatgagtcaccctgcatttttggtccaatcgtgaaacagcgatggtcctatgcatgtgcaaagcaacttattgagaggcttatttttgctgaaggtgcagaaaatggccttgagttcacaattgtgagacctttcaattggattggaccaaggatggacttcattcctggtgttgatggccctagtgagggtgtgcctcgggttttggcttgcttcagtaacaatctgctccgccgagagcccttgaagcttgttgatgggggccagtctcagagaacttttgtttacattaaggatgccatcgaagctgttgttttgatgattgtatgttatcgcctttatctctggctccttgttatgttcaaattcaatgggactgactagtgcgac

SEQ ID NO: 49417 - DNA, 158 bp, Setaria italica
  Peptide Sequence Number=SeqID_115391
cattgtactttggttggagtacatcaactctgccatacggataacatcccttcccctagatgtccatcttgttagattccgtgctgctatcaaggggaagggatgttatccgtatggcagagttgatgtactccatccattgactttggttgctacct

SEQ ID NO: 49418 - DNA, 410 bp, Setaria italica
  Peptide Sequence Number=SeqID_115392
ctttcttgatctctgacgcgttcgcgtcagagatcaagaaagcccactacaagctcgccctcaaacaaatgctctgcactgtgcagccatccggacaagaaccctgatccggagtcgcggaagctcttcgtcaagatcgccaatgcttacgagattctaaaagatgaatccactagggagcagtatgactatgccattgcgcatccggaggaggatcctcgtgctgtgttgattggtcttcttctaattgtttcagcatttcaattcataaatcagatgacaaggtataaccaggccatagaaagtgtcaagcaaactcctgcttacagaaataggttaaaagcaattggagtttgagcggaacaggaggaattgctaacaaaaagaagggtcacaagcaggcagataag

SEQ ID NO: 49419 - DNA, 229 bp, Setaria italica
  Peptide Sequence Number=SeqID_115393
aattttctgtcatgtatcagttttgtatttagtttctggtactgggtattaatagctttctttcttataaatttgccttttcttttctctgatgtaggaaggctgaagaagaggtcagtaatgaagttgaattgcaaatccatggtgtcgagaaaccatctgtctggaggctctatggtgtccagtttatacttttgccttattccattggcaaggtgcttaacttggg

SEQ ID NO: 49420 - DNA, 245 bp, Setaria italica
  Peptide Sequence Number=SeqID_115394
tcgtcaagatcgccaatgcttacgagattctaaaagatgaatccactagggagcagtatgactatgccattgcgcatccggaggaggttttttacaacacagctcagatcctcgtgctgtgttgattggtcttcttctaattgtttcagcatttcaattcataaatcagatgacaaggtataaccaggccatagaaagtgtcaagcaaactcctgcttacagaaataggttaaaagcattggtag

SEQ ID NO: 49421 - DNA, 232 bp, Setaria italica
  Peptide Sequence Number=SeqID_115395
catttgggggccaatggcactaaggctgtggtggtggtcgttgtggttgtagtggttgtgtgaacagagtttccactgatgatttttgccctggtgtcctcatttttgaggatcctcagctccttgagccctgttctggccttcatgcttggggcatcatccgactctacaatcacaaacacacatgcacatcatcaccaaatttcatgtaccacagcacaaaagcacaatt

SEQ ID NO: 49422 - DNA, 253 bp, Setaria italica
  Peptide Sequence Number=SeqID_115396
aacggaagcggggagtagttaatgcggatcgaggcgtggggagggaggtgggtgcggtcggcagatgtgtgttgattacatggaaagggaacgggatcatttctctgagttcataactgaaagttttacattatactgtaagaggaaaaggagagataaggtatatggcaacaatgttgagatccaggcatttgcagagatgtacaatcgtcccattcacatatattcatacagtacagagcccattaacatt

SEQ ID NO: 49423 - DNA, 221 bp, Setaria italica
  Peptide Sequence Number=SeqID_115397
ggaaagggaacgggatcaacacacatctgcctagccatatcataagtttatggagatgcagaagcttatgatatggctaggcagatgtgtgttgattacatggaaagggaacgggatcatttctctgagttcataactgaaagttttacattatactgtaagaggaaaaggagagataaggtacatctctgcaaatgcctggatctcaacattgttgccat

SEQ ID NO: 49424 - DNA, 418 bp, Setaria italica
  Peptide Sequence Number=SeqID_115398
ttggttgcggaggaatggggtctggaagttcaaacagtgtgcggattggatcttcaagaaggccagtagcttggccaccggtggcagcccggacatctgcttcaggttctcggccttcttcgcctaggtcactggttgatggtgaaggttataatagtgcagatgaacagggtccctgttatggctcgagttatgatgattcggaaagggacctcatgtttgagcatgacctaaggcgagtgaaaggattggaaatcagaaagatggcagaagatggtaactgtctgttcagagcagttgctgatcaagtttatggagatgcagaagcttatgataataggactaaggacaagaatagtagtagttagaattaaacaaataaggaaaaagggaaaacgggaaataacaaatttaacaa

SEQ ID NO: 49425 - DNA, 181 bp, Setaria italica
  Peptide Sequence Number=SeqID_115399
ttgtattatttaaaccgtagtctattctaaaatgagggcagctgcggccttcagccgcaactgccggagctattggccactgatgatataaccgagcatctaaatgagggcagcgagaacagtagcagcagcaataagccttcaaggctggatgaccccatttcagagagctcgagctcgg

SEQ ID NO: 49426 - DNA, 289 bp, Setaria italica
  Peptide Sequence Number=SeqID_115400
taggcatatgtagttaaagttaaagaaaattaaaacaaaataaaggaaaaaagggaaaaacgggaaataacaaatttactactagaagttacaataaactagaaaagtttttacaattatactgtaagaggaaaggagagataaggtatatggcaacaatgttgagatccaggcatttgcagagatgtacaatcgtcccattcacatatattcatacagtacagagcccattaacatttttcaaggaagttataacacagatgttcctccgatttaggttaagttatca

SEQ ID NO: 49427 - DNA, 192 bp, Setaria italica
  Peptide Sequence Number=SeqID_115401
cctatcccctgtgtgcctttcctatcccctgttgcgtgtctcagagaatggggatattgtaatagttgatggaggttcgcagaagagccaggatgattctaataaaacaaaaccgggtaaatctgttcttattaagcaagaggaaagggaaacaggagttatcagtgcgaaggtccttcacgttacaaaaat

SEQ ID NO: 49428 - DNA, 207 bp, Setaria italica
  Peptide Sequence Number=SeqID_115402
atgcacagcttggtcgtcaggtatttgctaagttcatcaaattggtaaaagaggagttaatattagtgggggacagaagcaaagagtttcaatggcaagagctgtgtattcggattcagatgtatacatatttgatgatccactcagtgcattagatgcccatgttggccgtcaggtatttgctaagttcatcaaaagtgccctcct

SEQ ID NO: 49429 - DNA, 441 bp, Setaria italica
  Peptide Sequence Number=SeqID_115403
ttggtgatatgaatgaatgataaattactataaaatagttataagttgttggcaatacctccagtgtatagatcggcacgaattttatattgttttatgtaatatgaggatgtttcctagaataacgaacacttgatatcctgggcgtgctgagatctttaattcttcactagtctcctaactataaaattattgtctctgcgggacctgtttgggcttcattgtgttcatctgatcggtacacatttggatttccctccttccagttatgcacttggtatatcgtctgattgttggttagcatatatggaccggctcttaaacagaagatgttgatgaagacgaaaaaggaatcaattgcgaagaagatgattaaaattagttaacctttattaattgggctctggatgggcataagataaaaagttgatcgtgaattga

SEQ ID NO: 49430 - DNA, 352 bp, Setaria italica
  Peptide Sequence Number=SeqID_115404
tactatcagaaataaattccgctcctattggcaccaaaataatttcattattagatataatatgaaggattgtgaatgattgaaaataaatactggtagcccacacctacaatttatctagacctttttcaatagaatttcaaaataaaattgatgcttgctcaagacgagatacaaacctgagtgcaacttctttgcgaactgcataacgtattttcttatcaaaattcctttccttccgttttcacggaacctaattagagaagcaaccctttttgcaggaatgtctgtcctccgaagtatgtcatcatacccctgcagaaagatgctaagttgctaattaatcattgat

SEQ ID NO: 49431 - DNA, 210 bp, Setaria italica
  misc_feature (30)..(30): n is a, c, g, or t
  misc_feature (41)..(41): n is a, c, g, or t
  Peptide Sequence Number=SeqID_115405
acctccgcgaccacctcgacagtaattaanaaccttcattntcctgcttatcaagcttaatcggatccatcgatcagctaattaacaccagaatcatatcgatcgatcagggtgcaacgggcggttccttgacctcggcacgcggctggacatcgccatcgacgtcgcgcacgccgtcacctacctccacatgtactccgaccaccccat

SEQ ID NO: 49432 - DNA, 464 bp, Setaria italica
  misc_feature (27)..(27): n is a, c, g, or t
  Peptide Sequence Number=SeqID_115406
attacctacatatcaacaatgctcaanacccttgatggagttcgagatgaaactggtagcaagtccaaccacctgggcggtttggacaagggcatggacagctgaagagaacaggcatggtgatctccttaataagtacatgtaccttactggacgggttgacatgaaacaaattgagaagaccatacagtatctgattggttctggaatggatccaggaactgagaacaatccctacttgggttcctttacacgtcattccaagagagagcaacatttatatctcatggcaatacagcaaggcatgccaaggagtatggtgatctcaagctggctcagatatgtggcacaatagcagctgatgaaaagcgccacgagacagcctacactaagatagttcgagaagctctttgagattcgatccttgacttactactagttgtcttggtcgttttgtcggtact

SEQ ID NO: 49433 - DNA, 420 bp, Setaria italica
  Peptide Sequence Number=SeqID_115407
gtttagttggtgacatggttacctagaagcatacctacatatcaaacaaatgctcaacacccttgatggagttcgagatgaaactggtgcaagtccaaccacctgggcggtttggacaagggcatggacagctgaagagaacaggcatggtgatctccttaataagtacatgtaccttactggacgggttgacatgaaacaaattgagaagaccatacagtatctgattggttctggaatggatccaggaactgagaacaatccctacttgggtttcctttacacgtcattccaagagagagcaacatttatatctcatggcaatacagcaaggcatgccaaggagtatggtgatctcaagctggctcagattattgttggtctactaattagtctagtcttgtattgtaaaagtcgtct

SEQ ID NO: 49434 - DNA, 388 bp, Setaria italica
  Peptide Sequence Number=SeqID_115408
acctacatatacaaacaatgctcaacacccttgatggagttcgagatgaaactggtgcaagtccaaccacctgggcggtttggacaagggcatggacagctgaagagaacaggcatggtgatctccttaataagtacatgtaccttactggacgggttgacatgaaacaaattgagaagaccatacagtatctgattggttctggaatggatccaggaactgagaacaatccctacttgggtttcctttacacgtcattccaagagagagcaacatttatatctcatggcaatacagcaaggcatgccaaggagtatggtgatctcaagctggctcagatatgtggcacaattagtctagtcttgtattgtaaaagtcgtcctacgta

SEQ ID NO: 49435 - DNA, 378 bp, Setaria italica
  Peptide Sequence Number=SeqID_115409
tattaagttactattgttacctttacttggtacgggtttgtactattgtaaactaaatttgtagtaagtacctattactagttattcttgattggttctggaatggatccaggaactgagaacaatccctacttgggtttcctttacacgtcattccaagagagagcaacatttatatctcatggcaatacagcaaggcatgccaaggagtatggtgatctcaagctggctcagatatgtggcacaatagcagctgatgaaaagcgccacgagacagcctacactaagatagtcgagaagctctttgagatcgatcctgactacacagtgctggcgtttgcggacatgatgagagagattacaatgcctgctcatctc

SEQ ID NO: 49436 - DNA, 377 bp, Setaria italica
  Peptide Sequence Number=SeqID_115410
gggcgcaggactttgtctgtaccttggcaccaagaatcaggaggttggatgagagagctcaagcaagggcgaagcaggcaccggttattcctttcagttggatttatgaccgcaaggtgcaactttaattgagagcagcaggcaatgggagcacatcctatatttgagtcccggggttctcctcccttctccagatagcccagttagatccgcaactttccacctctgaaccaagaactcaaggatgtcggcatagtctttagcggtgtagacgcccagcctctgcgccactgcaccaaagtgctcaaacaagtccttgtccttgccatcgtacatgagatgagcaggcattgtaatcttcttcctcatcatgtccg

SEQ ID NO: 49437 - DNA, 255 bp, Setaria italica
  Peptide Sequence Number=SeqID_115411
ccttctccagatagcccagttagatccgcaactttccacctctgaaccaagaactcaaggatgtcggcatagtctttagcggtgtagacgcccagcctctgcgccactgcaccaaagtgctcaaacaagtccttgtccttgagatcgatcctgactacacagtgctggcgtttgcggacatgatgaggaagaagattacaatgcctgctcatctcatgtacgatggcaaggacaaggacttgtttgagcactttg

SEQ ID NO: 49438 - DNA, 205 bp, Setaria italica
  Peptide Sequence Number=SeqID_115412
ccttgtccaaaccgcccaggtggttggacttgggcatggacagctgaagagaacaggcatggtgatctccttaataagtacatgtaccttactggacgggttgacatgaaacaaattgagaagaccatacagtatctgattggttctggaatggatccaggaactgagaacaatccctacttgggtttcctttacacgtcattcc

SEQ ID NO: 49439 - DNA, 132 bp, Setaria italica
  Peptide Sequence Number=SeqID_115413
gctcaagcaagggcgaagcaggcaccggttattcctttcagttggatttatgaccgcaaggtgcaactttaattgagagcaaggtgcaactttaattggcctgctgctctcaattaaagttgcaccttgcgg

SEQ ID NO: 49440 - DNA, 494 bp, Setaria italica
  misc_feature (13)..(13): n is a, c, g, or t
  misc_feature (25)..(25): n is a, c, g, or t
  misc_feature (128)..(128): n is a, c, g, or t
  Peptide Sequence Number=SeqID_115414
cttattagtgcangtttctttaagngaagacctgtgatttcctgcagtcacgttgagagtttcatttcctccactgcagcttgaaactcctcttatagatgaagttgctatctgctcagattgcctgngtttggacagccaaagtccttctgtgttgacgttgaagcaaagcctgcaaagaagccagaaaaaaacatatcaataaattacagtgagtaaaagctttaacaattttgtgtagagactagtttcctctcagtggtattatgaggcacacctttcggcacaaacaacaaagtaagtaggtttttgcattttgccatccaggtgtaccagaagagcatgctttaaaatagattatctcataatagctcacctgatgcatgatgcgtgttactgtacaaagtatcagttttagttgcgaactgtttctgggctcccagtgaacaacaacccatgttaccacaagatctacctgaagatatgggatcatt

SEQ ID NO: 49441 - DNA, 326 bp, Setaria italica
  Peptide Sequence Number=SeqID_115415
aacaccaggaccacatgtacttaaatatagcagataaataaaaaaacatttggttgcgaaccttgaatttgcttttatcgtttgagtgaacgcggcaaactagccccattttcgcttgtttctcggttatgtccacagaatagaaatgggctgtttgcttttccacctggccacatgtgacaattaagcatttaatataaaaaaggaagaaaggaacattgcagacaactggctgccaacctttctctgcactgagcttcctagctggagctgagaaaccataaccgagccattcaatgcctcctccaaaacggttgctgaaacag

SEQ ID NO: 49442 - DNA, 340 bp, Setaria italica
  Peptide Sequence Number=SeqID_115416
gtatccctccatacagtgatccttcactttcttttccttctgatgatgcttttctgcatcatttttgggcatttttgaaggtgattttgctttattcctgctagaactccgtttttagaggtggattgttggtgtaggaagcatggatttcattcctctccttcagaagctggtcgatctacaacagctcatgaggagttagaatattgttgaaagtgaacaatggttactactagtaagacgaagcctaaactcccaagtgaaaaataactatacttcaaaaatagatgtaccgtttgcatttcttgtgtgtatttgctagtcatttcagtgaactttg

SEQ ID NO: 49443 - DNA, 210 bp, Setaria italica
  Peptide Sequence Number=SeqID_115417
attcctgctagaactccgttttagaggtggattgttggtgtaggaagcatggatttcattcctctccttcagaagctggtcgatcgtttgcatttcttgtgtgtatttgctagtcatttcagtgaactttgccaaaacctcctatactctgactcaaaatttaggaacaagactacaagactacgttttagttagaagtaatttttagta

SEQ ID NO: 49444 - DNA, 300 bp, Setaria italica
  Peptide Sequence Number=SeqID_115418
aaaccgtttaagaacaaatttaacttaagtaagtaagtaatttaagactaagtacaatttacaagtagaaacttttgccaaaacctccctatactctgactcaaatttggacagctcagctcgttttgtgagtatttttgcttctacacttctcagcatctccttttcagcagggaacgattcaccacacactacctctatagtataatttgcactcttgaagaaattgtcaccatagacagcaaaaaagtgggttccaggtttcagctcatgtatgtcacatggttgaaagctatccaa

SEQ ID NO: 49445 - DNA, 236 bp, Setaria italica
  Peptide Sequence Number=SeqID_115419
acatcatccaggtcaaggtctccaatctacctaccgtcaccctctctccagcgggctcaacctccattgctgcaagcagagttttgctgacctgagtgcccggactgaaggccccttcgtagtccgccagcgagtctccagcagtaaaaattacattagccactcagtgaaagaggccgcattggataattgcattagagatggcagaagctgtgctccttgctctcgcaaagatt

SEQ ID NO: 49446 - DNA, 167 bp, Setaria italica
  Peptide Sequence Number=SeqID_115420
actttctccctgccagattaggcacggatcaagtcagggattcctcaaaatcccacgaaatcaaacgagaatgtgggtgcaacggcttacaggatcgggttcaggagcgcggagtggtggatcgcgaggcggcgcgcgtcgttgagcgcctcgcacgcgcggatcca

SEQ ID NO: 49447 - DNA, 396 bp, Setaria italica
  Peptide Sequence Number=SeqID_115421
ttccaatgagcatctttggcaatagcacagtatttcttggtcggtgcatctgaggtgtttacttctataggccaagtcgagttcttctacgatcaggtcccagatgctatgaggagtttatttagcgcatttgcacctgtaacagtctcactgggaagctatgtaagctcgatccctgacaacctgaatgaaggccatctcgaccggttcttttggttgattgcagggataaactttgtgaatttgatggtttacattggttgtgatgtgagatacagatataagaaagcctcataatcgtatttacataaagttcttagagtaatgtgactttggttaccacatactcatcaaacgtaatgctatttgtaagttgttaggtttgccaaaaaaaaa

SEQ ID NO: 49448 - DNA, 351 bp, Setaria italica
  Peptide Sequence Number=SeqID_115422
tcgatagagctgccattgtcatagctgctgatgtgaagagcgcttgtacagatccatggaagctttgcacagtcacccaggtggaagaactgaagattctaatcagaatgtttcctatttgggcaactactatcatgttctttgctgtgtacgcccaaaactcgtccctgtttgtggagcagggcatggttcttgacaagcgggttggatctttcaacattcctcctgcatccctctcaacttttgatgtaatcagtgttatcatatgggttcctctttatgatcgcatttcttcgttgtcctaattagtctttagttaaagttttcttactttggttaagggttagttaa

SEQ ID NO: 49449 - DNA, 364 bp, Setaria italica
  misc_feature (282)..(282): n is a, c, g, or t
  Peptide Sequence Number=SeqID_115423
ttgacagggactgatgcttgtcaagtttcagtattttatcttttttgacaggcaatgaattttgtgagagactggcctactatggaattgcaagaaacctagttacttatctgaaagtaaagcttcatctaggcaatcttgaagctgcaagaaacgttaccacttggcaagggacatgcgtatctcactccccttattggagccatcttagcagattcttactggggaaagtactggactattgctgttttctcatcaatttatttattgtaagtgcaaagntatcaccacctaatcaaagtatgaccctagtctggtacacatgaactatttgcggtcatgagctaaatcaaatgccgtgaat

SEQ ID NO: 49450 - DNA, 370 bp, Setaria italica
  Peptide Sequence Number=SeqID_115424
ttcagccattgagggaagccggaagctgagcacacaaatgaacttaagttcctcgatagagctgccattgtcatagctgctgatgtgaagagcgcttgtacagatccatggaagctttgcacagtcacccaggtggaagaactgaagattctaatcagaatgtttcctatttgggcaactactatcatgttctttgctgtgtacgcccaaaactcgtccctgtttgtggagcagggcatggttcttgacaagcgggttggatctttcaacattcctcctgcatccctctcaactttttgtattgttaattctagttgtttattctatatgggttcctctttatgatcgcatttctcgtgccaattagcta

SEQ ID NO: 49451 - DNA, 201 bp, Setaria italica
  Peptide Sequence Number=SeqID_115425
caaagaaaaattgtgtacccctgctttaagagcattttaatcaactatatgaccattttctttttattgaagggcctagctattttaacgctatcagcatcagttccagcactgcagccacctacatgtctaggaactgtttgccccaagcaagcttacttcagtatggcgtattttcattggcctctatatgatagccct

SEQ ID NO: 49452 - DNA, 167 bp, Setaria italica
  Peptide Sequence Number=SeqID_115426
tggtgttactaggccttcctatgatgccaaaactgaagcttggtctgcaataaagtggtagctgcagtacatctacggcttggctccacaggcatgtgtcagtcggtcacttcttactgggtcataagaagcttccgtgagatcttgtcctctgacactgtctcgcc

SEQ ID NO: 49453 - DNA, 375 bp, Setaria italica
  Peptide Sequence Number=SeqID_115427
aaagacaaggactagaattttagtaattagtagacaattaggacgaatgacaggtctgatgaggacatgtttgaaaacattgccgatatcatgaagaggaatatagttgctccaagaacaccactgtttgcgtgcactgtgggacaaaaaccaagcaaagccaaattctacgtggatgatacatttgaagtggtcaccatgctgagtgcattggcagatgccacagaacccgaactggagactgattcggctgatgaattggtagcatctattttgttgctcaatattggtgacgaacaatcagaatgcactgatagatcaattggaggatcttagcacactttcagaatatgatgattgattcaatagtttctt

SEQ ID NO: 49454 - DNA, 240 bp, Setaria italica
  Peptide Sequence Number=SeqID_115428
ttcatgcaagttgttaataatagtgatgtttcaagcttttacctacacggtcaacattcacttaacttcttaaaattgattcctgttgttgttttgctaacctgcagggagtaagcaagggagtagttgctgagaggatacttgcatcaatgaaggagagaggaaagcaggctgattttgtattgtgcattggcgatgacaggtctgatgaggacatgtttgaaaacattgccgatatca

SEQ ID NO: 49455 - DNA, 246 bp, Setaria italica
  misc_feature (212)..(212): n is a, c, g, or t
  Peptide Sequence Number=SeqID_115429
gtaagtaaactaaggaaacaaaaataaagaaaaccaaagtaactaactaagttaaagaagtggtcagttcattgttgaagtcaaaccccagggagtaagcaagggagtagttgctgagaggatacttgcatcaatgaaggagagaggaaagcaggctgattttgtattgtgcattggcgatgacaggtctgatgaggacatgtttgaaaacnttgccgatatcatgaagaggaatatagttgctcc

SEQ ID NO: 49456 - DNA, 249 bp, Setaria italica
  Peptide Sequence Number=SeqID_115430
ccaactcctcctcctcctctagggtttggtgaaaccctccgccgcgcggatcggtagggctagggtttggtcacatctcgtggcgaaagctttctcttccatctgctcggtgtttcagccatgatgtcgcggtcgtataccaacctgctcgatctcgcggagggaaccgacaaagagcaggacgaggtgtcgcgaggcgctgctcgaccgattccgctgtgcgccggtgttcctcccgacacctcaacg

SEQ ID NO: 49457 - DNA, 214 bp, Setaria italica
  Peptide Sequence Number=SeqID_115431
atcgcaaagttcttcatatgagaactgtatggatctgttaaccttaatgccctcagcttgtgaagcactgcctggaaaaggcatttaattaaaagggatgagaagttggcaaaaacacactattgtgtttgcaattataatgcaagtggtacaaggaaaaagataatatttccctcacaaacaaaagcagatatcaataacctcaaaagaagca

SEQ ID NO: 49458 - DNA, 474 bp, Setaria italica
  Peptide Sequence Number=SeqID_115432
atgatttcaaattgatgcagtaatcagtatttataaccaaacaaagtgcttctagttgaaagcataaagaaacagcaagattagcaagctgccacagattgagtgacactgcaagtaggccatgtactgcatttgtttcagtgctctacagttcctcagttgttagtaggttaatggaaagagccttatgcaatcagaactcaacaactttgatacaaaccattatcgatatgacactggaagcttatttcatcccttgccacaactgattttggaaaggaatttacttgcttcaccaacaaaaagtgccgtagatacaagcaccaagaagaagaattgatttttgcagttatatctggggtgaaaaggagacagtgccactgaccgtatagaactgctccaatgaatgcatctcctgcgccagttgtatctataagctctccaggtggtataacttcggctgtacctagaagt

SEQ ID NO: 49459 - DNA, 230 bp, Setaria italica
  Peptide Sequence Number=SeqID_115433
aaaagggaggcagtgatcatatccgatctgttcgtagacagttgtgttgtaacttcacaatggaacagcctaaagtgtggtatctgttttgcctgaagtatttcacaggcaggatctgaattgtgtggattgtgcgttccagctaggttccaagtccccgttgcaatctgttgctggattatgagtcagaatgcataacagtgtgcaatcagtatcaacaaaaaaaaaaa

SEQ ID NO: 49460 - DNA, 255 bp, Setaria italica
  Peptide Sequence Number=SeqID_115434
gagggccaactatgaagaaacccaaaaacttctccttcaggtttgttgaacaaaacacatgcatgccttgcattttgtttcgaccaccattccagcacttcacgatgtactgaacttcatttttggacttcaggttgctgggcacagggatcttcttgaaggtgatctctacctgaagcagcggctccgcctccgtgacgcctacatcaccaccatgaacgtctgccaggcctacaccctgaagcggatccgcga

SEQ ID NO: 49461 - DNA, 412 bp, Setaria italica
  misc_feature (269)..(269): n is a, c, g, or t
  Peptide Sequence Number=SeqID_115435
aaaactagtttaggttacaaactactaactactaaaagaataatcaaccccagatgataagcaggaacttgatgaggctctgcagagagagatccaagctgcctttagaactgatgagatccgaagaacgcagcctactccccaagatgaaatgcgtgctggtatgagctatttccatgaacaatttggaagggtgttccaaagttcttgcgccgagtcgatactgcattgagaacattgggattaatgagccgtgttccttacaatgnacctcttattcagttctcttcttggatgggaggagatcgtgatggaaacccaagagtcacgccagagggttaccaggggatggttctgcttgcttgccagaatgatggcagcaacctatactgctcacagattgaggatctta

SEQ ID NO: 49462 - DNA, 312 bp, Setaria italica
  Peptide Sequence Number=SeqID_115436
actaccgaactacaagtacgacaactaagtaaagaagacctacgtttacgtacgaagtaatttaccgcctcgctacacctgaaacagagtatggcaggatgaacataggaagcaggccatccaagagaaagccaagtggaggcattgagtcacttcgtgctattccctggatctttgcttggacacaaacacggttccacctcccagtctggctaggatttggagctgcattcaagcatgtcctccagaaggacatcaggaatctccacatgctccaagagatgtacaatgagtggccgtttttcagggtca

SEQ ID NO: 49463 - DNA, 168 bp, Setaria italica
  Peptide Sequence Number=SeqID_115437
ggatccaagcttgttatcatcttgccaagttcatcgagcttttgcaagtcatgcttaacttggccaatttggctgaggaagtccagatagcgtacaggaggagaatcaaactcaagaaaggagacttcgctgatgaaaactcggcaataacagaatctgacattgagg

SEQ ID NO: 49464 - DNA, 481 bp, Setaria italica
  misc_feature (388)..(388): n is a, c, g, or t
  misc_feature (424)..(424): n is a, c, g, or t
  Peptide Sequence Number=SeqID_115438
tatgttcgtctatttgtttactttcttttattttgttatttatttaggggtttactttcttagtttacgtttgttaaaaccttatttattaccctaactaaattggagacgtgcaaaatagcaaaagcagtgatgaataggcagtagaagggtaaatgttccagcagagctccacaccgagaaatagaatgatcctcaaaggtgtcggaaaatgtgttttccacaacagaaaaggcaatgaatagaagtaccaggaatagaattggtagtgtaatgatcgggcacacacgatgccaatgaagttgccgacaaacataacagttacaatatgtatgctgagaatggatggtctgggctggctggaaacaagctgttgaattgatttggngtttttaaatctggaatgcaagaaccaaataggccncttcatgctttaaccacttgtagtgtgcaaaatccagaagggtagtgaggtgaagaa

SEQ ID NO: 49465 - DNA, 256 bp, Setaria italica
  Peptide Sequence Number=SeqID_115439
gggcacacacgatgccaatgaagttgccgacaaacataacagttacaatatgttctttgctgagaatggatggtctgggctggctggaaacaagctgttgaattgatttggtgtttttaaatctggaatgcaagaaaccaaataggcctccttcatgcctgtcaataaaagtaaaagaatgttatgcagcagcataaccactttaaacatcctagtgtttttctcggaatgtactgatatagacataagttgggaa

SEQ ID NO: 49466 - DNA, 365 bp, Setaria italica
  misc_feature (151)..(151): n is a, c, g, or t
  Peptide Sequence Number=SeqID_115440
aacataggcaactacactttgccagccagcaccaacagcgacacctgcagatgatgaaatgacattttagtatcagtaaaataaggtacattgcaccaatctctatcattcagtagaactgaatcatacctgatagcactggttggacacngtttaacaatatggagaaggctagcagaggcgagaggtcagccactgcgtcggccactgctcgactctcagtgaatatgtaggcaaggcttccacggaagaaaaggaagagcacaaatagcacaaatccaatcaaggaagaagtgatgacgacattgtagatcgcgaacttggcccttcttgcactcccagctccaagctcatttgccacccgc

SEQ ID NO: 49467 - DNA, 250 bp, Setaria italica
  Peptide Sequence Number=SeqID_115441
gctggacggtgattaaaacgggcgagaggccagggggaggcgaccggcgcgcgcggcgcctttaagggcacgcgggggccttccagaaactgctgcgtgtggtggtggcggtgctattttttttgtgcgccgatcgtactacgtcgatgttccacatgtgcagcaggccttcacctgggactgcggcctcgcttgcgtgctcatggtgctcaggacgctggggatcgattgctgcgacggcattgccgat

SEQ ID NO: 49468 - DNA, 452 bp, Setaria italica
  Peptide Sequence Number=SeqID_115442
ggctgcgtgttgattctttcaggaagcgcgaaagggtgacaatgaagagcttagacgaggcccgcaagtcctttggaaccgatgaggatattctcttggtaggagaaacgctgtaaatttgtttcttcgcactcgttcctttcatgctccatgcgcttgagtcttgctcaaattgaagtgtgctcgtaagatgttactgcttgcacaacttactgatggcgtactgggtactgcaggtctccttaaccggaaagagtgggatgaagctcacccgtaaattcctcgccggctccatgtaaatagctcaccgcgccagcctcgcgcaaccttgtgtatacgctgtacattttcccctgtagttatgattgtcgattgccagccttgtacgtaaccttactgccgataggaagagctagtcaccaagctgtagccacgaagggttcagcggcagc

SEQ ID NO: 49469 - DNA, 206 bp, Setaria italica
  Peptide Sequence Number=SeqID_115443
cttggatgaatggtgtacatgatgtgcaacagctcaatgaggattcagattacatggggcattacgtcataatctgcgggtatgatgccgatgaattgtgaatttaagataagggatcctgccagttccaggtgtgtaatattcacttagtatactcttccatgataatgagtgtcagcttgtatatgtgcaactatatatgttgg

SEQ ID NO: 49470 - DNA, 264 bp, Setaria italica
  misc_feature (63)..(63): n is a, c, g, or t
  Peptide Sequence Number=SeqID_115444
tgaaaggttccactgacatatccaaccccgccggagcttcaattgcagccttgtatgtcgccnctgctggcccacattgggtcgaggtcttttacggtaccctttataatgccgggaaaagtggcgctgggacctctggatgagaatgcggcaacccttggcggtagcaccccactgccggtcacgcttagggtctgggagcggcggcagcggggagggatggcgagcggcggcggcgggggatggcgagcggcggcgcgcggc

SEQ ID NO: 49471 - DNA, 249 bp, Setaria italica
  Peptide Sequence Number=SeqID_115445
cagagggaacttgtggagatgatatatgcagccatccaccaggatctgcaggtcggtggccacctccgtggagacagacctggacgcagaacggcaccacggaatcagacaacacgaacaccacgaacacacgcaggcagaatccgaggagcaagatcgcaatcacacaaccttacggcctcggaggtgaagaaggtgtccggccgggtgccaagtttcataaatttcatcctggccgagcctcccgta

SEQ ID NO: 49472 - DNA, 273 bp, Setaria italica
  Peptide Sequence Number=SeqID_115446
aatcggatctgcgccaccggcggcaactcgctactgggactccgtgagggcagggaattttcagcgggggtcgaggagcgtaccgtggtgggagtaggcgtagacggcccgccaggtgtagatgtggtcgccgggcctgatctccgaccgctcgacccggttcgacagcagccccatccccgccgcctcccagcgtgtcgcggaggcactccgctctcacccgcgccgcctctacggccccctagtctactacgccgtccatggccgcgagcg

SEQ ID NO: 49473 - DNA, 394 bp, Setaria italica
  misc_feature (331)..(331): n is a, c, g, or t
  Peptide Sequence Number=SeqID_115447
ttggtcctatttccgtagttggtaccggtctagcttagaagcttaaatggagtggacagaagagctgccaatggcacaccaatggcagaagaagcttgcccactagtcccaatgccaggttcctcaacaggtagaaggccagtcttgcagtagagtgcaaagtcctcacagttcttctcaaacatgtcatagtttccaaacccattttgaagcaagtacattgctcgatggacaacaacctctggtgggtctgattccgcaatggtgcaggttcccccacgaagttttgcgaggaaaaccgcagatggcactccatactcaaagcagtagngggagccattgcggaggaacagtctaggcaagtgaggacaacaccactattcggcagctgaaa

SEQ ID NO: 49474 - DNA, 236 bp, Setaria italica
  Peptide Sequence Number=SeqID_115448
tctttctctagcttcagagtcagccaagaaaggcctcactgttggtcttattggccctgaccttccgttcacgaataactatggtgtgtgggaggatgaattcaaagaatcttggtctagagagctgtattgagcatgtctggaaggataccattgtctatctagacaataatgaaccaatactgattggccatcctgcaactggctactcagtggtcagatctttgtctgaggct

SEQ ID NO: 49475 - DNA, 362 bp, Setaria italica
  misc_feature (50)..(50): n is a, c, g, or t
  Peptide Sequence Number=SeqID_115449
ctgtcctaattgcaggaccgtaaaactgcagcgaaggtgtaggcaacctntggggttccttctgaatggttccacttctccacaaggaaccccacaggttgcctacaccttcgatgctggtcctaacgctgtcctaattgcacggaccgtaaaactgcagcacttctccttcagaagctcatgtactatttccctccgcaagataaggatttgagcagctatttggttggtgataaatcaattctaggcgacgctggattgcactccatcgaagacgtcgacgctcttcctgcacctccagagatgaagataccagatcagaaattcaagggcgacgttagctccaagcctgctgcagatga

SEQ ID NO: 49476 - DNA, 271 bp, Setaria italica
  Peptide Sequence Number=SeqID_115450
tcctgctagttgttctgaatttaacaaaatgttaaaaacctgaagatcctttttttccgcttgaacactgctaaactatatcatctagtctatttgttgggtgttagtgcagtattgttagctctggtatagacagttaaagggcaatttcattagtttgctaagtctttatactcaatgcttgcagggcttgttaagatccatgatgacaatgccatagtggctggaacttctcaacacgagccatttccaggaggcttgtagtacttgt

SEQ ID NO: 49477 - DNA, 377 bp, Setaria italica
  Peptide Sequence Number=SeqID_115451
attagtgatgagattcacaaaattctgacaatgcagattctcctaaggatagcttcaaagcttaccttcaatatctcgccaaaatagaagagccaaaggttagcgaacagtttttcttttatctcctcatttatttggccacatcgttgtggatattgtctttgtgaaacactaaaatcttaaattaggaaatacaattggtgtagtcatgtacctttgtcttgaaagatttttttccagatgtttgagctctttttgaaaccatactgaagaatgaaaattctctgtgctattgtctcctaatactagtttttactttacaaccgacttaactaagtactaatacctagacaattaataaacaaactaagaaataa

SEQ ID NO: 49478 - DNA, 252 bp, Setaria italica
  Peptide Sequence Number=SeqID_115452
tccgtatttagaggaaatggggaaccgcatcctcaatcgaacaccatttctcttcctcggcgaccagctacgagcaccggcacagatcagaggcgcaatagggccaggagagagagcgggcgaacctcgtaggcctctgagatctgcttgaacttggcctcggcttccttcttgttgctggggttcttgtccgggtgccacttcatggcgagcttcctgtacgccttcttgagctcgtcatcggaggcgccg

SEQ ID NO: 49479 - DNA, 361 bp, Setaria italica
  Peptide Sequence Number=SeqID_115453
ccatacattcagagtttcagacaatagcgcgtcaggcgctgggcacgttcggactttctcgggttacttgggatcctatagatcatttccttgaaacgaactcggacctgaaccaagcagatctcaacaaaccggctgtttatttatctacttctgcaagatactctcttcaggagattgggatgacccgtgatttcggcttcccgttgcgcctcggatcacggccttgctctgttccaggaagcgcccagccccacgcagatcgccggtcacgtccactggagctacggttacctagtaatttattctacttatttaggttgtctacctagtctatttcttgtatttcctagtcctaggt

SEQ ID NO: 49480 - DNA, 231 bp, Setaria italica
  Peptide Sequence Number=SeqID_115454
ctgtaagtggcatcccactcagaaggtgttcacatgagtgcaatcagaattatcactattaggtgcaccagcattctgattccagccaggcaagggatgtccagcattacccttccatgattcctcaaatccagccagttcatcttcattcaggttgtgcagtgtctgtgtggtgtcaacctttccatctgaattcagtttccttgttagggaatggcccttatcatgtta

SEQ ID NO: 49481 - DNA, 350 bp, Setaria italica
  Peptide Sequence Number=SeqID_115455
tattaagttttgtccttttggtaatttgtattcttgtattgtccgtagtcttctagattgggttgccgaggtctaactgttcgaagtccacggcctcggccgcggccacgcccacgcccacgcccacgcccacgggtattctttgcaatctttcgagggcctttctcatatgacccattgttgtcatccctgaactggatcctggaagagctgctaatacctctaggaaccttgccaccgcgactgtgggatcgacctcccctgctacctcctcgacttccacgtccacgacctctacgaccattggctattagttagcaacactccatattgttgatcaaaaccataga

SEQ ID NO: 49482 - DNA, 262 bp, Setaria italica
  Peptide Sequence Number=SeqID_115456
caggctcgtcgtcggcgtcggcgtcggtgtggatcccggtcacctcacctcatcgtcgtggaggggaggggcggtaggagcttctagatgcgggggaggtggaatggaagaccgcagcctcaatggaatggctactgctagctcgcttgcctatatctcctcttcttcgaacgggtctctctctgggtagtcgccgacctttactttctctggcctcacaattgccccatgaccgttgggggcactcgaagaagcgaatgcc

SEQ ID NO: 49483 - DNA, 230 bp, Setaria italica
  Peptide Sequence Number=SeqID_115457
tgaaccaagcagctgtgtgcgggtgatgctatatatgtgcctcttgtgactcttaccggtatttcaggtatatcaagaaagaggcgtacaggataaggagcgataccggactcagttggctgcttataaagaagaacagaggacaggccagcctgtcagcaatgctgtgcctatccagcagagactccctcagacagaagtgacgattgatgaagtagactccaaggtga

SEQ ID NO: 49484 - DNA, 383 bp, Setaria italica
  Peptide Sequence Number=SeqID_115458
tctcggaaagtgaaaatgattgctgatgtgctattggatgatgctcttaagcagcaatattatctcattcttctacctggtggtttgggtggtgctgaagcttatgcaaaatctgataaactgatgggtctgatcaagaagcaagccgaggcaaacaaattgtatggtgctatatgtgcctctcctgcagttgctcttgaaccgcatggcctcctaaagggaaagaaggctacatcctatcctgctatgtggaacaaacttgcagaccaaagtgaatgcaagaacagagttgtagttgatggcaacttaatcaacaaagaccaaaggtaccaaggacaacctactaataggaaattactacgacttagaccaataagtaggaa

SEQ ID NO: 49485 - DNA, 229 bp, Setaria italica
  Peptide Sequence Number=SeqID_115459
ttttgtaaaactttaacaaagacaaggaagaataggaaaaagaatagaatactcggcgataaagagtctgaagaaggagaatgaatttctgaagggaaagtgtgagaactcagatattgctctcgtgaagctcattgaagagcgtgagctaacaaagaagcaaatagagaaattgaaaaatcaaaaggagaagcttgaatccctgtgtcgttcactacaggcagaaagg

SEQ ID NO: 49486 - DNA, 436 bp, Setaria italica
  misc_feature (435)..(435): n is a, c, g, or t
  Peptide Sequence Number=SeqID_115460
taaattaaagtactagtctaagtctatttggtcgtccttttccttaatttgtattaattttacttacgtcttaagttgtagtacttgtctaaggtaactagtacctaggttctattgtttcaacagtcatccagaagatcgccatattcttccttcaagtgagattaccataacagaaacatcatcatggtatttccgacgatcaccctggggaatatccagtaactcatgaaaatccatcccattctttttggctgcacgacatagaagttcagctacaaggtattgcgcagggtctccctctggtacattttccatgaaccacgaaacatgcgaaactacctcatcattgctgaatattgatacaatccatctgatgacagtacaagaaaccgatcatttgtgcagagacgatggtgaagtacagcagggttnc

SEQ ID NO: 49487 - DNA, 180 bp, Setaria italica
  Peptide Sequence Number=SeqID_115461
cgtcggaaataccatgatgatgtttctgttatggtaatctcacttgaaggaagaatatggcgatcaccctggggaatatccagtaactcatgaaaatccatcccattctttttggctgcacgacatagaagttcagctacaaggtattgcgcagggtctccctctggtacattttccatg

SEQ ID NO: 49488 - DNA, 251 bp, Setaria italica
  Peptide Sequence Number=SeqID_115462
ggcacattgggatgaggtgggtggaacggtggtgccaacccaccagatgctgtcccacccacacactctccaagagagtcttgctgcattatgtctgggagagtgtgtgggtgggacagcatgcagcaagactctcttggacggctgcagggtttggacattggaaaggggcctctggttgtgaagtcagagagcagctcgatctctgcaagtgaaagcagcagcaccttctgatgggtgggcctcgttag

SEQ ID NO: 49489 - DNA, 221 bp, Setaria italica
  Peptide Sequence Number=SeqID_115463
tgttaaaatgattgcaaagcgaaataatcattttgctcctaaaagatgccactttcagaaatagcatgaacttaaacttgacctgatatccatgaggtaacagatagatgtacctgaaatagtgtgagctgtgctgaaagggtggtggcttcagtctgaagagtttgaacctttcgctcaagttctgttatataacgagccttttcttttcttttgatcta

SEQ ID NO: 49490 - DNA, 392 bp, Setaria italica
  Peptide Sequence Number=SeqID_115464
aaccaataagtagaaagaaggaaagaatagaaaggaagaaggagagtaatggccaagaaaacgatgattcttcaactccaaagaagccaagggttgtttggtcagttgaactacaccgaaaatttgttgctgctgttaaccagctaggaattgacaaagctgtgcctaaaaggatacttgagctcatgaatgttgacaaactcaccagggaaaatgttgcaagtcacctacagaagtacagactctacctcaaacggctaagtgctgtggcatcgcaacaagctagcattgttgctgctttgggaggtagtgacccctttatgcacatgggtgcatttgaggactccagggttatcaagcttttacttcttcagcacctctgtcatctttca

SEQ ID NO: 49491 - DNA, 429 bp, Setaria italica
  Peptide Sequence Number=SeqID_115465
cacgggcatcgtcaggtgaaccggatgatgtatcaattgatgtcgctgcgatgacaaagcataaaaacccgaagaagagcattctgaaccaaattcaacatggctcaagtgactgtcctccgcaccagcgttggcatattccattatcagctacttggccttcagttcagacttagggctcagggtcttgttaagatcccgtgcaacagtcttccctgatggagcatccttgtttctcagctcataccgtaggcaggcatttatccatttcagatataccaattcttcaacatctgcaaacctgtcactctgcagttgttcaatctctttagccaacttctcgttttcttgcttcaaccgatcagcctcctccaatgcttttacctccatgctatttttaggcttgggtacaagggggtaaggacgtta

SEQ ID NO: 49492 - DNA, 418 bp, Setaria italica
  Peptide Sequence Number=SeqID_115466
aggaataagacccttaggggaccgtagggaagaaccaaggaataggacaataattagaaatgcaagtgcaatgagtgctcactatttgggacatgtatttgatattcatggtggagggaaggatttgatttttcctcatcatgagaatgagcttgctcaaagccgagcggcttatcctgagagcgaagtcaagtgctggatgcataatggcttcgttaacaaggatgataagaagatggcaaaatctgataataactttttcacgatcagagatatcatttctctataccatcccattgctttaagatttttcttgatgcgcacacattatagatctgatgtgaatcactctgataaagcacttgagattgcatctgatcgtgtctactatatttccagactctatatgactgcgagg

SEQ ID NO: 49493 - DNA, 393 bp, Setaria italica
  Peptide Sequence Number=SeqID_115467
cagaatcaggagagacctttctaccaagggcattgccctgatggacgagcctactggtacagtatggagaccatgcgaaccggagtcatgattgtgcggtcactgactgtgaacaagtgatggcgtaaaatgaagcattggcctgagtgcagctttctgatgtagactaacaaagttcgccatctttggatttggtattcgacaggggaggggttccaggttcactcaccagttgaacttgacctgcatttttagtacgagtaataatccctctgttcaattcaacgtaattgccaagtccagtattcaaatccaaaaactcaaacaacttcccaaggagttttacaactggatggcagtataaccatatatggggccccttgcttcttacac

SEQ ID NO: 49494 - DNA, 208 bp, Setaria italica
  Peptide Sequence Number=SeqID_115468
atgcaatctcaagtgctttatcagagtgattcacatcagatctataatgtgtgcgcatcaagaaaaatcttaaagcaatgggatggtatagagcaatgatatctctgatcgtgaaaaagttattatcagattttgccatctcctcatcatgagaatgagcttgctcaaagccgagcggcttatcctgagagcgaagtcaagtgctgga

SEQ ID NO: 49495 - DNA, 158 bp, Setaria italica
  Peptide Sequence Number=SeqID_115469
tgaggagcaaaaatgattgaagatcaccataaggagttcttggatgatatgtcagatgatctcagccggcaccggggcagagatagcctcttcccgatattgagctaacacttcctcgcagtcatatagagtctggaaaatatagtagacacgatcag

SEQ ID NO: 49496 - DNA, 132 bp, Setaria italica
  Peptide Sequence Number=SeqID_115470
ctgaagcaactgaaggagaaagcattgaagcgagcagggttgactgaagaaagctgcactcaggccaatgcttcattttacgccatcacttgttcacagtcagtgaccgcacaatcatgactccggttcgca

SEQ ID NO: 49497 - DNA, 378 bp, Setaria italica
  Peptide Sequence Number=SeqID_115471
tagtttagttgtaaccctaaattttggtttatttaactaaaaattagttacgtagttaattaattcccttcttgtttctaatttctaacgttaatttgccaagtccagtattcaaatccaaaactcaaacaacttcccaaggagttttacaactggatggcagtataaccatatatgggggccccttgcttcttacacaaccagaaatgcaggtcaagttcaactggtgagtgaacctggaacccctccctgtcgaataccaaatccaaagatggcgaactttgttagtctacatcagaaagctgcactcaggccaatgcttcattttacgccatcacttgttcacagtcagtgaccgcacaatcatgactccggttc

SEQ ID NO: 49498 - DNA, 368 bp, Setaria italica
  Peptide Sequence Number=SeqID_115472
aagggaacaagaactaccccaagacgaaggaaccgacaaccaagacaaaccaaccgaggccaggagcctcgcgttcgaccccggggattccctgttcgcgcctttgacgccgagtaggtccaagcaggcagactgtgaggccagctgcgtgcccccccccaaccgtgccaacctcgatagatggcatagtaacggagatgtggagatctttgccatcattaatagcttccaacattgtcatgcattgggaactctccacattctgtgcagggtcctgaccagttgcaatgaagatggctgtcacgatgttgcttgcatgggcattgaaacccccaagagctccagcaacagctgagccagcaaggttc

SEQ ID NO: 49499 - DNA, 233 bp, Setaria italica
  Peptide Sequence Number=SeqID_115473
acatatcatataattgtttcaagaaatctcatggaagccaaatgattagggaccacaaagtaataaggaaaacattattagcgcaagagaatgttgtttcatacctcgatagatggcatagtaacggagatgtggagatctttgccatcattaatagcttccaacattgtcatgcattgggaactctccacattctgtgcagggtcctgaccagttgcaatgaagatggctgt

SEQ ID NO: 49500 - DNA, 395 bp, Setaria italica
  Peptide Sequence Number=SeqID_115474
tagtagggggttggggttgtaggggttaattctaactagttaaacgtactagttagtacgtaacttacgacaacatcaacgagcaatcaatcaaataggtcatactccaggatccataaggtgttttgacacctaaagctttcacggcctggtaaacatgacaagtcgactgaatcttctcttttacctgaagggttgtcttcctttaaccctcctgtgcatgccacaaggatacctacgaaaccctttctcttccgtattcccaaggggtataaaacaactgggcagcattcagcattttttgggttgtctgcttcctctgcagccttggacatatctctgctggatctgttgtatttcatgtggctctggaccagatggccagcggcctgggc

SEQ ID NO: 49501 - DNA, 232 bp, Setaria italica
  Peptide Sequence Number=SeqID_115475
atatgctgatgacatccatatcagggaagtcatcctggaggtagtccagtacgttctggacgcctttggagaccatgttcatccccatggcatcccctgtgctgcaggtgaacctcatgtaaaggttcctccccgccatcgcgcacttcactccctgcagtctaccaaatctgctcgacaagcaattatgggttgaaatttgacagctgacaacatgtgtttctgctttgat

SEQ ID NO: 49502 - DNA, 365 bp, Setaria italica
  Peptide Sequence Number=SeqID_115476
gggggggggggacgttatatttatgctcacactcgacatctataatcaatcacaaaatatgcatacctttattggtgaagacgaaaggcatgcttataactttgtttgtcataactattgatttggtttagctacaaggtatttgatgtttcttaaatattactctttaaggtgatggagcttgacctgctttcccttgattcggttgtaaaatttgctgatgcttggaatgctcgtatggcacccctacatgtgttgatcaacaatgctggaatcttcgctataggagaacctcagcgtttttcaaaggatggtcatgaagaacacatgcaagtaaaccatcttgcacctgcattactggcgat

SEQ ID NO: 49503 - DNA, 223 bp, Setaria italica
  Peptide Sequence Number=SeqID_115477
gtgatgctcaagatggagaagctctcagagcacagagagagagggagagagtggcgcaggagttgattcagaaatggcagaatgaaaattcagaaacaggaacaccactaaatgctgaggtgatggagcttgacctgctttcccttgattcggttgtaaaatttgctgatgcttggaatgctcgtatggcacccctacatgtgttgatcaacaatgctggaat

SEQ ID NO: 49504 - DNA, 231 bp, Setaria italica
  Peptide Sequence Number=SeqID_115478
cctactcccctcgtgtgcttcctatcccctcgttgcgtgtctcagttgtcctgtacggcgctgttggaatcgatgaggcgctcggcaacaagcgagagcaacttctgctgcgacacctcgctggcatctgggttcaggctgatcacattcttcagcagcagcacgttacagatggcgagtagcgggcaggggccgttgtcgttctggtagacgatgggcgtgcggcgtccc

SEQ ID NO: 49505 - DNA, 175 bp, Setaria italica
  Peptide Sequence Number=SeqID_115479
ggaggttgaaatctttgaggttgccgctcaaactcctgctgttgaagtgctatagctagctctagatcagagtttccagaagtggagttgtcaaattgagaaatataatcagcagtactcgccatctgtaacgtgctgctgctgaagaatgtgatcagcctgaacccagatgcca

SEQ ID NO: 49506 - DNA, 300 bp, Setaria italica
  Peptide Sequence Number=SeqID_115480
cgaaaatcaaagaagaaagggtggtggaaagaagaagaaaggcaagaaaggagatgcagcagagcctatggaggaggcaacaaatggtgctccaagccaagaataattctgatttttggaattgctacctctagttttgttcatgtttctttgctgcgtctgatggtgttatattacattcagttgtggaaaaattgagtactgtttcaagtgtctaagaaatgacgcatcctgactagacaacaattaatacgacaatactaaattagtaactaattaaattaattacttaaaaaaaaa

SEQ ID NO: 49507 - DNA, 237 bp, Setaria italica
  Peptide Sequence Number=SeqID_115481
cttatcattgttgtctggtccctaggcatattctttatgctttctctgtttacggtttaatatttgtcctagtatctgaaaaatgttaaattggtgacctaactaagtatgtactttttgttttgtatgtgtctggttgttgtttttgttactaactctgtgctcatatcttctttagaacaaggatgttactgaagcaattcagaaagttgctgctgcttatgattgcaaaattgt

SEQ ID NO: 49508 - DNA, 182 bp, Setaria italica
  Peptide Sequence Number=SeqID_115482
agcctatggaggaggcaacaaatggtgctccataggctctgctgcatctcctttcttgcctttcttctgctttcccaacctgtgtatccgttaataacacagtatgccacttctcaccgcttgccactgatgaggcagttctggaagaaaatgatatggttaaaatagatatgggctgtcat

SEQ ID NO: 49509 - DNA, 393 bp, Setaria italica
  Peptide Sequence Number=SeqID_115483
actgggtggtgataggattcctgtacatgctctagcctctgcgttgcagcgttgtacctgtgtgattatccaacattcgctgctacggctcgctactggacataggccttcgcaaagagtgcgcccactggcatggaagagaaggtgcagaagctggttgagatgggcttcccagaggatcttgtgagaagtacccttaagagtgtcgatggggatgagaacctggctctcgaaaagctctgctctggctaaaccaccctatggctgatatatgaactgtaaattgcatccccattgggtattatataagagaacaatgcctgctaattctcctgctctgccatttcagtgtggccgtttattaagacaatatatataggggattggaccatg

SEQ ID NO: 49510 - DNA, 308 bp, Setaria italica
  misc_feature (263)..(263): n is a, c, g, or t
  misc_feature (307)..(307): n is a, c, g, or t
  Peptide Sequence Number=SeqID_115484
ttaagaaagactaatagacaatcttctgcaactgttgatcaagtatatacatgtgtgctgaatgatgaaaactcttccaagtcctcgatcttacacttagcattgctgatggaaggttttcctttcgattcattatctggtggtataaaggagcttgctgtgaagaaaatgtttacctctttgctggttacctggagaactactccaagaatcatcgagcaatcaatgctccaccttctagctggggtgtgataggatttccngtacatgctctagcctctgtgttgcagcgttgcgagataaaggnt

SEQ ID NO: 49511 - DNA, 342 bp, Setaria italica
  misc_feature (331)..(331): n is a, c, g, or t
  misc_feature (333)..(333): n is a, c, g, or t
  Peptide Sequence Number=SeqID_115485
ttactttgaagacagcactgcttcccttcaagctctgctttcttctcctgcacctgatgatcctcaggatgctgttgttgcacaacagtacctgcgtgattatccaacattcgctgctacggctcgctactggacagaggccttcgcaaagagtgcgtccactggcatggaagagaaggtgcagaagctggttgagatgggcttcccagaggatcttgtgagaagtacccttaagagtgtcgatggggatgagaacctggctctcgaaaagctctgctctggctaaaccaaccctaataggactagaataataatagaaactataaattananaatacccca

SEQ ID NO: 49512 - DNA, 247 bp, Setaria italica
  Peptide Sequence Number=SeqID_115486
caggatgggcttagtaacttccttctggaatttgtactgcaagaattagtccagtgatgcagagtgtaaagcataagctctgaaaattcactgcaagaacgaatggaacagtgcggacccataaagctgtacaagaacttgtgagattcttaactgaattactattgccgaccttctcccattaatttctgtgtgttgattctgtttctgcagtacctgtgtgattatccaacattcgctgctacgg

SEQ ID NO: 49513 - DNA, 262 bp, Setaria italica
  Peptide Sequence Number=SeqID_115487
cctcgtatgtttccgagcaaggagtcagattatattgtgttgtagcacgatgtgtttaaaacgctattctactaagcacgcaaatcgttgtgaatcgaatttagtttgtatcgtacttttcttttgtggatttgggatggactcatgccttcaaggtattgcttaaattgtttaccggtggtattttcactttcagagtatgctgatgaggctactatgataccaaagaacacatcagtattgattcggcggattccaggac

SEQ ID NO: 49514 - DNA, 157 bp, Setaria italica
  Peptide Sequence Number=SeqID_115488
acaagcacccgccgtcgtccaagcccgaggccgaggcgcgcttcaaggccatcagcgaggcctacgaggcgctcctggaccagcaggagaacagggcggtgttcgggctgtgcaacgacggccgggcgggcgagagggcgggcggggcgttcggcgg

SEQ ID NO: 49515 - DNA, 444 bp, Setaria italica
  Peptide Sequence Number=SeqID_115489
tcctaattaccactcacggaacgtgtgcaataattaaaccatctcgagtggacgtacgtactctgcatcatgctcctcaccctacttccgtgcagcccttctcttggacgccgacttcccagcgtcgtcctgcaggcaacacaacagcacgcacgcagggttaaactcatctggtcgtggtagcgaccgatcgcaataaaaacacccctgatcaacaaactattgacgttgacggagatcagtgaagcagcgtgtcgacctcgagcctcacgattgtgtggctctcgcgattagcaagcaggccgtaagacaagtcataaacgacaccgccgcccgacagggggcctctgttggaaagcgacgcgaggtcgacggacggacacgggaccggagccaactggtcacgtcacctggaccagggagggccaggagcatctgcgccag

SEQ ID NO: 49516 - DNA, 272 bp, Setaria italica
  Peptide Sequence Number=SeqID_115490
tagttagtatttacattaatgtcctgaattactccaattgttaaggtgtggctagtaatagaagactaacaactaaataagcaatgaatgctgtgtgcagatggtctctgtcacgaccagatgcaagccattcactcctgtaacagtaagaatgctcggggggttgtacctgcaccttatgtggtgatggtggccacacgtgtacagattgccagattggcttttcaaaaccagttaaatgtatacatggatacatataaaatcgtgtgtag

SEQ ID NO: 49517 - DNA, 288 bp, Setaria italica
  Peptide Sequence Number=SeqID_115491
acaacttgttcgggcagttccgttggatctctgctcagacaacagggcccgcaacggcgagctctatcgctacatagctgatactcatggtgcctttgtacagccagcattttatgaagcatttggtctcactgtcgtggaggccatgacctgtggacttcctactttcgcgacactccatggagggccagctgagattaattagaagacaataggacaatactacaaaggaacttaaccaaacaaattaagaaaactaaactaacaaacaaactaagaaagtaacaa

SEQ ID NO: 49518 - DNA, 263 bp, Setaria italica
  Peptide Sequence Number=SeqID_115492
cgtttctctatctagaagtggaatagaataacccggttgaagggtaatgatcatacgtctgtaatgcattgtatgtcccagaataggtcccattcttctaccctttccgggtagtcgatggctattcacagctactaccttaacaccaaagaagagttcgacccaatgctttatttctgtcttagtgaatcgtaaccatagaatacgaccctaatcgaaatgcatacatttgtctcatacactatggggatggtgagaagaga

SEQ ID NO: 49519 - DNA, 267 bp, Setaria italica
  misc_feature (142)..(142): n is a, c, g, or t
  Peptide Sequence Number=SeqID_115493
gaataacaggactaaattatttccacttgcatctatgctccacctttctgttccaaaagcaacttgattggtttgggagcccaaaaatggagagctaattctcaacgatcttccataatactactgctcaggatgatgttanccctcgccaggctctcggatttggatggacgttctcgacaggcttgcttcaagttcatttaattcatcaatgtccaagtcatcatcaatatcgattattctttcgttctattcttaagtttccta

SEQ ID NO: 49520 - DNA, 113 bp, Setaria italica
  Peptide Sequence Number=SeqID_115494
aggactgggatcaggaaactttggagaaggttgttgaatcgaaaaggacagagtatcagtaggcttgttctgctgatactctgtccttttcgattcaacaaccttctccaaag

SEQ ID NO: 49521 - DNA, 125 bp, Setaria italica
  Peptide Sequence Number=SeqID_115495
taacaccagcaagctcaagtcaccagaaatatagcattataacaagacaaattgcacactaacactatttatgacaggctctcaatggcatgtggccccagccgcaagatggcatcctcacatta

SEQ ID NO: 49522 - DNA, 145 bp, Setaria italica
  Peptide Sequence Number=SeqID_115496
gagaactgaagatgggtcagctctcttgtttcactgtaattactcttcttatctcaaatctgcaaatctatgtgtgtgcatgtatgatccatacatgcacacacatagatttgcagatttgagctgacccatcttcagttctctt

SEQ ID NO: 49523 - DNA, 406 bp, Setaria italica
  Peptide Sequence Number=SeqID_115497
ttgtttgttcttaagtttaatttctttggttatttgttcttaccttattaattgttaaattcttaggtagcctgaaagacactattgttcgtgcaagttaatctggagatcgggttgaaggtggcaagaacgtggaggttaatttgttggattcaggccaagatgaggcttgatgaaggcttcaactctgcgaagcaggatgtggatgctagcagcgagcagctgagcatcatcagtgtgagtatgtacagggtttgtcaggtgggtgcagagggcagagttggggtggagttcatggaagggaacgcagggctgttacacaagtgcttatagtaggcgatggtgattttcattttctagtgcaggctgagtagcagcagcgttttctttcggttctttgttttct

SEQ ID NO: 49524 - DNA, 355 bp, Setaria italica
  Peptide Sequence Number=SeqID_115498
tcatgcgtgaacggttgaatgtgatgcatgactagcatgaggtggcatgcgctattaaagatcttatgtccacatcactcaatgcatccccaaatcaacttcaatgaccagtatgagcattttgcaagtatgcaaattgtttcacctcccatgtaaaaaaaaactctcaagtcttacctcaatgcaggcaagaagaatccttagagccatctcatggcagtgtttacctcttaatggataagaaccatacttagaaaaacaaacttctgcatttcccccagcaagcactgccatgtctgtagcagagcacattaaaagaccaccatctgctacacattgaactgctgaatcaagg

SEQ ID NO: 49525 - DNA, 188 bp, Setaria italica
  misc_feature (153)..(153): n is a, c, g, or t
  Peptide Sequence Number=SeqID_115499
aagctgtgtaatcagtagagagctctaagctcatgtcaagcataactgtaacaaatatgatcagtattacttaccagcactgacatgggcctagggccatgggcccagatggggtgacagctcaaggtgagcagcctgcctgagggccaaagnggcaaagagaccagagagaccagagctcaattccc

SEQ ID NO: 49526 - DNA, 237 bp, Setaria italica
  Peptide Sequence Number=SeqID_115500
atccacatgacttcctgatgtttgatacccagcatttctgatggcagaatgtaacataaccatggttggactagtgcacttcagtattgcacataagttgtgaagactcacaaacaaaggtgcttctggcaattcttgcttgggactgaaaggctatgttgttgttgttgttgtgaagagatcacctacttggtcaggcaggagtggtgagaatacgaggaagcattcaaggttaag

SEQ ID NO: 49527 - DNA, 392 bp, Setaria italica
  Peptide Sequence Number=SeqID_115501
taaacaaaaagaaaaggaaaccaaagaaacaaaatagactaggccaattaataaattcggaaccaaatctcactgggtttttttgtgatggaggagattatgatagttattatggccgttttttcctcaactggtactctcagatgttggtggatcatgcggaccgtgtactgatgttagcaaggttggcttttgagggtttaaacatagctgttaaggtctctggagtgcactggtggtacaaaactgccagtcatgctgctgaattgactgctgggttttacaacccatgtaaccgtgatggctatgctccaattgctgcagtattgaagaaatatgatgctgctttgaactttacattgtgttgaattgcgcactatggaccagcatga

SEQ ID NO: 49528 - DNA, 227 bp, Setaria italica
  Peptide Sequence Number=SeqID_115502
cgccctacgttcccgtctacgtcatgctccccgtaacggatgcatctcctccatttccttgtactggacctgcgcgatcgtgttccgattcatgctcgtgtgtttggcagcttggggtggtcaatgtcagcggcgaggtggtggacgcggacgagttggtgggccagctgcgggtgctcaaggcagccggggtggacggggtcatggtcgactgctggtgggggaac

SEQ ID NO: 49529 - DNA, 219 bp, Setaria italica
  Peptide Sequence Number=SeqID_115503
ctaaaatgctgcgtgggatgctggtttacaagtggctagtgagaacgctctaccttgctaccatcagtacacggtccgcatgatccaccaacatctgagagtaccagttgaggaaaaaacggccataataactatcataatctcctccatcacaaaaaacccagtgagatttggttccgaattataatggccagcattgtctggtactcttgcccatat

SEQ ID NO: 49530 - DNA, 250 bp, Setaria italica
  Peptide Sequence Number=SeqID_115504
gcccctgccacaagctggatattgaactcctattcttgctcctgcacttgctgccggtttgaggatcccacctgtaggaggaaaggctaagttaacacccattgaacttttcatctgatgaaggcgtgccagcagatttccacaaacatcctgcataagaatcagttagaaacctggtaaactgaagtctagtgggaacattctactatgaacttgcagttctctaacagtgcaagcttctccctaccat

SEQ ID NO: 49531 - DNA, 429 bp, Setaria italica
  Peptide Sequence Number=SeqID_115505
agaatttcactttcaaatgtcacagggaaggaaatgatatattctctgtcaattcactgaacttccatcctgtccatcacacatttgcaactgctggatctgatggtgctttcaacttctgggataaggacagcaagcagaggctgaaggcttttagtagatgcccacttcccattccttgcagcaccttcaacagcgatggttccatatttgcttatgcggtctgctatgattggagccgtggggccgaaaacatcaaccagacttccaggactataggaggcagcataacaaaactggtgactggcctaaagacacagatcccgcaagttggaacgaaatcacttccggcctgtcgcgatccgcggctttcctttgacctcagattcctgtggactgtggaggtagatggatgtctttgcagctgca

SEQ ID NO: 49532 - DNA, 256 bp, Setaria italica
  Peptide Sequence Number=SeqID_115506
gctttcctttgacctcagattcctgtggactgtggaggtagatggaaagccgcggatcgcgacaggccggaagtgatttcgttccaacttgcgggatctgtgtctttaggccagtcaccagttttgttatgctgcctcctatagtcctggaagtctggtgaactatgcctgagcgggggcgaagccagaggaaactctggtggaggctcgaagcgatactgacgtgcaaatcgttcgtctgacttgggtatagggg

SEQ ID NO: 49533 - DNA, 472 bp, Setaria italica
  Peptide Sequence Number=SeqID_115507
ctatatcaatttcatttgtgcttagatatggatcttcatacgaactgaacttttacgacaatgtacctgttgaagatgtcgaaccactaactttaaagcttgctatttcagctccagttgttgcagtagcttctccttccgcattgaaggcttggttaaagctgatctcaaaagtcgataactggaataattccatcgcttgcattggtgagaccactggctctgcagcgaagaaattgggtctgaagagcatatattatccaacaacccctggacttgaagggtgggttgaaagcattcttgaagcgctcagaggccacaggcaattaaaagaggtttcttatcttatccttgcgtcctatcctgatttttcttggtttcttccgtcatagcctttcctgtttctgctttaggccccaaaatgttgaacacgggcagccccttgtaccggatgacgcatgacggagcttct

SEQ ID NO: 49534 - DNA, 322 bp, Setaria italica
  Peptide Sequence Number=SeqID_115508
ataaaagggagcatgccatgccagttaaccatccatatacacaagtaaaaacttgaaatatgctatttgcctggattgactttccttgaaccgtcagcctcccaatatttacttccattttgccatagcttgcttttatatgtggttccgttgttcagtcttttttgtcatcattgtgatgcagggcttggttaaagctgatctcaaaagtcgataactggaataattccatcgcttgcattggtgagaccactggctctgcagcgaagaaattgggtctgaagagcatatattatccaacaacccctggacttgaagggtg

SEQ ID NO: 49535 - DNA, 426 bp, Setaria italica
  Peptide Sequence Number=SeqID_115509
catggccttctcttcttcgctggcgttccccttcccttccccaccttctggccaagcccgacccgcaggaaggctccgagccggcgccaccggtaggttcctggggtgctcctcgcccccgcccgacgtcgtggtgacccgcgagcggggaagaacgccaagctcatcgccgcgctggaaaagcacaatatacaggctctggaacttcctcttattaagcatgttgatggccctgatacatataggcttccagatgtcttacgtaatgacaagtttgactggattactataagctctcctgaggcagctgcagtgttccttcagggatggaagtaagcttcaagcatattgcagttatgtgctatatgttgctgtacaagtagtaattatgcctctaatttatgtcttcattccttataacttgtc

SEQ ID NO: 49536 - DNA, 257 bp, Setaria italica
  Peptide Sequence Number=SeqID_115510
tcctaaaatttaagttgatccagctttattattggaaaacttttacagatttcaccgtatattaactatggcctcctcattgcaagtgcaatataaccttccattctttgtatagtcaaaagtcattacactggtattacatgtgttttacaacatcaccgtatacaacacagttacacaagtcatgtgaccgcttctggagccgagttgcagtaaggggtgtgcaagcaaatgaatctagtcgacatcaagcacac

SEQ ID NO: 49537 - DNA, 240 bp, Setaria italica
  Peptide Sequence Number=SeqID_115511
agcaagtgttccagcagaagcaacttgtgatggagtcgcttccttaaaagcatcaggaagaacctctgctataacaatccatatcatgcatcctgcagcaaaaccagtacaaaaggggagcaccttctggaatgcgtcggcacaaaggaaagaaggaacagcaacaattggctggatttacaaatgaaaacaaagcagcatcagagcaaaatcaaagaatgtttatcacaagaagtgtaa

SEQ ID NO: 49538 - DNA, 268 bp, Setaria italica
  Peptide Sequence Number=SeqID_115512
tttcctttgctggctcgaaaggaaacacccacaccagagccttccccaaaagaatggagagtcattattcccacaccagagccttccccaaaagaatggagagtcattattccgacaacaaggataactttacttgcatctgcaccttttatatccagcatgcttacttctccatattgctcaagaaacttcttgcaaagccaaataaatattcctccgctcaaaattaccgaaaacaaacccagctcccactgccatacacctgccc

SEQ ID NO: 49539 - DNA, 412 bp, Setaria italica
  Peptide Sequence Number=SeqID_115513
gaagccggaggatgaatgtaatgacgttaacggaggatcttttgcgattaaccacctaaggatgcttgatgtggcagcatggtagacaagggaaccaccaatgatgagaaagagggtggtaaagagacccatttttgaggacattagaagctgtacaggtctccatgccgcaagacggaaagcaatgccagatgccacaccagtaagcagcgggtgtggcatgctgaaggcaagagagaatgtgacaagtataattcctccgataagtggaccgagtccaaatacaagtgataccaagaaacccgatgcatcctctgagttgttgccatcagtaaatcccagaagcacagcacttaatgtttcctattgtaaagtctaactaagtactaaagttagtttacctaagtactaa

SEQ ID NO: 49540 - DNA, 495 bp, Setaria italica
  Peptide Sequence Number=SeqID_115514
tcgaagctaatttggtaaagtttgtcttgtagtattttattaagtcctaaccttcttcatgttaaacccatatttgtggctgtctaagctgacatggagaagtattacagtgcatcagaggcttctgatatagtcttcaggtacgtcgaaaaggaaaatttggttaagcctacagacaaggccaaagtgattcttgatgttacattatgtgatgcattgtacaaaggagctatcaaaaagggctcagcatacccaactgagatccacaagaaggacttggggtcaacatttttaaaccgcatgcaagttcaccatatagtaacaagaggaactcaagaggtcatacgcaagggtgccataagaactattcagatcatgacagaaagaaggcaaggggaacaagaagatgactcggctctctggactggaatgctttctaatggatcctgattccttggcttctgaactgcagaagaatttgcttgcagcaccacg

SEQ ID NO: 49541 - DNA, 105 bp, Setaria italica
  Peptide Sequence Number=SeqID_115515
taatggatcctgattccttggcttctgaactgcagaagaaaggtcaggggtaacaagaagatgactcggctctctggactggaatgcgtttctaatggatcctga

SEQ ID NO: 49542 - DNA, 446 bp, Setaria italica
  misc_feature (440)..(440): n is a, c, g, or t
  Peptide Sequence Number=SeqID_115516
acgtttcttcctccttccctgctctcccatggcttcccctccctaaatcccctctctacagcagcaaacccttgggggaaactagcaaaacggatcgaggacaacaagaggagcaagaaaggtgcatcttccatgtagatcggtcctttccccatatcttcccgctgccctagggtttggggaacaaccaaggtggtaacgctccggatcacgcttagagcggctatctccttctttgggaggagcaatacatgccttaggcatgggaagcatagggagtaatcaacatgtgtggttgcaacacgtatcaggctcaatcacacgatcaagacatcaagttgaaccctcaacacagccatccatggtaccaagcgaaccctcggtagcaaaaggtgattcggatcgggcgctgaagattgaagtggaagtgcgaacgggtnatgatg

SEQ ID NO: 49543 - DNA, 312 bp, Setaria italica
  Peptide Sequence Number=SeqID_115517
cacgaagcatgtcctctaaggtctgaatagtcctctcaactaccttttggcagagttcgcttataataacagctatcaagctagtatcaagatggctccatttgaggctttgtatggtagaaagtgtatttctcccatatgctgggaaactttgggtgagagatctttgattggtccagattgggtccgagagacatctgaaaaggtgcgggagatacgacagaatctgttggctgctcagagccggcagaagagttatgctgatgtgaggaggcgataccctaagaagaacatggtcacccactgcaaact

SEQ ID NO: 49544 - DNA, 254 bp, Setaria italica
  Peptide Sequence Number=SeqID_115518
tggaacaccttataatcttctctgtctacttgtctaaagaggaatcgctctgacatgtcaacagatggaattggcaaatgcttcatggagacgaaaataagcactgaatgaatggaagggatcttctcaatcaggtgagggaataccggtggtatgccttgaaccaactcggtgtagaagaggcctatccctggggctctctgaacgtcacggcggccaaggagttctttcactttgtcacggggcacggagtg

SEQ ID NO: 49545 - DNA, 246 bp, Setaria italica
  Peptide Sequence Number=SeqID_115519
cttgaagatgctctgaaggagcaagaggctactcagcataaagtatcaactacagcttctgaaacaactgaaaatgctctactggaagctgaatcatcgctcaatcttaagtctaaagacttggaggagaagaaagagagttggtaggccattctttggtatttttttatctgcttgttttttgaatgcattgtttgatttttgtccctcatcacaggaactattgaataacaaggtgcaaacaat

SEQ ID NO: 49546 - DNA, 353 bp, Setaria italica
  Peptide Sequence Number=SeqID_115520
ttttctttaatttgtttttgtttagtttctttatttagttaaatttaaaaacgtttatttgttacttaagttaccccttaaacttagttaagtaaattctaactaattgatctctatgttcatgaaaggctcatgacaaaagagatctaaaacggatctgtaaaaacatcaccgcagacgaacattaaaatccaaatattgaagagggacacccagcaagtagaaacttgggcaaatcatttcaagattataaaagaaatgaaactctgaactcagctaaatctttggaatcttacttgtcagcataaaaggtgcagacagcaagggatgcaggcagctgcagtgccactatc

SEQ ID NO: 49547 - DNA, 232 bp, Setaria italica
  Peptide Sequence Number=SeqID_115521
atttctcaggagaaggtgatgccttgcgaggaggggagcggctagggctcctacttgcaggtgacgcactgtctctgccacgcctcttgtaatcatcaggactatagctgcgacttcggctacgactagggcttctgtctctcccatgctttttgtaatcatcagggctgtagctgcggctcctgctacgacgacgatagtccctctctctgtatctgtcacgtgtgtacct

SEQ ID NO: 49548 - DNA, 236 bp, Setaria italica
  Peptide Sequence Number=SeqID_115522
ttaagtcctttacatggccatttgggaatccagcactggcaatctcaccaagtcctgaactacattttggaagtgctgacacacatggagcaactaaggtgctcctaaagctttcaggcctttcagttagatgaaaattagcagtctgagaagtgaacatagtatgtgtaggcatgtctcttgcacgtgcaggcaaattagtaaaagcaggatcaactctctcatgatagacacta

SEQ ID NO: 49549 - DNA, 291 bp, Setaria italica
  Peptide Sequence Number=SeqID_115523
ttaataacgttaagaaacaagggaccgacccttagtactagggacttacttacaaaccaaagtagaattaatgtcagacatgacagtctcaccaccaggtcttctaacttcaacagtgagtttaccattcaagttgatacttcctgctgatacttctgtccctgctatctttgtcacgggcataggttcacctgtcaaacttgattcatcaactgtactccttccagctttgacaacaccatctgctgggatacgatccccaggcagcactacaacatagtcccccaacag

SEQ ID NO: 49550 - DNA, 238 bp, Setaria italica
  Peptide Sequence Number=SeqID_115524
ctattgcacgcaaatggacggcagcagggagctcatcgccggccgtggtcccctgcaacagcggcgcggtcgtcgccgccgtcttcttcctcctctccttctcctcctgctactcgccgtcgccgatcgctcgccgcacgctgccgccagcatcttcggcggcgacgcggcatcggtatggtcctagctagctactcagctcgatccatcaagaggttatcatcagctaaaaaattgg

SEQ ID NO: 49551 - DNA, 414 bp, Setaria italica
  Peptide Sequence Number=SeqID_115525
acttcactaatcagtcttctcccttcggagcagaatcaacacacagagcttgagctccaaaaggccatggagagatggagaaaacgcgggagcttgctcgccgtcgcagccgtggccctggtggcagcattgctgccgtccggcgaggcgaagctgtccccggactactaccggtcgacgtgcccggacgtcgaggcgatcgtgcgggaggcggtggccaagaaggtcaacgagaccttcgtcactgtcccagccacgctcaggctcttcttccacgactgcttcgtcgagggctgtgacgcctccgtcatcatcgcgtcccgcgacaacgacgccgtagtaaggtacgtcgtccgggtctaacgttgttcccttcgtccggttcgttacggttctttttcgtttacttacttt

SEQ ID NO: 49552 - DNA, 252 bp, Setaria italica
  Peptide Sequence Number=SeqID_115526
ctcttctctcctccgacgattcttgcttgtccaagtctggtggctggtggtagactgccggaggcgaggtgggtcctactcctgctctttattcttctctcggattgaggcatggtggtgcctgcgttagggtttccagttcggggtcgtcgggggagggctccatggccggcgggcttagaggaagcgtctggcggcggacgacaaccggcgggaagggccgacggcgggggcgagcggctttctcagtta

SEQ ID NO: 49553 - DNA, 423 bp, Setaria italica
  misc_feature (400)..(400): n is a, c, g, or t
  Peptide Sequence Number=SeqID_115527
cgattcttgcttgtccaagtctggtggctggtggtagactgccggaggcgagtattgttttgcttcacagggaaaaatcactcagagtctaagctatttagatatttctagggatgttggctcatggtctagcaacagatccctcaaggactttgcgatgtccagttgcttcaagggtgtcgactgcacccttgggagttgtatcttcgttgagtttcaacaggggacgcaaggaaaagaacaaaatcttcatcaatgtggatagatacacaaagtacagtactcctctctgttatgcacagagaaatgccagaattacaccacgggcaactgcatcatttggggacatggctgattcttcgactcccatctttcctagaatccacgtgaaggatccatntcagcgtcttggaatcagcaggg

SEQ ID NO: 49554 - DNA, 240 bp, Setaria italica
  Peptide Sequence Number=SeqID_115528
atggtatctgtaattccacctatactgccaggtcatgtgttacatatgccctccttttcatatcatcaaccttcctgaagtaagagatcttcatatttccatgttagcctatagtccggcggcagtcatcaacacggtatcctacttctgatgactctacagtcatctgcttctttatttgtttctgggagttgcaaatggtagttctttggtgagttgatagtagttgtcaggttgtaa

SEQ ID NO: 49555 - DNA, 246 bp, Setaria italica
  Peptide Sequence Number=SeqID_115529
taagttctacagtctgcaagaactaaggtctcggatgaattcaggaagtcaaagggtttgaatgaccattgcagtagtacagaatataataactttgtagtctgcatcttcagcaacatgtttcttctatcctatatgatgcattgaagaaacatgttgctgaagatgcagactacatgtttcttcaatgcatcatataggatagaaaaatgctggtctaatggtgagccagatgtacatggttgc

SEQ ID NO: 49556 - DNA, 248 bp, Setaria italica
  Peptide Sequence Number=SeqID_115530
ctgatgcttcaataccaagcaggactgcagaacttatagaacgaaccggaagcccaggaacattgttaagacccatcttacgaagaatgttcctaggtattgctggaggaactgtaaggcccatgctttggctgaactcttctgcaaggccaacaagcctggacttgtctcggccaatggtcttgtttgagttgtagtaccccagccatgcctgataggcacattctttgctcttcatctctactttt

SEQ ID NO: 49557 - DNA, 368 bp, Setaria italica
  Peptide Sequence Number=SeqID_115531
aaaaataaaacaaaaagaaaataaagaaaattaacaaggaataggtacaacttctgcttcttcgatttcttcggcgggttcttgactagtgcttcaccctcgtcatcagattcaccctcaattgactcatcagggacatcgtttggagcattgtgcttggcgatgtattccttgagaatcaccatgctcttctccttcattgtggccagctgctcggataggataccgcactcagagctgatggcaaacgattctgctccaagaaccaggttagccttcactcttggaccaagactagcctgcgcagcgtttgcttggccttccatcactgcagttcgtgggcgccggggcgccggcagttgcaggga

SEQ ID NO: 49558 - DNA, 269 bp, Setaria italica
  Peptide Sequence Number=SeqID_115532
gggggggggggggggggacggtgccaaaactgcactttggtagatgaaaaggtgcatctgagatatcctttttcttttgcaacaatattagagtatccactattcctttaccctatattattgcaaccaggtatcttttgaaacattattgaagaatgaagatcgtttaccagaatctccacatagactttcatgccaggcttgatgtgatgtcggatccaataccagtcattcccttttatcggcacccacccctcatggacacagcc

SEQ ID NO: 49559 - DNA, 225 bp, Setaria italica
  Peptide Sequence Number=SeqID_115533
cctggcccttgctggtgccgtagcccaccgccgccacgccgtgatccagctccgcgccgcacggaccatcgaacacgcccttcattgcattattgcatacatgggaatatgagatcgatggaaatgcacaatgatatataattaactgaacgttcagcatcatcagcaaaatggcgtacccctttgtagaactggaagtgcctgccggacgcctcgatggcgacg

SEQ ID NO: 49560 - DNA, 221 bp, Setaria italica
  Peptide Sequence Number=SeqID_115534
cttcggcacgtcgccgcggctcacgccgccgtaccggaagctgccgccgccggagttggaggtcctgctcggccgctggtggctgagcccgaggtaggcggccttgaactcgtcgtgggtcaggtcggcgaactcgttcagccccagccagtagctgctcacctccctgttaatctcctgagacacgcaaaaggggataggcaaggcacacaggggatagg

SEQ ID NO: 49561 - DNA, 239 bp, Setaria italica
  Peptide Sequence Number=SeqID_115535
aaccaagctgagcacgtaatgacaaaatatccaattcctgtcccgcattgttattggtagcacgattcaccgcatcttcaacatgactcgatggctgaagaagtactgaacatggcatgcattgaacagatgaatatcaagctagcagtcagccagtcactttgtcagttctttacaaagaaacaagatgtgagtgctattttttttttaagaaaaactaacatcattgtatttggtat

SEQ ID NO: 49562 - DNA, 417 bp, Setaria italica
  Peptide Sequence Number=SeqID_115536
aaggcaaaatggaggaatgccaggattttttcaagactttgtacaagttcatttattttctaggcacgtacttgaaaccacatgttgccattcttgatggtgttactatgggtggtggaggaggtgtttcgattcctgggacatttcgcattgcaactgatagaacagtctttgcaactccagaagttcatattggattccatcctgatgctgcagcctcctttttactgtcacacctaaccggtcatgttggggaatacgtggccttgactggtgaaaaactcaagggagcagatatgattgcccttggccttggcccacacactattcccatgagtgagcatctggatctggttgatgatcgacttgcaaatttgaactgatgacccatcagttattgatttcttcccttgccac

SEQ ID NO: 49563 - DNA, 464 bp, Setaria italica
  Peptide Sequence Number=SeqID_115537
aagagtttcctcatcaagctacaaaattcaaaacaatatcaaatcattcgctgaagtaaaaaaggtaggataaggttcctacacctgcatatccaaacacacagcttcttaaaaaaaagaaaggtgacagaataaatgttccataaaagcaaaggataagtctgaaggtaactcatccagatcatcaagtttctttccccctcaaatacacagagatgtgcataccatttcatgaaagaagaaatccatttggccaagttgatacacaatatcatcaatatacctttttaacttgttgtgcagtgtctggaggcggcacggctaaatagcgtggaagtcgaatcttgaaccacacatgttcacggatttcacggatggtaatccttttcattggatcaacaaccagcattctgggaattaagtcccttgctgaaggtgacaaatgactaggaagggtatatatt

SEQ ID NO: 49564 - DNA, 393 bp, Setaria italica
  misc_feature (122)..(122): n is a, c, g, or t
  Peptide Sequence Number=SeqID_115538
aaggcactaggatatggatatacagtgaactagcccagtgccttcaccagccgccggccagccgtaaagaaccaggaggaatctttgctccataaagtctggttcagaagatagccaggcanaacagcttcgcatgtatacaatctacatactccagaaattcaatctactggatagattactatttacagctttgtgagcgattcgacattcctctagtgaaacgcaaggaatacaaatgatggaaagcagacaccaggaatcaaagaactctcagctgagctagaaaggctgcgcacaagtcaagaaagaggagctgtggtccgctgaacctttgcaagtcgaggaggtatttctcatctcttgttttgtaaaagactagaaatttacaaa

SEQ ID NO: 49565 - DNA, 182 bp, Setaria italica
  Peptide Sequence Number=SeqID_115539
cccggacttaacatactccataacaacgtaaatatcagcctgtgtgtctataacctcgtagaggcggatgatatgtgggtgcataaacaacctcaatatcttaatttctcttttaactttctcttccatctccccctctctcgtctaccagccctcctccggtccacccttcctccttcccc

SEQ ID NO: 49566 - DNA, 179 bp, Setaria italica
  Peptide Sequence Number=SeqID_115540
cagactgcaaaatgaggcaactgttgcatattattttgcagtctgttttggattgattccaccaacaagtccttgtcataacccataccaataacctcacggagtgtttcctcatcaatcttttaacttgttgtgcactatctggaggaggcacggtcaaatagcgtgggagatgaatt

SEQ ID NO: 49567 - DNA, 391 bp, Setaria italica
  Peptide Sequence Number=SeqID_115541
gcaggagaatctcaaggtccacaatttcagttttagtactgaaaactactgtgagtatgcaccttcgtcttcaaaataccggatgccaacgatgttctcaacaaaaggcgatcaggatcatatgctgcacgtgcgcgcagctccagagaagaggcaacgtgttccttcagcatacaatagatttattaaggaagagatacgaaggattaaagcaagcaacccggccataagtcatagggaagcattcagcaccaactgaaacaatcatgtcaataatgtagctgcgaaagctcctttctcaaacgagactgcaacagtgtacttccatatctccagtttatagcagcaacacacagtacaaaggaccaagtgacatgttatatctttaatt

SEQ ID NO: 49568 - DNA, 420 bp, Setaria italica
  Peptide Sequence Number=SeqID_115542
ggtgcaggagaatctcaaggtccacaatttcagtttttagtactgaaaactactgtgagtatgcaccttcgtcttcaaaataccggatgccaacgatgttctcaacaaaaggcgatcaggatcatatgctgcacgtgcgcgcagctccagagaagaggcaacgtgttccttcagcatacaatagatttattaaggaagagatacgaaggattaaagcaagcaacccggccataagtcatagggaagcattcagcaccgcagcaaagaactgggcacattttccaaacatacattttggcctagggccccttgagagtagcaagaagcttgatgaggccattggtgcaagacaaggtaacaaataaccccaaaataaaaaagtaaaaccaaaaaagaaaaataaaaactaaaaactaaaaa

SEQ ID NO: 49569 - DNA, 391 bp, Setaria italica
  Peptide Sequence Number=SeqID_115543
agtaccaacaaatttacaagttttaagtaactagaaaactaactagtagaagtaatgcaccttcgtcttcaaaataccggatgccaacgatgttctcaacaaaaggcgatcaggatcatatgctgcacgtgcgcgctccagagaagaggcaacgtgttccttcagcatacaatagatttattaaggaagagatacgaaggattaaagcaagcaacccggccataagtcatagggaagcattcagcaccgcagcaaagaactgggcacattttccaaacatacattttggcctagggccccttgagagtagcaagaagcttgatgaggccattggtgcagcaggtcatccccataaagtccaagatctctactagaggcttacaacacccat

SEQ ID NO: 49570 - DNA, 432 bp, Setaria italica
  misc_feature (249)..(249): n is a, c, g, or t
  Peptide Sequence Number=SeqID_115544
tttacctttaggtttacctttaaggttaagtctttccagtaaacaccatctggaaccacgtgcccgcttcatcggcccccgcggcaacagaatcgcggcaacggcactcggaaatccaacagaatcaaccgctaatcggccaaataaacacccacccgcccgccagagcttcccctccgtccaggtcacccgcgcgcggacactggagccacggcaaacgcgaccgccggaattcgcaggagggggganccggggaggggggagagagagaaggtgaagtgagggagtgagggagggagagtctcccaacgcgcgcttaccaggaagcagatggggcactcctcgaggtcccctccgccggccgcggcgtcgtcggcgcccgggtagcagggcgcgagcttggcctcaaggatcagcttgcgcagcttcttc

SEQ ID NO: 49571 - DNA, 254 bp, Setaria italica
  Peptide Sequence Number=SeqID_115545
gaactgcgattgacgcgttgaaaaaaaaacaatatctgcaatgtagatggtacctgaatcttggggatcatgtaggcgatgttgcagaggtaggacatcatggagtactccttggcctcgccgagcgacgccttccgcaggagccgcgagaaggaggcgcggtcgaacacctcgccctcgtcgtaccccacggcgcagccttcgccctcgcccccaccgccgcaggaagcgcactcatcgacgccaccgccggc

SEQ ID NO: 49572 - DNA, 304 bp, Setaria italica
  Peptide Sequence Number=SeqID_115546
cctgcctctgaggtggacaagtggacacctatgcagcgtttgctatgctgttgcagtcctgaaaccccaggcgcgtggccaatgcagaactagatgtctggtttcactgctgcttgccatggtggttcactggttcttggcatgaccatggccggctctgaaacctatattgtactagagtttgcgccatccttatgtttgtgcgctgcatccatgtgtatatctgtgtgtctactatttagtctaccttgttctttatttttgttttactttcttaacttaaatttacctttctttttttttt

SEQ ID NO: 49573 - DNA, 257 bp, Setaria italica
  Peptide Sequence Number=SeqID_115547
ctagatacatcccactcaggtagtggaaagacctacaccatgagaccccttccttcttaaggcctctcaagatatcttgagattaatgcaccatacataccgcaactaagggtttcaattatttgtcagcttctttgagatatacggtggcaaattatttgacttacacaatgataggaggtgagttgctacagaatttgtgatgtttaggaatggtgtgtatccctgggtccgctagaatttgtgatgttcaggaa

SEQ ID NO: 49574 - DNA, 242 bp, Setaria italica
  Peptide Sequence Number=SeqID_115548
cgatcgtcgctacttcattcatccgctaccatgatgccaacactggaagagggtgggcattgggccattggcgattcctgcctctgaggtggacaagtggacacctatgcagcgtttgctatgctgttgcagtcctgaaaccccaggcgcgtggccaatgcagaactagatgtctggtttcactgctgcttgccatggtggttacaactaggttacttaggacaataagaaaccaataagaa

SEQ ID NO: 49575 - DNA, 410 bp, Setaria italica
  misc_feature (157)..(157): n is a, c, g, or t
  Peptide Sequence Number=SeqID_115549
aggagcaaatttgaaaatgcaattgcacaaacataaatgggaacagcttgaaagaagaaacaaatatatatcatcattagttgtcagccacgtcggcaagatccgccactactctaatcttcactccaggtagttcaagatgatctgcaatagtacngaaagctgcaccagtaactgtcaggtgaaccattacgaacacaactctactttgggctagaagaactcagataccccaattgctgagcaaggtcatccacatcttcgggtcttgcctccaactctgactgccctgccttgtctccaaaatcttcgatcaacagctctgcccagaagtcatcattcagctctgattggccattagcttgatccatctttacactatctgtagttccctttccaagctcttgaat

SEQ ID NO: 49576 - DNA, 235 bp, Setaria italica
  Peptide Sequence Number=SeqID_115550
acacgtagcctctcttccatggctctcacatgatctttagtagtttgctgctcctgccttagctttactacttctgtgattaagatgttcttgtcacgcttcagcctgtcaatctcttcctcaggggtcaaaggcacctactgaagacaataaagagaaggaagccgtcatcagctgtgccacaatcacatcagcagcaggctcccgcttcttgcttggaggttggcgagttcgg

SEQ ID NO: 49577 - DNA, 175 bp, Setaria italica
  Peptide Sequence Number=SeqID_115551
gggtatctatatgcccttgaatctcccatatatgaacacctgagaagggccgtacatctccaccagtcaacccaattgctgagcaaggtcatccacatcttcgggtcttgcctccaactctagaactgccctgccttgtctccaaaatcttcgatcaacagctctgcccagaaga

SEQ ID NO: 49578 - DNA, 209 bp, Setaria italica
  Peptide Sequence Number=SeqID_115552
gtttttgaaaaatggcgtatcggagtatcaccgtatcgtgtatccgtatccgtatcggagtatccgtgtaacatagcttgtacttcatccagtatcttgttccatctagctacaatgaaaaagtttaagaaaccatgtcaggattacatttctttgggagacttcatctctcctctccttgcctcaccttaagatgaagctcactggag

SEQ ID NO: 49579 - DNA, 141 bp, Setaria italica
  Peptide Sequence Number=SeqID_115553
ggaaaccctcatttgcaaactcccacctgtcaggatcgacctttctgaagccctgcagattgcaacagacaagaaatgactattgtcaggtcacattcacaaagccaatatgttagcttggcaaaaactcctctgaagatt

SEQ ID NO: 49580 - DNA, 254 bp, Setaria italica
  Peptide Sequence Number=SeqID_115554
cgcatgtccccgtattggtgtttttgaaaaaatggcgtatcggagtatcaccgtatcgtgtatccgtatccgtatcggagtatccgtgtaacatagcttgtacttcatccagtatcttgttccatataggtgttgagctgtcggacgaagctggagaagttgctgtgcttgaagagacgcgggagcagcgtgtcggcgaagacgtgcgggtcccagacgacgaagctgttgccggcgcggctccaggagacgac

SEQ ID NO: 49581 - DNA, 399 bp, Setaria italica
  Peptide Sequence Number=SeqID_115555
gaggtcaggagatggggcaggcgttccggaagctcttcgatgccttcttcgggaacaaggagatgcgggtggtgatgcttgggttggatgcagctgggaaaaccaccatactctataagctgcacattggcgaagttctctccactgtccctaccatcggtttcaatgttgagaaggttcagtacaagaatgtagtgttcactgtgtgggatgtcggtggccaggagaaactgaggcccttgtggaggcactacttcaacaacactgatgctctgatttatgtggttgattcactggatagagagagaattgggagagccagagcagaatttcaaggactaataaatacaaatagaacccttttaatagacttaaacaagtagtaacttttaggtagta

SEQ ID NO: 49582 - DNA, 360 bp, Setaria italica
  Peptide Sequence Number=SeqID_115556
cttggagggcttaaggaaaattctcacatttaattgatttggatttcatgggtgaacttatctcttgcctcaagaaactttctgggtacagcgaccgtcaggatgaaacaccccatgataacacactgtctgtctcagaacgcatgcaatgctgcatagttgcctttaaagtctggaggagcaaccttgaggcattgaatgtagacctagcaggatttctttgtacagctctataacctcatattggagtatcgtcctgacaggttttgactcttaatcttggtgatagttattaggaagaatacctgcttttgtttttcattatttatgatttatcttaagaattttagattgattttt

SEQ ID NO: 49583 - DNA, 244 bp, Setaria italica
  Peptide Sequence Number=SeqID_115557
ttcaacccatgaaatccaaatcaattaaatgtgagaacttatctcttgcctcaagaaataagttcacccatgaaatccaaatcaattaaatgtgagaacttatttcttgaggcaagagataagttcacccatgaacaccccatgataacacactgtctgtctcagaacgcatgcaatgctgcatagttgcctttaaagtctggaggagcaaccttgaggcattgaatgtagacctgcaggattt

SEQ ID NO: 49584 - DNA, 375 bp, Setaria italica
  Peptide Sequence Number=SeqID_115558
cagtttaagcataggttgtgctggattggtgatgtagcgtcgcagagtcgatcacgggtcagatggctcacatttcaccggcgtcttgacgggagccacttccatggctgcaggcttggcattttgatcgctgctgaggctgctggcaacgaccagatcgctgacaacgtcgaagttcagtcgtccgctaactttcttcccgctatttagtcggttgttgatagccttcaggtccttggaagggctttgaaacgcataggtactctcaccaacgcatgcatagtagctctttgagcttggggagagcaaagtatcctaattcttttgtaattagtaattacgtaaagttaggttagtaaaacgttaattaactaa

SEQ ID NO: 49585 - DNA, 239 bp, Setaria italica
  Peptide Sequence Number=SeqID_115559
tgctatcaagttggcgtctaacagttcattgatcagcatattattgtgacggctgcaacaccatttcttgcttgtctttgcgatcttctgatggcaccctaggagtttccaagggtaccttggactcaggttcaatcttcaagtgtgtgagccctaaaaagagcgaacttggctctgccgctctagacatccttttgcttaactcgatgtcctctccagtttctcagggccatttttta

SEQ ID NO: 49586 - DNA, 377 bp, Setaria italica
  Peptide Sequence Number=SeqID_115560
tttccaagggtaccttggactcaggttcaatcttcaagtgtgttgaggatatgattcttcttagttgctgttagcaaccttagagcaatgtctttgaacagcaaatgggctactattcgatcaattggatttgttgttgtttctgcttccttagttggagatcttgttctcctagtagatgtgtcatgttctgaagcttcatcttcatctttagtagtcttgttagtgctactcctgtcaccagcaatttgtctctctgtggcactacaggccaaacgaagcaaactatctcgaatacatagtcgagttttggtatccaacttagaccaaagaagaacaaataacttaagaaaagaactaagaaataaaataaataa

SEQ ID NO: 49587 - DNA, 496 bp, Setaria italica
  misc_feature (136)..(136): n is a, c, g, or t
  Peptide Sequence Number=SeqID_115561
caacagcaactaaagaagaaaatcataatcctcaacacacttgaagattgaacctgagtccaaggtacccttggaaactcctagggtgccatcagaagatcgcaaagacaagcaagaaatggtgttgcagccgtcncaataatatgctgatcaatgaactgttagacgccaacttgatagcaaaatcagtggtggtggtgatgatggcaatctgctgatcatctgcggcactggagatcattaccttgtgtaccatgtaaccatttgaccattgtagcatccttttccacatccagcaagaacatctcagactggatagaaacctgcgattgtgtgtgagccctaaaaagagcgaacttggctctgccgctctagacatccttttgcttaactcgatgtcctctccagtttctcagggcctattttttctcaaggaagcaacttagttagaaaactattgggtacggtttacttcttactagtagggtaaaaaatt

SEQ ID NO: 49588 - DNA, 368 bp, Setaria italica
  misc_feature (26)..(26): n is a, c, g, or t
  misc_feature (53)..(53): n is a, c, g, or t
  misc_feature (143)..(143): n is a, c, g, or t
  Peptide Sequence Number=SeqID_115562
ctgaagtttggtaacttgtagcagcnggttcctctgatggcttcagcttgaangtttgacactaatggaatagtaggaaatggatatgcaggatacccatatccaggacaaataaactgattagaatgctgaacttgccccangtttttgctatcctggaacagtgcatattgaggagtctggacaggttgcataggagcttgcaaactggctgatggattctgtactttgctctgggagaagccacttgtatcgctggatagtttactttttcctctttcctcctgttttctagacgtagaataactaacaaactaaggtaactaacttaactaagaacaaacaaataactaaccctaacctaagaa

SEQ ID NO: 49589 - DNA, 455 bp, Setaria italica
  Peptide Sequence Number=SeqID_115563
gcaatgctcagctagttaaataacaatattaggtcgttacagaaagcatgccaatcgtacgtaaggacgtattagagcaatatatagtacaacatcaaagtgaactactaatgagcatggacttatttgacacaatgcaacggaggccagtgcagatagatgcctcataacataacttggagcacagcatgcatttctcgatctatcttgagtttttatgcaatttcgtatgccaatgggagcaacctgggtactggatgaaccatcaacggcaccgcccgctgcagcagcagagtgaaggcctcttccatatccaactcgtccggagtttggcccgccggcatctcccagtcaaacgcgtgcaccagggtggcgctagcgagcgtgaccatccgcaagccccagctgagttcccgtcgttcttattttattttcctttttcgtttttctttttt

SEQ ID NO: 49590 - DNA, 321 bp, Setaria italica
  Peptide Sequence Number=SeqID_115564
tcgtaatgccaggctggagatgaagaagacaccattagctttgacctcaagccatcagatgctattaacattgctttccgttgcaaggtatgcatttgtttcctctcctttctcagtatctgttgacaatatttgtttgaaggataaatattgctgatattgagagtgttgcttttatcccttttggccgcgtgttaaccatatgaatgttaaccactctgctggagaatcgaaacaacaacgtgatttctttgatttgtcagcaaggcaaccatatctttgattctaatcttgatgctaaccttgctactgctgtatgat

SEQ ID NO: 49591 - DNA, 454 bp, Setaria italica
  Peptide Sequence Number=SeqID_115565
tcccttaagtcgtaacttgtccgtcgtcttcttctttgtattcttccgtcggggtagtcttcctagtattcttgctaggcgggcggcccggcgtccggatcgggaagcgaagatgacggaggcttgggtgcggaacaagccggggatggccagcgtcaaggagatgccgctggtgcaggacggcccgccgccgggcgggttcgcgcccgtgcgctacgcgcgccggatcccccacctcggggcccagcgccaccgccatcttcctcaccgccttcggcgccttcgcgtatggcatgtaccaggtcggccaggggaacaaggtccgccgtgcactcaaagaagagaaaattgctgcccgtagtgctatactgccgatgctccaagctgaagaggatgaaagatttgtcaaagagtggaagaagtatcttgaggaggaggctaggatcagtgaaag

SEQ ID NO: 49592 - DNA, 235 bp, Setaria italica
  misc_feature (45)..(45): n is a, c, g, or t
  Peptide Sequence Number=SeqID_115566
taagaatctttgtttgattctgcaggagaaatttccagtgaaganatttttgtgccatatgtggttcaaaggatgtgactttacaaaatgacatcattctttgtgatggagcctgtgacagagggttccaccagaactgtttgaagcctcccttgctaactgaagatatacctccgggtgatgaaggatggctgtgccctgcatgcgtgtgcaaagcagactctatagatgcact

SEQ ID NO: 49593 - DNA, 382 bp, Setaria italica
  Peptide Sequence Number=SeqID_115567
tttagtttttacttaacccttttcttaagtattgggtagggtcctacttcgccgagagccggcacattcctccccttcggcctcggcgcaaggctctgccccggcaacgatctcgccaagctggagatctccgtcttcctccaccatttcctcctcggttacaggctgacgaggacgaaccccagctgccgggtgaggtacctgccccaccccaggccggtggacaactgcttggccaagatcaccagagtttcagacgagtactgaattctgatgaagcatagctagttgctggggtcgaaaaaaggggccaaaactattgtcggcgatctgtgcaaaaaaaataaacaagcaagaaatgaagtgttacatgacatgttct

SEQ ID NO: 49594 - DNA, 336 bp, Setaria italica
  Peptide Sequence Number=SeqID_115568
agttacaaacccttacaaagaatagggaagggaccaactacgaccgaagaaagaaccggacaacaattacctaccccttacggacctcggcgcaaggctctgccccggcaacgatctcgccaagctggagatctccgtcttcctccaccatttcctcctcggttacaggctgacgaggacgaaccccagctgccgggtgaggtacctgccccaccccaggccggtggacaactgcttggccaagatcaccagagtttcggacgagtactgaattctgatgaagcatatctagctgctgggggccgaaaaagggccaaactattgtcggcgatctgt

SEQ ID NO: 49595 - DNA, 326 bp, Setaria italica
  Peptide Sequence Number=SeqID_115569
cacctccgcaaaatccgaaaaattcccaagcccgcactagccccacgccccgcccgccgcggctcccgtccaagcacaggctgaggagtgaggtggggactcaccggcgggaccgatctgggcgctcgcgggcaaggaacggccagagcgccgcctccctcctcctgcgtcgccggagatccgacgtccggtcgcgtcgccggcgcagatccggcggccggacggtgcgccgtacgcgtcccacggtggcgcgatttgtgtgcttttttcctctctttgtgtgatttgtccttttccctccgggctcaactcgtcgtagacccaag

SEQ ID NO: 49596 - DNA, 494 bp, Setaria italica
  Peptide Sequence Number=SeqID_115570
ctgcagtgatgcaatcttgctcacagcctctgacttgttgcagaagatttttgcttttgcagccaacacagtcattcacattgaacactgtgtgtgttatcttgaccagcatgtgggaggaacattggcaaagtgatcataatcaagcaggtaagcagcaacctctcggaaccctgtctcgccaaccctcacagatcttttgaggcctggctgtcccagtgccttccccacaaaacctttttggggttgttcggggcaaatggttcctcatcagttggcttgacaattgcaacacgctctccccagatgttcttgaagtagtaagcaccacccatcccactgttaacagctactgggtcgacaccattccttattgctttgatgacatccttagcaagctgcttcatccgagaggaagggcttgaacagccaaggatttcaatgggcccgctaccggtactacgactagaccaaaacaataccttaccaagtaa

SEQ ID NO: 49597 - DNA, 229 bp, Setaria italica
  Peptide Sequence Number=SeqID_115571
aggcaactgagctggaagagagtctttgtccaaactgacaatggttctgtccttggcattgagttggagaggggtgaaaatgtgcaagctgtgaaaaagaagctgcagatagccctcaatgtgcccactgatgagagctcgctgaccttttgagaagcaaaggtgagtcattgcgaatgctggtaagatcattattcagaaccagatcaccaaaggtcagcgagctctc

SEQ ID NO: 49598 - DNA, 250 bp, Setaria italica
  Peptide Sequence Number=SeqID_115572
acatgcagaataagagtttggtcgcacattttgtcatggctaatgagatgtcatcctgaagctcttttccagaacagaacaatttgatcttctcagaaggcttcaattctaacttctttgaagcttttaatttgacagagaccggagtgtcctctgaatttaccaaaatcctgactccttttcctcccaatgtcataagaatagcagtcagagggtctgacaaactgtggcacctctacaggtgccaaaa

SEQ ID NO: 49599 - DNA, 382 bp, Setaria italica
  Peptide Sequence Number=SeqID_115573
tttgaacgaagtttgatctaatgagcattaagaaaaataagtgtgcagacatctcacatgagcatagacacatgaccattgaccaggggaattggcatatgtttcagcaaggtcaccagtctgaaatctcattaactaaactatggtacctggacaaatataaggaattcatgtgtatgatcctgctgcatgttaattgtaactcttcaatttgccctgcattcagtggactttattgaaacaaactctagtactgctaaatttcctaggcgatgatactaatatctgtttcccctgaaacaaactctagtactgctatgttggtagcatactatctcttatcaatgggtggtctacaagaacacatttcaccacttattgt

SEQ ID NO: 49600 - DNA, 456 bp, Setaria italica
  Peptide Sequence Number=SeqID_115574
agttgggcatacttgagtactgttgtgtttgggatggtgctcatattctatgttgacaatgttgctgaggaaaagtaagatattttctcgaacggaaagtgtattttgagttaactttaaaattttcttatggtgttgtaggtcagtttgtcaagcgaaccattattgttttgttgtcatcggtctgagccagatcttcagtagattatagatttgaagttatttattcctcaaatatcttcaagtgtaacgatagaagcaagtacttttcttttcttggatgcttcttgaagtatcttttatcaacctttgtgctaatcataagacatgaattgccatcctttagttaattggcccttttgcttcacggttagaccctcactccatgcctgtaacgtgtttacttggttgttattcctacctgacaggttgcatctggtcttctcatctccaagg

SEQ ID NO: 49601 - DNA, 425 bp, Setaria italica
  Peptide Sequence Number=SeqID_115575
tgttggtagcatactatctcttatcaaatattaactttccttccatataatgcagcagagaggactccaagaacagcacctgcatactccgccagcagagcgactaatgggccacaagcaagaagtcctttaccccataatacaaagtataatgccaggattccgccattgcaagtaattcatatcttgggaaacttcatggagaatttggtctgtttactccttatatagctacctatccaacagtggggattcaatagttggctttatcttcagttgtcttgtacccacttcagtcatattcttggtctttacagaagccttggaagggccggcctttgcccaactcacaggttgttcctacagttgtcaatggaggaatcctggcattatactttgtattatgccaggattcctccattgac

SEQ ID NO: 49602 - DNA, 244 bp, Setaria italica
  Peptide Sequence Number=SeqID_115576
tgaaacatagccttttcttgaatcctagaattcttagtgtagctagtttctccgctccctccttgccatgtggagaccttgctctatactcatgggcatggctgccagatgaggcttcagctgtgtgtagagaagtacctaacccaaagttcagtacaagtgtagccactggttgctagccattttggagaaaccatactcgacacattattcaaagagtatgcgcaccgtgttgccaaacatt

SEQ ID NO: 49603 - DNA, 187 bp, Setaria italica
  Peptide Sequence Number=SeqID_115577
ccgttgccgccgagcttcactccctttcttggttgactgttagcccggtctacacagaaaggcgtacggctctgcccttccactgtgacatggtcctgaggttgaggcggcttctacactacgccgatcggcatctaactctcccttctctgctggttgagttagatgccgatcggcgtagtgttag

SEQ ID NO: 49604 - DNA, 347 bp, Setaria italica
  Peptide Sequence Number=SeqID_115578
caccaataattgggattgtcggacctgacaaaataagcaaacctgcagaccacagtgttgagtgtgtgtacatgtaccagaaagaaacatatttgcaagacatctattgaaaaaagaatgacatcgaaaattttgaaaggctaaataagtgtacatatgttgtatgcgtattctattgtcaagaatagcaagaagagaaaaataccctctagccaaccagagaagaggggatgtagcaccaatccctggaaattcatttaggggagcctacggtactttgtccctagtctagtctattcttttgttcttttttaaaattttacttaaccttaagggtttaaggttaa

SEQ ID NO: 49605 - DNA, 314 bp, Setaria italica
  Peptide Sequence Number=SeqID_115579
gaacgagcaatccgcagcagaaaagatgagaagcatgagctaagagattagctgtcatgaatgcaccatatgaatgaccaccaacagcaattttatcaggatgagccacccctcttttaacaacttcctcaactgcggcctctgcacttgcaactagttgttccacatacctgtcattggcctcttcgtcaccttcaccaataattgggattgtcggacctgacaaaatagcaaacctgcagaccacagtgttgagtgtgtgtacatgtaccagaaagaaacattattttgcaagacatcttatttaaaaaaaa

SEQ ID NO: 49606 - DNA, 227 bp, Setaria italica
  Peptide Sequence Number=SeqID_115580
ataaacttaccatctacagtccacaattcaactttctttggaaatctcccacaagctacaatgtaggaatatggacggtagatggaagaaaccattaggtatttatcatctggtgatggatcaatggatgtatatacagctggagggccaagtgagaaccttccaagatctgttgaaagatgaacatgatgctgatctatttgattactatgcaacctcacaacttg

SEQ ID NO: 49607 - DNA, 300 bp, Setaria italica
  Peptide Sequence Number=SeqID_115581
tagtacgggttaattagtaacggttcttgtagtaccttctttttgtaacctagtttgtcttctaatagggtgcttgttgtacacagcaaggtttggtaggagacccagcagatacttctttaggtgctcatcaccaacgttcttctgtgcagggttgccgtcaaggttaatggcttctaaagaaatgtaatttgcagctagctgcccgaggcccttcgatgtagaaatcttgttatggcgcaagtccagaaccttaagcttcagaaggcggtgaagaccatctacctcactgatcttgtt

SEQ ID NO: 49608 - DNA, 281 bp, Setaria italica
  Peptide Sequence Number=SeqID_115582
gcaggttaaccagttgtccatccgaatttaatttagcgcagaaggataagagttaccacaataataagtgtttaatttctgccccgatttgctcagtagaagtttgtaatcaactttgtaaccttctaaacagtatggctatggagaaagtgaactaagtactctccccgtgctatctagaatgtcatagcaacaactgaaagctatgttttgttagactatactactactcatcaaaataaatgatttagctcacaactttcctacttggggctaactaa

SEQ ID NO: 49609 - DNA, 258 bp, Setaria italica
  Peptide Sequence Number=SeqID_115583
ttatcatgaaataaaaataagttagactttacaatacaatttaattttaagttccaatgcttttagctgctacactgatgtgatttgtttgcagtgatgtcttcgaatgatgctatgggtactgtctttaaatgtttgtcaaaaggtgctgttgacttttttgtcaagcctatacgtaagaatgaacttaagaacctttggcagcatgtgtggagacggtgccacagctccagtggtagtggaagtgaaagtggcatt

SEQ ID NO: 49610 - DNA, 234 bp, Setaria italica
  Peptide Sequence Number=SeqID_115584
ccgccgccgccgtcggcctccgccgtccgaccgccatgccactgccttcccctccgccctccgtctcctgacgactcggccgccggccacaagaggtttctgagttgttggatgcaaccgaggcgctcttcgatgcaagcgtaatatgtgctcgaccacctattcattaactcaagacctgcctcggatcaatcccaccactttcgtctacctcttcaagtcaggctgatggga

SEQ ID NO: 49611 - DNA, 262 bp, Setaria italica
  misc_feature (177)..(177): n is a, c, g, or t
  Peptide Sequence Number=SeqID_115585
accatgctgagttaaaatatccttaatttcgcaagactcttcacataccggcaacccttcagctatatcatatgcagtcttgtggtctctggtcagtgcattgacatgggtatctggtagccgacaaaagaacactaactatctgtagaagataagaaacaagaaaaaacattaaanacaacagagacttaaataataataataattaagttaggcaacaaagtaaaaaaatctaataggagtggtaattgttatcctatat

SEQ ID NO: 49612 - DNA, 296 bp, Setaria italica
  Peptide Sequence Number=SeqID_115586
atagagctacaacttaccagctacagtactctccctactcaagcttcgatttacactgcatacgctagtcagagaacgagcgctactgaagcgcaaattgctacttcctgcctgggaggcagttcgtcaattgtagatctgagcctgcctggatttggtcaaggatgcagagctcatttccagggcatgctggatatgattggtggttgattactgttgcttgcagccatgccgtgaatcatctggtggggctggaagcccaccaccactgcatcaaggcatggctgcagtggttg

SEQ ID NO: 49613 - DNA, 320 bp, Setaria italica
  Peptide Sequence Number=SeqID_115587
ctaaatcttcgctgaactacactgcaaagaaccaagtaaacagataacaaagatagaagagcatgcgatgcgatgccactgatcaatttcgagccattcagaggcactgcgacacaaaggcgagggaagcgccaagcaggaccaggagcaggtggccaacggcggagggtgacgcggccgcggtgccattgatctgtgaggagcccacggccacgggcagctcgtcgccggcggggagagagcaggtggcctggtggccggccccggccttcgttctagtccgtcctattctagtcgtccttggtattctacggtccgtt

SEQ ID NO: 49614 - DNA, 344 bp, Setaria italica
  Peptide Sequence Number=SeqID_115588
cgaagtccaaggacacggggttgccgagccgtctgagggtgtgagcgcctccgcggctgctgcgtctccgtccgcggtcgttgacttggtcgacgacgaggagggaggcggtggggaggaggagccgctcatccaggcggctgagtgccggatatgccaggaggaggacagcgtcaagaatctcgagaagccgtgcgcttgcagcggcagcctcaagtatgctcatagagcttgtgttcagcgctggtgcaatgagaaaggagacactacatgtgaaatttgccattctaggtaattactaagtccttggtttacttaccgttcttaccttacctttcgtttgt

SEQ ID NO: 49615 - DNA, 229 bp, Setaria italica
  misc_feature (196)..(196): n is a, c, g, or t
  misc_feature (213)..(213): n is a, c, g, or t
  misc_feature (217)..(217): n is a, c, g, or t
  Peptide Sequence Number=SeqID_115589
tatttaggttgtaagtatttgtattatggttgtctcatctggttcaacacgaggtggtgcggtgtaaccaggcttgtattcctgatgagacaaccatagacattggtgaagatttgattatggatttgcgtgacccaagaattctcgctgtagcagctgctcagcgtcgtcttctgaggcagagtatgatggttangctatacagatgctggnggtnctgcattctgcc

SEQ ID NO: 49616 - DNA, 290 bp, Setaria italica
  Peptide Sequence Number=SeqID_115590
acattcaaaacagaagctagatagctatgctatcctatcctcagttatctccgatggcacaaacgccatgaaccttgacataggagttcgattataggggccaaatccagcagcccccttttctccatcatattcctgcattcaccatgaatgatacaaccatgttgtgcattaacctgccatgtcaaagatgcattataacctcaaggttgtatgtagattgatctgattttttttcattacaagaaaggtactgttgttgttacttagtcaaggacatatgattaatt

SEQ ID NO: 49617 - DNA, 226 bp, Setaria italica
  Peptide Sequence Number=SeqID_115591
tcataaaacaactaatcataagtagaagtattgcgcatatggctctcaaggaacaactaaaatgggcagagctgtaccttatctgccaacaagctgcacacaaaaaagacctgcatctgttggggatggaaataattaaataaagcatctgtttctctggacacaactctcactgcagagttgtataaaagacatttggggtttgaggcttgatgattgtatactt

SEQ ID NO: 49618 - DNA, 140 bp, Setaria italica
  Peptide Sequence Number=SeqID_115592
ttacctcataacccattttatcaatcatttccttaacaacttgatataatgggttatgaggtgatactgtctgtagggtcttctatctttgttagataaagttcagcacaatatgcttcttgaattcttttgtttacccg

SEQ ID NO: 49619 - DNA, 469 bp, Setaria italica
  Peptide Sequence Number=SeqID_115593
tttccttttgtattggtattcttgtctttctaaattacttcttagttacttgtatttttccttggtattaaaattttgtagtcttcggtactattaattcttgacgatccagacatagccggacctgctcgagaatgaaagcaattttctctgtctttgccatagagccaaatgtttcgacagcaacttcttgcatcaaatcagcagcctcatcgatctttccctgctcctctttgatttttgcaagtcttttgatcagtcttgctcgctctatctcgacatatattttgccagcagagacgctactcaatgttttgattagctcaatgcgtgtgtccatgtctggtgtcaaatcaatgtactccattgctttttgaaccatggcggtaatggcctgcttgagctggcctctcctcttcgagaggagaacgatctggtcattaagtgtcttccacgcgccggccttgta

SEQ ID NO: 49620 - DNA, 223 bp, Setaria italica
  Peptide Sequence Number=SeqID_115594
gagaatgaaagcaattttctctgtctttgccatagagccaaatgtttcgacagcaacttcttgcatcaaatcagcagcctcatcgatctttccctgctcctctttgatttttgcaagtcttttgatcagtcttgctcgctctatctcgacatatattttgccagcagagacgctactcactgagacacgcaacagaggataggcaaggcacacaggggatagg

SEQ ID NO: 49621 - DNA, 161 bp, Setaria italica
  Peptide Sequence Number=SeqID_115595
tcagctcaaatcttctggagctttggcacccaaagctcctccctcattctcatattcagatttaaagaattacccaacaaagactaagtaccaactagaaacaaacctaccaataggtaaaccaagactagacttacaagacaaataaatactagaaaata

SEQ ID NO: 49622 - DNA, 218 bp, Setaria italica
  Peptide Sequence Number=SeqID_115596
cctatcccctgtgtgccttgcttcctgttgcgtgtctcagacatcggactcctccgcgaaggatcgtctgcatctccaaacccttcgccgaatccatctcccaagccaagcccgaacccgtcaccgaacccctcaccctctggcggagggaagtggtgtgtggccaagaccggtgcagatgtgacgaccctgcaaaacaacatcaactacgcctgtgg

SEQ ID NO: 49623 - DNA, 192 bp, Setaria italica
  Peptide Sequence Number=SeqID_115597
atcttctccctgttcgacgagaatcagaagcccgggccgattgcggagaggaacttcggcatcttcaacacggatttcacccccaaatacgacatcggactcctccgcgaaggatcggtcagttgatctctctatctctgctcttaataaaaaatcaattttgtccccaaatctgagtgtctttactttgcc

SEQ ID NO: 49624 - DNA, 413 bp, Setaria italica
  misc_feature (195)..(195): n is a, c, g, or t
  Peptide Sequence Number=SeqID_115598
agtacccgacggacttcggcttcgtcacgttcgcgagcgagcaggcgatgcgcgacgccatcgaggggatgaacggcaaggagctcgacggccgcagcatcaccgccaaccccgtcgtcaagggcgacaagctcaaggacaaggtctgagggccaggagcctcgttccctccattcgatccctcgcacttttccnccacgcgacgccggaaggaggaggaggcggaggacgacgacgacgactgccggaacggatcgtcgggactgtacgaactactactccgtgtaccctgcgactggtgtactgtagcttcaactgcatgtgtaagccgacggcccgtcggccatcgcaaaatccaaatcgaaaactaaattggtttcgaataagaggtcccgatcgtgaggccttcttgc

SEQ ID NO: 49625 - DNA, 362 bp, Setaria italica
  Peptide Sequence Number=SeqID_115599
gtcaaaaccctcaacttataagcgcaaagaacttgcatctgatgtgctctgtgcgtggactaaagatgattttgatcgagcagaagctgcaatgcttaaggttctccagtttgcacaacccggagaaccttaagcattgcagcttctccgggttgtgcaaactggacagtgggtagcttggcgtgcacttcggggagctgcatcaaaggctgttgattcacaagagctgcttgattattctcttcgagaactgggtggaaaacaactggatgatggccattttgttgctgtccgctgcaatgctgagacaagtgcaatagagtacaggctggaatcttcctccattcggtcaccagttaatg

SEQ ID NO: 49626 - DNA, 240 bp, Setaria italica
  Peptide Sequence Number=SeqID_115600
ctgcatcaaaggctgttgattcacaagagctgcttgattattctcttcgagaactgggtggaaaacaactggatgatggccattttgttgctgtccgctgcaatgctgagacaagtgcaatagagtacaggtgagccttgtcgtcatcccttttaatacctgaacttaacctagtagtttgcttaccattattatttcatgacaagcaggctggaatcttcctccattcggtcaccagtt

SEQ ID NO: 49627 - DNA, 209 bp, Setaria italica
  Peptide Sequence Number=SeqID_115601
ttaccggtaggtatttgttactagtttctaggtattggtagtaggggttttggtagtaacttggtacttgttggactgctcatgtggtgccaaggatgatgatggggaacgtatgctagcatgtgatgtttgtggagtctggcagcacaccagatgctcagggatcagcgatttgaggaagtccctgaaaatttcatctgcaggaagtg

SEQ ID NO: 49628 - DNA, 396 bp, Setaria italica
  Peptide Sequence Number=SeqID_115602
ggattcctttgtcgataatagcttctctggctttctcatgagctgctttcatttgcgcattgtacgcctgacccttcatgctcagttccttggccagagctttgttgccaaccaagtaagcctgtctagcctgctcaaagcaagcatttctgaccctagcataatcacgagcttccccccttgattcggagtacatatttgccactgcatcaccagtctcaagccatggagcaactcttgcaccgctaacactttgaaatttgttcccagatgattgtttggtgctagaactgtactgcttgggtacagaatgagacgaaacaccattacccgtaattacaaggaacctttacttaaaacttaccaagtaggactaagaaattttagtagaataga

SEQ ID NO: 49629 - DNA, 399 bp, Setaria italica
  Peptide Sequence Number=SeqID_115603
ggaggaactgctccactgcaatgggcaaccttgcggtgcgtgagcccttggtgtggtggcctgtcccgacgcataccatgacctgcatcctctcccccgcagccctcgctgcgcttttcatggcagcaagctcaacctttagggtgtggattgcttcgctcacatgcagtccatgtaaatcgatcagaccatcacctcccccgttgcgaaacaggattcctttgtcgataaatagcttctctggctttctcatgagctgctttcatttgcgcattgtacgcctgacccttcatgctcagttccttggccagagctttgttgccaaccaagtaagcctgtctaagcctgctacaaaagacaaagacaatttactagaaccctaagacaataaatacaacg

SEQ ID NO: 49630 - DNA, 257 bp, Setaria italica
  misc_feature (10)..(10): n is a, c, g, or t
  Peptide Sequence Number=SeqID_115604
tgattcagancaaattgtaccaatagtgttccaggagtcatccaaacaccccctaggatctattctctccaggtgattattaatttataagtgcataatataagtagatttatgaaaaatcaataacaattaccaacaccgttaaacagggagtaagtgtgcaatctgcattaaaaataacttgaatatccgagtattacccactgcatcaccagtctcaagccatggagcaactcttgcaccgctaacactttgaa

SEQ ID NO: 49631 - DNA, 253 bp, Setaria italica
  Peptide Sequence Number=SeqID_115605
gcatttctgaccctagcataatcacgagcttcccccccttgattcggagtacatatttgccactgcatcaccagtctcaagccatggagcaactcttgcaccgctaacactttgaaatttgttcccagatgattgtttggtgctagaactgtactgcttgggtacagaatgagacgaaacaccatttcccgttatttctaggtaccttttcttagtcctacttggtaagttttaagttaaaggtttccttgtt

SEQ ID NO: 49632 - DNA, 141 bp, Setaria italica
  Peptide Sequence Number=SeqID_115606
ctagggtcagaaatgcttgctttgagcaggctagacaggcttactttgttgccaaccaagtaagcctgtctagcctgctcaaagcaagcatttctgaccctagcataatcacggagcttcccccttgattattgtcttagt

SEQ ID NO: 49633 - DNA, 418 bp, Setaria italica
  Peptide Sequence Number=SeqID_115607
gcctatgtatatttgttttcttattacaaaatttatatttctgcattgaaattttagtcctgcagcagtaccaaaaagcaaataaaaagggcaaactacagcatgaaatttgttaggtcgtttttgcatttctaggttcatagttttttctatgcgcctagacatagtgtctatctaagtgcataataaaaggtatgaacctagaaaaatccaacgacctgtaatttggaacggagggagtgtgttgtaaactttagaagttttaaagctatggggttctcacaatctccaactgtggtggactagaatttgaccacattattactatgtccaggtaatgttctttgcagaacgtcacataaacccaggggaggaaattacttacgattaccactttaaccgtgaagatgaaggccag

SEQ ID NO: 49634 - DNA, 346 bp, Setaria italica
  Peptide Sequence Number=SeqID_115608
tttacggtttacttaaggttaaatttagttaagttaaagttaaaggtttaaatttgttttctttttgtcttagtaacgttctactattaaaccctaggggtaggtaaatttactttacgtatttacctacttttaaccgtgaagatgaaggccagaggatcccttgcttctgtagatcaagatactgcaggcgttacctcaattagtttactattgtgccatcttactgtgtaacatgtctatatatcctttatttttcatcctttagaacacttcattgcatgtctgggagaacaataaactgcttgatgtatataaactctagggacttgcatctggcagtgcc

SEQ ID NO: 49635 - DNA, 250 bp, Setaria italica
  Peptide Sequence Number=SeqID_115609
tacgaaacgaaactaactaactacccgaaagacttacaagtaggactagaatagaatagttcgtccaaagccgtaacagagagaaagggcccttctaaagattctgtagtatctaaaggacaaccaaagtttggtttctcttctggatcatcaagcattgtggttacaaagtttcagatgtcacctgaagttcacaaagtgtcatctactgctaaacataggaaacataaaaatgtatgtgatgaaggat

SEQ ID NO: 49636 - DNA, 230 bp, Setaria italica
  Peptide Sequence Number=SeqID_115610
atgccacttactgctgcagagaagattatggattctcatggtgtggatcaccttcctgtagtctctgaacatgctaatcttcaggacagtggacttttgataggttttgtagacagagaatgcatcgccattgctcgaaggtaattgtagaattcttctaaattgaacattgtattgcttgtattccaattgccagtttatactcagtgttcctatgtcttctgtgttgt

SEQ ID NO: 49637 - DNA, 399 bp, Setaria italica
  Peptide Sequence Number=SeqID_115611
aggttgtgccgaaattcaagattctcaaggatgggaaggttgtcaaggaggtcactggtgccaagatcgatgaatagctcatgcaattgaaacagcgaagtgaagctgagaaataccctgaaaaatgtgcacgaatcagcatgctaccagtagtgtacactatgaacgagccaaccccttttgtggaagtggatactgacatgcaggaaaaaaaagttattctagatggagtgctccctgtaaataatcatttgtgctttatgaggatactgcttctttcagatattaatagtttgacagtgatcctagtctttcatactcagtatgttttgaatactatatcaggtggttctctggctgaatacctttgagttacacgcactaagctgtacagtttaa

SEQ ID NO: 49638 - DNA, 372 bp, Setaria italica
  Peptide Sequence Number=SeqID_115612
ctctcttgtgtatttactattatgctctgtaggatatctggacatggcatgatgaaaacctcggtgcttgctacttgcagcctcttgcaaaagagctgggcataaaggttgtgccaacattcaagattctcaaggatgggaaggttgtgaaggaagtcactggtgccaagatcgatgaattagctcatgccatcgagacagtgaagtgaagtcaagctgagaaataccctgaaaatgtgcaagaattagcatgctatcagcagtgtacagtatgaatgagccacacccctttcgtggaagtggatactcagcatgcagaaaaaagttattctagttcttctgcttatgatttattaagtctattaagtacct

SEQ ID NO: 49639 - DNA, 298 bp, Setaria italica
  Peptide Sequence Number=SeqID_115613
caccgaaattccaggagatgtccgagaagaacctcgatgttgtgttcctcaaactcgattgcaaccaggacaacaagcctcttgcaaaagagctgggcataaaggttgtgccaacattcaagattctcaaggatgggaaggttgtgaaggaagtcactggtgccaagatcgatgaattagctcatgccatcgagacagtgaagtgaagtcatgctgagtatccacttccacgaaaggggtgtggctcattcatactgtacactgctgatagcatgctaattcttgcacatttcagggt

SEQ ID NO: 49640 - DNA, 239 bp, Setaria italica
  Peptide Sequence Number=SeqID_115614
cactcgtctgttgccgccgctactgtaaagctccctctcctatcattcaccacccgctcccactaccctccatagctctagccaccaatggccctacgcctctccatctccacatgccggctggctgcctgcgggcgcttcccagccttggttggcacctcagctgcgtcccagaagaggagcctcacggtgatgacgggctctgagatgaggggagtgaccgccgtgaggtcgagcag

SEQ ID NO: 49641 - DNA, 229 bp, Setaria italica
  misc_feature (214)..(214): n is a, c, g, or t
  Peptide Sequence Number=SeqID_115615
aaaaaaataattccagcctgtctatacatcaatcattacaaagtcactggtgccaagatcgatgaattagctcatgccatcgagacagtgaagtgaagtcaagctgagaaataccctgaaaatgtgcaagaattagcatgctatcagcagtgtacagtatgaatgagccacacccctttcgtggaagtggatactcagcatgcagaaaaagttnttctagttcttctgt

SEQ ID NO: 49642 - DNA, 415 bp, Setaria italica
  Peptide Sequence Number=SeqID_115616
gggggctggtagttgatgccgcacttgaacccagtggggcaccagtccacgaactggatggtgcgcttggtcttgatggtggcaacagcagcgttgacgtccttgggcaccacatcaccacggtacatgaggcagcaagccatgtacttgccatggcgggggtcgcacttggccatcatggaggacggctcaaaggcgctgtgttgagcaaactaagattgttggttctgaagaaaagcctagtgcacaagcgacctccgagacagataaaaatgaaagatagtgaaacaactgccaacactggatcatcattagatcaaagaagaaactttgctactgaaagaaaagctcctcagtgaagcaacttctgaggcactcacaatcaatgatgtgaagatgactagtactggaattg

SEQ ID NO: 49643 - DNA, 200 bp, Setaria italica
  Peptide Sequence Number=SeqID_115617
tctttcagtgagtgtgcatgcgcatgctcttgagcatgatcatgaccctcatgatcatgcgagtgagaatgccctccaccttagcattgatcaaagggtataccaaaagcatgtggtagttgatgaagaaatgaatctccaagcattgctcctgccccaaacactgcaagtgcatccaccatggcctttgacggtttccc

SEQ ID NO: 49644 - DNA, 117 bp, Setaria italica
  Peptide Sequence Number=SeqID_115618
tccaccaaaagcatgtggtagttgatgaagaaatgaatctccaagcattgctcctgcctcgatttagcaaaatcttctaacagctgcagattctgcacttaccccaaacactgcaag

SEQ ID NO: 49645 - DNA, 234 bp, Setaria italica
  Peptide Sequence Number=SeqID_115619
cttcgtgactcggggctcttggccaaactagtccatgggagctcggcaatggccggcatctttgggctcagctggatcctctcattcctcttcacattccctgcatacggaaacatcatgtccaacatgaatcgatgtggaggagtcaatggaacttagaaattgcatgttttgctcctaccactttcgtcaatgatgccatcctctatcagcttgggaatgtgcgccctcagc

SEQ ID NO: 49646 - DNA, 482 bp, Setaria italica
  misc_feature (37)..(37): n is a, c, g, or t
  Peptide Sequence Number=SeqID_115620
taatgtgcttgggtgtcactgctggtgcctatcgttnttaccctctttgcggtaagtgtgaccatgagataactaggttttggattgttttactgttgagtgcgtgctaagaatcttgtataaactatgacagacaaagtatcgagagagggttcttggcctcatgttggtttcacctctgtgcaaaggcccttcatggagcgaatggttgtacaataaggttataaccgacacctttgtttcagctatttaagatgccttacgtcctgccaattattcactcctatgtgcagtatttagagcgttaacatcagaatattattgtaccaggtattattaaacttgctttattattatgggacacgtgggttagtcaaggaaagcttgcttcagcgttatttcagcatggtacttttggtcccccatcacctttctttcccccttttcatccatatatgtaattatgcagattcactcagggc

SEQ ID NO: 49647 - DNA, 228 bp, Setaria italica
  Peptide Sequence Number=SeqID_115621
ggaagttcgcggcaatgggcaagatcctgaatcagagattgtccaagcctgcagaagtttacttgatgagaggcagggatctaatgtctggcggttccttcaagcaattaacaggtaactggaatatatctttgctgtcatgacctgaacagacaaagaaatgggatctcactgaactaaattcaaccatcatgtgcatcaggcggcatgacttaacagaatcattga

SEQ ID NO: 49648 - DNA, 251 bp, Setaria italica
  Peptide Sequence Number=SeqID_115622
ggcaagatcctgaatcagagattgtccaagcctgcagaagtgttagtaactctctctattcctctagtaatgttaaaaaaatgatatgaccattacatttaatatttgaacataaaattgaaaccatgttaatccttacgtgcagttacttgatgagaggcagggatctaatgtctggcggttccttcaagcaattaacaggtaactggaatatatctttgctgtcatgacctgaacagacaaagaatggg

SEQ ID NO: 49649 - DNA, 316 bp, Setaria italica
  Peptide Sequence Number=SeqID_115623
gctgaacccacaaccgtatgccatgataggcacaccctgtgctgaagggttttggtaaatgactatttgttaagggcgtccacgatggctttgcggaacgcgtcgttgtggaggaaaaaggatgaaacgtggcctcctgttacccaccggacttcggagcctggccatgccttctgaagctccatgactgaatgtctgggaatataaccgtcatccgttgcaccaacaaagatgacagcctgtgggttctttgggactggaaatcgagtgacgtcagtcaaagacattcagtcatggagcttcggagcctggccat

SEQ ID NO: 49650 - DNA, 246 bp, Setaria italica
  Peptide Sequence Number=SeqID_115624
ggactagtctctttttactgttagtttcatattgattgatgaatattgtcacaaagttgttcattctcaaaaatccgtgccacttttttcctatatgtctctgctctcatctaatgaatcaatctaaattttctgtaataatataggcactggtgatcacacatttgaacgcaggcttcggcttggtgggcctcttctgaagaacaatattgcaactatggttcttgagagcccctattatggaca

SEQ ID NO: 49651 - DNA, 301 bp, Setaria italica
  misc_feature (254)..(254): n is a, c, g, or t
  Peptide Sequence Number=SeqID_115625
tgtttgttcgttgtaagtcgttggttctattctagtatttgttagtaagtttaaaccttcagggagtcagcaagggcattgctgtggacaagatcattcggacactggtaagcaaaggggaagtggcagatctttgatgtgcatcggtaacgaccgatcagatgaggacatgtttgagagcatcaataaagcaacctccttgctgagcttcctgccattccggaggtcttcgcctgctccgttggccgaggccngcaagctaactactacgtcgacggttgcagtgaagtgatcagattac

SEQ ID NO: 49652 - DNA, 224 bp, Setaria italica
  Peptide Sequence Number=SeqID_115626
taagttaagtaacgtaagaaagaacgtaaggtaacaatacaagaattagtaagaaagttaaaacctacaagggaagtcaagcaaagggacaattgctgtggacaagatcattcggacactggtaagcaaaggggaagtggcagatctttgatgtgcatcggtaacgaccgatcagatgaggacatgtttgagagcatcaataaagcaacctccttgctgagctt

SEQ ID NO: 49653 - DNA, 384 bp, Setaria italica
  Peptide Sequence Number=SeqID_115627
ccggaaggaatcaaccgtcttgtgtaacccagatagcatctcttcagcatcggtgtcactgagaagggctcggaagcactgctgaggagctctggaagctaccagaggacagacgtggttccatccgagagccccttggtttgttacacagatctgaaagctgacgagatcattctggctctaaagcaggtctctaagactaccagcagcacgtaaatttgctgctaggaaggctggtctctgatatattcttgctgttcataactgaaaaggcatactcgttttgacctttttcttcactacataacttgtgcaaagtaccgtgactgtatgtcttgcagtgaaaaataactaggacactgctaattttactactggtgggcg

SEQ ID NO: 49654 - DNA, 279 bp, Setaria italica
  Peptide Sequence Number=SeqID_115628
cccggctcttgggccctcgccgccgaggagcaggatgagctcccccccccgcccgccgcccgtcgtccccgccgccgacttccccgacctcgccaccgccgccaccaccaaggtccccaagaagaagaaggcccagtctatgcctctttccgatttcaactccggcaagttcgtcacgcgcgcatcccgcgggcaggaggagggaggagatgagcaatggtggggacagcagcgttggccggccccgtctcaatttgcagaagcggaccttgccgcttg

SEQ ID NO: 49655 - DNA, 258 bp, Setaria italica
  Peptide Sequence Number=SeqID_115629
tttccggtattgcccctagatccacggcttcctaaatttgacggagggtgttcggcgatgccgagcttgccagcggcggagggcgaggcgaaacctgtagggctctgcgctgccttgcggttcctcccggcggcgtgaggtgaagagcgagcgccgcgaggaggccggcgagcgcggaatccctggagcgcggcggcggccagacggcaagctacgcagcgagaagcggtgacggtgaggacgtgaggtagcgtgagc

SEQ ID NO: 49656 - DNA, 344 bp, Setaria italica
  Peptide Sequence Number=SeqID_115630
tccacccatttcatactagtagctgaccatatcatgatgtcatattttgaatatgctgctgctaggaactggtgaagatatggacgcatgagttccttaggattctcagctggcgacttatggtcaaacagagtatagtcaatatctaagaccagcagcttctttcctttacgacatggattcaatatctaagaccagcagcttctttcctttacgacatggattcaagagcttgatcttatactgacttgcacgccgctttaatttttgcttgtagacatctttatccttaatgggtgtatcttcattctgctcgaagtcaaaatcatcgagtaactccggat

SEQ ID NO: 49657 - DNA, 304 bp, Setaria italica
  Peptide Sequence Number=SeqID_115631
gcagtcaaaagttttctttctactttggttttcggattgcacagttatcatagccaagtgatccataagagcagtaattttgtagtcggggttgccaagaactccaagttgctccattttcaactccacccatttcatactagtagctgaccatatcatgatgtcatattttgaatatgctgctgctaggaactggtgaagatctgtaaagaggaacccacaacttaaatgataacacactagaggaacgtaacatattaacagtggtgctgaaaagtccccttacatggacgcatgagttcct

SEQ ID NO: 49658 - DNA, 246 bp, Setaria italica
  Peptide Sequence Number=SeqID_115632
gccagttgatgaatgtagtgtaccttcaggaactgacatgtgttgtatttggcgttcagtgtatgtaacaataatgccctggcatgtcgtcttccttcttcccctcatttccgttttctgctgtaacctgagaataatctgaatgtaaggtgatttacagctgctgtagattgattgctggtttccgatcacatcggtcgtcaatacaagtggcagcggatttcttggttgctaaaaaaaaaaaaa

SEQ ID NO: 49659 - DNA, 252 bp, Setaria italica
  Peptide Sequence Number=SeqID_115633
ctcctacttgctgaaagaagcttcctgcaagcggaaggacttcaaggaagagcatggtttaagcatctgctgtattcacctcctgaggactatgaaagcaagctatcgttcttccctgggatcgccgacgccatctcacggtcgggcaacctgagtgccgaagaacgcgaggtgtcaattcaacatgaagtgtggaaggtctcccgggcgattcaaagggctgcgagtgttcttagaggtgaattcagtcgg

SEQ ID NO: 49660 - DNA, 421 bp, Setaria italica
  Peptide Sequence Number=SeqID_115634
ccaacttcaactaccggatgaactacacgcagtggacgctggtggcgcagcacccaacctggacaacgtcaccgaggtcttcagcttccagtacaagccgctgctcccctacggcgccatcaacgacacgggcatgttctacggcctcaagttctacaacgacctgctcatggaggcagggcccttcggcaacgtccagtcggaggtgctcatgcgcaaggacgccaggaccttcacattcagccagggatgggcgttcccgcggaagatctacttcaacggcgacgagtgcgtgaacacgccgcgcaaggacggggcggcgctgctgcagtgcacgccgcacatgtgcccgatccgggtgcactggcacgtcaagctcaactacaaggactactggcgggccaagatcgccatcaccaac

SEQ ID NO: 49661 - DNA, 266 bp, Setaria italica
  Peptide Sequence Number=SeqID_115635
tgggccccgggcccccggcctacacctgcgggcccggcccaagatcgtcccctccaccgtctacttcacccccgacccgccgccgcgttcctgctggcgatgctcctggtggcatgatcgacgtaatcaggctgcagagatcttggcactttttgagtctccaattactattagacagacagcctgagaaagaaaatgatacatagaggcagcacaagtttttcctgtgattttccttctgtacacgtaatacagatttctttgtt

SEQ ID NO: 49662 - DNA, 215 bp, Setaria italica
  Peptide Sequence Number=SeqID_115636
cagcgcggtggacggcatcatgagcgccatggcatcggcggcggatcgctcccacgcggcgtcggcagctttcggcccggcgctccttcccggcggcgaggagaacgtggggcagttcatgtacctggaaggcatggagtacaacatcgcgacttcgccatggccgtcctcatccacgacccgcgcctccgtcacaccctcgacgggaagaccgt

SEQ ID NO: 49663 - DNA, 218 bp, Setaria italica
  Peptide Sequence Number=SeqID_115637
aagaaggaactgtggctcaaatgactctgagcaatacgatcatctgcttagtttggtgagtgcatcagcttaggccatgacaaactctatattgtagatccttgcagcaatgtttttagtgcgagattctgctatctgatgcaggtgtggggacactggaccatgggaacagttgtggagatcattgattcatccttgagaagccatcctagtgtaga

SEQ ID NO: 49664 - DNA, 143 bp, Setaria italica
  Peptide Sequence Number=SeqID_115638
ccctgtttcgcatacacacaaatataaatgaacactttttagtttatttggtgattaaatatcttcacttgtacagggggtcctccctaatggtcgagaaatagcagttaaaaggctttcccagagctctcggcagggaataa

SEQ ID NO: 49665 - DNA, 243 bp, Setaria italica
  Peptide Sequence Number=SeqID_115639
aaaggatccggtgaatcaagaagcggaggagaaagggttggaagaggtgggagaggggaagggacttgctgcttgaggagggtctcgatcttgcgggacttctgctcgatgcgggtgatgatggcctccaggttctcgtccgcgtcggggtacgccgctgacgaagccatcccgccggcgacgagtcggcgcctggctgcggcctgcgggtcgggttggcttctccgcactgctgcgtgctct

SEQ ID NO: 49666 - DNA, 343 bp, Setaria italica
  Peptide Sequence Number=SeqID_115640
ggaattactttatagttatttatttgtccgatgctggcagcaacatgtgatttctgataaaccatccatcacttacagcatagtccacaatgatgaattttctgcacgattatccatgaactcagtgattagattgcgtggtttggctgtcaaggctctgtcaaaggcttcgcccaattctgctaaagtgggtaaactagttggtgggatgatgaatgccagaacggatgagaaaaatgccatagagcattgtgctccaattggtgctctgcagatagtcagtgaggctaagctaagtaatgataaaatgcatggaaggaatccaatgcatacaataagaggt

SEQ ID NO: 49667 - DNA, 255 bp, Setaria italica
  Peptide Sequence Number=SeqID_115641
ccaatgtggccccggaagtccttcggaaaggtcgtgttagccagacgaaacgcgaggctgcctattttgttattgtcttacatgatttgagtacagtagtcattgctatccgtggaactgagacaccagaagatgttataactgatggcttgtgtaaggaatgttcccttacgatggatgacttggatgggttgatcaattctgatcagttgtcccctcaactgaagaataccgttctctcatcttttccacact

SEQ ID NO: 49668 - DNA, 246 bp, Setaria italica
  Peptide Sequence Number=SeqID_115642
cgcagtcctcgatcgtcctctccaacacgccccggcttcgatcggttcgtccaggaggcagaggctatagttgtctgccttggaagccgcagccatgcaggaagctctcctctctccggccaatgccggcagcctccgctcggcatttgagctcaagccgttcgccttcggggaccagcgcctcgcctcgccgcgctacctcaacctcgcctgcggcggcacgggtggcgacgacgctctgttccg

SEQ ID NO: 49669 - DNA, 432 bp, Setaria italica
  Peptide Sequence Number=SeqID_115643
agccaggcacgcaggtgcgcatgcaggtcatggaggccgaggacgcgcgccgcaccgagtgggccaacggcacctcaacaagctccacccaacatatggcgagcgctcgagattgactgggatgactcctcgccattctcactaaccaggagcagatatgtaaatgcttggcaagtccagtttgtttcatttcctcctcttctgaagaggctgaggatttctgacacaatggcacctctgtgctctggagatgtctcttccttggctgctccactgatcggaccggaaagccaggccatggctatactgttgggttcaccaattcctgctggcatgcagggagccaggcatgatgtaccaccctcttcatcaactctgggaatgctcacaactcagctgctgttcccccagcttagcagcgaccttcagatg

SEQ ID NO: 49670 - DNA, 241 bp, Setaria italica
  Peptide Sequence Number=SeqID_115644
catgcaggtcatggaggccgaggacgcgcgccgcaccgagtgggccaacggcaccctcaacaagctccacccaaacatatggcgagcgctcgaggtctgtatactatcctcctcctgaattctgatagatcagccatcagcagaagatcgagcaggctaccattagagcaatcttgaccaggttcctcgaaaaaaagagcaatcttgaccagtagtaactttcaagtcactcggtactttg

SEQ ID NO: 49671 - DNA, 425 bp, Setaria italica
  Peptide Sequence Number=SeqID_115645
cactgactaattaagcatcacaactgcgaagcactagctttcttgagggtttgccatctccagatcaactgaagcactatgttgtccatggatgccctcagcttccacctggttccatctgatatcaactatctgtaagtatgtcttcagtaaattacctcagaattttttttacccgttgataatctcttcttagtatacatagcccgtcattctcatatactacttcacggaagaataactggagtattggatgttgcattgatttaaagcaatgataatgaatcaaaatttgtatgctaatagatttatttcttgaagacttgattccttcagatttatacatgggccgcagtccatttgaaacatagttcaatctaatatcgtgctgttttcagatcatagctacttgtttacctaactta

SEQ ID NO: 49672 - DNA, 408 bp, Setaria italica
  Peptide Sequence Number=SeqID_115646
taattgcttaataatcattgaatcacttcatgcataagaacaaataatgattccaatagacattttaaacagggaaagacatacgaaattaaaagagacctgcttcgtctttttccccagccaaagaagatgatgtatgtgaacctttcaattggttaccatactgttcaatactttcaagaagatcagaatcaacttctccatcagcatctgctccaaaattctttcataatgtcctttgcaactctggttcctgaacctcaagccttgtttcaatgtgcagcagtattccacttgaatactcaaagtcaacctcaaaggcccacaactcattcagatccagcggaaggactctcattgcatgtacataaggtggaagttccccaaggctgaagtcagtaagtgtaa

SEQ ID NO: 49673 - DNA, 358 bp, Setaria italica
  misc_feature (113)..(113): n is a, c, g, or t
  Peptide Sequence Number=SeqID_115647
ctaattttattggtataccttttagcccttgaaaaatgaatttcacttctacagaagttccttcaagaaacgtacttaacctttaccattttcgtgagggcatactcgatgcngaaactgcaaggactgtgcaattcagaagctcaatggttgcctgggaaccatcaggaccagacaagcacagcgagtgtcccttgattttagccatcttctttgcagggaaaacctcggcaatattctttttgtctttcgtctctttgggacctccaactgataggcgctcattactaacttttggtattttttctggctccagtatccacagagaacccttcttctcgtagtaggggaacgggca

SEQ ID NO: 49674 - DNA, 154 bp, Setaria italica
  Peptide Sequence Number=SeqID_115648
aagttacagagatgagtggattgaaattgagcattatatctaacctgaatgcgtgctttgatagccttgtttatctcatcactcattttagcatcaaaaaacaatcgcgatgataggagattccaacaaagtgtaccttcatcagcaactcgat

SEQ ID NO: 49675 - DNA, 413 bp, Setaria italica
  misc_feature (68)..(68): n is a, c, g, or t
  misc_feature (193)..(193): n is a, c, g, or t
  Peptide Sequence Number=SeqID_115649
gcatgaccgatctcgaccagaggctattgtctgtttgggcttgaatgtcgtgagagagatctgcatgnggatgcctttggtaggtgccttaatccttttggatacctcaaactgtactcttgtctgcaatgctactggtccgacatcccttaagacgctggatttactgaactctactgcttttgttagttgngttttgtatgcgacgagttccgtgtgtccagcacagactcagacaagcagagggaacattggtcattttttgaaaaaaaaagttgtttgttttttgtattaatgactgatagactgaaaagcttgcaacatttgtgctactagaaattctaatcatgtcagtaatggagaggaataaacctttgaactgttttagttagtggttttctgccattattgcc

SEQ ID NO: 49676 - DNA, 260 bp, Setaria italica
  Peptide Sequence Number=SeqID_115650
tgggtttgcagtagggatgctaacagagtatgcaacaggctcagattttgtttcagcaaatgaagatcctcctctccaattttggaattgtggacttggattaatggtggacgcttggtgttgttgttgtataagtcttttaaatgaaatgtacctacttgatatggcatatagaaaattcaatcttgcacgttgtttaacttatataacttagtttcatttgtgctgccctgtgaatttggatgaacataaaagtctaa

SEQ ID NO: 49677 - DNA, 288 bp, Setaria italica
  misc_feature (218)..(218): n is a, c, g, or t
  Peptide Sequence Number=SeqID_115651
aaataactaagaaataaaggaacaagaagacaaactaatgacaaaaaaggataatgggcctgagactggtcgggctgggtataagaagcagccgcaacagcatcaaaggccaccatctgcttcagcttcgtctaggcaatctgaaaaggaaagttcttgtgatgatgtggaaattgatgcaattcttgaggaagaggaggctctcattgcagctcacnggaaggaaattgagaatacgatggagatcgtgcgtgaggagatgaaccttttggcagaagttgaccaacc

SEQ ID NO: 49678 - DNA, 402 bp, Setaria italica
  misc_feature (8)..(8): n is a, c, g, or t
  Peptide Sequence Number=SeqID_115652
gccaaccntaaaaactgtgtctgtttgtactgacaagcatttagagactgccatttctgttctcttgagcatgaatacacttgttgtaatgcaatgagcatttcacttcttagtcgtaagcaggataaaaacacagatgtaactgagcccgttggaccagagtccagtcaagtacctttctccgatatctagaccaacacaaaccaaaattgaagatagtttaccatcgattagcatcaagacttcaaggttttgcagtgaggaagctggcaatcgatgctaatatcaatgagcctgaatgaaatgttattggttcattcaggaaatagcttcatggtgtagttgaattgagcacaatgaagcttttacttaaagctcagataggttctatgaccgccttat

SEQ ID NO: 49679 - DNA, 209 bp, Setaria italica
  Peptide Sequence Number=SeqID_115653
cacgcagctgaactgaaccgatcgtgaggttggagtggaggcgaccactcgaaacggcgcaaccgcacaacattatcaatgcacgatgccacgcaccgacgacgatgacatgcccgttgcttcgaacaaacggtcatcatcatcagttcacgacccaactgcgcacggcatctgttgtcatgtggcttgcacacagacagacgggaaag

SEQ ID NO: 49680 - DNA, 429 bp, Setaria italica
  Peptide Sequence Number=SeqID_115654
cggcggcgaactgtcccgcttcctggattcgcatctccagaccatcaacgacaccttccaggtacgcccaaacctaccatgggtcttggcccagctccgatccgatccgatcccacgcggccacgcggaaacctcaccgcgccgcttgcacgcttgacgcttgttcgctctcgttttttcagatgatggcggaggcggttccggggagcttggagcggacggagtggtctgaggtcgttaagctcggcgaccaggtctccaggcaggccaccgtcgctggaatgctctggagtggtgacttgcctaatatagacaccttgaaggagaacattgttgcgtaatttcaacaatacctaacaaaggaattacctacttaggacttagaccaataaggaaagaacaaataaggtaacggtaagaactaaggaa

SEQ ID NO: 49681 - DNA, 277 bp, Setaria italica
  misc_feature (82)..(82): n is a, c, g, or t
  Peptide Sequence Number=SeqID_115655
aataaacccttccacggccgctgcgccgcctccttgtccccgtcggctcctcgccgctcgcgccgccctctttctttcccanccccgactcgcccaccgccaccgccgcctcgatgtcgaagaaaggaggacgagcgaagaaagcggcgggcggcggcgaactgtcccgcttcctggattcgcatctccagaccatcaacgacaccttccagatgatggcggaggcggttccggggagcttggagcggacggagtggtctgaggtcgttaagctcgg

SEQ ID NO: 49682 - DNA, 250 bp, Setaria italica
  Peptide Sequence Number=SeqID_115656
atcctcaaggtctccgatgtgcagacggccgggatcaaggcgagcaacagcttcgatgcgttccacatcgccgcgaagcaaggccatcttggtaaactgttatctgcctttccttgccgtcaacgtaaaacaacactctcacaaccagttttcttacccagagtagtcaatataaatgatgattgggtttatggaacggaattaaaaatttgggcagatggtgttgcagttagttgagactgtactgttg

SEQ ID NO: 49683 - DNA, 228 bp, Setaria italica
  Peptide Sequence Number=SeqID_115657
tggccatcctggcctacttcatcttcggcgagaacccatgcgtttcctgtataccttccgacgtataggttctcgccgaagatgaagtaggccaggatggccaccatgatcgtcgacagggggttgaacatggtgacgaagacggggcctttcttctcggtgcaccacagctggacgaagaccgtgaagccgttgcaggcgagtcccgagtacacgatgcaccagaac

SEQ ID NO: 49684 - DNA, 362 bp, Setaria italica
  Peptide Sequence Number=SeqID_115658
tggatgcaatatgattgtgacggtgacgaaaaggaagtaacgggcaatgtaataatatgatgtttgactagaatttatttgcagcctacaatgaatgctgggttctaagatgtcaaattcaatccgaccattcgcatcatcttacctctgtacttgcaacctgggcacctggcacattattttaagttcctgctacttttgctgtgatataagttttaaccgatccccgatgtggctgtaaaatatagaattgcatactgcaaagtctgttagaacttggttgttcaagtgaagggacaaactagaaaatagacaatttagtagacttttagacttagtaggacaaataggaaaaacctaga

SEQ ID NO: 49685 - DNA, 231 bp, Setaria italica
  Peptide Sequence Number=SeqID_115659
aagtttttgcaaagaccactggttcagcatttttacggtgcgcggtagtaatctcttcagaagttagtgttttgatgcgcgcttacgtatctgtagaacagatgggtgaagaagacgacgaagaggaactggactgccgcgtagatccacacgtatcttcttgccactgcaacgttactaatgatatcatggttctgaaatcagagcatctagctaatcgtgtgtgcgtgt

SEQ ID NO: 49686 - DNA, 226 bp, Setaria italica
  Peptide Sequence Number=SeqID_115660
gtcaatgaggagaagaggcccaggatacatgagaagggcagcgatatcgccagcgcagcaatgccgtcatggcccaccagtaattgttccaagaagcagaagtaggccaggatgctaatgattacgaggataggtgtcccatgccacaccctgaagattcaagatacgatcggtacaggtaacttgctaacaatctcgcagctctcgtcgtcagcatttgcgttct

SEQ ID NO: 49687 - DNA, 262 bp, Setaria italica
  misc_feature (226)..(226): n is a, c, g, or t
  Peptide Sequence Number=SeqID_115661
tttaagtaacttaaggtaaataaattaacaaataacgggaaactaaaggaacaaggaagaagagcaaaggggagaagccaccatgaagtgattaacatctgacaccctatcttgtttctggtggctgctctcaaatgaataagagcacaaaaaaagaggtgatttttgtgtacagtcatagatgatacatgtgacgtccaatcatccatctacagattggaccctnaatgcccagtggaactgtgaggagttccccttccag

SEQ ID NO: 49688 - DNA, 350 bp, Setaria italica
  Peptide Sequence Number=SeqID_115662
acttttattgggtgacacgcgaacaaggctcttttgattggtttaaaggagtcatgaatgagattgctgaactagatcaaaggaatataattgagatgcacaactatctcacaaagtgttttttgaggaaggggatgctcgatcagcactcatcacgatgttgcaagctcttaaccatgccaagaatggcgttgatatagtttcgggtaccaaagtaagttctagtactcttgcatatttgatgtagagtgcttagctttactatagtatccgatgacaaaaaatgtgaggcagaatacttgtaatgttcagtatgccacttataattttattttgctattggtccggac

SEQ ID NO: 49689 - DNA, 433 bp, Setaria italica
  Peptide Sequence Number=SeqID_115663
aacaaggctcttttgattggttaaaggagtcatgaatgagattgctgaactagatcaaaggaatataattgagatgcacaactatctcacaagtgttttgaggaaggggatgctcgatcagcactcatcacgatgttgcaagctcttaaccatgccaagaatggcgttgatatagtttcgggtaccaaaagtccggacacattttgcaaggccaaattttaagaaagtcctatctaagatagccttgttcgcgtgtcacccaataaaagtaagcatttgttgtcttcaaaaccctctttggttttgaggtaatcctcataagggtgtcaagatcaaccatgtgccttactgcgaccaattggtgggtaaagatcgcttgaagcttcttcctcttcctccactttgatgatgttattgagcaaatctttcaata

SEQ ID NO: 49690 - DNA, 371 bp, Setaria italica
  Peptide Sequence Number=SeqID_115664
ttctggtactctcatcatttgttcattattgtgtatctggcactcattgttcatggccagtggctgtacctcattcatgtctggtacagaaaaacgacatggatgtatctggcggtgcctgtttgcttgtatgtaggggagagggtgctgaggttcttcaggtctggcagttattctgtcaggctattgaaggtggccatatatcctggtaacgtgttgacattgcaaatgtccaagcctcctgctttccggtacaagagtgggcaatatatgtttgttcaatgtccagcagtgtcacccttttgagttggcattccgtttcttctaatttactttctagttcgttcctttggggttatttgttatttttt

SEQ ID NO: 49691 - DNA, 289 bp, Setaria italica
  misc_feature (227)..(227): n is a, c, g, or t
  Peptide Sequence Number=SeqID_115665
ggctcgcaagctgctgagaatatccgcttgagctccccgtgtccaatcaccagtgggtgggaaaagccggccttcttcgagcagatgagacaactaagaaagccttaccaaaacttttgattgaatggaccatatggatctcctgcacaaagactacagcaagtatgatgttttactacttgttggattagggattggtgccacaccttttatagcatattgaaagntttgctcaataacatcatcaaagtggaggaagaggaagaaggcttcaagcgatctttaccca

SEQ ID NO: 49692 - DNA, 220 bp, Setaria italica
  Peptide Sequence Number=SeqID_115666
ttcttagttatttcttaccgttatttaacttagttcttttcgttactttcgttcgttcctttccttagtattcttcttcgacatggtggataagaatgcagatggccatatcacggaggcagaggtgaaagagattatcatgttaagcgcttctgctaataaactgtcgagacttaaggagcaagccgaagagtatgcggccttgatcatggaggaactt

SEQ ID NO: 49693 - DNA, 251 bp, Setaria italica
  Peptide Sequence Number=SeqID_115667
acttgtctacttgatcataataatgagaaaatgttctggcctgacatgtctctttgcaggagtcgagatttatagagaagcttgttaaaaatgaacgccaaatagagggtcttccagacaattgcaacagggttatggtctggaatttcaacctggaacctcctcaactaaactaccccacaggctgggcactatataagtacctagaagccaacatgcctgtaatatagtttcttgctgctgcactatgt

SEQ ID NO: 49694 - DNA, 397 bp, Setaria italica
  misc_feature (397)..(397): n is a, c, g, or t
  Peptide Sequence Number=SeqID_115668
acaactactacctacccaagactaacaaaaacaaagaaggttactacctacgtaggagcaaggtcattgaaaggaaggtcactgggtcagaactctattcgagaaattgaaagctccaatgaagtaatacctcgtcaatcatcctcaaagagacgccatgattcacggagagagaaccctgttgagggacaagaaactaaggttgattcagaaggatcacttgttgctgctgatgacgtggcagataagctgagtacagaagatcactttgatgacaacgacgatgatggtaggcttgcattggttgatagtgttgaagtggatggtgatgatgctacctcagaaccacctagtgatacaaatgaggatgatatcttggatcactctaggtaaaaan

SEQ ID NO: 49695 - DNA, 273 bp, Setaria italica
  Peptide Sequence Number=SeqID_115669
gaacgcaacctccgccgaaaagatgccttcttacatcatttactctcattggttgatagtgttgaagtggatggtgatgatgctacctcagaaccacctagtgatacaaatgaggatgatatcttggatcactctggtaaaaagcagaaacctatatctatggttgagcaacctgctgggcacaatagcagtgaacctgatgaattgaggactagtgaaaatagtaaaggcaggtctggtagcagcaaagatcagcagaaacgccttagaaat

SEQ ID NO: 49696 - DNA, 338 bp, Setaria italica
  Peptide Sequence Number=SeqID_115670
ttgtaaccttgtattgtaatttgtaggtacttagttgaaaatagtaaaggcaggtctggtagcagcaaagatcagcagaaacgccttgaatctggtgaagaagttcttcaagataggcacccaaggagagtaaatgatgtaagaaggcatcatgatgcggaagaacgcaacctccgccgaaaagatgagttttctcgagatggcaaaccagatgtagaaagatcacatttgccctccagaggcagggaagatccccaccagacttatgcgaacagagatcgggttgacatacggagtagaagttatgatagggtaagagagactgaaatttggccgag

SEQ ID NO: 49697 - DNA, 367 bp, Setaria italica
  Peptide Sequence Number=SeqID_115671
gtaccaggcaaaaatgaaccttccaggagaggtcagggtgcggaagaaaatagcttgcagaataaagggcgttctgatgtacatccacgtgatgacaactcaaacagtgagaggagctccaggcaagaaaaacaaaacaataatcgtctctctggcagttctgatgctcgccacgcaggtagagataggcatagggagagcacaagaaagggcagaagttcggagcctggtgagcacgatctccacagatcaagcaaaaggagacgtgaagaccatgaaaagccaatacgacaaccgggaaaggttagaaaacaaaaagaaggacgaaatagaagacaaagaagaaacaagttaagtaaggttacaa

SEQ ID NO: 49698 - DNA, 382 bp, Setaria italica
  Peptide Sequence Number=SeqID_115672
ccaagagcgtaccaggcaaaatgaaccttccaggagaggtcagggtgcggaagaaaatagcttgcagaataaagggcgttctgatgtacatccacgtgatgacaactcaaacagtgagaggagctccaggcaagaaaaacaaaacaataatcgtctctctggcagttctgatgctcgccacgcaggtagagataggcatagggagagcacaagaaagggcagaagttcggagcctggtgagcacgatctccacagatcaagcaaaaggagacgtgaagaccatgaaagccatcgcaccgggaaggtatgaaattattgggaagtggctcctacatgcatagacattagaaatccatgctgtaatgcacctacttacaacaaa

SEQ ID NO: 49699 - DNA, 249 bp, Setaria italica
  Peptide Sequence Number=SeqID_115673
gacaaggtggaggatgggagttgggtcgaacaggtggtcggcgcgggagaggcgacgagaggatagaagatagtgttcacggcagacgaggtaaagaggaagatttgaggctggagtacaatgctgaagttggtgcaaggcataatagaaataaggcgaggcccactgataggaatgatagagatgaagatcttcattcgcggaagcgtttggatgatggtgactggaggggctctcgacaaagagagc

SEQ ID NO: 49700 - DNA, 245 bp, Setaria italica
  Peptide Sequence Number=SeqID_115674
actgattacagattattttgtattgtacaacaattggattttaatcagtatcggcattgcagctaaatcacgaccaagataatgaaaaggctgcattatacttctataactgacaaggcacaatcctggaggaaagctggaggcatcacctccaaaggtagaaccaccagttcctaaggtggtttcacctcctcagctacagaaatctcctgtcaacgttgatgcaacacccctaaagttgagaa

SEQ ID NO: 49701 - DNA, 320 bp, Setaria italica
  misc_feature (11)..(11): n is a, c, g, or t
  Peptide Sequence Number=SeqID_115675
acgctgatctnttcggtttccaagctcacaaggggctcatcgcttggagaaaaataccttgagttaatgaggaaaaatcgtaatctttgccagattggtgacgggagagtagatgaggcagtggatgcagtgccattgttgctagcacctgcagccgcggcccatttgctgggacagctgaactaatgttgtacagcccaggagtaccaaaccgaagttcccagcagataagtcctgattgttgctcacaacccttaagtaggacaaccaattactagtagactagactaggaagtacaaacccaagggttttagaataa

SEQ ID NO: 49702 - DNA, 523 bp, Setaria italica
  Peptide Sequence Number=SeqID_115676
aaacgtactcgcatccagtttgcaattctcgtgggtttacatctgtgggcggctctgacgtgtggatcgtccttctcttctcttgacaggaacgacgccgaggagaccggggtacacggggctcaactacgccggagttgggaacggccgcggcggcggcggcaacggatacggctacctcgggatggtctacgccaacgacgccgatcggggtcgcaggtcgcggtccatgctgtcgctgacctcgtcggttgtcaccctcgtggcgctcggatgcttgcgcttgttgtaacacacgatcgattcagaatttcagatgcttcattatgattcgattggaaaggtagtagggaaaggggaaggaaaaggtagcaccgtagcattagtagggagggggaggaggtagtcaggtaggcaacacagtgatgtccacagtcacaaccatgttaagttgcacatggctgggccgctggggaacattgcatggaatcaaatgtagccactgtagttctttacaaagggg

SEQ ID NO: 49703 - DNA, 285 bp, Setaria italica
  misc_feature (274)..(274): n is a, c, g, or t
  Peptide Sequence Number=SeqID_115677
agaaggaagaatactaacgaagaaggcctccagcaccgaccccaagtcatcggcgctcgtcgacacgctcacgcagaacgccggcgtcctcggcgaccccaggtacggtgttctttcctgtcctgccctcaccccgagctcttgtcccgcggcctcatttcttcgtgatggagttggtgacatttctcatgcgcgagtgagcccatggtggctgccgttgcacgccaggtttgtccacgccggcgccacatcggtgcaaaggcaccttttgggngccgcgtcagc

SEQ ID NO: 49704 - DNA, 333 bp, Setaria italica
  Peptide Sequence Number=SeqID_115678
ttttttcgttttttactttttagtttttgtttcttttgttgtcccacaatctgtgcaatgtagtctttaagcttcccactgatggattcatccaatgccctctcagcaagctcatacatcacaacatgaccttctggtccagcaagtttctccttcagcaagtacctttgctgcgcaaggagttcaagcgcctgcttattgttaccaagagcagggtgcttctcgtcattatcattcttcaaaacccaccgcttcaactgatgccagaggtcctcttcagggatttttgcccacccagcaagatgaataaggctaatgatagtgaaagcaaag

SEQ ID NO: 49705 - DNA, 266 bp, Setaria italica
  Peptide Sequence Number=SeqID_115679
aggcacacatctgctctcctttacaaaaatacgccctgtttcgacaggacttagcgaccctgcaagatgatatagcttcccatcctgaatagagtcagctcgtcctcgcccacaacgaacagggcagataccctgtgcaatgtagtctttaagcttcccactgatggattcatccaatgccctctcagcaagctcatacatcacaacatgaccttctggtcctagctaagttttcttccttttcttagttcttaagtttacctttt

SEQ ID NO: 49706 - DNA, 187 bp, Setaria italica
  Peptide Sequence Number=SeqID_115680
aacagtccttcaaatcctgctgcaaggaataggtacgtgaatttgtcgctggcgtccttctgatacactggttgagattagttcccttgaccagggattggagggcattcatgctgctcaggcgagtcgcaagtgcttggtccgcctgagcagcatgaatgtccttctgatacactggttgagatta

SEQ ID NO: 49707 - DNA, 263 bp, Setaria italica
  Peptide Sequence Number=SeqID_115681
gcgctcgtctccctcgtgctcctactcatgccgcgatcggtgcgaggacaacgagcaggacgccgcggtatcggtggaggcggtcggcgagcgtgtcctggcgaccgttgggcagcgcggagtagcgcgggcgcatcttggcgtcggtggggaggaggaggtccggtgaggagggcgtgcggtagcggatgcggccggggggcgtgggcgacggcttgaccgcctcctgctccgcgggatccagggctccgcgcctcggtgcg

SEQ ID NO: 49708 - DNA, 444 bp, Setaria italica
  Peptide Sequence Number=SeqID_115682
cactgcatcatccttgcattttgaataacttgcaccagaaggtgaagctgaggcttcaaatgtttcagagccatacttatattgcccttgatatccttctaacatacagttgctgtaaccattgccattgccagcttttaagacctctgctctagcagccagcaacccatagtgcaaatagctgtgaacataaagattatatgtggttcctttcaggtagagtttcttcacatatgtgtcttccccgtcagatggtttaggaaccttttctgcatccttctctgcgatcgcatatgccatttggacagatccaccaccaagatcgaccactccaactgtgtctgcataagtctttcccaaatttcccaacagataattgatagtaacccactcgtatgcaaccttacctagacgaataccaatacaaagaaaccgtaaacccaa

SEQ ID NO: 49709 - DNA, 162 bp, Setaria italica
  Peptide Sequence Number=SeqID_115683
atacagagcctgagctacattgaatggtggcaagccaaacatttctgagaatcagcagggaagtgaatgcacaagagcaatggttagataaggccagagcatcatacccactcgtatgcaccttcctgcgatccatcaagaaccgtaacccaatctgcttgg

SEQ ID NO: 49710 - DNA, 454 bp, Setaria italica
  Peptide Sequence Number=SeqID_115684
gatccaggtttctggcgtgagaacatcaacaattttgagaaaatgatttccaggtataccttgtcctttcttgaacttacatattcaataacaagatatgaaattgcctgtaaaagctatgaagttctttttttgtgtgtttgcatcgaatcacggcatctcactccaggcaatcttttgttccttaaaaagaggaaaaatgcgcacatagactacctaagtagttgaacatttaaattcaaattgaggtagtttggatggttcaatttggattttataagcacataagcatttagctctgaaattgtgatggaataacaccttcaaatttgcagattctacgtgtcctgatgacaattattgacacatcaagtgacaccactgctctcgcggtggcctgctacgacctctcacagttcctccagtaccacccatccggccgaatcgttgtggc

SEQ ID NO: 49711 - DNA, 482 bp, Setaria italica
  Peptide Sequence Number=SeqID_115685
actagaataataaataaagtagacaacgaacctaagcttcagaatggcatgcttccaaatggagactcttcgaattcgaagagcaagcttacttcaacacatgatgtgttgagaggtttggttgattggttctgttctcagctgaggaatcctacccacccaagctgttctattcctactactatccattgcctctcttctttgctaagagaaccatatgtcaggacattatttgttcaagctgatggcatcaagctgctcattcctttaatatccccagcttcaacacaacagtcaattcagctcctttatgaatcttgcctctgcatctggcttttatccttttatgatgcagcagttgattattttatccactacaagggttatgccaagacttgtagaggttgtcaaaggctctactaaattgttgatgttctctacgccagaaacctggatcttgtgcattggagaccaatcaaggt

SEQ ID NO: 49712 - DNA, 370 bp, Setaria italica
  Peptide Sequence Number=SeqID_115686
ttcgttagttaacttaccgttaagtttgttaggttaaaaacgtctacttgtcttctgcatccagaggctattccttggcgctaagtatgccagcttcctgcaggcttgagagagaccgagtttttgtatttagatccagagaaccccccactggccatttttcagaatggccaaaccattattgagaaagaccaaattcttgtccagtatatcctattgttctttgatttccggaaccgatgtataataaataagccataccctgctcgatgtaataaagtgtccgtgggcttgttgattctttcgttcctcgaacagttttctacgaagtgaaaatacctgatttatgtaaattgttacctgtaattca

SEQ ID NO: 49713 - DNA, 232 bp, Setaria italica
  misc_feature (180)..(180): n is a, c, g, or t
  misc_feature (214)..(214): n is a, c, g, or t
  Peptide Sequence Number=SeqID_115687
gctcccatggaatgtcccgcttcagaacctgctcggtggtgagctcggcgctatgaccacaaaccagagagccagcgagctcctttgcttgaggaggatgggccagcatatgttcgagttttcctgaatatactggggagtatctctaaggaagagactgttgaatatgtgcttgccctnattgatgagatgcttgcaaacaaatcctaaacgngcagcactgttctatgaa

SEQ ID NO: 49714 - DNA, 230 bp, Setaria italica
  Peptide Sequence Number=SeqID_115688
ctgatttatgtaaattgttacctgtaattcaggtattttactacttcgttagaaactgttcgaggaacgaagaatcaacaagcccacggacacttttctacgaagtgaaatacctgatttatgtaattgttaaaaacctgtaattcagcaaatttgacttgtggtgcacatggtttgctgttacttctttgtaattattccaaagatatttatgccaatttattctcctg

SEQ ID NO: 49715 - DNA, 269 bp, Setaria italica
  Peptide Sequence Number=SeqID_115689
ttagtttaggacaaatttctagttaaatcagtgattgtagaactaatttgcattcttcttttcataaaaaaaatgttttgttgtatatttctcatttcaggtattcgacatatcatcactccaaatattttctcctcaagaacttgattatctgatttgtggtcgccgtgaactttgggaggtattgctcgtgtcctatctatttttccactgtagttatttgacttgttctgaacaatggcacatcattcagaccggaaatactgctt

SEQ ID NO: 49716 - DNA, 397 bp, Setaria italica
  Peptide Sequence Number=SeqID_115690
taacttaggtagtctaattagtagttcttgtctagtattgtacgtatttgcccagtgtcatgacttgtgctaactatcttaaactgccaccttactcaaccaaggctatcatgttaaagaaactgctttatgcgatcaatgaaggccaagggtcatttgatctttcgtaaggctcaagactaacatagatattggtctcccttgacatttgcgacattgctagccagagttagtttcaacctgtcatgtaagacataggttaaagtcagctcacccccagagtccgctgaggtttcgagcccgcatctttgggtgtgcatgtctatattctctgatcacatctggttgtatattcctgtggatctttatagtgaataataataaattcttttgttat

SEQ ID NO: 49717 - DNA, 330 bp, Setaria italica
  Peptide Sequence Number=SeqID_115691
gtgttgttattatcacccggatgttgctgaagacgatgcagtgcacgagataacccaaaagctgtggaatagaaattcgggttggtagattgcaacgccagaaagtccgtgtttctcgtaaccgtatcttggattcagcagctaaagttatggagatgttctccaatcagaaggctgttctagaagttgaatacttcggtgaagttggaactggacttggtccaacttcagagttttatactctcttaagccatgacctgcaaagggttgacttaggattatggagatctcactctacaggcaattctggcacgcaaattgatgggaatg

SEQ ID NO: 49718 - DNA, 273 bp, Setaria italica
  Peptide Sequence Number=SeqID_115692
ctgattacgcagtggagaaagggcctgtgggaggttcagcttcagcgccaaaattttcccagtcagattcttgcaaaccattatctagaaaacagtgtacttccctccttgatagtattttgcaaggagagcttccttgtgatttagagaaatcaaaccaaacctaccaatctccttttcattgccgtaaactctggcgcaatcgatgtgtcggtaccccgccttgacggcggcgtagacggcgttgccgacgacgccggggtcggactgcca

SEQ ID NO: 49719 - DNA, 358 bp, Setaria italica
  Peptide Sequence Number=SeqID_115693
gacgaacaattgctagccagaaagttaaagtttacaaacctagtacaatagtaaagaacaataaggttaaaagtcagctcacccccagagtccgctgaggtttcgagcccgcatctttgggtgtgcatgtctatattctctgatcacatctggttgtatattcctgtggatctttatagtgaataataataaattctttttgttataaccaaactccttggaatctgtttctaagctgtaatacttggatttgcgaagctctcgtgagctcatagagtgcatgatagctggttgttacagcgaatgattatttggaaggtaccttctcaacaatttagctggattaatggtgcaggcc

SEQ ID NO: 49720 - DNA, 342 bp, Setaria italica
  Peptide Sequence Number=SeqID_115694
caaatattttctcctcaagaacttgattatctgatttgtggtcgccgtgaactttgggagccggaaatactgcttgaacatataaattcgaccacggttatacctctaagagtcctgcaattgtcaatgtaagtttccctgcttgcttctttgcaattcatttaagttgtgcaagtttatctggatgcttctgctgtggtgtcttgcagtttcttgagatcatggcagaatttactcctgagcagcaacattctttctgccaatttgtgactggtgctcctcggcttccacctggtggtttggctgccctaaatcctaaattaactattgttaggaagcact

SEQ ID NO: 49721 - DNA, 255 bp, Setaria italica
  Peptide Sequence Number=SeqID_115695
cctcacgcacaatgacatcaagaccctgcaagacctctctaggcacaggtaactctgagagttgacttaatggcagctgtttcttcaaatctacagatacaatgtaggtcttggaccgaactctcacacgaaataaaccttctggaagttcagcagaagttgtaattagtattttcgttccgtcctattctattaagtctaactactattgtacgtaaagtacgttacgtaaaagtacttaggttagttaaccta

SEQ ID NO: 49722 - DNA, 304 bp, Setaria italica
  Peptide Sequence Number=SeqID_115696
cggacaaggacaaggccgaggccgccaagagggccgccgccgccaaaggggagaagaagaagggtgaggaggaccatccaagctaatcactggatcagatcgatgctcgtgtgatggcgtggtgtgggtacagtgactacaactgatgctacatgcagatagaactactactactcgtactgtgtcgtgctgtgcactgtggagagaagcttgtctgaaactctgcttgtggtgtgtaaataccccctaacccaatacaacttaacttagttagtaaacttactactactagaaaagaacggaa

SEQ ID NO: 49723 - DNA, 321 bp, Setaria italica
  misc_feature (88)..(88): n is a, c, g, or t
  misc_feature (304)..(304): n is a, c, g, or t
  misc_feature (312)..(312): n is a, c, g, or t
  misc_feature (320)..(320): n is a, c, g, or t
  Peptide Sequence Number=SeqID_115697
tctcaaatagtccagcaagtcattttttcctctccaacaaactgttgcatctgtagggcagaattctttctcctgaggtcatgtaacncctttttcatggcatccaaacgagattgcatctgaataatgtattcttctgcttgaggtgttaagtcaccaagctcttctaccatattctcatatgatgattcttcatcactttttccagggtcctggggcatgtcctcttctgataatctaaaaatagtgacaggtttacccaaattagaatagttaatagaatagaattagtacttactagtanaataatanaattttana

SEQ ID NO: 49724 - DNA, 240 bp, Setaria italica
  Peptide Sequence Number=SeqID_115698
catggccaaatgattgtacagcctaaagttgagctgtgttggtaatggcagcagaagaagcttctttgtggttatcaaactgaagtcttttcatttgacaatctcgaccatgaaaatcagccatgaaaaccattgccatagacaggactccatagggaaaggctgcacctaagctgaggaggacagttccacatccgaattgtgccagcatttccaagtcaggtaactgccctggcatcg

SEQ ID NO: 49725 - DNA, 488 bp, Setaria italica
  Peptide Sequence Number=SeqID_115699
tgttgtcttcccttgttatttaggggtcccttcctttaggtactaggggtaacgtctagttgttaaccaccagcttccaccattttatcagccagggattgccattctctccggcggcggtggggaatgtcagtgaacgtggcattctcaaacaacatgatcatcaccattagcgaaagaacctacatcactggatattcgaagaagctgcgccagctctaaccggtactccagaccccggatgtagtgacccagcagcatgcaccagaagagcagacgtgcaagataatcacggggtacagatattagaggctgaaacgggagtgaagcattctcaacaagctccgcacagtcatcatcctcaccccctaggtttagggcaccccccagaacgtgttctctagtggcggaggggcctttgagtgtatcttgggggaaagagtagcaagtaaaccgtgaaccacagaatgaattgcttcttgcacgcc

SEQ ID NO: 49726 - DNA, 338 bp, Setaria italica
  Peptide Sequence Number=SeqID_115700
ggttgataggattgtacacgtcaacgaaacgagagttgccaattgtgaagcttgaacggccacccatgacaaaagcttcccttcaaaactgcacccaaagcagccccaccttggcctgcgcaggctctcaatcagtgtccatctattctgttctgggtcataaacttcgacactagacaaattgtcaccatttggaccaaatccaccagcaacatatatcacaccattgacctctgcacaggcgaagtcacatcgagccacattcatcttagcaagcaaagtccacctgaggaatgaaaagctctaaatgaataagcctaattatttgaaatgatgtt

SEQ ID NO: 49727 - DNA, 270 bp, Setaria italica
  Peptide Sequence Number=SeqID_115701
cgtttgcgtctgccctgaacactccaaaatctcccagtgcgacccctttgtgccagcttctggagttaatacatacacccactcctcaagtttcccaacctccttccttacagctattagttccttgctctcaagaaatgacatccaccgcttggaaactgcgcccataacaggaaaatgactacgaggaacaagggcaagacattattcttttgtcctaagttctttctaggtctaagcctggtattagatcacagtatgaatcacgtt

SEQ ID NO: 49728 - DNA, 253 bp, Setaria italica
  Peptide Sequence Number=SeqID_115702
gagtcagggtaactaaaatttccttgaccacatttgcaattttcaaactcacatggaatatcaccacacttaaatagcacactcacatcaattcatcaattgccacaaataaatccattttacagatgtctaaaatctgtggacataggaagcacaggagaggatgctcgcggctcacctcggcggacggcttgacggaggtcggggtcaggctgcgccgtcgcctcctactcccagcagcgtcggtcgccga

SEQ ID NO: 49729 - DNA, 252 bp, Setaria italica
  Peptide Sequence Number=SeqID_115703
ccacccggccatctgggcgagcgacatgccccgatgagtaggagtgcgcggcggccgctgcaaaacccggcgctcgccctcctcccgtgtaagaactactattatatgcagacaaataacaacggatatccatgaatgtacatatccttaatacttcactttcaattgttgactttgcataagatagatctgaaggattgtgaagattaggtacaaacatagctgtgacgtgctcctttgttggaggaacct

SEQ ID NO: 49730 - DNA, 309 bp, Setaria italica
  Peptide Sequence Number=SeqID_115704
cgtcacgcatggaattggaaaaagggcactgaactttttggcaccaaggtttcaggtgctatcttccatcgtatgatatctaataccacagtgccgttctccaacatgattggtccagttgaaccagtagagttttatgggcaccgggttgtctacattgcacctagcgtatatgggcacccgtcggcacttactatcctttggcaaagctacgccgacaccatcagggttgtgcttgcaagtaggaaataagaaactaacaaaacaaaaatttaaaccaaaagaaaaattaaaagtaaacaaaataaa

SEQ ID NO: 49731 - DNA, 263 bp, Setaria italica
  misc_feature (253)..(253): n is a, c, g, or t
  Peptide Sequence Number=SeqID_115705
cgatctcttctttttggtgaaccaatgttccaaagaaatatattgatcttagggtaggaggctgtattttaccaagttgactctagtctccaattgtagttttatttgcgtgtaaaatccgtgatcatgaaagaaataattctttacacatagcttgttgcaggtttcaggtgctatcttccatcgtatgatatctaataccacagtgccgttctccaacatgattggtccagttgaaccagtagagttttangggcaccggg

SEQ ID NO: 49732 - DNA, 250 bp, Setaria italica
  Peptide Sequence Number=SeqID_115706
attagggcaagtgagtgagagaataaacatgtaacgaagcagaataaagtatagtgtatatgctaagtagatgacaagaaggatacggtgtacatgatgctttattctgcttcgttacatgtttattagggcaagtgagtgagagaataaaaataagcaatgctgttgattttccgtgtagaaaagaagacaagcccttaacctctttcccaccttgtcttcttttctacacggaaaatcaacagcattg

SEQ ID NO: 49733 - DNA, 248 bp, Setaria italica
  Peptide Sequence Number=SeqID_115707
accgtacagattcatcatactccgtatactatactagcatcatgtacggtgatgggttgattgtacacgaggcatgattgggatggcagtaggcgctggtggtagagtggtaggtaattaagggcatgattgggatggcagtaggcgctggtggtagagtggtaggtaattaagggcatgctaatcagtagtgatgctcttgagggggtaatcgcattcacatgatggtgcaggcgtaggaggggtcg

SEQ ID NO: 49734 - DNA, 249 bp, Setaria italica
  Peptide Sequence Number=SeqID_115708
gaagtctccaaatgatcttgccatggccaatcctggcgagttgaatgtcggaagccacacacgtgcaacattgggctcatctggaagagaaaataccctaccccttcgttgcttgattctttctgcttcacctgtaaatgattcaattggctttgtttcagacaatagctagaaatcatagcaccaaaattacttcatgctaacaaaggaaaataatagaagggaacagccatttgatgtgctctttca

SEQ ID NO: 49735 - DNA, 417 bp, Setaria italica
  Peptide Sequence Number=SeqID_115709
tacaccaaggcacactattgcagttctcatcatagcaatgctaacagaaagatgaagctgtaagtaaatatcgtaccaagcatcctccgcaggaatagacaggcaaaattggagccaacaccaattgtaagacggctcctcgtttcctgtggcaagtgggtcttaaacgctcctttccaacccaatcgccgctttatcggcatgaacaagaaccatagctgccaactagatgggttgcgaagcaatagggtcatgaaggtagacacgcagaccacaatggcgatccgctcgctgaccgggctcaaaacaacataggcacccaatgcgaatcctataaccatacttctcgtcgcctgctccattcgtaaatttactagtagtaggtaactattgttagtattgcacgaagcagcggat

SEQ ID NO: 49736 - DNA, 222 bp, Setaria italica
  Peptide Sequence Number=SeqID_115710
gcaggaatagacaggcaaaattggagccaacaccaattgtaagacggctcctcgtttcctgtggcaagtgggtcttaaacgctcctttccaacccaatcgccgctttatcggcatgaacaagaaccatagctgccaactagatgggttgcgaagcaatagggtgccttggtgtaccattcccgtttctttaggcgagcactcgtgcaacttgaagaacttgt

SEQ ID NO: 49737 - DNA, 240 bp, Setaria italica
  Peptide Sequence Number=SeqID_115711
acacggacagacacgtcaaagcagtcagttgttaattagcaccattaagattttcgcggtcgtgcggatatacctatgtagtctgtgcaagtagtaaaactagatcatcattaataagatttagagagcgtgtgaactgtgaagcaaagagaagttccgctcaaagagacgaaagaagcagcggaagtcgaagcagggactcagtaagtacattgagactgcttcaacaattcagcatca

SEQ ID NO: 49738 - DNA, 237 bp, Setaria italica
  Peptide Sequence Number=SeqID_115712
ctaattctaacagtattttcttgctttcttgattattctgttctgcatggttcatctagtcacatctacatgttagcatggatttttctagaagctgatctcagttcaagttttgatggactatctttgtttgaaacttgagcagaccatatgcatgatcggagttgtcgaaagatacaaggagctcgcaaagttcaacctaaggcagctgacctcaccggagtcggagaagtagct

SEQ ID NO: 49739 - DNA, 225 bp, Setaria italica
  misc_feature (224)..(224): n is a, c, g, or t
  Peptide Sequence Number=SeqID_115713
gtgtgcatttcatttattcagttctattggaaatcttactgacaacttaagattaaaaagcaacagaaaccgactaaactttatatatgttgtttctattgtactttgatttgtgacattatatgctaagttgtatgatgaaagcttttgtattatgaacagaggctctttgcaagccttgagtcaggctgcaacggttgcgtattcattcaaatgcataaagng

SEQ ID NO: 49740 - DNA, 350 bp, Setaria italica
  misc_feature (344)..(344): n is a, c, g, or t
  misc_feature (348)..(348): n is a, c, g, or t
  Peptide Sequence Number=SeqID_115714
caacaggaggtacttgacagctctgttcctgccagtaaggatgatgaggaacaagcaggcactgctgaagaaccaagtagaaaagaagcaacgtgtggaagaccctccagtttctgaacagacagaacaaaaggaggctgctgatgaaacaaaggagtccactgatgaaccaaaggagtccactgatgaaccaaaggagcccactgatgaaccaaaagagcccactgataaaccaaaagagtccggtgaaagaaacattgatgatttaattgatgaggacttgtaaagtaaccttaggtagtactaggtaaaagtatttctttacggttcttttctttattttntttntt

SEQ ID NO: 49741 - DNA, 238 bp, Setaria italica
  Peptide Sequence Number=SeqID_115715
aaagtttaagacaagtgttatatgaagcaaggtaacaaaataacaaggaaattagaataagaaatagaaaattaataaatgcagtagcgaaatctgtaccacaacctcacaaagttgacctgaaaaaccctgacaaaactattattgtccagattgcaaagaccatatgcatgatcggagttgtcgaaagatacaaggagctcgcaaagttcaacctaaggcagctgacctcaccgga

SEQ ID NO: 49742 - DNA, 269 bp, Setaria italica
  Peptide Sequence Number=SeqID_115716
ttcggggttaaatttctttgtctttgttccgttgtctcgagataggagcctgcccgtcaggctgaaacttgttgttggagaccctgccgacgtgccaaatctggcagaagaagagcgcgcccttgcggtggacggcatcgacgatgggcttccacgcctcgacctgctcctgcgtccagatgccgggcgtttccgggtagccctgcgcggtggcggacacccccgtggcctcggcgatgacgaggccgcccttggtggcgcgctgcgag

SEQ ID NO: 49743 - DNA, 227 bp, Setaria italica
  Peptide Sequence Number=SeqID_115717
atgattcatgcatcattagtgtactaatgatgaagaatagtggaaatcaataataaactaatgatgcatgaatcatgcacattattagccttgttcaaatcggtgaaatccatgattaagcttgagtagcagccttcctgttgctatcctcttcaagaaaagggtagtctgtgtatccaacgacagggtcctgtgtgtagaacgtcgagcggtcatacttgtttagc

SEQ ID NO: 49744 - DNA, 265 bp, Setaria italica
  Peptide Sequence Number=SeqID_115718
gccatgttctgaaaaatctagtgtttctagaagaaacaagatagagccattagtactgacagaacaaaaaaaaagaaaggggtggaatatctggtgtgctccccttgctttcttgattagaatgtaaaggctgcctcctatgtatctaggcatctagtacatgattaggaatatctagtgtgctcaggggcggacccagtgtaggaataactgttgcaaaaaaagatcgaatttagtaggtaaaatcatggtcagatccgaataa

SEQ ID NO: 49745 - DNA, 224 bp, Setaria italica
  misc_feature (9)..(9): n is a, c, g, or t
  Peptide Sequence Number=SeqID_115719
ttttttttntttttttttttttttggtacactaaggtacgctatagataagataattacactattacacaggtacatctgtgacacccttctctaaccctcttcttagacaaaagtactgaaaaaggagcaccgcatctcggagagaacgttcagggagagcgctaccacaagcctaccacgacgcctcaacactcggcacacaggggactcgtctcatctcat

SEQ ID NO: 49746 - DNA, 460 bp, Setaria italica
  Peptide Sequence Number=SeqID_115720
ttgtttcttatttaaagggtttctttgttagttaagttatttctattcttcctaacttgcactgaagatcaccctgagatcgatcagagagggtcggaaacagagcttgcctgaatgtttgaccaaggaattcagacttacaatgaacattctgcgacaggttgttaatggggatgtttatgagggcattagagctcttagcatcgataaagacaatgcccctaagtggaatcctgctacccttgaggaggtgaagaacgaggacattgaccgtgtgttccagccgttcagtccagagcacgagctccaggtcccatctgacgattccgacaggtggagcgggtaaatatgagaacacggtctatgccaaagcttctcagtaactgcatacaagatttagattccaacctatgcttgtccagtgcttgtgttctatcggtgtaacaatatattaacagtt

SEQ ID NO: 49747 - DNA, 180 bp, Setaria italica
  misc_feature (24)..(24): n is a, c, g, or t
  Peptide Sequence Number=SeqID_115721
tataagttacttattctacgtacnggaaaaaaactgacattggtatctcaatctttgataggctttcaactatcaacaaatgtttctccgccgagactgttgaggacatcataaaagcatttgaatcagaagcgagcatagatggaaaccaatggatagctccagtcataaagggtctga

SEQ ID NO: 49748 - DNA, 458 bp, Setaria italica
  Peptide Sequence Number=SeqID_115722
ttgtgctttccggtaaatgaaattccccatgtattacatatcagggcaacaatggatgtttacggacttattggccacaaaacgatgaaataaatttctgcatttgttatagcttccattctagtcctttctctatgctttgtttaactgacctgttggtgcatgaaaactgttagattcagggtttcctttaactttggtaacttttatttgggcattgatgattttttaatatttttttcctgaactgtttatctagttctggaacctgatcaagctattttcgactccctctaccactcctggcatttttggaggcggccttttgggttatgtgatctatgattgcacacattactacttgcatcatggccagccatcatcagatcctgcaaaacatctcaaggttcttacttcattctgaattctgaagcttatccaaccactccgtctcatgg

SEQ ID NO: 49749 - DNA, 270 bp, Setaria italica
  Peptide Sequence Number=SeqID_115723
ggcccatcttaacgctccaatgctccatactaaaagttgttttgtgcagtcaggaactcagaagaattggttcataccgttgtaatggcaaacataagcagtgacaagaattggcactgctgtaaaaaagttcccaaacagatgccaaatcaggaacagcgggaaacaacttgggcattggaatttgtccacctatcaacttgacaatggcaattcctgcagtaataataacgaatacaacggccaaagcaacagatattgtggaggtat

SEQ ID NO: 49750 - DNA, 353 bp, Setaria italica
  Peptide Sequence Number=SeqID_115724
attagcttcatttcttgacagcatcatttagcactgaactgtatggaatcccaagatttgaatcaaagtttgctagcacatcagacagcgtagattcaccaaagaggagatatccaaagaaacttgttgtgatgtagatagttgagcatagtgtcaatgatgtgtgcactattggcttgatctgcgaggaatcctttagctcattatgaattgggtgaactgcaaaaagtaatcagatcttctagtcagctgagaacccaacgttttcttgggagttagttccatagaaggcatcagctaaaaagtgtgagcaactaagttgcagggacagctctcaaaagtgttcattattg

SEQ ID NO: 49751 - DNA, 200 bp, Setaria italica
  Peptide Sequence Number=SeqID_115725
ttgggtgaacgttgtaatgggcaaaccataagcagtgacaagaattggcactgctgtaaaaagttcccaaacagatgccaaatcaggaacagcgggaaacaacttgggcattggaatttgtccacctatcaacttgacaatggcaattccaatacgcttcaagcatgctagcggagtaaaaacacaaagggtcgtgacca

SEQ ID NO: 49752 - DNA, 227 bp, Setaria italica
  misc_feature (4)..(4): n is a, c, g, or t
  misc_feature (105)..(105): n is a, c, g, or t
  Peptide Sequence Number=SeqID_115726
acangtttgtcatttcttacatcagttcctagtgtgggaggatggcagttttagacagatcatccactgatacaatacagtgcttgtgtgcaccctatattttcncactatgcagtatctcattaggtgttgaaatatgcgttatgacaggctaagaaggatacagtggacaaggtttgtgaaattgtgaagaagcagctcgctgttccagagggcactgaagttta

SEQ ID NO: 49753 - DNA, 154 bp, Setaria italica
  Peptide Sequence Number=SeqID_115727
cattcagtgcccaagagatttgcattgcccttcctcgcagcagtcaacacgagctcgctctctttctctgctgcgaggaagggcaatgcattcctccgcctgcattcagtgcccaagagatttgcttcttcacaatttcacaaacctttgttct

SEQ ID NO: 49754 - DNA, 118 bp, Setaria italica
  misc_feature (98)..(98): n is a, c, g, or t
  misc_feature (101)..(101): n is a, c, g, or t
  Peptide Sequence Number=SeqID_115728
gccccgatggcctccatcgccggatccgccctctccttcgccaggcccgtcaaggtgtatggtggtttgcgcgggtgatctggtcatctggggccggnggngagaacaaccccttacc

SEQ ID NO: 49755 - DNA, 457 bp, Setaria italica
  Peptide Sequence Number=SeqID_115729
tacgtctattggttgttaccttcgttcgtacttattgtctttgtctttccgttgtcccccctattaactaccgtataccctccgcagcttttgttgagcatgcccgccaagtgacccatttcagcgagcgtagtgtccgtttcatgacacgccttctcgagagatcgggccttggtgaagagacaagcttgcctcaaatggccagctacctcgaagcttacaagtactgcacattggagacagctcgtgaggaggctgagcttgtcgtcttctcggccatcgatgatctatttgccaagacaagcatcgatccaatcaccattgacatggttgtcgtaaactgcagcggatttagcccaacaccatctatgccagatatgattgtaaacaagtacaagatgcgcagcgacatccggagcatccatctatctggaatgggtgtagtgcagggttaatc

SEQ ID NO: 49756 - DNA, 264 bp, Setaria italica
  Peptide Sequence Number=SeqID_115730
ttaaagtaaaaggtaaaaggtaaacttaaagtaaaagtaactttaagttaacgttacttactacggaccaatacgatagatctatttgccaagacaagcatcgatccaatcaccattgacattgttgtcgtaaactgcagcggatttagcccaacaccatctatgccagatatgattgtaaacaagtacaagatgcgcagcgacatccggagcatccatctatctggaatggggtgtagtgcagggttaatctcagtagagctc

SEQ ID NO: 49757 - DNA, 409 bp, Setaria italica
  Peptide Sequence Number=SeqID_115731
tagtaatagtaaactagtagtactgactcattttttccgggtacagttatatggatgtcaataatagtgcctccttttttacccttgtaattgcaggtagacatctatccactgaaaatttatttgactgaagcaatgtacagaatgatgtggggatatttcttccctggagacgaacagcaaccgcaaaagcgacaggagcttttcaaggtctccactacagcaggaacaagacgaaagaaaagtacttctgttgcggagacaaacagtcccaataaccagtcatcaaaagaaaccacatttacacagaagcctgaacttcgaaggacatcttcatttgacagatcatgggagaaacagttgctgagtctgtagctaatgaacttgtttcacaaatccaggttcagtc

SEQ ID NO: 49758 - DNA, 464 bp, Setaria italica
  Peptide Sequence Number=SeqID_115732
cgtttgtatgcttgggtatcagattcacattagcctgcacactcatattgaggaccctttccattgaaaatccagtgccatcggcagccagttcagagaaacggtttgtcttcagtatcctttcaatggtcttgataccatagacacaacgatcgagatcctgtggatgactgaagtagttgaaggtaactgctgggttgttccggacatcagtgtctgtgaggactagatggcccgtggacagaggaccatcaatcttctcgaggataaaaccgccatggaatacctctttgggtaggtttagtttgttatgagcatatttctgggctgcttccagggttcttgcttggaggaattgtagacagctgtccaatctgtatttgcagggatgcattgtggcagtgcattagattcgtgagaccaaagagataacaatttcacataataatcaaaggtacggtgtc

SEQ ID NO: 49759 - DNA, 151 bp, Setaria italica
  Peptide Sequence Number=SeqID_115733
aaacctcttccacgtgttgaggccaagattattatggaggatgggattgaaactgtaccttcttttcggataccatgcaatggattagacagtgccatgacaaactcagtcatgccataacgttccaaaagacgatggcctgtcacttcct

SEQ ID NO: 49760 - DNA, 310 bp, Setaria italica
  Peptide Sequence Number=SeqID_115734
atatcctgaaggaaaaatacaataatatactatgaacggaggaaaagttttttggaaaattattgttctatgataaggaaaaggatatctataaactctgagtctaagctcctaataatttcttcagctccttcttgttaacctttcccatggcattccgagggagagaatcccacaagtacaatcttgttggaatcttgtatggagcaagcttatctttcgaccaacttgtcaatgcttccaaggttagtgctggcggagcaagactcgaagccagcacttaacctttgttctaattgtctttacctaa

SEQ ID NO: 49761 - DNA, 241 bp, Setaria italica
  Peptide Sequence Number=SeqID_115735
tgtcatgctctagcagtactgcctcaatttctagtgctgacaacttataaccaccaactttcataatgtcagcatttgtgcgtcctaaaattatgaagtatccttcctcatcaaaagttactgtatcacctgtcttgaagaatccaccatcaatgaaggattctgccgtaacctctggcctcttcctcctcctccccagcataccacaccagacagaacacccatacgttcatggaggtgg

SEQ ID NO: 49762 - DNA, 361 bp, Setaria italica
  Peptide Sequence Number=SeqID_115736
aaaagggatggacttctaatgcagagctcaccaactcccagttgtagtttcaatcccatcctccataataatcttggcctcaacacgtggaagaggtttaccaactgtaccttcttttcggataccatgcaatggattagacagtgccatgacaaactcagtcatgccataacgttccaaaagacgatggcctgtcacttcctcccaccgcttcataagtggggaaggaagagctgatgatccacacatcattaacctcagctgctttgcagaataagaagaggcagattgttgatcaggatccattacttattcgttaccctttgtctagttagtccgtcgttattactattggtttggt

SEQ ID NO: 49763 - DNA, 193 bp, Setaria italica
  Peptide Sequence Number=SeqID_115737
taacaaaggaaagaacaaataacgtagaatagaagttagaaagggacaactagtaagtaccttgttttccaaccagccgaggaaggtggtggtggggctcagaaaatgatagaagctggagcagtggaaaatattgatgccatttttgggattcacatagctgactctattcctattggtgtgctggcatcca

SEQ ID NO: 49764 - DNA, 460 bp, Setaria italica
  Peptide Sequence Number=SeqID_115738
caggccaattcatcatacttctgttccatctcaattcacgaaagctcaatttgtctttgcacatgttgacaacctataaaccgactgctcctactggataaatagtcgagatcctcctacttgaatggtttcaagacttttgtttccaaaacagtgcatgatatagcgtccagcatcctcgttctttggccggttagtacccgggttggagctgcgctgctatgtgttccttctataccatctaagcctgcttcagagacatagcccttgcgcgaaggttgagaaatatcccccaacagcatgcgacaaagctgtggaagatcacacggaattgcaaaggcatgtactggtggttgatccaactgacaattggccaaaactgcagagcaaacggattcatgactgatccgtggagggaaattaaaagactagtatcagcaccaaaagaaaaattacatta

SEQ ID NO: 49765 - DNA, 262 bp, Setaria italica
  Peptide Sequence Number=SeqID_115739
ccaaccccaccgcctgaaccccttcgatcgatctgcccacctactcctcctccgacaaccgagcactgcgcacgctgcctctgtgcgctcgcttgattttttttggaggggcggattctgcgatgctcttgtgtgggtgagtcggcgagagatgggaatcgcgtgggagttgattccggcgggtggctgccgcggtggtccctcgccggccggacgatgcacgtggtggccgacgtgtgggccagaggcagttaaccctctc

SEQ ID NO: 49766 - DNA, 471 bp, Setaria italica
  Peptide Sequence Number=SeqID_115740
tactcacatttcattagactgaagaaaaaaggattaatttattgatgcctatccaacaataaagaatcactaagcataacccaatccccactcctctaacatgcccttcccaaaaatttctgctttgttacagatagcgtacactcttgtcatgtccaaaagttcgaatctgtcacgataaccaccgcaatgctcagcagcaaccgaaggaagagcaagaaccctttctcccttcctgttcttagcctccatatcgcagatccctcggcatcacttgtcgatgttgtagtgttgtttgcgctgccagatttggtgtcgttgctcagcagcttactgcatgataatgatcacaccattagcaaaggtcaggtgtggagggaattatggtgtgcagcatctgatctaacacttcgacattcagatatacttggtacttatgaatcgattaaacagaagcgtaccagggtcatt

SEQ ID NO: 49767 - DNA, 395 bp, Setaria italica
  misc_feature (46)..(46): n is a, c, g, or t
  Peptide Sequence Number=SeqID_115741
ctcagctaatgaaatgtgagtacgatctgactgaaaaaaaaaaggntttaatttattgatgccctaatccaacaataaagaatcactaagcataacccaatccccactcctctaacatgcccttcccaaaaatttctgcttttgttacagatagcgtacactcttgtcatgtccaaaagttcgaatctgtcacgataaccaccgcaatgctcagcagcaaccgaaggaagagcaagaaccctttctcccttcctgttcttagcctccatatcgcagatccctcggcatcacttgtcgatgttgtagtgttgtttgcgctgccagatttggtgtcgttgctcaagacaagacttaacttaccaaggaaaataaagacaagttagtacaatagaaca

SEQ ID NO: 49768 - DNA, 527 bp, Setaria italica
  misc_feature (447)..(447): n is a, c, g, or t
  misc_feature (504)..(504): n is a, c, g, or t
  misc_feature (508)..(508): n is a, c, g, or t
  Peptide Sequence Number=SeqID_115742
tcttgttgtagttcttaaattttattattattgtaactttcttaattacttaacgttggcctaagtttacagttattagtttgtgcaggagcatgtgttaatgggctagctatcctgataataaagaacaatgaatggtaagtaacagaaaaataaatacacaaccttttataacatagatgaagaattcattgctggcactaacagctggctgcaggagtgggcctaaaaccagacaagggcaaactgtaacaacatttagtccatttttctctgcatactccaaggctttctctttcggctaagagtcttggcagccatataccagtccagccagccgaacaaggttaggattagcctaaatcctaccctagtagcaatcagtagtaacaagaattgctaaactgaaatatacttataatcagaaactagaaaatcaattgggancatctgtctaataagcaaaactaaattagaatgttcatcttcaagcatgtgctttgnggtnctctggtgaactgatacgg

SEQ ID NO: 49769 - DNA, 230 bp, Setaria italica
  Peptide Sequence Number=SeqID_115743
caaaatgttggttgcctgatcactgtaaagaatgttgcaattctcgggtcgaaatatcagctctcttcaggcgctgcggatggcagcacaaggcgttctctgccttgaacaagcttcgcagaacgaattttgtctccggtcttaatctgcgtcagaacatctcttccatcaaaccccaccgtgcccactccccccgaaaaccccacaaaccaccgagccccagaacgata

SEQ ID NO: 49770 - DNA, 223 bp, Setaria italica
  Peptide Sequence Number=SeqID_115744
atcaagtgacgaagcaagtgctatggaaagtttgtcagggttattctccttaatatacttcaagagagtcagcaaaccacccttctcttccagcagagaagtatatagcttggcaccatcttccttgcgctctgcaggtatgcttcccaggattgctgaattggagctgttgcaggctcctggtctgtcctttctcctcgaccccaatagttatttaagaata

SEQ ID NO: 49771 - DNA, 266 bp, Setaria italica
  Peptide Sequence Number=SeqID_115745
gaagttgattatctagataaaattccggatcctgatgctcagcaaaaggagttcataaaactatggactcttaaagtgagtcttttattggctctttactataacttccttattcatttgattcatgtttttgtatcaccattcttcagaccaccggtacttttccttgcaatgcgaaaaattcttaactgaatgaatcttctaccactcaaagcatactacggccaattacattgttataatctaccagcttctcgtgagttata

SEQ ID NO: 49772 - DNA, 246 bp, Setaria italica
  Peptide Sequence Number=SeqID_115746
cccactcctccacactgcctccgccgtccttcgcgaacttcggcgacctctctcgcgccgctgatagccccaggaagtatcaagtctgcaccacatcgaagatgatataccgacacatacagagagttcacggtttaactcgttcacaggataccagacactgactgaaagagatgaaagcttcaagaccaaggaaagtgtgacagtgcattgtggcttttatgatgagaatggagggttccgtag

SEQ ID NO: 49773 - DNA, 245 bp, Setaria italica
  Peptide Sequence Number=SeqID_115747
gcgaacttcggcgacctctctcgcgccgctgatagccccaggaagtcgtgcttgaaatttcttgatcctgagaagcttcaaaatctggagcttccagaaattcctgaaacaaatatctcaatcaaggaagttgtttacagatcaagtctgcaccacatcgaagatgatataccgacacatacagagagttcacggtttaactcgttcacaggataccagacactgactgaaagagatgaaagctt

SEQ ID NO: 49774 - DNA, 294 bp, Setaria italica
  Peptide Sequence Number=SeqID_115748
aactttaaccaattttaggaaacggacaattaacaatactaacgactaggtagccgttaccaaaaaatggaaagtggtggagtcattcacaatcctagaaaagattgcatcatggtgtgctttctcgaccatgttatctggctctgaaaaatatctcataatattggtagaacttatagggtaaaatgtagcagagggttccaattttgtgtcaaggtgccccatattttcatctgccttgctagacagattgcttattactcttgtcataagttcagcaccattccattgcaa

SEQ ID NO: 49775 - DNA, 183 bp, Setaria italica
  Peptide Sequence Number=SeqID_115749
gcttctagctccagcacaagccttggtgaaaagaatatatatacacaatgctgctggtatttttcccaccacactgtttccataaaagatcagcaatacaccatggccttctgagtacctattgaaagatttcttctgtatatgtgttccaaatacctttacttgttgcattctgtattgcca

SEQ ID NO: 49776 - DNA, 214 bp, Setaria italica
  Peptide Sequence Number=SeqID_115750
ggagaccggggagtacagcgacgagaagacgccgagctatggcaaggacacgctcgagcaattcttcgaaagagtgttacgggaagggatggcagggcaggagctcggcgagcaaacaatcttctaggccttctccagcggcgtgagcgccttcccggccgccaatgggcagcaccttgttgatattgtcctcgtcgtagatgcagtcggcgat

SEQ ID NO: 49777 - DNA, 193 bp, Setaria italica
  Peptide Sequence Number=SeqID_115751
cgcgagcccaagttcatcaaggtgccgatccagattatggacgccgtcatctgggtgctcgatggattggccaagctgttcccggggctggaggacgccgccgagttcggcaagattggcaggtactatgcctcggagagcatgccctgccatcccttcccgtaacactctttcgaagaattgctcgagcgtg

SEQ ID NO: 49778 - DNA, 345 bp, Setaria italica
  Peptide Sequence Number=SeqID_115752
ttactaatttgcatatattgcatggggactatctcagcactgacaaagcttcctacagctcaactccagaattaaacttgattagagatgcttcctttcagctacctgttgtacgatattactatgatggccggcaaagctattagggaaagatttggcaggatttcttttccgatccaactaacacatcacaatttttccaacagtatgtttgctcaacagcggcaaggatgcaaatggttccttatgtgttggcctgggacctgaattgggactgaaggagtggtgatggtttggcccaacatgcaggatcttctacccgaggttgtccaaagttggtagggt

SEQ ID NO: 49779 - DNA, 247 bp, Setaria italica
  Peptide Sequence Number=SeqID_115753
gtttgctcaacagcggcaaggatgcaaatggttccttatgtcgggcaaaaccatttccccttgaatctcgtttctggtttcattacacatgtgtgggtttgactccagaaacgagattcaaggggaaatggttttgcccgacatgcaggaatcttcaatgagggtttcctaagttgtatgtttgctcaacagcggcaaggatgcaaatggtcccaggccaacacataaggaaccatttgcattcctt

SEQ ID NO: 49780 - DNA, 489 bp, Setaria italica
  Peptide Sequence Number=SeqID_115754
ctgatagagagccatatcaaacgtcttgatgaagacctgggccagtttgcagaagatttaaagcatgaagggaagatacctccagacgaaccgccagtccttcctccaattccggtggttagcagggatgagaaaaggaggcttggttttagtacacctcaagcatcaaagaaatttagagagagggagtgggacaggggaaaggggtatggacttttgatttaatgccccctcaggtagcagcaagaaagcaggtacacctatggatgtagatcaaatgattgatccaaatgaaccgacgtattgtatatgccaccaggtcagttttgaaacaatatacgtcttaatttttcctggaacttatatttgcatcttatctaaaatcttttttcgcaaatgctcgctgaataaaattcttattcgtcattggtatttcaggtttcttatggcgatatgattgcctgtgacaatgagaatgtaagttgtttt

SEQ ID NO: 49781 - DNA, 264 bp, Setaria italica
  Peptide Sequence Number=SeqID_115755
gcttgacatggcccatgggaggcttcttcatctttttagtaatgtacatgcttggcagggacggggatttttccttgttcagaataacatatgggatctagaaatggaggcttggttttagtacacctcaagcatcaaagaaatttagagagagggagtgggacagggaaaggggtatggactttgatttaatgccccctccaggtagcagcaagaaagcaggtacacctatggatgtagatcaaatgattgatccaaatgaaa

SEQ ID NO: 49782 - DNA, 401 bp, Setaria italica
  Peptide Sequence Number=SeqID_115756
ttaggttttactacttttggttttcctttcgttagtctaggtctagtatttgttaaattacctaaatttgtagtcatatgaatggcatgcaaaatatggaagcgagcaaactcaattgcctagcagtggtatcatagccggatttgccaagtacgactagatttcaggatcctcatattcattttctactttaaccagccttccacgtacccatctcatcttatacttttcctcagatgaaggtgtgtcttcttccagtgtccccggaggacaatcttctcttgtttcggcattttctgcagacctgggagcatcttctcccagtgtccctggatgatctgttgattcagctgcaatgcaatcatgatttgccatatcattgaccattgattgcctaactt

SEQ ID NO: 49783 - DNA, 255 bp, Setaria italica
  Peptide Sequence Number=SeqID_115757
tagttttttctttagaaaatggaattgtctccggcctctgcgaccacacacagccaagttcttacaacaaattcagcttaacagctgatcacttggggtcctgcatcgcaatcctggttctctcccgaatccgctgcagcgtctctgggctgtgcttccttcccttgttccacggcgtgttacccttgttcgcctgtgatattcgcatccgcctgagcctctccctctcgtccacgtcctcctgctgctcctccg

SEQ ID NO: 49784 - DNA, 462 bp, Setaria italica
  Peptide Sequence Number=SeqID_115758
aataatcttgatgttatctgagcttgcaatgagatctgacaaatatagacgccccttttcttgatgcaagtatattcaggctgtttcagaagcatatctcactcgacactagcagtacaggtgtaatcgtgttaggtaaaaatgcaatgttcttcaggctgtttcagagtacactgatgaccattaaatttctcagtcaataaagctgggaattgaccgaattcggaaatgaagatgccttgttatgctctaacaacgtcgcagaactgaagcagttatcttataacagactcagtctctactatcttcagctttttcagactctctaagccactcctgaagtttcagttcttgttcttctttgacttatttgacatagactcatgaggcagtagccttcattgtcgaggattgtggattctctgaagacaaactcatggctctactaggatgttcatgagg

SEQ ID NO: 49785 - DNA, 354 bp, Setaria italica
  Peptide Sequence Number=SeqID_115759
ctgtctcatgaaaagtaccatgttctctgttttactgggagtttactgaattcggaaatggagacgccttgttatgctcaaacaatgtcgcaggaactgaaggagttgtcttataacagactcagtctctattatcttcagctttttcagactctctaagccactcctgaagtttcagttcttgttcttctttgaacttattgtaagtctccaccgtttcggcaatatcagtagcaggcaagcccttgttcgtagtggatgtaccatctgacagtcgacttgtaaattggggtaccttctattccctttttctttgtttattttcttttggtttctttatttttgtttatttta

SEQ ID NO: 49786 - DNA, 396 bp, Setaria italica
  Peptide Sequence Number=SeqID_115760
tggcagagcgccaccgccaggacgtcatcggctacctcaagcgcatcggctcctccgtcggctgtgaggctgtttcagaagcatatctcactcgacactagcagtacaggtgtaatcgtgttaggtaaaaatgcaatgttcttcaggctgtttcagagtacactgatgaccattaaatttctcagtcaataaagctgggaattgaccgaattcggaaatgaagatgccttgttatgctctaacaacgtcgcagaactgaagcagttatcttataacagactcagtctctactatcttcagctttttcagactctctaagccactcctgaagtttcagttcttgttcttctttgaacttattgtaagtctccacggttttggcaatatcagtttcct

SEQ ID NO: 49787 - DNA, 162 bp, Setaria italica
  Peptide Sequence Number=SeqID_115761
tgatgaatggcttgattaataaggtgctccagatcttcatgaggagatgattcattttagtgtggttgatgtcatggttgatgatggcttgattaataaggtgctccgagatcttcatgaggagatgattcattttagtgtggttgatgatcctcaacttag

SEQ ID NO: 49788 - DNA, 319 bp, Setaria italica
  misc_feature (256)..(256): n is a, c, g, or t
  Peptide Sequence Number=SeqID_115762
aattgtaggtctagttagtcctttctatttgttcgtaggtatttgttggtatttcttcttgaagtacaaactcatggctctactaggatgttcatgaggacccttgaggcttgtcttgctatcttgcccacatgaggagtcttgcaggctctgtctcattcgttttgtatctttcaatgctaagctcaagtaaagcgtctggcttctctgtgagaagcgagcgaataatacatgaagcaatacatcatttttttanactatagtaagccatctaggctctctacatgtctagcactacctcgagtacttactaaattca

SEQ ID NO: 49789 - DNA, 211 bp, Setaria italica
  Peptide Sequence Number=SeqID_115763
ttgagtgtgttaaaaactaattgaaattaaggcatcatgacttcgcggataacaaaatttccttttaaataattcaacatttattgatggctgccaacattttttgtaccatgtaccaatatattcttaaagctgttttgaactcttaccaacattttagaatctattcaatttattttgaacacatctccaacatttcctttatatttct

SEQ ID NO: 49790 - DNA, 233 bp, Setaria italica
  Peptide Sequence Number=SeqID_115764
aaaacaaaacaaaaataaaaaaagaaacctaaactaaacaaaaaagaaaagaaactttaacaaaccaaagggaacgaaatacaaagacaaggaacaatcccaagggggaggctccagcaaggaatccacttcccgccttaaagcaattgcattggtaggaggaagggggcaaatcagcatctttcataaaatcatgcgtgtcgcaagcaggcccagaattgcagaagcaagtg

SEQ ID NO: 49791 - DNA, 237 bp, Setaria italica
  Peptide Sequence Number=SeqID_115765
tcacgctgaaacagatacttgtgctggtcccacgcgtcagtaagacatgtcgagcttcaacagagttattggtttctatgtgcgctttgaagatgatagtgtggaggcagccaaggtggttaaacagtggaatgtgaaaatcatatctataagcaaaaataaaagacatcaagatcggacagctgctcttgaggtatgggagcgcttggaggagtttatgcgggcgcgcacataatt

SEQ ID NO: 49792 - DNA, 414 bp, Setaria italica
  Peptide Sequence Number=SeqID_115766
cctggctttaatgaatgtacaatcattcccgacatacatcatttttattttcattcaacataaaaaattcaaactctgagatctaaacaacattgtccagagcaaacagcttattatcaccattaacaatcaaaaagagtatcatatttgtgtattgttattagcaagtggaactaaataatgttgtcattttagtcatgatcggtcaggtcaggatcgtagttctgagcaacactgcaagttataaaattttggaattctcaatagctttaattacagagaaaagatccatactagtttagaaccatgtggtagttcttttggacgcacagtcatccagtccctcttttcaaaacagaaagaattctgcaaaatgacacttgctatgtcagacccccatgttagtaaaattgt

SEQ ID NO: 49793 - DNA, 442 bp, Setaria italica
  Peptide Sequence Number=SeqID_115767
aaaacaaaatcgcagactaaaatcatcttccgaagaatcgcaggacatgatgcatgttgaagactaaaaatgtgatagttactggatttgactcacttttggaccagagatgacactgttgacttggtactctacgaacctgctctaccagcattttttagtaggcagatcaccgacatatgaaaagtccaacacaagggaattgctactggaccattattttctgaacctacaactgaggcatccctgttggctcttgtagtgtaattgcataataaacaaacaagttttcaaagggttatttagtcaagcatgatcttataaaaagggactatagtttaccaattttaccttggtcgaataacatcataattcctgaagttgcatttttgccaactttatcaagcttttctttcataaactgactgaagtcatttagacc

SEQ ID NO: 49794 - DNA, 208 bp, Setaria italica
  Peptide Sequence Number=SeqID_115768
ggaaatgaagtttgctttgaaaagaagtgatgaatgtgttctcacccatgtaggtttcattcctagtcccagatctgccattcttcaatgtagagtgaccatgctcctcagctattctcctgtgcttctgtgtccaatcaggacggctccacaaatggaccaatggaatgtaaccatgctcctcagctattctcctgtgcttctgtgt

SEQ ID NO: 49795 - DNA, 483 bp, Setaria italica
  Peptide Sequence Number=SeqID_115769
ccacatacatcgggatgtaaaggctgggaacatactacttgatcaagaacaaggagtgaaactgtcagatttttggagttactgctagcctttatgattcaattattaatagacatggaaaaaggaagacacttgttgggacgccttgctggatggcccctgaagttatggagcaaaaggattacgacttcaaggcagatatttggtcatttggtataactgcacttgaacttgctattggtcatgctccattttctagtcaacctccagcaaaggtctttctcatgacgttgcaacatgctccaccatcacttcataacacaaaggagaagaagtttacagatgtatggttttaaaatattcgtttgaagttaattagtgtgacaatgtcgattcatttcgctccttgttttgtagtcttttaagagtatgattgccacttgtctaataaaagatccaacaaagaggccatcagcaaaaagc

SEQ ID NO: 49796 - DNA, 312 bp, Setaria italica
  Peptide Sequence Number=SeqID_115770
tttaatttaaacttagttacttaacttttgttaacttttgttcttatttggttctattgtcttcctatttttcttagttctaaccttccagcaaaggtctttctcatgacgttgcaacatgctccaccatcacttcataacacaaaggagaagaagtttacagattcttttaagagtatgattgccacttgtctaataaaagatccaacaaagaggccatcagcaaaaaagctattaaagcacccattttcagaaaagcaaaggcagaacataatgctgtgaaatgcatactaaataaattgccatcgctgg

SEQ ID NO: 49797 - DNA, 368 bp, Setaria italica
  Peptide Sequence Number=SeqID_115771
caacaattgcaatggtgttccttcttcctgcccagcatcatctgcccttgttgatcctatcccaatcgagcagtgaccatatgtgcgttacctatgtagagtagggattagatgcaatttatttgcagatttaacatgagaggctagttcgtttctgctggtagtactgtacatgattcagtaccttgaggagccaagtggccctgttcctcggctggattagctgagtcgtcctgttcctccagcatcagttctggaggactcgatgggagcacaaagttcgaaccatcatcttcctcacattttggttccaccataaatatagtttgatccatttcagggtgatcctctagatgttcatcctgctg

SEQ ID NO: 49798 - DNA, 423 bp, Setaria italica
  misc_feature (22)..(22): n is a, c, g, or t
  Peptide Sequence Number=SeqID_115772
agtaaatggtttcttcttgtcncttctcatcctggtcatccagtccttttaggcatggtgagcgcattggattcagctacctgtttctcagaagtacactggtgagaaggcacgtgtgaaactactgcgcaactcaaaaattcatgaatttaacataaagctagcaacccacaaaagactcattccagctcatatcaagggaaggcctccgtcatattacattgttgctggcttgtttttacggtcgtgtctgttccatatcttcgatctgaggtatgctgtcttttttctcctatgccttttggtctgagttacgaaataatcaagacagtaaatctttgtttgtctgttacatttcctgctcgctgcttcatgtgtgttttaacctcagtgctctttaaaagacaactcaatagctgctag

SEQ ID NO: 49799 - DNA, 416 bp, Setaria italica
  misc_feature (292)..(292): n is a, c, g, or t
  Peptide Sequence Number=SeqID_115773
gagtatggaaaagactatgaatatgatgccccagtcaagttgttggacaagcactcgcatgcaatggcgcagtctcctgatgagcagcttgtggtggtctcacaggtgcttgtgtcagatataaatattggttatgaagatattgtcaatattcaggttcttgccttcaatggcacacctgttaaaaacttgaagcacctagcgacaatggtggaagagtgcaacgaggcattcttgaaatttgatctggactatgatcagctcgtcgttcagtgcgtctcgtgaaaccggngctgcaccgatcaacaatgtgaagcatgttccagtcccagaaaggattgtaggatcatctggttgtaccagccagcatctctttccttagctcttcaggtcttctgacatagccgaaggtatac

SEQ ID NO: 49800 - DNA, 486 bp, Setaria italica
  Peptide Sequence Number=SeqID_115774
aaacaaaataaaataaaccaaattaacaaaaataacctaacggaaagaagtaggaaatagactagacaacaagctcaattaaatggcacagttcattgtacctaccctaaatggatagagatcctgtgccatgacataaatgtacatgtcccacaccatatttctccaagaattccaagttataaccttcgtgctgcctatgacttcatcagacagaactggggcaagtatgtcaatgaagccaactggaactggcgattgatgaagacgatactgactagatgccatgtgtacgacaaggagagatactacgttccattcgacgagctcgctcctgaggaatcccagccaatcaaattccttcggaagttcatgccggattatgcatgatgccatgactactgttggctagttgagaggatcgttggaggggcgaacgatacagtgacttagaagacacttcctaacagcatcgatgcacatccc

SEQ ID NO: 49801 - DNA, 261 bp, Setaria italica
  Peptide Sequence Number=SeqID_115775
ccgccgcagtatggaggctactacggccaggacccgaacgcgggctactacggcgcgccggcgccgcagcagggaggaggatacgccgcgccgtccgcggccccggcgtaccacaccccggcagctgctccggcgccgcaggccgcgaagccacggcaacttgaccggcggtactcgcggattgccgacgattacaactcggtggatcaggtacctgtgcgattattttgtccttagcgaattgtagcagcagctgcggct

SEQ ID NO: 49802 - DNA, 227 bp, Setaria italica
  Peptide Sequence Number=SeqID_115776
gctttgtattttttttcttatttttaagttacatactgacttgtatcaacatgttgtgagcagtcgtcgctctttcaagtctcatgaccgggtggctctgccgcctcctgctggaatcgatgatgcttattcctattcatctaataaaagctttagtaagccaaccacctacccgcagagttcatcatccgcatcaccgtatcctcactacgaaaatccacatagcg

SEQ ID NO: 49803 - DNA, 361 bp, Setaria italica
  Peptide Sequence Number=SeqID_115777
caatggatatattcagaatgtacgagaaatatgcccagaagaatgggtggaaatttgatgtcattggcataatggagtctgctgtgaaaggatacaaggtacaatctttgtcgatgttttcccagttttgttgtatatatgcactggttttttcactgcagcataaatgtggccaccattccaagatctggaagctcttaaactcctgattcctatatttcgtattgttattcatttgtatgaaggaagctagtggaactatatcaggtccaggggcatttggcaaactgaagtttgagagtggcattcatagagttcagcgagtgccagtgactgaaaaatctggacggctgcacactag

SEQ ID NO: 49804 - DNA, 363 bp, Setaria italica
  Peptide Sequence Number=SeqID_115778
aaaagtaacaaactaagtaaagaaaagggtaagtaagttaacgaaggaagacccaaagactaagactagattaatgtgcataggcgcactggcaagcacgccgctattgtcaagtcttagcccgttgcagctgagaatggtggtgatggcaacgccaaagatgacaagaaggcagctgaaggcggtgaggagaagaaggatgatggcaagggaggaaaagaaggatggtggagatgctggtggagacgggaaagaagcggataaacagaaggatgatggcagtggtggtgatggcgaagagaaagataaggaccctgcagccatggctaacctgtatatgcactacccaagattcaaccaccc

SEQ ID NO: 49805 - DNA, 265 bp, Setaria italica
  Peptide Sequence Number=SeqID_115779
tagccaatatgatgtagcaatgcatcgctccgaacttttctccaagttgttttgatcgaccaagtaaattccttttggtcgaactctgaaactgaccggatgaatctgtgttgcgatggtcgaacccgcaggcggggcatctccaacttctacgccggcaagtccaagtcgttcacgagcctggcggaggccgcggcgacggcggccgccaaggagatcgccaagccggagaacccgttcaacaagcgccgccgcgtgctggcgg

SEQ ID NO: 49806 - DNA, 277 bp, Setaria italica
  misc_feature (215)..(215): n is a, c, g, or t
  Peptide Sequence Number=SeqID_115780
cgcacggcggattccgcgggtcggagaaagtgaatccggatccggacgacgcgggtagcaggaggaatactaacggattcttcgtggaagaggaggaggagagcggtggtgctgaggcggcggtgaggagggagttggaagaggaggaggaggaggcgctgtcggagaactcgccgctcacctgccaccacctcggctccagcgccgttccccgntcccgcctcccctccctctccttctccctccgccgccgctcctccaagcccatactccctct

SEQ ID NO: 49807 - DNA, 287 bp, Setaria italica
  Peptide Sequence Number=SeqID_115781
ggttctttcggttaacgttctttcgttagttcctttggtaggtattgccctgcccatcaagcggggcatctccaacttctacgccggcaagtccaagtcgttcacgagcctggcggaggccgcggcgacggcggccgccaaggagatcgccaagccggagaacccgttcaacaagcgccgccgcgtgctggcggcgtggaaccggcggcgcgcgtcctgcagcgcgctggccacggcgtacctcccgccgctcctcgcccccgaccacgccgtcctggaggaggacg

SEQ ID NO: 49808 - DNA, 188 bp, Setaria italica
  Peptide Sequence Number=SeqID_115782
ccgggagaggcggacgaagagggccgccgcgaagggggccaggaggaggtacgggaggttggagatggcaacgtggcagcaccccgccgctcagctagtagcctcgcccatcacccttgctacctcgccgcgccacgccgccaggcaccatgagcgccgcccagcaagcagaaccgaccacctctccc

SEQ ID NO: 49809 - DNA, 323 bp, Setaria italica
  Peptide Sequence Number=SeqID_115783
tgcctgcctaggatgcgtagtaacactatacttagctacaaactgaacagttaatattatcatcaaatcgaatattatgatagtgcggttgtcagccaatgcgaaatgaaacaaggatgattttatgaaaagtactgctcatgttggaaaaacactttgcatgaacaagtcaatgcatcacttgcctgtcccagtaccagcactacattggccttgaaagtttcaattgcatttagaagtaactgcagagcaaaaataagaatcaccacatgatgcatataaattagccaccagcaagcattgtagaaaattaccagtcattt

SEQ ID NO: 49810 - DNA, 219 bp, Setaria italica
  misc_feature (50)..(50): n is a, c, g, or t
  Peptide Sequence Number=SeqID_115784
tgatttctgaagttttacaacatcaatgttgggcttgctttgaactgcancctttaacatcttccagagtttctcctgaaagccatgagatagatcagataattctgataagctgcttcatatatgataatttcatttatccatgactcaacattcaaaataaaatgacgaacaggtacagttccgtagagcactaaatttgacaagattaaatcaaca

SEQ ID NO: 49811 - DNA, 405 bp, Setaria italica
  Peptide Sequence Number=SeqID_115785
ccccactggtattgataaccattcctgctgccctacgattcagcattgccagagaattgtctctccaatgttttagctagctctttcataaaaactttgtagacatccggattgatacttggagttgggtggccatagaagtaaactagtggcatctccaagggaatcccatcaactatatcgataggtttctcaattggggtagcagaaatacatccagggatcgttatagacccctggccgatatctaaatccacatatgtaggcttccaagacccaaattttagacaagacccaagactaaaggaagacaattactaagaacaaagaaagggtaaactttttaaccaaagaaaaataaactaaagttaaaggtaaaccccaaaacaaaaacaaaataaacaa

SEQ ID NO: 49812 - DNA, 256 bp, Setaria italica
  Peptide Sequence Number=SeqID_115786
cggaggcgctgggcctgccgccgcttgtgccggcgtacctcgacccggcctacggtatcgatgacttcgcccgcggcgtgtgcttcgcgtccgccggcaccggcatcgacaacgccaccgccagcgtactgtcagtgatcccgctgtggaaggaggtggagtactacgccgagtaccagcgccgcctccgcgcgcgcctcggccggtcccgcgccgccgccgtcatccgcgacgcgctccacgtggtgagcatcgg

SEQ ID NO: 49813 - DNA, 388 bp, Setaria italica
  misc_feature (340)..(388): n is a, c, g, or t
  Peptide Sequence Number=SeqID_115787
gaggcgctgggcctgccgccgcttgtgccggcgtacctcgacccggcctacggtatcgatgacttcgcccgcggcgtgtgcttcgcgtccgccggcaccggcatcgacaacgccaccgccagcgtactggtatgtttttctttgtgccgtgttagtttctccgccacacatgtgagtctctccgcggaagcagaatttagggtgtgtttgcttgttccgtgactttcgaaaagtcactgtgagctgtggactgtagaaaagacagctgtggaaaaaagacagaagtctgattgcttagagcagctgtggtttcttgaataaaactagttggagtggaacnnnnnnnnnnnnnnnnnnnnnnnnnnnnnnnnnnnnnnnnnnnnnnnnn

SEQ ID NO: 49814 - DNA, 338 bp, Setaria italica
  Peptide Sequence Number=SeqID_115788
aacctacaacgaaccgacaaacctaccctacgaagactacgaagaacaaaaggaagaaaaggacggaacgacggacggacggaagacggaagaatgtcggagaagaagcgcggccccggcacacgcaaggacgaggtggtgactcgcgagtacaccatcaacctccacaagcgcctccacggatgcaccttcaagaagaaggcaccaaatgccatcaaggagattaggaagttcgcacagaaggccatgggtactgctgatgttcggatcgatgtgaagctcaacaagcacatctggagcagtggtatccggagtgtgccaaggagagtccgtgtcag

SEQ ID NO: 49815 - DNA, 429 bp, Setaria italica
  misc_feature (327)..(327): n is a, c, g, or t
  Peptide Sequence Number=SeqID_115789
gttgccttgacatgctgtcatgtgttccatttgggtgcaacaatcacacagaaatccaatactttgctgtctatttattcctgtagttgaagtcatgtatagcaaattgataagtagtgatcagtcattgtagtgatcgctaatctgctgttgattgtatacagcaccttcaagaagaaggcaccaaatgccatcaaggagattaggaagttcgcacagaaggccatgggtactgctgatgttcggatcgatgtgaagctcaacaagcacatctggagcagtggtatccggagtgtgccaaggagagtccgtgtcagaattgcccgnaagaggaacgatgaggaagatgccaaggaggaactctactctctggtcacagttgctgagatccctgcagagggtctcaaaggcttgggtactaaggttgtt

SEQ ID NO: 49816 - DNA, 265 bp, Setaria italica
  misc_feature (258)..(258): n is a, c, g, or t
  Peptide Sequence Number=SeqID_115790
gccgccgccgcctgagggagcgaggtagagccgcgatggcggagaagaagcagcgccccggcggcgctaggaaggatgaggtggtcacccgcgagtacaccataaacctccacaagcgcctccacggatggtatggttgccaacacctccgcgcccttgcctcttccctccgcctgatctttcgaggcctgtgtgaacggatcttgcttgcgtgttcgtggtattaggtttttaatgagaatgaatcgctcgggggtnattgttt

SEQ ID NO: 49817 - DNA, 141 bp, Setaria italica
  Peptide Sequence Number=SeqID_115791
tcttcctcatcgttcctcttgcgggcaattctgacacggactctccttggcacagttgctgagatccctgcagagggtctcaaaggcttgggtactaaggttgttgaggatgaggattaagtcccaccgtggattcaatac

SEQ ID NO: 49818 - DNA, 128 bp, Setaria italica
  Peptide Sequence Number=SeqID_115792
taagttaacggaaataacgaataagtaagaaagactacaaacaaagacaacaatctggagcagtggtatccggagtgtgccaaggagagtccgtgtcagaattgcccgcaagaggaacgatgaggaag

SEQ ID NO: 49819 - DNA, 305 bp, Setaria italica
  Peptide Sequence Number=SeqID_115793
tacttaaagtctagttctttagtaaagtattccgtttaggtaacttccttttgtagtagtacctacctattagttcctaaacctagtctttctaggtaaggtccgtctatttcacttacaaatgacacatgaatgcaagatttcaactttgaccttaggcagttcaactgcctgtatccatcttcaattatatggcctcgacgtataactatcgcaatagatcccggacctggtccagatatttcaccagtaactcttcttgatgctttgtctgactcaataaattctctaaacatctgcactct

SEQ ID NO: 49820 - DNA, 347 bp, Setaria italica
  misc_feature (18)..(18): n is a, c, g, or t
  Peptide Sequence Number=SeqID_115794
agcttgtctcacatgaancccgttttcagagtccaatgaatgtgatgttggtctttttcaaataccagtacatgatgcttgctgtcagagttagcatcatcttctggttcacctccaatatatcttctggcaacagaaaatggagcaaccaagcttcctagccacggaaatgatgtatgaagcattcatttgcttctcttcatctatccagaaataaatttaaattattcaggaaataggctttgacaaacatgcactgcaagaaaataaatgcatgccatacgctcgtagtagtcaatctggtgacttgacataacattgttccaggtaaaaacttagtctaaaaa

SEQ ID NO: 49821 - DNA, 469 bp, Setaria italica
  Peptide Sequence Number=SeqID_115795
gctgggatgaagagtattccaggtcagatcatttctcttcatgatccctgcacttctatctagctgcattgtcatcgaacgatgattcagatgcagaatcgtctgaagttgtggtcgagcttgtctcacatgaactcccgttttcagagtccaatgaatgtgatgttggtcttttcaaataccagtacatgatgcttgctgtcagagttagcatcatcttctggttcacctccaatatatcttctggcaacaagaaaaatggagcaaccaagcttcctagccacggaaatgatgtatgaagcattcatttgcttctcttcatctttttctcctttagtcacaaggctccaattcacaactcgaggctccacagcacttagtaaatcaaggaaaagtgccgctggaaaggcttctatcctgtaattagtaaatgtagtttgatgcatgaaccgtaagtaccaactttagg

SEQ ID NO: 49822 - DNA, 351 bp, Setaria italica
  Peptide Sequence Number=SeqID_115796
tgaaaatttgaccaaaccgtaacatggaaacaccatcccctcggctctccatacacaaactaactcctagctaagattcatgtccgaggcacttaacataggcatgccatgtgcaaggttgtctgcgatgcatccagttcaccttcacctggctgggggcggtggtggaggggggatgtttgatctggccatcccaacccaagcaaaaatgccgacaccaaggatcacccatccacacacatcgtaccagaagtcagtatccttcttcttcttccctgtctaagctgacaatattgtgtttcagcaatcaaggaagaagaagaaggataactagaacttactaggtaacga

SEQ ID NO: 49823 - DNA, 267 bp, Setaria italica
  misc_feature (245)..(245): n is a, c, g, or t
  Peptide Sequence Number=SeqID_115797
taactttaaacaaaagtaactaacaaatttaagaccttactacgttaatactagacaactagaaagaaataccatgagaggtctgagcatttcccaagcaccagagtgcatcagccttgatgggatcaactttcagtgcctcctccagcttggattccgcatcttcaaggcacttgagggcttcgtcgggcccggctttcacctgcgacagttccagcagcgcgcctccccatcgcgtcaggttncggcgtcgagggggttctgggc

SEQ ID NO: 49824 - DNA, 381 bp, Setaria italica
  Peptide Sequence Number=SeqID_115798
tacttaagttagttcttgtccttcctagtagtattacccttgttggatatgcctggagactggtctgcgcctgctccacccattcatgccttatgtaacagaagagctctggcagcgtcttccacagcccaaagattcttgtaggaaagattccattatgatttcagaatatccatcccttgttgagggatggactaacgatagacttgaaaatcaaatggacattgtcttggatgctgtgaacagaataaggtcactgaagccaccaacagattcaaatgagagacgacctgctttgcactctgccgaggccaagagattgctgccactatccaatgctatcaatctctaatcgtgtccctttcctccgtatcacatctc

SEQ ID NO: 49825 - DNA, 323 bp, Setaria italica
  Peptide Sequence Number=SeqID_115799
ccatgatccaaatgactttgaggttggaaacggcataacctggacttcatcaatatcttcactgatgatggaaataacagcaatggaggtgcacaatttgaaggaatgccaagattcactgctcgagttgccgttattgaggcgctgaagaaaagggttgttgttgacaccgtttttgacatacgtcaaagatggcgtcaaaaggaagtagaggtgccgatgcatactgaagagacaaacggctagtggaatcggccgatagggttgcagagggcacagccgatgaagttataagagatcgatcgatgatgacgaaagctttg

SEQ ID NO: 49826 - DNA, 395 bp, Setaria italica
  Peptide Sequence Number=SeqID_115800
gcatctgcatggaaggtatgcagtcacccttcaatgccgaaaactcaaaataatctgcgatgctgagttagtcgatcccacgttttgtactggggctgtcaagattacacctgcccatgatccaaatgactttgaggttggaaaacggcataacctggacttcatcaatatcttcactgatgatggaaaaataaacagcaatggaggtgcacaatttgaaggaatgccaagattcactgctcgagttgccgttattgaggcgctgaagaaaaaagggttgttgttgacaccgttttttgacatacgtcaaagatggcgtcaaaaggaagtagaggtgccgatgcaataactgaaagaagaacaaacggactaagtaggaaatacggaccgaataa

SEQ ID NO: 49827 - DNA, 266 bp, Setaria italica
  Peptide Sequence Number=SeqID_115801
accatgctggcattgctacacaggttgttgtagaaaagaagcttatgcgtgaaaggaagctgacaaggcatgacatagggcgtgaaaattttgtttctgaagtactcaaatggaaagatcaatatggtggtaccatattgaatcaattgcgccggcttggggcctcacttgattggtcccgtgaggcttttacaatggatgagcaaagatcaaaagcttgttaacttgaagtctttttgttaaggtttactactaaggtaaggtcc

SEQ ID NO: 49828 - DNA, 242 bp, Setaria italica
  misc_feature (17)..(17): n is a, c, g, or t
  Peptide Sequence Number=SeqID_115802
aacctgtttgaatgganattccttttcagagactatcgccttgtgaattgggattgcatacttcgaactgcaatctctgacatcgaggttaatggatctttatattgtttatgatatgttagatatcgttatcctttgtgtgcttgattaagataattttcttagattgaaaatgctgatttgacaggttgatcatattgatcttaaagatgaaactatgctaaaggtccctggttatgcca

SEQ ID NO: 49829 - DNA, 223 bp, Setaria italica
  Peptide Sequence Number=SeqID_115803
aggaagctcaccgccctattggaacaactggaggtcatcagtgaagctgacctccgtgctttctaccctacttcggtactagaaactggactcgatattctcttcttttgggtagcacggatggtgatgatgggactgcaactgggtggtgatgtgccatttcagaaggtttatttacacctatgatccgtgacgcacacggaagaaagatgtacaaaatcac

SEQ ID NO: 49830 - DNA, 306 bp, Setaria italica
  Peptide Sequence Number=SeqID_115804
tagaaaacaagacaaggtaagaaagcgcgacgttgttcttaagttccaaagatcaaaaggcaaaagagaaagaagaaaaaaaaacttaaggcgaaacaaaaggaggcagctaggctccaggcacaagcagcctcagatggaacaaagaagactgaagaaaaaacaaaggaagaaagctgcggaggatgaaaatccaagaagaatttcattgatccagacactcctaatggcgggaagaaattgctttcgcctcagatggccaagcaatcagtccaagtgccgttgagaaatcatggtatgcctggt

SEQ ID NO: 49831 - DNA, 196 bp, Setaria italica
  Peptide Sequence Number=SeqID_115805
aattcatttggatccagattgccttctcccaaacgtttcagaagaccttccagtgacatgccatttatcacctcaagagggtggttggatacagacaatggtgcaacaaattatggaatgccatccgttttgcgatgggcaaactgggtgatcattacattccaccttccacttgcagattggtggctattcgtaa

SEQ ID NO: 49832 - DNA, 216 bp, Setaria italica
  Peptide Sequence Number=SeqID_115806
aagttgcaagctcaagtaaatttacttcaaacctatggaatatgggtcttatttgtagattatatcgcaaggaacacaactgtggtgatataaattgatacatagtgtctacataagttaatacatagcctagtacagtactactatttttatacaagttgatacacaaactctacacaagttgatacaatctctatataagttgatacacctaaa

SEQ ID NO: 49833 - DNA, 432 bp, Setaria italica
  misc_feature (37)..(37): n is a, c, g, or t
  Peptide Sequence Number=SeqID_115807
ctgcaattgtccacttttattgagaaatacatttcgntaattatctcgacatcaagggcaccgatattcttactcggttgatggtttctcagcttcttccctgaaaggatgaggagcagcatacagagcacaaggtctgttgtagcagtatttaataccaagctttcttggagtatgttggaaaccattgtcagatgaccatgcaacaaaaaccaagccatatgaaggtgatggtgcccaaatcacttgaccaacacttaatgatctaggtattcccttcacaggtcgaacttcaccactggatatgttgacaacaaacagttgctaggttattccttttttctttcgtaattaggttttcttccccaggtttcctcccaatccccttgtcccttccagcttctttgcagttccttttcagatgagccttcc

SEQ ID NO: 49834 - DNA, 455 bp, Setaria italica
  Peptide Sequence Number=SeqID_115808
ccctgcgggccggtgtacgtcaccgtcggcgacggcggcaaccgggaggggctggcgaagaagtacgtggacccgcagccggcgatctcggcgttccgggaggcgagcttcgggcacgggcggctggaggtggtgaacgccacgcacgcgctgtggacgtggcaccggaacgacgacgaccagccggtggtcgcggaccaggtgtggatcaccagccttgcggccaaccggcttgcaacagaagcaagaacaagatgtgaacaaagcaaaagggaagactacagtgtctttactggcttgagtagcagtttattttaaatttaaaagaagtatacatacgttattcttcagagcaatattcatatattggttgtggcatgtaaatatcccatactcatactttgactgattgttgggccttgtgctaggatgccaacgtgctattgggcttccac

SEQ ID NO: 49835 - DNA, 423 bp, Setaria italica
  Peptide Sequence Number=SeqID_115809
ttacggaggaaggacatgacatggagttgtaaatacaatctgcactcagtgacgccttctgtctctatgttcatctctagaatagcgatctccacgatcgctccttgaatggtaatctgcactcagtgacgccttctgtctctatgttcatctctagaatagcgatctccacgatcgctccttgaatggtaatatgagtcatcatcatgccttgacctcttggaatcatggatatccagatctctagctctatgacgaccatgctcttcatgtcttctctcatcacctctgttctggtggcctctgtatccctcatctctaactctacttaaatttgggtcataccgatcatcttctaattttcttttgtagtctctctccacaccatttccacctttccttctattctttgtcttcttccta

SEQ ID NO: 49836 - DNA, 280 bp, Setaria italica
  Peptide Sequence Number=SeqID_115810
ttttttttttttagtttcagataatttcatgacggcaaatatcagaaacatgggacgaaatgtgtgcctcttgcatctcaaactaccactagccaaaataatactggcaatatcaaacataaagttaaatccccaacaaaattctgtaaagttggtcggcaacaacggtttcatcaaacaaaaaaaattgcaatacatctctgctacaccatattacatgtaaactttgcacagtaaaaaactcgatacaaacaaaagcgaagcttaatgctgcaacggg

SEQ ID NO: 49837 - DNA, 360 bp, Setaria italica
  Peptide Sequence Number=SeqID_115811
cctgtgacaccagacaattatctgctctcctatacatcagtcgctgctgatgctcataaagcagggctagaaatctatgctgctgattttgcaaatgactttactatcagctacaactacagctatgatccattagcagaatacctttacttcattgataatgatgccttctctgttgatggtgtattgactgatttccctatcactccttcagaggcagttggctgctttagtaacctgaacaacagcaagacagatcatgctaagcctctagttatctctcataatggtgccagtggtgactacccagactgcacttgattctaagtctttattctagtaaggtctagtttgtattgt

SEQ ID NO: 49838 - DNA, 335 bp, Setaria italica
  Peptide Sequence Number=SeqID_115812
taagaaggacttaagcatgatctgtcttgctgttgttcaggttactaaagcaagacagatcatgctaagcctctagttatctctcataatggtgccagtggtgactacccagactgcactgatcaagcttatcagaaggcagttgatgatggtgcagatgtcattgactagtacctagttacaagtgaccaaagatggcataccaatatgcatgagttcaattgacctaattgatgttactaatgttgcaaaatcagaatttgcttcgcaaacaactaccataaatgacctgaaagctaggtcctggacgtctttaccttcaacctcacttggat

SEQ ID NO: 49839 - DNA, 424 bp, Setaria italica
  Peptide Sequence Number=SeqID_115813
atgtctctttaggcactcttgcttcaccatctctaagcaaaccatcatcgccattgcttgactgagcagcgccttgcagtgagggtgagtcgacttgcattgtcactgggccattgtttaccaaagaaaccttcatcattgctccaaaaacaccatctttcactgaatcagccgagtatgacctctgaaatttctcgactagagaagcatagaatggttttgcttttgcaggtggcatagccacatgaaaatctggcttgttacccttcaggatgccatataatgtaaactggctgactaataggacttcaaagttacgctgcataacactttgatcccatgctttcccagtattctcgttaggaatagcctcatgttcaggaccttccgacaaatgtagtcggcgtcggagtcagtgtccgcc

SEQ ID NO: 49840 - DNA, 367 bp, Setaria italica
  Peptide Sequence Number=SeqID_115814
acagggctccatcacgtttaggccagccggcaggactcagcagacctagtcatagaggtttagcatgtctctttaggcactcttgcttcaccatctctaagcaaaccatcatcgccattgcttgactgagcagcgccttgcagtgagggtgagtcgacttgcattgtcactgggccattgtttaccaaagaaacctgcaagactttccaattaactctaattttgaaaaggccatatgacatgaaaagccaataataacaacattttttttcactcagaggcaccttcatcattgctccaaaacaccatctttcactgaatcagccgagtatgacctctgaaatttctcgactagagaagcatagaa

SEQ ID NO: 49841 - DNA, 250 bp, Setaria italica
  Peptide Sequence Number=SeqID_115815
ttgtttaccaaagaaaccttcatcattgctccaaaaacaccatctttcactgaatcagccgagtatgacctctgaaatttctcgactagagaagcatagaatggttttgcttttgcaggtggcatagccacatgaaaatctggcttgttacccttcaggatgccatataatgtaaactggctgactgaataagatatcagcttagaaacatagttaatagcaggcttactggaggttatttatgtttaca

SEQ ID NO: 49842 - DNA, 420 bp, Setaria italica
  Peptide Sequence Number=SeqID_115816
taagtatttcttgaacaccatcagaaaacactgtgaggccacccataccagtgcccacaagcacgccagcccgggccttgtcaatctgccagagaaaatgctttaccaattagaaccaaatatccttttcgccaacaatagtgtcaacggcaaaagcaaatcttttaggattagtaagaatactaaaattagctaatgaaataactatcaacactgtccaaacgaaagaagtttgatgtgctaaaaggcaattttatttattcgctacaaaagtcacaataatacaacggaatcatcaaatgaaacaacaggttttttgcaatgctcacgtgttactacagcctaaccacagttatgccaaatcatatctttttaataaagtgctcctttggtgcaattcaaaccagtccagttagaacc

SEQ ID NO: 49843 - DNA, 259 bp, Setaria italica
  Peptide Sequence Number=SeqID_115817
caacgctgagcccatgtttgttatagcatacggaataaagaaaggcgaaatttttctgtatcccttctcgatgagattctgaacgccatcagaaaacacagtaaggccacccatgccagtccccacgagaactccagcacgcactttgtcaagctgttagcaataacgtaattagggaaacaagttttcaaaatggaaaacggatataaaatcagaaacctatgacaggtatgaatgtattggtacgcgctcattcgca

SEQ ID NO: 49844 - DNA, 225 bp, Setaria italica
  Peptide Sequence Number=SeqID_115818
ggttaaattgattaatggtagggtgcacccatccaatagttatggcttctaccgtggcaatagcttctaatccaccagctgcacctaggcaatggcctatcattgattcagccaagtcaccagcaagtgtggaagttgcatgcgcattgatgtagttcacctcctccggtgcaacacctgcatcttcaaggctctttgtgatacaggatgatacacccagtccat

SEQ ID NO: 49845 - DNA, 271 bp, Setaria italica
  Peptide Sequence Number=SeqID_115819
tattggtctttcttaccgttggtctaattagtctttcttaattcctaccagcttgcacctaggcaatggcctatcattgactttgttgagttaattttttatctcagatgtattgttgaagacttgcttaatggctcttacttcagccaagtcaccagcaagtgtggaagttgcatgcgcattgatgtagttcacctcctccggtgcaacacctgcatcttcaaggctctttgtgatacagggatgatacacccagtccatctgatctagg

SEQ ID NO: 49846 - DNA, 294 bp, Setaria italica
  Peptide Sequence Number=SeqID_115820
ggtgtcctgtagaagctcatttggaccacctaattcaataccatacagatgtattggagggccagagttgtgtttgtactacaggatctgtactgcgttacatgaaaaaagagtacaaccaattacaaatgattcaaacaacgttatacagccgctctcaatctaaatgaacaaagagttgtctaaaatgcaatgtatctcagtactctgttcatttgtaacgttgctggctaacaatctgcccccgaaagaaaacgcatgaaaatttaatgcggaaattcctagaatgacctt

SEQ ID NO: 49847 - DNA, 238 bp, Setaria italica
  Peptide Sequence Number=SeqID_115821
gcaacatgatcaatgatcttgcaatgctctagtctcttgcttatcgtagtttgtccattcgaaatgcagtttcgaagggaaaagataaatgaaaggatgaagcttcttcaagacctcgtcccaggttgtaacaagattacaggcaaggccatgatgcttgatgaaatcataaattatgtacaatctctgcagcggcaggttgagttcctttcaatgaagctttcagctatcagtcccg

SEQ ID NO: 49848 - DNA, 180 bp, Setaria italica
  Peptide Sequence Number=SeqID_115822
tttgtttcttgtctcgtgatcgtctcgctgatcctgaatgccaatttctttctagtggcaggcacgtcaacttatttttgtcacgctcgttcgtgcagagtgcgcgtactcgaggaaggtgaacgagaaggtcgacgtgtacagcgttcgggggtggttctgcttgagctgaccacaggc

SEQ ID NO: 49849 - DNA, 226 bp, Setaria italica
  Peptide Sequence Number=SeqID_115823
attttcccctctgtgattgaaagcctccttatcagattcagtgaagaacagatcactgctttctgctgcacgtcatcatcccctactgtgtcggacgtgtagcttatgaatcctgtgaatacttaaaagaatagaaggtaccgtaggactactaactaaatttactagtagacaaagtttaagttaactaaaaattaaaattaactaaattaaaggtaactaaaaa

SEQ ID NO: 49850 - DNA, 245 bp, Setaria italica
  Peptide Sequence Number=SeqID_115824
ctcttgacgtactgccaggtgtcgcggctggagacgtcgttccaccacctgctgacgttcttgcgggtctcgaagaggcggcgggagcgcgggtcggaggcgaggcggccggcggcgaaccagaaccagaaccagcagcaggcgaagcatcagaaggaggaggagatggtgaggctgttcgagcagcggaagaaggacctggagaagctgctggacatctacgagcagcggctggaggaggccaa

SEQ ID NO: 49851 - DNA, 184 bp, Setaria italica
  Peptide Sequence Number=SeqID_115825
agactcgactgcttcagtagtcctatctgaggaactacaactcttgtgaagagaggaatgcaatgaagaagagaggcttgacatcgtggaacgctgcagcttgctcaatgataggcgctcgtccaccactcactactcaagcgagtggtggacgagcgcctatcattgagcaagctgtctagta

SEQ ID NO: 49852 - DNA, 343 bp, Setaria italica
  Peptide Sequence Number=SeqID_115826
acccgggtcgaagaacgaaggacgaaggcttcaaaatgtggcgagttttgaggcaagcggtggtggccgccatgttccatcatcgagacaaccttctcgcttggttatgattcaccagactcgagaccgcttctacattactgcaaaggttgaagaaaccattggggtcagcttcagataaaagcatgatatgtgacggttccagatattctagtatatgaatatttcgatgctaaacataagagattgcaacaagcatcaccagatatataaattctaactatgctacgttctataacaaaacaatatcacttactcgggagctgcagtggtcacactgggt

SEQ ID NO: 49853 - DNA, 275 bp, Setaria italica
  Peptide Sequence Number=SeqID_115827
cgcaaacctttattattgtaatcggacatacagcttgctttgctttgctttgctctcttcatcatcactaagcgccgtgaccaaagggcacggcagccaacaggcccactagttagcgtacgacccagccgcacaacacactaggagttcatttttacagagaggaggggaggggcgccgcctcgaggacaccgcgctcacgctcaccctccgcctcccgggctccgcgtcctcgtcctcgtcctcgtcctcctccgccttccccgaccccgacc

SEQ ID NO: 49854 - DNA, 424 bp, Setaria italica
  Peptide Sequence Number=SeqID_115828
agggaggggcgccgcctcgaggaagtcgtcgtcttaacggttctttcggaaaatttacataacccgggtcgagacgaggcgaggcttcaaaatgtggcgagttttgaggcaagcggtggtggccgccatgttccatcatcgagacaaccttctcgcttggttatgattcaccagactcgagaccgcttctacatttatcgggagctgcagtggtcacactgggtggtctcacattggaatggttcttcttgtagaacctgatggagataagactgctatgtgctctgattgatgattcaggagatccatggaagcttacggctgaaccatgtcccgagaaaaacctgatgacccttgtttggcattcttcatcttcttcaatgccttcattcgctcaatcctagcccttttcaacattgcaagt

SEQ ID NO: 49855 - DNA, 277 bp, Setaria italica
  Peptide Sequence Number=SeqID_115829
ttgttcatgtggtatctcttgtcacttaaagtgtgctctaaagataaaaaagctggcattgtcaagaatgggtgcaacaagttggattgtagtttctactgtgttagctgcgggaagatcaactggctaatgaggtatccttctgattgttttgattcgttaacatccttagaaaataatgttttataagaaaggaaactatgaactctgcttgttaacctaattcttatttaggtctggccatccaaaactaccgtaacagtttgtattaacgggc

SEQ ID NO: 49856 - DNA, 126 bp, Setaria italica
  Peptide Sequence Number=SeqID_115830
tggtatgtgcgagtgcagggaggtagtcttatgataacataaatcatatcctgactttggagatgttttatgttatcttgtgggctctgatttatttcgtatggtatgtgcgagtgcagggtgatt

SEQ ID NO: 49857 - DNA, 333 bp, Setaria italica
  Peptide Sequence Number=SeqID_115831
gcaaattcaaatcctttttctgatgctgcactgaatcctctttgaggcacacactctcagaggattcagtgcagcatcagaaaaaggatttgaattttgcagaatcatcagagagccattcaacatgattcacctaagggttctacaaattcaagtgagaacaatttatcctgtgaccggtattctaagcgggctaagatcgcaaggttagatggtgcaagtgacaatgatgaagccaattgccgccaacatctgaagttttaccattcccgagctccaactcctctccttcggaagctccaagcaaacccgacgtgcttattggcacccaga

SEQ ID NO: 49858 - DNA, 433 bp, Setaria italica
  Peptide Sequence Number=SeqID_115832
gctacagattaatattacgaactcaaaaattagctcatcaaagagaaaacaaacagaaaaaaaatgtactcctcatcacatccctagcaacatcacttcaacatggcctggttaccgtagcatcgcgctcagttcttgacgaacgtgctcagaacatcgaagtagtcggggaaggtcttgcgggtgcaccggggtccctgatcgtgacgggcacctcggcgcaggcggcgagggagaaggccatggccatcctgtggtcgtcgtaggtgtcgatcgccgtcacgttcagcttctccggtggcgtgatgatgcagtagtccggaccttcctcaactgatgctccgagcttagtgagctcagtccggatcgcaaccatcctctcagttcttcctttctacttcttcctaggtaagtcctactattcttcttaatt

SEQ ID NO: 49859 - DNA, 437 bp, Setaria italica
  misc_feature (10)..(10): n is a, c, g, or t
  Peptide Sequence Number=SeqID_115833
ccttcactcnccaggaagccacatctctaatagcggttggccgtcagcaaagagcgcaacaacagcaagggtcatggcgacatcaggcattttgttcatgttgacatcaattggcttttaggtgtttcctcccaaatggctcccgtggtggaccggtaacagttacactagtctcagtccatgtaaccttcgctcccatcttctccagtacctcagcaaatttcacatcaccctgcaaactggtggtgccacacccttcaacagtcacagtccctccggtaattgcagcaccagccaagaaatagcttgcacttgaggcatcgccttccacatatgcattcttaggggacttgtacttttggcctcccttgattattagtaaccttgttccctagtttatttcttagttaatttgttctttctttgttctttttctt

SEQ ID NO: 49860 - DNA, 229 bp, Setaria italica
  Peptide Sequence Number=SeqID_115834
cttcctggagagtgaaggagactgagaggatgccacatctctaatagcggttgggccgtcagcaaagagcgcaacaacagcaagggtcatggcgacatcaggcattttgttcatgttgacatcaatggcttttaggtgtttcctcccaaatggctcccgtggtggaccggtaacagttacatggactgagactagtgtaactgttaccggtccaccacgggagccattt

SEQ ID NO: 49861 - DNA, 196 bp, Setaria italica
  Peptide Sequence Number=SeqID_115835
acgccaaaacgactccatcaatctcaatgtcatgtcgactagggaatggagattagtttatcaatgatttcaatctccacgtccccaagagctaaaggagcagccatcaacaaggcactcaagtattgactgctcctttagctcatgtcgacgtagggaatggagattagtttatcaatgatttcaatctccacgt

SEQ ID NO: 49862 - DNA, 253 bp, Setaria italica
  Peptide Sequence Number=SeqID_115836
cctctttggcgtccttctcaactgggaacttgccgccacagccagcaactacagctcttttggcagctttgtctgcttcaacggagagcccgagggccttcaaggccccaagcatgtagtggacatcctcactatccagcaggttgtcaaccactgtcgtcccctcggctagggcggagagcaggaggatccggttggagagcgacttggacccgggcagcttgacggtgccggagatctccctgatgggctg

SEQ ID NO: 49863 - DNA, 158 bp, Setaria italica
  Peptide Sequence Number=SeqID_115837
gctaaaggagcagccatcaacaaggcactcaagtattgactgctgatggagccagatagcttaaccttgccaccaggtagccctccaatccccaaatctcgcacgccccgaagccttcaaggcccgaaaccctagcacctcggcctccccgccgcccg

SEQ ID NO: 49864 - DNA, 157 bp, Setaria italica
  Peptide Sequence Number=SeqID_115838
cattcgagaaaggagttcaaccatcaatataagaatttagcatgtgggatctgatagcaaaccttgccaccaggtagccctccaatccccttgacacgaacaggtgggcagtcagtgccaaggaaacaatcaacatccgcacccagctagtttacaa

SEQ ID NO: 49865 - DNA, 331 bp, Setaria italica
  Peptide Sequence Number=SeqID_115839
ttggtactgcatctggttacacctccctgtccaaggggagatgtaaccagatgcagtaccaattccaatcattgcgtctgtctctgagcatcagccaacagcatggtcatcattcatgtttgatttccacatcctcctttttcctgttcccttgcggccaaaactatagatggagaagagtaagcctcagatgtcacccaagtgcagtgaatggcatacctactgagcaagtaaaaggcacccagaagaagagcaatagctgcgttatgttggaatggcaaagattgatcaaccgctccctttgcagctgcctttgagccagttgtttttt

SEQ ID NO: 49866 - DNA, 230 bp, Setaria italica
  misc_feature (121)..(121): n is a, c, g, or t
  Peptide Sequence Number=SeqID_115840
ccatattctgtggtaagttctccaaatcggtagtaacaaagcttgtacattaggcagttcaacatttttggtgctgcacccttatcaacacgatattccccattaacaaggtaatcaggcnctttgattacaggaaaaaacacccccaccaatacgcaccatccataagaacttattaatgtcatctgtaatttattgttgtctttgtttgttatttttggttaggttta

SEQ ID NO: 49867 - DNA, 192 bp, Setaria italica
  Peptide Sequence Number=SeqID_115841
ctcgtgggctcgtgccgtgcggcggtgctctgacctaggttcgctccccgcggcggcggcggtgggggggttggctgcagcttcgtggcgctgtacgaccgggaggacgtggagacgattgggctggacgacgcggccaagcggctcggcgtcgagcgccgccggatctacgacatcgtcaacgtgctcgag

SEQ ID NO: 49868 - DNA, 404 bp, Setaria italica
  misc_feature (383)..(404): n is a, c, g, or t
  Peptide Sequence Number=SeqID_115842
ttcgttcgtttgttctttctttaccgttcggttcgtccgtccggtcgtacgttgtaagcacgccggcgatgagccgttcagcgttttcgtcaagtcggcacggaggatcaccattctaaccgacgctgggagcgacaacctagggagctaaacgatgagcagtaaaaccaatcccagtcgcgagcattctgttattggtactgctagcatgtacaggtgaacccgcgaggttttgttcatctccgttagattccagctctgaagagagatctccccgtggcagctcgtaagcaatgccacaatcattaggcacttctccccttctctctccccagtgtatccctatcaaatgtaaaacgtggggtaaccctattaactaaacnnnnnnnnnnnnnnnnnnnnnn

SEQ ID NO: 49869 - DNA, 224 bp, Setaria italica
  Peptide Sequence Number=SeqID_115843
atccatggtaattccatgtaatgtacaataaaagatatgttatgcctgtttgcactttgcaagtgaataattattcatccttctggatcggagcgttctcttcatgcgtccattgatgctctaagttcttgctatggcgacaaacaaggcaacaagttccgggtatgggtggatagactagttacatcaccgattggtacaagtaactggttggtgaggtttga

SEQ ID NO: 49870 - DNA, 227 bp, Setaria italica
  Peptide Sequence Number=SeqID_115844
tgggcattttatgacattttcctgagcatttcggtgtcctagattccaggtaatctcaacgattccaccaggcacaactgaggactggtataataatccttaagcctcctaaaagaatttgagagcattgtcatcatgaagctggaggaagtccatacattgtacaatcatgaagctggaggaagttcacgtaacccatctcttcacgtaaacgcattatctgccca

SEQ ID NO: 49871 - DNA, 410 bp, Setaria italica
  Peptide Sequence Number=SeqID_115845
ttaatttactttacgttttactttactttaccttttttactttttaacggttcttttttgttctttctttctactttgtttgtagttactaggtatttgtattcttcttcttagctgtagcagcatttgggctcctttcataaggcccatttggatcttcatcaacgttgatactggaaacttcttcattagcaccacgcttcagaatatcagaagcaagcaaatcaccgagtctctcaaaacgagcttgtgaccttttcaattcttcctgtgccttcaaaaagcgagcatgagctttaatgaacttctttatttttgaggtcatcctgtggcattcctctttctccttccttagctgcagatcaagatcatttactctgctagaatctgcgtacttctgctattcttct

SEQ ID NO: 49872 - DNA, 248 bp, Setaria italica
  Peptide Sequence Number=SeqID_115846
acgctctgccacctgtgacatctgaaaaatccctttgaacatcatcaattccaagaaaatgcttctgctcaagcattgatccagagcctgatctaaggttatattttccactgttctcaatgctgttggttaaactatcaaggttgaccgatccctcctgcgctgactgccctgtttttgcctgatcttttctgtagttgtagttttaccagatttgtcaagatgtagctgaaattaaggaggccttt

SEQ ID NO: 49873 - DNA, 329 bp, Setaria italica
  Peptide Sequence Number=SeqID_115847
tttttgcttcttcacttgttgagttaccaggattgaatctcttcttagctgtagcagcatttgggctcctttcataaggcccatttggatcttcatcaacgttgatactggaaacttcttcattagcaccacgcttcagaatatcagaagcaagcaaatcaccgagtctctcaaaacgagcttgtgaccttttcaattcttcctgtgccttcaaaaagcgagcatgagctttaatgaaaaggagagaacgagatgcagaatttgataaaccaagcaagggaactgagccaacaaaaggtttatgtttgactggagaatctttgaccttg

SEQ ID NO: 49874 - DNA, 308 bp, Setaria italica
  Peptide Sequence Number=SeqID_115848
cagaccagttgttaacagcttcttcagaaaattagtatcatccccagccaagttcacgcttgaaccctgcttttttccccctagtcaactcattgacgctcccaaccaagtgattagctgacgctctgccacctgtgacatctgaaaaatccctttgaacatcatcaattccaagaaaatgcttctgctcaagcattgatccagagcctgatctaaggttatattttccactgttctcaatagactagttaggttaaaactaataacaaaaggttaagaaaccgaaataaccctaacctaagaacgaa

SEQ ID NO: 49875 - DNA, 233 bp, Setaria italica
  Peptide Sequence Number=SeqID_115849
cctatccccctgtgtgccttgcctatcctctgttgcgtgtctcagtccctaaagatagagcaaatgttatacaaggaaagatacaatactgaacgaaaaatgtatcaatatggagataggtcacccataaacctgtaagcttaccacaacctttgagctacaagataattcaataagcaataagtagaagggtctccagtataataccactagccacaacaaagtagggccaa

SEQ ID NO: 49876 - DNA, 364 bp, Setaria italica
  Peptide Sequence Number=SeqID_115850
accatctcgacacagcacttattccacgtcgacttcctcatcatcaccctccatacttgtcagtgttggctgaggaaactacattgcctatcttatccttttcatcttcccacaatttcttcttcaaatataaaccttttgttggctcagttcccttgcttggtttatcaaattctgcatctcgttctctccttttctttacggcttttgcttcttcacttgttgagtacaggattgatctcttcttagctgtagcagcatttgggctcctttcataaggcccatttggatcttcatcaacgttgatactggaaacttcttcattagcaccacgcttcagaatatcagaagcaagcaaatcacc

SEQ ID NO: 49877 - DNA, 320 bp, Setaria italica
  Peptide Sequence Number=SeqID_115851
actctgctgaaatcttgcgtacttctgcattcttctcatccaaaattatctccaggtgagatttatcatcacgcagaagttccatatcctgtctatttttgaggtcatcctgtggcattcctctttctccttccttacgctggcacgtagtccaagatcatttactctgctagaaatcttgcgtacttctgcattcttctcatccaaaattatctccaggtgagatttatcatcacgcagaagttccatatcctgtcttatttgtttcagctgtatttcttgatcctctttgtcatcaccacttaagagtgtctcctttt

SEQ ID NO: 49878 - DNA, 386 bp, Setaria italica
  Peptide Sequence Number=SeqID_115852
tgctatacgccctgtctctttgttgctaggaacagaggtttccatagcctgggctactgaggagacgacacctggttccatcttattctcatcagaggacgcaaggcctgccttcttcatcctgattgttgatagatccgtagaaactgcctgggatgtagcaggatgttggtttgtagagcgttttagtaagggagtgagagctcccttttgatatgccactatcagacctgcatatgaaacacaaagcacatcagttgttaacagcttcttcagaaaaaattagtatcatccccagccaagttcacgcttgaaccctgcttttttcccctagtcaactcattgacgctcccaaccaagtgattagctgacgctctgccacctgt

SEQ ID NO: 49879 - DNA, 192 bp, Setaria italica
  Peptide Sequence Number=SeqID_115853
tgagaagctaatctgccgcagcatgatgtcccaagagagagtgatgccaactggaaatccgcacggtcattctctagatcccgtacggattgaccaatgctgctattaggcctcccagtgtacaacacttcttcagcatcctgaggaactgattcaggaatgtgctgctggcgattactgatatttgctata

SEQ ID NO: 49880 - DNA, 402 bp, Setaria italica
  Peptide Sequence Number=SeqID_115854
actatttcttccttctttgattgcttacatggcgtgactgaaggtatttgctgtaatgccacaggaattggtgttcatggaggtaaagcctggctaagattaccaccggaaatagctaattaaattgattctaccaacactgctatattctttctatttgttgtgggtttttcaggtagtggagcataacattggatcttcaagcattgcttttgtatacctggaggatcttctcatccatttcaggttctttggattgcttctcatcagtaaccaattgttgacttttttaaagacaaagctatggaacctgaaaatgtgaataacagcttatgcagagactttttttggttgtgcttcaccattacagagatgaaatgtctcatctctaaattcctaacc

SEQ ID NO: 49881 - DNA, 428 bp, Setaria italica
  misc_feature (352)..(428): n is a, c, g, or t
  Peptide Sequence Number=SeqID_115855
tttttgttttttcggttttttggtttttagtttttccttttacgtttcgtttcgggttaccgttcgtatttcggtcttcgccaagctgacggcgttcaaccacacgacgctgctgttcgagtacaagaagagccgggacggcagcgtgcacgaccacttcaccgtctcccgcgactaccgcgacgtcctggcctgcggcgtcgacaactgccccagcaccaccttggcgtcatagagtttcatgtcgattcaatttgttctttgtcctttgaattctgatagatgcactgtccattgaattcctgaggactaactagtttgtccttttaaacgaaaagttttgctctttttnnnnnnnnnnnnnnnnnnnnnnnnnnnnnnnnnnnnnnnnnnnnnnnnnnnnnnnnnnnnnnnnnnnnnnnnnnnnn

SEQ ID NO: 49882 - DNA, 266 bp, Setaria italica
  Peptide Sequence Number=SeqID_115856
taaaaaaggttgtatcaattttttaattctgaaatgtagggtctattgggataagattataatgtccaacaattcctatgttgcccatttggatttagtgttcagtgttccaaaagaaaagtgcgactgatgtttccactatccatgaaacccaataagagcattagcatcactatgtatcttgatggttttatgtcaggtcctcctgcaaggacagttggttggcgtgatcctggtttcatacacacaagttttctcagggactt

SEQ ID NO: 49883 - DNA, 299 bp, Setaria italica
  Peptide Sequence Number=SeqID_115857
cataacttccagtggcaattacacaactgttatgatctggtatgcattccgaggaagttatgacacaactgttatgatctgttatgatcttcctcggaatgcataccagatcataacagttgtgtcataactgttatgatctggtatgcattccgaggaagatcaaatgacaaacgatcaaggaatgcaaattacgacatatcaactaaggatcacgtcattattgaaagcccttcccatatattatgtggtcatgatgatattatcacatgcatatttgtcagcacggaattagaccc

SEQ ID NO: 49884 - DNA, 204 bp, Setaria italica
  Peptide Sequence Number=SeqID_115858
cctatcccctgtgtgccttgcctatcctctgttgcgtgtctcagagttgcatggagctaagttgctgtggtgagtttatggtatgtgctggtgatcatggtcaaattgttctgcgctctatgcattcccttgatgttgtttggaggtatgagggagctgggaagacaataacttctttagttgtgactcctgaggagtgcttct

SEQ ID NO: 49885 - DNA, 199 bp, Setaria italica
  Peptide Sequence Number=SeqID_115859
caaggagtagagagacactgtgctactactgcttgctcgtgtgcttctggcaggaaccaaggatggtagtttgattgtattctcaatagaaaaccctttgcttcgtaaaagcaccatgcaacggcacaaggcaaaaccttctattggtggttagtggtatagatgaaaacaataccagaactcacctctcatttgaaac

SEQ ID NO: 49886 - DNA, 175 bp, Setaria italica
  Peptide Sequence Number=SeqID_115860
ccagaatcttgaggccatgtgtccgtgatacaaccttcctcctatctgaacaacatcagaatcattctgggcaccgcagttcctccataaaccacttcagagttgaggaagttcctgtgggttctccattgatgctcttaatatcatacctgctctccgcttcttgtcatccttt

SEQ ID NO: 49887 - DNA, 414 bp, Setaria italica
  Peptide Sequence Number=SeqID_115861
cctacgatatggtcatttcacttttcacaacctcgatatatgcatgttttttattacgtatctacactggtagcaacacaagctgatgtcaccatcttcacctgctgcagctagctagaactttgctccgtttgagccgttgatcatgtagccatcgacgaccaagctcgagtcctccaatccaaaaatcttggtagtcgagcagccagtcggtcgcgccgtcccacggcaactccgggccggcggcgatgctgctgaactcgtccacgtcgacgctgccggcggtgaagtcgagccacggctcgtcgccggtgggcgggtcctcttccaggagccacttcaccagcgggttccttggttcgttggtcttgttccgttccgttcttgtcttgtcttgtcttgtctttccgtcct

SEQ ID NO: 49888 - DNA, 247 bp, Setaria italica
  Peptide Sequence Number=SeqID_115862
gtattgtgtcacttcgaagtgacacaatacaacattcggcaccacacagcgcactgcactgcaaacccaacttgattcatcacacatcacacgaccgaaccccgacgaccctctggtccccgagatcgcgcacatgtacaagacggaccggcacaagtacgagaacaccgcgaggacctggacccagaggtatgccatgtaggaggaccgggccaccggagctggcgctgctcgtctccgctgtaat

SEQ ID NO: 49889 - DNA, 162 bp, Setaria italica
  Peptide Sequence Number=SeqID_115863
gattcagaaggagctcaaggatctgcagaaggaccctcccacctcgtgcagtgcaggtcctgtgggagaggatatgttccactggcaggcaacaataatgggtccatgtgatagcccattattgttgcctgccagtggaacatatcctctcccacaggacct

SEQ ID NO: 49890 - DNA, 290 bp, Setaria italica
  Peptide Sequence Number=SeqID_115864
cttcttttgtgtgttgggatatgtgtcatatgtaagattcaggtgttcctttgtatatttcttatacatcgagtgaatatacaaaggaacactagttacaatccatttccctcctgatttatcctttcaaaccaccaaaggtggcatttcgcaccaaggtgttccatccaaacataaacagcaatggcagcatctgccttgacatcctgaaggaccagtggagtcccgcactcaccatttccaaggtgctgctgtctatctgctccctgctgacggatccgaaccccgac

SEQ ID NO: 49891 - DNA, 410 bp, Setaria italica
  Peptide Sequence Number=SeqID_115865
gcgaaaggcgcaaagccgctggcgatgccacaggcgactccgcagcagcttcagcaactgcagcagctgcaacagcagatgcagatgaaggggatgaagcttctccccagctcatggccatgggtggcaagatgccgttcccggcggcggccgcgccgccggcgaaggaccccaaggccgtcaagttcaacgttcccgtggacgacgagttcggggacgacggcagcgagttcgatgatgagttcgatgatgacttcgacgacgaggatttcgaggacgacggcctcgacgacgacttgtacgacgacccaaagatgatggcaaagcccatggcaatgccgatgggcaacggcggggccggcaagaagggtggcggcgggaacgaagaattccggtccaagaatcaaaga

SEQ ID NO: 49892 - DNA, 299 bp, Setaria italica
  misc_feature (41)..(41): n is a, c, g, or t
  misc_feature (48)..(48): n is a, c, g, or t
  misc_feature (57)..(57): n is a, c, g, or t
  Peptide Sequence Number=SeqID_115866
acctgtccattattgaaagaaaaaggctgtttttcctaagngaaatgnttggattgnttaaactgcaggtgtctaccagagcagtgtagatgcagagcaggggaaggtgacggtgtccggcctgatggatccggcgaccgtcatcaagaagctgaacagggcgggcaagcccgccaacctctggggcgccaagcctggtgtggtaagccaggtccaaaagctccagctcggcggcgccggcgccggcggcaagggccagcaaccgaaggatgctggacggacaaaggggacaagaccca

SEQ ID NO: 49893 - DNA, 240 bp, Setaria italica
  Peptide Sequence Number=SeqID_115867
ttcgtgtggcaccacaccaccatcaagaagtacgagtacgacatgcagaacaaggtgaccctcgagtggctgctcgccctgggcgacaagctcggcatggtgcgtgtcccgggcatcggcctcgtctacaccgacctcacctccggcgtcgctgctcgaggtcggcatggtctacgtgctatgacaacgtgattgcggatctccctgcttctttttgtcagtgcgtcaactacggatctc

SEQ ID NO: 49894 - DNA, 251 bp, Setaria italica
  Peptide Sequence Number=SeqID_115868
cgttagcttacccccaaaaagacacttttacctgtcttaccgtgctcatttctgctcttttttcttccctcgcagatgcggtcatcccgataacctgtgctatattagtattcctgtttgctctccagcattacggcacccaccgtgtcggatttctcttcgcaccgatcgtgctgtgctggcttctctgcatgagcgcaatcggcttgtacaacatcatccactcggaacccccatgtttaccaggcact

SEQ ID NO: 49895 - DNA, 238 bp, Setaria italica
  Peptide Sequence Number=SeqID_115869
tcaagtacgtcaccatcgtcctgcgcgccgacgacaacggcgagggtaacaaatcattctgaagcttatactttattgattgactagcatgtcatctttctttcctactacttgttagtattaagcttattatgctcatgtgttgttgcgaactgcgatcctgaactgaattttgcaggaggcaccttcgcgctctactccctcatctgccgccacgccaatgtcagcctcctcccca

SEQ ID NO: 49896 - DNA, 210 bp, Setaria italica
  Peptide Sequence Number=SeqID_115870
ggaacaatgaaacgtttccaaaaattgttagtcaagtacatacttttttctgttatagcacacatcactatttttcaacagctagattgcaagtgctggacacgaagctctacaagcaaagcaacgtgtgatcctagatgtactaaactgctaataacttgtatgaaatcttgtacttgcaatctagctgttgaaaaaatagtgatgtgt

SEQ ID NO: 49897 - DNA, 334 bp, Setaria italica
  Peptide Sequence Number=SeqID_115871
tgttttggcaactgattcagggttttttagtatctgaatctgattattgataaatggcctgaatttttatatgagtaaatactctattttgaagaaaggagtagatacttgatatgagtaaatactctatccagaagaacaaagggggggtccagagatatcggagacagaaggttgggtcatgtcagcgtagaagttgggcactgacctttcccatgtaaaagtagcttgcttccatctctgcatccagggccctcaggaacttgtccatgtcaaagatggacgtcgagcatatgggacaagagtaactttgttacgttagtactttactaaa

SEQ ID NO: 49898 - DNA, 228 bp, Setaria italica
  misc_feature (192)..(192): n is a, c, g, or t
  Peptide Sequence Number=SeqID_115872
ctcaccgacgacgtcgccgacctcgccgtcgggctcgccatcgccgtgctacgcaggatcccgcaggccgaccgattcgtccgcgccggcctgtggaaggccaagggcgactacgcactcaccacgcggttcagtggcaagagagtcgctattctggggcttggcaggataggcttagctgtagcgaaaagngctgaggcatttggttgctcgatcagctatcactca

SEQ ID NO: 49899 - DNA, 234 bp, Setaria italica
  Peptide Sequence Number=SeqID_115873
cgcgccagtctcccttaccgagcttctgcagacccatcagaaacattctatgctctccttcagtccaaggagtacctgaagcaaaaaagtagtccctttgaagctgtgatgtgcacacaataactatgagataaatgatacataatagcacactaagataaatacatttcagagaagacagtcgttccctttgaatttgactagcatgaatccataagtgctacatacaagatt

SEQ ID NO: 49900 - DNA, 469 bp, Setaria italica
  Peptide Sequence Number=SeqID_115874
ccaatgagaaacagggtcagtgattggtaagggcaagactggtagagcagttgggttgatgaaaccttgaacttcttctgaatagtgtttgtcatctgatgaccagttaaggattacgtgaatacacagcaaggaattcgtgaacacatagcagagaaactcaaatgcaatggagttctacaacaagggcaaaaggactgcatatcaggaccaaatacaagtgcattgacaagtacttgtgaactggcaaagtgaaagatagtcatggcagccttctgtttatttagaaggaccggtacttgtgttgaactggcagattttatctcatttattgatgtgaatataagctagcgctgttggccttgtagtatacttggacaacgctaacctaaccacatgaaatgtaactgtgtatgtgcacatcctactcaagtcaacacaatatttaacccttaaatttcatttatgg

SEQ ID NO: 49901 - DNA, 178 bp, Setaria italica
  Peptide Sequence Number=SeqID_115875
tgtagtcttcctactattgggttacctttaagtaggtcttcgttcattcagcaacaccacccccgttttcaactttgctcaaagagtctgagatcaaaggggctgcctcgctttctttcacctgttgtggggagacttcagtgttttttgctgtgtctccactgtgcagaagtatgaa

SEQ ID NO: 49902 - DNA, 239 bp, Setaria italica
  Peptide Sequence Number=SeqID_115876
cttgttctccagcctggaagttctagcttcagcaggctagccaccagcaatgcagccaacatggcagatgacatgaatgacagggtatctctgcgtgttatgtggtttctgaaccagtcagccaatgcccaaggacgaacaaggttcagaaaccacataacacgcagagataccctgtcattcatgtggtttctgaaccttgttcgtccttgggcaaatacaaccagtcagccaatgcc

SEQ ID NO: 49903 - DNA, 373 bp, Setaria italica
  Peptide Sequence Number=SeqID_115877
actggattggagtcctcaaggattatgtttcaataagctttggcttgcaactcaaaaatcaattacaagccattccttgatgggattcagtcactattagtctcatccaaggtgcagaagtatcttgaagaagttttgggcattaattcttcaagcaacagctcttgatgctgcgcctatggaatttgacatgaataagtctgatggtttacttgaacagacatttatatctgggcattgtatggtcaaattggatagaactgaattcgagtttctttgggggttatctatccttgtgctatttcatgcaacgccaaatcaagtggaagaaataagtaactttgaaagaatacaagtacttagaactttaagg

SEQ ID NO: 49904 - DNA, 318 bp, Setaria italica
  Peptide Sequence Number=SeqID_115878
agggaaaatgaactagtctaataacaatctcaatgattgatagattaagtatccagcgaaagatgccttcagcgagatgaacacaacaatcatagccttcagaattatgcaaagtcacaatgacaaattacagctataccttcagcaatctgcttatctaaaggaacagagcactccatgtcatcactcaatttatcaagtgtgcaatttctccccattatgcatattcggcggatttcatgaggatcctctaggagatcaatgagcatttgtttcaggtcacctgctcgtgaacccagcttcaaccaatttctttgt

SEQ ID NO: 49905 - DNA, 305 bp, Setaria italica
  Peptide Sequence Number=SeqID_115879
cctgtaccttatttccccccagcatgcgatgcatggcatgcgagctcataatctgcttgatcacactcaaatgcaagtcccttatcaacaatgccacaataatggtgtattgcatggtggtgttaattattctggaaatcatctccacataggtccacgaattccagttctgttctccagttctgagcgtactttttgggcttccacatcatccatcatagtggcatgctcaggtggtagaatccttatgttctggtggttaactggattttgccagaaatggatgatgtggaagccctaaaaag

SEQ ID NO: 49906 - DNA, 232 bp, Setaria italica
  Peptide Sequence Number=SeqID_115880
agaagaataatagacggactagaacatagacagcatgacttatgaaaggaaagaacttttaaagaacaactaagaaagaagacagatcggagatgtcaatactggtttgacaaaaaaccacattgtagataaattgaggactagcttatatgttccaggaacatccagcacgtctgaccagccatctaaatcttctctagagaatgatgcttgcattatatgccaggaggag

SEQ ID NO: 49907 - DNA, 448 bp, Setaria italica
  Peptide Sequence Number=SeqID_115881
caccaatctctaagggaagttgaacaccatcagtggagatacctttccgttactctccatactgttcaatatgtggtgccaatttctcaagtgccggggaatatggtaatattgctctagctgggtaaccaagaaatgaaacattccacaccctcagcaaaccgagtacaggtatatttttctcaaatgaagatgtgtagaagtggttgtcaatgctggaagcaccctccaaaaatcttcaaaaggtaataaagaaatgtcaagagagtactggtgttcttcgatcttactctgaaaataatcttctgtggtttccaacattatcattaatacttcaatacaagacatggttattagacttatgaggaatttgacgatttaatccaggccctgtttggaggctcttaatttaacatgcaaaacaccaatggcaatcgaaaaaaagatg

SEQ ID NO: 49908 - DNA, 258 bp, Setaria italica
  misc_feature (3)..(3): n is a, c, g, or t
  Peptide Sequence Number=SeqID_115882
tanatttttctcaaatgaagatgtgtagaagtggttgtcaatgctggaagcaccctccaaaaatctctggacaattggaaagccatactgaagagataacggaagaacaccaacagcactgcaaacactatagcgtccaccaacccagtcccagaaggcaaaagcattgtttgggtcaattccgaactccttcacaagcttaagattagtaccaacagcactgcaaacactatagcgtccaccaacccagtcccagaa

SEQ ID NO: 49909 - DNA, 488 bp, Setaria italica
  Peptide Sequence Number=SeqID_115883
catgacccactgcttccatgtaacagatcttcatcaacacacaatgcgaagcttccacctcctccaaatgccaaagcatcttcaagcacaaatagtagaatctgtttgcaccagttggtctgaaaagtctaagttcaccatgtactgttgtgaacacaaatgtctggtttgttccctgatatttccttttctccgtaggccgcagaggactgttcaataaaccaccaaacacagccccttgcatatctccgacaatcaataggcatggaccctgaacattctcacttctacgaagaagtgttcttagagatatcccatgcttccaggtgctatatagcaatacccagtggcacccctttaaggtcccagggagagaagattcaaaaaatgcatacagtttggagatacaaacatagacttttcagttaagaataaatagaaagaagtagacctagacaacaagtactagaaagtacgaatagtttaca

SEQ ID NO: 49910 - DNA, 161 bp, Setaria italica
  Peptide Sequence Number=SeqID_115884
tttctttcgttttattacaagaatattaacatcacaacgaacaagtacacaggattacacctgacggtcgtatgggggcaattagcttccgctatttcgaacggctcagcaatggttgtgacagctatgttagcaggcaggaatcaaaaaacctgagcact

SEQ ID NO: 49911 - DNA, 435 bp, Setaria italica
  Peptide Sequence Number=SeqID_115885
tgggtctagtagtagtagtaagtaaacctaaactagttgttgtcttccgttattccttgtcttgtctagtttttactaccaccccggacgggagtcgcagcacaagctgcccaccaaaaacactcttcacatagtagtagcagaaatccgcgaggatgaatgtctgaacgatttcggagagaagcaccattgatggccacagaccatagcccagcgctgtcaacaaacggccacgggtatccagaacctgaaggacccagtgtgcacagctaagaaaccttgcgacacccagtgcaaacacataatgagctgtgaatggctcaacaatcttggtattttgcatcaagcgcagctggggtagcactgaaacagcttccaaataaacacaaaaggcccagcaaagtctgttcactatgttgtgcgatgttgtaggat

SEQ ID NO: 49912 - DNA, 253 bp, Setaria italica
  Peptide Sequence Number=SeqID_115886
tttttttttttttttattcccagtgataattttttactttccatcaattaatttgtacagtaatagtaagggtgattttagtttctcgtactcatgtaagacagagaaccgagcgcagtacatttatggcgaacagtgataaattccaaataatgttagatacatttatcgtaactagcacatctatctcatcagcttttacaacggttaacaactacacgggagtatctgtattgaactatgaagatgtatt

SEQ ID NO: 49913 - DNA, 379 bp, Setaria italica
  Peptide Sequence Number=SeqID_115887
ccctgtccagacctatgccatgtactactgtgcttccactacttcaagaggatcatggagacattcttcgtgcaccgttcagccacgcgacatcacctctgtcaaacgtcttcaggaactgtgcctactactggactttcggcgcttacatcgcttactactgcaaccacccgctctacaccccagtgagtgaactgcagatgaagattgggtttggcttcgggatcatctgccagattgcaaacttctactgccacatcctgctgaggaacctcagaagcccaagtggtagcggtggttaccagatccctcgtggtttcttgttcaacatttgttgtacctttgtcgttccttaactttacttaccttaccgttagtt

SEQ ID NO: 49914 - DNA, 239 bp, Setaria italica
  Peptide Sequence Number=SeqID_115888
gtgggttgggttcaacattgaccaactacaagaactagtaagacaaggactacatcttcctcgtggtggctgcaagcatcatgaccaactgggcgctaggcaagcacagccgcttgaagaagctgtttgatggcaaggacgggaggccgaagtatcctcgccgctgggtgattctccctccattcctgtgaagaggtgatgattgtgattgctgctggcctgtcacgaatgcaatccta

SEQ ID NO: 49915 - DNA, 244 bp, Setaria italica
  Peptide Sequence Number=SeqID_115889
tgccagattgcaaacttctactgcacatcctgctgaggaacctcagaagcccaagtggtagcggtggttaccagatccctcgtggtttcttgttcaacattgtgacctgcgccaactacaccaccgagatctaccagtagtaggcacagttcctgaagacgtttgacagaggtgatgtcgcgtggctgaaacggtgcacgaagaatgtctccatgatcctcttgaagtagtggaagcaccagta

SEQ ID NO: 49916 - DNA, 347 bp, Setaria italica
  Peptide Sequence Number=SeqID_115890
tctccattataagtacaccaaaactatagacatcactcctctcatttaacatcccagtgctggcgtattcaggtgccacataaccaaaggttcccataacacgggttgtaacatagcttttctctgagcacaatagcttcgcgagcccaaaatccgacactttagcattccactgctgatcaagaagaatattgctagctttgatgtcacggtggacaaccttcggttccagcccctcatgaagataggccagcctggtatgtagaagttgtatgtcagttttcggatatttcacctcatatagacaaacttttaattaaaaaaaacgtaatgttggttgtttaaac

SEQ ID NO: 49917 - DNA, 300 bp, Setaria italica
  misc_feature (33)..(33): n is a, c, g, or t
  misc_feature (299)..(299): n is a, c, g, or t
  Peptide Sequence Number=SeqID_115891
atctgtaccgatggtgctcacgcttgctgaagntcccatctccttggagctgtatctgtctgaaccctcccttcggccttcttatcatctcggaataggaggtcatccatttcgagcatgtgaattacatgccccattttaggcctcttgttggcatcagggtcgacgcagcgtagcgcaacgagcagtgcccgcttttagttgtttttgggtagtaaggtctttttctagtcctattctttagggttcctacttactttccttccgtcttttccttcttcggtctaacctattggttnt

SEQ ID NO: 49918 - DNA, 236 bp, Setaria italica
  misc_feature (64)..(64): n is a, c, g, or t
  Peptide Sequence Number=SeqID_115892
tagattcgatccatccaagcaatcacatgaatcagaacctcaattactaactatcatcattacnctaaaatctctggtgcagagacactgccagaggtgccattcgagaggccaaccccgcccaacgaacacgggtggctctcggacttccagcgggagctcgtggagctcgcgagcttcctgaacggcgactacatgctgacgagcctcgcgcaggagacccggaggaagaagat

SEQ ID NO: 49919 - DNA, 227 bp, Setaria italica
  Peptide Sequence Number=SeqID_115893
cgcataacttgaatacatagtttcatcagcacctattaagcgaatcaagacctccatgatggaagtaataccaataagatcaacaagttatgcggattctatgcaatggttagatgacataaaagtccttgagatgatagttgacaagttcagcacatcagattctcctgaggttcatgcaaatgttgctgagatcctttgtgcagtaactagatatgcccctccag

SEQ ID NO: 49920 - DNA, 471 bp, Setaria italica
  Peptide Sequence Number=SeqID_115894
tactagaaacaataaacaggataaatagataactgacaagatttgatgctaaaagcaatctttagttcttactgatgtgctgaacttgtcaactatcatctcaaggacttttatgtcatctaaccattgcatagaatccgcataacttgaatacatagtttcatcagcacctattaagcgaatcaagacctccatgatggaagtaataccaataagatcaacaagttggctaactatttcaggatgaccctgcacataactaactagtgggagtgtcttcctcatcatcaagcagatcactaccttggcaaagtaaccagccgaaagtgtcccatgagggtggtcagattggaggaaggagaaaagtaaattcataagatcttcatcctccactaatgtcttcatgataacatccacttcgcatgtgaatatttcacaagctataaacggaaatctaaatatccttttctt

SEQ ID NO: 49921 - DNA, 260 bp, Setaria italica
  Peptide Sequence Number=SeqID_115895
actgtataatgttgacatgggccaagccatacatttgtcagttcacaaacaatgatttttttcagtgtcacaccttttttccagtaattgaaataaaatattacaaacatggtatagttttagagaaaactgacctccatgatggaagtaataccaataagatcaacaagttggctaactatttcaggatgaccctgcacataactaactagtgggagtgtcttcctcatcatcaagcagatcactaccttggcaaaacg

SEQ ID NO: 49922 - DNA, 256 bp, Setaria italica
  Peptide Sequence Number=SeqID_115896
aaaaaagaatcttattttactaaacactaaatgccttaccttgctgtaattctttatgtaggcaccaaaagccatcacagaaaacatttcctgactatctatgcttgataattgatacgacagatatgacataccttgtggaccgacagtgtttgctaatatcttcacaaagggccttgctcacactttccgattctgaggagcttgtttttatccactcagagagctgcaaatgaaccagaaaaagaataagaat

SEQ ID NO: 49923 - DNA, 349 bp, Setaria italica
  Peptide Sequence Number=SeqID_115897
aaggaaccaaaccttaaaagaacaaaaaataagtaagtaagaatacaacaaataccaacataatgatcctcaaactgtttatacaataatggtccgaccagttcctaatgctgcctgcatgtccatcaactgatccaccatcgtgtgaattgaactctgataccctcaaatttatttcacttcattccctcttattttcatcttcctcctgattctgtccacccagtggatactctgaaacagtgctctcaccaactggttcaggatgcttgattgaatcggaatcagatgaaaccggtagtactgcttctgctgtggtctcaggcgccgaaagataccagacgaatta

SEQ ID NO: 49924 - DNA, 228 bp, Setaria italica
  Peptide Sequence Number=SeqID_115898
ggctaactatttcaggatgaccctgcacataactaactagtgggagtgtcttcctcatcatcaagcatgtccccgatggcggatgcggaggaggcggccgccgcgaagatggcggcgaggagtatgagggcgacggatctgtggattgcagctctcggctccatctcccgcgatctggtgcagcctgcagcgtcgtctccctcccgaattccagtctccgcttccgcg

SEQ ID NO: 49925 - DNA, 214 bp, Setaria italica
  Peptide Sequence Number=SeqID_115899
aagagttttaggcaatatgttattttctgttgagcattatacataggatcatcagacaaattgcaagtgattagtggtagcagatccagtaacatgttcaggtatgtaaataattgcactttttcatctataacgatcatcaaactccaaacctgcaaatgtgattggaccatggtgttggtattggccaactgaaggagtttgttagctatgc

SEQ ID NO: 49926 - DNA, 233 bp, Setaria italica
  Peptide Sequence Number=SeqID_115900
caccctgatgtacaaccagcacattattgtgcaacctgaggcgacattcttgcgctagaccgactgaccagcgtgccacagctgctggagtccatatatgcagaaccaccgatcacccttgacatgcaacagaagcagacttcttgtcacgaccaaaaaggcaaaaacacagcacacaaggatataatctagtatcgcgaagggccaaaggggcattcacagcgggggcataa

SEQ ID NO: 49927 - DNA, 216 bp, Setaria italica
  Peptide Sequence Number=SeqID_115901
cttccagcaaaattgcacaatggccgtccatctgatcttctgaaaagtaaggttacttcactaatgaatctggacatgatctctaaagatagcagacttgagaatgttgtactgattaacaactgagttgtacaaagtatttgcaaatagctcccttccctcatcagcattcttggtatgagcagtaatatccccatactttatttcttcaagtta

SEQ ID NO: 49928 - DNA, 463 bp, Setaria italica
  Peptide Sequence Number=SeqID_115902
tgttttctagtactaattgtcttggtagttgattcgttgaacccaaagggagagatgaaaggtataaccttgaaagttctggtggttctatatgcatgaccaacctggagtaggaatagttgaaagggcagaatattaggaagctattgtcgattaacgttgtgctaattcatgcttgctacgtgaacagtttgaatgatatgtatttgcatcgtgcaggttctgccatcactggacctatcggaaaggagtgcgctgatctgtggcccaggattgctagtgcggcaaatgcgatcgtctaatggaagcagctagttgaagtttatcagtagcatttcctcattttaagagagttcctagctagatgagcttttgatggccccaaggatgtttcgtggattgtgtttgtgttgccggtatcgttttctctgttaactttgaaggcaattctctcggtatcgat

SEQ ID NO: 49929 - DNA, 338 bp, Setaria italica
  misc_feature (245)..(338): n is a, c, g, or t
  Peptide Sequence Number=SeqID_115903
tcttaattggtaagtctagtcttagtttgtaagttttattctagttagtctattttccttctattttaagtagagtttccttagctagatgagcttttgatggccccaaggatgtttcgtggattgtgtttgtgttgccggatcgttttctctgttaactttgaaggcaattctctcggtatcgataagaacctgttgcttagcctgacatctggcagagtttaatcgtttgcaagttctgaatnnnnnnnnnnnnnnnnnnnnnnnnnnnnnnnnnnnnnnnnnnnnnnnnnnnnnnnnnnnnnnnnnnnnnnnnnnnnnnnnnnnnnnnnnnnnnn

SEQ ID NO: 49930 - DNA, 262 bp, Setaria italica
  Peptide Sequence Number=SeqID_115904
agaagggaaagcctgacctcaggaagaaggtgatgccagctgtcattgtgaggcagcgcaagccatggcgccgaaaggatggtgtctacatgtactttgaagacaatgctggagtgatcgtgaacccaaagggagagatgaaaggttctgccatcactggacctatcggaaaggagtgcgctgatctgtggcccaggattgctactgataaacttcaactagctgcttccattagacgattcgtctattttgtccgtctact

SEQ ID NO: 49931 - DNA, 256 bp, Setaria italica
  Peptide Sequence Number=SeqID_115905
tgaagggaatcaaagggcgccttaacaggcttccctctgcctgtgttggtgacatggttatggcaactgtgaagaagggaaagcctgacctcaggaagaaggtgatgccagctgtcattgtgaggcagcgcaagccatggcgccgaaaggatggtgtctacatgtactttgaagacaaatgactaggaagtagaatacgtagaaacccaaaagggaagaagaatagaaaaggttactagaccaatacaactaggaa

SEQ ID NO: 49932 - DNA, 371 bp, Setaria italica
  Peptide Sequence Number=SeqID_115906
gtagtgagaagcagtgatgccatgagtttcattctcttagctagcctctctgatttccttgttggcatgttcaaggaccctttcttttttatgcttgtcccagtggagcttccttttctgcaaaatgaaaattgcagcaaggtctaaaagggtaagaaaaggcaactgcattagacatctgggtgcaaaatgtagatacatgcttgccaagtgtacagaagcagcaggctccgtttattgttcaaacaagattggaagaacccctaacagggctctcacaatgtcataatcctttccaaaaaaagcaatgaatattatcattatgactcgggggcagtcattttaactctaggtgcaagtccaatgaactg

SEQ ID NO: 49933 - DNA, 306 bp, Setaria italica
  Peptide Sequence Number=SeqID_115907
ctactcaacatctacattcaaacacatctgcttccaaagggtcttcacttacataggtgcttaaactacttaccatggtaaagtttcatgttgtcatcattgtccaaaggtacatgatgcttttggtgctctaccatgccttcatcagctagtcgcattcaacgttttgtaatggcaattgcaacagcatgttgatggccttcaatgtgaatgtaggcgtgtagccctgttacatattgaaccgaaaagcatgttcaacctgaatgtaattggaccaaatagaatagaacaaacaatagaaaacta

SEQ ID NO: 49934 - DNA, 240 bp, Setaria italica
  Peptide Sequence Number=SeqID_115908
tgagaacaagagtggaatggagattgaagaaggtgatgatggaaagccatcaaacgagaatgcaggtgctgtagaaaaggagaagaagaagaagaagaagaaagacaaatcagccaccgagacttcagtgaaaactgatgcaggagctgtgcctgctgatgctgatggtgccaagggaaagagtggcgttgtagagccagtgaaggatgataatgaagaaaagaccaaaaagaagcggaa

SEQ ID NO: 49935 - DNA, 477 bp, Setaria italica
  Peptide Sequence Number=SeqID_115909
ctgccagctgatgaaagccataacaagcgaggagaatagctcgaagccaaccacctttggtgtctgccactccagtgatcttctcaagtaacttgtgatagatggcattgttgccaagagcagagcacatgcataaattattggaaccaaagtcctaggcttgttcttcctaagccacatcaatgatcccaatgcagcaagggagagggtcatcacctgtagagaaacacaaatcagcagtcttcttgtcaacaactatgttaaataaacatgatgagttgtagcactaggaagctggtctcttcaaaacaaggaatctgacactacggagtggcatacaagattagcatttgcttcaattccttgaaatatgaactcccacgtaaattcaagccctcttgccccaatccacagaggtgccagtcggtgcagaaccgaatcagcaaaagcccaaccaaagaaccaaacaagcctaga

SEQ ID NO: 49936 - DNA, 369 bp, Setaria italica
  misc_feature (139)..(139): n is a, c, g, or t
  Peptide Sequence Number=SeqID_115910
cataatataatataccctacatactagaaaaaactgtgcgataaatcacagatggggagacataacaaatcaaaggagggcattgaactgataaggttgcagcagaatctccaaaacttcacgcctctatccagtggcngttttgcacttgcagccaaccaatttaaccagtgataataccggcaaggacatcgctctttcctcttgcaaaaatagtgtagactaggcgtatagcgtctagccagccgtcaagagcctcccaactatcggcgacctgtcagtgagaataagggcacgaattatgtactccacgccattaattttcaatagcaatagccaaagtggttatatagacgttgcaattagaca

SEQ ID NO: 49937 - DNA, 381 bp, Setaria italica
  Peptide Sequence Number=SeqID_115911
gagcggactaatcgtaaagcactgcgatagaccgagaatttggcttcagagcatgagcagctgcaacatagatagcagattgactgtaaagctcgttcggggagacatctggtttcccagatctcatggtatcctcagctaaaccgtacaagacagttccgaggttgtatattgcccgatggaaatcaaattgcagctgaattgcagcacggaacttacttatagctgtttttatgatggtttgtttatcccgggcaggaacaattgcactgagctcctgtagcccaagaccccagttattgagagcctgcaataaaaaagaaaagcaagtaaagaaagcagcagcactggctattaacaagattaaatttgaagctgaaa

SEQ ID NO: 49938 - DNA, 256 bp, Setaria italica
  Peptide Sequence Number=SeqID_115912
ataaggttgcagcagaatctccaaaacttcacgcctctatccagtggctgttttgcacttgcagccaaccaatttaaccagtgataataccggcaaggacatcgctctttcctcttgcaaaaatagtgtagactaggcgtatagcgtctagccagccgtcaagagcctcccaactatcggcgaccaagaatgtaggtccatgaattgttcctgcccgggataaacaaaccatcataaaaacagctataagtaagtt

SEQ ID NO: 49939 - DNA, 404 bp, Setaria italica
  Peptide Sequence Number=SeqID_115913
cccaatccttgtgtggtgcaatggcgttgtttgctggaggagcagtcagataccccactttgagatatggcaaaggcaacattgagcggactaatcgtaaagcactgcgatagaccgagtaatttggcttcagagcatgagcagctgcaacatagatagcagattgactgtaaagctcgttcggggagacatctggtttcccagatctcatggtatcctcagctaaaccgtacaagacagttccgaggttgtatattgcccgatggaaatcaaattgcagctgaattgcagcacggaacttacttatagctgtttttaatgaataggtttagtttaatacccgggacaaggaaacaaattagacaactagaagactacctagtaagacccaaagaaccccaaga

SEQ ID NO: 49940 - DNA, 249 bp, Setaria italica
  Peptide Sequence Number=SeqID_115914
tcttcctctgggtctacgtcacggggatggtcgcgcaccccgacaagggcaccatcgagttccaggccgtctacgccttctagatgacccagtggtcctgatacccctctcctgatgtgtttcttgattgatctccccctcgctgttgtcttgctccccgcttcttttccgtcctcacattggtgtatcttctccgtacgagctgttgtaattatgaaacattgattttaatttatccattcctccaaa

SEQ ID NO: 49941 - DNA, 439 bp, Setaria italica
  misc_feature (381)..(439): n is a, c, g, or t
  Peptide Sequence Number=SeqID_115915
ttccattgttaccaacccactcaagggaatgcctcagctcatctcaagaaattcagctactcgcttttctccaggaaataaaacttgtagatgcccactatctcccctgcccgcaacaccaaattcccctccccaccaaccacccatgccaccacgcatcaacaaatggctccaacattaaagcaagaggccttgctttctcccacatgttgtgggcgaaccattggccttccaaggaaacgtattcccagttgatcaggtttagcaaccctagtcagcataacccactcctccaagtttcctagttttcgttctagtctattccttggtagtttcttaggtttagttcgttcttaccttttgtttatttttttattttcnnnnnnnnnnnnnnnnnnnnnnnnnnnnnnnnnnnnnnnnnnnnnnnnnnnnnnnnnnn

SEQ ID NO: 49942 - DNA, 266 bp, Setaria italica
  Peptide Sequence Number=SeqID_115916
caccgagatagtaattccccttcggcagaaagatttgtagtgcttcaaatgttgttggcaatgccatgcagaacccaaccatgtgaaatctttcgaaatttccctagaagaaacatcctttgaataagtaacctgagtgcagttaatgtcattgtcgtcgtatgaatttccattccacctattagctgatgagtaaccataattgcaaccggaaacgagggaggacagccagtccacgacctcccgcctggaccgccacctcctcg

SEQ ID NO: 49943 - DNA, 252 bp, Setaria italica
  misc_feature (210)..(210): n is a, c, g, or t
  misc_feature (222)..(222): n is a, c, g, or t
  Peptide Sequence Number=SeqID_115917
gtttcttctgaacggttgcagcaacaaggagcagcacagagtgatggcaacagggcttttagctcatcgcagcaaaaggctagcttagaaaatggaaggaagtcttcttcctctgaccacgaaagtcagtaagtagctgacttccatggttctgttaccagttatgcttctatttgaacttgtacctacttttttgcttttgcccttttnatgttgtggttnttctatgttcgaacccgtcaccatcagcgg

SEQ ID NO: 49944 - DNA, 339 bp, Setaria italica
  misc_feature (266)..(266): n is a, c, g, or t
  Peptide Sequence Number=SeqID_115918
ttaacgtactaaacctaagtccttaccgtattggtattcctaagtctagtactatttctacagttcttgaggaggagtctgatgaagatgacgaatttctgatacctgaatctgaacaagagccatcaactcgtgagaatgctgcagatgttagacagccagagccagggcgggatgaggaggattcagatcagattgatttatctgggttttctgggaatttacgtcgggatgaccgtgataacagtcgtgactgctggagaatntccgatgggaacaacttcagagttcgaagcaagattttgatatgacaaaagcaaggttccggcaggaaagcct

SEQ ID NO: 49945 - DNA, 278 bp, Setaria italica
  Peptide Sequence Number=SeqID_115919
ttaatttaacgttaaggtaagtacttaccctaagtaaacggtttagtaatttaggggactagttcgcatgtcgcatattgaattgtcatctgcagtagttccggtgcttgaggattaaccaaagctcgtactgcattgggctgccgctatgaagcggctttgcttgaatctctgacagacgtatacagcatactaggaaacatagataaaaggtggctccaggggccggtcctcatgcaaccttcctcgtcctgtgagtgagttaataaactgaggat

SEQ ID NO: 49946 - DNA, 221 bp, Setaria italica
  Peptide Sequence Number=SeqID_115920
aaaaaaataaaaaaactttaaaaaaagttaaaaaaataaaaagtaaaaagaaaacgaactaattaggacggacgtaaatagaatgaatggaagctatgttgtgctgtttcaatccagagagcacccaaactgtggtccacaaccaggatttgtaagggcagatattgagagtggtggcttcaacatttctccactgaaatcccgtaatggaagaacccgaa

SEQ ID NO: 49947 - DNA, 445 bp, Setaria italica
  Peptide Sequence Number=SeqID_115921
cttttcagcaacttctacctctgtaagaggcacacttttaccaacttcctcctctagccagcaccagaattctgctaaagcagcagcatctcttaggtgtgaattcttcattccctcaatctctgcctcattttttaactgacttggcaagtgttaccggtgaaacattgtatacaacattttaatgctccattctcaacaacagggcctctagttgttggcttgtctgaagatgcttctttctctccaaccttttttccctgattttcctttcttttttcatatgtctatcgcaacttgatataaaagcagtaactatggctgcattcatacttgaagaatccaaccagagctttgcacctttctctgccagtctttccacttcagacacaattgcttcatatggcttaagttttactccagctttctcaaggtgcaaccaaaa

SEQ ID NO: 49948 - DNA, 309 bp, Setaria italica
  Peptide Sequence Number=SeqID_115922
gtccttgtacacaaaagtgtcccaatcggcttactatcacacattttggtctactttctgtggctctagatatgggcattgcaagatggaagtacagtagttgttggagggaagacaaatcgagccaagcttgaattttctgaagagatgaaccggttgcttgataaagtgccagagttgatcggtgccaatgagaatgtagtagatagcaaatcgactgccacatgaaagctatttttttctcagttgagattgctgaagacgcagatggcgactcaggtgaactgaaagcttgaattcgcagaatgg

SEQ ID NO: 49949 - DNA, 222 bp, Setaria italica
  Peptide Sequence Number=SeqID_115923
ggaggaggaggtggaggcgccgccgtctggtcaatggaggtgaggtgcggtttgtgtgggggttggcgcagtggacgcgagcgaggactccatggagagctccgaggagatggtgacgcccagggccgccgcgtcggaggcggaagaggaggagaggaaggccgccgcggccgaggtgctcgtggagccgcgctgtcccgccggaacggttgggcaggaacg

SEQ ID NO: 49950 - DNA, 248 bp, Setaria italica
  Peptide Sequence Number=SeqID_115924
tttcaatgatcttagatgcactcgaatcttcttgctgggtaaattagcatcagcttttatgctgccatcaccaaaaaactcagaaaaaatattagttggaatgccaggatggccttcaatgctctgatctactccagtatcaaggacaccacactccctcaccatgtcctgctggcttatgggtctgtagtaaaaccatcttttgaaaaacttttggtttgttatggtacggatattaatctgggcat

SEQ ID NO: 49951 - DNA, 216 bp, Setaria italica
  Peptide Sequence Number=SeqID_115925
tcttatggttggtacttactgttgagcaggggactgccacaacacgaaaggagagaaggacatgtgcgtggttggagcaatcaacaactacaccgcggcactggaggattcatcaagtccatgtaagcatcgaacatatgtgagctaaccctagttaccatgcatcgtgttcgtgtgagctgacttcaggccacacggcacctaatatcctttgcc

SEQ ID NO: 49952 - DNA, 230 bp, Setaria italica
  Peptide Sequence Number=SeqID_115926
cgccgtcaaggagacgacggggatcgtgggcctcgatgtagagcccgatgagcacctcccgcgcgttgggcacccacatcgacggcccaccgatccccgtcgtctccttgacggccgcgcgccgcacgcagcgccgccaggctgcccccgccggtcaagatccgccgcaggaacatctcgccgtcgtcgccttgcagtggtggtggtaaggggggcgtctctctctgatg

SEQ ID NO: 49953 - DNA, 260 bp, Setaria italica
  Peptide Sequence Number=SeqID_115927
tcactgaagaatgctttgaacttctgtcacttattgcaatagcctctgaagacggggcttacaagttttgcgagcctggtgtaatagacatgatcttccttcaaatctcaagcttaccagatggttcaaagtgcatagaacttgccattaatctaatgcgattacttgttcataaactcaaagtcgacaacatgagtgtaggaaaaaactagacaaaggaaataggacaaagacaataggtagaacttagaccttagacc

SEQ ID NO: 49954 - DNA, 381 bp, Setaria italica
  Peptide Sequence Number=SeqID_115928
tatcctgtaatctgggtgtacgccttcttcatgcaagcgaagaagaggacttctcaacagtgcgaacacccagattacaggatatatttacaatgccttttcagtgcactggagccatcttctcttgctaaggctatatatccagttttgatatcatattcctcacctgacaagcaagcattcccacggcacactttaagccgtgctgctctaatcatgagcgagagcccaatattccttctggacgtcttttaccaaccttattgttactattcatcaactgctgatccttcaatttccttttcctcccaccccgagattgtctgttgagaacaacgattaataaattgaagcaggataggtgtataacaccaaagctta

SEQ ID NO: 49955 - DNA, 413 bp, Setaria italica
  Peptide Sequence Number=SeqID_115929
aacaaataacaacttagtactaccaaggttaattttaagaagtaccttggaataaaaggggttaagagaaggcagacaacaagtgcatgcttggctagccctccttgcagcccggtacaatcaggcccttagctctgattctcgaactccactatcgagcgtcgacattgacttctcgcagtgcccacagttacaaatggtaccacaactcgtgttcgcactgttgagaagttctcttcttcgcttgcatgaagaaggcgtacacccagattacaggatatatttacaatgccttttcaggttcataacctttttaaattgttacgcttggatttgcatttctctttcttgcaattttaattatactaaacttgattaatgtttgcttcaaatagttgttcatttagttagaa

SEQ ID NO: 49956 - DNA, 406 bp, Setaria italica
  Peptide Sequence Number=SeqID_115930
gatgattcaacattgtttgagagctatctcatcgaggagcaagatgttgatggttcaggctttacaactggttcaggggttttgtagccttccgtgagagcgtcaggaatgttgctgcagaaatcgtccaggaagaatttggaagctagtttgagcttgattatccttctggttccgctgcagattgtatcgacagggtcgcattgatgcttttaacctttaatgttatagtagctaactgtatgttacttgccaaacaaagaaggaatgtcaaggaataataaaaaggtggccactttatagttacttctgtcagctcaatgcttcaggcattattagtcagaagaaaaacttactagtaaccaagtttttttagtacaacttaaaatttaatacaagaccgaca

SEQ ID NO: 49957 - DNA, 239 bp, Setaria italica
  Peptide Sequence Number=SeqID_115931
caatttagtacctactccctccgtcccaaatttacatttgtccattgtcaaatggagagcagctcgggtgtttgcttttctatctggtgctcctgattatggagctggtctgttagacaccaggagatatggggagcaatatgctagtaaaggggtagatgctgaccttgcattgctccctgaacagatacctttctacagagacctggcagctgttgctgttcaagcaggagtatgca

SEQ ID NO: 49958 - DNA, 369 bp, Setaria italica
  Peptide Sequence Number=SeqID_115932
aatgtccttgaaatatagagcatgatgtgcattcaattatgaatactgctattaatattaaagccctttgcctgattttagaaatcgcatgtataaagctgatgacgtataaatttatgccccatggtttgaaacaacctttgtactgacctgcattatgaatctaaaaaaggtcccagaaacctttggaactcaagttctctaatttaaattgttgtctaggttgttagtgttcctggaagctttgaagttcccattacggcacaaaagcttgggaagtctggaaaatttgatgccattctgtgcattggggctgtgattagaggtgacacaactcactatgatgctgttgcaaactcagctgcatca

SEQ ID NO: 49959 - DNA, 115 bp, Setaria italica
  Peptide Sequence Number=SeqID_115933
cggcacaaaagcttgggaagtctggaaatataacagttgttagtgttcctggaagctttgaagttccaggaacactaacagttgttagtgttcctggaagctttgaagttccagg

SEQ ID NO: 49960 - DNA, 361 bp, Setaria italica
  Peptide Sequence Number=SeqID_115934
agacaagacgttactaaataagaagatattgatcggaccttcatccctgatacagttgggttttcaggtagttaaaaagcagacactttggttttactttgctcctcttcaatatgagagcttgtgcttctttattaatatttcacatgatcctgcttcatgtgacctcaggtgaaagagcaggcaaacgggatcacaaacggaagaccactggaagatttatagacgcgcctccgtcgccaacccagtccaagaggcctaggagttgaagggatctgactgataatgctgttcaattagcgtgggcagaaacatttcttagtcaaacaacgcagtaatgacatgtaaactcagttttttc

SEQ ID NO: 49961 - DNA, 370 bp, Setaria italica
  Peptide Sequence Number=SeqID_115935
ggtaagaatagtcatcaaccgataaacttgaacatggttacaggtactaaaccaacacttgctgagcaatgtttcaaaactgttatttactaagctagaaccaacacatgaaacttcatccgatctgaaacacattactcagaacaatatactacatacagggctcaagtctcccttacatgaaatccatggagggcgaatgcaactatgcactatgcaggcctcaggatcttttatttaagatgaaaggctttgagctaagataaagggcttcacttgttctgcaacaatggaacaactagactaggactaggacccaagtaacaagaaaagacaactttacaagaacaaagacaaaacttacaataca

SEQ ID NO: 49962 - DNA, 432 bp, Setaria italica
  Peptide Sequence Number=SeqID_115936
gagaggcaatgtggccatcaggtcccattccaagaagctggagatcgaacctgggaaacccagttgctgctgacatggcaattacaccgttcttaacaagctgcttcaagcaagcttcgtagtcgtccgctgctccctcagctgacaaggcatcatttatagcataaacttgcccaggaggaatcggcaccttagagagaaacccatcgaaggcgagcttgtagttgctatcctcatggtccttgggcacgactctctcatccacccagaagacgtgccacttgctccagtccaccgattctaggtacggcggctccgtcagcttgctgagcgcgtcgatgagggatccggccggagagcacgccgagagggtgccttcgactgtggtgctctccggcggatccctcagcttgctgagcgcgtcgagtgagg

SEQ ID NO: 49963 - DNA, 202 bp, Setaria italica
  Peptide Sequence Number=SeqID_115937
ccgtcgtggaagaccaacttttggggtacttgtccctcggcagtagctgccacgccttcttgtcggcttcgcttaggacataggtctcctgtatccagattgtatagagttagtgcactgtgtagcacctaagagctgcaatttgttaacctgcgaatgacgctaaaatattccaggtgtggcagcaatatatccttttttt

SEQ ID NO: 49964 - DNA, 472 bp, Setaria italica
  Peptide Sequence Number=SeqID_115938
cggatcctaacccctggaggaaggcgatccgagcggaccggagatggcggcgtcggcggtggagaagctcaaggccctctgggactcgcaggtcaacgacgaggagcagtgggcgctcaactatgtccgtacccccttcccccactcatcccgcttgcccctcctcttgttctcgcaatctcgttcttctccctagttcgtgtgaagtcctgtcgttcgaatccgttgcgccggtagccttgttgccgctctcccactgcagcgatttgattcgactgcgcggctgccgctgtacctcgtagctcgtacgcgcggagacgtaggtatggactgttgctatgtttgatgttagttactgcgattaatgctctctctgcttgcacggataggttttccgcctgtgctgcagtgagctttcttgtatgtgtatttgttcctaacctcctaaagttcaacgtaattgtgaatccta

SEQ ID NO: 49965 - DNA, 253 bp, Setaria italica
  Peptide Sequence Number=SeqID_115939
acgtggatgtgacatatgatgggaagtggatactggggacaaccgatacatacctgattctaatatgcaccattttcattgacaaggatggaaaggagaagactgggtttaacgggaggattggggaactagtaatttgtccgtcttcctaaggtttgtttgtaagctcaaccctctggattctcactttagctggcgcaaacaataggtttcgggagggcaggttctcctgggtgacggaagaaatagggaa

SEQ ID NO: 49966 - DNA, 461 bp, Setaria italica
  Peptide Sequence Number=SeqID_115940
gcttatgcggagagtcgatactctagtaaatatccaagatacaggcaggaaatgcatgaagaacatatggagcgagatgcataccataggagcaaatatggacattcataccatgacagggtgcatggagcatcttgcccagaatgtaatttgagtggtcaaaattgtgattaccccaatggtgaggaattttctgcaaccagtggttgtgagcaggcctactataagacggaccgtgaccgtacgccttcaacgtctcaagtagcatctcattgtgaggattcttgctgcaagggcaatcagttgatgcctaaaagttcttctgtgatgtgtgattgtgatgattgctttgttgaacaagagtcaactcctagtccaagtgatcatgcttagaacttagtattcttaattctttctattcgtccgggttcttggttcgttaaagtttcgtttcgttcggt

SEQ ID NO: 49967 - DNA, 410 bp, Setaria italica
  Peptide Sequence Number=SeqID_115941
ctcaagaattgcccttgtaacttggaacattggggtgatgcctgatcctccagctatcattccaaatgctctcacttgtccaggttggtacttgaaacggcccttaggtcccttcacagacaaatagtcgccgactttcatctcacgaaaatgatgagacattcttccttgggggtacatcttaataacaagctcaaagtgcccgagatcagagtccagtgtagtgggagtataaggcttgattacttcctcaccagcggcatcctgtcccctgcagcttatatgttgtcctattggaagacccaagacagaagtaggtgtcggaagcgctaaactttgtaactttggtctaactatttattggtcttctagtttgtccttctttcttcgtacgtagttttaaacttcct

SEQ ID NO: 49968 - DNA, 265 bp, Setaria italica
  misc_feature (201)..(201): n is a, c, g, or t
  Peptide Sequence Number=SeqID_115942
taaattaaacttaaaattaagtaacgtaaaattaagttaactaaactaattaagtaatttaaggttagtaaactttttagttaatttgtcttctgggttctcaagaattgcccttgtaacttggaacattggggtgatgcctgatcctccagctatcattccaaatgctctcacttgtccaggttggtacttgaaaacccngaagacaatacaaaagttcacctaatctatgcgaatgtcacatatgatgatattcttctgaagg

SEQ ID NO: 49969 - DNA, 384 bp, Setaria italica
  Peptide Sequence Number=SeqID_115943
taaaagtaaaccgttaaagtaactaaaaaggtaaattaagggggtactaacggaacgaagaaaggacgactagaatacgaagatactgggccaccggacggcggcgcagcgcgcggagatcgccgtggcgtacgagggcctctacaacgagacgctcctcgaccggctccactccgagctctccggcgacttccggagcgcgatgatgttgtggaccatggacccggcggcgcgcgacgccaagctcgcccacaaggccctgaagaagaagggcgaccggcacgtgtgggtgctcatcgaggtcgcctgcgcctcgtcgccggaccacctcgtcgccgtcaggaaggcgtactgcgccgcctactccgcctccctcgaggagga

SEQ ID NO: 49970 - DNA, 358 bp, Setaria italica
  Peptide Sequence Number=SeqID_115944
aacaaaggctacaatgcctcaatagtattatcatctactcacttagtcactttgtacaataaaatctattgcaattcgactcaagcatcaccagtttaacaccagaacagtagaaaacgtctccttgttcattagtgaacagacaccatctcacttcttcctggcaacagcagctgcaattccaccaaccagaagtcccacagcagttgtcgctattcctatcccaataagaccatctgcaccataacaagaatacgttacctacaaacaggctcatataattggtccatcatcaatacactgcattatcacttcagctgatgtactaatatatatgtattgtcccaaggaaacatgg

SEQ ID NO: 49971 - DNA, 488 bp, Setaria italica
  Peptide Sequence Number=SeqID_115945
tttttaagtttttaattttttgtttattgtttgcagggttatccaaatggctatgatagaatctattggaaaagtgggaatcaaagtcctccaacagattctatcatagccatttggataaccctgcaaacatcaattcttcatcaatagcagcagctgctgctttagctgccaggtcgctgtatattcttgctagtgctgactcagttgtcgatctcatgacactgaacactataaaagtgaatgtttcattggtcaaagaacttgttggatgtctacttagttgcaatcctggtttttcttgtgacctcgtgaaaagcttcatttctccaagcagcagttcctgcccaagtcactatgttggtgttttttctggatgaccttccggcacacagttccttcatatgcagatgacacctctcggtttgtattggaacttcttggcagacagaacttctacttcagtggcaataaaagctctgtactgg

SEQ ID NO: 49972 - DNA, 352 bp, Setaria italica
  Peptide Sequence Number=SeqID_115946
taagtaacggttaaattaagtaaagtaccctaattaacaacttgcccttcaaaatacaaggatttaaacaatgatataaatcaaaaactaaatataaagatatcgtactcaacaggtacaggtagcaacttctgacaggcagactttactgtatagtgtatatttattatgcaagcataagagcagtgttgcaacatagctatgaaagaaaaatcacacacctgtgtcctcctaagggcaagcatgaatgctctttgaggcaggatgctgaatcatgtgtttgagctttagttgtctgcataatgaggtcgaattctgcaacatttgctttatatccattgtcagtcttctc

SEQ ID NO: 49973 - DNA, 396 bp, Setaria italica
  Peptide Sequence Number=SeqID_115947
catactcaccttcatcaccacactttccagtacaagagctttattgcccactgaagtagaagttctgtctgccaagaaagttccatacaaaccgagaggtgtcatctgcatatgaaggaaactgtgtgccggaagggtcatccagaaaaacaccaacatagtgacttgggcagggaactgctgcttggagaaatgaagcttttcacgaggtcacaagaaaaaccaggattgcaactaagtagacatccaacaagttctttgaccaatgaaacattcacttttatagtgttcagtgtcatgagatcgacaactgagtcagcactagcaagaatatacagcgaccttggtctagtcttaaaagtctagtctagtcttgtcttgtcttattttgtatta

SEQ ID NO: 49974 - DNA, 161 bp, Setaria italica
  Peptide Sequence Number=SeqID_115948
acaatacaactgattgagttggcaatttgtagaacattagctacacatcagcacatgtgatagggtgattgaactgccagaacatatagaccggggtacccagagtcagtggagcaggtcaataatgcttcagtcccgcttgacgaccttcgaaatgtatg

SEQ ID NO: 49975 - DNA, 124 bp, Setaria italica
  Peptide Sequence Number=SeqID_115949
atggaagcaactagcatacacaattccagtggtcatgtcatacctgtttcttaaggttgcttagatcaggaatgtgagaaagagcatcgacagcagtgagcaaggcaatcaatccagatatggg

SEQ ID NO: 49976 - DNA, 341 bp, Setaria italica
  Peptide Sequence Number=SeqID_115950
gctaaataagcatgttccattgtcaaatattgtatgcgctaaagaaaagtccaaaccaacagcacagaactggagcaaactggaaatcaatgaactaagggaaagtaggaaatcagatactggatacaaattttactgtgtaataacttacattcaggtgtgcatctctttccaccgaacttttgcaaaccaacataagtccctttgacagcactgttgttatacaccaaaattatctccacagactgcattcccaactacccagatagaaatgttcctacaatattggtgtataacaacagtgctgtcaagggactttttgcaaaccaacattaagttct

SEQ ID NO: 49977 - DNA, 433 bp, Setaria italica
  Peptide Sequence Number=SeqID_115951
tctaaacctaactattaagttcccttttgtactagtctacttgttgttatacaccaatattgtaggaacatttctatctgggtagttgggaatgcagtctgtggagataattttaacgaattttgtcgctgggtatcttgtagccaattcttccaaacaattctgaagcaacccacattcgggtatcccgtccttgaagaggaagaccacaacccagatatctgatggcgcctgagacacctcacgcacgaagtccgatccggtaattggcactatactgccaaatcgcgcggcttttgctgcctccctgagctctgcaagcctcatcttcctgtactgctcgagaaagcggtcgtcgtccaggtcgtcctcgagttcctcgagctcctcgggctcgcgcgcgtcgagccattccttggacttgggctgctcg

SEQ ID NO: 49978 - DNA, 239 bp, Setaria italica
  Peptide Sequence Number=SeqID_115952
acttggatgacaatgatatagagatcgcccccacaccttgtgaatataagaagcgtgatagcagaaattgtgctgctgtcagggttgtacacaaaccaagtggagtcactgctgaaagttcaggtactgaacaaaagcctactgcatatgcaaatgtgaattggcatgcaactgtgaattgttactggaatttaacaagttagccttcaacaggtgagagaagctactttgcaaacaag

SEQ ID NO: 49979 - DNA, 492 bp, Setaria italica
  Peptide Sequence Number=SeqID_115953
acacggaatttatttaccatataatatacaacggtgtcatcagatcacccatgtcaccacctgtccacctgacacacacataatcttcccttgagtcaactacaccgacagcactgcggaccgagctagactttgaatcgatggagggcggtatcacctctttccactaagatttagcttgcttatgcgacaggagggcaagacttagggtcattcgaggtgtccacatcagaaggtggcatgaactgccacatcgggaacccagggtagccgatcacaggcatcatcagcttgtgaccggcagccggcggccctttgggagtggtgaaggcagaggctgggatcacaggagggtgtggtaccaggcttgggcgggagttcaggaacttgatctgctgctccaggctctctttctcagccttcagcctttgcttctcatcccgcaagactacaattacttactacaagaccttacaaactactttagaatca

SEQ ID NO: 49980 - DNA, 407 bp, Setaria italica
  Peptide Sequence Number=SeqID_115954
gggaaatgttacgataaatgtaccatctcacagcagcattatagtagtactattcatggaattgaagaaggcacggaaggacatttaccttggtgttttcctgtcgataacattagtctcaggtggctgctttccgacgcctgattggacattgtttctcctctcataacaggtcgagcatggggacgacgatcctgatatacttcacgctggggatcaacagcaaagcggaggcttagtcgttagcaggcaccatttacttcggcgcggcatcagtacattccaagctttgagtttgctccgttttcggattgtgttttgttttttgggaggaccaccggtccacagcagcaacagctgcagctagatgcagccagtcaggttcctacctgcgtagttgtagtact

SEQ ID NO: 49981 - DNA, 397 bp, Setaria italica
  Peptide Sequence Number=SeqID_115955
ggtcgtgcccgcagacccagcccaaaacatgagtggcgccctgctaagtaatgggccttcggagctacaagaaaatgggtcagattctactgaaaatttagactttaagtggcggttcgtgtcgccactgggcctgtactgggtccgcccctggaatcctatggtgctgacacgagggatacgtaaaagtttttccttcttcagaaaagaaggaactctcaaacccatacaatctcttagttaggcgcaaactatcatagcaatagacatttgatccttggtacagatttcttagcatttgtttgcgtgtagctacatctctctcagccacttcattcggatcaacaatatgtctaggtctcttacgctgataccagtgcacaatcatgctcatgac

SEQ ID NO: 49982 - DNA, 234 bp, Setaria italica
  Peptide Sequence Number=SeqID_115956
tagttgccatgacctactacaagaaaaaaggttagctactttttttcttaccgacacattcaagttatcacacataccacatctctcatgtaagatggcacataggttataaaatgatctcttagttaggcgcaaactatcatagcaatagacatttgatccttggcacagatttcttagcatttgtttccgtttagctacatctctctcagccacttcatctggatcaacgat

SEQ ID NO: 49983 - DNA, 394 bp, Setaria italica
  Peptide Sequence Number=SeqID_115957
cctcaaactgcaagattggagccgatgatgcgagagccccaacagcaatatgtggatacttgagtctcatccaagcagccagcattccaccgtatgaacccccaaagagcaccacggggctgccctctgcggataggttcctcttgaggtcagtgagcagcacagcgaagtcggcaatcgcctgctcggccgtgagatacgccaaggacttggaattgttgtacgccttggctttgctcccgaacggcatggactccccgtagtaacgatgctcagcgaagacgacgagggcggcgaagcgcggggcggcctcccagacgaggccggagttggcggcaaaccaggcgatgtcgccctcgttgccgcagtagaagaagatggggccgccggggcc

SEQ ID NO: 49984 - DNA, 153 bp, Setaria italica
  Peptide Sequence Number=SeqID_115958
acctgccaatcccatccacccattccatggggatcatcattttagatcaaagcagccaacagtgccagtatagttgtagtatacatttactcctggcattattattgtcgtttcctagtaattacttagttacccttcttaggtttgtactta

SEQ ID NO: 49985 - DNA, 383 bp, Setaria italica
  Peptide Sequence Number=SeqID_115959
taattaattctaagttttagggtttaaatttcaggattacgtggatactcaatcctgataccagtaacagggcctgcccattggccatgaagcccatttggtcctagtatcgagtgtcttgatagtgtttcctcttttggataaggcaaagtggaatatcttggaaatctgtgcatgccttatcgcctaggcgacccccaggcgacaaggcagacaggttcccaaggcgagctggatccgcccagatgcctacgcgacgcctttgaaacaggtttgattagttgcctctcaggttgaacattctgcaatgatgttgtttgatgctttgaactagagaacgatttctgcagtagtccagtagggcctccagccaatgactgacg

SEQ ID NO: 49986 - DNA, 258 bp, Setaria italica
  Peptide Sequence Number=SeqID_115960
aagagaatttgaacagttttattcttagatgcaaatgagctattctgtatagtagcgctgatatgtttaattctatcttgggtcaggagatcctcgagttcgtcaacaggtacacggacctcccaaacatggaggattggaagatggagctgttattgactaccttagggaacatgaatgacaaccgcgaaaccttccaggaccgtgacgactacagtgagaacgtcaatcagggttttcagagatggctctccttag

SEQ ID NO: 49987 - DNA, 449 bp, Setaria italica
  Peptide Sequence Number=SeqID_115961
agctcatcctcatccgggctgggccgagggccgccgctgggccgacatcatcaagcccgggagcgtcaacactgaccccatcttccccagcaacaagctcaccggcaccgacgtcgggtaccctggtggcctgtggtttgacccgctcggctggggcagcggctcgccggagaagatcaaggagctgcgcaccaaggagatgaagagggtggtggtgtcggtgaagtactgctgctcgccggcggtgtaccagaagggcgtgttgaggatgccgatcttggtcaggaactccgggatgaagatgcccgccgcgccgagcatcgcccaccggcagtgcaccagctccgcctgcacgttccaccgcaagctctccgggtcagatccaaggccccagggatcgaagccgaagtcggccggggaggctgccatcgagccacggcggcggggtg

SEQ ID NO: 49988 - DNA, 325 bp, Setaria italica
  Peptide Sequence Number=SeqID_115962
tcagatcgctaactccaactcctcatttggggggtgaaggcctggaagatggtggcgtggccggggtcggcgaggtgggcgaagaggttgtcgatggggccggtgccggtgtactcggcctgaaaccaggcgcccatgacggcgagcatggcgaggcggccgttcttgatctccttggtgcgcagctccttgatcttctccggcgagccgctgccccagccgagcgggtcaaccacaggaccaaccaaagggtaaacccgaaacgtaaacggtaaagaaaccggtaaagaaaagaaacttaaaagttaaagaaactaaagggaaa

SEQ ID NO: 49989 - DNA, 187 bp, Setaria italica
  Peptide Sequence Number=SeqID_115963
cggtgaagtactgctgctcgccggcggtgtaccagaagggcgtgttgaggatgccgatcttggtcaggaactccgggatgaagatgcccgccgcgccgagcatcgcccaccggcagtgcaccagctccgccttggatctgacccggagagcttgcggtggaacgtgcaggcggagctggtgcactgc

SEQ ID NO: 49990 - DNA, 188 bp, Setaria italica
  Peptide Sequence Number=SeqID_115964
tcgttgaggatgccgatcttggtcaggaactccgggatgaagatgccgccgcgccgagcatcgcccaccggcagtgcaccagctccgcctgcacgttccaccgcaagctctccgggtcagatccaaggccccagggatcgaagccgagcatcgcccaccggcagtgcaccagctccgcctgcacgttc

SEQ ID NO: 49991 - DNA, 400 bp, Setaria italica
  Peptide Sequence Number=SeqID_115965
tactattgtaaggtattgacgcagtgggacaactatctcatcaagtgccaggtcccatagaagaagctgggtgtcctgaccaacagaaccaaagcgatagacattttctccatttccatcagaacttggtggagaccaatatgaatcaaaagcaactccactaacccaggaattatgtccttcaccccatgcaacgatctttctatcatccatgctccatacctgcacaaggtcatcttcaccacctgttaatagatattttccatctgagctgtagacacacagaacatgaaattaggtcagaggctgaaatgttattttgtgtgatgaacccatataacagtgataaaaacaatttgcagataaaaaatacaagtgatcagaaataatacaacagaat

SEQ ID NO: 49992 - DNA, 420 bp, Setaria italica
  Peptide Sequence Number=SeqID_115966
tggtccggtctggcccagattttgatgaggccctcacggcagatggtgaggattgattcattagtgaacaccaggaccagagaggggatcggcatgtactcggtgagcaacaaggggtgagagcttcggaacatctcgcattcttggagaaggttgaagaacacctgttggagggcatgcgttgtcccaatgtgcagaaggacttccgacgctaaatgttggcgaggcacatgaaggatgacgcagtgggacaactatctcatcaagtgccaggtcccatagaagaagctgggtgtcctgaccaacagaaccaaagcgatagacatttctccaatttaccaatacaagaaacttaggtaggaagaaccaaataatagaaatacaaaaagaacaaactaaccaactaaacccaaggaaata

SEQ ID NO: 49993 - DNA, 221 bp, Setaria italica
  Peptide Sequence Number=SeqID_115967
ctggatcgaatgcatggcacagtgggtttgagttgctgaaatgaatggactttattggatccttctccagtgaattgagatcactgatgaatagcgtatcagcagcattgaagacaatgtatgtacccttgccatcataattcgcaaccccttgtgatccaccaagtacatgccgatcccctctctggtctggtgttcactaatgaatcaatcctcaccat

SEQ ID NO: 49994 - DNA, 232 bp, Setaria italica
  Peptide Sequence Number=SeqID_115968
gttgcggcgagagcggtcgccagggaagctgttagagcgcggcgcggaagtgtgcgaagcaaagcagccaccgacgggatctgccacggatcaagcttcagaaggatgagcaagtcactgaagaaattgcactgaactccttgaggcgagctctggatcagttctcttcactgcaagcgagtgatgggcactggcccggtgatttcagcgggatcatgttcataatgcccgg

SEQ ID NO: 49995 - DNA, 382 bp, Setaria italica
  Peptide Sequence Number=SeqID_115969
attgcaagtttacgttcaacgttatttcttttgtttttcattcgattgacagaggttttctttcacctttgattagatgtgcctcttggcaagaaaccacttgactggaatacacgtgtaaggatagctgttggagtagcagaagggctttcttacttgcacaatgtagctgatccaccagtcatttaccgtgatatgaaagctgctaatattctgcttggagaggatttcagtccaaagctttctgactttggacttgcaaaagttggacctattggtgacagaactcatgtgtccacaagagttatgggtacctatggctactgtgctcctgactatgttgtgagtggtaaacttaccatgaaatcggacatctacagct

SEQ ID NO: 49996 - DNA, 248 bp, Setaria italica
  misc_feature (25)..(25): n is a, c, g, or t
  Peptide Sequence Number=SeqID_115970
ggcggtccccacgcagcagctgctncggtggtggtggcgggtggggagtgaggactggaggagtaatggctggctggcggcgggtggcgggcggcgacatgaacgcggacaggacggagtgcgcggaccagctggtgggtctggcgccgtgcctgcagtacgtgcaggggcaggcgcgggcgccgccgcccgactgctgcggcgggctccggcaggtgctggggaagagccccaagtgcctgtgcgtg

SEQ ID NO: 49997 - DNA, 226 bp, Setaria italica
  Peptide Sequence Number=SeqID_115971
accacgttccgctgcaagcaacttgaccaacacatatgttgcaacctgaagccatcaccacgccatcgatgaaccagatccatctccttggcgttgtcatctcccaaagccacacaatgaaccatcgcagccttcggcaccggtacaaacgctcgccacttgctatagacgcctgcatcaccaacgacgaggcagctccggccagccaccgcaacacatggccgcc

SEQ ID NO: 49998 - DNA, 252 bp, Setaria italica
  Peptide Sequence Number=SeqID_115972
gttggtgggtcgggcattaatggtgtggtgtggggtggggtggccactgaggtcgggagagggaaatggcggccggggaagagaaagtgatggcgatagatggtagtagatgggttcggttgggaggaggagattgaatgctcttatggatggattgagtgtgttggaattgctgataggtctgcctatgacttgcgagctcactcggataaaagcggtgagaaacttgaagcacatgaaaagtttgcagaa

SEQ ID NO: 49999 - DNA, 295 bp, Setaria italica
  Peptide Sequence Number=SeqID_115973
tgagggaactgtaaacaatgagacccttggctactttatcggaagggtctaccttttcttgacacaacttgggattgacaaagaccgtctacgcttccgacagcatctgccaaatgaaatggctcactatgctgctgattgttgggatgcagagattgaatgctcttatggatggattgagtgtgttggaattgctgataggtctgcctatgacttgcgagctcactcggtatgtatcagaatcatcaccaaatgcatgcactattggaaatgattatttatttattgtctacta

SEQ ID NO: 50000 - DNA, 268 bp, Setaria italica
  Peptide Sequence Number=SeqID_115974
cgaggacgttggccgttgacggcgcacccggggggccggtagtcgtagagcccgcgacgccgccgtagatcttgaaggagggcacgaagaagaggcgccgctccagcgtgttggtcaccgccgcgcggaacgcgtcccggctcatcgccgccgtcccacccgccggcgcggccggcgcagccatggaagcgagcgggcgcgctgtcgggattggtgttcccctggcgatcacggttgacaacaccacgagcgtgacggtgcgcgaccg

SEQ ID NO: 50001 - DNA, 219 bp, Setaria italica
  Peptide Sequence Number=SeqID_115975
agcatctgccaaatgaaatggctcactatgctgctgattgttgggatgcagagattgaatgctcttatggatggattgagtgtgttggaattgctgataggtctgcctatgacttgcgagctcactcggataaaagcggtgagaaacttgaagcacatgaaaagtttgtctagtaaccctagtagtaagttggttagtaagtttagtttattaaccctt

SEQ ID NO: 50002 - DNA, 235 bp, Setaria italica
  Peptide Sequence Number=SeqID_115976
gatagcattgcaacatgccaatcaaacaggcagcaggagctatcttccatcgtatgatctctcatacaaccatatcattctccaacatgattggtccagttgagcaggtagagttttgtggacatccagttgtcttcatcgccccaagtggatatggtcctcgagtacttacttctggaggaccatatccacttacttctggaggaccacatccagttgtcttcatcgccccaag

SEQ ID NO: 50003 - DNA, 365 bp, Setaria italica
  Peptide Sequence Number=SeqID_115977
gcgcttttccttgctgaaggcaattccccggtacagctttggagatccaaaattgatccgagactcaccattaggtagatacattgccctcggccacggcaaaggcacgcctcggagcttggggcgggaggagcacatcgcagagaaggatacccctccagagatcgacccagcccatggtaccgtcttcacccccaagcgtgatcacggtgcttgtggtatgactcaaaagccgacaagcatccgtatcccttgggatctctattgggaactcgctctgtggcgcctccagagacacatccttggatgtccacctcctgatctcccgaggtaggaggcccatatcgtcgtcacggatggagaaa

SEQ ID NO: 50004 - DNA, 232 bp, Setaria italica
  Peptide Sequence Number=SeqID_115978
cgtttgcgtggattggcgggtagtcagcctgccagtcctcaaaggaattggtcagattgcagttgctccatttggtgatctcccatccttcaaatctataagtgggtatccctctttccttgtctgaagcaggaaggcgtttcctcaggtttgttgatttggataccacctacaaacgccttcctgcttcaagaacaaaggaaaaagttagggttaattacccttactttta

SEQ ID NO: 50005 - DNA, 231 bp, Setaria italica
  Peptide Sequence Number=SeqID_115979
gtttcccatgtcaacttcaagaacatatgccttaggctgccggaattcagccttggcaatcaagaagacaacatttgaatcatccatgctgggagtgggtagaaaaacagtgacgttctccaagtttcgccctgggtcggcagccacactgttgccctgtgatggtgccttcggccacagtctagtttggttacttcctagtctattttgtctttttgtctattcttgttt

SEQ ID NO: 50006 - DNA, 220 bp, Setaria italica
  Peptide Sequence Number=SeqID_115980
tttttttttctagacgaaacagatatgttgaatattatgaaagtacaacagccagtagagtaggcatacaaatttcttaaacgtcaaagcatgatcaagcactaagtaacttacgggaaaacagcaataaattcaagcacaattcaatctgtcttccagaaattattacacatcaaaggcataccataggcaaaagatcaccataaacgcctgtattctt

SEQ ID NO: 50007 - DNA, 202 bp, Setaria italica
  Peptide Sequence Number=SeqID_115981
caagctaacggcggtggtgtggttgggcttgtggccgatgtaggcatatccgtcgagaaggacctcctccaaggcacaggaggcgggaacaggggtggcggttgccatggacgggattggaggggcggatcgatggatgaaaaccgcgggtacggaagacgcgatgggaggaggcgaggggaggggaggcggcggcggcgcg

SEQ ID NO: 50008 - DNA, 426 bp, Setaria italica
  Peptide Sequence Number=SeqID_115982
aacgtaacgaaaccgtaaacaaagaaacgtaacgtaactaaccgaaactagacctaccctacctaacaacctaccaagacgaacaaactaccgccaatcgtcgccaccgattccatcaagaacaccgtgtatgtcaaggcgaaggagtgcacggaagtggtgtccatggaggaattcgccgtgattcttggaaggcatttcacctcgctgtaccctcaggtctcggaggctacggtgaccatcgtggagcgcccatgggagcgtgtggttgtcgacggaaagcctcattcgcatggtgagcaagattctcggggttatccctactgtttgactgaggaagagcggcgaacttttggataatgaagagtatggtgtttttccgatagtaggatacttaggacctgcccaaattgcagttttggctac

SEQ ID NO: 50009 - DNA, 495 bp, Setaria italica
  Peptide Sequence Number=SeqID_115983
tggtttgttcgtacggtaaagtccttctatttcgtctattgggtttctaaagtttggttgtttgtagtaagtctactagtctactagtaagttctatttgttgtaaaaaattcttggtaagtctttgtctttattaaatttccggtaattcctaagggttactctctgctaaagacaactcagtctggttttgaagggtttgtgacggatcgctatagacttcttcctgatacaagagaaaggatagtagcaacagaagtaactgcttggtggaggtacccttttgaacatgtttcgcagctcccgtcaaagccgttctgctttacgcaaagataccaggatgtaaagaaagttctgtctgatacgttctttggccccccctgatgttggtgtgtatagtccttctgtacagaatacactatacctcatggccaaagaagttcttacgaggttcccagacatatcatcaattcagcttagaatgccgaatcttca

SEQ ID NO: 50010 - DNA, 259 bp, Setaria italica
  Peptide Sequence Number=SeqID_115984
tgtcatcataggcgacaaggtaaaattccggagtcctatcctcacatatacccttccacaggccctggatcgggcgcgcctgggtgggctcagcatccgcgatcctgacgaagtgctcgggctccatgaaggctcctctcctcccatgcttggctctcctcctcctcccggccccggggctcctcctgttggcgaagtgcgcgtacatctcctcgggcggggacccgctgaccatctccacctcctcgtcctcccccgc

SEQ ID NO: 50011 - DNA, 342 bp, Setaria italica
  Peptide Sequence Number=SeqID_115985
aactaagaactaacggaaataaaaactaaccttagaagaaagggaccttactacctcgtcgagtttcttcttctctgcagcattgcgtggcttgatcttccgcttctcttccagcatccatttgtagaggtggcgctgctcgtcttgggggattggtgggagctcctttctgggcacatttactggttcggcaggcttcccagcagatgaggttgatacggtggcaggatctgtcgcagggtcctttccagagtcctttcggtaggtccgcacaagtacataaactccgacgaagagattggcggccaggaggaaggggaacatgcggcgcatgaagccctt

SEQ ID NO: 50012 - DNA, 216 bp, Setaria italica
  Peptide Sequence Number=SeqID_115986
tgatttgacctcctcaagtccgaaggttgtgtgcatggaaacttgcattggctgcattgagatatcagcttacaagatagtacaatactgtggtacacagtccaatcaggcccaaccacattcctggtgacacaccagatacaagagatccggaatgacagctggtgagcttataagcttgggagggaacctgctcggataaactccttgagaagg

SEQ ID NO: 50013 - DNA, 171 bp, Setaria italica
  Peptide Sequence Number=SeqID_115987
ccgcacaacatgcgaatcagctgtacttttctgtaccaatcctggaattttctgtcacagtaaaatgatcatacttggcataaatgtagaacctcaggcttttataggagaatagaaacaagtttgcaaacatcatggcaggagaggttctacatttatgccaagtatgat

SEQ ID NO: 50014 - DNA, 260 bp, Setaria italica
  Peptide Sequence Number=SeqID_115988
caactgaagaagctcgtcgccggcggcaagctcaccaaggtcaagaactcctacaagctgccgcccaacttccgcaagctgctgctggtgcaactgaagaagctcgtcgccggcggcaagctcaccaaggtcaagaactcctacaagctgccgtcggcgcgcgccccggccgccgacaagcccaagcccaagcccaaggcgaagccggcagccgcgaagcccaaggcgaagcccaaggccggcgccaagaagcccaacgg

SEQ ID NO: 50015 - DNA, 240 bp, Setaria italica
  Peptide Sequence Number=SeqID_115989
ctctcctgtgcgtgtctcttagttttttttttttttttttattgacataacatatacccttgtcacaggagcgacatgggcaagaaatcaggttcccagcacagcatcacccggatccagacgctgcaccacgccgacaaggccacgacggagcactacatcctggagctggtggtgctcctccaccacctggtggtccaagtgaagaaccggggctacgggaacagcaagtcgaccaag

SEQ ID NO: 50016 - DNA, 331 bp, Setaria italica
  misc_feature (250)..(250): n is a, c, g, or t
  Peptide Sequence Number=SeqID_115990
tgttcgtaagtctagggttggttaccggtaagtagttctaggttttctagtccgtcgtaagttgggcagctcctagctgtggcaggtggaagcatggtgaacatttttgatgttgaaaagcaggcaaacttaccctctccagcaaagggtcacaacagtgaggtaaactgtgtgtgctgggatgaaagtggtgaatatctggcttctgtaagtcaagacactgtgaaagtgtggtcagtatcgtcgggancgtgcattcatgagctaagatctcatgggaaccaatatcagtcatgcgtgttccacccgagatacccaaaagtgttgattg

SEQ ID NO: 50017 - DNA, 330 bp, Setaria italica
  Peptide Sequence Number=SeqID_115991
gccttttctttttgagtctcggttggtgaagtatttctgtaatttatgaaattatttttctcaactctttatgtattgatgtttgatgatgttataggtcttcctctggaatatggataattttaagatggataccaaaatagaagaccacacaaactttatcacagacataaggaaagtggcactttacaaacttttcatgggcatacctctcatgtaacgtcagtagattttcacccaagattgacagaggttctttgctcttgtgatgacaatggagaaattcgcttctggaaagttggtcaaactacatggacccatgttttaagg

SEQ ID NO: 50018 - DNA, 277 bp, Setaria italica
  Peptide Sequence Number=SeqID_115992
tagttagtttgttaaaagaaaaagggcctttctactgtaactatgttactactagttttgttattgctctacttcttcctaacctttaaaagtttgacatagatggtgaaaaattgtattagtacatttttttgctatttgtatgatggagtacccttttttatttcacactttttcactcacagaaaaggcgtatggagatgatggatgcttgaaacaggcaaaagaactttcaattaataaagttgggcatgcattacatgaacttgatcctgtg

SEQ ID NO: 50019 - DNA, 463 bp, Setaria italica
  Peptide Sequence Number=SeqID_115993
cacgtcttgcgtttatgtcaagcaagtattgttcctcacggtaatgatcaaataagtttgacaactctaattggtcttcttcacctgcttgctggcgcaaaggcatacaacaacatatttcttcgtcatcatgtgttctgcatattgcaagttgccgctggaaggttagaaaatttgttattgcacatgttttcattattttgttctgttgattaacctttgcgtataatttggtattctgcgatccagaaaagtgtttgcatttttttttcccatcaatatgacaacaataccttcatgctgctggtgtatccaagtaccagaagctgagatctggtcaaaacaactggatcaatgtttcggcgggtttacaacaaaatgattcgatacttccttactggtttacaaagtcaaacatttgaacttttggccatcaatatctaaaattgtttataagttgacg

SEQ ID NO: 50020 - DNA, 354 bp, Setaria italica
  Peptide Sequence Number=SeqID_115994
ttagtttctttttgttcgttaggggttcgttactaaagttttggttcttgtttctacgttcttgcgtttatgtcaagcaagtattgttcctcacggtaatgatcaaataagtttgacaactctaattggtcttcttcacctgcttgctggcgcaaaggcatacaacaacatatttcttcgtcatcatgtgttctgcatattgcaagttgccgctggaaggtctccatcattatttggtgttccaaaaggttgtcacgccctctctggtggtccaggacatatgtagtgatcagcacactaaagctgattcctcaaatttccctcaaacccatcgagacctcaagaccttccact

SEQ ID NO: 50021 - DNA, 238 bp, Setaria italica
  Peptide Sequence Number=SeqID_115995
cgtgaatcaaggatgtcagcaagcgttagcaatgctaaactaatggacaggcatgaattttccaaggaactacagtgtactgctgattcgaggctggatgttcttcctaaggatcagttctctcctgccattattcctctcttttgtttccagtccattcacggactctggagcttgatttccatcatagctggtggagactacttcaagctgactaccaggcttgtctacaacaccc

SEQ ID NO: 50022 - DNA, 190 bp, Setaria italica
  Peptide Sequence Number=SeqID_115996
ggtacgttgtaggttgtaccatgagtagtcagtttttcattaatggctgatgtatgctgtacagtaatccttacaaatggcggcagcctgaccacaattcttcaatctgtttcaactcccttcaggttttcttatcaagggcttgactctgatctttatccgtggtttggctgctgtccgtgcagtatct

SEQ ID NO: 50023 - DNA, 506 bp, Setaria italica
  Peptide Sequence Number=SeqID_115997
gaaaggttgaagacattgatctaccttgcagcttcggcgtctgctgaggtgattgcggatgtggctctctgccctatggaggctgtcaagattcgagtccagacacagccggggtttgctcggtgcctgaccgatgggcttccaaagattgtccaatgcgaaggtgcctttgggtatagatactgcaagtcttgtataatttgggttgcaattaatcttgttcaaggttttggagaacaacacccttttaacactatgtgcaaatttcaggctttacaaaggactgcttcctctttggggccgtcaagttccctgtaagtcaaaatgtcttattagaagttatctttttgccattgtagttgcttgttaaggatccatcgctgctgacttatataagtccagtacttctatagtgatcagcaccaaacttctgtaatttagtcctctttgaagcacatggtcctgtacgagtgaacctacttgatctcactgcttgccctgaggtt

SEQ ID NO: 50024 - DNA, 375 bp, Setaria italica
  Peptide Sequence Number=SeqID_115998
attgatctaccttgcagcttcggcgtctgctgaggtgattgcggatgtggctctctgccctatggaggctgtcaagattcgagtccagacacagccggggtttgctcggtgcctgaccgatgggcttccaaagattgtccaatgcgaaggctttacaaaggactgcttcctctttggggccgtcaagttccctgtaagtcaaaatgtcttattagaagttatctttttgccattgtagttgcttgttaaggatccatcgctgctgacttatataagtccagtacttctatagtgatcagcaccaaacttctgtaatttagtcctctttgaagcacatggtcctgtacgagtgaacctacttgatctcactgcttg

SEQ ID NO: 50025 - DNA, 225 bp, Setaria italica
  Peptide Sequence Number=SeqID_115999
cccttgtgtgtgatcgggaagctgaaatagaacagtttaagccacaagagtattggacagtacagacagacttcaaaacccactttgcagatccttcaaatggaacattcattccatcccgtataaagcttctgaattcaaaaaagttggatcaactttccatatgttctcaagaagaagcgcgagctatagaaaagaggattcattcttctcagtttgaagttc

SEQ ID NO: 50026 - DNA, 440 bp, Setaria italica
  Peptide Sequence Number=SeqID_116000
ttttactttaaggtttaattttactttaacctttaatttttaaccgttttagggttaagttaaaccttatttgttctaattttctttgtgttcaggaagcgtcccccatttcctctcgcccttctcattgcgtgttgatgacgagactcatgaaggtagggcttcctggttttgaccacctttttctcaagttcagccttggcacgtgactgccttcgccttaaaattccatggtactgctttgcatttacataaacaggctcctccgatacttcaaggggtaatggcatgcgagagtgggctaatccaggtagctggaaatgagccacagcttgagtgccataaggaggaaccatgacagtgtagtaaggatctgggtactgatatgctgccgaagcaattgattggttcagttccagctgtgaatatggtgccaaaat

SEQ ID NO: 50027 - DNA, 149 bp, Setaria italica
  Peptide Sequence Number=SeqID_116001
aatggcaggattctttaggctccacatgtcatagaaacaaagaggatcttaccatacacttgccaccttgttcaaacttgcctaaggttagatgtggcaaactgtggctgggaaccaagcaccccctgtataattaagatcaacttcgt

SEQ ID NO: 50028 - DNA, 234 bp, Setaria italica
  Peptide Sequence Number=SeqID_116002
tcattttgaagtggggttcctgtcagcatcagcctttgacgagcatgttgcgcaacagccatcaggtttctccatcggaagctgcccttatctttcagaacatgtgcttcatccatcaaaacacaactccattgccatcttttgagagccttacgatcatccttttgttgagcactacattaaatgtttcaagagataaacataacttccaatgttgtgaatatgacattctga

SEQ ID NO: 50029 - DNA, 253 bp, Setaria italica
  Peptide Sequence Number=SeqID_116003
cgagcaggtcgtcgcaggtgtacacccccgaccagctggtgcaggagttgcagcacgacttcttcgcgctcgcgcccaagccgtttgattccgccatggctgctgagaccaggacggcctggagaaccaggatggccaggacggtgctgctgatcttcatcttctccccacgctgcttgctgccgaacaacttaagacttaggaagacaaacaaaggactactttagaagttagtacaactaggacaactaga

SEQ ID NO: 50030 - DNA, 344 bp, Setaria italica
  misc_feature (8)..(8): n is a, c, g, or t
  misc_feature (314)..(314): n is a, c, g, or t
  Peptide Sequence Number=SeqID_116004
gaaagatncggtctgacttctggaacgaagcatctaaccttgcggatctccatcacccgaatgttgtcgctttttatggtgttgttctagatgggcctggaggatccattgccacagtcacagaatatatggtcaatggctcacttaggacggctttgctgaagaatgccaagtttgttccttcttcaatgttgcatatacgtttattctgcattgatctgctgctcaaaagcagaaatcaatgatgttacatggaagtgatgttttatttctcctgggcaggactcttgatcgacgtaagaggttaattattncatggatacagcttttggaatggaatacta

SEQ ID NO: 50031 - DNA, 239 bp, Setaria italica
  Peptide Sequence Number=SeqID_116005
cttcacctgagaaaatggtgtgcagttccatcagagaaaggttgaaatgctgcgactggaacggagtatagaacgtcggtgtgtatgtatagctacggaatcaccggaaaaggttcattaccatcagagcggaattctcgaatcttagtttgtccgaactctctgttagcctgccgatttcagatctaagggatgtgcttgcttgctgctcgacctctctcttgctcctccataatcac

SEQ ID NO: 50032 - DNA, 243 bp, Setaria italica
  Peptide Sequence Number=SeqID_116006
accaataaaaagaatgcagctcaatactgcgatgagataacacaagcatgaatctacgcaggggaagcaagagaaatcaacgagcattgcgcacgaattgtaacgggaaccttctcacctcgccaaatcaggtgacgattccgctcggcagcgcggctccgtggatcagccggagacggaaagccgaattgatccaatcaggaggtgtgtttgtgtagcgagaaggtgagaggcggagaccgg

SEQ ID NO: 50033 - DNA, 348 bp, Setaria italica
  Peptide Sequence Number=SeqID_116007
tcccaaaagggtgtggcattagaggctgaggaccccacatatatggcggtggatgacctggagctattgctggagcaaaatatgttggtggcaagacaccgtggccatagtatgcctgcatggttgaccaatcaggatatggagaaggagctggttgatcctgcaaataaatataaccgatgaggcattaatggtaaggtctacacttgcaatcaataaaaatctcagtcagaaaatacattatatcatcataccatgtaagggctcaaaccagcaacaaacatgagaatgagcaggaaagtattcactgtatatgttccgttgacagactaaggacactggacactg

SEQ ID NO: 50034 - DNA, 410 bp, Setaria italica
  Peptide Sequence Number=SeqID_116008
ccagttatctctgtgtatagctacttgtattttgaaataccatttgtcatgacatttcaaatttggtgacgttgcattgttgcccttttaatcatatttcgctcgagttacactgcttatatctttcttcgtttgcctctccccagcattatcattcaaggtcgaccatcagttccttctaccgatatggacattgatgataaccaaagtaaagacgaaacagctgaaagatgcaacaacatggatgatgggccttctagtcaaggaaagctaagtccactgaatgcagatgatctaggaggaaacagtattcctaactggactggttacaatgcacagacaccagatttgaatgatatgctattgcataatgaaggtattgcaggaccatcagcttcatactatcaacc

SEQ ID NO: 50035 - DNA, 275 bp, Setaria italica
  Peptide Sequence Number=SeqID_116009
ttggagaaacagttccttcctagtagttcctattgtaaagttccttgtttcttgtagttcctactagtagtaaaagtctttctacctattctaagtctaattgatgaaaccgtgaaggccagcactcccgctgctccaggctcagattctctccattcagccacagcaaatgccactgatgttgtgggtgctgaggctactgaacttggattggcaaagcctgtgcaagttgagtcttctgctgttgtgcaggatgatgttgattgatgcaacaa

SEQ ID NO: 50036 - DNA, 362 bp, Setaria italica
  Peptide Sequence Number=SeqID_116010
tcgttcctttgtagtctagtccttttcgtttacttttcggtttcttaagttctttcttattcgtctacgtttttgtcctattcttgttggtccgtacctagtttttgtattgtctaggtcttgcttgtcagcagccataggagaactggccatgatcctccattgtggtaactccatcgggtgttcttggggtcacagccagtgacaattctccactcatgattctcgatagcaggatagcatatcttcagaggcatctcaccaactagctcatcccaccgctcctcgatcagatccattatagcaactgattgttctggagtagctagagatgatacaatggacaatgactaaatttcccg

SEQ ID NO: 50037 - DNA, 237 bp, Setaria italica
  Peptide Sequence Number=SeqID_116011
cctaaaatttaggtttgcatgtagtatgactgtagagaatatgtgcaactgtacaacattcggcgatcaatcattgagcagccatctgtacaaagcagagtagggaaagtgtcaaatccttcagataagcatagattcagaatcaacctcatgcatttctggcagtcaggtgattctgacaaactaacatctccagtgtactttgtgtaagcccgaaggagaataatccaccaaaat

SEQ ID NO: 50038 - DNA, 445 bp, Setaria italica
  Peptide Sequence Number=SeqID_116012
tgacggcgttacgttgattcgggtctacctacctacctagtattgtaaccttgttgggttggtagttacgtaccttggagcgcggccgcgtcgggctcgcgcccgtcaagtgcgacgtagccagcgagcggctgggcctgatgctgtgacgcggcttggcgagaagtaactgctctgggccagggttggttcctcttcctccagggcctggaggaaccgctgcctttgtaggataacctaacgtttcagtttggaacttgcttatcctgatcgtgcgtgtggcatgtacagtctgtagtgtaatctggaaattaagcgtgcgatgtactgatgtgttcaccctttgactgagcatgtagggttgtgctttgtatgtaaagaactaagatcgatgtgtacatgtacatcatgcaatgtacggtctgaagcttgactttctttgctt

SEQ ID NO: 50039 - DNA, 236 bp, Setaria italica
  Peptide Sequence Number=SeqID_116013
cagaaaatggttgggcttgtcttccagaggccactgggtatatgctatagcaggcatagtactaggtatgccatcatatttttatgatgaagtgcaatatgtcataaattagatgttatctaaccaaagttagaacaaaaatcatccttctgatggttaacagcactgattcaggaatgttcattgtcaatgagtccatcacaattggtgccgagacaggcgagcgcctacggtag

SEQ ID NO: 50040 - DNA, 448 bp, Setaria italica
  Peptide Sequence Number=SeqID_116014
agggaggaagtctttggtccagtcctgtgcgtttatgaatttagcactgaagatgaagccatcgaactgtccaacgatacacattatggcttggctggtgctgtaatttccaacgatcgcgaacgatgccagagattagctgaggtatgcacaagtgaagggttttacagtatttggcgggtgacttgatgactgcatcggactgatattcagatttctcagttttacctaccctctacctctgtccttaatagttgaaagttggtattcttgatgccatggcacacaaattgactttgcgtttcaacaaagaacccatgcaaacttgctcttagaactgtttcgcggcatttctacaacacatttctaatgaaaactttgcccaacaggagatcgacgctggatgtatctgggtaaactgctcgcaaccctgctttttccatgcccc

SEQ ID NO: 50041 - DNA, 255 bp, Setaria italica
  Peptide Sequence Number=SeqID_116015
atggttgcatggtccaaaaatattaaagtttcagatccacttgaagacggttgcaggcttggaccagttgttagcgaaggacagtatgagaagattaagaagttcatatcaaatgctaaaagcgaaggtgctactattctgactgggggtgttagaccggcgcatcttgagaagggtactatcttgaacccacaaatttaatttaatttagaattagttagtacaacttaacttacaacaactagaagtacggaa

SEQ ID NO: 50042 - DNA, 398 bp, Setaria italica
  misc_feature (314)..(314): n is a, c, g, or t
  Peptide Sequence Number=SeqID_116016
gaggagagtcatcttctgcaactcccatatgcagacgcaggtcgctgcattcttgcacagcagactctcctctggaaggaggtggacagaatgccaaatatctggtgcttagagttctatggtaagcacatgaagatgacatgcctgggcaacagtggtttgctcatgctctccttgaaggcgaagaggatgaaccgccttgttacatacaaccttttgaaaaaggagtggcagaaggttcctgattgcatgctcccatgcagccgtaaaaagcagtggatagcatgtggcacagcatttgatccgtgcccctnagccttggcctgataggtctttttacctcttcgaccaagcatgtcgaaattgtagccatttcatatcattggcctatctttaga

SEQ ID NO: 50043 - DNA, 332 bp, Setaria italica
  misc_feature (300)..(300): n is a, c, g, or t
  Peptide Sequence Number=SeqID_116017
tcttgttcttgtccgttaagttggttctttcttcttgtttgggtcttcagacagtttctctcgtcagtactctgaagctccccatggactgccatggttctatacaatcacccatgagaacgcaaacaacaatgttgcaatgtatgacccatcattgaagaaatggcaccacccatctgttcctcttgctcctacaaaaatagttattccagtggcgtctgtgggtggtcttgtctgtttattggatctgagccacaggaatttctacatttgcaaccctcttacgcaatcactcaaggngatcccaccagatcagtgcagggatggtcaag

SEQ ID NO: 50044 - DNA, 102 bp, Setaria italica
  Peptide Sequence Number=SeqID_116018
ctctccttgaaggcgaagaggatgaaccgccttgttacatacaaccttctgccactccttttcaaaggttgtatgtaacagtggtttgctcatgctctcctt

SEQ ID NO: 50045 - DNA, 381 bp, Setaria italica
  Peptide Sequence Number=SeqID_116019
ttggtttccgtaaaaggttcccgtaggggtacccgtctactagtttaaggtagtaaaatttctttgttggctgggttggggtccaggatcttgtacaacagcttcttgagtttgtgtgaaaaccaactggggcacctgaaatcaccatgctgtacctttcgatacatctccatcaagtttgggccttggaaagggagataaccagcaacaagaacaaatagaacaacaccgcaagaccagatgtctgattttgcaccatcatagcctatcttgctgatcacctctggagctccataccacctgtggaacaccagcatatgtagctccagaggtgatcagcaagataggctatgatggtgcaagaccagatgtctgattttg

SEQ ID NO: 50046 - DNA, 259 bp, Setaria italica
  Peptide Sequence Number=SeqID_116020
aggagctgagagcgaaactggaggagaaagagtggatctcgcagaagcagatgatcattcttctcaaccaggccactgacatcatcaacctatggcagcagggtggcgggagcctgtcgacatgagtccctctccttcctgttcgtccagccttgcgaccttgctttttgttggtttcgttacatgccctcacttgtttgtttaattgtttaaacttctactattggttactattggttcctttgtagatacaaaaaaa

SEQ ID NO: 50047 - DNA, 219 bp, Setaria italica
  Peptide Sequence Number=SeqID_116021
ttttggtgcagacataccaatgcagacataaaactaccctttagaatgaaagttgatgtagtttgaatcttctatggcagtatgaggtgaaggtgcccgaaagacaggatcctatgctggtactgaagttcatctggatggagaagaacatcggcatagcacttgaccaattggttcccggctatggcagcatcccgttaagcccgtactacttttggc

SEQ ID NO: 50048 - DNA, 459 bp, Setaria italica
  Peptide Sequence Number=SeqID_116022
cttgcattgttctatccaactgatttatacaggcttaaatcaaagattgttgtactgtctgctcaaataacagttcatggcatggagtacggatttggagcacatgagttcccaacaagtggggtatttgagtggaaccaaaaagctgccctggcttcgtctatagaaggtctgtgtggatgggcacaactaacatgtctaggacagagttccgctcgttcattgaaaatcttgcaggaaagtacaatggcaacatgtatcatttgatttcaaagaattgcaaccattttacagatgatgtctgtaagaatttgaccagaaagtcaatccctggttgggtgaatcggctagcaagaagtaaggttacaatttttacaaactagacctacctaaccaagaaaagacaataccaaagtttactaacaagtacaagaacaatagtaccctaactacaataca

SEQ ID NO: 50049 - DNA, 417 bp, Setaria italica
  Peptide Sequence Number=SeqID_116023
aaacggctagtttaataacctgctgtgtcattttgtttaattggatgttgtcttttgtattgacatttatctgttcttaatttgtttccctttcatagatgatgatatggattcgatatcttcatcagttgtcggggacagtgacttggaagagttggaccaacacctgctgccatcagacgtccattctatagatgtatcgccaaagctagccaaagatcttctctgaactactccacccttttggattccatatagcagtataacttcaactgcagcagctggcatccacgaagtgattctccaggttgatgcaggagtgtagactaatcctgctgattgtattgattctttgccactgagtttgctgtttacacgcacatataccactcgacagcaacgacatgactttaaact

SEQ ID NO: 50050 - DNA, 389 bp, Setaria italica
  misc_feature (272)..(272): n is a, c, g, or t
  misc_feature (340)..(340): n is a, c, g, or t
  Peptide Sequence Number=SeqID_116024
tggtctactaacttaactattgttcttaggtactagtagtttccgtcttcgttcattgaaaatcttgcaggaaagtacaatggcaacatgtatcatttgatttcaaagaattgcaaccattttacagatgatgtctgtaagaatttgaccagaaagtcaatccctggttgggtgaatcggctagcaagagtaggttcatttttcaactgcctctaccagaaagcatccaagtttctacagtcagacatgtccctactcatcctgcattttcngatgatgatatggattcgatatcttcatcagttgtcggggacaggtgacttggaagagttggaccaancctgctgccatcagacgtccattctatagatgtatcgccaaagctagcc

SEQ ID NO: 50051 - DNA, 407 bp, Setaria italica
  Peptide Sequence Number=SeqID_116025
gaatatactctacattctacaatgatcagaagtttataaccataaacaatataatataagataaatgaatggtcaaactgtaatttggaagaccgcgccaagtcatatcatgtcttataaataaaagcggagggagtatatattagttattatgaagtttgcttatttattgttgtcttgcagattttagaaaagaaaatagacaccttaaacaaagcaatggaagtggaggctaaaaagatgagacgacaggttgcagccatggagaaagatgttgcagctatgcgtgccagtaaagaacaagaaaccagagccaagcggcttggtacgaaaagccctggaagttcacagctgcttcctggaagaaacgcaccacgaagtgggttgatgcgcaacttccagtgatt

SEQ ID NO: 50052 - DNA, 295 bp, Setaria italica
  Peptide Sequence Number=SeqID_116026
cgagattacgagcgcagatttcaagaaatgagtgaagaaaagagaacacttgaccgtgaacttgcacgtgcaaaggttacagcaaatagagttgctactgttgttgccaatgagtggaaagattctaatgacaaagtgatgccagttaaacagtggcttgaagagcgtaggttcttgcagggggaaatgcaacaacttcgtgataagcttgctgttgcagaacgtacagcacggtctgaagcccccttagtccatcttctaatactttcagacgtaactgatatttttcctttag

SEQ ID NO: 50053 - DNA, 209 bp, Setaria italica
  Peptide Sequence Number=SeqID_116027
gaagaataacttgttcattccaattgaattattattattattgcttaattgattgatttttctgcattgcaggaagaaaacaagatcttggacaagctgcatcgccaaaagattgcagaagttgaaaagcttagccaaactgtgggagatttggaagaggctttacttcaaggtggtcgaaacgctaatgttgttcgagattacgagcg

SEQ ID NO: 50054 - DNA, 270 bp, Setaria italica
  misc_feature (215)..(215): n is a, c, g, or t
  Peptide Sequence Number=SeqID_116028
gccggcctggaggattttcgcgcccagcgtgagcttccccttcaccgtgtcggaaagtttgggaccgagggtcactgcaagcaaaaacatcgggaccaggaaacttcagtctactttcccaaagccacggccaaggacaaggcatcctcatcaacaactttccaggtgttgcatataggagaaataaggttcatcgctaattaccgtgttctttnatgccctgagcgatgttgtctcccttcctgccatgtttgctcgtcggccgatcgg

SEQ ID NO: 50055 - DNA, 351 bp, Setaria italica
  Peptide Sequence Number=SeqID_116029
ctcacaactttaaatcgttccatctctcgttcaatctgcttacgggcatccatcagagccttcttgtccttgatctcgctggattggatccacgtcttgatctggtccctgtaccgctgcagcttcttgatctctttcttgaggtccgcctcgaacttctccttctggttcgcattctcggtgtcgtagaccttgttccagatgctgtcgaagacgtcgacgccctcctggaccttcttgaggacgcggtcgatctcgccctgcagcttccgactggcgcccatggcggcggcgggggtgccctcgcgctggggcgcggcttagggttttacgattttgggtagtcgtagt

SEQ ID NO: 50056 - DNA, 316 bp, Setaria italica
  misc_feature (316)..(316): n is a, c, g, or t
  Peptide Sequence Number=SeqID_116030
atgatgtcgtctctgtcccaccagtgaacatatccaataaaattgccttgatgtttgttgtgccgatggggaattcaagctccccctcgtccctgattcgaaggaggacgctcacaagggaatcaccttgcagtccctcacattcagctatgatcttgtcaaagacggcgtcaagctgcctgtgtgctcgccacatcctaagccttcttgtccctagttgtattaacgttctaattgtaaccttctagtcgtatttgggtaagtaggtccccgaatgtgaagcccccactgaacctcatcgacacttcaatcccan

SEQ ID NO: 50057 - DNA, 164 bp, Setaria italica
  Peptide Sequence Number=SeqID_116031
tttgttgttgatcgagtcgatggttggatgccatcctgcaagaacctgtccagatagataccaaagaagcctgtaacctgttcctgttcctacctttgttgttgatcgagtcgatggttggatgccatcctgcaagaacctgtccataatggtttcctatctgg

SEQ ID NO: 50058 - DNA, 397 bp, Setaria italica
  Peptide Sequence Number=SeqID_116032
taggaattgacgacaatcaacagcgtgcaccctgtctattgcaagactgacatcaactttgacaccggcatatacaccgcggaggacggtgccagttgcattgttgcggttgccctattgccggaaggaggcccaacaggtgtgttcttcttccgcacagaagaagcaccctttgtgtagcatcatgaagggtcactcactactgaaatgtctgctggtatttagaacatccgcacctcattggaacgttctgttctcttcagaacactgctgtcagtttgtattgtcactcttcgacattatcctggtgtagccattgatcagagccttggacaccttgtaggccaggtagtgagaatctgcaggccatccatgagatttcaactggccattcttg

SEQ ID NO: 50059 - DNA, 253 bp, Setaria italica
  Peptide Sequence Number=SeqID_116033
agtttggcaggctagatatcctggtaagctcctcccttaaccttccgtacgcctttttttcccccttatggactgaaccctgatgttggtggctctgcagatcaacaatgcaggtgttataggcgcaactgcagagattgacaccacagcaccaattgaggaagtggtaagtcctttgacttctccaagatgattgcttacattttgacagtagcgtcactggctcactgcttcaactgaaagtacactaccg

SEQ ID NO: 50060 - DNA, 268 bp, Setaria italica
  Peptide Sequence Number=SeqID_116034
tacaccacagcaccaaattgaggaagtgctcgtaggtaagagcacaatggagagactgcaatggttgctgcagcgctccacggaaagttatgaggaagcagaagaatgtctgaaaataaactacttcggcaccaaatatgtgaccgaagcactactccctatccttctgtcctcctctgatggacggctcatcaacgtgtcatccaacttaggacttccttccgtacttattttcttagttcggtttcgtttaagtttacctttttaa

SEQ ID NO: 50061 - DNA, 313 bp, Setaria italica
  misc_feature (268)..(268): n is a, c, g, or t
  Peptide Sequence Number=SeqID_116035
ttaaaaacctacaggatgttggggtagactctaacatgacgtacttcaagcatgctgattctagaggcccccctcgagttagttatctgcatttctatgattgccccaagttttcggtaatttaacttctccacttttgtgtattactttttggtacttaaaagaaaatgcgtgcgaaactttcttaaataacttgctagcaaatgcctcttgctgaagcttcgaatggtttgtgcagttttggatcttctgcttaccgaaatcagcngttattccccttcacaaccatcctgggatggacagtatttagcaa

SEQ ID NO: 50062 - DNA, 205 bp, Setaria italica
  misc_feature (172)..(172): n is a, c, g, or t
  Peptide Sequence Number=SeqID_116036
ggcccccctcgagttagttatctgcatttctatgattgccccaagttttcgtttggtatcttctgcttaccgaaatcagcagttattccccttcacaaccatcctgggatgacagtatttagcaagatactatttggttccatgcacctgaagtcagcagttattccccttnacaaccatcctgggatgacagtatcttgctaaa

SEQ ID NO: 50063 - DNA, 397 bp, Setaria italica
  Peptide Sequence Number=SeqID_116037
tctaggttattttgtagttggttttcctagtattattttgtacttaggtaaaagtaactaaagttggtatttcttgtcgtctattcttttctagttggtttgaaatgccgatgacagctgattgtaaccctcaggtcttcttgtttgcgtccaaccctctagacttagctttgtctgggcagcaatattgtttctctcttgctcaattcctgaagaccacatggtgagatcctgagcggacttcagatcactgctatcacggaatcgactagtcaattgtgcccttccttgactgtgcaaggcccttgggagactgttttgttgagagtccgccatgactttagaagcaacttctctggttacagttggcatgtcagatggcgaagcattaacattt

SEQ ID NO: 50064 - DNA, 354 bp, Setaria italica
  Peptide Sequence Number=SeqID_116038
aaaggaaaattaaactaaagaaacgaaacaaaataactttaacaaagtaaggttaagaaaatagaccgaatagaacaagactagattgtaaccctcaggtcttcttgtttgcgtccaaccctctagacttagctttgtctgggcagcaatattgtttctctcttgctcaattcctgaagaccacatggtgagatcctgagcggacttcagatcactgctatcacggaatcgactagtcaattgtgcccttccttgactgtgcaaggcccttgggagactgttttgttgagagtccgccatgactttagaagcaacttctctggttacagttggcatgtcagatggcgaagcatt

SEQ ID NO: 50065 - DNA, 281 bp, Setaria italica
  Peptide Sequence Number=SeqID_116039
ctagaaagaaccaacaataggtagaagaatacctagaagacggaacttacaagaatacaactgactaatacacggaatcgactagtcaattgtgcccttccttgactgtgcaaggcccttgggagactgttttgttgagagtccgccatgactttagaagcaacttctctggttacagttggcatgtcagatggcgaagcattaacatttgaacgagacctcttgaatctgagtggaagagggttcacaggagatgggctaacagcagcaggttctatttg

SEQ ID NO: 50066 - DNA, 410 bp, Setaria italica
  misc_feature (368)..(368): n is a, c, g, or t
  Peptide Sequence Number=SeqID_116040
taaaatagacctaacaaactagtagtacccaaggtaatttgagtggtttccagatatttgactaggaaaagaacaaagtggattctgcgcatctttcagtggttgaaatgccgatgacagctgattgtaaccctcaaatacctgggacacagttgatgctcattatccaacccaacaagcaaaccacaacatgctacctggcacatggtctttaatgcctcataactctggttttatgatgaatcaacaaaattatctgtcaatgcctgaagctgcacttcctcaaagggctgaattgcaaatttagtggaaatcagctttcacttcgcttcagggccatggcattgatcggtgctgctcaggctggnttggcataatcgtgcatcatcgagtttgatcaacttccccgg

SEQ ID NO: 50067 - DNA, 469 bp, Setaria italica
  Peptide Sequence Number=SeqID_116041
tggaactactttgcactttgttctgaacattctgggtagcctctgggcaaggatgattatctccctaacagaatctgtctgaggaccatcaagaggcttaacagtcttcgaaggatcagataatcatccacttcaattatgtctagctgattcctttgtgatggagatgtttgaagctttccgtcatatgcaacacttggtgggggataccagaggttcagatttttctgggctaccaagaggaaacccaaatagcttgaatgaagtgcctttggttttctggacatcagtttcaataaccaaaggccggggattgatcaaactcgatgatgcacgattatggccaatccagcctgagcagcaccgatcaatgccatggccctgaagcgaagtgaaagctgatttcccactaaattttgcaatttcagccctttgaggaagtgcagcttcaggcattgacagataattt

SEQ ID NO: 50068 - DNA, 244 bp, Setaria italica
  Peptide Sequence Number=SeqID_116042
aattactacggtagactagacgtacggacatgcggatgagtgcctccctccactggatatgagtcagcatcctcatgccgacgcagcaccgagaatccaccatgcgtgcttgtgtctgaggcagtcagtgtcttgcagaaggaatggatgagaagctgctcattggtggctggtggtgcaacaggcacgacctcatcctctgcagcatcactctccactgttgtagtggtattctcatctcgct

SEQ ID NO: 50069 - DNA, 465 bp, Setaria italica
  Peptide Sequence Number=SeqID_116043
caccaccaaagtcaaacatctgatccagttcagcaattagttcactgtagcaagtgaactttgtcagatcaatcgacctgccgaggcactgccttgcttatgcaccttcttgcagcttcgggtggaactactttgcactttgttctgaacattctgggtagcctctgggcaaggatgattattctccctaacagaatctgtctgaggaccatcaagaggcttaacagtcttcgaaggatcagaataatcatccacttcaattatgtctagctgattcctttgtgatggagatgtttgaagctttccgtcatatgcaacacttggtggggataccagaggttcagatttttctgggctaccaagaggaaacccaaatagcttgaatgaagtgcctttggttttctggacatcagtttcaataaccaaaggccggggattgatcaaactcgatgatgcacgattatg

SEQ ID NO: 50070 - DNA, 475 bp, Setaria italica
  Peptide Sequence Number=SeqID_116044
aacaccactacaaacctcacaaacttgctgtctgtctctccggctacggatgtggccttttgtctccctctgttgccaccacgaaagacctcgtgaactggacaaactagcagttctcggagttgagagacaaagcggatggcccacctcggggctccttggaacccgatcctctcaccagcgagtcagacagagtttcttcggacctggagctcagggcgccagggttcatcctttccacctcctcccttgtgtagatgaacatcttgtggaccatgctgcagaactcgttccagggatcatcaccaaccagcatcatgtcaccttcattgtcagtgaagacaaccatccagttcttgtgaggactgctcagctcaccaccaaagtcaaacatctgatccagttcagcaattagtcactgtagcaagtgaactttgtcagatcaatcgacctgccgagggcactgccttgctta

SEQ ID NO: 50071 - DNA, 378 bp, Setaria italica
  Peptide Sequence Number=SeqID_116045
ctctgggcaaggatgattattctccctaacagaatctgtctgaggaccatcaagaggcttaacagtcttcgaaggatcagaataatcatccacttcaattatgtctagctgattcctttgtgatggagatgtttgaagctttccgtcatatgcaacacttggtggggataccagaggttcagattttttctgggctaccaagaggaaacccaaatagcttgaatgaagtgcctttggtttctggacatcagtttcaataaccaaaggccgggattgatcaaactcgatgatgcacgattatggccaatccagcctgagcagcaccgatcaatgccatggccctgaagcgaagtgaaagctgatttcccactaaatttg

SEQ ID NO: 50072 - DNA, 379 bp, Setaria italica
  Peptide Sequence Number=SeqID_116046
ctctgggcaaggatgattattctccctaacagaatctgtctgaggaccatcaagaggcttaacagtcttcgaaggatcagaataatcatccacttcaattatgtctagctgattcctttgtgatggagatgtttgaagctttccgtcatatgcaacacttggtggggataccagaggttcagatttttctgggctaccaagaggaaacccaaatagcttgaatgaagtgcctttggtttctggacatcagtttcaataaccaaaggccggggattgatcaaactcgatgatgcacgattatggccaatccagcctgagcagcaccgatcaatgccatggccctgaagcgaagtgaaagctgatttcccactaaattttg

SEQ ID NO: 50073 - DNA, 353 bp, Setaria italica
  misc_feature (337)..(337): n is a, c, g, or t
  Peptide Sequence Number=SeqID_116047
gtgatggagatgtttgaagctttccgtcatatgcaacacttggtgggggataccagaggttcagattttttctggggcctaccaagaggaaacccaaatagcttgaatgaagtgcctttggttttctggacatcagtttcaataaccaaaggccggggattgatcaaactcgatgatgcacgattatggccaatccagcctgagcagcaccgatcaatgccatggccctgaagcgaagtgaaagctgatttcccactaaattttgcaatttcagccctttgaggaagtgcagcttcaggcattgacagataattttgttgattcatcataaaaccanagttatgaggcattaa

SEQ ID NO: 50074 - DNA, 459 bp, Setaria italica
  Peptide Sequence Number=SeqID_116048
agcaaagttggcttcttcaggtgccatgtcagtcacgacttgtcaacagtacactactacgcttcagagcaaggctatatttacaaggaagaaagagaggagggccaagcaagcgcgaccagggattttgttttgcctgctttctgctgctctgctacgataacttcaccggttaaccccaacacagggcacacccaaaacttgaacaagaaactgaccgccaggccaagcaccaactacaaactgggtactgcggggctttacccagagccatacacacgaaagcacctacaacaccactacaaacctcacaaacttgctgtctgtctctccggctacggatgtggcctttttgtctccctctgttgccaccacgaaagacctcgtgaactggacaaactagcagttctcggagttgagagacaaagcggatggcccacctcgggggctccttggaac

SEQ ID NO: 50075 - DNA, 354 bp, Setaria italica
  Peptide Sequence Number=SeqID_116049
tgtctaaggtaaaactttctactaattttatttagtctattagtaagtaattactaaacttagcaggtttctttttttcattcagtggaacctgcgataaaattagcttctagatacagccaatttgttgcagaaggaatcctatcaggaaattccagccagcaagcagcagtacatagcttcattgaagcatacttcgaaaaatattcactaaaggatatggacccagtatgcattttatgtatcaggaaatgactagcaaggaaaaggtccataactagcgaggaaaaggtgcaatgtgtggtgaaccttcttgcagcttcgggtggaactactttgcactttgttctgaac

SEQ ID NO: 50076 - DNA, 391 bp, Setaria italica
  Peptide Sequence Number=SeqID_116050
tcttacggatgtggccttttgtctccctctgttgccaccacgaaagacctcgtgaactggacaaactagcagttctcggagttgagagacaaagcggatggcccacctcggggctccttggaacccgatcctctcaccagcgagtcagacagagtttcttcggacctggagctcagggcgccagggttcatcctttccacctcctcccttgtgtagatgaacatcttgtggaccatgctgcagaactcgttccagggatcatcaccaaccagcatcatgtcaccttcattgtcagtgaagacaaccatccagttctgtgaggactgctcagctcaccaccaaagtcaaacatctgatccagttcagcaattgttcactgtagcaagtgaac

SEQ ID NO: 50077 - DNA, 435 bp, Setaria italica
  Peptide Sequence Number=SeqID_116051
tttgttcctagtttctacgtaggttcttttcgttggttggcaacagagggagacaaagcggatggcccacctcggggctccttggaacccgatcctctcaccagcgagtcagacagagtttcttcggacctggagctcagggcgccagggttcatcctttccacctcctcccttgtgtagatgaacatcttgtggaccatgctgcagaactcgttccagggatcatcaccaaccagcatcatgtcaccttcattgtcagtgaaagacaaccatccagttcttgtgaggactgctcagcctcaccaccaaaagtcaaacatctgatccagttcagcaattagtcactgtagcaagtgaactttgcagatcaatcgacctgccgagggcactgccttgcttatgcaccttcttgcagcttcgggtggaactacttgc

SEQ ID NO: 50078 - DNA, 458 bp, Setaria italica
  misc_feature (79)..(79): n is a, c, g, or t
  Peptide Sequence Number=SeqID_116052
gagcaaagttggcttcttcaggtgccatgtcagtcacgacttgtcaacagtacactactacgcttcagagcaaggctanatttacaaggaagaaagagaggagggccaagcaagcgcgaccagggattttgtttgcctgctttctgctgctctgctacgataacttcaccggttaaccccaacacagggcacaccaaaacttgaacaagaaactgaccgccaggccaagcaccaactacaaactgggtactgcggggctttacccagagccatacacacgaaagcacctacaacaccactacaaacctcacaaacttgctgtctgtctctccggctacggatgtggccttttgtctccctctgttgccaccacgaaagacctcgtgaactggacaaactagcagttctcggagttgagagacaaagcggatggcccacctcggggctccttggaaccc

SEQ ID NO: 50079 - DNA, 304 bp, Setaria italica
  Peptide Sequence Number=SeqID_116053
agtactaagactgaattcctttgtgatggagatgtttgaagctttccgtcatatgcaacacttggtggggataccagaggttcagattttttctgggctaccaagaggaaacccaaatagcttgaatgaagtgccttttggttttctggacatcagtttcaataaccaaaggccggggattgatcaaactcgatgatgcacgattatggccaatccagcctgagcagcaccgatcaatgccatggccctgaagcgaagtgaaagctgatttccactaaattttgcaatttcagtccctttgagg

SEQ ID NO: 50080 - DNA, 474 bp, Setaria italica
  misc_feature (1)..(38): n is a, c, g, or t
  misc_feature (124)..(124): n is a, c, g, or t
  misc_feature (298)..(298): n is a, c, g, or t
  Peptide Sequence Number=SeqID_116054
nnnnnnnnnnnnnnnnnnnnnnnnnnnnnnnnnnnnnnaaaaggttagcaaagttggcttcttcaggtgccatgtcagtcacgacttgtcaacagtacactactacgcttcagagcaaggctanatttacacggaagaaagagaggagggccaagcaagcgcgaccagggattttgtttgcctgctttctgctgctctgctacgataacttcaccggttaaccccaacacagggcacacccaaaacttgaacaagaaactgaccgccaggccaagcaccaactacaaactgggtactncggggctttacccagagccatacacaagaaagcacctacaacaccactacaaacctcacaaacttgctgtctgtctctccggctacggatgtggccttttgtctccctctgttgccaccacgaaagaccttcgttgtaacttggtactaaacttagtctagtttcttcggtagttt

SEQ ID NO: 50081 - DNA, 229 bp, Setaria italica
  Peptide Sequence Number=SeqID_116055
taagtgcctttggttttactggacatcagtttcaataaccaaaggccggggattgatcaaactcgatgatgcacgattatggccaatccagcctgagcagcaccgatcaatgccatggccctgaagcgaagtgaaagctgatttcccactaaatttttgcaatttcagccctttgaggaagtgcagcttcaggcattgacagataattttgttgattcatcataaaacc

SEQ ID NO: 50082 - DNA, 419 bp, Setaria italica
  Peptide Sequence Number=SeqID_116056
atctgaacctctggtatccccaccaagtgttgcatatgacggaaagcttcaaacatctccatcacaaaggaatcagctagacataattgaagtggatgattattctgatccttcgaagactgttaagcctcttgatggtcctcagacagatttttctgggctaccaagaggaaacccaaatagcttgaatgaagtgccttggttttctggacatcagtttcaataaccaaagccggggattgatcaaactcgatgatgcacgattatggccaatccagcctgagcagcaccgatcaatgccatggccctgaagcgaagtgaaagctgatttcccactaaattttgcaatttcagccctttgaggaagtgcagcttcaggcattgacagataattttgttgattcatcataaaaccagag

SEQ ID NO: 50083 - DNA, 308 bp, Setaria italica
  Peptide Sequence Number=SeqID_116057
agtgccctcggcaggtcgattgatctgacaaagttcacttgctacagtgaactaattgctgaactggatcagatgtttgactttggtggtgagcattctgggtagcctctgggcaaggatgattattctccctaacagaatctgtctgaggaccatcaagaggcttaacagtcttcgaaggatcagaataatcatccacttcaattatgtctagctgattcctttgtgatggagatgtttgaagctttccgtcatatgcaacacttggtggggataccagaggttcagattttctgggctaccaagag

SEQ ID NO: 50084 - DNA, 286 bp, Setaria italica
  Peptide Sequence Number=SeqID_116058
tcctaacagaatctgtctgaggaccatcaagaggcttaacagtcttcgaaggatcagaataatcatccactttcaattatgtcttagcttgtattcctttgtgatggagatgtttgaagctttccgtcatatgcaacacttggtggggataccagaggttcagattttttctgggctaccaagaggaaacccaaatagcttgaatgaagtgcctttggttttctggacatcagtttcaataaccaaaggccggggattgatcaaactcgatgatgcacgattattg

SEQ ID NO: 50085 - DNA, 429 bp, Setaria italica
  misc_feature (98)..(98): n is a, c, g, or t
  Peptide Sequence Number=SeqID_116059
agtcaaagttggcttcttcaggtgccatgtcagtcacgacttgtcaacagtacactactacgcttcagagcaaggctatatttacaaggaagaaaagngaggagggccaagcaagcgcgaccagggattttgtttgcctgctttctgctgctctgctacgataacttcaccggttaacccaacacagggcacacccaaaacttgaacaagaaactgaccgccaggccaagcaccaactacaaactgggtactgcggggctttacccagagccatacacacgaaagcacctacaacaccactacaaacctcacaaacttgctgtctgtctctccggctacggatgtggccttttgtctccctctgttgccaccacgaaagacctcgtgaactggacaaactagcagttctcggagttgagagacaaagcg

SEQ ID NO: 50086 - DNA, 275 bp, Setaria italica
  Peptide Sequence Number=SeqID_116060
ctggacaaactagcagttctcggagttgagagacaaagcggatggcccacctcggggctccttggaacccgatcctctcaccagcgagtcagacagagtttcttcggacctggagctcagggcgccagggttcatcctttccacctcctcccttgtcgtagatgaacatcttgtggaccatgctgcagaactcgttccagggatcatcaccaaccagcatcatgtacaaccttcattgtcagtgaagacaaccatccagttctgtgaggactgct

SEQ ID NO: 50087 - DNA, 340 bp, Setaria italica
  Peptide Sequence Number=SeqID_116061
ccatgctgcagaactcgttccagggatcatcaccaaccagcatcatgtcaccttcatgtcagtgaagacaaccatccagttcttgtgaggactgctcagctcaccaccaaagtcaaacatctgatccagttcagcaattagttcactgtagcaagtgaactttgtcagatcaatcgacctgccgagggcactgccttgcttatgcaccttcttgcagcttcgggtggaactactttgcactttgttctgaacattctgggtagcctctgggcaaggatgattattctccctaacagaatctgtctagaaggaaccaatacaaagaaggacttaaacaaga

SEQ ID NO: 50088 - DNA, 364 bp, Setaria italica
  Peptide Sequence Number=SeqID_116062
aaaacttgaacaagaaactgaccgccaggccaagcaccaactacaaactgggtactgcggggctttacccagagccatacacacgaaagcacctacaacaccactcaaacctcacaaacttgctgtctgtctctccggctacggatgtggccttttgtctccctctgttgccaccacgaaagacctcgtgaactggacaaactagcagttctcggagttgagagacaaagcggatggcccacctcggggctccttggaacccgatcctctcaccagcgagtcagacagagtttcttcggacctggagctcagggcgccagggttcattcctttccacctcctcctttgttgttagtattagtaa

SEQ ID NO: 50089 - DNA, 296 bp, Setaria italica
  Peptide Sequence Number=SeqID_116063
gttcttgtgaggactgctcagctcaccaccaaagtcaaacaatctgatccagttcagcaattagttcactgtagcaagtgaactttgtcagatcaatcgacctgccgagggcactgccttgcttatgcaccttcttgcagcttcgggtggaactactttgcactttgttctgaacattctgggtagcctctgggcaaggatgattattctccctaacagaatctgtctgaggaccatcaagaggtctttaactagttctttcgttaaggttatttcttagtaattaattctattct

SEQ ID NO: 50090 - DNA, 257 bp, Setaria italica
  Peptide Sequence Number=SeqID_116064
gccaggccaagcaccaactacaaactgggtactgcggggctttacccagagccatacacacgaaagcacctacaacaccactacaaacctcacaaacttgctgtctgtctctccggctacggatgtggccttttgtctccctctgttgccaccacgaaagacctcgtgaactggacaaactagcagttctcggagttgagagacaaagcggatggcccacctcggggctccttggaacccgatcctctcaccagcga

SEQ ID NO: 50091 - DNA, 313 bp, Setaria italica
  Peptide Sequence Number=SeqID_116065
ccaaagtcaaacatctgatccagttcagcaattagttcactgtagcaagtgaactttgtcagatcaatcgaccctgccgagggcactgccttgcttatgcaccttcttgcagcttcggtggaactactttgcactttgttctgaacattctggtagcctctgggcaaggatgattattctccctaacagaatctgtctgaggaccatcaagaggcttaacagtcttcgaaggatcagaataatcatccacttcaattatgtctagctgattcctttgtgatggagatgtttgaagctttccgtcatatgcaac

SEQ ID NO: 50092 - DNA, 356 bp, Setaria italica
  misc_feature (135)..(135): n is a, c, g, or t
  Peptide Sequence Number=SeqID_116066
cgcttcagagcaaggctatatttacaaggaagaaagagaggagggccaagcaagcgcgaccaggggattttgttttgcctgctttctgctgctcttgctacgataacttcacggttaaccccaacacagggcacncccaaaacttgaacaagaaactgaccgccaggccaagcaccaactacaaactgggtactgcggggctttacccagagccatacacacgaaagcacctacaacaccactacaaacctcacaaacttgctgtctgtctctccggctacggatgtggccttttgtctccctctgttgccaccacgaaagacctcgtgaactggacaaactagcagttctcggaa

SEQ ID NO: 50093 - DNA, 106 bp, Setaria italica
  Peptide Sequence Number=SeqID_116067
aggagcaaagttggcttcttcaggtgccatgtcagtcacgacttgtcaacagtacaactactacgcttcagagcaaggctatatttacaaggaagaaagagaggaa

SEQ ID NO: 50094 - DNA, 195 bp, Setaria italica
  Peptide Sequence Number=SeqID_116068
cgtcctgggccccgtttgtctcgctgatggggaccatttcaccgacctcgtctaccatggcgaaggcaaggtctactgcctcaccaggtgcgggaacgtgcatgtcctacacctccctgagcgccgccgccggcaacctgccacggatgtatctgacctgtttatgagacgttcacctgaatgtcaaggagagga

SEQ ID NO: 50095 - DNA, 241 bp, Setaria italica
  misc_feature (1)..(1): n is a, c, g, or t
  Peptide Sequence Number=SeqID_116069
naccctgactgctcaggtcaggcctactcattggtcgagaggccatgcctgccatttcgcccctcttgccattcagctcagcattgttcaccagtgactgcacccatgacacatctggttcctctcctgcagctccaggttgcgcaggatgcctcaaaacggaaccaagactacttacgttaatacaaacaaccccaagtacaaaccttaactactttaggggtaaccaaatagttaacca

SEQ ID NO: 50096 - DNA, 386 bp, Setaria italica
  Peptide Sequence Number=SeqID_116070
tagtagaaaggacggaggagagggtggtggacgccatggggacttgctcggggagctcgggcctcgggagtgagcagcggcggcgggaggaggcgggggataagaagatgaggtgcccagcagcgcgcgtatcgccaccatcaaggtcgtgcgcgcgctcaccagcctcgcgctcaaggaggccaaggacctcattgagggcctccccaagaagctcaaggaggccgtcagcaaggacgaggccgaggacgccaagaagcagctcgaggaggtcggcgccaaggtgtccatcgtgtgacactagagcaatgtgagtaaacccccttttgttgacatggcgtgtatgttccaccaattggagaatgatgtacttcagatgcatatat

SEQ ID NO: 50097 - DNA, 185 bp, Setaria italica
  Peptide Sequence Number=SeqID_116071
ttttcatcaagaaattaaaacagcaatagtaatcgatctgatggatggaaaaattaaaccgaagcaaaaactgagttgcagggtgctcaaggagaagcgtgcggcgggcgtgctggagaaccacgaagaggggaggaggtactcgcagcacggcttcaggaagtacatcgacggcaagaagccag

SEQ ID NO: 50098 - DNA, 217 bp, Setaria italica
  Peptide Sequence Number=SeqID_116072
cggccggtatggatcggtgctgctgccacgacgatctactcctttgggtccgccatccacgagttgaggctctgcatgatctctggcttcttgctgatgatttgataagttgttaccgtgtgattgtcctctcggtacgtttttgatcaccatacatatatatatgttcttaacaaacaaacatgcatggcatgatgtggtggcctggctgtgaaca

SEQ ID NO: 50099 - DNA, 234 bp, Setaria italica
  Peptide Sequence Number=SeqID_116073
cgctgttcctggcgacgggtacacctcggggcggatccaccgcttcgaccacgacgcggacgccgacgccatgggatgatcgaagcggtggatccgccccgaggtgtaccgctgttcctggcgacgggcgcggccgtcggcatctgcgcgatgcagctcatccgcaacatcaccggcaaccccgaagtcagggtgctcaaggagaagcgtgcggcgggcgtgctggagaaccac

SEQ ID NO: 50100 - DNA, 373 bp, Setaria italica
  misc_feature (348)..(373): n is a, c, g, or t
  Peptide Sequence Number=SeqID_116074
aaggaatcaaatcgtcgcccagatggccgagctgaagaagatactgtacggcaagttcaaggatgccatcaacctggaggaggattgacaaggagagtttgaagcttcggaagctcgtttaccccacaggatgcacgaacttggttggagtgagtggtttgattccgagcgtgtttatgaattgaagtgaatgggcgtgagcctcaggcgtacatccagtcatgatcttttcgtcagtttgatttttcactcgtgcaggtcaccaaacattttcccagcagacatgttgatcaaaatctgtgtgaatctgtgatccgtctgtgcaagaaaacactgaactttggaacnnnnnnnnnnnnnnnnnnnnnnnnnn

SEQ ID NO: 50101 - DNA, 441 bp, Setaria italica
  Peptide Sequence Number=SeqID_116075
gatgcttgccttgcttatgaagtatccttctgctgctcattcagctgtggattctacaacaattatgacatgagaggctataaatcagtgttgtgatggctgagaaatcagcacccagagcaccctcttatggtcatggtggtggccgtggtggtgggctatggtggcggtcgcagggacagttacagagatggggtggacatggacccaatagaaaccagggtggtggttcgcgttcacgaccatactgaaaacagcaaatgttattattatgattgtcttctgtgagaaaccatttctattcctgtcctatggacttgtactctcgtacatgctacattctacttcaatcccacgtccgtgtgaattgcaacggatttggtgcattctgtgcatgctagttgatacgtttaatatacacctgataaacctatcacatga

SEQ ID NO: 50102 - DNA, 239 bp, Setaria italica
  Peptide Sequence Number=SeqID_116076
tggctatggtggcggtcgcagggacagttacagagatgggggtggacatggacccaatagaaaccagggtggtggttcgcgttcacgaccatactgaaaacagcaaatgttattattatgattgtcttctgtgagaaaccatttctattcctgtcctatggacttgtactctcatacaggcgcataacatagatcaatcacttttggacaaacaaactattccgtaccttaagttactt

SEQ ID NO: 50103 - DNA, 427 bp, Setaria italica
  Peptide Sequence Number=SeqID_116077
ttcttcgcaatcccagcctgaactaggaaagtggcgacattcttacgctgatcgccttggagctgaatgacctggcctagctctgggtcctggactacagtaccattgcagcagaattccttcttgagatccttgaggatcttgttgtagctgaactctttctttagtccctgaacagtagtcagactctttctgccgttgcgttgctggatgcgcacatgcacataatcctttgttccgggaccagcaccggagtcctcagcatttgcctcagcaaacggatcgaaggcagatggaagctggacgtcgagatcagacatgaaacttggttgttgaagttggattggcaccgagccgatcaaggactttagaatactagttaggtactttaatagacaagaaaacttttacttactttagtaccgta

SEQ ID NO: 50104 - DNA, 467 bp, Setaria italica
  Peptide Sequence Number=SeqID_116078
atcaaagcctgatcggctcggtgccaatccaacttcaacaaccaagtttcatgtctgatctcgacgtccagcttccatctgccttcgatccgtttgctgaggcaaatgctgaggactccggtgctggtcccggaacaaaggattatgtgcatgtgcgcatccagcaacgcaacggcagaaagagtctgactactgttcagggactaaagaagagttcagctacaacaagatcctcaaggatctcaagaaggaattctgctgcaatggtactgtagtccaggacccagagctaggccaggtcattcagctccaaggcgatcagcgtaagaatgtcgccactttcctagttcaggctgggattgcgaagaaagagaacatcaagattcacgggttctaagggacctgctgtaaatgcgtgcgtgcacaatattgtgcgctaccgcatattgggaagcttgaagcagtaa

SEQ ID NO: 50105 - DNA, 489 bp, Setaria italica
  Peptide Sequence Number=SeqID_116079
tttaaattaccaaacttcaaacaaccaagtttcatgtctgatctcgacgtccagcttccatctgccttcgatccgtttgctgaggcaaatgctgaggactccggtgctggtcccggaacaaaggattatgtgcatgtgcgcatccagcaacgcaacggcagaaagagtctgactactgttcagggactaaagaaagagttcagctacaacaagatcctcaaggatctcaagaaggaattctgctgcaatggtactgtagtccaggacccagagctaggccaggtcattcagctccaaggcgatcagcgtaagaatgtcgccactttccagttcaggctgggattgcgaagaagagaacatcaagattcacgggttctaagggacctgctgtaaatgcgtgcgtgcacaatattgtgcgctaccgcatattgggaagcttgaagcagtaataatatagttactgtcttttccatataagaacaaagtaag

SEQ ID NO: 50106 - DNA, 471 bp, Setaria italica
  Peptide Sequence Number=SeqID_116080
taactgttcagggactaaagaaagagttcagctacaacaagatcctcaaggatctcaagaaggaattctgctgcaatggtactgtagtccaggacccagagctaggccaggtcattcagctccaaggcgatcagcgtaagaatgtcgccactttcctagttcaggctgggattgcgaagaaagagaacatcaagattcacgggttctaagggacctgctgtaaatgcgtgcgtgcacaatattgtgcgctaccgcatattgggaagcttgaagcagtaataatatagttactgcttttccatataagaacaaagaagtattgtgctattatcaagtgtgttttgcttgatgcaagttgtgttttctcctcattatgcgccaccagcgtatgggtatggcttgtatggagtgttattgttgccaacttaataaaagtactctctgtttggctaaataaaaaaaaaaaaaaaa

SEQ ID NO: 50107 - DNA, 441 bp, Setaria italica
  Peptide Sequence Number=SeqID_116081
tccagcttccatctgccttcgatccgtttgctgaggcaaatgctgaggactccggtgctggtcccggaacaaaggattatgtgcatgtgcgcatccagcaacgcaacggcagaaagagtctgactactgttcagggactaaagaaagagttcagctacaacaagatcctcaaggatctcaagaaggaattctgctgcaatggtactgtagtccaggacccagagctaggccaggtcattcagctccaaggcgatcagcgtaagaatgtcgccactttcctagttcaggctgggattgcgaagaaagagaacatcaagattcacgggttctaagggacctgctgtaaatgcgtgcgtgcacaatattgtgcgctaccgcatattgggaagcttgaagcagtaataatatagttactgcttttccatataagaacaaagaagt

SEQ ID NO: 50108 - DNA, 409 bp, Setaria italica
  Peptide Sequence Number=SeqID_116082
tgtctgatctcgacgtccagcttccatctgccttcgatccgtttgctgaggcaaatgctgaggactccggtgctggtcccggaacaaaggattatgtgcatgtgcgcatccagcaacgcaacggcagaaagagtctgactactgttcagggactaaagaaagagttcagctacaacaagatcctcaaggatctcaagaaggaattctgctgcaatggtactgtagtccaggacccagagctaggccaggtcattcagctccaaggcgatcagcgtaagaatgtcgccactttcctagttcaggctgggattgcgaagaaagagaacatcaagattcacgggttctaagggacctgctgtaaatgcgtgcgtgcacaatattgtgcgctaccgcatattgggaagcttga

SEQ ID NO: 50109 - DNA, 462 bp, Setaria italica
  Peptide Sequence Number=SeqID_116083
gacgtccagcttccatctgccttcgatccgtttgctgaggcaaatgctgaggactccggtgctggtcccggaacaaaggattatgtgcatgtgcgcatccagcaacgcaacggcagaaagagtctgactactgttcagggactaaagaaagagttcagctacaacaagatcctcaaggatctcaagaaggaattctgctgcaatggtactgtagtccaggacccagagctaggccaggtcattcagctccaaggcgatcagcgtaagaatgtcgccactttccagttcaggctgggattgcgaagaaagagaacatcaagattcacgggttctaagggacctgctgtaaatgcgtgcgtgcacaatattgtgcgctaccgcatattgggaagcttgaagcagtaataatatagttactgcttttccatataagaacaaagaagtattgtgctattatcaagt

SEQ ID NO: 50110 - DNA, 481 bp, Setaria italica
  misc_feature (34)..(34): n is a, c, g, or t
  Peptide Sequence Number=SeqID_116084
ccagcaacgcaacggcagaaagagtctgactacngttcagggactaaagaaagagttcagctacaacaagatcctcaaggatctcaagaaggaattctgctgcaatggtactgtagtccaggacccagagctaggccaggtcattcagctccaaggcgatcagcgtaagaatgtcgccactttcctagttcaggctgggattgcgaagaaagagaacatcaagattcacgggttctaagggacctgctgtaaatgcgtgcgtgcacaatattgtgcgctaccgcatattgggaagcttgaagcagtaataatatagttactgcttttccatataagaacaaagaagtattgtgctattatcaagtgtgttttgcttgatgcaagttgtgttttctcctcattatgcgccaccagcgtatgggtatggcttgtatggagtgttattgttgccaacttaataaagtactctctgtttggctat

SEQ ID NO: 50111 - DNA, 445 bp, Setaria italica
  Peptide Sequence Number=SeqID_116085
ctgaggactccggtgctggtcccggaacaaaggattatgtgcatgtgcgcatccagcaacgcaacggcagaaagagtctgactactgttcagggactaaagaaagagttcagctacaacaagatcctcaaggatctcaagaaggaattctgctgcaatggtactgtagtccaggacccagagctaggccaggtcattcagctccaaggcgatcagcgtaagaatgtcgccactttcctagttcaggctgggattgcgaagaaagagaacatcaagattcacgggttctaagggacctgctgtaaatgcgtgcgtgcacaatattgtgcgctaccgcatattgggaagcttgaagcagtaataatatagttactgcttttccatataagaacaaagaagtattgtgctattatcaagtgtgttttgcttgatgcaagttgtgtttt

SEQ ID NO: 50112 - DNA, 430 bp, Setaria italica
  Peptide Sequence Number=SeqID_116086
tgctgaggcaaatgctgaggactccggtgctggtcccggaacaaaggattatgtgcatgtgcgcatccagcaacgcaacggcagaaagagtctgactactgttcagggactaaagaaagagttcagctacaacaagatcctcaaggatctcaagaaggaattctgctgcaatggtactgtagtccaggacccagagctaggccaggtcattcagctccaaggcgatcagcgtaagaatgtcgccactttcctagttcaggctgggattgcgaagaaagagaacatcaagattcacgggttctaagggacctgctgtaaatgcgtgcgtgcacaatattgtgcgctaccgcatattgggaagcttgaagcagtaataatatagttactgctttccatataagaacaaagagtattgtgctattatcaagtg

SEQ ID NO: 50113 - DNA, 456 bp, Setaria italica
  Peptide Sequence Number=SeqID_116087
taagttaacaagggaactaaaagaaaagaagttacagctaacaacaagatcctcaaggatctcaagaaggaattctgctgcaatggtactgtagtccaggacccagagctaggccaggtcattcagctccaaggcgatcaagcgtaaagaatgtcgccactttcctagttcaggctgggattgcgaagaaagagaacatcaagattcacgggttctaagggacctgctgtaaatgcgtgcgtgcacaatattgtgcgctaccgcatattgggaagcttgaagcagtaataatatagttactgcttttccatataagaacaaagaagtattgtgctattatcaagtgtgttttgcttgatgcaagttgtgttttctcctcattatgcgccaccagcgtatgggtatggcttgtatggagtgttattgttgccaacttaataaaagtactctctgttt

SEQ ID NO: 50114 - DNA, 356 bp, Setaria italica
  Peptide Sequence Number=SeqID_116088
cagcgtatgggtatggcttgtatggagtgttattgttgccaacttaataaaagtacaatacttctttgttcttatatggaaaagcagtaactatattattactgcttcaagcttcccaatatgcggtagcgcacaatattgtgcacgcacgcatttacagcaggtcccttagaacccgtgaatcttgatgttctctttcttcgcaatcccagcctgaactaggaaagtggcgacattcttacgctgatcgccttggagctgaatgacctggcctagctctgggtcctggactacagtaccattgcagcagaattccttcttgagatccttgaggatcttgttgtagctgaactctt

SEQ ID NO: 50115 - DNA, 366 bp, Setaria italica
  Peptide Sequence Number=SeqID_116089
aaggattatgtgcatgtgcgcatccagcaacgcaacggcagaaagagtctgactactgttcagggactaaagaaagagttcagctacaacaagatcctcaaggatctcaagaaggaattctgctgcaatggtactgtagtccaggacccagagctaggccaggtcattcagctccaaggcgatcagcgtaagaatgtcgccactttcctagttcaggctgggattgcgaagaaagagaacatcaagattcacgggttctaagggacctgctgtaaatgcgtgcgtgcacaatattgtgcgctaccgcatattgggaagcttgaagcagtaataatatagttactgcttttccataatagcacaata

SEQ ID NO: 50116 - DNA, 418 bp, Setaria italica
  misc_feature (402)..(402): n is a, c, g, or t
  Peptide Sequence Number=SeqID_116090
gctgcaatggtactgtagtccaggacccagagctaggccaggtcattcagctccaaggcgatcagcgtaagaatgtcgccactttcctagttcaggctgggattgcgaagaaagagaacatcaagattcacgggttctaagggacctgctgtaaatgcgtgcgtgcacaatattgtgcgctaccgcatattgggaagcttgaagcagtaataatatagttactgcttttccatataagaacaaagaagtattgtgctattatcaagtgtgttttgcttgatgcaagttgtgttttctcctcattatgcgccaccagcgtatgggtatggcttgtatggagtgttattgttgccaaacttaataaaaagtactctctgtttggctaaataaaaaaaaaaaaanaaaaaaactaaaaaag

SEQ ID NO: 50117 - DNA, 429 bp, Setaria italica
  Peptide Sequence Number=SeqID_116091
ccagcaacgcaacggcagaaagagtctgactactgttcagggactaaagaaagagttcagctacaacaagatcctcaaggatctcaagaaggaaattctgctgcaatggtactgtagtccaggacccagagctaggccaggtcattcagctccaaggcgatcagcgtaagaatgtcgccactttcctagttcaggctgggattgcgaagaaagagaacatcaagattcacgggttctaagggacctgctgtaaatgcgtgcgtgcacaatattgtgcgctaccgcatattgggaagcttgaagcagtaataatatagttactgcttttccatataagaacaaagaagtattgtgctattatcaagtgtgttttgcttgatgcaagttgtgttttctcctcattatgcgccaccagcgtatgggtatggc

SEQ ID NO: 50118 - DNA, 366 bp, Setaria italica
  Peptide Sequence Number=SeqID_116092
aaagagtctgactactgttcagggactaaagaaagagttcagctacaacaagatcctcaaggatctcaagaaggaattctgctgcaatggtactgtagtccaggacccagagctaggccaggtcattcagctccaaggcgatcagcgtaagaatgtcgccactttcctagttcaggctgggattgcgaagaaagagaacatcaagattcacgggttctaagggacctgctgtaaatgcgtgcgtgcacaatattgtgcgctaccgcatattgggaagcttgaagcagtaataatatagttactgcttttccatataagaacaaagaagtattgtgctattatcaagcaaaacacacttgataatag

SEQ ID NO: 50119 - DNA, 326 bp, Setaria italica
  Peptide Sequence Number=SeqID_116093
caaatgattatgtgcatgtgcgcatccagcaacgcaacggcagaaagagtctgactactgttcagggactaaagaaagagttcagctacaacaagatcctcaaggatctcaagaaggaattctgctgcaatggtactgtagtccaggacccagagctaggccaggtcattcagctccaaggcgatcagcgtaagaatgtcgccactttcctagttcaggctgggattgcgaagaaagagaacatcaagattcacgggttctaagggacctgctgtaaatgcgtgcgtgcacaatattgtgcgctaccgcatattgggaagcttgaa

SEQ ID NO: 50120 - DNA, 458 bp, Setaria italica
  Peptide Sequence Number=SeqID_116094
aactaactgttcagggactaaagaaagagttcagctacaacaagatcctcaaggatctcaagaaggaattctgctgcaatggtactgtagtccaggacccagagctaggccaggtcattcagctccaaggcgatcagcgtaagaatgtcgccactttcctagttcaggctgggattgcgaagaaagagaacatcaagattcacgggttctaagggacctgctgtaaatgcgtgcgtgcacaatattgtgcgctaccgcatattgggaagcttgaagcagtaataatatagttactgcttttccatataagaacaaagaagtattgtgctattatcaagtgtgttttgcttgatgcaagttgtgtttttctcctcattatgcgccaccagcgtatgggtatggcttgtatggagtgttattgttgccaacttaataaaagtactctctgtttaggaact

SEQ ID NO: 50121 - DNA, 421 bp, Setaria italica
  Peptide Sequence Number=SeqID_116095
tctcaagaaggaattctgctgcaatggtactgtagtccaggacccagagctaggccaggtcattcagctccaaggcgatcagcgtaagaatgtcgccactttcctagttcaggctgggattgcgaagaaagagaacatcaagattcacgggttctaagggacctgctgtaaatgcgtgcgtgcacaatattgtgcgctaccgcatattgggaagcttgaagcagtaataatatagttactgcttttccatataagaacaaagaagtattgtgctattatcaagtgtgttttgcttgatgcaagttgtgttttctcctcattatgcgccaccagcgtatgggtatggcttgtatggagtacttttattaagttggcaacaataacactccatacaagccatacccatacgctggtggcgcat

SEQ ID NO: 50122 - DNA, 397 bp, Setaria italica
  Peptide Sequence Number=SeqID_116096
ctcaagaaggaattctgctgcaatggtactgtagtccaggacccagagctaggccaggtcattcagctccaaggcgatcagcgtaagaatgtcgccactttcctagttcaggctgggattgcgaagaaagagaacatcaagattcacgggttctaagggacctgctgtaaatgcgtgcgtgcacaatattgtgcgctaccgcatattgggaagcttgaagcagtaataatatagttactgcttttccatataagaacaaagaagtattgtgctattatcaagtgtgttttgcttgatgcaagttgtgttttctcctcattatgcgccaccagcgtatgggtatggcttgtatggagtgttattgttgccaacttaataaaagtactctctgtttggc

SEQ ID NO: 50123 - DNA, 411 bp, Setaria italica
  Peptide Sequence Number=SeqID_116097
cctcaaggatctcaagaaggaattctgctgcaatggtactgtagtccaggacccagagctaggccaggtcattcagctccaaggcgatcagcgtaagaatgtcgccactttcctagttcaggctgggattgcgaagaaagagaacatcaagattcacgggttctaagggacctgctgtaaatgcgtgcgtgcacaatattgtgcgctaccgcatattgggaagcttgaagcagtaataatatagttactgcttttccatataagaacaaagaagtattgtgctattatcaagtgtgttttgcttgatgcaagttgtgttttctcctcattatgcgccaccagcgtatgggtatggcttgtatggagtgttattgttgccaacttaataaaagtactctctgtttggctata

SEQ ID NO: 50124 - DNA, 242 bp, Setaria italica
  Peptide Sequence Number=SeqID_116098
cttggcaggctgggattgcgaagaaagagaacatcaagattcacgggttctaagggacctgctgtaaatgcgtgcgtgcacaatattgtgcgctaccgcatattgggaagcttgaagcagtaataatatagttactgcttttccatataagaacaaagaagtattgtgctattatcaagtgtgttttgcttgatgcaagttggcaacaataacactccatacaagccatacccatacgctgg

SEQ ID NO: 50125 - DNA, 376 bp, Setaria italica
  Peptide Sequence Number=SeqID_116099
ggatctcaagaaggaattctgctgcaatggtactgtagtccaggacccagagctaggccaggtcattcagctccaaggcgatcagcgtaagaatgtcgccactttcctagttcaggctgggattgcgaagaaagagaacatcaagattcacgggttctaagggacctgctgtaaatgcgtgcgtgcacaatattgtgcgctaccgcatattgggaagcttgaagcagtaataatatagttactgctttttccatataagaacaaagaagtattgtgctattatcaagtgtgttttgcttgatgcaagttgtgttttctcctcattatgcgccaccagcgtatgggtatggcttgtatggagtgttattgttgccaa

SEQ ID NO: 50126 - DNA, 373 bp, Setaria italica
  Peptide Sequence Number=SeqID_116100
ccgacggacccagagctaggccaggtcattcagctccaaggcgatcagcgtaagaatgtcgccactttcctagttcaggctgggattgcgaagaaagagaacatcaagattcacgggttctaagggacctgctgtaaatgcgtgcgtgcacaatattgtgcgctaccgcatattgggaagcttgaagcagtaataatatagttactgcttttccatataagaacaaagaagtattgtgctattatcaagtgtgttttgcttgatgcaagttgtgttttctcctcattatgcgccaccagcgtatgggtatggcttgtatggagtgttattgttgccaacttaataaaagtactctctgtttggctataaaaaa

SEQ ID NO: 50127 - DNA, 355 bp, Setaria italica
  Peptide Sequence Number=SeqID_116101
tcagagctaggccaggtcattcagctccaaggcgatcagcgtaagaatgtcgccactttcctagttcaggctgggattgcgaagaaagagaacatcaagattcacgggttctaagggacctgctgtaaatgcgtgcgtgcacaatattgtgcgctaccgcatattgggaagcttgaagcagtaaataatatagttactgcttttccatataagaacaaagaagtattgtgctattatcaagtgtgttttgcttgatgcaagttgtgttttctcctcattatgcgccaccagcgtatgggtatggcttgtatggagtgttattgttgccaacttaataaaagtactctctgtttgg

SEQ ID NO: 50128 - DNA, 405 bp, Setaria italica
  Peptide Sequence Number=SeqID_116102
aagaaagagttcagctacaacaagatcctcaaggatctcaagaaggaattctgctgcaatggtactgtagtccaggacccagagctaggccaggtcattcagctccaaggcgatcagcgtaagaatgtcgccactttcctagttcaggctgggattgcgaagaaagagaacatcaagattcacgggttctaagggacctgctgtaaatgcgtgcgtgcacaatattgtgcgctaccgcatattgggaagcttgaagcagtaataatatagttactgcttttccatataagaacaaagaagtattgtgctattatcaagtgtgttttgcttgatgcaagttgtgttttctcctcattatgcgccaccagcgtatgggtatggcttgtatggagtgttattgttgcc

SEQ ID NO: 50129 - DNA, 345 bp, Setaria italica
  Peptide Sequence Number=SeqID_116103
cagctccaaggcgatcagcgtaagaatgtcgccactttcctagttcaggctgggattgcgaagaaagagaacatcaagattcacgggttctaagggacctgctgtaaatgcgtgcgtgcacaatattgtgcgctaccgcatattgggaagcttgaagcagtaataatatagttactgcttttccatataagaacaaagaagtattgtgctattatcaagtgtgttttgcttgatgcaagttgtgttttctcctcattatgcgccaccagcgtatgggtatggcttgtatggagtgttattgttgccaacttaataaaagtactctctgtttggcttattaaaaaa

SEQ ID NO: 50130 - DNA, 343 bp, Setaria italica
  Peptide Sequence Number=SeqID_116104
taggactaaaagaaagagttcagctacaacaagatcctcaaggatctcaagaaggaattctgctgcaatggtactgtagtccaggacccagagctaggccaggtcattcagctccaaggcgatcagcgtaagaatgtcgccactttcctagttcaggctgggattgcgaagaaagagaacatcaagattcacgggttctaagggacctgctgtaaatgcgtgcgtgcacaatattgtgcgctaccgcatattgggaagcttgaagcagtaataatatagttactgcttttcatataagaacaaagaagtattgtgctattatcaagtgtgttttgcttgatgc

SEQ ID NO: 50131 - DNA, 372 bp, Setaria italica
  Peptide Sequence Number=SeqID_116105
gcaatggtactgtagtccaggacccagagctaggccaggtcattcagctccaaggcgatcagcgtaagaatgtcgccactttcctagttcaggctgggattgcgaagaaagagaacatcaagattcacgggttctaagggacctgctgtaaatgcgtgcgtgcacaatattgtgcgctaccgcatattgggaagcttgaagcagtaataatatagttactgcttttccatataagaacaaagaagtattgtgctattatcaagtgtgttttgcttgatgcaagttgtgttttctcctcattatgcgccaccagcgtatgggtatggcttgtatggagtgttattgttgccaacttaataaaagtactctctg

SEQ ID NO: 50132 - DNA, 360 bp, Setaria italica
  Peptide Sequence Number=SeqID_116106
tggtaactgtagtccaggacccagagctaggccaggtcattcagctccaaggcgatcagcgtaagaatgtcgccactttcctagttcaggctgggattgcgaagaaagagaacatcaagattcacgggttctaagggacctgctgtaaatgcgtgcgtgcacaatattgtgcgctaccgcatattgggaagcttgaagcagtaataatatagttactgcttttccatataagaacaaagaagtattgtgctattatcaagtgtgttttgcttgatgcaagttgtgttttctcctcattatgcgccaccagcgtatgggtatggcttgtatggagtgttattgttgccaacttaataaaag

SEQ ID NO: 50133 - DNA, 326 bp, Setaria italica
  Peptide Sequence Number=SeqID_116107
tctatttctagtcttcctaaggtcgtattctaggtcgttaagaatgtcgccactttcctagttcaggctgggattgcgaagaaagagaacatcaagattcacgggttctaagggacctgctgtaaatgcgtgcgtgcacaatattgtgcgctaccgcatattgggaagcttgaagcagtaataatatagttactgcttttccatataagaacaaagaagtattgtgctattatcaagtgtgttttgcttgatgcaagttgtgttttctcctcattatgcgccaccagcgtatgggtatggcttgtatggagtgttattgttgccaa

SEQ ID NO: 50134 - DNA, 370 bp, Setaria italica
  Peptide Sequence Number=SeqID_116108
tactgtagtccaggacccagagctaggccaggtcattcagctccaaggcgatcagcgtaagaatgtcgccactttcctagttcaggctgggattgcgaagaaagagaacatcaagattcacgggttctaagggacctgctgtaaatgcgtgcgtgcacaatattgtgcgctaccgcatattgggaagcttgaagcagtaataatatagttactgcttttccatataagaacaaagaagtattgtgctattatcaagtgtgttttgcttgatgcaagttgtgttttctcctcattatgcgccaccagcgtatgggtatggcttgtatggagtgttattgttgccaacttaataaaagtactctctgtttgg

SEQ ID NO: 50135 - DNA, 240 bp, Setaria italica
  Peptide Sequence Number=SeqID_116109
gtagcgcacaatattgtgcacgcacgcatttacagcaggtcccttagaacccgtgaatcttgatgttctctttctttcgcaatcccagcctgaactaggaaagtggcgacattcttacgctgatcgccttggagctgaatgacctggcctagctctgggtcctggactacagtaccattgcagcagaattccttcttgagatccttgaggatcttgttgtagctgaactctttctttagt

SEQ ID NO: 50136 - DNA, 243 bp, Setaria italica
  misc_feature (2)..(2): n is a, c, g, or t
  Peptide Sequence Number=SeqID_116110
gngcacaatattgtgcacgcacgcatttacagcaggtcccttagaacccgtgaatcttgatgttctctttcttcgcaatcccagcctgaactaggaaagtggcgacattcttacgctgatcgccttggagctgaatgacctggcctagctctgggtcctggactacagtaccattgcagcagaattccttcttgagatccttgaggatcttgttgtagctgaactcttttcttttagttccct

SEQ ID NO: 50137 - DNA, 246 bp, Setaria italica
  Peptide Sequence Number=SeqID_116111
tattgtcggttagtcgtctacaattattgtgcacgcacgcatttacagcaggtcccttagaacccgtgaatcttgatgttctctttcttcgcaatcccagcctgaactaggaaagtggcgacattcttacgctgatcgccttggagctgaatgacctggcctagctctgggtcctggactacagtaccattgcagcagaattccttcttgagatccttgaggatcttgttgtagctgaactctttt

SEQ ID NO: 50138 - DNA, 325 bp, Setaria italica
  Peptide Sequence Number=SeqID_116112
ctcaagaaggaattctgctgcaatggtactgtagtccaggacccagagctaggccaggtcattcagctccaaggcgatcagcgtaagaatgtcgccactttcctagttcaggctgggattgcgaagaaagagaacatcaagattcacgggttctaagggacctgctgtaaatgcgtgcgtgcacaatattgtgcgctaccgcatattgggaagcttgaagcagtaataatatagttactgcttttccatataagaacaaagaagtattgtgctattatcaagtgtgttttgcttgatgcaagttgtgttttctcctccatacaag

SEQ ID NO: 50139 - DNA, 238 bp, Setaria italica
  Peptide Sequence Number=SeqID_116113
ccgtgaatcttgatgttctctttcttcgcaatcccagcctgaactaggaaagtggcgacattcttacgctgatcgccttggagctgctgtaaatgcgtgcgtgcacaatattgtgcgctaccgcatattgggaagcttgaagcagtaataatatagttactgcttttccatataagaacaaagaagtattgtgctattatcaagtgtgttttgcttgatgcaagttgtgttttctcct

SEQ ID NO: 50140 - DNA, 208 bp, Setaria italica
  Peptide Sequence Number=SeqID_116114
tggtactgtagtccaggacccagagctaggccaggtcattcagctccaaggcgatcagcgtaagaatgtcgccactttcctagttcaggctgggattgcgaagaaagagaacatcaagattcacggcgatcagcgtaagaatgtcgccactttcctagttcaggctgggattgcgaagaaagagaacccgtgaatcttgatgttctct

SEQ ID NO: 50141 - DNA, 349 bp, Setaria italica
  Peptide Sequence Number=SeqID_116115
aggaattctgctgcaatggtactgtagtccaggacccagagctaggccaggtcattcagctccaaggcgatcagcgtaagaatgtcgccactttcctagttcaggctgggattgcgaagaaagagaacatcaagattcacgggttctaagggacctgctgtaaatgcgtgcgtgcacaatattgtgcgctaccgcatattgggaagcttgaagcagtaataatatagttactgcttttccatataagaacaaagaagtattgtgctattatcaagtgtgttttgcttgatgcaagttgtgttttctcctcattatgcgccaccagcgtatgggtatggcttgtatggag

SEQ ID NO: 50142 - DNA, 334 bp, Setaria italica
  Peptide Sequence Number=SeqID_116116
accaagaagctaggccaggtcattcagctccaaggcgatcaggcgtaaggaatgtcgccactttcctagttcaggctgggattgcgaagaaagagaacatcaagattcacgggttctaagggacctgctgtaaatgcgtgcgtgcacaatattgtgcgctaccgcatattgggaagcttgaagcagtaataatatagttactgcttttccatataagaacaaagaagtattgtgctattatcaagtgtgttttgcttgatgcaagttgtgttttctcctcattatgcgccaccagcgtatgggtatggcttgtatggagtgttattgttgccaa

SEQ ID NO: 50143 - DNA, 302 bp, Setaria italica
  Peptide Sequence Number=SeqID_116117
tagtaagtaacattcaagattcacgggttctaagggacctgctgtaaatgcgtgcgtgcacaatattgtgcgctaccgcatattgggaagcttgaagcagtaataatatagttactgcttttccatataagaacaaagaagtattgtgctattatcaagtgtgttttgcttgatgcaagttgtgttttctcctcattatgcgccaccagcgtatgggtatggcttgtatggagtgttattgttgccaacttaataaaaagtactctctgtttggaactaaaaaaaaaaaaaaaaaaaaaaaa

SEQ ID NO: 50144 - DNA, 313 bp, Setaria italica
  Peptide Sequence Number=SeqID_116118
ttcaggctgggattgcgaagaaagagaacatcaagattcacgggttctaagggacctgctgtaaatgcgtgcgtgcacaatattgtgcgctaccgcatattgggaagcttgaagcagtaataatatagttactgcttttccatataagaacaaagaagtattgtgctattatcaagtgtgttttgcttgatgcaagttgtgttttctcctcattatgcgccaccagcgtatgggtatgggcttggtatggagtgttattgttgccaacttaataaaaagtactctctgtttaggactaaaaaaaaaaaaaaaa

SEQ ID NO: 50145 - DNA, 170 bp, Setaria italica
  Peptide Sequence Number=SeqID_116119
ctttcttcgcaatcccagcctgaactaggaaagtggcgacattcttacgctgatcgccttggagctgaatgacctggcctagctctgggtcctggactacagtaccattgcagcagaattccttcttagaagaataccttagaaggaatacttagttagttaagtactta

SEQ ID NO: 50146 - DNA, 148 bp, Setaria italica
  Peptide Sequence Number=SeqID_116120
ctttcttcgcaatcccagcctgaactaggaaagtggcgacattcttacgctgatcgccttggagctgaatgacctggcctagctctgggtcctggactacagtaccattgcagcagaattccttcttgagatccttgaggatcttgtt

SEQ ID NO: 50147 - DNA, 222 bp, Setaria italica
  Peptide Sequence Number=SeqID_116121
tgcacgcacgcatttacagcaggtcccttagaacccgtgaatcttgatgttctctttcttcgcaatcccagcctgaactaggaaagtggcgacattcttacgctgatcgccttggagctgaatgacctggcctagctctgggtcctggactacagtaccattgcagcagaattccttcttgagatccttgaggatcttgttgtagctgaactctttctttag

SEQ ID NO: 50148 - DNA, 156 bp, Setaria italica
  Peptide Sequence Number=SeqID_116122
aggtcccttagaacccgttgaatcttgatgttctctttcttcgcaatcccagcctgaactaggaaagtggcgacattcttacgctgatcgccttggagctgaatgacctggcctagctctgggtcctggactacagtaccattgcagcagaattcc

SEQ ID NO: 50149 - DNA, 274 bp, Setaria italica
  Peptide Sequence Number=SeqID_116123
tgtaaatagcgtgcgtgcacaatattgtgcgctaccgcatattgggaagcttgaagcagtaataatatagttactgcttttccatataagaacaaagaagtattgtgctattatcaagtgtgttttgcttgatgcaagttgtgttttctcctcattatgcgccaccagcgtatgggtatggcttgtatggagtgttattgttgccaacttaataaaagtactctctgtttggaactaaaaaaaaaaaaaaaaaaacaaaaaaaaaaaaaaaaac

SEQ ID NO: 50150 - DNA, 304 bp, Setaria italica
  Peptide Sequence Number=SeqID_116124
taggcgatcagcgtaagaatgtcgccactttcctagttcaggctgggattgcgaagaaagagaacatcaagattcacgggttctaagggacctgctgtaaatgcgtgcgtgcacaatattgtgcgctaccgcatattgggaagcttgaagcagtaataatatagttactgcttttccatataagaacaaagaagtattgtgctattatcaagtgtgttttgcttgatgcaagttgtgttttctcctcattatgcgccaccagcgtatgggtatggcttgtatggagtgttattgttgccaactt

SEQ ID NO: 50151 - DNA, 284 bp, Setaria italica
  Peptide Sequence Number=SeqID_116125
tgcgaagaaagagaacatcaagattcacgggttctaagggacctgctgtaaatgcgtgcgtgcacaatattgtgcgctaccgcatattgggaagcttgaagcagtaataatatagttactgcttttccatataagaacaaagaagtattgtgctattatcaagtgtgttttgcttgatgcaagttgtgtttttctccttcattatgcgccaccagcgtatgggtatggcttgtatggagtgttattgttgccaacttaataaaagtactctctgtttggctaat

SEQ ID NO: 50152 - DNA, 263 bp, Setaria italica
  misc_feature (257)..(257): n is a, c, g, or t
  Peptide Sequence Number=SeqID_116126
gacctgctgtaaatgcgtgcgtgcacaatattgtgcgctaccgcatattgggaagcttgaagcagtaataatatagttactgcttttccatataagaacaaagaagtattgtgctattatcaagtgtgttttgcttgatgcaagttgtgttttctcctcattatgcgccaccagcgtatgggtatggcttgtatggagtgttattgttgccaacttaataaaagtactctctgtttggactaaaaaaaaaaaaaaanaaaaaa

SEQ ID NO: 50153 - DNA, 264 bp, Setaria italica
  Peptide Sequence Number=SeqID_116127
gagttcagctacaacaagatcctcaaggatctcaagaaggaattctgctgcaatggtactgtagtccaggacccagagctaggccaggtcattcagctccaaggcgatcagcgtaagaatgtcgccactttcctagttcaggctgggattgcgaagaaagagaacatcaagattcacgggttctaagggacctgctgtaaatgcgtgcgtgcacaatattgtgcgctaccgcatattgggaagcttgaaagcagtaataatata

SEQ ID NO: 50154 - DNA, 243 bp, Setaria italica
  Peptide Sequence Number=SeqID_116128
acctgctgtaaatgcgtgcgtgcacaatattgtgcgctaccgcatattgggaagcttgaagcagtaataatatagttactgcttttccatataagaacaaagaagtattgtgctattatcaagtgtgttttgcttgatgcaagttgtgttttctcctcattatgcgccaccagcgtatgggtatggcttgtatggagtgttattgttgccaacttaataaaagtactctctgtttggctataa

SEQ ID NO: 50155 - DNA, 212 bp, Setaria italica
  misc_feature (204)..(204): n is a, c, g, or t
  Peptide Sequence Number=SeqID_116129
ttgaagcagtaataatatagttactgcttttccatataagaacaaagaagtattgtgctattatcaagtgtgttttgcttgatgcaagttgtgttttctcctcattatgcgccaccagcgtatgggtatggcttgtatggagtgttattgttgccaacttaataaaagtactctctgtttggaactaaaaaaaaaaaaaaaaanaaaaaaaa

SEQ ID NO: 50156 - DNA, 258 bp, Setaria italica
  Peptide Sequence Number=SeqID_116130
ctgctgtaaatgcgtgcgtgcacaatattgtgcgctaccgcatattgggaagcttgaagcagtaataatatagttactgcttttccatataagaacaaagaagtattgtgctattatcaagtgtgttttgcttgatgcaagttgtgttttctcctcattatgcgccaccagcgtatgggtatggcttgtatggagtgttattgttgccaacttaataaaagtactctctgtttggctataaaaactactcaacaacta

SEQ ID NO: 50157 - DNA, 245 bp, Setaria italica
  Peptide Sequence Number=SeqID_116131
tcacgggttctaagggacctgctgtaaatgcgtgcgtgcacaatattgtgcgctaccgcatattgggaagcttgaagcagtaataatatagttactgcttttccatataagaacaaagaagtattgtgctattatcaagtgtgttttgcttgatgcaagttgtgttttctcctcattatgcgccaccagcgtatgggtatggcttgtatggagtgttattgttgccaacttaataaaagtactct

SEQ ID NO: 50158 - DNA, 257 bp, Setaria italica
  Peptide Sequence Number=SeqID_116132
ctgctgtaaatgcgtgcgtgcacaatattgtgcgctaccgcatattgggaagcttgaagcagtaataatatagttactgcttttccatataagaacaaagaagtattgtgctattatcaagtgtgttttgcttgatgcaagttgtgttttctcctcattatgcgccaccagcgtatgggtatggcttgtatggagtgttattgttgccaacttaataaaagtactctctgtttggctataaaaactactcactactt

SEQ ID NO: 50159 - DNA, 239 bp, Setaria italica
  Peptide Sequence Number=SeqID_116133
ctacaacaagatcctcaaggatctcaagaaggaattctgctgcaatggtactgtagtccaggacccagagctaggccaggtcattcagctccaaggcgatcagcgtaagaatgtcgccactttcctagttcaggctgggattgcgaagaaagagaacatcaagattcacgggttctaagggacctgctgtaaatgcgtgcgtgcacaatattgtgcgctaccgcatattgggaagctta

SEQ ID NO: 50160 - DNA, 236 bp, Setaria italica
  Peptide Sequence Number=SeqID_116134
ctacaacaagatcctcaaggatctcaagaaggaattctgctgcaatggtactgtagtccaggacccagagctaggccaggtcattcagctccaaggcgatcagcgtaagaatgtcgccactttcctagttcaggctgggattgcgaagaaagagaacatcaagattcacgggttctaagggacctgctgtaaatgcgtgcgtgcacaatattgtgcgctaccgcatattgggaagc

SEQ ID NO: 50161 - DNA, 240 bp, Setaria italica
  Peptide Sequence Number=SeqID_116135
aaggatctcaagaaggaattctgctgcaatggtactgtagtccaggacccagagctaggccaggtcattcagctccaaggcgatcagcgtaagaatgtcgccactttcctagttcaggctgggattgcgaagaaagagaacatcaagattcacgggttctaagggacctgctgtaaatgcgtgcgtgcacaatattgtgcgctaccgcatattgggaagcttgaagcagtaataatatag

SEQ ID NO: 50162 - DNA, 239 bp, Setaria italica
  Peptide Sequence Number=SeqID_116136
aattctgctgcaatggtactgtagtccaggacccagagctaggccaggtcattcagctccaaggcgatcagcgtaagaatgtcgccactttcctagttcaggctgggattgcgaagaaagagaacatcaagattcacgggttctaagggacctgctgtaaatgcgtgcgtgcacaatattgtgcgctaccgcatattgggaagcttgaagcagtaataatatagttactgcttttccat

SEQ ID NO: 50163 - DNA, 242 bp, Setaria italica
  Peptide Sequence Number=SeqID_116137
caggacccagagctaggccaggtcattcagctccaaggcgatcagcgtaagaatgtcgccactttcctagttcaggctgggattgcgaagaaagagaacatcaagattcacgggttctaagggacctgctgtaaatgcgtgcgtgcacaatattgtgcgctaccgcatattgggaagcttgaagcagtaataatatagttactgcttttccatataagaacaaagaagtattgtgctattat

SEQ ID NO: 50164 - DNA, 242 bp, Setaria italica
  Peptide Sequence Number=SeqID_116138
aattctgctgcaatggtactgtagtccaggacccagagctaggccaggtcattcagctccaaggcgatcagcgtaagaatgtcgccactttcctagttcaggctgggattgcgaagaaagagaacatcaagattcacgggttctaagggacctgctgtaaatgcgtgcgtgcacaatattgtgcgctaccgcatattgggaagcttgaagcagtaataatatagttactgcttttccattaa

SEQ ID NO: 50165 - DNA, 239 bp, Setaria italica
  Peptide Sequence Number=SeqID_116139
tcattcagctccaaggcgatcagcgtaagaatgtcgccactttcctagttcaggctgggattgcgaagaaagagaacatcaagattcacgggttctaagggacctgctgtaaatgcgtgcgtgcacaatattgtgcgctaccgcatattgggaagcttgaagcagtaataatatagttactgcttttccatataagaacaaagaagtattgtgctattatcaagtgtgttttgcttgat

SEQ ID NO: 50166 - DNA, 243 bp, Setaria italica
  Peptide Sequence Number=SeqID_116140
cgaagaaagagaacatcaagattcacgggttctaagggacctgctgtaaatgcgtgcgtgcacaatattgtgcgctaccgcatattgggaagcttgaagcagtaataatatagttactgcttttccatataagaacaaagaagtattgtgctattatcaagtgtgttttgcttgatgcaagttgtgttttctcctcattatgcgccaccagcgtatgggtatggcttgtatggagtgttattg

SEQ ID NO: 50167 - DNA, 252 bp, Setaria italica
  Peptide Sequence Number=SeqID_116141
cgggttctaagggacctgctgtaaatgcgtgcgtgcacaatattgtgcgctaccgcatattgggaagcttgaagcagtaataatatagttactgcttttccatataagaacaaagaagtattgtgctattatcaagtgtgttttgcttgatgcaagttgtgttttctcctcattatgcgccaccagcgtatgggtatggcttgtatggagtgttattgttgccaacttaaataaaagtactctctgtttggc

SEQ ID NO: 50168 - DNA, 239 bp, Setaria italica
  Peptide Sequence Number=SeqID_116142
ctgctgcaatggtactgtagtccaggacccagagctaggccaggtcattcagctccaaggcgatcagcgtaagaatgtcgccactttcctagttcaggctgggattgcgaagaaagagaacatcaagattcacgggttctaagggacctgctgtaaatgcgtgcgtgcacaatattgtgcgctaccgcatattgggaagcttgaagcagtaataatatagttactgcttttccatataa

SEQ ID NO: 50169 - DNA, 236 bp, Setaria italica
  Peptide Sequence Number=SeqID_116143
aaggaattctgctgcaatggtactgtagtccaggacccagagctaggccaggtcattcagctccaaggcgatcagcgtaagaatgtcgccactttcctagttcaggctgggattgcgaagaaagagaacatcaagattcacgggttctaagggacctgctgtaaatgcgtgcgtgcacaatattgtgcgctaccgcatattgggaagcttgaagcagtaataatatagttactgct

SEQ ID NO: 50170 - DNA, 215 bp, Setaria italica
  Peptide Sequence Number=SeqID_116144
cagagctaggccaggtcattcagctccaaggcgatcagcgtaagaatgtcgccactttcctagttcaggctgggattgcgaagaaagagaacatcaagattcacgggttctaagggacctgctgtaaatgcgtgcgtgcacaatattgtgcgctaccgcatattgggaagcttgaagcagtaataatatagttactgcttttccatataagaaca

SEQ ID NO: 50171 - DNA, 186 bp, Setaria italica
  Peptide Sequence Number=SeqID_116145
agaacaaagaagtattgtgcttttccatataagaacaaagaagtattgtgctattatcaagtgtgttttgcttgatgcaagttgtgttttctcctcattatgcgccaccagcgtatgggtatggcttgtatggagtgttattgttgccaacttaataaaagtactctctgtttggctaaaaaaaaa

SEQ ID NO: 50172 - DNA, 226 bp, Setaria italica
  Peptide Sequence Number=SeqID_116146
tgctgggattgcgaagaaagagaacatcaagattcacgggttctaagggacctgctgtaaatgcgtgcgtgcacaatattgtgcgctaccgcatattgggaagcttgaagcagtaataatatagttactgcttttccatataagaacaaagaagtattgtgctattatcaagtgtgttttgcttgatgcaagtttgtgttttctcctcattatgcgccaccagcgt

SEQ ID NO: 50173 - DNA, 173 bp, Setaria italica
  Peptide Sequence Number=SeqID_116147
acttagaaagacaagtaaataatatagttactgcttttccatataagaacaaagaagtattgtgctattatcaagtgtgttttgcttgatgcaagttgtgttttctcctcattatgcgccaccagcgtatgggtatggcttgtatggagtgttattgttgccaacttaataaa

SEQ ID NO: 50174 - DNA, 183 bp, Setaria italica
  Peptide Sequence Number=SeqID_116148
agaacaaagaagtattgtgcttttccatataagaacaaagaagtattgtgctattatcaagtgtgttttgcttgatgcaagttgtgttttctcctcattatgcgccaccagcgtatgggtatggcttgtatggagtgttattgttgccaacttaataaaagtactctctgtttggctaaaaaa

SEQ ID NO: 50175 - DNA, 180 bp, Setaria italica
  misc_feature (171)..(171): n is a, c, g, or t
  Peptide Sequence Number=SeqID_116149
ttttccatataagaacaaagaagtattgtgctattatcaagtgttttttgcttgatgcaagttgtgttttctcctcattatgcgccaccagcgtatgggtatggcttgtatggagtgttattgttgccaacttaataaaagtactctctgtttggctaataaaaaaaaaanaaaaaaaaa

SEQ ID NO: 50176 - DNA, 175 bp, Setaria italica
  Peptide Sequence Number=SeqID_116150
ttacttcgacaaatcccagcctgaactaggaaagagaacatcaagattcacgggttctaagggacctgctgtaaatgcgtgcgtgcacaatattgtgcgctaccgcatattgggaagcttgaagcagtaataatatagttactgcttttccatataagaacaaagaagtattgtg

SEQ ID NO: 50177 - DNA, 159 bp, Setaria italica
  Peptide Sequence Number=SeqID_116151
cgccactttcctagttcaggctgggattgcgaagaaagagaacatcaagattcacgggttctaagggacctgctgtaaatgcgtgcgtgcacaatattgtgcgctaccgcatattgggaagcttgaagcagtaataatagcacaatacttctttgttct

SEQ ID NO: 50178 - DNA, 145 bp, Setaria italica
  Peptide Sequence Number=SeqID_116152
tgttcataaagctcatcatctgtttgcttgtcttggcaggctgggattgcgaagaaagagaacatcaagattcacgggttctaagggacctgctgtaaatgcgtgcgtgcacaatattgtgcgctaccgcatattgggaagcttg

SEQ ID NO: 50179 - DNA, 222 bp, Setaria italica
  Peptide Sequence Number=SeqID_116153
tgtagtccaggacccacgagctaggccaggtcattcagctccaaggcgatcagcgtaagaatgtcgccactttcctagttcaggctgggattgcgaagaaagagaacatcaagattcacgggttctaagggacctgctgtaaatgcgtgcgtgcacaatattgtgcgctaccgcatattgggaagcttgaagcagtaataatatagttacctgcttttccat

SEQ ID NO: 50180 - DNA, 165 bp, Setaria italica
  Peptide Sequence Number=SeqID_116154
actttcctagttcaggctgggattgcgaagaaagagaacatcaagattcacgggttctaagggacctgctgtaaatgcgtgcgtgcacaatattgtgcgctaccgcatattgggaagcttgaagcagtaataatatagttactgcttttccatataagaacaaag

SEQ ID NO: 50181 - DNA, 186 bp, Setaria italica
  Peptide Sequence Number=SeqID_116155
agtccaggacccagagctaggccaggtcattcagctccaaggcgatcagcgtaagaatgtcgccactttcctagttcaggctgggattgcgaagaaagagaacatcaagattcacgggttctaagggacctgctgtaaatgcgtgcgtgcacaatattgtgcgctaccgcatattgggaagcttga

SEQ ID NO: 50182 - DNA, 217 bp, Setaria italica
  Peptide Sequence Number=SeqID_116156
actaagggaacctgctgtaaatgcgtgcgtgcacaatattgtgcgctaccgcatattgggaagcttgaagcagtaataatatagttactgcttttccatataagaacaaagaagtattgtgctattatcaagtgtgttttgcttgatgcaagttgtgttttctcctcattatgcgccaccagcgtatgggtatggcttgtatggagtgttattgttg

SEQ ID NO: 50183 - DNA, 173 bp, Setaria italica
  Peptide Sequence Number=SeqID_116157
taaatgcgtgcgtgcacaatattgtgcgctaccgcatattgggaagcttgaagcagtaataatatagttactgcttttccatataagaacaaagaagtattgtgctattatcaagtgtgttttgcttgatgcaagttgtgttttctcctcattatgcgccaccagcgtatggg

SEQ ID NO: 50184 - DNA, 147 bp, Setaria italica
  Peptide Sequence Number=SeqID_116158
taaatgcgtgcgtgcacaatattgtgcgctaccgcatattgggaagcttgaagcagtaataatatagttactgcttttccatataagaacaaagaagtattgtgctattatcaagtgtgttttgcttgatgcaagttgtgttttctc

SEQ ID NO: 50185 - DNA, 171 bp, Setaria italica
  Peptide Sequence Number=SeqID_116159
actgcttttccatataagaacaaagaagtattgtgctattatcaagtgtgtttttgcttgatgcaagttgtgttttctcctcattatgcgccaccagcgtatgggtatggcttgtatggagtgttattgttgccaacttaataaaagtactctctgtttggtcttattaaa

SEQ ID NO: 50186 - DNA, 144 bp, Setaria italica
  misc_feature (138)..(138): n is a, c, g, or t
  Peptide Sequence Number=SeqID_116160
atcaagtgtgttttgcttgatgcaagttgtgttttctcctcattatgcgccaccagcgtatgggtatggcttgtatggagtgttattgttgccaacttaataaaagtactctctgtttggctataaaaaaaaaaaaanaaaaaa

SEQ ID NO: 50187 - DNA, 210 bp, Setaria italica
  Peptide Sequence Number=SeqID_116161
ttgggaagcttgaaggcagtaataatatagttactgcgttttccatataagaacaaagaagtattgtgctattatcaagtgtgttttgcttgatgcaagttgtgttttctcctcattatgcgcccaccagcgtatgggtatggcttgtatggagtgttattgttgccaacttaataaagtctctctgtttggactaaaaaaaaaaaaaaa

SEQ ID NO: 50188 - DNA, 401 bp, Setaria italica
  misc_feature (354)..(401): n is a, c, g, or t
  Peptide Sequence Number=SeqID_116162
agcaaactcggcgtggcacaaggacggcactagctcagcccaagaggatgaggatgccgaggaggccaaagcaagagcatgggacgactggaaggatgacaaccctcgtggtgcaggcaacaagaagctcactccctgcggctaaactgcttgcatttactgaaattcctccttgtgacgaatgtttgtgtagattatagaatgtttgattttactaatgtcccagctatgccttttcagtaacgttctgtctctataatacgattccattgatgtgcaagtcagtaagggcatggttcctttgcttgaagagggtgcatggtttcatgtgttactgaaagttggtaagaaacnnnnnnnnnnnnnnnnnnnnnnnnnnnnnnnnnnnnnnnnnnnnnnnn

SEQ ID NO: 50189 - DNA, 152 bp, Setaria italica
  Peptide Sequence Number=SeqID_116163
tcgccgcccagcagttcgccgaagaaccgtgccgcattgccttcagcatcctcctcctcctcgtcatcttcgatccgcgcttcgaagaacgcgcggcaggacctcacggcggcggcctgcgggtgcaacgggaccgccgccgccacttcgac

SEQ ID NO: 50190 - DNA, 475 bp, Setaria italica
  Peptide Sequence Number=SeqID_116164
ccttgtccttgtgctgctatgctctgtgctgaggatgctctgcattgattggccgaaatttgaggatcttttgagtgctggcaagatgtatttacttccttcaacgaaccttccttgctgctgctagctggtttgtccatgttttcttcggaaaggtgtggtctcatcactcggaggttttggttcagcttcactttcagagaatagataacatgtgccaacagtttcttcatattctccaatctgtaaaacaatgcattggcattagcactagaacacgcaataggcagattagacattgaaagtcaatggtacaagttggggattttcaagttttttttgtaaagaagaaaaccattagcacacagaaagggacaccaatgcagcctaacgaagtaagttgccatcaccagcgacaaaatcagctaatcagtacaagatgcatttggtactaaaggaactataactaaattat

SEQ ID NO: 50191 - DNA, 423 bp, Setaria italica
  Peptide Sequence Number=SeqID_116165
gggataacaaacctttttaagttcccatccttgcattacagatcgtacagaatatgagagcgagatgaaactgcctcctactcgactattccccgctttgcgccgtccaccgtgttcttcagcagcatcgccaccgtcattgggccgacgcctcctgggactggcgtcaggtaaccggcgaccttgctcacctctgcgaaatccacatcaccgacgagccggtacccagacttcctggtagggtcgtcgactgagttcgtcccaacatctataacggcagcgcctggcttgatccagtcccctttgatctgacaaccaagaaaggaacattgactcagtgagcaatgggcgatgaattgcaggaactgcatcatgctgcaaaaactgataatttgctgttgtgaagctacgcaccatcatagc

SEQ ID NO: 50192 - DNA, 421 bp, Setaria italica
  Peptide Sequence Number=SeqID_116166
ttgttacttacttatggcgcatccatggtgtagattattatggtatgtctgaagacaaatgaacctaaaggacctgagacatgtgaaagctgatgcaagaacatataatggggatagctcaaatgcaactgaatgggagaataaactcgattcattctggcaagacaggattcaaggtcaagacccgttagaaataattgaaagcaaaggagaagattgatgcagctgctactgaagtgttggatccatatgtgaggaaaataagggatgaaaagtatgggtggaagtatggttgtggagccaagggttgcactaagcttttccatgctgccgagtttgtccagaagcatcttaaactcaagcatgcagaatagtaggtaggttagaagactaaaacttaacgaaaaagtaagaaaagaaa

SEQ ID NO: 50193 - DNA, 510 bp, Setaria italica
  misc_feature (486)..(486): n is a, c, g, or t
  Peptide Sequence Number=SeqID_116167
taataggtactaccaagtagtaattttaatagaacaatagactagacaagaaggaggtagtttctttgagaaaggcatgccatgagaaagaccaaagtctaaaggacaaggacgatgcaatagagatgttagcaaagaaagtagatacattaaataaagcgatggaagtggaggctaaaaagatgaggcgggagatagctgctatggagaaagaatttgctgcggtgcgtcttgagaaggagcaagataataaagctaaacggcttggtaatttgaaagggcctggaacttcttctcatacggcttctggaagaactgcaccacggggtggattggcgcgcaatctccaatagcatacctctaacatcaggcaggcacggaattcgtcgataggcttcatttcccattgtatttcttcccctgttcttattcattttgtgatgaaatagcacagatgaccctgcgatacctagattggggaaaagngtaggtttgcatctgacacgactt

SEQ ID NO: 50194 - DNA, 351 bp, Setaria italica
  Peptide Sequence Number=SeqID_116168
cgtcaaggtcgagctcaaccggctggagaatgaagtgagggataaggatagggagctgggtgaggcgcacgcggagataaaggcgctgcggctgtcggagagggcgcgggagaaggccgtcgaggagctcactgctgaattagagaaagtggatgaaaaactcaagttgacagagtctctccttgaaaccaaaaacttagaacttaagaaaacaaatgatgagaaaaaagctgctctggctgctcagtttgcagctgaagcaacactacgaagagtacatgcagcctagaaagctttaactctgcttccagtggtgcaagaatggcttcaataggaggcatatcatcaatt

SEQ ID NO: 50195 - DNA, 242 bp, Setaria italica
  Peptide Sequence Number=SeqID_116169
atctggctgacgtactctgtctctgtttggtttgaggggcgctgatggtcaagttcgttgtaagggtcaatcacaagaccacgcactccatgtcttagaactgcagctttcgcaaggtcaagaacccaattaatagatggaaggctatcatcttcacacctgtaacaagaaacatttaaatatgaagacacgtaccatctttcaagagaagcatatgattggagagaaggtacattccagca

SEQ ID NO: 50196 - DNA, 438 bp, Setaria italica
  Peptide Sequence Number=SeqID_116170
gggctggagtgggaggcgtcagctctggtggggcctctcgagtgacaccgatcgtggaatcatattcttcgtcctggtgagcaaacttcttgggcagcaccttctcgaactcaaccttctcaagtggcttggcattctcagcagcatgctccttggacagactaaaatagttggcagccgattcagcaataaaagctatttcatcatcagtgagcttcctcagaaatttggcagggtttcctccccatacctaaatccaacagagattagtcaagaaaatatttcaagaaataagataccaaacaagacccatgtagcatatccttgttccaattccacccatggacactagaacttaatatgccacatggatattagacaccaaaggacacgtataataaagtggacctgtgcaatctagcataatcaaattgggtt

SEQ ID NO: 50197 - DNA, 289 bp, Setaria italica
  Peptide Sequence Number=SeqID_116171
tggtactagtacttaaattagtttggtctagtccgtatttctagtctaattaaaagtcttattttctattctattcagttgagcttcctcagaaatttggcagggtttcctccccatacctctccagaagggatccttgtattctgtcttacgagggctccggcagcaaccattccatgcttttccacaatgacaccatccaatagggttgcccccataccaacaaagcttcatcctcaatggtgcatccttgaagcagcgctatgaccctactgtgacattttcaccg

SEQ ID NO: 50198 - DNA, 142 bp, Setaria italica
  Peptide Sequence Number=SeqID_116172
agcgaggagatcagcccgccgatcacaagaaccgatcccagcacgcttccgaggtagagctgctcgtgcaggatggagaagtcaatgacggagacgatgatctgcacgacggggatgaaggcggccacgaacacggcgcccc

SEQ ID NO: 50199 - DNA, 419 bp, Setaria italica
  Peptide Sequence Number=SeqID_116173
gaagtccgttctgctgccgcattttggaacttcaaaaaagacataggatactcaatatgcagagatgctgcagagaaacataacacaattttttgggagccgagaacttattgtcaaatgagtgtgggaaaaactgttaataacatgtaagatgaaggaagtagtctgcgcctaacttacctagacgatcaagggctgatggtggcataataattttgtcaccagcctcaagttgtggctgcaaaaacagtaacagagatctattacaataaattgcaaaaaaagcaaaccaaaaatgttatattgaaaggttgtaattattctagcaatagatgctgatagaatttactggcccagttaatgatagtttaaatatattttacttgattcaattcaaaagtcatgttgattaaggaaag

SEQ ID NO: 50200 - DNA, 344 bp, Setaria italica
  Peptide Sequence Number=SeqID_116174
ttaaagacctctaatgaatttcaactcaagtaaaaaaatagagcagggtgttaccagtttgacaagagcaaaatgtccaggacaaatattttgagagctttaacttatcctcgattaattggtaacctacaaaacatatctcaggatcatgtaccacgaacaaatgtgtcaaaataagataaactcaccatactggataatttgtaaaagcatgtatctcgtagttattttcttcaaacaacaaagaatatcttcgacaccatcaatgtactcatatgctctcaccatgcactctttgagaccttccaaatcaaaagatctgccatcactgaagaacttttggc

SEQ ID NO: 50201 - DNA, 251 bp, Setaria italica
  Peptide Sequence Number=SeqID_116175
agtacgacaactagtctcctgcacaagtgaatgccagagcacaaaccataaagcaccaaaggcagatcctacaccggctcccaccatgatctggtttagtgtatgaaggcgctgtgagacccgtaaccacgactgcaagcgaataggaccagagttagattgcagccaacgactgaaaactacaggttgatgatatgagaaaagcagcatttaggagcctccaaagaacacttcacttgaccaaagagagt

SEQ ID NO: 50202 - DNA, 298 bp, Setaria italica
  Peptide Sequence Number=SeqID_116176
tgtgttgaaccagcagatgctgcaccctgctatcaagcagaccaagaacacctgcagtgcaacatatgaatcagaatttggtagattaattaaattcgctataaatcgcatgttggggcatctggacaatttagcctgtgttgtgtctacatcttggcttcataatttgaggaaagtgtttgcaatcacagttcctcttaagacaatttgcgggctaacataggttatctactgaagagtgcaggagtgatttgtatactgggagccgtatgttatatggaaggcattgcactactac

SEQ ID NO: 50203 - DNA, 465 bp, Setaria italica
  Peptide Sequence Number=SeqID_116177
ggtgagccggagctcgccgccggtgatgccagaccgtggcgccgcgcgtacgccagcctctggctatcgatcgccgacgcgatcgccatcgtcaccacctgaaggaacatgccgatgcccatccgcttcaggatggtgatcccacgcgggttcttggtgtaccgacgcacggccttgacgaagaccaggtcgtagacgacgacggcgatgagcatggtcagcgtcacgaacgcgccgaggctcgccggcgggatctggaagcgcgggcccatgtgccggttcatcgtcgcgccctgcttcacgaacagggtgttggtctgcgcgatcagcgtgcacggcacgaacatggtcaccaggagcggcaccagcttcatgatctgcttcgtctcctccacctgggtcaccgtgctactaggtcttcctactttcgtaccggtacgtaagtaccgtaccgtttagtaccta

SEQ ID NO: 50204 - DNA, 466 bp, Setaria italica
  Peptide Sequence Number=SeqID_116178
ccacggcccacttcctggccgccgccacgatgaccctggccatcttggcgaaggggctatcggaggtgggcttgtggcggtagaagggcgtgccggcggtgaagatgacaatggagacggcgaggcccagcgtggggagcgcgtagcccacggtccagccgacgttgtcctggatgtagacgaggacggtgttggcgaagagcgtgccgaagaagatgctgaacatccaccagttgaagaaggagagcttgtggcggcgctcccgcgggtggttgtcgtcgaactggtcggcgccgatggtggagatgttgggcttggtgccacccgtgcccacggcgaggatgtacaggcccaggaagaagacgcccagctgcgcgctcgtcgcctggtgcgtgcagtttgggtccgctgttgccgttcgtccgtctactttgggtcggtccgtctagtcgtccggtctagtcgt

SEQ ID NO: 50205 - DNA, 463 bp, Setaria italica
  misc_feature (450)..(450): n is a, c, g, or t
  Peptide Sequence Number=SeqID_116179
acgtggggagcgcgtagcccacggtccagccgacgttgtcctggatgtagacgaggacggtgttggcgaagagcgtgccgaagaagatgctgaacatccaccagttgaagaaggagagcttgtggcggcgctcccgcgggtggttgtcgtcgaactggtcggcgccgatggtggagatgttgggcttggtgccacccgtgcccacggcgaggatgtacaggcccaggaagaagacgcccagctgcgcgctcgtcgcctggtgcgtgcagtttgggtccgctgtgccgtcgccgcacttgggcggccgcagcgccggcagcgacaccgccagcgtcagcaggatcatgccctacgacgaagccgcaggctttccaccctccgcgcttggcccggagcaccgggttgccggtggaggtccaccgtgccgtcctgcgtgtactcgtcgccggnggccggcgccgcc

SEQ ID NO: 50206 - DNA, 229 bp, Setaria italica
  Peptide Sequence Number=SeqID_116180
aactttgttgccagaataattttttgcaggcaactcttttgttgttctttatccccatttttcatgcgatcatacgaaaattacctgttggaatcctgtgcttttttttcataacagcataatagtggagccgcaaagttgtatgctctgcagctcgatacatgatcacgcgagtcgcaccatggctggagcttggcttcctctctcgtcaacccatggctccgcctgg

SEQ ID NO: 50207 - DNA, 465 bp, Setaria italica
  Peptide Sequence Number=SeqID_116181
tactaaggttggttgtctaactttgttgtcttgtagtaactttagtaactttatttttgtcctaaggtacttcgttactagtcttttcgtctattctttcgggtcgttcctaactacgtaaaagtaaccccttcatgattcactttggactctggagttctgcaacctggaactagggctgtaaatgagctgagctcatcacctcaagcttgagcttgttagagcatcgagccgagcctcaaaactgatccaagcttagagctaggctcaagcttggctcatttataattcgaaccgatcagtcgagcttatagcggttaaccacgaataattcacgagctttgagatttatatcattcctaaacttagttcagcaaactctacataaataattggtactttgtaaacattgaggatttgcacaatgcaattaggcaagaaaaattaaagtaaaaaaaaaaaaac

SEQ ID NO: 50208 - DNA, 438 bp, Setaria italica
  Peptide Sequence Number=SeqID_116182
gtttgcttcatcatggcatttccttacacagcatctggcaatctacatgataaccagctcatactgagatgaacaaactttggatatagcatatttcactaatgatgacatcgttgagtgaaacccaagtgcaaaccaatcatgcttcacatgatattgagccaacatcatgaaattgctcgaaatgagtgattgttatgcataggacaggaagttggactccaaccaagggaagcattctgcaaggacagcaggcgctcctatcgggtttgcagtcacagtctgtgttacttgcacaaggtggtgcaacttgtgctgagaacttagaacttattttgccaaggactcgtacagctttcgcatcttcgggcgtccaacacgaaaagaaccccttcatgattcactttggactctggagttctgcaacctggaactagg

SEQ ID NO: 50209 - DNA, 278 bp, Setaria italica
  Peptide Sequence Number=SeqID_116183
tctcccgtgctcacaccttcttccattctgcggctaactcctccaaatcttctggtccagagcggggtgtttggctcagatcgtgcggccgccatggcggatcagttcgcggattcggcggtaaggggttctcgagctcttcattcctctttgggtgggtgtgggatttctgttttgacgcaaggattgatcgaaaattcagaccctccgcaccggtgtagaggggaatccggtgaccacggttgcttctccctcccccgttccactcacccttaata

SEQ ID NO: 50210 - DNA, 271 bp, Setaria italica
  Peptide Sequence Number=SeqID_116184
cgaggacggcggaatcgcgaatccccgcctcggccaccatcccccaatctctcaacccgcaggaacactgaagggcagtaacaccatacccatgtggtcgtcgggcgtggggagccagtcctcggcgaaggcctccggcggcagctccacctggatgagcgacgaagcttgggctccaccctctgggtaatgcctcgcccattggagttcaccagcatccactgccgatcccaccggaacccggtggcggtgatgggggcctggggcacgg

SEQ ID NO: 50211 - DNA, 357 bp, Setaria italica
  Peptide Sequence Number=SeqID_116185
ccacattggcaccacaacataaacagtaaatcgttccccagcttcaatcttgctgacaatcttcaaggaaagctccttcggaatcaagtggagagcaccaatctcttccggcttgatgccttcaggcttccagcaatatgaacttccaaggaagtactggttttcaatgtagatgaagttcttagccctccggatggcatgtatgtatgcatcctggatactcctgtgatgttcccggaggacagagaaacatggaatgtccagctcttcagatccattgatggtggtgctgcttttggcttccctgagactccagaggaagctgctagagctgggcttgtgagtggaaaggattca

SEQ ID NO: 50212 - DNA, 277 bp, Setaria italica
  Peptide Sequence Number=SeqID_116186
aacaaaatacttagttacaaccttactagacaacgacaactaccatgctctccgggtgttggaacacgtcatccaacatgcccaggtgctcgtaccacagcgccatccggaagccgtggatctggccacgtgcaggctgcctggtcgccaggtggtacggctggtacgcgcccatggcaatctcagagtccctggcgccatccatggacctctggttgatgttggcagaaccgatgatgatgtactcgtcgtcaactatcatcattttggtgtgaac

SEQ ID NO: 50213 - DNA, 270 bp, Setaria italica
  Peptide Sequence Number=SeqID_116187
tgcgtccaggtcgtcactcgagtacaggtcccagtacttctcggcaatcttgttcaccttctgcacgcactccatgctctccgggtgttggaacacgtcatccaacatgcccaggtgctcgtaccacagcgccatccggaagccgttggatctggccacgtgcaggctgcctggtcgccaggtggtacggctggtacgcgcccatggcaatctcagtagtcccttggtcgtcctattcctattggtaccttcttggtttgtattgtttgt

SEQ ID NO: 50214 - DNA, 221 bp, Setaria italica
  Peptide Sequence Number=SeqID_116188
gaaaagaataattacaaactagtatgggtcgtcgatgcagagcagaatgatagatgtgcactgtatcaacaagagcgtagatcactataaatgagcaagattatccagatggtggtagcatcacatcaccaattcaacgttgagcagcccaaacagctgaacaagcaatcgtgtagaactgctggaatctcatcttacaaacggcactgcaacgcagcaag

SEQ ID NO: 50215 - DNA, 369 bp, Setaria italica
  Peptide Sequence Number=SeqID_116189
tgtttggaaaaacagcggatgggacaatttcgtttgttctttgttattttgtattgtaggtttctattacttccttgacttccagcagatattggattgctaattcatatgaagatagattcaaatctggtcttgaacctgaaaatgttgacaaggagttttttaaggctttggttcaaggacaactgcaatccatatgaagacaaggttctgccagaagctccggaggagctggtctgtgagctagcctggcggtacattttcctgttcgagacaatcacaaatgcaaaattcgagatccctgaaacacaggaaccgattcatgaaaggatctcaaggaatgttgctcaagccttacgggacctgtaa

SEQ ID NO: 50216 - DNA, 394 bp, Setaria italica
  Peptide Sequence Number=SeqID_116190
gattcatgcgcggagcttactcgctaggcagggacaccgttaccgtgcttggagagtaccctaaggtcaagccaagtattgtctcatcatcaagaggcaccgtacaaggatgttcctcaacctcgacgagatcattgcaatggcagaggacctcggctttgaagtggtgatcgatgaggccaatgtgagctctgacatctccaagttcgccaggctggttaacacggtcgacgtgatgatgggagtccatggggctgggctcacaaactgtgtgttcctgccacagaatgccacgctgattcagatcgtgccatgggagggctggaatgggtatcccgctaccgattttcggtctaattcctagtcggtagtcttctattgggtccttgtctaa

SEQ ID NO: 50217 - DNA, 391 bp, Setaria italica
  Peptide Sequence Number=SeqID_116191
acttagactacgacaaccgcggcatcttctaacctgcctagttcacgtatatgtatggaaccacatcaggatgtatgggtggatgaactgatcagacaatcaaagggaaggctatgcttcgatctgtcattcaagcaagataatggaagctaaaaataacattgataaggagggccatagagacctgagaacaccaacaatgtcagatattgcttatccgagaagctgattagggaaatcctggggatttggagatctccagggttcttcagttggtcagacatctcccaggcagtatacctagcagctaatcattggagaaggcttaagagtagagacaaattggcagagcatcgtgcagtcataggtgttggtgtgtttttcaattaac

SEQ ID NO: 50218 - DNA, 453 bp, Setaria italica
  Peptide Sequence Number=SeqID_116192
ctgactgcagaaaggcactctgctgggttcctacgcaggctgcagattctgatcacagaacaacaggaacatgatccacgtctggcaatctgggatgcagatccatgtctgaatctgaacaaaaattcagatcaacttgcttgccgttgtgcagcgacgacgaagcttgcgaaatatacggatctcaacagctcgatctatctgtaaatacttgctcatactctacgtatatacagtactctctacctagtctttatgcgtatatacgtgcatactcatatgtcgtcggaccagtcctggggctcgccctcggagaagagcgccttcgtacgtattgtttgttcgtattgtaagggtaagtaacgaaacgtaaaaggaaacgtttaaaagtaaaaactaaaaaaccccctaaaaaagtaaaaaacgttaaaaaagaaaaaaacaaaaaaacta

SEQ ID NO: 50219 - DNA, 380 bp, Setaria italica
  Peptide Sequence Number=SeqID_116193
cgcaggctgcagatttctgatcacagaacaacaggaacatgatccacgtctggcaatctgggatgcagatccatgtctgaatctgaacaaaaattcagatcaacttgcttgccgttgtgcagcgacgacgaagcttgcgaaatatacggatctcaacagctcgatctatctgtaaatacttgctcatactctacgtatatacagtactctctacctagtctttatgcgtatatacgtgcatactcatatgtcgtcggaccagtcctggggctcgccctcggagaagagcgcctcgacgatgttgtcgatgagggagtcgacgaaggacgttagtactaacccctaagtaacgtttaagttaaaacttaaatttaacttaa

SEQ ID NO: 50220 - DNA, 253 bp, Setaria italica
  Peptide Sequence Number=SeqID_116194
ttagtacttactagtactagtcctaaagtacctttccccttgtaggtaaacttagttaccttctacttaggtactactagttaaaaaagttcttcgcacaaggacgctcgtgatgcccataaggcatggaaaaggttggagatcgcaaaaaacttctggtgggaggaagatatctagcaaacctgcctcccttagctgcagcacccccatttttcccatgggggaacagatcaacttcttacagtcctattga

SEQ ID NO: 50221 - DNA, 411 bp, Setaria italica
  Peptide Sequence Number=SeqID_116195
ggttaagagttcgtgagtgtgaaggtgtctatgcaattggtgactgcgcaacaagtagggtacaaagaaaaataaatggatgatatttcgatggtattcaaaatggcagataaggacaattctggcactttaacaactgaagaaaatcaatgatgttttggaagatatttgtataagatatccacaagtagagctctatatgaaaagtatgcacatgcttgatattgcggatttgataaaagatgcaataggtgattctcacaaagaatcgatggtggttgatatagaggagttcaaaaaagctctgagccatgttgattctcaagtgaaaagtgctccagcaacagctcaggttccctctattgcacttatgcaagtgatatgttaatggtatatagtaatatagctcag

SEQ ID NO: 50222 - DNA, 284 bp, Setaria italica
  Peptide Sequence Number=SeqID_116196
atgcagcacagcctcatggttaaccaggcagcatccatactgtggctgacaatttggcatcaatacttgcccgtgaccattgagcatcaggaacgtgagtaacatgccaaggctggagaacataccgccgaccgggtaccatcctgcagtagtatgattatggggtctgtaaatagcgtaggaacatctaagctcgtgctggcttttggattattctcgtgattagctttagctcacacgtctcgttaaaaatcagagctcagattcaaagcgtgttgatcacg

SEQ ID NO: 50223 - DNA, 265 bp, Setaria italica
  Peptide Sequence Number=SeqID_116197
tccccggcgtctccccgcaggcagatggcgtaaaggccatggccgcctcagtgtcggtgactgctgcggcggccgcgaaggaggccgagctggcgaggtccgacagcttcgacgactacgagcaatgcaggtaacccgtcgttttgggttcggctgtgcccaagctcggaccatttcgttgaatcgcgaatcggaagggaacgggagtgtgtttgcctggaagtgttccaatttgtatgttgacctcgttaggtttagcagcggc

SEQ ID NO: 50224 - DNA, 405 bp, Setaria italica
  Peptide Sequence Number=SeqID_116198
tggccctgcactctccgaggcagacagctgggctctatccgggttcgtgccatctaacattttctctctgtttttccttcatacttcaagtttcatattgttagaacctacaccaagagattgttgtgcatagcttcacgcaagacatggctacacatgctgctttgaatcctgatataacatgtttcatgcaggacttgagaactaacagtgggctaagccgcactgtaagtatcagctcaaagcaaagtgatacggagcgccatgtcagattcgctgagcccgcatactcatttgttggaatgcattgcatttttgacagctgcaaaacctcaggttatttcttatggccatgctatgcatttctcttctttcagtgatcaccagatgttcttgtctgattga

SEQ ID NO: 50225 - DNA, 445 bp, Setaria italica
  Peptide Sequence Number=SeqID_116199
cttggtgtatcagcttaagcagcgacaatctactgaagaatgttgaagaggactacttcgcagctctgcaaaattcacctgccccagtatgacgatacatttgttctactttggctgtagaagaaccccgatagagtttgtaaaagtaagcgaatcgcggaggagatgttaacagtgccaacatttctggcagttttggtcgaggagatttcatctgccattttttctagattgtacataggaatctgtaaatttgtgattttgtttataccccaggacaagatgagacttgttaatcccttgttcgtccaaaaggcaagttgcatggccgccggcatgttgtagtttgtacaaatgtttcttcttgaacttaagctcagtttgaagttgaatgcgtatttgatactatacacacgacagctggatacatcaatcttcactactg

SEQ ID NO: 50226 - DNA, 254 bp, Setaria italica
  Peptide Sequence Number=SeqID_116200
aaagatttgttattggcaacaagctacaagcttatttaagtcttcatgacagttatcaagaaagcttgtatgtttttacttggtctagtatgtttctgattatgttgacttgcttctacttttgcaggcattggatacatttaatttagccatcgtttctcctatttattatgtgatgtttacgacccttacaatagtggctagtggaattatgttcaaggtagaaactaatcctaattgcttagttaattaag

SEQ ID NO: 50227 - DNA, 242 bp, Setaria italica
  misc_feature (80)..(80): n is a, c, g, or t
  Peptide Sequence Number=SeqID_116201
tcgccgtcgcctccagcgccttcatcggcgtcagcttcatcctcaagaagatcggcctccttcgcgccgccaagtgcggngcccgcgcaggtggtggaggatacacttacctttccgagccactgtggtgggctgggatgaccacaatgctgcttggggaggttgcaaactttgttgcttacatatttgcgccagctgtactcgtgactcctctcggagcattaagcataatagtgagttca

SEQ ID NO: 50228 - DNA, 401 bp, Setaria italica
  misc_feature (387)..(387): n is a, c, g, or t
  Peptide Sequence Number=SeqID_116202
tagtcttccttgtctaggtctaactttccccgttcgtagtccttccgtctaaggtattcctattttgtccttcccatcggcgacgtggaagagaaccgcggaggggattgcgaagcttaaaacccacgacaccggctgccgagccccaccgcgcacgctcctgcaggaaggtacccccttttctcttcgtcctcgcttatctctgattcctgcacccgccggagaggagagagttcgccggagaagtacggctaggacaggaaggaatccggtggtattttgcaattgccaaaaacaatcatggtaccgcggcgatgtgctacgaaggcaattctcttgtggtgctagactggttgccagggcttgggccatcagcactggcattangggtggatgcttac

SEQ ID NO: 50229 - DNA, 466 bp, Setaria italica
  misc_feature (5)..(5): n is a, c, g, or t
  Peptide Sequence Number=SeqID_116203
tggancttgatgttagacctcctgctttggttagttctgacagtagctcgtgtgttcctctgtgcaaccatgacaaggaccatcaaactgcttccttgtgtcgggatgaaagtgcagtatactgcagacagagatgacgatgaaaattcttctgggtgcacgcatccaagcaccgcaagggataagggtagcaggccacaatatattggtagccacaggataaggaaattgcttgcctcgaaggtaaggaaggcagcacgtaataagatttgtggagggatgccatcaaaaaaggtttgtggagggatgtccaacaaaggtatgccaatcccatgttcccatggtgttagtatttgcatcatctacactcctagttgctcaattagctgccatagagaaccatgtttccttttgcttctctctattatcattgcaacctgccgacataggaatttgactaatcaag

SEQ ID NO: 50230 - DNA, 451 bp, Setaria italica
  Peptide Sequence Number=SeqID_116204
ctatgtttccaggatgaagtatgaagagccatttcctggaactaaaggcggtgggggcaaccagcagcctataaaggcgtatccaaatgactctttcgctggttgtgttcatcgtcctgttgaaatggcctcacaagatgcatcagcaagcttgcaagccataatccctgttgcagcttcagacttgaacgcactagccattgtgcctatttgcaagaccagacgatctgaatttgggcaaaggcgtacaaggatgcccttctctgttggtgaggttgaggcactggtggaagctgtggaacagcttgggaccggaaggtctgtcccctatttttcttggtttcattttattcaaggttagtgctaatggcatgctaactcatgttggctgttgttcattttctgttcaggtggagagatgttaaaatgcacgcattttgacggtgcttga

SEQ ID NO: 50231 - DNA, 367 bp, Setaria italica
  Peptide Sequence Number=SeqID_116205
agaatccttgcccaccttcacattccagcgtaaagtctatgttatttagttgttcatcctgttgagatggcctcacaagatacatcaacaagctcccaagcccatcgtccctgttgcaccttcagacgatggtgctctagccattgtgcctctttgtagtgtcaggcggtctgaaactgggcaaaggcgcactaggatgcccttcactgttgatgaggttgcggcactggtggaagcagtcgaactgatcgggactggaaggtggagagctgttaaaatgcatgcatttgaacatgtggagcacaggacatatgttgaccttaaggacaagtggaagaaccctaggttactaactaaccgtactaaa

SEQ ID NO: 50232 - DNA, 251 bp, Setaria italica
  Peptide Sequence Number=SeqID_116206
ctgcagctctctaacatactgtgaaatactgattgttgaaccaggacaagtggaagaccctggttcacaccgcaagtatatccccgcaacaacgaagaggcgagccagttccacaagaactcctggaccgtgtgctcgcagcacaggcctactggtccgagcacccaaagatccgtggcaaggctcctcttcctgcgatatgctctgcctagaaagggagggggggcgagctggtccttgtgtaaatactg

SEQ ID NO: 50233 - DNA, 324 bp, Setaria italica
  Peptide Sequence Number=SeqID_116207
ccaagctctagcttaccataagacctgctacgaggacatgcctctacaagattcacaagcaacacaagagcagcagacgatacaaaatctttgtgatacacttcgaaccatactgaggttgtagacatgcatgaatgcatgaatgaaggatacaaccttgggaattctgaagacgcggcatggagccaaggatgaatatggcttcccatggtggacaatgcccctgctcagggtggagaccagtcaccaagcgtccacaaaattcaacggcaggcgccatttgcgttaccctgcgatccgcaccatttctcatgcctcctttca

SEQ ID NO: 50234 - DNA, 295 bp, Setaria italica
  Peptide Sequence Number=SeqID_116208
cacgttcattggtattccacattggatggcgccagaggtcattcaagaaagtcgctatgatggaaagatgtttgggcattaggtgtatctgcaattgagatggcagagggcatgccaccaagatccactgtgcatccaatgagagtacgtgcagtgcttctcagtgcctgttatcttcatgatatctagtgaacctgcaccaatgctggaggataaggagaagtggtctctcctcttccatgattttattgcgaagtgtctaacaaaagatccaagacttcgtcctgctgcaagt

SEQ ID NO: 50235 - DNA, 171 bp, Setaria italica
  Peptide Sequence Number=SeqID_116209
gccaacccaacgatgaagaaacatattggtgcagaagggactaatttgactatcatggcgtcgcatagtcccttctgcaccaatatgtttcttcaccgggtcttgccaacccaacgatgaagttaaacaacagcccaagccgtaaagcttatcctgaacagaaatgcttac

SEQ ID NO: 50236 - DNA, 204 bp, Setaria italica
  Peptide Sequence Number=SeqID_116210
gaggcatcgcaagacagtaagctgtaagcctctctcagcaccatcatcattagcagtagtgtcaattagtgattaaccttgctcggatgctgatacgcaggcagcgacagagcgggatgagccggggcggcctggacctgaagctgcacctgtcgcccccggcggcggcgggcggcggcgtcgccggcgtcgtcgtcggacgag

SEQ ID NO: 50237 - DNA, 509 bp, Setaria italica
  Peptide Sequence Number=SeqID_116211
cttagggtacttcattgacaaaggtgtatcctctgctgctaaagtggttaggaaggcttatccacaagagaacgtaggggtatttgttcaacgaggtcgtggtggacctctctctgtggtcgagtacagtgaaatggatgcagctatgactactgaaattaatcaatcaacagggcgccttcgctattgttggagcaatatctgcctgcatatgttcactttggacttttttgaaccaagtggcaaacagccttgaaaaggacagtgtatatcatctagctgagaagaagattccttccatccatgggtatacaacaggcctgaagcttgaacagtttatattcgatgctttcaacttaactaccccaataccaacaagacaactttttagaaggtacaatagacgggaaagaaggaaatttagacaaccaagtaaaagaaatagaccaaacggacgacaaacaataatagaacaacccctagaataagtagacgaaaaactacaatag

SEQ ID NO: 50238 - DNA, 211 bp, Setaria italica
  misc_feature (195)..(195): n is a, c, g, or t
  Peptide Sequence Number=SeqID_116212
gcccttatatatgacaggcgtcgaagtttctccgctttcctcctacgctggagagaacctggaagacaaaataaactaaagaaaccgtaaagggaaacgaaaacaaattaaccaatagacgaccaagtgagatatcgtttaggagggctgttcatgacagcaagagctgtgtaactgcaaagcgaatttaaaggnttgcaggatgtgcatg

SEQ ID NO: 50239 - DNA, 237 bp, Setaria italica
  Peptide Sequence Number=SeqID_116213
attgaagatatcctagtggttcctgcaaccctagcttcaatgggaagtccatctctggtaatcattcttcgcaagggcaggggactggatgcaaagcatggagcaaagcaactggacagtgaaggaagactcaagtttcatttccagtcttttgtctcattcaatgtcgcacataagtaagtacattttcttggatgatacatatggacctaatttgtcacatgtgactggccatca

SEQ ID NO: 50240 - DNA, 343 bp, Setaria italica
  Peptide Sequence Number=SeqID_116214
aagattatcctagtggttcctgcaaccctagcttcaatgggaagtccatctctggtaatcattcttcgcaagggcaggggagtggatgcaaagcatggagcaaagcaactggacagtgaaggaagactcaagtttcatttccagtcttttgtctcattcaatgtcgcacataaaacaataatggcactgtggaaggcaaggtccttaactcctgaacaaaaagttcagcttgtagaagaggaatcagaaacagaagatttccaaaacgaggaaggtatcaacactcatgagtctatttttttgtaggggttggttccttttggtagtctatcgggtgatggag

SEQ ID NO: 50241 - DNA, 252 bp, Setaria italica
  Peptide Sequence Number=SeqID_116215
gtagactgtagttagtaggaatggtgtgtaggatctcagtagtggatagctaggggcaagcattgtttgattggacggttctcgtttcacgtttaaattatataatcaaaattgtggaactgatatgtaaccattgtgcttattaacaagcatcatcatttgctcagtaaagtttgctatgttttttatcttgtaatgtattgagattctgcaaatgtgcagattccaataacattgtaatctagataaaaa

SEQ ID NO: 50242 - DNA, 364 bp, Setaria italica
  Peptide Sequence Number=SeqID_116216
agagctccagatccattttagtgctgccgagtgttcttctcagtaaggaacgatgatggattcgataagctcctggagtggagccaattcctttttgtcaatcaggccaaactcatttgtgaacagaatgaagtgcttgaagcaggtgttaagatgagcctcctccttgaggctgacaatcttctgaaagtgagagtgatatatgtgggcataaacgcggaacaggcgcttgaatattgtctttactacttccttgaagtttggcgggaacggtgtgccttgacaaagggggaagcaaaatccatcagacaacatgctcgattgctccaatatcatgtgttcataagaaactgagagtgtgcca

SEQ ID NO: 50243 - DNA, 417 bp, Setaria italica
  Peptide Sequence Number=SeqID_116217
tgagtcattaactgaaaatgaaggttaacccatgtacaaacacaagcagtcggtaggacatgttgaatatagagaagttaaagatgaacagaattactgaacgaaagcaagtgatatattctaaatttcaaatgctacgcattgtataacggttagccactcctacctttacctcctataaaaaaaattatcttggcttttttctcagcaacttcttagttttgttaaatactattaagatttaatggaagaccacagacatcaggaaacagtaaaagcttttagagacactcacaaactttgatagaaatagctcatgtaacccctccagatgcatgagtcttattggcacttggctaccaattcgatcagcttcaaatcttcgagtaaatactgttcccaagttctgaattccta

SEQ ID NO: 50244 - DNA, 241 bp, Setaria italica
  Peptide Sequence Number=SeqID_116218
tcgtcgggttgtcttgtaactaagttgggttgtcgggagggtggtacccgcgcgtcgacgatctcgtcaagcacgttaaggagctccgcaagtacaagcgccatgcccacgccctcgagctaatggattggatggtcaatgcaaggggcatgcacatgtcacacactaaccatgcaatacgtctggatctcatctataaagtgcgtggccttgaggcagctgagaattattttgctagtct

SEQ ID NO: 50245 - DNA, 210 bp, Setaria italica
  Peptide Sequence Number=SeqID_116219
agtgctgctgcattggtgctcattggcccagcaatagcgtttcctactgcgatgtggttcctgaagtttattattggtacctcagaactctacacacaccattgtattgtagtaatattcaatagatcctttctaaagcactatcccatgtatataaaccttttttatgcagtgatttgcaggttcgttttgtcgccacttgcaatgttt

SEQ ID NO: 50246 - DNA, 269 bp, Setaria italica
  Peptide Sequence Number=SeqID_116220
tgttctaggttctagtagttagtctagtcggtcttgtaaggttgtaacttcgggtctaccttgtaattttgttgtcgtagttcggtgtgctgtgacgcctcccaccgctctgcgaggccatcgccctcgagcatcctgaccacctctgacatcttgggcctgtggccagggaggaactgggtgcatagcagcgccacttgcaccatctcctccaactcaatgcggtcatatttgctccccaagcccttgtcgacaagtatgtccagctg

SEQ ID NO: 50247 - DNA, 460 bp, Setaria italica
  Peptide Sequence Number=SeqID_116221
gccggaccaataagcacttacccaagaaaaatattaaggacatgaaatataatgacaagaactaatagtacacatttgtcagatttgagcaatcaacatctgaagagcaagtgacattaaccttataggctttatttccacaatccactagactacttaagtttatgggggactaagagttctgatcccgcatgtaaagtgcaacaagcagactttgcgtctggataactaaaatactactgtacgtgaacacaaaattgcaacagaaagagaacctttagtgctggtatgtcaaactggcccattctttgactcaattggatttttcaacttcacagaaagaagcatacactggatacggtacattatagaaggaataaataggaagctagcgcaaagtatcggatgaaaccggtgacatgacaactacacagagctcggggggcagttcaacagcatt

SEQ ID NO: 50248 - DNA, 375 bp, Setaria italica
  Peptide Sequence Number=SeqID_116222
ttgcaccagcaatagattctattacatcaccaagaaccttgggtaaaccgatgccagcttcccaaccatgtgatggacctgaaaatgactgcttgaaattttcaaggtagtcagccatccttttgtgcagtgctgatgatgaatgaagaatgtgcttatgtaatcctgctttaactgctgcatgagcgtagcaattgttgttcacagaagcagatctcagatctgtcaacagttctggagtgcattcagggtactgcctgtagaaataatcagtgaagatatgatctaatacggcatctccaagaaactcaagccgctgcacaggtgcatggagcttgttaagttagtatttacttcgtattaaaattcgtctta

SEQ ID NO: 50249 - DNA, 258 bp, Setaria italica
  Peptide Sequence Number=SeqID_116223
ctgtaagcttcgcgaccacataactcctgcagctctttcacagggtcaacatccagtgtgtcgggggtagcaagaggctccagtagccgtttcatgcttctccaaacaacctccttgtcgcacttgctgtcgatataaattgcaccagcaatagattctattacatcaccaagaacctgcataattgcaaataagcaaaaggttattagggtgcaaataagctacgaaaccaaaaaggttcccggagtactcaaaatg

SEQ ID NO: 50250 - DNA, 407 bp, Setaria italica
  Peptide Sequence Number=SeqID_116224
cacgtttggcaatacattgatgggcagcttggcagatgaagttgaaggcttgcagcaacatcgatcagctgttgtatgtgtgtgttccctacctcgatgtttcttttgtcgaggattttcttcagctccgacagcgcgtccagaccgcttgtgtcgatcgccgcgacggctgcaacaacaatgtgatgattcgtctctgatcagctgattaatccttgacaagaattctttcgccgatcaatgatataatggcactcaccgctcatgtcgaggacgacgcatcggatggaactctggttggacttgagagccatctcctcctcgtcgcggaggtacctcatgaccctctcgacgaggtacatggagttggtgaagtagatcgccgactcgacgccgacgacgaggaa

SEQ ID NO: 50251 - DNA, 258 bp, Setaria italica
  Peptide Sequence Number=SeqID_116225
aaggttggcgagcttggcgtagctgattccctgcgggatggcgaggctggcaatggtgaggccggcgatgaggtcggagcggaggaggcgggggctgtacgcggacccccactggaagatggggaagaagtactggagcgccagcaccagccgccgcgccgacgactggttcttgaactggtgcagggggtcgtcggggaagagcacctcggcgaggcgctgccgcagcgccttcgccgtcgaccggcgctccggcag

SEQ ID NO: 50252 - DNA, 303 bp, Setaria italica
  Peptide Sequence Number=SeqID_116226
gctacccgccctcccgggcatcccaatctccgatctccccgccgtcccccccgcctccactgggctcgttccccttgctgacggcgacctgctggtgaatgcacgaatcgatcaggtgggggtgcgagaagagcaagttcccgtggacctactcggccaaggagacgtgctacctgctgcaggggaaggtgaaggtgtacccggagggccacgggaggagttcgttggtagtattcgtccgtcggggtaccttggttcgttctttccccttaagggttcttatttgttagttctttgttctta

SEQ ID NO: 50253 - DNA, 286 bp, Setaria italica
  Peptide Sequence Number=SeqID_116227
ctacctgctgcaggggaaggtgaaggtgtacccggagggccacggggaggagttcgtggagatcgccgcgggggacctggtcgtcttccccaagggcatgagctgcacctgggacgtcgccgaggccgtcgacaagcactacaacttcgagtagccgccgctgtccaggccggactagcctgcagcgctcgatgtatggtacgcagtagcagttaattggtgaccgcctagttggaatagtttaggaattagacaaccggacttagtaaaccaaaaaaaaaaaaaa

SEQ ID NO: 50254 - DNA, 260 bp, Setaria italica
  misc_feature (205)..(260): n is a, c, g, or t
  Peptide Sequence Number=SeqID_116228
tatttgtctaccggtctttgttcctatttccttgtccttgttagacgtgccgtgctctgaacctctgatgctccattccagtgttgaacagcacaataaagctccggattagcggattacaacactttttttttaaggaaccaggctggagagctgtcgattatacgattatattaaaaaagaagatgaaactcagattgagacnnnnnnnnnnnnnnnnnnnnnnnnnnnnnnnnnnnnnnnnnnnnnnnnnnnnnnnn

SEQ ID NO: 50255 - DNA, 236 bp, Setaria italica
  Peptide Sequence Number=SeqID_116229
gcgcgagaagttcgtccagctctgctcgcccgaggacgtcaccctcatcagagacgaaacgagggtgagctcgatgttcgtggaggacctggccgtccagcagccgttcaccaagggcgggtacggctcggtgcgcagggtgtacgtggtgtgcacggaggaccacgccatcgcggaggggttccagcgcctgatggtggagaacgacccggttgacgaggtgaaggagagcatca

SEQ ID NO: 50256 - DNA, 269 bp, Setaria italica
  Peptide Sequence Number=SeqID_116230
cgcaaatgctctcagtactttgggctcaaagagaacgatgtgcccctcctttttgtgattgcacagggtgggaaatatctcaatccaactatcgatcctgatcaagttataccctggttgaagcagtacatagttgaggcctttttaactttactttatggcttagttactaagctgtttcacagtactttagtttgttgtcaaatagtttcctactcaatgttgttctgccttgttttgcttatgtagtatggaaacttgacgcctta

SEQ ID NO: 50257 - DNA, 283 bp, Setaria italica
  Peptide Sequence Number=SeqID_116231
gtagcgtataactgggaaaacatcaatctggcatatctgactactgtacacatgccttaagcatggtgtgattaatggaccgtactgtaagcatatgattattttgatcacatgctttcttccagatcacatcaactatcatctggtgttattaggagtaatccctatttgaacctgacatacataattaaaactatgcagtgcttttacactcttgccaaaaaacaagaagctagatgaaaacctcctaaaagatcataaggctagatgctagaggcataca

SEQ ID NO: 50258 - DNA, 320 bp, Setaria italica
  Peptide Sequence Number=SeqID_116232
aaaaatggtggttcagacttcagatatggaagataattggcttaatatcctgaccatgccctaaattacttacaataatagctaaaatgtcaatacttctattgaaataatatgcttagcttgtttcaatcttgcatggttcgtgtatgcagttgtacaccagggattcatcaaaaagttggcgtcaggctggatctgatgggagcagtcagctggctttaaaagaccttctagcaatgttgtcctagctgatcatgttacaacaaagaaatgggagaaacttgctgatttcgacgaccaccttgatgatattagcaagt

SEQ ID NO: 50259 - DNA, 429 bp, Setaria italica
  Peptide Sequence Number=SeqID_116233
aagaattaattgtcctcaaatcttttctaacttctgttttgcatttacacaaagttttatatatttaattccttccgttacagcctcgctggacttgcctttatgttttccacaagcattctgctgcagatactggcatgtgctttgtacaacaactggtggcccatgttagcagctctcatgtatgtcctcgtaccaatgccatgcctgtttttcggtggtggatccacacacttcttgacaagcagagaaggcggggggtggattaatgctgcaaaattcctgactggtgcgtctgccatgggaagccttgccatcccagctattctgaggcacgctggcctaatcgagactggtgccatgttcattgagttcacgtccttcttcatccttgtatgcacagtgatgtgcttccacagggctaccctt

SEQ ID NO: 50260 - DNA, 464 bp, Setaria italica
  misc_feature (385)..(385): n is a, c, g, or t
  Peptide Sequence Number=SeqID_116234
tacttacctagtacctccgtacttttgtgctggatgatgctgttcacttactcttggtgtttctcgtgacagtcctcgctggacttgcctttatgttttccacaagcattctgctgcagatactggcatgtgctttgtacaacaactggtggcccatgttagcagctctcatgtatgtcctcgtaccaatgccatgcctgtttttcggtggtggatccacacacttcttgacaagcagagaaggcgggggtggattaatgctgcaaaattcctgactggtgcgtctgccatgggaagccttgccatcccagctattctgaggcacgctggcctaatcgagactggtgccatgttcattgagttcacgtccttcttcatccttgtntgcacagtgatgtgcttccacagggctaccctagatgaagattggtaaatgcgcatgcacggacccttaagaatagtga

SEQ ID NO: 50261 - DNA, 353 bp, Setaria italica
  misc_feature (35)..(35): n is a, c, g, or t
  Peptide Sequence Number=SeqID_116235
tatgtgagtaagagtgataactcatgtgtgctggngaaaatgctttgcagatagtgcacgcaaagattgtgtcgacaccagatagcatcgattttattattctattagctgtagtattttcatggaaaaggcaacaccagtttgtcataacattgttgtttggctatgttgtggcctctataatgttcagtttttgattttttaatggtgcaggcatgtgctttgtacaacaactggtggcccatgttagcagctctcatgtatgtcctcgtaccaatgccatgcctgtttttcggtggtgtatccacacacttcttgacaagcagagaaggtcggggggttggtatttaatt

SEQ ID NO: 50262 - DNA, 266 bp, Setaria italica
  Peptide Sequence Number=SeqID_116236
cggacgagaggaagcaaagcagagcaggtgaggaaaggcgaagcttctcctcgccaacatggcgatgaccgtcgaaggtgggtgtgcttcttcctcccctaaatttcaaccggttatgcgagttcctcttcgcttgagatccgattcgtgtgtggaatcgtggggattgggtgggtgcttgtggttttctgcggattagggcttgggagatcccaattagactacgggtgctgctctttaaggtatggattgtgagttgtgtatct

SEQ ID NO: 50263 - DNA, 285 bp, Setaria italica
  Peptide Sequence Number=SeqID_116237
aggacccgctccttgggtgccgggggcgggctcttcagcgacggcggcaggccctggccgtgctggaccttgatctcgaagcgcatcccctgctggcactgggagccgccgtcggcgtcggagaagaagtagttggtgccctcgagaacgagagcgaccgggatggtgttgttctgctcgaggccgccgcccccgccgccgccgccgccgtagattaaggtttccgggaactactccggttgggccaacggcgagaccttctacctcggcgactaccttatatta

SEQ ID NO: 50264 - DNA, 367 bp, Setaria italica
  Peptide Sequence Number=SeqID_116238
aaggaagtgatgcttccttcaacaatacgtcttacaatcaaacagcagtagtagtgtgtgatgcttcttttaagaatataagatggacattgtttcaacaatacgtcttacagtcgaaatatatcagaggcagcatctatcaaccagctcaatatactccacaaaattcttgccgagcattacatgagtaccatgctcagggtaagatacaacataatactactaaatgtttcgaaaatacactttcttctcgtctgtcttcctgtctgcaagttcttcaagcagaagtgaatttacaaggaatacaactaaggaaaaagggacaataaatagacaacaataccaatagaagacaatacaagaagta

SEQ ID NO: 50265 - DNA, 336 bp, Setaria italica
  Peptide Sequence Number=SeqID_116239
ggagtatattgagctggttgatagatgctgcctctgatatattccacaaaattcttgccgagcattacatgagtaccatgctcagggtaagatacaacataatactactaaatgtttcgaaaatacactttcttctcgtctgtcttcctgtctgcaagttcttcaagcagaagtgaatttcaggggacaccatcccaataatggcagatgcaaatgtgtgatttgggaatcagcatccgtgtaatggagataaataagaatatgttccttgtctggcagtcaccagttgtgatcgattacgatccagggcaactctgatgctcatggatgtgcatt

SEQ ID NO: 50266 - DNA, 431 bp, Setaria italica
  Peptide Sequence Number=SeqID_116240
ggttactttgcagatatatgcttcaaaatgttggtgaccgagttaagtttggataactattaatgagccaaacttgttcacaaagttaagctatatgtatgggcgatacgctcctggtcactgttctaagccatttggtaattgtgcctttgggaattcttcggtggaaacatacatagtaggtcacaacatcatactatctcatgcaaatgccgttcacatttacagaaagaagtatcaggtgaaacaaggtggccatattggaattaacgtttgctcaagatggtatgaaccattccacaataccacggcagacatcttagcagttgaacgggttctctctttcaatggtccatgacagggtcgccgatattttattctgttccatatgggatggagaaactggtcatgtattaacaaacaaaagaata

SEQ ID NO: 50267 - DNA, 534 bp, Setaria italica
  misc_feature (146)..(146): n is a, c, g, or t
  Peptide Sequence Number=SeqID_116241
cacaacatcatactatctcatgcaaaatgccgttcacatttacagaaagaagtatcaggtgaaacaaggtggccatattggaattaacgtttgctcaagatggtatgaaccattccacaataccacggcagacatcttagcagttnaacgggttctctctttcaatggtccatggtttctggaccctcttattcttggtgaatatcccctagagatgcgcaagatcttaggttcaaacctacctgaattcacatcaaaacaaaagaagaaattgcaggccacaaaattggatttcattgggttaaatcattatacaacatcatatttgaaggattgcattttctcaccatgtgaactggatccggtagagggggaggcccaggttctgacatcagcagaaagagatggaatatttattggtaaaaggacagggtcgccgaataattttaattactagttaccaataatagggaataggaagaaaactaggtacaatagtaattaacaaaacaaaagaataacaaataaacaaca

SEQ ID NO: 50268 - DNA, 244 bp, Setaria italica
  Peptide Sequence Number=SeqID_116242
gggcggggcagcagcgggcagaaggaaggggatggtcgtcggcctcgcgctcttcttgctcgctcatcaggggctcctgccgtgcgcttcggccgttgatcgcggcgagttccccgagaacttcttgttcgggacctccacctctgcctaccagcttgcagggagcaattgggcaacatgagatcccactcaactgtgcagaacgctctatctatcctggtctgtgtagtgtcatttgaccatt

SEQ ID NO: 50269 - DNA, 256 bp, Setaria italica
  misc_feature (23)..(23): n is a, c, g, or t
  Peptide Sequence Number=SeqID_116243
ctttttctttttttattgtagtntaatgatatgaacatcgatttaagatatctgatataccaatgcaaaacgcaacatttaagaataatccagcaggatgtgaaatcattaattctccatacccttttcaataaagatgaatcaatatggttttctcctctaccaacccatatgaggatggcaaaggctaaatgttgtatttgtaatatttatgaagctataactatgtgatctccattcaaaagctgttttcttc

SEQ ID NO: 50270 - DNA, 415 bp, Setaria italica
  misc_feature (407)..(407): n is a, c, g, or t
  Peptide Sequence Number=SeqID_116244
tttttagtttttttactttttttttacttttttagttttttaagttttagtcttgtgacggtatacttctgcaatgccaggaccttaaatatatctgcaatttcatcttttgttcagaagcatgtcatttgcactgtgattatcatattacctgttcatatgttggttacgcatgttgttgtttctcactattgcattgccaataggacaagtgttcctttagtgtaagctttgtttgcaatctgatatctgaaatgttctgcaggaggcaagtttgattggcgttgacagtcttggtattgatgtaagagccttttctggcttggaagctaggactgttcgattttcgtcaatgcgcaggttagtcattaggcttagaaatttcaaatcaccttggtccttttaangaacctag

SEQ ID NO: 50271 - DNA, 261 bp, Setaria italica
  Peptide Sequence Number=SeqID_116245
ctaccatacaaagtacaccaagagaaactgatcatggtagattggtaaagagtgatttgctgagattttttaaatacctgctaactctgatattcaaaaaaaattaagttccaataaaaaatgtggcaggaattaaactaataacatgacaattatcagccaagcaaaggacattgaaaattagtgactcacaatagcaattacagaaaccctaccaatgtgactgcacaagttaactttcaccaaatatcagtgtgatag

SEQ ID NO: 50272 - DNA, 240 bp, Setaria italica
  Peptide Sequence Number=SeqID_116246
gggccccacacgccttgtcgtgtggacgcacagcagcggcagcatcagcatcacccccgccgggtaccggacgccgccgagctccatgggcttgtacgtctgccgctgcagcgccgccagcggcgtgtacagccgcagcacctcgtacagtaccatggtcccgattctgaggcggctgaggccgtcgtagtccggcatcaccaccgacgacgtgatcggggagtgcaagctgttctactt

SEQ ID NO: 50273 - DNA, 235 bp, Setaria italica
  Peptide Sequence Number=SeqID_116247
cagaattgatgagaacatggatgaaacactgactaacgtcgagggagcgcaggggcagctcctggatggtcgattccacattttgtagagcttcagctctgctctgcatgtaactgtcctgctgtacagccaattgctgctgctggaaaggctgggatgacgatgatgctccatggtctccattagttttcttcctctggaataatggtgtagatgcagagtcgctgacgactgg

SEQ ID NO: 50274 - DNA, 337 bp, Setaria italica
  Peptide Sequence Number=SeqID_116248
cgtctcgatggcatctactgtgagctgccagccagagagcgccgtgctcgaaccagagttaatacaacatgcagcagcaacatttccatttacccaggggcagtaattgttgtggtgctttatttggatcgaaatctggaagttcggttttcataatcgtttttcttccatttgttgctcctagcccatttgctggatcatagtcatcattagtcagcataataccagtcacttcctctttcgatgcatcaatgccagaataaactcttgcattgcaagaaagagaagatgagtcatgctgtagctcatgagaatagtgcacatccctctctttctt

SEQ ID NO: 50275 - DNA, 318 bp, Setaria italica
  misc_feature (298)..(298): n is a, c, g, or t
  Peptide Sequence Number=SeqID_116249
ttttttgtttctttaattttggtttactttactttgttttcttactagttgtcggtaggtaaaattcaatggagagtgttgaatatcatccatgtgatggtgatgatgttaataagccttctagtgcactcaggagtggtggaatgagtgaggcattggatctcaattatagcaaccaagcacagcaaagcagttttgtacagcctgctgctgaaactgaaagtaatgcaagagagatagggggcagtagtatgaatggaggggaagaagttctcaatgcagaacgactcctgcttcngctagagatcagcttagcct

SEQ ID NO: 50276 - DNA, 228 bp, Setaria italica
  Peptide Sequence Number=SeqID_116250
cgcctcgttcccatggtctacacgatgattgagagaaatccgcagcagccccatcagcattagtactaaatgcaggctgagatggattattgcagtttgtatctcttcctgttattgcctcatctgcaattgagagtatgaagatcactagaagcgttcaaattgatcgcatcttatcccaatcagttacaattcctgttgtactgtctgttctgtagcccagctccc

SEQ ID NO: 50277 - DNA, 201 bp, Setaria italica
  Peptide Sequence Number=SeqID_116251
ggaggggaagaagttctcaatgcatactactgccccctatctctcttgcattactttcagttttgtacagcctgctgctgaaactgaaagtaatgcaagagagatagggggcagtagtatgaatggaggggaagaagttctcaatgcagaaacgactcctgcttctgctagagatcagcttcatgactagcacccattccc

SEQ ID NO: 50278 - DNA, 371 bp, Setaria italica
  Peptide Sequence Number=SeqID_116252
ttaaatttactttccttttactttattttagttaagttacttatttatttggtttgttttggttaacttagttacttattatttgtaacttgtaagcgtgtttagaatcaacttttccatttctagaatctgcccttttgtgtaggctctgtcagaaatgagcactaggtcttcaacaactggaactgaaacctcctcgtatttgcaagcaagaagcatagctgttactcccactagctgcagcttcttccttggaaccacttgcttttccaaaaatctatctattatgtttacggtaagaaacagtgtctcatccatcaattcgaacttgtaatgcacctcaatgagccaatcaatgagaatcgctctca

SEQ ID NO: 50279 - DNA, 244 bp, Setaria italica
  Peptide Sequence Number=SeqID_116253
gaaagagagcagcaagaacagcggcggtttctccatcaccttcttgctcgtcgtgggcctgctgttgttacacgttagaacaggcgctccgtttaggagcgaaaacacaaggggcggtatgcatataccgcgtgtaggtatcctctcatgggagtatagctctgcttactgctggagactgctgcaccctactatgtcctcttgaggatgtagccgacgacgatgcccagcaggcccagacgag

SEQ ID NO: 50280 - DNA, 207 bp, Setaria italica
  Peptide Sequence Number=SeqID_116254
cggaccaccatgggttcgactcattagttgcagtaaatatgggacgtcctgccacatccattactggtcctttctgcatcagctcataggtcaagtttttatgagctggtgcccattcctctttgactcttcgttttatctgttcaatgtcttcagttggaggctgagacacgcaacagaggataggcaaggcacacaggggatagg

SEQ ID NO: 50281 - DNA, 234 bp, Setaria italica
  Peptide Sequence Number=SeqID_116255
caaaataagttactttccaatgtttcaaatcagtgatatgttcactagatcatgataaaatgacaaagttacttcactagatcagatatattcagattacttgaaggtgtgcatgcgatcattttattccaagtaacaaatgttacagcatgattgtgtgcatgtgatcattttatcccaactaaaacacaacatttatttacccaaaaaagaaagttacttactgtgtcatct

SEQ ID NO: 50282 - DNA, 276 bp, Setaria italica
  Peptide Sequence Number=SeqID_116256
catgattgtgtgcatgtgatcattttatcccaactaaaacacaacatttatttcccaaaaaagaaagttacttactgtgtcatctatattgtttcataagttacttcctatgtaatataaataggtgaggagttacctttttgtaatgtgaaaatagtcacaaagttgaccaccctgtcatgtttcaaaacatgggcaaagttacttccaatctcatataattgattgattagatactacctatattttcaaaccgggaacaagttactaattatt

SEQ ID NO: 50283 - DNA, 249 bp, Setaria italica
  Peptide Sequence Number=SeqID_116257
ctatgtacagaatgtatcgcctccccaccaaataaaacatacttctccttgcgcctcatatttagatctctatccctttttgtaatgtgaaaatagtcacaaagttgaccacctgatcaatatgtgcctacactagatatcaagagaaacgcttccaccccaatgtgtagggacgctgccttagctacacacctggaacaaatcgtcgcctcgtgtcgctgctccaagcattcgctggagccctcgtcg

SEQ ID NO: 50284 - DNA, 480 bp, Setaria italica
  Peptide Sequence Number=SeqID_116258
agaaatgacagggataatccagaacttgcatgcatccctgaaagtagaatcagactaagtgcctactaaaagctaacatgtatgcagtattcttaggagcatatccataggattgtacagtataacaaaaacattgcgcaaggatggcattgagtattcccttatctaatacagaaggtgtgcagctaaatctggataaaccttaattagtaacttagacataagcaaaaggcactggtgcagcaaacctcagaaaaatgttcctgtcaacttgttcagcaatgttgatttcccaacagaaggaaagccaactaaaccaacacgtgcatctccactttttgtgacatcaaatccttcacctgcaccgccaccacctttcgatgttggagtgagcaactcccgccgtaattttgcaagtttagccttcaaaaggccaagatggtgagcagtggctttgttcttctgcgtccttgccatctc

SEQ ID NO: 50285 - DNA, 417 bp, Setaria italica
  Peptide Sequence Number=SeqID_116259
ccttttgcaggcttgtcacagtttgcaacagaagacaccctagcagaagcattctctcgttacggccaagtaatagaagctaccatcgtcacggataagatgaccgacaaaccaaaagggttcggctttgtgaaatttgcttcccaggaagaagctaataccgcaagggaagagatgaacggcaaggcaggattttgatggattagtttacgctctttgcaacatgaattgcagatatgtttgtgtccttttggagagaatctaatatatgcaagcctgtgacaggtattgaacggccgtgtgatctacgtcgacattgcaaagcccaaactggaacgtgatgcagatgcccgcccaatagcgagaggccctcctaagccatttggcaacgactgataaaggattggtccttggtta

SEQ ID NO: 50286 - DNA, 267 bp, Setaria italica
  Peptide Sequence Number=SeqID_116260
tcttgaaatattttcttccattcctcccatatgcagccaatatggccacagggataccccgactaagtgcatcatcaatgaacgtttcaactccaggccgcagtggtaagctaccagaagctgagaactcttccaaagctttcaacttttcacgaagaacacttttcataaatgaagattgttggaaaagatgaggttgaaggaagcttctacgggcaacttgttcttggtaaaaggagttacatccagtttggatgagcaacttta

SEQ ID NO: 50287 - DNA, 240 bp, Setaria italica
  Peptide Sequence Number=SeqID_116261
tcttttaagttgccatgtgtctgattctgtgtatgaaatcattcgaaggttcattgatgatgcacttagtcggggtatccctgtggccatattggctgcatatgggaggaatggagaaaatatttcaagatccatagttaaaaagttgggtcctgaaagaacatcaaaaataaagattgttggaaaagatgaggttgaaggaagcttctacgggcaacttgttcttggtaaaaggagtta

SEQ ID NO: 50288 - DNA, 471 bp, Setaria italica
  Peptide Sequence Number=SeqID_116262
tgcgggggagcccggccacatggctagggactgccccagcgctgacggcggcggcgggtatggcggaggcggcggcggcggcagtggatgcttcaagtgcggggagcctggccacatagccagggactgccccagcggcggcgaccgctcctgctacaactgcggcgaggccggccacatcgcccgcgactgccgcgcgtgaggcggatcagatcggatcggcatcgcgccactactacccggtggtggtcgccgtctagatctcgcccaagcctctcactctttatgtctcgttcgtcggagtattgctttagttttgccgatctgggcccgagcgccgcctccttgctatagaggagccagccgccttttttctttcgtttcgctttggatttggttcggtttcgtaggggtaactgctctgctcagttatcatcgtgtgcttggtgagtcgtcgtcgttgttcgtcgt

SEQ ID NO: 50289 - DNA, 300 bp, Setaria italica
  Peptide Sequence Number=SeqID_116263
cctcccccaggttgagcgtccaggagggagagattgcttcaacttgtttgccttctcagcatcgaagacgcaggagggtgtacaagtacttggagcagcgcaccttgaacttgtacaccctctgcgtcttcgatgctgagaaggcaaacaagttgaagcaatctctcccccccaggtttgagcgtccaggaggtttgaagttaagacaacatctagatgaactaccgaaagcttccttgttagcagagcatgctcgtctatgtacctttggaacctacatgactggcaggtctaaaatca

SEQ ID NO: 50290 - DNA, 186 bp, Setaria italica
  Peptide Sequence Number=SeqID_116264
tagaaggaaggatgctcgctctgtgaaaatcaagagaagcaaagatgttgtgaagttcaaggtgcgctgctccaagtacttgtacaccctctgtgtctttgatgcggagaaggcgaacaagttgaagcaatccctctctcttgcttgaatcttcagatttcttggacactcaaacctggagggagg

SEQ ID NO: 50291 - DNA, 360 bp, Setaria italica
  misc_feature (326)..(326): n is a, c, g, or t
  Peptide Sequence Number=SeqID_116265
tgtcgtaaagttcgggtcgttgtctattctaggtattctttcattccaacaccgtcgaatcagtttcgacaatcttgggtgaacgcttgcaggaatgtccaagcgcaacccctgccttacacctaatgcagcttgcaagggcgtcatgttgtcatatgggacctttgaagttgccaactcccatagaacaatggcgaagctgaatacatctgctttgttatcataaggcttatgattaattatctctggtgccatccatcgataggttccagtttcagcagtcatctgcccctcctgacttccatgtcgtgccacaccaagtccgnaatctttatgacttgatcatagcctattagaaga

SEQ ID NO: 50292 - DNA, 239 bp, Setaria italica
  Peptide Sequence Number=SeqID_116266
gaagtggtactggaagaccgagctaagctgaaggggattccctctgattgctcccagatcatggtgtggcagtatagcgtgcccagctcacaatagaagcgtgcggcccgccgatgacgaagcggcccgaagggttgaggtggaagatggtcttctcgtcgaggtacttctccgggatgatgggcttgatgacgtgctccttgaggtcggcggcgatctcgtcgttggtgacggtctcg

SEQ ID NO: 50293 - DNA, 463 bp, Setaria italica
  Peptide Sequence Number=SeqID_116267
aaaagtttgattttggcttgtcagagggtgaggatgatgatgatgatgatgatgcggtggggaagttggtgaggatgatgagccatcaggtttcgaagatgatccctttgatgatgagggtgctaaggataatgtgagggagattgcgggaaataagtccggctcttttgagttagacaaagaagagccagctaaacagaagagagacacaagaagtactggaggtggtgattcttatctgagccagaagaggtttgatgaatgcccactatctcccttgacacttaaaggtgttaaggctgctaattatgaacgaatgactgctgtccaagaggctactcttcctattatacttcaagggaaggatgtactagccaaagcaaggacaggaacaggaaaaactgtagctttcttggtaagtaccctgctgaatagtgaatattcttttccccaattgtaatgt

SEQ ID NO: 50294 - DNA, 293 bp, Setaria italica
  misc_feature (171)..(171): n is a, c, g, or t
  Peptide Sequence Number=SeqID_116268
tagggaattacaagatctgatattgagaaaatagtggctgctctcccaaaacagcgtcaaacactcctattttctgcaacagttccagatgaggttcgccaagtatgtcacattgccatgaaaagagatcttgaatttgtcaacactgttgaagaaggaagtgaggaaacncattctcaggtatttcacaaaccaaatgtatgttgattgctccgtagttttaaaattaatgatgtgcttatgattactatattcaggtgaagcaaatgcatttagttgcaccactagacaaa

SEQ ID NO: 50295 - DNA, 207 bp, Setaria italica
  Peptide Sequence Number=SeqID_116269
aacagaagcgcatgcataccaacccttgccaggtgacgttgtcttgttgaattgaataatcctgctattctgttgtcatttgttctgagttctgacccacaagcaacgatgaatggctgaattacagattctagtagctactccaggaaggcttagggatcatatggagaacactccagggtttgctacaaggttaatgggcgttct

SEQ ID NO: 50296 - DNA, 489 bp, Setaria italica
  misc_feature (481)..(481): n is a, c, g, or t
  Peptide Sequence Number=SeqID_116270
ttgtccctattcgttgtcttaccgtttctttctaagttaggtacttgtcttgtattggtagttcacgcaggttgagtgggacgaggatgaagtgttccatttcttggttggctactatgggaagaaacttgtatcttcctacagggagacctccatggattctcatcttcaagtaacgaagcaagtaggctcaatttctgatgattcttccgcttccagcgctgcaacagtcccaatcggagctgccctgggtgtcgctgttgctagctgtacatttggggcactggcttgcttctggaggacccagcagaagaacagaaagcaaagaaagaactggaactgaaaaatagtgcaccacttgcaaaccctaaactgcatgtctgcatcaggaggagcctccgtgaatgtatatttactgggcggttatcttggcaagtacccatcaaaagatgaaaaacatacagaagtgcgaagatttacncgtgcctg

SEQ ID NO: 50297 - DNA, 471 bp, Setaria italica
  misc_feature (335)..(335): n is a, c, g, or t
  misc_feature (344)..(344): n is a, c, g, or t
  misc_feature (366)..(366): n is a, c, g, or t
  Peptide Sequence Number=SeqID_116271
cgctgttgctagctgtacatttggggcactggcttgcttctggaggacccagcagaagaacagaaagtactaccatttacgttctttaaagaaaatttgactaaacattttaggtctgtaggatgtcaatgctaatatgttcttcgtaggttcatatcatagagaagtgattaggatttttttgtctcctttgttgatttgacaggcaaagaaagaactggaactgaaaatagtgcaccacttgcaaaccctaaactgcatgtctgcatcaggaggagcctccgtgaatgtatatttactgggcgggttatcttggcaagtacccactcaaaagntgaaaaacntacagaagtgcgaagatttacncgtgcctgagtcccgtgattgttttgtgcaacgacgtgaactttgttgcaacagtaaacagttctataggttcaacgttttaagctctgtacttaccatgtagcc

SEQ ID NO: 50298 - DNA, 249 bp, Setaria italica
  Peptide Sequence Number=SeqID_116272
acagcaaagcgaccaagaggagggtactcagagaatgtctccacaaccatgggcttggtgggaaccatcttcaccatactgtgaggaatgccgcaagcacttctacgaaatgtgttcaagtgtatcagtccccttcaaatctgcccgtgacctcaccctctggctatggagagcacataacaaagttaacgagaggttgatgaaagaagaaaaggatttagacactgctgatccttcatttcctaaggt

SEQ ID NO: 50299 - DNA, 324 bp, Setaria italica
  Peptide Sequence Number=SeqID_116273
gcagaagaacagaaagcaaagaaagaactggaactgaaaatagtgcaccatctgcatcaggaggagcctccgtgaatgtatatttactgggcgggttatcttggcaagtacccactcaaaagatgaaaaacatacagaagtgcgaagatttacttgtgcctgagtcccgtgattgttttgtgcaacgacgtgaactttgttgcaacagtaaacagttctataggttcaacgttttaagctctgtacttaccatgtagccttttgaatacctttctctggggactaatgtaattttataccaaagtaatgagtgaaaactaaatt

SEQ ID NO: 50300 - DNA, 216 bp, Setaria italica
  Peptide Sequence Number=SeqID_116274
aacaaattaaaagttacaacaaagaagaagttactaacaattaattaaacaagtgttacaggagacaacatctgtggagagggggtgccacgtggatattggatgttctgccgtggaagtaaaaaagaaacgagaggatttagctgtggtctatgggttttgctgcattcactaactgtccgaagtggagatggagagagccaatcaacatttaca

SEQ ID NO: 50301 - DNA, 312 bp, Setaria italica
  Peptide Sequence Number=SeqID_116275
ctaccatttacgttctttaaagaaaatttgactaaacattttaggcaaagaaagaactggaactgaaaatagtgcaccacttgcaaaccctaaactgcatgtctgcatcaggaggagcctccgtgaatgtatatttactgggcgggttatcttggcaagtacccactcaaaagatgaaaaacatacagaagtgcgaagatttactcgtgcctgagtcccgtgattgttttgtgcaacgacgtgaactttgttgcaacagtaaacagttctataggttcaacgttttaagctctgtacttaccatgtagcctt

SEQ ID NO: 50302 - DNA, 175 bp, Setaria italica
  Peptide Sequence Number=SeqID_116276
tgtttcgacttgggaaatgcgtacctatcacacgagggggtggaatctatcaagaacacatgaatgaagctcttgaggtgcttatcaatggaggctgggaaaaataggcgcaagatgatcagccaattagaagattgaagtggggaactgccagtcttattgtccgagcgcctat

SEQ ID NO: 50303 - DNA, 449 bp, Setaria italica
  Peptide Sequence Number=SeqID_116277
atggtgctgatctcctttgaggacatatgtcctcaaaggagatatgtcctcaatggtgctgatctcctttgaaagcacggatgacctcaagagagctgctgatcagaacgaagagattgccgacaaggaaatggtcatggactcagacaagaaccatgtctcgttgaaggttctcctcgccgacaagaacgtggaaaccaaggataaggagaagaagacaagcaccaaggaacgggtactgtcgttcaggcggcgtacgtcaaaagacaatgtgtcaccggtgaagcctggttcgcccaaggtcggttcgggacagcaagactggaactcccctgccaggttgcctgtcgagaagaagcccaagggaaggaacagcagtgggtgccgtttattgctgctcgtctgtacaatagttgtgctccatttgttgctgaatcatcagctaggga

SEQ ID NO: 50304 - DNA, 501 bp, Setaria italica
  Peptide Sequence Number=SeqID_116278
gaaattcactacaggcccatttctgatggtatcaacatgatatgcagcagtactaatgagggaaagatgcataaggaagaagtgaccgagagccttggttgtcatgagaatatcgtggtgcgtggcacagatgatgttgaagaaaagacgattgaagagactatggcagatgctacatctagcaagtttagtttggttacacctactgacagtgttgaagagaggaaggacgaagaaacaactgcagaccctactttgcttgagagaagtgcagagcacaccatagataatattgacgaaaggaagaatgaagaacctgtttttggatcctactactaccacagccaccatacgcagtataggtgatgttgaaggaaagaaacagaatgaagaaactacagcagatcctagttctggtgaatgacaaacgggacttaccaaggacaacaagaacaaatagacaagaaagacaagaaaaacaaagaaaggaaaaagggaaga

SEQ ID NO: 50305 - DNA, 257 bp, Setaria italica
  misc_feature (56)..(56): n is a, c, g, or t
  Peptide Sequence Number=SeqID_116279
gtggtggagtttcggggcggcggcggcggcggatgcggggagacgagggaagaggngaggagacggcgacggtggttggtggacctggcaggatggaggctgcggcgtcgtcgtcgtcggcggccgagctcaccgccgctgttgccgcccagaggttgctaggcctgctcgctcttgcgattcaagctgtaaacagtggatcagaaatattgaatgaagaccagagggcaatttacaagctacttggcagaatcaaa

SEQ ID NO: 50306 - DNA, 259 bp, Setaria italica
  Peptide Sequence Number=SeqID_116280
cttgaatggttgatccactgctggtaacaccaaagcgaaatggtaatggaaaacctttggtaggcggagagggacggatcgaacgagttcgcgaactaccagccgggatcgctgaacacgacggacgcgctggtcagggatctggacaactacgacatcgtcttccacatcggcgacctgccctacgccaacggctacatctcccagtgggaccagttcactgcgcaggtcgcgcccatcaccgccaagaagccctaca

SEQ ID NO: 50307 - DNA, 374 bp, Setaria italica
  misc_feature (21)..(21): n is a, c, g, or t
  Peptide Sequence Number=SeqID_116281
aatatcaaaattgctgttcanaggaacattacaggaggatatgctgatatgcacaagcctactacacatactagctattgcaattttacaacgaaaataagtaaggtgatccgcgtatgtacagtttgcagtgtttttcttcactgctttgccgctactctgtacaaggaaactgctggttagagctatgcaatggaagtttcagcgttaatgtacaactcctgtatttgactcttccaagacttatgttttccgaaggccccgactccaaactccattattggttgatccttgagaagagaggaagaggagaggcagaagcaaaggagaaacagcagttcttcagttaggcaggagagctaaggtaaggggga

SEQ ID NO: 50308 - DNA, 450 bp, Setaria italica
  Peptide Sequence Number=SeqID_116282
ctccctcgtactcatgaccaccatacatcttgtacacactaagtgcttcaaaatcatgcattaatcgacgacaactttgacacatgccgtacgtcctcgccgttctactacggctgccatgcggcgagctgctggatgttcatggggtagacgacgtcggtgccgccgttgaacgccgccctgccgagcagcacgttcaccctttccgtcgggtggaaggcgtcccagaagatgtaggtgttccggttgaggcacggccgcaggaacggcaggcaggtgatcatgcccccggttctcccgatgccgcagcacccgcggtcgaccacgctgaaccctgcacactcgcagacgacgacagagcacaacaagttgaggcccataatgcatgatcactccatgaacgaataatgtgcagtgctgcgctgccgatcgatcgatggtacacgtacc

SEQ ID NO: 50309 - DNA, 283 bp, Setaria italica
  Peptide Sequence Number=SeqID_116283
ctcacaactgggttcagctccctcgtactcatgaccaccatacatcttgtacacactaagtgcttcaaaatcatgcattaatcgacgacaactttgacacatgccgtacgtcctcgccgcatggcagccgtagtagaacggcgaggacgtacggctgccatgcggcgagctgctggatgttcatggggtagacgacgtcggtgccgccgttgaacgccgccctgccgagcagcacgttcaccctttccgtcgggtggaaggcgtcccagaagatgtaggtgtt

SEQ ID NO: 50310 - DNA, 363 bp, Setaria italica
  Peptide Sequence Number=SeqID_116284
cttgtaaaaacgtagtacagctccatatcattaaactggcgaacatatggagataaccacaccaaccaacaaaataactccacactgatctccttgattcagtacacaggtagtagtactactaattaagagaacaccaatggaccaaaaacaggacactagacacgctcacaactgggttcagctccctcgtactcatgaccaccatacatcttgtacacactaagtgcttcaaaatcatgcattaatcgacgacaactttgacacatgccgtacgtcctcgccgttctactacggctgccatgcggcgagctgctggatgttcatggggtagacgacgtcggtgccgccgttgaacgccgt

SEQ ID NO: 50311 - DNA, 254 bp, Setaria italica
  Peptide Sequence Number=SeqID_116285
ctgctggctgctcgcgccggcgaacggggggatgaagtcgtcgaagcccagaagcttggctgcacacgggccgacggacgcgaagtaaatatgcaaagtagttcttgtcactagctacgaattaactaagctctgttgctgcatgccacacgagaacactggaacaccagaagctccgtcggtgctgctcaccgaggacgtcgacggtggtgaggccgttgctgaagcgccccgtggggccgccggcgaagtcg

SEQ ID NO: 50312 - DNA, 296 bp, Setaria italica
  Peptide Sequence Number=SeqID_116286
cttctccagccagtcatgagggttcttgggcattgcttgcttgcaccactgaatccagtcgaggtgcgggatgcagctgcaggtgctgtcagggttgtctatgcccgtgcatgccatgaccttgtgccacaagcaatgttagcatccagaagcttggttgagcttgacatgagtgcacgaaaggctgcaaaagaagctgctgctgtggcttctggggcaattgtggctgctggcactgatggaaagacaactagacgtacgaagactactaaggaccaaagttacaaaagaccaaa

SEQ ID NO: 50313 - DNA, 256 bp, Setaria italica
  Peptide Sequence Number=SeqID_116287
tgacacattacttgcgtccaaatgaagtcaactgtatccagggagtgtttgcaggatggtacagagtttctttctcatgattattgtgtgtgcgtgccacttgaatattggtgaaagttcagtagacattgcaatgtgtaaaacggtactatgggtggaagagaattggctaaggttgtttccaacttggtgttgtatgttaacttgtttatgttccttgctgcatatagttgatgaatcaacatataaattttgt

SEQ ID NO: 50314 - DNA, 391 bp, Setaria italica
  Peptide Sequence Number=SeqID_116288
aatcacaagcattccatcttgtacctacttgtttatgagtgacaatattgtacaaaatgtaaaaccttatctggatgagcagatgatgaacttacttgaagcagcatgtggaggaaataaatagcatcggtcacacttctcaaaacagcaagtgctgtagcaaaatccccagtttaacactatgcatttattatcctgctctactgataataggaagaagaacagtggatcgatgaaaatggcaatcaggcatgatatcacgaagaattgattccagtgttgaacaggctttgcatgtgggttcataattggaatgcgtgaaagaatttgctcgatctttttcttccatccaccaccataaccataaagaatattatgaagcttaattgtc

SEQ ID NO: 50315 - DNA, 189 bp, Setaria italica
  Peptide Sequence Number=SeqID_116289
aatgtactgttccattgctttttttattaagtttttttttaaattctgacacagtacagtaaatctgttgtgctatgcacttgcctttatgtaagtcatccctcacaaggctccaaatgctttcatatttcagaacgctgctcgcttggacagcgagataatttatgatagggactttgactacgacta

SEQ ID NO: 50316 - DNA, 153 bp, Setaria italica
  Peptide Sequence Number=SeqID_116290
aggtgaaggcgagcgctccgatccgggcggagagagcgcgcgcgagcgagaaagagggaggaggtctcggagcttgctcctcatccgccatggctgacacgctcgccttcacctccgagaggctcctcctcgaaccgagcgctccgatccggg

SEQ ID NO: 50317 - DNA, 224 bp, Setaria italica
  misc_feature (192)..(192): n is a, c, g, or t
  Peptide Sequence Number=SeqID_116291
tgggtagtaaggtgatgggacaagaaatgcatttcctggatcagcaatacagaaactcagtatttccattgcaggagttgcaccagatgtaaccaccatttgagatgggtcgaaaggatactgattcatgcatgatttgcctcatgaatccagcaagagccgtgtctagtataatccaccggaattgaaacngtaacataaaaaagtgttgttaagcaccgaaa

SEQ ID NO: 50318 - DNA, 343 bp, Setaria italica
  misc_feature (333)..(333): n is a, c, g, or t
  Peptide Sequence Number=SeqID_116292
atcgcctttctttcaaatatatccaggcagcacgttttatccgaccatcgtgcgcttcctgcccccgttgcctcacttgagccagcttattctgggtggagcaccactgcttcgaagactttctatacgccgccaggatcttctccatcacatccccacaggatgaatgcatcgaaatcaaagctctctctagcacatataggtccaccgctttgtcctcggggattgttgatgtgaagctcaagaaccaaaaatacaaataaagaaaccaaattagaattagttagactagttacttaagaaattaaaataaaacaaaaataaaattaaaanaaaaataaaa

SEQ ID NO: 50319 - DNA, 177 bp, Setaria italica
  Peptide Sequence Number=SeqID_116293
gcgtccttcttgttctggcggcgcgggtcggcgtctttgtcctcgtcgtcgtcgtccgtgaagaccaacaccgagctccggaagctactcatcgagaccaagagcaagtccatcatggtgttcgaggacatcgactgctcgctcgccgtgaccggcaggcgcgggtcggcgtctttg

SEQ ID NO: 50320 - DNA, 240 bp, Setaria italica
  Peptide Sequence Number=SeqID_116294
gagccagttcggctatggcatgaaccatgactgatcgtgggcttatgattagtctgatactctgatggaaaataagtcatactccctccgtctcaaaacgacatataatttagaacagagggagtataagaaatatgtatgcagtcgcatatttagttgtcaaagcccatgtccatgtactatctgagtgtacgacaaaagtgaagaagttacaatgtgctaattctatgataacagtaa

SEQ ID NO: 50321 - DNA, 489 bp, Setaria italica
  Peptide Sequence Number=SeqID_116295
tcttccttcttcgtcggttctattccttcgtccgttcgtcccttccttctatcctcctctcagccgggccggcgtggcgcgaagatccattcggacctggaatcagttcctcttttttctgctgagattgaagattgttctcgaaaatggagatacagacttcagggaagcccattgatttgctgatggagaaggggcccctccactgcattctgtcttctctacaagttcttcaccatgaagcttactgtcaaacagatgcacggtttgttgaagcatcctgactccccatacattagagctgtaagtttctgtgccctgagtatgcttttttgtgaatgtcttgcttcatggtgccatttctattattaggcatgaggttagtgcatgaatcaagctgtttactgggatattttagaactcaactaaacagtgtttttgcagttgaaaaagtagctttatatgatctgaagcaataattcttgcttt

SEQ ID NO: 50322 - DNA, 389 bp, Setaria italica
  Peptide Sequence Number=SeqID_116296
caatactcttgctggaaagaagctaggaagaacttctcacttggtacaatactactttgatagtctcctcccaagaattcctcttccagtaactcgtcaggtaacagccaatcttgagaagatgaaattgcccactaagctttctggtgcgactggagactccagtcgtcagggatcagaagatactgcacgtcgccctccttctgtgaaagcctctctgtcagtttcctttggacagcgtgctccacatcgggcttccaccagagattcatcccctgttcgacgaaccatcacccatgatgatcctcgaagatcatactcaccatctcgtcgcagtggtagccgtgagggtcctgaccgtgatcgttctagtcgcgaccgggaccatt

SEQ ID NO: 50323 - DNA, 244 bp, Setaria italica
  Peptide Sequence Number=SeqID_116297
cggtaagcagagatgtcgctagggcttgagactggagcaaggaggaggagaggagcgcacagataaggaggagtcgaagcaggagcaggagccgaagttggagtcggaacgagcagcgatccagtccattcgggaacggaaataaggagaaggctgcagtctcaagcaacctagcaaagctgaaggacttgtacggtgacattactgagaagaaggaagatggcgatgctgaaaagcttcgccg

SEQ ID NO: 50324 - DNA, 370 bp, Setaria italica
  Peptide Sequence Number=SeqID_116298
aaaaagaagggtaaaataatgacaactaattaaacatcatatatgcaaatatcagtggatcaaagaaagagaagaaataattctacttttgcatttgagggaattcccaaagttcgtttctaagtgctctctgagataagacgaacttcatatagatcatcaccaccttttccaatttccgccttaatcccaggtccaaaaaaggaggtgaattttgcctgcagacaaataagtgcaaggaatcaatgcctgcagatccaaactgcttctaatatttctatactttacacagcgtcagtattgttttgtacttcaggccaggtatataaaggaggcagtttcacctgtctcttctcaaaatcagacagcc

SEQ ID NO: 50325 - DNA, 263 bp, Setaria italica
  Peptide Sequence Number=SeqID_116299
ttaacatcatatatgcaaatatcagtggatcaaagaaagagaagaaataattctacttttgcatttgagggaattcccaaagttcgtttctaagtgctctctgagataagacgaacttcatatagatcatcaccaccttttccaatttccgccttaatcccaggtccaaaaaaggaggtgaattttgcttcaggccaggtatataaaggaggcagtttcacctgtctcttctcaaaatcagacagctccaatgctttggcttc

SEQ ID NO: 50326 - DNA, 144 bp, Setaria italica
  Peptide Sequence Number=SeqID_116300
tttgtcattgcaaagtgtgtagatattcaggtaattttgctgttagagaggtgttctttatcggagtggtgatcctctttttaaaacaattaaggtagtgctggacaaataccgaatacctacctaccaaaaagaactagttta

SEQ ID NO: 50327 - DNA, 347 bp, Setaria italica
  Peptide Sequence Number=SeqID_116301
atgatccaaatagtttggccgaatctttgacaacacattcacatacggaacagtagtatccagcctgctgattcaatggtgcaattgggggtcaccacctgagtcttgcccagacgagactcaagatcaacttcatagtctctgtgcttcaaaggctgtctttgcaacaaagaaggggacccccttttaccctttagacccttttacccggggacttacaataccttactacccgttagactaccctactagtacgaagactacgactaccaaagtaactacttaccttagtacaaaacttacctaccgaagaaagtaattagtacgaacgaccgaactaggaatta

SEQ ID NO: 50328 - DNA, 150 bp, Setaria italica
  Peptide Sequence Number=SeqID_116302
caatggtgcaattggggtcaccacctgagtcttgcccagacgagactcaagatcaacttcatagtctctgtgctgcaaagacagcctttgacaacacattcacatacggaacagtagtatccagcctgctgattcaatggtgcaattggg

SEQ ID NO: 50329 - DNA, 438 bp, Setaria italica
  misc_feature (386)..(386): n is a, c, g, or t
  Peptide Sequence Number=SeqID_116303
cggcgcgggacaacaagaagaaccggatcatcccgcggcacgtgctgctggcgatccgcaacgacgaggagctcgggaagctgctggccggcgtcaccatcgcgcacggcggggtgctgcccaacatcaaccccgtgctcctccccaagaaggccgccaccaagtcgcccaagaaggcggccgccgcgtaggccccgagcggatggtggtgccctgtctctcgctctctccctgtccgctctgaactgaatgctccttcctagctgtcgtcgtcgtcatgatctttgctgcttgtcgtggttgtttgtgtgtaactgagtgcctttcgctcaatcagcatgcactgtgtaaggttgacactggtctagggtccgatctgaaaaacncttgttaggttcgaaggagtgtgtgtgaactctgaagggcaggtggaggggt

SEQ ID NO: 50330 - DNA, 318 bp, Setaria italica
  Peptide Sequence Number=SeqID_116304
aagaagcccggtctcccgctccgtgaaggccggcctccagttccccgtcggccgtatcggccgctacctcaagcagggccgctactctcagcgcatcggcaccggcgcccccgtctacctcgccgccgtcctcgagtacctcgccgccgaggtcctcgagctcgcggggaacgcggcgcgggacaacaagaagaaccggatcatcccgcggcacgtgctagactaggacgaataccgacaaacgaacgaaggaagaactaacgggaaaagaactaagaactaaggaaccggaacgtaacaaaccaaataacgaacgaa

SEQ ID NO: 50331 - DNA, 272 bp, Setaria italica
  Peptide Sequence Number=SeqID_116305
ggttccgccgcgtggtgcgcggggagcagcaggtggtgtccgggatgaactaccgcctctacgtcgacgtcgcggacgcggggggccggagcgcgccgcgcccactgagtcaccgctcgtccatggtccattccggcggcccgccgcggaccggcacggcggccggcgacgacggcgtcagtgcccttctctcctctcctcccggataattatatctagctaatactattactagcggtatatgttgcgagcgagtaagcgctgcgttttta

SEQ ID NO: 50332 - DNA, 271 bp, Setaria italica
  Peptide Sequence Number=SeqID_116306
gattgggtgggggcttgggattgggtcgagagggggggcaacggtggggagatctgggagacgtgactgcggttccgccgcgtggtgcgcggggagcagcaggtggtgtccgggatgaactaccgcctctacgtcgacgtcgcggacgcggggggccggagcgcgccctacgtggccgtcgtgtacgagcagctctggaccagcacccgcgagctcacctccttcaacaaggcgcgccgcgcccactgagtcaccgctcgtccatggtcca

SEQ ID NO: 50333 - DNA, 397 bp, Setaria italica
  Peptide Sequence Number=SeqID_116307
cctaactggaaatctgtatagcaatcaaacaaacacattgccatgagttacctcatagccagcatggcttgtataaccagagtaggctgatcgtgaagctgcagtttctctagcataaggatgacgatctattggatggatatcatattctgcagttctgtgagagcataaaatagaactgaaattaggtacgagctaagccagatctcaacagtaccacataagtgttatagacggtcatggccttcattagggcgaagccagaaaatttccataagggggcagatagtaataactaagttaattaggggagccaaaatttaactttctttgttttatatggtaaaattttgtgtatacatatgaggtgcatctacccaagaattggggcccttgt

SEQ ID NO: 50334 - DNA, 266 bp, Setaria italica
  Peptide Sequence Number=SeqID_116308
ttccgagaggtaagattgttcttattgccttttggcaatttatgtggtgaacctgtatctataacagccttccctgtgtggcctttttccttcttagatgtagtagcaccttctgaagctgcactactattgaccttcaaaccacttttaggccgagcaagacaagcagacaacttgaagcctccatcaacaatctttgtattatttattccttccacacaagctaatgcactcttgctaggaatagaagaaattaacaaaacaaa

SEQ ID NO: 50335 - DNA, 254 bp, Setaria italica
  Peptide Sequence Number=SeqID_116309
taccccaaaatcaggcaaataagactaacaataagcaacaaattgaaaaggaaatgaaaccttcgctgatcatatgcatggttgctgtgaactcgacttgtaggagggatgaatccagcatgaggttccagatcagaggcatatgctttagatctcgaacttctatccacattactattgttatgtgctttcttcagtggtctttcatttatatagattattttttattcctgcgagattttcctttttcccta

SEQ ID NO: 50336 - DNA, 248 bp, Setaria italica
  Peptide Sequence Number=SeqID_116310
atgagggaggagaggaactcggtgagcgcggtctcgtcgtcgtgccgcccgtccccgcctccacccacaggcccgcccatgcccggagccatgcccccgccagggcctccgcctccaccgctgctgttgctgcccatcatcctcacgtcccgccgcctcgctgccctcaccgcacgagcagctggtaagatccgacggttagaatcgcgcagatcgctgagaagaaaggcgacggtcagcgctcaccg

SEQ ID NO: 50337 - DNA, 446 bp, Setaria italica
  Peptide Sequence Number=SeqID_116311
attgagattgagagaactaatattattgtaaaatctgtcttgtaagaaatattgttaactgggcaaagtggaagttatgggccttcaacttttttccggagagatgatggcaaatttttaagacaaatgtaacatgtcattaaattaaaaaagttgatattcaggctagtacgtgctacgtataagtaatcacaattacaaggagtctaggaccaaaagcaaaactatttcataagagaaacaatgtgcctagtattgctggcattcaacaaaaagaaacaacaggaagggcaaacttctagaaacttatgaccctgaaaactgagtaatttgaagaaaacaaagcatatccaaaatccagcaaatggctatcagattagaattgaaacgatgcaaaaaaaagagtaagtatcacttcaaggaaataatgttcatatccatttgtc

SEQ ID NO: 50338 - DNA, 322 bp, Setaria italica
  Peptide Sequence Number=SeqID_116312
ttgtctagggtctttcttccttattctattactatttgtcttcctattcacggcgatcatacccaggataacgtccacgccgattgtaatctggactgtagtcctttcggtaccttgggctaggtgagcgcatgtaggggttaccgcgacgcctgtcatgagcaccttgcttggggctgccgtatctgtcatccctctcattgtcatcatcccggaaggcatattcaactgtgatcaccctgtccaatattgtgctgcaagacaaatttgatgtaaaaagaaagggactattcactgaggctaagctctgctgtggttaagg

SEQ ID NO: 50339 - DNA, 263 bp, Setaria italica
  Peptide Sequence Number=SeqID_116313
ttttgcgatccttgagtttgtggcacatactttctgtaaaggtagaagagtgatgaagtgttgttacactcgttgctttcaaactgcatataaatgttaagtaaaaggatgtcaccttatgttgttctcggcaccaaaatccaacaagagctttccattgaagttcattcactttgtttggtttcccatttatgatttcatctagatatctctcttcacgattgaaatattgtttcttcaactttgatttgtaggatcaccta

SEQ ID NO: 50340 - DNA, 260 bp, Setaria italica
  misc_feature (6)..(6): n is a, c, g, or t
  Peptide Sequence Number=SeqID_116314
tggganagtacacattaccaagtgagtgtgcagggctgtgatcatgatgactttctggttctagaagtccatcttcattatcatgtagatctgctaccatttccttgatgaaatcctcttcaggaaacttttttaacatgaaaccaagctagtgcttcatgaaaccacccatgtgttgcatcttattctccatttcatttactttctcttggtatcttctttcattattgcatccactttgtgggtagtgtatctgccat

SEQ ID NO: 50341 - DNA, 409 bp, Setaria italica
  Peptide Sequence Number=SeqID_116315
ctcttggtatcttcttcttccttagtttgatgacaaagttaaccttgagacactcgaacttcactctagtacttatcatcatagtacctatgtgcttttaactcctttgcaactatatcattgaacacctcattaaaatcttgagctgaaagattaccattgttgttttgttgccttttttctaattcctcatatgttgcattctataaacagtggaaggtcacagaatggtacacaaaatttcagattgaacataaatgcttaggattagaaattgtaccattattgcatccactttgtgggtagtgtatctgccattctttttcttatgagcaacctcccataattctagcctatgaaccttccttttctggttatcttccatctcttttttcagcttagcatggct

SEQ ID NO: 50342 - DNA, 240 bp, Setaria italica
  Peptide Sequence Number=SeqID_116316
aaataagtactttttggatctcaggtcattcgcaaatttctgaatcgagcgaatcttctcctcaaacattgggtggtttaacatcagcatcgtattgttgttaacgatagccttaactgctagctctttagcttctgcatgtttccttttcaataaaatgcatatatcttcaagctcctttctgcaagtctcagctttttctaagttgccatcattttctaacagcataggcaactctag

SEQ ID NO: 50343 - DNA, 450 bp, Setaria italica
  Peptide Sequence Number=SeqID_116317
ccgctactgacaggctgactggtgtttgtcaaagcaacctgagcatcaggaaaccatctttggaagtctgtccaactgcctcttcatgaatttcactgctctcggagtttattgtgcttgcatgtcgggattcttctgcactttcgaggcgaagtaactcttgcaagcttatcttctcactgggatcgcctgcaatgaaagaagtagtagtccgatcttcaagatcatactctttaccagaagagtgttgtttctcgttgtcataatcaggagcaaagtcaactgggacaactgcttctggctttagttcgtgcatgtattttttagaatcatctttcttcccatatcttatgtcactgtttgcagggatcatttggcaactgaaatttggggatgaccttttatctactggtttttcttctgaaatcttcctatgaagtattgcccctt

SEQ ID NO: 50344 - DNA, 454 bp, Setaria italica
  Peptide Sequence Number=SeqID_116318
ttagtttaactttcttttgttcttaagtctttattctttcttctacttgggtattcgtccttgcaatgcaagaagtagtagtccgatcttcaagatcatactctttaccagaagagtgttgtttctcgttgtcataatcaggagcaaagtcaactgggacaactgcttctggctttagttcgtgcatgtattttttagaatcatctttcttcccatatcttatgtcactgtttgcagggatcatttggcaactgaaatttggggatgaccttttatctactggtttttcttctgaaatcttcctatgaagtattgccccttcatcaacacagacatccttgacaaaattaccaccataattatcagaatcaacagtaatctgccaattttatctccatgacatctttctcataagaaacattctgaagtgtgacgtttccacttatctgtaccg

SEQ ID NO: 50345 - DNA, 192 bp, Setaria italica
  Peptide Sequence Number=SeqID_116319
aagctgcatcatggcattcagacatcgttcctgagcaaccgctggtattctccttacttgatgtaccgctactgacaggctgactggtgtttgtcaaagcaacctgagcatcaggaaaaccatctttggaagtctgtaagaataacaaagctttcatgaagtatatgcatggaagaacttaccactaatttg

SEQ ID NO: 50346 - DNA, 147 bp, Setaria italica
  Peptide Sequence Number=SeqID_116320
gaaagaaacatccttgggatctcgtttgggtccatggtatttccttccgcctcgcgcgtgcacccaccgtggaaggagctgaattccgcgggaagggatgcgaagggcgaccgcgatggatcagaatttacagcagatgagtccttt

SEQ ID NO: 50347 - DNA, 235 bp, Setaria italica
  Peptide Sequence Number=SeqID_116321
cctgcattctctttatctccaggtccctttccatcctctctttcttctcgtcctggtggagagcgatccagacgtggaccctgtccatggactgccagaagaggaacgccccgaaggtcatcgcgaagaaggtcgccacccgcaccatcttcttcctcttctccgatctcctcaagccctccaccaccaccacccaccgttccggcgcggagaccgcttcccttcccccaccccg

SEQ ID NO: 50348 - DNA, 426 bp, Setaria italica
  Peptide Sequence Number=SeqID_116322
gtactgctcttcaccgtcttctgcctcatcatctggggcgccgcgcggccgtacgagcccgaggtcatcgtcaaggtatacacattcatacatcctaggagcatcggagactgagcttaattcacttcttgagctgttgagcatatggaatacttgttcctctttgttggtttctgattcagccaatatctttttggattggaaggtcggtaattaaccccctaatcgagcaattgacgatcaattactaaaattgactcatgcctcactgttcctgcggtaggcgagaagggttacatcatcgaattggttggtggttcagttagacagtgatgtgttggaacttaatgaggaatgagtgaggaatgcagattgggatttaacagtagcaacttggtttgttgctcatgtgcgcgcgtgtggtta

SEQ ID NO: 50349 - DNA, 298 bp, Setaria italica
  Peptide Sequence Number=SeqID_116323
ttcgtactgctcttcaccgtcttctgcctcatcatctggggcgccgcgcggccgtacgagcccgaggtcatcgtcaagagcttggtgatggacgacttctatgctggtgaaggcacagaccacagtggggtgccaaccaaattggtcacgacgaactgttctctgcacatatccgtgtacaaccctgctacaatgtttggaattccaaacattgtagcagggttgtacacggatatgtgcagagaacagatgaatggggccagaggtgacatgaattccaaacattgtagcagggttg

SEQ ID NO: 50350 - DNA, 485 bp, Setaria italica
  misc_feature (391)..(391): n is a, c, g, or t
  Peptide Sequence Number=SeqID_116324
taactaaattaacaaagaagaatactacaaatacgacggtacggaccaagcttcgcaggtactaccaaccgaggaagagccaccgtatggtgactgcggtcatccacggcgagaaggtacccctctacggcgccggtggcagcctgatgctgtccagcacaggcggggcggtgcccctgacgctggacttcgacctgacctcccggggctacgtgatcggcaagctcgtgcgggtgacgcacaaggtgcacgtgacgtgccccgtcgtcgtcgacgccaagaagaccaagcccatcaggttctccaagaaggcctgcaccgtgtccaaggcctgagcttgagcatttttcctgaatcgtggtcgacggacaagtgtgtattcttgcaaagntgcatgtatttagctatcgtgttgatgatgaagaacaataagcacacgcatatggttttgtttgaggtcctttttggttttgtcgataaatggc

SEQ ID NO: 50351 - DNA, 252 bp, Setaria italica
  Peptide Sequence Number=SeqID_116325
gggaggaggcgaggggaatcggtgtggaagggaaggtggttgggagggagttggagtggaggggcgagttgtgaaggtgctagttgagaaaagcgtctcatcttctgctcaggagctctttccaaaagatatttcgctagttctgaatgttaagaggcctcttttggacaggatatcaagatgcacaggggcacaaattgcctcatcagttgacagtatttcttcagcaaggctaggtcattgtgaattgtt

SEQ ID NO: 50352 - DNA, 381 bp, Setaria italica
  Peptide Sequence Number=SeqID_116326
ccccgggaggagctgatagggaagggtctggggaaagcgtcatgcttttaggaggaaaggcttaactactgggtgtaaatatggttttgcgtgcttcaaatgaggaaagttcttgctttgagtagtagaggcgttgcatctgtttttatggaaaattcatggggttcttggctgtagaacgaagtaattgctgcagttctaagctaaaatttatgctgtttagtggttgctggttgccagctcatctcattaatttggtcttgttgcagagctggtgagggagcaggagagggcacttctcgcgtgaggatgggcaatctgcagcagctgcagctctactattaggatttgatccttctgacatggctggaggggcgtcgg

SEQ ID NO: 50353 - DNA, 206 bp, Setaria italica
  Peptide Sequence Number=SeqID_116327
caaaataactacagtcactacaaacaagaaaggatattgcccgtgttccaaattacacgtagaaaacctgaaagaaaccccagtgctgacaggcatctccgaggttcgcgagctcctcttccgaggaccgtgggtcaagcaacctgctgaggtcgacgaccgggatggcgcggccggcgacgacctcctcggcggcggtctcctcc

SEQ ID NO: 50354 - DNA, 267 bp, Setaria italica
  Peptide Sequence Number=SeqID_116328
tccagcgggaggttgaagaactcggtgatgtccctcttcacgtcctggagcacctcgtccggcacaccgtggttgacgagctgcaggcagtgcgttctgaaagaaaccccagtgctgacaggcatctccgaggttcgcgagctcctcttccgaggaccgtgggtcaagcaacctgctgaggtcgacgaccgggatggcgcggccggcgacgacctcctcggcggcggtctcctccttcctgacgtaccggtcaggccacccgctccg

SEQ ID NO: 50355 - DNA, 253 bp, Setaria italica
  Peptide Sequence Number=SeqID_116329
cgattgtgtggtgtattattacagagtatgctaagggtggttcagtccggcagttcctggcgagaaggcagaacaagtttcatgaagtccatgtactccatggatttgtaccgtgccccgccgctgtctttcttcaccagctccggcagtgggccgatcgtcgtgtcggggcacggctgatggaacaccgccgccgagatgcggtctttgtcagggtggaccacggccctgtgctcaatgcttctgtatctcc

SEQ ID NO: 50356 - DNA, 257 bp, Setaria italica
  Peptide Sequence Number=SeqID_116330
ttttttttttttttacaggaaaaatggtttctttgtttattcaagaggagcagcaacttactgtttttgcataatacaaatatgatatgcccacacccacgctccatttgtaaatctagacgtagtgatgttgataacctgtagaagacaagcaccaaatgtattatatatacattcaaggtgtaataaaaacaagtgcacatatatgtacattcaccgttgcagtaaatatatagtacattgtaatacaaaaaaaa

SEQ ID NO: 50357 - DNA, 242 bp, Setaria italica
  Peptide Sequence Number=SeqID_116331
actttggttcagactcatgtaccgtgttcagactagcagagttttagctcagagaattcgttaaggtccaggtctcatgtctgactaatttcagttctcaccgaaatttcttttgccgtgcagttgaagaggcgctggaccacccgtacctggagcgattacacgacatcgctgacgagcccatctgcacggatccgttctcgttcgacttcgagcagcaggctctgactgaggaccaaatg

SEQ ID NO: 50358 - DNA, 324 bp, Setaria italica
  Peptide Sequence Number=SeqID_116332
actcagtgtgagtagtctcatcgatggcctcaaggcgtttgatggggagcttgtctaggtccagcagcacgtccccttcaaacgccttgaggccatcgatgaggctggcaacgagcactatccaccggataccagcaacaaggagcagcaccttgcagccatccgccggattgacttctcctgggtcatcgagaaggatgctaagaaggccaagaaagcagctgaggccgacaccgctcagcaggcatggccgtggcagggccttatggagagcctgcagcaggcgcagcaggagctctctgtcgtgattgacctcatttgctt

SEQ ID NO: 50359 - DNA, 259 bp, Setaria italica
  Peptide Sequence Number=SeqID_116333
gtggctggatctcgtcggagcggcggcggggcagtaaccgaagagaggaatggaagggtgcgagggggaaggaaggaatgaagggcttcatgtttgatttagttgatagttatcagttagacacaacaacgatgcctcgcgtatcaccattgtctttagttccaattgatcaagactcttcaggcactttatctgttcaaattccgcagaagtctttccgttcattgagccttcaattttatggagacactgccaataa

SEQ ID NO: 50360 - DNA, 229 bp, Setaria italica
  Peptide Sequence Number=SeqID_116334
cagtctcagccatatcaaatacctgctcctcaaatatggtgatccgtgacacatttacccaatctcaaggcatcaatgttactggaatgtgtgaagattttctccaattagcaattggccaggagtgttcattgtgtcttttgcttgtgccctctggacagaatagtgactccgagtccatatgatcttcctgacctactgtttctagaagtacaactaattactagta

SEQ ID NO: 50361 - DNA, 263 bp, Setaria italica
  Peptide Sequence Number=SeqID_116335
ttataggattttgtgagaatatgtgctaataactttgcttcagttaatttgcacctgtcttttgtaggtccttttatactgggatcagtatccatttgctgatggatgatggaactttgggtccagagaaagcggttaacggatacaatgataatgcaaagattaattttgtaggatggtaactttcccatcataattcaaagattcgttattttagtatgcaaaagagttacagcatgctgttttttatccctaatcatgtt

SEQ ID NO: 50362 - DNA, 245 bp, Setaria italica
  Peptide Sequence Number=SeqID_116336
gcctccattgtcagaccttgctaaacctgataaaataacttgctggtatacggattgatccaagttctaacacaaggagtcgaatgtccttttatactgggatcagtatccatttgctgatggaatagaataggaactttgggtccagagaaagcggttaacggatacaatgataatgcaaagattaattttgtaggatggtcaccagatggtcagcacgtggcattcactgtgcgctatgaaga

SEQ ID NO: 50363 - DNA, 218 bp, Setaria italica
  Peptide Sequence Number=SeqID_116337
aaaacttctagcgactatggcaatttgagtgttaaacattcatctcatcaatgatacagtttacatgattgatcgcacgaactagtagcatagctcttcgcctgtctagttttgtaacatcatgttataaaactagacaggcgaagagctatgctactagttttgtaacatcatgttataaaactagacaggcgaagagctatgctactagttttgta

SEQ ID NO: 50364 - DNA, 251 bp, Setaria italica
  Peptide Sequence Number=SeqID_116338
cgattaaatggatgtacaaattgcagaatgtagtcttcattctctctgacagtcccatacaaccagcacaagacctcatcggcaaaggccaggcaaacaccaccctgccagtagttctttgccttcaccttttgtgtaatatctttagttcttagtctttctgttcgcacaagtatgccagcatcattcctgaatcccacaacaacataaggaacaccagccaggaatgattgaatccaaaacctaagtag

SEQ ID NO: 50365 - DNA, 453 bp, Setaria italica
  Peptide Sequence Number=SeqID_116339
taaagtaaataagttaagaaacaaggaatagtacgaattacgactcgatcggcatcacaaaaaatgccttctctgcgggttggaagcctctctagctttctcaatgtatcgtcacctttagtgaccctcccaaatacagcatactggccatcaaggtgtggagcatcgccaagaagaaaggagaaggatgaaccgccgctgtctggatcagagtgccttcccatggataggattcccctgacatgcttgacactactaaattcaccaacaattgttttctctgcttctcttttctgctcctcattcattggggcggttctacctcctacaacagcagcaacttgtgccacaaaaacccttgtcgaccctgaagatatgatttgtgttgtagcatccaagccgcacgagtttgaatatgtggtcaacagtcttaggcgcaacatgaggaaagaa

SEQ ID NO: 50366 - DNA, 240 bp, Setaria italica
  Peptide Sequence Number=SeqID_116340
taaaggcatacagcatgcacattcagggagcaattcactttccatacagtccgtgctgtgcctcagccatcagccctgcgttgcatcaaaggtaaaaaaaattataagggcaggcagtttgtattgaaaatttcaaagattggtgttgctcatgcatgcttgagttaaccaagcaatatttctggtgcggttcaaaagaaacgattcgtttttgaggtattcacctactgcacttgacaa

SEQ ID NO: 50367 - DNA, 260 bp, Setaria italica
  Peptide Sequence Number=SeqID_116341
cagctggtttttgtaccttgggctgcgatccatggtcggagcaaagaaaccctgacgacacctgccaataccatccctccgcacctttatttcatgacggcatgaaagagtggagctgctgcaagcaacgaagccatgattttagcttatttttggcaataccaggatgcacaacagggaagcatacgactgaaaaaccagtcacaaaagctgtttctgcaaaccctcccaaggccacaccaatccagtattctaagcaa

SEQ ID NO: 50368 - DNA, 230 bp, Setaria italica
  Peptide Sequence Number=SeqID_116342
catcacaattacagtgactaaatacagactacaagaaaatgctactctgaatagccatatagcatcacaatttcgttcagtaggttcgcacatcttggatgcagaggctgttgacagacaatgagtggatcatggagctaatgcaccaagatctacacggaatcaggaaagaggaggagagggtgagggggaaaactcacatatgctagccgaggaggaagagggtctta

SEQ ID NO: 50369 - DNA, 316 bp, Setaria italica
  Peptide Sequence Number=SeqID_116343
taaggttactaattacttaacgttactttagttaacggttaacgttccgttcggtcgttcctaggtattccggtctagtcttccttctagtccttctaggtctagtcggtccgttacctgcggctcggcgtcaaagcgcgaggctgcaacggcctctcttacacgctcaattatgccgatgagaaggggaagttcgatgagcttgttgaggagaaaggggttaaagtgcttatcgaccccaaggctttgatgcatgttatcggcaccaagatggattatgttgacgatccattgaagtccgagtttgtgttcataa

SEQ ID NO: 50370 - DNA, 244 bp, Setaria italica
  Peptide Sequence Number=SeqID_116344
ggtgggcagccccaccgggcggaagagcacctcgcgcatgccgccgcggcggtgctcctccgaatgaaccgcgcccgccgccgtgggtgaggtcgagcgtgacagtggggaagggcgcggacgcggagatggtggccatgctggaggagcagggcagcacggcgcgcgcgaggaagctgttgtcggcgctgggcatggagcccgagagcagcatggatgcggcggcggaggtggtggaggccag

SEQ ID NO: 50371 - DNA, 450 bp, Setaria italica
  Peptide Sequence Number=SeqID_116345
aaccgaaagtaagaacccgtaggactacgaacgaccgtaggaccgaccgacgtacgaaggaaggaatcagcggggaggtggcactggtggtgggcgagccagcgtcgctgccggagccccacggggttttcacatgcacggccaggatcgagtgggagtacggcggcaagtgcacctccatcttggcaccgtgcgacgtcagccgtctgcagtgtgagtccagggactacctcttcacctggaggttccgcaccgtcgacgccgacgcatctgttggccgccgctccggcgagacgagcgataggttaggagaagttttgtaccgctcttgcgtcacgcactgcggtgtgccaaaccaagtgcacaggctaagctgcatgttaaaaactagatcaacttcatcttttgcaaagtccatagaatgtagacccagttctgaaatctggagta

SEQ ID NO: 50372 - DNA, 381 bp, Setaria italica
  Peptide Sequence Number=SeqID_116346
ttaattgtattattttgcttcctcaacctaattttctttgttacttattcacagactgcttgcgatgagcttcgaagcagcagactcttccttaagctacttgaagcagttctgaagactggcaacaggatgaatgttggcacaaaccgtggcgatgcacacgcgttcaagcttgacactctactcaaattggttgatgtcaaaggcactgatggacacacaacccttctgcactttgtcgttcaggagatcatccgaacagagggcgcccgcctctctgccagcacccaaacaactcccaagaacccaagcaaatcctctacgagaggagcacgagtgcaagaagctcgggcctccaggtagtggctggccttgcaaacg

SEQ ID NO: 50373 - DNA, 460 bp, Setaria italica
  Peptide Sequence Number=SeqID_116347
cagattgctgtcaagaggttaatgaatacaaagaatggcacagaagtggaatttgcttcagaagtcgagatcttgggaagaataagacacaaaaacctcctgagtttccgtggatattgtgcggatggacctgaacgcattctggtgtatgactatatggcaaactcaagtctctatgcacatcttcatggaccactttcagcggagtgtctccttgattggcggaggagagcatctattgccattggtgctgctcgggctctcttgtcagtaaactgtcttattatctttgctcataacggaatagtgctgataattatactttgttgcttttaatacactgtcatacatagctcacaagtgctttcttacaggtatcttcatcaccatgcaacacctcagataatccatgaagcatcaaggccaccaatgtgttactggattcagacttccaggcaca

SEQ ID NO: 50374 - DNA, 375 bp, Setaria italica
  Peptide Sequence Number=SeqID_116348
ggaaatttttaatctccatgccatgtgatgttctgtagattgtgctattcatatgtcgtaaccagcaatcttcatcttttgatcggtgttcatgtctcatttaaaaaatctgtattatgtggagattgatatcagaactcagaccaaagaatgcacagttttttttaaggtaagaatgcacagtttttttttaaaggtaagaatgcacatattagccattactgctgttatgaaatttctatatgggccacatgatacgaacccaaatattaggcccggcccggcccatatggtccatacttggcgcagcccaaaggaaatctataagcctctgactcggctcttcttaccttactacctttacctaccctacca

SEQ ID NO: 50375 - DNA, 490 bp, Setaria italica
  Peptide Sequence Number=SeqID_116349
taatagttacagtgctatatcgtcattgctacatgtccttttgaccttttgtttcacaatcgctgaaactgctcataattttggcacaggatcttcggaggaaacttccagttacccgaaccctttttccatggcataacacattagccttcagtctgacgagagacctcgccaaagaactagcgctcggaaaatgaagtctgcagactatgtcaccagatagcttcaagtggaaattttatctccatgccatgtgatgttctgtagattgtgctattcatatgtcgtaaccagcaatcttcatcttttgatcggtgagcttcaccgcccgtgtaaatcaagagaacacactttttgtggagaattgcatttcctgaaaatatacatccattcaaatttcctccgtctgtcatccagaagtaaaatcttgccctctgcaaggcttctatagacgtgtgtttgtttaatcaccattgccatggattattac

SEQ ID NO: 50376 - DNA, 234 bp, Setaria italica
  Peptide Sequence Number=SeqID_116350
tgccagtcatatttgctttcaagaagactggaggaaagccgcaaaatagaagcgcaaatatctaaactgatacagttactattctccattagagcattaattacaccagtagtgacctagaagagtagatgtcagagattgtaatgcatggaactacaacaaagagggtagtcgagagtacagacagcaaaatccaatattctccatgtagcatcaatagatccctttatatca

SEQ ID NO: 50377 - DNA, 250 bp, Setaria italica
  Peptide Sequence Number=SeqID_116351
cgtggttgaggtatgggatgcgactgcatcagatcccaagttacttgtctatctgaagtcctacaggaacacagtacccgtcccaaggcactggtgtcagaagaggaaattcctgcagggatgatgtaacaaccttggagcaagagcttggtgatactgtacttgagtggtttctatagtatggattttagtgtgtttaatctagttaatttaggtgaggcatcgctgagattatgggttttgctaggat

SEQ ID NO: 50378 - DNA, 366 bp, Setaria italica
  Peptide Sequence Number=SeqID_116352
cactgggggagacttagaggaggaagaggaggaggaggaagaggaggaagaggaagaggaagagccgatggaagacgaagacatggaagagggcatgcaatctgttgacaccatttcaaggtgctcgcatattactttctttgattgatttagttagttttcttagggatatagaactaggccttgatgcttcattttgaatagcactcccactggcgtggaaacacctgatgttatcgatcttcggaagcttcagaggaaagaacccgaaagacaaacagagaagcagctataccaggttcttgagcagaaagaggaaagaatcgccctgggacactgtacggatcaagccacacgtatgtgctc

SEQ ID NO: 50379 - DNA, 239 bp, Setaria italica
  Peptide Sequence Number=SeqID_116353
aagagctcgacttcggcagacgtcgctcgtcgagaccatggcgagaagagatgcctgtttgcctgccttcatcatctataaatgcaaagaaaataagtttttacccgtctgcgccttagatgttttagatcgtatatgcgtgcgcgcatggatgaatgcttgtttcgccggatgattgctgtgttttgttattattaccttgttgtcttctttctattttcttttcttagttcgttctt

SEQ ID NO: 50380 - DNA, 217 bp, Setaria italica
  Peptide Sequence Number=SeqID_116354
gaggtcaaacttagggaaatgaagcccggtgttctatcccgagaacttaaagaagctcttggtatgcctgatggtgcgccacctccatggcttataaacatgcagagatatggcccaccaccttcctatcctcagctgaagattcctggcctcaatgctccaattcctccgtacaaggggcgcccatgctcattcaactaggtaggtttttccccta

SEQ ID NO: 50381 - DNA, 159 bp, Setaria italica
  Peptide Sequence Number=SeqID_116355
ggcgtttcttggtcgggggcaggaggatttgggaggaagacggaagggaggggaagacggagacatggaagagggcatgcaatctgttgacaccatttcaagcactcccactggcgtggaaacacctgatgttatcgatcttcggaagcttcagaggaa

SEQ ID NO: 50382 - DNA, 231 bp, Setaria italica
  Peptide Sequence Number=SeqID_116356
cgcacactgatgaccttcctaggacgcatggcaaggatacgatgctgtgaaattacaccttttctttctcgttctcgtacatcagacaattgtgagctgccagttccatgggaagaaaggttaagcgagaacagccttctttagaagctgtggagcagaaggtgcgtattccccagcttctaaagaaggctgttctcgcttaaccttttctttctcgttctcgtacatcag

SEQ ID NO: 50383 - DNA, 215 bp, Setaria italica
  Peptide Sequence Number=SeqID_116357
ccatgtattcttttgattccatgcattggttaagcaccttggtgattcttgaactccacttccaatgaacccgaacaaactgactataagatacacgctggctgttagggtatctgaagtatacagcaaaacctggtttgtttacacattcacgctcatacacagattcatcgctctcaagggttagaataccttccaatagtaggccatcttta

SEQ ID NO: 50384 - DNA, 318 bp, Setaria italica
  Peptide Sequence Number=SeqID_116358
acttaaaccctaaggttacatgacctgagtgagccatgtttcagcaatcctactgtacaacaaatagcttcatctggattgcctctagaaattgtatacctactgatctccagtgattgactcccagacctgaatgctggacagaatatagacattagcagatgccaaacatcatgcccatggtttggcataacaaatgaactgccttgtcaattgtcatcttcagcaagtattgactaatctgactcattacatcaggtcaacaaagatgaggatctgtgcttctgattgtcagaagtgtaatgcagcttgatgtcg

SEQ ID NO: 50385 - DNA, 209 bp, Setaria italica
  Peptide Sequence Number=SeqID_116359
cggtagccacctgagcaacttcaccaccgaggtcccgttcatggtgcccgagtagtgcgacttctccgagctcatgcccagtctatgaggaacaatgcatgagctcggagaagtcgcactactcgggcaccatgaacggcaccatccacgttgttgtcggaggcggcggtagccacctgagcaacttcaccaccgaggtcccggcttgg

SEQ ID NO: 50386 - DNA, 291 bp, Setaria italica
  Peptide Sequence Number=SeqID_116360
attaccttgcattagggccttggaggggtttaaatgattctaaactcaactgttcgactctaggatgcatctaacccagtccttcctcacgccttaggtattaagctctgatatatataccggttaataccggttaatatgacgtgacttaggttattaggctctgatatacatcggtgaccctcggtagaaaattgacctataattcttctagttggaaaccttacagatctcggttttccgtcggggacaaagaattatttgacgcctacacagaggcgtaaggaaaaa

SEQ ID NO: 50387 - DNA, 470 bp, Setaria italica
  Peptide Sequence Number=SeqID_116361
tgttcatacattaagttgatagactgggctgaaggtggatacttaacaactgattcaccaatgcctcggggtgaaatagttattggaggtccaaatgtaactaaaggctacttcaaaaatgaagcaaaaacaaatgaagtctacaaggatgatgaaagaggcatgcggtggttctactctggtgacattgggcgcttgcacccagatggctgtattgaaatcatcgaccgtaagaaggacattgtcaagcttcaacacggtgaatatggatctcaaacttctccagtcgcgcttgtttagcagcctttgccaaagattggaggacttctttgacaatctgttgcttctggcacaaatctgcaaaatcacgatacgtgattccttgttttgaggcccagcctttcagctcgctgtgtgcagctacaacaagggcacacagtagctgtggaagggtcagcatggatcatgat

SEQ ID NO: 50388 - DNA, 240 bp, Setaria italica
  Peptide Sequence Number=SeqID_116362
atcagatacttctccacccatcagttgtacaagttcgtcatgcacaatcttcactagttgctggtctggtcgaactcctttgatagtatctgcacctaaagccttttcgctaatggatgaaacaaaacgtctcacaactggcagactaacctgatgaaagcaggagaaacttcagtgctcagactatataggtacaaaatgaactgatgagtacaattagaagctgcaaggtacttacat

SEQ ID NO: 50389 - DNA, 271 bp, Setaria italica
  Peptide Sequence Number=SeqID_116363
taggaatcaagaagcgaaccgactcaccgacgccacgcagctcgttccaggcggactcgagtcccgtggtgagctgcccaaacatctccgcccgcacaaccagcccgttccccctcctcctgcgtctcctccatccctagaatccccataggtaaacatatgcactaaaacatcaaggcccaacaaatgcgatcctcttccggaaccagaagaaaaggctagctagctagctaacggaccagagagagggcgcgcaagggcggggttccgg

SEQ ID NO: 50390 - DNA, 481 bp, Setaria italica
  Peptide Sequence Number=SeqID_116364
ggcatcgattggatggcacatttgatttttggaaagctttcggtatgcactgaattacttcttgtttgtagacttttaatgaatttttcataagaggactgaaacctggtgccagaccaattgcatattgtgatcaagatggtatcgccacctgtgctgctgatagccgtttaatggctttcagttctgttgatgagagcacaagactttggatcaagggccgcaaatttttcaattgagggtctcctagggaccagtgcccactcgaatgctttaagcaatggatcgttggtcattttccggcttgcacctcaggattaccataggtttcatgtaccagtctcaggaaccgtggagaaatttgtggaaattcctggatgcctgtacacggtcaatcccattgctgtgaatagcaagtattgcaatgtattcacagaaaatagagagttatctcaataatatcaacttcagagtttggaaa

SEQ ID NO: 50391 - DNA, 197 bp, Setaria italica
  Peptide Sequence Number=SeqID_116365
tacctatattatgtgtgttgagatatgttcatgcaatcacagcatgaccccttttccattcctagggccgcaaattttcaattgagggtctcctagggaccagtgcccactcgaatgctttaagcaatggatcgttggtcattttccggcttgcacctcaggtacaggttttaatctcctttaagaaaaaggatcat

SEQ ID NO: 50392 - DNA, 185 bp, Setaria italica
  Peptide Sequence Number=SeqID_116366
cttatttgcaatcctccacattccctgtaacaaaatatagaaagtggaaggagtagaagctatctccaggttgtacaagtcaaaacaggagatagcttctactcctgttttgacttgtacaacctggggttttggaagtacaacctggttatatctttccttagacttcctgacgtatgaatttt

SEQ ID NO: 50393 - DNA, 514 bp, Setaria italica
  Peptide Sequence Number=SeqID_116367
gtataagcttgggaggaagattgggagtggatccttcggggagctatatctcggtgttaatatacagaatggagaggaagtgggaataaaattggtacgtgcacaataagccttatcgtaatgtatataatctttgcatttaatatgatatttctcttgtccggaatctgaatatgcccttttaaacttgggagttgaaatgcttagttcaaaatcttacaatttctccggtttgatctgtcaggaacctgtgaaaacaaacatccacaactacattatgaatctaaagtttatatgctattgcagggtggaaatggtatcccacacctgaagtggtacggtgtcgagggggagtacaacgttatggtgatcgatcttcttggcccaagcttggagacttgtttaactgctgcaacaggaaactttcaatgaaaacagtgcttatgcttgctgatcaactgataaccgagtggaatacatgcattccaagggactttatcaccgtgacatcaag

SEQ ID NO: 50394 - DNA, 312 bp, Setaria italica
  Peptide Sequence Number=SeqID_116368
aggcattgtggcaataggcagctacgttttgtacagcagcaatccattcacaggagaaactagaacagatcaaagaggagcctgatcatggagcatgtgattggagggaagtataagcttgggaggaagattgggagtggatccttcggggagctatatctcggtgttaatatacagaatggagaggaagtgggaataaattggaacctgtgaaaacaaacatccacaactacattatgaatctaaagtttatatgctattgcagggtggaaatggtatcccacacctgaacgtggtacggtgtcgaggggg

SEQ ID NO: 50395 - DNA, 244 bp, Setaria italica
  Peptide Sequence Number=SeqID_116369
ttatatgcatcccattttgttcagagaaaggatgttcttctttttgaatgcctgatgctgttatgcagtttttccccccatggggcctatttgatgatattttgcactcctacaggggatgttgttgttcatatatttcttcctcagcagcgagcattctataatttggaagagttctatggtaacgctacacccattgaactcccattcgacacccaatggcagtgattggtgatcctgcaat

SEQ ID NO: 50396 - DNA, 234 bp, Setaria italica
  Peptide Sequence Number=SeqID_116370
caaattcttgcagatattggtgatcaccaggtagtctctgtcctttgagaatttagctagtcacttgtgggacaataagcttattgacaaaaatattttttggattgaagtcgctggagcacagcctctctacattcagtgggcacatatcacgcctgcgaaagattgtagaagttgtatcggaggattctctagttctaattgatgagattggcagtggcactgatccatcag

SEQ ID NO: 50397 - DNA, 291 bp, Setaria italica
  Peptide Sequence Number=SeqID_116371
aaaattaaaagaaaaaccctaaaaacaaaaaagaaaactaaaacaaaacaaaataaaactaaaataaacaaacctaaggtaagaacaaacgtaagtagactaaccaagactaccaaacccaagctttacaagtggtagcaccgccaggcccgagtacagcaacgccttccatcaccgcaggcatgcaggggtcattatctctggatgcatggcttacagcaaggctggggttgagcggcgatgcgcctagggcgacagctcctgcgacaaatggttctgatatagatgtgg

SEQ ID NO: 50398 - DNA, 235 bp, Setaria italica
  Peptide Sequence Number=SeqID_116372
ggattttcgggccaaattcatatcaccatcggcagcacaagcaagagcccatacccctcagccagtgattggtaccagtgaacatttaggtgatgctgcagtggaagttgacactgaaaataggaacactgctttgacagattcacctcaatttgacacaccagctttgactgctacttcgaggcaggccacattgccagtttctggagaagtcgagatacaaaacatcttgtga

SEQ ID NO: 50399 - DNA, 343 bp, Setaria italica
  misc_feature (10)..(10): n is a, c, g, or t
  Peptide Sequence Number=SeqID_116373
ccttgagtanattttgtaagaatcaccaaatcagccaggagcctaagggcattctgcatgcattcaatatagctctgtgttggcgtgctgcgtctcttttaaagcataagatcagtcgtacagaatcactcacccttgctgcaaaaaacttaaactatgagtgcactgaagaacttgctgagtatgtctatgcgaagctaaggaatcctaaaagaaagaaagtttagacaacgtaagaagacaaggtagaaaacgaagacaaagacaaaaaataacaaataaacgaaaacttaaacaaaagtaaaaaagaaaacaaaaaacaaaaataaaaataaaacaaaaa

SEQ ID NO: 50400 - DNA, 306 bp, Setaria italica
  Peptide Sequence Number=SeqID_116374
caattgtgcagagcagcgaagttccattgtgaagagcagccgtgttgtcatttgaggcggaactaatcctgaacattaggaacctttacagggagtacgcactccccacgatcaaaaaaaaaagaagcaacattcgctaccactggtttagtataattacaagggctgtcagctggacatccccccacttctgttctgcagcctcctcacagcagatcagaacaaccttttagtttgagtttctccccgtcctgtccaagtgaaatgagcgaaggcacaagttatgctcaaattgcacccaaaatt

SEQ ID NO: 50401 - DNA, 301 bp, Setaria italica
  Peptide Sequence Number=SeqID_116375
tcaaaacacaagtcaggaccatattgttgattactaaacagttcagacgttgctcaacataagtacaaagtagcaagagccagtttaacaccaaattgtaaaaaggcacacagctgacgaaggtcaaggttatagtaacacaatcaaacagacaatgcaccgccattgccaaaatgagaaaatcccactaaatcaactagtacaatttatagtaacaaatttgattgtaacaacctttggaatccaggcaaagccgggaagtcttcattttgaatgctgaattcctggttttgttgaacaa

SEQ ID NO: 50402 - DNA, 481 bp, Setaria italica
  Peptide Sequence Number=SeqID_116376
cccagttcccagtgattgaagacacaccaccatagcccatatggggaaggcagggatcatgataatctgggtgttgggccaaaatttgagcaacttaatattgaaataattatatagatacatctcaaacaaataaaaatataacagcctaagtttgatccagagataaatcactctaaaccaaatgtgtgttttagctgcacggcaatccaaatgattatccacagttccaacaacattaattttgcaaatgaacagataagaggcttcaaaatcttcattttctactataagcattcacatactaaagactgacctaaaaaaatacctcatatgctacaaaacattgccactatggagtttagcgaactctgctacctagtaacctagcgctataattctaaaatctaacctagcactataatggagtatccccgcacacgcaaaggctacagggcagatggtctgcacacaatcatat

SEQ ID NO: 50403 - DNA, 369 bp, Setaria italica
  Peptide Sequence Number=SeqID_116377
taaacttcttgataaatgataaatctgttcttcatcttatagttaagccagacctgtaaaactgaattggtccaataagtgtaatccacagtgcccaaaagaatactgaagttcagaactataagatgaagaacagatttatcatttatcaagaagtttacatacctgtgagagattggaagcagtggagattgaagttgtgggcttgtaggaggtcaatgcctgtacagccagggataggggagagctgctgggagatagcgtgcattgaatgccaaagacttgccaatctaagactgtcattggtgtccatcctccctgctgaacaatagtccttgtagtatataaagggccaccagacttattaat

SEQ ID NO: 50404 - DNA, 492 bp, Setaria italica
  Peptide Sequence Number=SeqID_116378
cactaaactttacggtatgtcttaactggatatcagaaatcaaactaggcacaattggaagatgcatataaaatcaagcttagctgcatttgtacagctgggacttacgtttctgcagcattgttttgtaagtatcttttctcttctactacctgcaaacagcaaacgtttagtttatactaaaatacaggaattctacccttgaagttgctttattaaaatttaataaataggtgagagcaaggtgcaacattcattcggaatgacaaacccacctcatgtttgtatatctcctctgtgattatcgataatccatagtcgctcaactttgacacaaggtgttcgtcaagcaaaatactagaagattttagccggttatataaggaaccaggaattattcctgtatgtaggaaatgaacagccttagctatggcaatcagcaactgcagcctatcacaccactttagggtcttctctggactagagcctggc

SEQ ID NO: 50405 - DNA, 330 bp, Setaria italica
  Peptide Sequence Number=SeqID_116379
ccgtcaacaccagatgtccatggagttgtcggtgaagtcccagagctcgccatacttctcgttgaagtcccagatgtccatggagttgtatggcgagctctgggacttcaccgtcaacaccagcagggaagacatcgtcaaatcaagctagatggttacctactgcacaagcctttccgtgcaaaacaaatcaagtatagcatagctgctaggaaaaagctcttgaatgaaaggaataacaatgtgtgtatcttcatgcctgaggttctcagccctgtaaaaactgagagcctgaaaatctgctttatcctcacataatggatgtatgtc

SEQ ID NO: 50406 - DNA, 261 bp, Setaria italica
  Peptide Sequence Number=SeqID_116380
gtgtggttttctgcattttccctttgaactaccatggtaatgtagtaccaaacagagatgatgacgaagaacaatcgaataaattaattggtactacattaccatggtagttcaagggaaaatagcagaaaaccacacattaagtcttacatgcgcacgcgcacggagacttcatacaagatacaacgggcctttgccaggcagcagagttccaccgttccatggctttgtattagtattcttcaccagacgcaccaacag

SEQ ID NO: 50407 - DNA, 220 bp, Setaria italica
  Peptide Sequence Number=SeqID_116381
gaaggacaccatgtttgatccgaacatgtttcttcccctttagcatacagcaggcaagtgcacggcctaggtctgattttcgtgttagcggtgatgagcttgcaatagttattagctcaaggagagatattgaagaatcgcaaagtggctagttgccgtatcttcaatccatggagcatttcaaacaccagaatgaggaggcattgattatgcaagacat

SEQ ID NO: 50408 - DNA, 263 bp, Setaria italica
  Peptide Sequence Number=SeqID_116382
cagcggccggaggacatgacgacgtcgcggcaggcctacaaggtcgaccgcgagcgccccggctccgacgtcgccggcgagaccgccgccgccatggccgccgcctccatggtcttccgggaccacaacccgcactacgccagcctcctcctgcaccacgccctccaggtaattaaccactgatggtgatgattatgacagtaatttttattaaaataattaccgccgctgctaatgatgatctcgattggttaccgcgcgac

SEQ ID NO: 50409 - DNA, 256 bp, Setaria italica
  Peptide Sequence Number=SeqID_116383
ggtggtcctcttcgcgtcggcggcgctgtccatggcgagcggcgccgagtcgccagcggcggctgcggccgggccggcgtcgtcgtcggtgcggcacgactacgaggacgcgctgcacaagagcctgctctacttcgaggcgcagcggtcggggcggctgccgcacggccagcgcgtggcgtggcgcgaccactccggcctcaccgacggcctcgagcaaggagtggatttggtgggcgggtactacgacgccggc

SEQ ID NO: 50410 - DNA, 204 bp, Setaria italica
  Peptide Sequence Number=SeqID_116384
gaggtgggtgacggcgacacggaccactactgctggcagcggccggaggacatgacgacgtcgcggcaggcgtacaaggtcgaccgcgaccacccgggctccgacgtcgccggcgagactgcggccgccatggccgccgcctccatcgtcttaccgcgaactaccaaacccgacaactaacgacgacaacctacctacctacca

SEQ ID NO: 50411 - DNA, 345 bp, Setaria italica
  Peptide Sequence Number=SeqID_116385
tcttagtttgtagttcttgtctattggtcgtagtagtcttttcttgataatatgagcctgcatctggataagcttttgaatagctccaccggtgacttttgggcatctggcttggtatttgtgatggttcgacgacagttagcttttatgcacaatggtcaaattatgttggacagaccactggcatccagttctcaccattactgtaagattttacgtgtcagaccagttgctgcaccttattctgcaacgataaatttcagggtagaaggttttaacctactcagttaattcctcaaggctaatttgttcatttgaaggacgttctatattccaggaagacac

SEQ ID NO: 50412 - DNA, 207 bp, Setaria italica
  misc_feature (165)..(165): n is a, c, g, or t
  Peptide Sequence Number=SeqID_116386
cggagctccggcggatcgcccgagctccgcccgctgccgccgctggcgcggcaatgcgcgccggcgccgtcgaggagccccggcggggcatctccgtcgtccggagatgaagaattctactcgccgcgaggctcgtcgacgaagacctccagctcgcgcaggacnctggcaacggcagttcaggcgccttgaagcgcgcgaccgctc

SEQ ID NO: 50413 - DNA, 257 bp, Setaria italica
  misc_feature (48)..(48): n is a, c, g, or t
  Peptide Sequence Number=SeqID_116387
accctcatgtggctatccacctgctcctggtcaaggttatcgccagcnggttaccctcagggtggtgcatacccgacaggaggcggatcgatgcgtgacatttgttgcaccggaggcactgccatgggctgcggaccgaacttcccatccctcttgtccatttcaattttgtgctgtgtctgcatacaggcacaaaccgtccagtagaccaaatcagacaggcagttaaggatctgggaggcctctgaaagtttcct

SEQ ID NO: 50414 - DNA, 272 bp, Setaria italica
  Peptide Sequence Number=SeqID_116388
taattaccttctttgttcctattttctaatttttgttgtcttgttgttcttgtctattactaggtcacaaaccgtccagtagaccaaatcagacaggcagttaaggatctgggaggcctctgaaagttcctcgctcccaacaatagctgcaactatagagaagatgcaagcaacttgttgaaggcagaccatgaagccaatgatgcagttatcgcactgagttgtctgtatgttgaattcatcttgcagcaagaagcgggttgacgcaactg

SEQ ID NO: 50415 - DNA, 419 bp, Setaria italica
  Peptide Sequence Number=SeqID_116389
acttcagatgctctacatgtttcccgtaagctggagctggagctggagcctgttgtcgttttctcttgttatcttcctcagcagatgaacgtgaattatcaagtcttgtgggatgactattccacctactgtgtatcggagagccaagcaagctcctgagcacaaacgggaggcctgtttgataaaggagttagaggatatgcttgaaaaggaaggattgtcaaaaaatccttctgaaaaagaaatcaaagcagtgaagaaagaaaagaaagagcaaaggaacttgagggcatagacacgagtaatattatcactagttctcgtcgccgaagtacatcaagcttcatacccctgccaccaccacctaaaatagaagctgatagtgatgatgatgaagatgatgatgcgaaagacgatga

SEQ ID NO: 50416 - DNA, 263 bp, Setaria italica
  Peptide Sequence Number=SeqID_116390
gcagcagccgcaggcggcggccaccaccgggcaccgcatgggctccgacgccgatacctccgcgggggcggcgcgggagagggaggcggagatcgagaaggccatgcgcgcccgcgtcccagacttcaagaagcaggccgattccttgacccttgaaggagttaggagagcactggagaaggacctaggtttggagatatattcaagggtcaaggaatcggccttccttcctgcagtactagtgctccctcccttcttcttct

SEQ ID NO: 50417 - DNA, 474 bp, Setaria italica
  misc_feature (134)..(134): n is a, c, g, or t
  Peptide Sequence Number=SeqID_116391
taggtcctgtatagtaagttcaagcttcatacgccatcactgatgcagatacgctctagaagtgcaaaccatgctcgtttgctctcttctagtcgatttcaggtgtttcctgatcaacctgaaaagcgcagggngtcccagctcttcggaacagctatagacacgtttgggccattgggctttgagatgtagatgtggtgagcaccatctctgaatcttcaacctcgcttgagacaggggtgggcaccggtcgcgagatacccactccatggcttcagggtcagggtgcccgaggaggattcgtgtgactcagagtttggcttctaactttgaattccacaaggaacgagggacgtccgctcggtcagcggcagcatcagttgttcctcccttctcaaagcctgctccatcaaagtgggacgatgcgcagaaatggattgccagcccgacaacaaaccgtcctagcagggctgc

SEQ ID NO: 50418 - DNA, 204 bp, Setaria italica
  misc_feature (157)..(204): n is a, c, g, or t
  Peptide Sequence Number=SeqID_116392
aaaccatgctcgtttgctctcttctagtcgatttcaggtgtttcctgatcaacctgaaaagcgcagggcgtcccagctcttcggaacagctatagacacggtaaatgatgcctcatggaacaatatctttagagtaaaatgcatggctggtccttannnnnnnnnnnnnnnnnnnnnnnnnnnnnnnnnnnnnnnnnnnnnnnn

SEQ ID NO: 50419 - DNA, 263 bp, Setaria italica
  Peptide Sequence Number=SeqID_116393
gccaccaccgcgacagcgactgccgccttctcgcctgtgagccgtcgccttctcttctctcctactcgccggctccgtcgtcgcggtcgctcaggccatggcgctctcgatcccggcgtacatcaggcctatgaccccgagcgtgttgccgacgcggcggcctgagctcccgcaggagttgaggacgcggttggcccggatcttggcgggctcccccggctccgctccccgcgtggcgttgcggaggcccagcgcggcccccg

SEQ ID NO: 50420 - DNA, 396 bp, Setaria italica
  misc_feature (42)..(42): n is a, c, g, or t
  Peptide Sequence Number=SeqID_116394
taaaatgtgatcatatagtagtgactaaggctataataacanggttttcaggccaggagccagaagttcttctgccaccgggtgctgatgaggtacccaccgacgcccttgctctgcttcctcaccgccagcgtcaggcactccgcctggttgatgcactgctccacaaactcctcgctgctgctccgcaggaggcagcttaaccagcagtagggagatggcctgcactggctgagcaccagcacggaggcctccagcttcttcacctggctgaggaccgtggccagcttgggcccttggatcacaagcgcttcaacctccacctcgggcctactggccttgcagagcgtgccgagcgaagttggacgaagggaacgaattagaccttaccttaca

SEQ ID NO: 50421 - DNA, 319 bp, Setaria italica
  misc_feature (182)..(182): n is a, c, g, or t
  Peptide Sequence Number=SeqID_116395
caatcttacttattgtttgtgtgaattactttcaaactgctgtagtgttcagagtctgtctatcaaaagaacagttgattttacagtatgttttttctattgtggaatttgttttatgagaatttttttaacaggatgtggattttgatgaaacaaagcagctggtggtatttgttcaaggnttattggttaaatttgaagacaaacttgtcattgacagttgaggaaatatcagcagccaaatatcaaaagagtggtgaactacctgatactaatgatgaagaggctaattctgaaagttcattggggcgacatctag

SEQ ID NO: 50422 - DNA, 311 bp, Setaria italica
  Peptide Sequence Number=SeqID_116396
taaaaccaaagtttaaggggttaagaacaaattaaaaataaccgaatagaacaacctaacccaagacctagccatgggaagcttttcgggtcaaaatattgtggctgcaggaaatatggttcatttaactcctggaatgactcctgcaactgcaaatgcagaattaacctcagatttaccctcccagaaccaagtaccatctgctttgccacagatggatgacagattagcagatggagaaaaattcttcacatggacgagtgtgctcttcggctgaaggcacaaggaaccagatgtcaacaccatctgct

SEQ ID NO: 50423 - DNA, 406 bp, Setaria italica
  Peptide Sequence Number=SeqID_116397
tgttcaactagtgctaagatagcccacctgaacagtttcaattaatctgctggttcttgatgcgaaggaatggagccagaaaattccttgatctaatccattgaacattttcattggctccaccctaggcttcagttatgctcttcctgtacctaaagctgaagctgttgctcaagagacattggctgtctggtgctcacttgcttctcgtttgggagtgtgggctttgaaagctgagctggaagatttatgctttgctgttcttcagcctcaaatcttcaagaaaatacgatctgaacttactttaatgtggaaccgtacgggcaaatctaaaagtatgagaagatcatcaattagaagcgaattgcttgcctcaatgaaagatggacatatgacgtctatccat

SEQ ID NO: 50424 - DNA, 489 bp, Setaria italica
  Peptide Sequence Number=SeqID_116398
ttccgtctggcctcgcatcgagcagttgcccgatactcttatatttgaaggagtagaggtgacaggataccagatatttgaggatccaaaggtgcagaaagcaatagatttgctagtacagcccaccttgggcaatttaggagaacaggagatccatatgttacacactgcatacatactgggaaaattttagccgctttggttccatcaactggagaaagagcagttaatacagttgtggcgggcattcttcacgatgttgttgatgatacatcggagagcttgaagagcatagaagagcagtttgggggatgatgttgcaagcttggtatctggtgtatcaaaattaagctacataaatcagctactgcggaaggcaatcgaacaagaaagaaacaacaaggtaggaaagacaactacttaacttacaagaaagaaagacaaaataaatactagacgtagttaatagttaattaggggaataggtta

SEQ ID NO: 50425 - DNA, 446 bp, Setaria italica
  Peptide Sequence Number=SeqID_116399
gtgtgagtagttcaatagtagttctggagaacccatatcaaatcctaagattgttgacgatgctgctgttgcattagcatctttagcatcttgcgaggaagaacttgagcgagaattactcatatcaacatcgtatatacctgggatggaagtgactttgtcaagtagactcaagagcttgtacagtatctactgcaagagtaacacattctgtctccacagatgaaaaggaaagatgtaggaattagacaagtgtatgatgctcgtgcattgagggtgattgttggagacaaaaacggtgcattgcatgggcctgctgtccggagttgttacagcattcttgatatagtacacaggctatggactccaattgatggggagtttgatgactacattatcaatcctaaagggtagtaggttaccaatcactacacacagcagttcag

SEQ ID NO: 50426 - DNA, 245 bp, Setaria italica
  Peptide Sequence Number=SeqID_116400
tactgaagaggaagaggaagagtattggatggttgtatctgccatattcgagggcaaagagacttccagtctaccatctgaatcgaattatgctgataaatcatcatctgatcctccaagttcaactcctttaagtgatcccatcaacaataaggttagcgtagcctgtttgtttccacaacacactctagagaaaggaaagctcgtatacaatcattgtgtagctgcttatttttgcacagttc

SEQ ID NO: 50427 - DNA, 222 bp, Setaria italica
  Peptide Sequence Number=SeqID_116401
tgaaaaggaaagatgtaggaattagacaagtgtatgatgctcgtgcattgagggtgattgttggagacaaaaacggtgcattgcatgggcctgctgtccggagttgttacagcattcttgatatagtacacagtcactacacacagcagttcaggcatctgatagctcaccgctggaggtccaaattagaacccagcgaatgcatgagtatgcagagcatgg

SEQ ID NO: 50428 - DNA, 253 bp, Setaria italica
  Peptide Sequence Number=SeqID_116402
ggttttttcttcgaatggcatgtacctggcaactgcttctgaaaagggtactatggttagagtacatctcgtcacacaagcaaccaaggtgaaattacacctttctcctttgacattgagctctctatgatccgcttaatctcttttgcatttttactcaacagtcacatagttttcggcggggaacatacccatcaacgatctattcactggcatttagtccatctgttgatctgcctgacgttcttgtcgc

SEQ ID NO: 50429 - DNA, 207 bp, Setaria italica
  Peptide Sequence Number=SeqID_116403
attgagttagaaaaacgagtgcagaagagtgcagatgatgctctaaaggatgaggagatgggtgtcacaaacgaaacaactgcgccatcttctgttgcatcagtgccttccagtcagactaccaagaaagaaaatgttataactaaatcagtgccttccagtcagactaccaagaaagaaaatgttataactaaatcagtcgttgta

SEQ ID NO: 50430 - DNA, 324 bp, Setaria italica
  misc_feature (201)..(324): n is a, c, g, or t
  Peptide Sequence Number=SeqID_116404
ccaccacgtttttctcatgtacatgtaccctccactgggaaaagacgaaaactggtaaccttgttttcaaaatcaaagggaattgcccgcctgcttttcctttacccaatcccgtgtttagtgaactggtgttgatggccgagtttttacagccttcatatatcacacgcttgagtggtggcttacgggcattttatgttnnnnnnnnnnnnnnnnnnnnnnnnnnnnnnnnnnnnnnnnnnnnnnnnnnnnnnnnnnnnnnnnnnnnnnnnnnnnnnnnnnnnnnnnnnnnnnnnnnnnnnnnnnnnnnnnnnnnnnnnnnnn

SEQ ID NO: 50431 - DNA, 389 bp, Setaria italica
  misc_feature (191)..(191): n is a, c, g, or t
  Peptide Sequence Number=SeqID_116405
acgcgcgtcacgcccgcatcgacttcacagcgctcttcacccgccgctcgcacccctcgcagtccatcttcaccttgatgttaccgtctgcagacgcgatacccagcggagtttttaacaaacagctcattaatggggatcaggaaactcaaaagctctgttactctgcaagatcagtaaatcgagaaacncaaatctttactcacctgcagcgggcgcttcttccggagcttgagggcctccttcgtctccgtgatgctgcagagatcggagaagtggtccaggatgcccatggtgattgtgatatgcctcaccaagtgtacgccgtggctattgaacaagcaacaaagcttctcgtcgtcgtttgtgtcggccacgggtgaaataga

SEQ ID NO: 50432 - DNA, 448 bp, Setaria italica
  Peptide Sequence Number=SeqID_116406
gaaagccatcacattccgtgacaggtatttgttttcaattcaattttatctttcgacgtttttttgatcttatgtccattgcttgttgattgccatctgcaaaccaaccttatccacaggtacaagtgttttaatgccaccataattgttgtttacataaaaaaacagtatcttgctggtgtacatgttagagaaggctccttttcaaggaagattcctttgtatcactgcctttgcactcacctgtttcagactccagtctgacccaacggcactccttttcactcctgcagtaacatagtcgatgttaagctcatacggagagctgaaggaagccattgccgaagggaagtgggctagaggcccttggtcagctagcgatgctgatgaactgaaggtgaaagaagagaccagcgccaccatcaggtgctatccgttcgagcagccg

SEQ ID NO: 50433 - DNA, 297 bp, Setaria italica
  Peptide Sequence Number=SeqID_116407
taagaaactaagaggaaaagcttgtggttagaccaactagtgagaccattgtaaaccacatgttcaccaaatggattcagagctatcgtgatcttcctctcatgattaaccagatgggaaatgaggacaaaaccattcatccgaactcttgaattttttgtggcaagaaggtcatacagcccatgctacccttgaggaggcagagaaggaggcaatgcagatgattgatggtatataccaagtttgcctatgagcaagctgcaatgccagtcattccaggtaggaaatcaagagtgg

SEQ ID NO: 50434 - DNA, 389 bp, Setaria italica
  Peptide Sequence Number=SeqID_116408
ccttttgagtctatgttttctggtactgacgtatacacagatatggaggtagtattcagggttcttcaagttgttggcgacccaaaggaacgggatgtccatgtccagttcgatgccctgtacccttactagcttcacttttagcttgcttggtcgcctctcgcagacttgcggaagctggttctgcctcctgagaacttcttgaagagtttgtggtatctgaaccaccaccagctgagcccagttcctctgcattttgggggtctgagctgaagaactcaggaagcaatgtttgtaatgcatgccccagggtaaatagtaagacttactagaccttacgaaacctttaaccgaaaattaacttaactaaaaaattaaggttaactaaa

SEQ ID NO: 50435 - DNA, 303 bp, Setaria italica
  Peptide Sequence Number=SeqID_116409
ggatatagaagatgcaatgcctgttagtgactgggaaccctagacaataggtactgccaggtccaggagattctggctcatcagaactttgttgacgctctgtagaggctgtttgtactaagccatcctcctcaaatggtccaagcttaagcctggtggagatattcttatacccatctaagttacctttcgttacagattgccacagagcaacttgatcagactgggacatattcatcacactcttactgttcccagtaatgatgaaggtggcctctttcagagaattcatgtagctccact

SEQ ID NO: 50436 - DNA, 249 bp, Setaria italica
  Peptide Sequence Number=SeqID_116410
ctgcgatcatgtcaaagaagataagtcaaagcaaaaggaaacggagtttgccctttcagcactcatggaaattgtcaaaagacctagccggtatgttgtcatcaaattccttcatcatgtcccatggaccatctccaactccaaccagaattatagacaagggaaattcactggcttgtacaatagcatcaactgtcatttgctcctgggtacttaactgaccaaattcggtatctacacttcgtgtga

SEQ ID NO: 50437 - DNA, 507 bp, Setaria italica
  Peptide Sequence Number=SeqID_116411
tataaatttcgtcaaaactatttgactcacttactaaccagacaaacatattgatctaataatttgcactatgttcttcatgctgcgctccactgtaaccctagattcaaatttttcattattgaacaaaaatcattcatcaagttaattattctagtttctataaaactaattggaaaattcaaatactatggaaacactttctcatgtttcaccagtaagaatgcccattttccacttttctcaattagcaaattgtattctacaaagtagaaggatagaagaatttatcatacttggggttctggaactctagtttcgacagctggtggggatgtcactgatgctgtgatagttgaatctacagttggctcctctctaggacgtgaaggcacgcttcgatagctatttgcccgatatggtgctgctcttgaaacagtgctataacttgcgaagggtggaggaagtggaacccgctcaggcgatttgcaagtcgacgtcctaaaa

SEQ ID NO: 50438 - DNA, 241 bp, Setaria italica
  Peptide Sequence Number=SeqID_116412
aaattgtactagtcaggatataactgaagcgctctcaatcaatgggccttcgacagatggggcaatctgcgacttgtggtccacattccgaacatgtctggtgaccacaaccaaatgccatgtcccggggtttggaaaggcaaactgggcacatttggggttctggaactctagtttcgacagctggtggggatgtcactgatgctgtgatagttgaatctacagttggctcctctctagg

SEQ ID NO: 50439 - DNA, 342 bp, Setaria italica
  Peptide Sequence Number=SeqID_116413
gtgagatatgtttcctgataatattaagcaagtaacattgttatgttattgcttttgcgtggaacattgtgatgggtcttctaaattcaatcattgtgcatacagatatggatgcccgctgcatccatgatagcttcgatatattgcctttttgacgtagaaaatcttttccttgggcaggcgcagcatatccaaattctacaatggtaaatccaaatcctttgcgtgcctcaaagaagctataacatcttctggttctgcaaaagacatcactaaggcagataataaagaattaaggatgctaattcacatttaaaatatacgtagtcatagagatagcag

SEQ ID NO: 50440 - DNA, 375 bp, Setaria italica
  misc_feature (362)..(362): n is a, c, g, or t
  Peptide Sequence Number=SeqID_116414
aagactaataacaattagggaataccgacctttctaccccctgcgcctacgttgagcaggtacctttaggtacccacacaatacctaaactaatttttgatattgaaaagcaaaattgacttttgaaaccctttttatgtgtaacggaaaagagttgcgatttcttcttattcctatagaacgtctagtaacaagaatatgaaatcgtaaatagcgaaaaattcttgccttgcgcgatctaagtctaaggaaatacaaaaaaatccgcttatacaccaatttcatccacatcgaatttatatatcaagaaatagcggatagaggcattattcaaggggtcaggtctacttactttatctttntttccaatttatt

SEQ ID NO: 50441 - DNA, 298 bp, Setaria italica
  Peptide Sequence Number=SeqID_116415
ccaacgagtaaaatccccctgtgcttccgggccccatagtagcaacaaagagtgtgctaaactattggcaggagtggaaaccgccgcggttaagaaattgcaaccttccaaataggaactagccaatccatgggtataccaagaagttacaaaagtagtccctgtaaaccaaccccctaaagcgaaataagcacaaggaaagagcaataggccggagcaatgaacctatttgaagtggcccatttcgtaccagaaaagcccatgtatgaacaagggttaattttacttccgcacttag

SEQ ID NO: 50442 - DNA, 368 bp, Setaria italica
  Peptide Sequence Number=SeqID_116416
cctgccgctggagctcttgctggtttcttgaactgtggaggcgctgtctcatgctcgaggtcgctgtcgctctcctctgcacccgtcttgcgtttggcatcaatttcagcaatatcagtaggattagttgggtaccatgaccctggaaggccgatgtgcctcatgtatcacgccctattataaaagcaaccaaacttcagcgttgctctacggattaatctgaatgtaatgtagaacagaagcagacgaagaacatctggaatgctacaatacagactgaaccacatcttctctgtattgagaagggccaattacaaaacaggcaactaataagtacaaataaaatagtaagaaagactaaaaaacca

SEQ ID NO: 50443 - DNA, 172 bp, Setaria italica
  Peptide Sequence Number=SeqID_116417
gcctctcatctttggtcatcttggaatcatatggatttgccataggtgcgaacattgctgcacctggattcaggacaataaatcgtatgccagcagatcaataacattacttatgtgacaataagcatgtaaggtttatgttatttaaaaacacaagcaaaaaatgcttttg

SEQ ID NO: 50444 - DNA, 243 bp, Setaria italica
  Peptide Sequence Number=SeqID_116418
gttttatgcctctcatctttggtcatcttggaatcatatggatttgccataggtgcgaacattgctgcaccagcaactcggtcaggaatgtaacgaagagcactccaagcatgcatgccaccaccagaatagcccacaaacccaagaaacttagtaccggaaataatacaaagaaccaattaagaccaagaataggaagacaatagtaccaaatagacaagaaagaaaatttagaagaattta

SEQ ID NO: 50445 - DNA, 242 bp, Setaria italica
  Peptide Sequence Number=SeqID_116419
aaaaatacatcataccaagtttttccagactggatctccagataatgttcctccaggcaacatttataacctatttataaagtgtcctaccatttacatctgagtgggcagtcccctgtgagatatggtaccaattaatgtgtcgttttgcaggtactgtagtggacagtgcggtctgccatcctaggaactttgacttctacatgtgtgcacatgctggggcgattggaacatcaaggccc

SEQ ID NO: 50446 - DNA, 400 bp, Setaria italica
  misc_feature (319)..(319): n is a, c, g, or t
  Peptide Sequence Number=SeqID_116420
aaaaaattaacaaaaggaaattaactaaagtaagaaatagtaagaaggtagaaatgacttaatgcattggagagacttgttgcaaggagtccgaatcttaaaaggttaaggttgaatcgtgctgttccatttgatgttttgtccagaatacttggtagcacacctaagctggaggatttaggaacaggatcttttgcaagaggcaatcaccctgctggatatggcagtctatttgctgctttcgcaaaatgcagttcactaaagagtttatccggtttttgggacgctacgggcttatttcttcaaagaatttttttcngtttgcaaggaccttacatgcttgaatctcagctatgctccatcgattcaaagtccaatcttatcagtattattcgtcggt

SEQ ID NO: 50447 - DNA, 360 bp, Setaria italica
  Peptide Sequence Number=SeqID_116421
taaccggttttttaagggtaaacgtacttaacgggtactttaattttactttactaaaagtaatttttttcttgttttgtctaaggtacctttactattgtctttgtaattctcagctatgctccatcgattcaaagtaccaatcttatcagtattattcgtcggtgtacgaaactccatgtcttatggctgttggacaacattggtgatgaaggattgaaggttgtggccacgtcttgtcctgatctccaagagttgagggtatttcctgataattcaaacgcaactactgttacagaggaagggttggttgccatatcttcaggctgtcggaagttacaatctgtgctatacttttgc

SEQ ID NO: 50448 - DNA, 302 bp, Setaria italica
  Peptide Sequence Number=SeqID_116422
taccaaaaataataggactacaaccttcggcaaaacttggccatggtttgtcgcaccgtggcggtccatgactcgtccatcacggtgtacttggtcaccgttccatcaccatctccgtgtccattaacgccttctcggggatatgcatggagggagtcaacagcaaggaggaaattcagatggggctggaccactccaagctgttaaaagaaataatgctacaattgagagttacattcaagatatctacgagcagttggaaaaaggaggtggagaggcttttggtgttccagaccagctaa

SEQ ID NO: 50449 - DNA, 201 bp, Setaria italica
  Peptide Sequence Number=SeqID_116423
agtagtgaactggaagcaaaggtgatgtcgaggaacttaaaacttgatcagtccgtcctgcaaactacacttatgaagcttgtatttgtatatcttaagtgttgatgcaaaactcttagtatgtcttaagagaagaagtgaaaacattcggcatctcatgtttcgacttctgtattgtgtcattgtatttgacgtacaatg

SEQ ID NO: 50450 - DNA, 446 bp, Setaria italica
  Peptide Sequence Number=SeqID_116424
aattacagatgcatgaagccaagaacttacctaacccttgagtacctcctgacgctgccagtgttgttttgggttgggtatctctctctccccatccaggtgaaggagaaactacaaagggttgggctcgagtcatctaaccttgtaatcggggtggatttcaccaggagcaacgaatggacagggaagcattgtttcaacgggagaagcctgcatcacctcgggaacgctccaaacccgtacgagcaggcgatcggcattattgggaggacgctgtcagcatacgatgaagacaacaagatcccatgcttcggctttggggacacaacgacgcatgatcgaaacgtcttcaacttccacagagatggccgggcgtgcaccggtgtttcagaagcactgcagcgatacagagagatcgctcctcacgttcggctttctgggccgac

SEQ ID NO: 50451 - DNA, 402 bp, Setaria italica
  Peptide Sequence Number=SeqID_116425
ttctttaatttgtgaatgcattattctcagcaaatcaattgcaattgaacatgcacatatacgggatgtggattataaccccaagaagcaaaacataattgcaacagcagaagatgaatttggaattcgcttgtgggatctcagaatgctgaaacatcctctgaaagatctccctggacactcacattggtatgtgcagcgtaatatagtgtagtacaatcaaaccagaatctttccttcgcaagatttaaacattagttctctcaatttattctatgcagtatatgtactgtgctgtgaatgttatttgtttgattcgtgacttccttcaaacaagtgcaattttcatcctgttacaagtttggtttctatttttgttagtctagtagagtagtatatgca

SEQ ID NO: 50452 - DNA, 334 bp, Setaria italica
  Peptide Sequence Number=SeqID_116426
aagatcccagagcagcatgggcagtcaaactcgccgcagcttgagcagctcttcgagctcactgggcatacgggcaagataagacgcgtactctggtggccacttggaaagcatgataagctaattagcattgatgacagaaatatttatctttggaacatagacgcgtcaaataaatcagcaaagatgatatcacagggatcggctgacatgcttccaaatttacgtggtggagcttgggacccacacaatcacaattcaattgctgcaatatcaaattcatcttctgctgttgcaattatgttttgcttcttggggttataatccacatccc

SEQ ID NO: 50453 - DNA, 261 bp, Setaria italica
  Peptide Sequence Number=SeqID_116427
ccggtcatcttactgcattcaacagcgtgcaattgatagccaagaatgttgcagaaatcatcttggctgatatccgatcttccgcctcttgggtgatgcgatgccaacagtggtaccaaaaaagtccgatgtagcttcgattggaaagaggacagcacagtcgaagaattaatacaagacaagttactttacctagtaatacttaccaaagtacttaataccaactagtagaatttaccttttacaagttagactaagaaa

SEQ ID NO: 50454 - DNA, 273 bp, Setaria italica
  Peptide Sequence Number=SeqID_116428
gcggtaggcgtcaggtgcagaaggttgcatgtccccggcggcgccgctaccgccggcgtggccaccgagtactcctgcccgcgcaggagctcccggacgtaccccgtgatagcctccgccgcgggaacgccggcgtccggaaaggtgagccggtggaccttgtcgacgacgaagaacggtatctggttctccgcgagatacagggcgtcgcgcaccaccgcgacggcctccatcatgtcgccgcccactgacggcgcttcgccaccgccgttt

SEQ ID NO: 50455 - DNA, 285 bp, Setaria italica
  Peptide Sequence Number=SeqID_116429
aaagagagacaccatccttgaaagggacgagacacgagctgccgtccaaaaacgtcccccgggggcccgggatgtgaccggagcagttgaagaagaaggcaaggcctgtgcgcggcacacgcgaagggcccatccgtcacccccccggcgagaaagcagagatttttcgcatcaggacgctaatcctatcgcctttgtctgacgacgcccctcctcctctcccttcaaacccgtcgctttctgcaacccaagaattttaagacgccagaaagagaccctccccag

SEQ ID NO: 50456 - DNA, 208 bp, Setaria italica
  Peptide Sequence Number=SeqID_116430
gctctggcgatacccaatcaatctcaccactgccagccttcgtcccttcatcctcctcgtcaacagccttcttcttcctcttgcccatataaatcttcccttttgcagacccagccaccagcacagtgccacagggcgaacaccatccccgacacctgcaccgacaccagctcgaacaccagccccgactcctgcaggtgtcggagta

SEQ ID NO: 50457 - DNA, 236 bp, Setaria italica
  Peptide Sequence Number=SeqID_116431
ggttcctaaattccaacctagccgtcaaggcgtcgagccgccgcgccgccgcctccgcctccgcctcgcacgaaacgggcctgatcgccgccgcccgccgcctcgcgcctcctgcttcttcggcgacgtcagttctcgtgcctcgaaccgggaggaaggtttgaacctactttagaaatacacaatatggctgcggttgatacagctaccaaggagatggaggcattgacaaggtt

SEQ ID NO: 50458 - DNA, 361 bp, Setaria italica
  Peptide Sequence Number=SeqID_116432
ataacgggtgacaaccaaaagccaaacacaactaacagctaaggttggatcatttacaaagtggtaaaaggctaccaagactagcctacaaaacggagcaagccactctgcatcacctagtccttgagttggaaaagctatcaaccttctacaaaggttatctcaaactgctggaagtacgatgtcaagccaacaatgccacggttatagttaacattgactacctggtgttaacaggtagaagcatttcaatttgccatgctaatatgtttcttaatcatggtcaaggtctccataacaccagtatagtgttgacaaggaactaggaagaaataagtaggtacgaagtagacaaattaga

SEQ ID NO: 50459 - DNA, 446 bp, Setaria italica
  Peptide Sequence Number=SeqID_116433
atccttttctgttcggattatgtgtgcgtggtagcgatttgattggtcactattacttctagatattggaactagagttctaactgttacgttatggagttaattatagttgcatttgttgtcaattggtcccgcttccaatacaagtctagcaaatttgacatcttggtctggtgggtaaatttgtggccaagttagcatgtttatgtttgtgttgcttcagtctacaaaagattccttgttgatttctattgcactaaacatttgccgtgttgcttttgcaggtactagaattgaactgtccttgaggctgcagttagagaggctctggtagtgtgtctacatatttatgtctgtgtcaatgcgataagaatctgtctcaattagatatagaaagatgggtgacggggtggcttttgaggcggcgaggaagattattattgtct

SEQ ID NO: 50460 - DNA, 252 bp, Setaria italica
  Peptide Sequence Number=SeqID_116434
catatcctatgtaaagcatgatgcatttatgatttatgtcactgccatatgatagcgtacttatctttcctgttacttgcttcaggtatcagaattccaggattccaaaccagagacggatgtggatgttgactataacagtttgtactcaaggcaggactttctagagggtgaggacggtgagctttcatggtttaatgccggggtccgtgttggagttggaatcggccttggcgtttgtgtgggtatcgg

SEQ ID NO: 50461 - DNA, 251 bp, Setaria italica
  Peptide Sequence Number=SeqID_116435
cgcatcctgagtgacgagggcggcgtcggcggcgacatcatcgacttcgccgagttccgccgccgcgtcagcaagaagtgcaccgtcatggactcccaggccttctacgacttcaacgagcgccgcggcaaggtcggcgagcttcttctcgtgctctgattctttctcctgtcctacatccgtgagaaacttgcaagtaacggagacacttcttgttctcgccgtttgggcagccgggggatcccttctac

SEQ ID NO: 50462 - DNA, 282 bp, Setaria italica
  misc_feature (18)..(18): n is a, c, g, or t
  Peptide Sequence Number=SeqID_116436
agttaagaacaacttacnctcatacattaagttttcttgggtacaaaatacaatatatgattacgagaaccaatcgaactgttcatcacatcataataacaaatcaaacattagatggtacaacatattttaccttctgttccctcattcttgttcttatctccactctagacaagcaccggtctttgtaagagctggcatcctaccactctggtactcgggtctgtgtctagagtggagatgcagaatgagggaacagatggtacaacatattttaccttc

SEQ ID NO: 50463 - DNA, 381 bp, Setaria italica
  Peptide Sequence Number=SeqID_116437
aataattctgggaatctgcttctccagggttctccctgcccggggttaccagtcgagaggttattctagtggtggaagctccaacaggccaatgagacagttctctgaacagaatgagtcaagtccccgaccattgatacactacattgctgtatgttgtttctacgggttgcatcatcttcttatttttccatactgtatctaagtatgaaattatccacactttttgtttcatgtcaaatcattttcatgtgattttttgaaatacatgtctttggacatgtgcactacaattcagcttgaatgaatctttaaaaacatttttgtatcacggtgtttaccccatcggtgttgtgttctcttctacttaaatgaaatggc

SEQ ID NO: 50464 - DNA, 247 bp, Setaria italica
  Peptide Sequence Number=SeqID_116438
ctcagactgttcttacgcctggctctccttgttgtcatcttgataagatcatctttttgtggcaccttttcttttgttgagccgcttgtttgctgcttgctgttggattctgaatccgcatttagggaagcaaaagctcgagaacttagtcgtagttggcccttgtcatttatctcaataagcttgacgtctatgcgaatacaacctaactttagaaaagacaactacctacaagaccttaggacca

SEQ ID NO: 50465 - DNA, 420 bp, Setaria italica
  Peptide Sequence Number=SeqID_116439
caaaacacccacgcgtgcagttacagttacagagccatacagggcaggcgcacgcgcatcctgccacgatgaacacgccgcgctccagagaacaagccctgaggaggcactcacggtggcgcgggcgatccggccggcgcactggcttctggcgctgctcgcggccgccgccgccgccaagctgaggcgcatgggccggcccaaggacgtgtacctcgtcgagtacggctgcttccggcccaagccgtggttccgggcgccgttcgccacgtgcctggagcacgccaacctgatgccgtacctaatcgacgacgaaagcgtcagcttcgccatccggctgctcgagcgctccgggctcggtcgtaggtagtacgttgtcgttgtccggtaggtcgttacctacttactattgtccgtcct

SEQ ID NO: 50466 - DNA, 231 bp, Setaria italica
  Peptide Sequence Number=SeqID_116440
tgttcgacggagaccatcactcccaactactacgtgggcaaggagcgcgccatgctgctccccaactgcctgcaggtggctcccaaaggcgcgcacgcgctggtggtgtcgacggagaccatcactcccaactactacgtgggcaaggagcgcggccatgctgctccccaactgcctcttccggatgggcggcgccgctgtgctgctgtcgacgtcgcgcccgggcgcgcg

SEQ ID NO: 50467 - DNA, 276 bp, Setaria italica
  Peptide Sequence Number=SeqID_116441
atggaggtgggagcaaaggattgtataaacaatggctgctttagccaattctctgacatgtattgacctttgtatccatatttaagcaaggtatccacattgattgactctcccaaggtatttttgattgatgatataactgtgagaacacaagacacgaaccagtcatactgggaaataacttcagatgactaccttgcaataatattgggaaaatacgttgtcggccttggtccatggaaagataccattgttccagctgcaggaaactacttg

SEQ ID NO: 50468 - DNA, 240 bp, Setaria italica
  misc_feature (27)..(27): n is a, c, g, or t
  Peptide Sequence Number=SeqID_116442
ctttgctagcaaggatgtcagtctctntaaaatctgcaccttcttcaatagccctagcgagatgggcgcatggtgcaggtctgcaggagtgctccctcccccctccttgcccacactcttcttgctccacttccctccagtccctcccgggctctccccgctatatgcgagcgagcaaggcagcgagctccggagtttcagcggagcagaagaggagacggcgcggctccacgctccgtg

SEQ ID NO: 50469 - DNA, 160 bp, Setaria italica
  Peptide Sequence Number=SeqID_116443
aagttagtttcctgcagctggaacaatggtatctttccatggaccaaggccgacaacgtatttcccaatatatgcaaggtagtcatctgaagttatttcccagttattgtacttggtttcgttgttctttgttgtttcttcttactttagttttatttta

SEQ ID NO: 50470 - DNA, 389 bp, Setaria italica
  Peptide Sequence Number=SeqID_116444
tccacatactcatccaccagctttactaaaagattaagagattgcagtcaccacgcctgagttatttctccaaccttgctgacgatgggctctctcatggctggctgggactcgccagttcttcgggttcggtaaccggacaagaaagttcacgcgcggcggaaccggtcgcgttacggtaaccgtaaaacgggtaacgggtaacgggttacgggtaacgggtaccggtttaccgttacgggtaaacggtaccgtaacggtaccggtacccgggtaacgggttaccgtaacggtaacgggtaaccgggttacgggtaccggtaacggtaccgttaccgtaacccgttaccggtacccccgttaccggtacccgttacccccgccacgga

SEQ ID NO: 50471 - DNA, 245 bp, Setaria italica
  Peptide Sequence Number=SeqID_116445
gtgaaagaagtgacaggtatgatagccctagaagagctggtggctatggtaggtgcggggataacccatatcgccgttctattagcccagtataccgctcacgacctagtcctgactatggtcgcccaccaagtcctgtatatggttcatatggcaggagcagaagtcctgttcgtgatcgctatcggagatctcgatcggtagccaggagatctccgatagcgatcacgaacaggacttctgct

SEQ ID NO: 50472 - DNA, 206 bp, Setaria italica
  Peptide Sequence Number=SeqID_116446
atgttctgcttctggtaagacatctcttttagactactgctgtgctagtcggactatctgcagtagaaaaatttgcagtaatttttttgaatgtgggttcagggtggacacatcatcttcttccaaagcctcagtcttcttggctattgcctgtttccactggatgtcggtgctctagtctgcatgctgaaggactaatgtcatac

SEQ ID NO: 50473 - DNA, 331 bp, Setaria italica
  Peptide Sequence Number=SeqID_116447
attgtacagcctactttcgttgttcgtgataatcggtaaactatcacagcagaaggtgaggaacaacaggtagtctgcatcttctccagtcgggaagcctagatgagagacatcttcggattgctgaaaaaaggcaaggccatacaagtaattgttgcgaacagcatgtgccgatataaataataaatcatatgcttcagtgtccaaaatgccaaaagacaaatgctaccgactttctagagttatactattcctcaggttacctgtctgagttcagatgattcattgcagacttcatcattgcaaaggttgtatccatcacgtttctatt

SEQ ID NO: 50474 - DNA, 263 bp, Setaria italica
  Peptide Sequence Number=SeqID_116448
tatctgattacttgatggcgttgaggccttatactctaattaatgtataacagttaatacaaggaacttatgtaaaatgtccattgttgaccctactctccccctttttgcttgaatatcttttcttgttgttgtctaaagaggcctaagtttcatgtcaaatttatactttacaggtaaaacagaatatatctatgctcgagtcagagagtctgctcgttttgctgatgaggttctttcttatcctttatatttgcttgaac

SEQ ID NO: 50475 - DNA, 390 bp, Setaria italica
  Peptide Sequence Number=SeqID_116449
aaagtaacttatcaaaattacaatgacgcgcatgtaccaatgcatgatatttcatctcactattatgagggctcgatgacagtatgattggctagctcgagtaggcaacggatcagtaagaactgaattatttgattttttgagttgtcatcctttatttcctttcttaatgttcaactatcagatatttggagcagtttacaagtaccagaatataattgtaatttcataaaaatgaacacttgtattgctatttgctaatggtggtcgcaaattctggcgacagctaccagagatgttgaaggatccattcagacggaagaaacggtgtgcttgcgaagaacactgactggcccctggtgatggctgtctcgaacagtagatgacctg

SEQ ID NO: 50476 - DNA, 418 bp, Setaria italica
  Peptide Sequence Number=SeqID_116450
aatctccaacacacctttacgcttgtgcagagacttcctactcgctacaagagtggcctgcatagaatttggtatctggctttcaacaactacgccaccttcaactccttcaaattattctcacgcaaggtagtcccactacttacaagatcaacaatagcatcagccatacccataggaggatatgactcaagagctccatcagcagataaaaagcgaacatgcttaaaacctttctctcttaagaacttatcacctagatatccaaatcctgtaacaacacgtagtggcctttcttctgtccattcaggcatatttaacaaatcctctagagtatttatattttcaaaaatgccttccttaggtaccgcaagggataaacgacaatgtcctaaactctaagtagtcgttctattgt

SEQ ID NO: 50477 - DNA, 346 bp, Setaria italica
  Peptide Sequence Number=SeqID_116451
acggtccaacagatgcctggtgtataaacagctgcgccacaatgcacgacggtacagaccaaaatttcccgaagaggtacactgacagtgacagatatttcacacggtagctcacttctgtatatgggttgtttacatgcttcagtaaggactaaatagtgcagtgcacaacagagaacgttgtaagggaccagaagctgacggtgcgctaagttacaaccccagctctgaaaggagattgcgccaccttggcgtctcctcatcgaatatgtaggtcagctttgttaactaaagaactaccaactagaccaaccaaataagaatactacaagttagttaggaataa

SEQ ID NO: 50478 - DNA, 230 bp, Setaria italica
  Peptide Sequence Number=SeqID_116452
ggaagacggagcagaagagtggaagactggctgcctaagagtcaaccctggaaactgttgcaattcatagctctcactgtttcgattactcttgttctgcagatagcttggtactggtacctagccctggcgttcattgatgtacaggggaactatcttggtgagtacaggcaccactcagttacactgagtccagagatattcttcttgctacagctgataaccatcta

SEQ ID NO: 50479 - DNA, 256 bp, Setaria italica
  Peptide Sequence Number=SeqID_116453
taactttgtttggattgttggactgttgtatgggtcatcgtactcacctggtacgctctgggcacaaggtattctatctggcagtttttaggggcagggacatgtgtggcagggcttgcccttgtgctcctttcagatgcacaatcagcaaaggagcaagacccaagtaaaataccacttctgggggatgcccttgttattgctgacacagtattcctccccaacattgctaaacgcaaagcaaactgtcccagca

SEQ ID NO: 50480 - DNA, 330 bp, Setaria italica
  misc_feature (164)..(164): n is a, c, g, or t
  Peptide Sequence Number=SeqID_116454
actcttctttttctcttttcttttcggacctcagcctcagcctccaccaaagactctggttgcttggactttgtctcttcaggctcttcaacagaaaaatgtgaatcaataaccacagttgtaagatgctgcttcagaaagaccgcagaaagcaactgtcttgngtttgtgtcccagatacgcaagtagctatccagtccacaagatgctatcaaaggtagctccggatgcctaacgattgatctaatacttccactgcatttgccaaaattgctgggatgctatattggcaaatgcagtggatgcctaacgattgatctaatacttcca

SEQ ID NO: 50481 - DNA, 197 bp, Setaria italica
  Peptide Sequence Number=SeqID_116455
ccatttaacaaagtaaggatttgctatattagtaccggagagaattaacaaagtcaatgggtgcttacagatttagcagaccacatcttgctacaagatgtgatatcccacaagttcatttctatacctttcctacaataaaatggggccattatttctggaactcaaaatttgcttggactttcatgtcacaaata

SEQ ID NO: 50482 - DNA, 265 bp, Setaria italica
  Peptide Sequence Number=SeqID_116456
tttactcttcttttcttcttttctttccggaattcagcctcagcctcgttctcttcaactgttttactcttctttttcttcttttcttttcggacctcagcctcagcctccaccaaagactctggttgcttggactttgtctcttcaggctcttcaacagaaaaatgtgaatcaataaccacagttgttaagtattgtcttgtctttctagtaaagttaccgttcttagttaaagttcttaactttgtttcttttgtttgttttt

SEQ ID NO: 50483 - DNA, 443 bp, Setaria italica
  Peptide Sequence Number=SeqID_116457
atcactaggtctggatgtgaagaaggttgataagtgcatgggagacccaaatgctgattctgatcacccgttgcttaaaatggagcaagatgctcagattgggaaaggttcaagaggagatgttactatattgcctactcttgttgtgaacaaccggcaatatcgagggaagcttgagaggaaagctgtcctcaaagctatttgtgctggttttgaggaaactactgaaccaaatgtttgcctgagtgatgatatagaaactaatgagtgtctgaatgacaatggaggttgctggcaagacaaagctgctaatgtcattcagacactcaaatgttgcctgagtgatgatatagaaactaatgagtgtctgaatgacaatgaggttgctggcaagacaaagctgctaatgtaaacggccacggaaggtgtccctgcaggccgtt

SEQ ID NO: 50484 - DNA, 403 bp, Setaria italica
  misc_feature (191)..(191): n is a, c, g, or t
  Peptide Sequence Number=SeqID_116458
aactgtcatcaaatcactaggtctggatgtgaagaaggttgataagtgcatgggagacccaaatgctgattctgatcacccgttgcttaaaatggagcaagatgctcagattgggaaaggttcaagaggagatgttactatattgcctactcttgttgtgaacaaccggcaatatcgagggaagcttgagnggaaagctgtcctcaaagctatttgtgctggttttgaggaaactactgaaccaaatgtttgcctgagtgatgatatagaaactaatgagtgtctgaatgacaatggaggttgctggcaagacaaagctgctaatgtaacggcctgcaagggaacaaccttaccgtaggaccgaagtagtagtagaaatagaccccaacgttacaaattagta

SEQ ID NO: 50485 - DNA, 223 bp, Setaria italica
  Peptide Sequence Number=SeqID_116459
accccaaggacaactccaaacgcctgcgacgatttcgacggcaagcaccccttccgcgccaagcctggcgcgatgcccaccttcctcctcgtcgaccgcggggattgcctatttgcgaaaaaggtttggaatgcgcaaaatgctggtgcctctgctgtacttgtagttgatgacaaggatgaaccattgataacaatggttcatccttgtcatcaactacaag

SEQ ID NO: 50486 - DNA, 220 bp, Setaria italica
  Peptide Sequence Number=SeqID_116460
cagcatgggctgcagtgtggggtatcttgatagttatcgttgttgtggcagcgggaagttatattgtccagtggcatatactgtgccataatagctctgatctcagagtccatgtaagacctcagtctgtatttgtatacaatatactcccgctgccacaacaacgataactatcaagataccccacacagcagttcaggctaaagcagcatgggctgca

SEQ ID NO: 50487 - DNA, 185 bp, Setaria italica
  Peptide Sequence Number=SeqID_116461
ctgttaaaagatggagaaatggttaatgtgaatcttgattggagggaggctgttccacatcctgatgaccgtgttgagtaatgaagttaataggaacaaaacaagacaaatagaatagaaatagtaggaacctaaaatagtagaataatagactagaatagaaattttactaaaaggaaatttaa

SEQ ID NO: 50488 - DNA, 232 bp, Setaria italica
  Peptide Sequence Number=SeqID_116462
aacggttgcagaaaggtgaatgcctctccagggaccccaagctggacttcatcggtgatgtcagctgatgatatggcattccttgattcacggagcttgtttatttctttttccaactgcttcttgatgaattcctctgcttatattctgcaacaagacagataaagttacagcccactcaaaggaattcatcacggagcttgtttatttctttttccaactgcttcttgat

SEQ ID NO: 50489 - DNA, 260 bp, Setaria italica
  Peptide Sequence Number=SeqID_116463
gaagatttcagacaagaagctgcaataaggaccaggattgtgacggcaaccaccacggcggcgacgtagatctgttccgggggttggctgacggatccagctctccgcttggcctacccaggcctctgcttgccgaatccactcatccatcgcgcgcgcgagcccaagaaccaacggaggaagaaatcaatccaatccctgatggatgggtacaaaggcggtcacacctacggctagtagcgagaaccccaagcgcacgg

SEQ ID NO: 50490 - DNA, 405 bp, Setaria italica
  Peptide Sequence Number=SeqID_116464
tggctgaggaaattgagaatgtacatatatatttcataagatgttctcaaatacagtgaaaatgggtaccattgaatgcactgaaccgtctaaccatcttattacaagcaatcgaggtctaccaatcaccaacgcatcttactgcgagccgccattaaccgagggatcaggcttgtgagcggccagcaagaagtccagcatgaccttgttgaaccgagccgggtcctccagctgcggagcgtggcccgtgttcttgatgacctccattctagcgctcccgttcagagacctgaagaacacggcaacgtttgtacaggacaaagccgatcagtgtttgcatggaccgatgaccgacgggagttagagagcgtgcgtgcggaatcatcggagtacctctgaactgcg

SEQ ID NO: 50491 - DNA, 258 bp, Setaria italica
  Peptide Sequence Number=SeqID_116465
cccgcccatccgaaccccccttcctcctccgggttcgcgtgaggctgcgctgctgccgccgctgccgccgccggggaggagggccaggcgagatggaggcggagaagaagccgccggcggtgtccgacatgggcgcctgggcgatgaacgtcgtcagctccgtcggcatcatcatggccaacaagcagctcatgtcctcgtccggctacgccttcgccttcgccaccacgctgaccgggttccacttcacggtcacgg

SEQ ID NO: 50492 - DNA, 244 bp, Setaria italica
  Peptide Sequence Number=SeqID_116466
agcactacaccaccaaggttatttctgcggtggtcgttgtggcggccggtgttgggatttgcacggtcacggacgtcgaggtcaatgccaagggattcatctgcgcgtgcgtggcggtattctgcacgtcgctgcaacagattgtgagctcctttccttgtctattaccatctttcatgctaaacttttgcattgtgcgttccttgcttatgatgtcaagagttctagtttcggggtgccatga

SEQ ID NO: 50493 - DNA, 347 bp, Setaria italica
  Peptide Sequence Number=SeqID_116467
tacttgggcccctttgtagattactacctcaatggacgatcgttgttgaactacaatttttcaggaggagcaactttcttcatactgctttcatgctccctggccgtcttctgcaacatgagccagtacctctgcattggcggttctctgcgacgtcgttccaggtcttgggccacatgaagaccgtgtgtgtgctgatcctcggctggatcctgttcgactcggccctcaccgtgaagaacatcctcgggatgctgctcgccgtgatgggcatggtggtctaacaagactagggaccgtaggaaggaccgaagaaagaaaggacgtaccaaccccgaattacccca

SEQ ID NO: 50494 - DNA, 540 bp, Setaria italica
  Peptide Sequence Number=SeqID_116468
ttgttactattggtcctagttgtcgtcttgtaaagtcttgttaggtttgttggttggtacctagtaaccttgtattctttctttcttctattgttattggttccttgcttagattgttcatttttggcttttcctgcattggagattacggtatactgaaattatgcatatgggaccactaaaatcaatgaaatatggtgccattatgaaaagctttaatataacttctcgaagaaataccaaaaattatggtaaatgagagttggtacttttgtaacgaagaccagtagcagtttactccctccaccattttttctgctgctgagtacaatactaaattcgtcgtcacaccccacactgtatttcccttgtacaagatcggaagtgccactgacagaatatacgggatcagaaccctttgtaaaagtcgcgtcaacagtaactgattaatgaacctgccctcgagcacgactttgcttgtcagttgcctcgtcaagattcgtgcaagcaggtatccatcggagggacaatggctgctag

SEQ ID NO: 50495 - DNA, 367 bp, Setaria italica
  Peptide Sequence Number=SeqID_116469
tttactaattatttaagtctttcttctttacttttgttgtctattatttcttcttgtctagttggcttgttgattgtttttactgttaatatgtatcactgtttatggcaacatgcagggtattagtgcaagcatttcacactctggccacaaagatttggtaatagagtgtgtttctggttctgatggcaaggagggtattgctaaagcagccagtttactttgctcaacttacttaaatggtgatactcatggagatggcaaaaaaggagccaacatttacagaagctgacatggccagtgcgctgaaagctgtaggttgtggtggaccagaacctgatcttcttctcatgtatggtcctgctag

SEQ ID NO: 50496 - DNA, 425 bp, Setaria italica
  Peptide Sequence Number=SeqID_116470
atttattatcttactattatatgttgcatcataggagtcatgaagaaatcatttgaaccggctatggagggttcaagagatgggaaggtaagagaatatctggtaacttacgatattaagcttcccttactttgtgcatattctctgctagttggcttgttgattgtttttattgttaatatgtatcactgttcatggcaacatgtagggtattagtgcaagcatttcacactctagccacaaggatttggcaatagagtgtctttctggttctgatggcaaggagggtattgctaaagcagccaatttactttgctcaacttacttaaatggtgatactcatggagatggcaaaacggagccaacatttacagaagctgacatggccagtgcgctgaaagctgtaggttctggtccaccacaac

SEQ ID NO: 50497 - DNA, 233 bp, Setaria italica
  misc_feature (226)..(226): n is a, c, g, or t
  Peptide Sequence Number=SeqID_116471
accagtagcagtttaatccctccaccttttttctgctgctgagtatactactaagttcatcgccacaccctcactttgtatttcccttgtacaagatcggaagtgtcactgacagaatatacgggatcagatccctttgtaaaagtcgcatcaacagtactgattaatgaacctgccctcgagcacacgagcgaatttaaatacgaaaaaaaaaaaaaaaaaaaanaaaaaaa

SEQ ID NO: 50498 - DNA, 159 bp, Setaria italica
  Peptide Sequence Number=SeqID_116472
cccttgtacaagatcggaagtgtcactgacagaatatacgggatcagatccctttgtaaaagtcgcatcaacagtactgattaatgaacctgccctcgagcacacgagcgaatttaaatcgagattgatattgtttgttaccaaaaaaaaaaaaaaaaa

SEQ ID NO: 50499 - DNA, 106 bp, Setaria italica
  Peptide Sequence Number=SeqID_116473
tggtactgttgtaacgaagaccagtagcaactctcatttaccataattacggtatactgaaattatgcatatgggaccactaaaatcaatgaaatacggtgccatt

SEQ ID NO: 50500 - DNA, 322 bp, Setaria italica
  Peptide Sequence Number=SeqID_116474
tatcattcgtcagggatcggcaatgatagctaaagatacttgatgatcctcattggagatagcttcagacatgagcctttcctgcaatctgtcaccagcttccacattcccaaacttcactatcattcgtcagggatcggcaatgaatttaacaattacaccaagaaggtggcatggaagaggacttctgggggtgccatttcgaatgttatgaagagtctgcgttcttcagccaataatgttcgcccttctggacggctctagcatcaattgatgacttaggtcgtgattgaactgattaactgaaagtgtgtaacgtcct

SEQ ID NO: 50501 - DNA, 327 bp, Setaria italica
  Peptide Sequence Number=SeqID_116475
cgaggtcaatgatgaggatgatgacgaggggtagtgaggaggaggaagacgatgacgagtgaactcagctgaagatgatgtgctccactgaacgatggagtggtgaatgcaaaggccccgtggcgggaattataaggagcctatcctatctactagaattattcagtttcacttcacatcgtgatgttttacttttgtcgtcctataacggatagcgctccttgttggcgccaccggcgtctggcgggatgcaatgccccgcttgttacccaaactgatattatcacaatattagccgatgacgatggaaacagtaatctaggtaac

SEQ ID NO: 50502 - DNA, 435 bp, Setaria italica
  Peptide Sequence Number=SeqID_116476
tgatattatcacaatattagccgatgacgatggaaacagtaatctaggtaacaagcgggcattgcatcccgccagacgccggtggcgccaacaaggagcgctatccgttataggacgacaaaagtaaaacatcacgatgtgaagtgaaactgaataattctagtagataggataggctccttataattcccgccacggggcctttgcattcaccactccatcgttcagtggagcacatcatcttcagctgagttcactcgtcatcgtcttcctcctcctcactaccctcgtcatcatcctcatcattgacctcggactttgacttgtcagactcctcttcatcttcctcctcttcctccttggcaggagccttcttcgtcttcatggaggaattccgcaaggagttcaaggagaagaacccttaagaacaagttc

SEQ ID NO: 50503 - DNA, 263 bp, Setaria italica
  Peptide Sequence Number=SeqID_116477
tctgtcagggatttccacctgttaccggctgcttttcccacctccgcaacagacttgttcttagggttcttctccttgaactccttgcggaattcctccatgaagacgaagaaggcgctgggcgccctcttgggcttgttggggtccttgccaggcttgccctcgtctccctccggtccaggaatccgccatggaagggggccaaatccaagggcgccgccaaggcagatgccaagttggcggtgaagagcaagggagcggag

SEQ ID NO: 50504 - DNA, 251 bp, Setaria italica
  Peptide Sequence Number=SeqID_116478
tggctacataaggagccttgtccgcatctgtcagggatttccacctgttaccggctgcttttcccacctccgcaacagacttgttcttagggttcttctccttgaactccttgcggaattcctccatgaagacgaagaaggcggtaacaggtggaaatccctgacagatgcggacaaggctccttatgtagccaaggccaataagctcaagtcggagtacaacaaggccattgccgcctacaacaagggcg

SEQ ID NO: 50505 - DNA, 347 bp, Setaria italica
  Peptide Sequence Number=SeqID_116479
atcagttagcagcgacttgtctgcactgagcataacttgggctggtgttcttccgtcactggactatactcatggatccatcccaacgacgatgatgccgggttgtgaggaaagaagaaactttgctgtaattgttgtagatttttcttagctgttaggcttttggttctaatttactcaggagggtatggctttggaggtggaatcttgttgatcctgagctctggagccgctgtaattagaccgtccgctctgtttgttggtgataaactgttgagcacatgctgcagctttacataaaaatttagatgtgactttgtactttgttggggaagcgttacttcagc

SEQ ID NO: 50506 - DNA, 288 bp, Setaria italica
  misc_feature (265)..(265): n is a, c, g, or t
  Peptide Sequence Number=SeqID_116480
tagtaggacttaggaaggtaggaaatactttagtagaaccctgagcccagcccagcctcttcaaagatctgggagccactgtaattagcccgctctgtttgttcttgataaaagtcttgagagcacattcatcagctttacataacaatttagatgtgacctggctttagctgacatttcaacactatggagcgacaagtagcatatcgctgcgccgtcatgtatcttgtgttgcgctgcagctgtatgtataagaattcaaacngatcagcaagttataatatgtca

SEQ ID NO: 50507 - DNA, 212 bp, Setaria italica
  Peptide Sequence Number=SeqID_116481
gggccaacaggtgcattagctgcacagcactcaaggcagtatgcaataaatcttgctgaaggtagcagcagcagtcctgcttggtgtggcaaatgtcattacggagaagaaagaatcaaaagacagttccagtgaatccaataatcatgtaaaatctgaaggtgtcaattctcagcaaagcgagcatggtgcaggttctgtgccagcttcat

SEQ ID NO: 50508 - DNA, 288 bp, Setaria italica
  misc_feature (269)..(288): n is a, c, g, or t
  Peptide Sequence Number=SeqID_116482
ttccgtcactggactatactcatggatccatcccaacgacgatgatgccgggttgtgaggaaagaagaaactttgctgtaattgttgtagatttttcttagctgttaggcttttggttctaatttactcaggagggtatggctttggaggtggaatcttgttgatcctgagctctggagccgctgtaattagaccgtccgctctagtttagttaggtagaataaaactagttagaagacaacaatagactagacaagactttaacaatnnnnnnnnnnnnnnnnnnnn

SEQ ID NO: 50509 - DNA, 271 bp, Setaria italica
  Peptide Sequence Number=SeqID_116483
taagtaaccgtacttagttaatttaagtaccgttccgtcttcttgtttgttggtgataaactgttgagcacatgctgcagctttacataaaaatttagatgtgactttgtactttgttggggaagcgttacttcagctgaccatgtaagcactgctgcactggtgcagcgtctagcgtgacgagttgcgccgtcatgtatcttgtgttgccgtgcagctgtatgtataagaattccagcagatcagcaaagttatattttgttgctgtttc

SEQ ID NO: 50510 - DNA, 315 bp, Setaria italica
  Peptide Sequence Number=SeqID_116484
cattcaaggcagtatgcaataaatgatgggatggtaatgcacctgttggcccaacaagcgatggagaaatggcaggaaaatacggcacccctgacggaacagagttgggaaatgttgttgaccaacaggtgcattaccatcccatcattcaaggcagtatgcaataaatcttgttgagggcagcagcagcagtggacgtgacaataatcgtaaatgggaaagtcagggccttgatcttaactcaggccctggaagtatagatctagaaggaaaggatgaacgggcacctttacaaattagacaaaatttgatccc

SEQ ID NO: 50511 - DNA, 161 bp, Setaria italica
  Peptide Sequence Number=SeqID_116485
gcaatgagggctctgaaggagatcagttagcagcgacttgtctgcactgagcataggtcctgcaatgtagatctttctgtgtcccaactgccatcaggttccttcctcttgttgagggcagcagcagcagtggacgtgacaataatcgtaaatgggaaagt

SEQ ID NO: 50512 - DNA, 295 bp, Setaria italica
  misc_feature (268)..(268): n is a, c, g, or t
  Peptide Sequence Number=SeqID_116486
taacttaagtacctaattagtaagtaaataataatacaaccaataggtttagacctactagaccaaacccttgtggtccagtgccgatgcaatcatttttgccttctagaggagaacagccttacccaattgaggcagcacctggaacccagcggattattgcgcctacagctgaaagtggtcaatttggaggtgatcccagcagggctccagttatttcatcgtctccaacaatggttttcatcagcctgcatatccgtatgcaggnttgcttttcctcccagtgttcaccttc

SEQ ID NO: 50513 - DNA, 503 bp, Setaria italica
  Peptide Sequence Number=SeqID_116487
accggaagctcggcgaggaggagggatcggcggcgccgtcagggaagatgcagcgggccggatatgcatgggtggcgcggcgctgaggggtgcgacggcaggaggcggcgtctcgttcggctcatgtggccagccgctcgcgtagaggcagaagctccaccaccaccggcacagggaccacctacttccccttccagctcatctgttccccccgtctcggactacttcttatccgccggaatcggcggcgcggaagcaggactgcgtcgattcccctcgccccgtgtcacccgactcgtttataaaggtagttggcttggcggtcacacaaatcttacctgcatatagtatctagtagaaagtcacatttaaggaattcgttgaaaaaacccagtattaggagggcatcttctataaccacaaatcatatgcattagagttgagacttccacacaggcgccatggtagctggtggcacactacatagaggcagatggggctga

SEQ ID NO: 50514 - DNA, 255 bp, Setaria italica
  Peptide Sequence Number=SeqID_116488
cctttgttcctacaactggaatttggtaaattcttccttgcctctgccaacccttgtggtccagtgccgatgcaatcatttttgccttctagaggagaacagccttacccaattgaggcagcacctggaacccagcggattattgcgcctacagctgaaagtggtcaatttggaggtgatcccagcagggctccagttatttcatcgtctccaacaatggtttttcatcagcctgcatatccgtatgcaggattt

SEQ ID NO: 50515 - DNA, 159 bp, Setaria italica
  Peptide Sequence Number=SeqID_116489
tgttcctccattcatcggattgatacgttggattgagaaaaagaagaaggctatcccaaactacgcgttagttggctttatagacctgccgacatcaagcttaacaagggcattcaactcaacgctgcaccaaacgagatcttctactctttccaccag

SEQ ID NO: 50516 - DNA, 336 bp, Setaria italica
  Peptide Sequence Number=SeqID_116490
cgtggtcttgttggctgtgtacatcagggtctccagcgcgtgcaaggagacgtggaccgggttcgtccatggaggcgttccatgacgcgctcagcttcttcaggctcgggatcccatcagctctgatggtctggtacgtcatgtttactgattttgatgaagtttctgcgcagctgtgtgatatggtcagctagtactacattgcattacatgacacattgaagatggacgacgccgattgcagcttggagatgtggtcgtttgagctcattgtgctcctttcaggccttctcccaaaccccaaattggagacgtctgtgctatctatcagcctca

SEQ ID NO: 50517 - DNA, 270 bp, Setaria italica
  Peptide Sequence Number=SeqID_116491
agaggagtggggtgtatggagcaacactcgctgaggcagatacagctgttgttctcaaaatggacagcaatggactactaactcaggtacgtttcagagtttttggttgcaacttgaacatactcgcactgttttaatgtaaagttcttttaaaaaaaattttaaagttgcaactaatattttggcacaatggacctaatcaactgttgcatcagtagtttttgattgtctaagcatgcttgtacgcttgcttttaattttaaaatcaag

SEQ ID NO: 50518 - DNA, 241 bp, Setaria italica
  Peptide Sequence Number=SeqID_116492
ctggaatgctggagactgtccttcgggttggtgtgcttggagaagatgatactggcgaagaatcccccagtaaaaaaaaatactagcaacaaatgtgcttgttatgctgtgaagctcttatatgaggtgtaacatcgctattttgtcttcaccagaaacctgaagataccttctcggatctgtagtgccacagccacttatacattctccaattggtaccgagaatgccagcagtgatagg

SEQ ID NO: 50519 - DNA, 241 bp, Setaria italica
  Peptide Sequence Number=SeqID_116493
gcactgaggtaccagactgcagtgaacatgtttgtctctttgattttgtactctaccttcacaggttcttcgacctcaacgtcggaagatggaacggatccttctatcaattcgacgcgcatgggagggtgctgcagggcattagcacgcgcttgtccgtgagcacgtacggagaggacgacctcatcagcctcctgcaatcgctgtatattaagcaagcttcctctaggatatcaatttg

SEQ ID NO: 50520 - DNA, 282 bp, Setaria italica
  misc_feature (1)..(26): n is a, c, g, or t
  Peptide Sequence Number=SeqID_116494
nnnnnnnnnnnnnnnnnnnnnnnnnngttcataatgtaacttgcctataaaaaattcccctgtagaggaagcaggacatatatacaatacaatacacacaggatacatactacacacaagtacaatacacgatggacttatggcagttccctggaggatatagtgtacataacaacagctgctatttagtaacaaattctaatggtgtccactatttatactgcactaagccacaaacacaaaagggcttccccttcttcctatgatgaagcaatacgacta

SEQ ID NO: 50521 - DNA, 417 bp, Setaria italica
  Peptide Sequence Number=SeqID_116495
agaggaagcaggacatatatacaatacaatacacacaggatacatactacacacaagtacaatacacgatggacttatggcagttccctggaggatatagtgtacataacaacagctgctatttagtaacaaattctaatggtgtccactatttatacttcattcacacatttattgagagcgatgctcatcataggaagaaggggaagcccttttgtgtttgtggcttagtgcagtctgaatttgcccagccaatctgcctccgttgattgtcatacacaactaacttgccacgcagtgaaacatctccgactattatagttgacccatggttaatctctgttccattgagaagtccaaaacatttactatttctcccgaggattacttgattattagtgataaaggaaatgtctg

SEQ ID NO: 50522 - DNA, 215 bp, Setaria italica
  Peptide Sequence Number=SeqID_116496
cgcagtttgtacatggtgcatcacactggatccacgtcaagtcgcttccagtatcaacatcaagaaagtacggtcttggaggattgccaacaaagatagatgtataatactggccatcggggaagacattccccttgatcgggagcgacttgacgtggatccagtgtgatgcaccatgtacaaactgcgcaaacggaccccatcctttatataag

SEQ ID NO: 50523 - DNA, 438 bp, Setaria italica
  misc_feature (413)..(438): n is a, c, g, or t
  Peptide Sequence Number=SeqID_116497
gttttccgtttcttaggttccgtttggtttgggttcgttccgttctattgtccttcttccgttcgttgtttcgtgcgggtggccaagcgtaaccggcagtcccgtgtcgtctccctgaagctcgaggcttagcaggcttgccgccagccgcctctgctgtgccaccaccaccccctgcctgccggggcgttctaaaggcgcctctcgctctgtaccatacagcactaggtcacaatggtccagaaacctgttttcgccgtagaatcgtcgtggagtgtgacctgcgtgtgtttctgtaacttgcttctttcccacatatatagggtcgtggatggatccgagatggtaaaagatggtgtagacgaaggacatacatgtgtttttttgcgttctgtgcagatggttgctacttnnnnnnnnnnnnnnnnnnnnnnnnnn

SEQ ID NO: 50524 - DNA, 337 bp, Setaria italica
  Peptide Sequence Number=SeqID_116498
agggttgtctttgcacacacttttatggatcgatgcatcaagccttctgggtggcataattgggacaaatctgagaatgagcgaactgcttgcttctatgagtacagatgctcagggccaggctcccgctcatcaaaccgggtagcttggtgcagacagttgcttgatgttgaagcggagcagttcctctctcacacttttatcgatccagaccttgataggccatggctccgccagatgatggcaacaagagtaccagcctctgcattagtacttgtattccctaggtattcctttggtttattccttccttttcttagttcctattcttaaatta

SEQ ID NO: 50525 - DNA, 268 bp, Setaria italica
  Peptide Sequence Number=SeqID_116499
ccaaggacatgtgcatccaaccccgcttcacgacctgccagtcattctccataacgatccatcgtgacgtacatcctgcctccaccagacgcgattctcgcgtcgacgcccttctcccgtagcctggcgaggtcctcctccagcatctccacgaacctgatgctgctgccgtccagcacgtcgcggccaataccgtagaaggaatagtaggaacgacgtaaccctaacttaaggaaccccgtaagaactaacgaacttaagaaacaaa

SEQ ID NO: 50526 - DNA, 228 bp, Setaria italica
  misc_feature (223)..(223): n is a, c, g, or t
  Peptide Sequence Number=SeqID_116500
gtgagagcaggctacgagggaatcggaggggagagatcggggaggacgaatgggttggttggttggttggccatcgagaagcgcgagcaggaccgcatgatccgggaggaggcgtggcggcggcaggagatgacgcggctcgcgcgcgagcaggagatcctcgcgcaggagcgggccatggctgcctcccgcgacgccgccgtgctctccttcatccagaagntcacc

SEQ ID NO: 50527 - DNA, 356 bp, Setaria italica
  Peptide Sequence Number=SeqID_116501
aactagaaagaagtaggaatagtaacaaaggtagcagtttacatgaatgcaccagatggtaatattgatggtttggaaaggtcacagttgggacctattgtccatgctaaatgtcgatctgggcccagcagtacttcttaggatgggcatagctggtgagtatctgtagatttcattgtgctataattaacgtatgcaaacttttacatatgtcttgagtttaacctcactggagtcaggggagattatctccttgctgatttggctgtttgcacatgtttcagctatggttatatgaaacttcatgatgatatctgattaaataagaatgctggatatggataatgcaatgtttt

SEQ ID NO: 50528 - DNA, 360 bp, Setaria italica
  Peptide Sequence Number=SeqID_116502
acctggttcgctgcagattggttcatcatcatcacaagttggtggccctcaaccatttgtgtctggactattgagtaaccttatgcggcaaggtgtaattacattgggaccacatagccaacctcaggactcaattggagttgacttcaatatagacctcaaggtacggaatgattctgtcatcaatgctttgtatcaggatctttcaagacagtgcaaaacttgtggccttcggttcaaatgccaagaggagcatcgtgctcacaatggaactggacaatagttaacaaaaaacaagaaaattacaaaagaaaccgtaaagacaaatacttacaacgtaaaataattttagtacaacta

SEQ ID NO: 50529 - DNA, 322 bp, Setaria italica
  Peptide Sequence Number=SeqID_116503
ttttcctaagtcctaagtcttccttcgtattctattcggtttgtattggtcccaccatttaaatcttgaagataggattactgctgcaagtcatgctaacatgcctactagtaggagacatcctagcaattttggtgttcagaatggagctcttttggagtaccagagttctgagcataccctcaatcatgggagaactgctaccatgcaagctccaccttggcagcagcctactggtctgccattacgagtacaagcacctgaacatccatcagtacttgatagaataccactgcctgctgacggtgaaatgccagtcaag

SEQ ID NO: 50530 - DNA, 203 bp, Setaria italica
  misc_feature (131)..(131): n is a, c, g, or t
  Peptide Sequence Number=SeqID_116504
ggaagcacaacaaaaattgaagcaggccaatgtgatgcatcagcctgccgttcgtggcactaggcaaatggctgatgtggaggaggatctgataaatggattaacatcgaacggcttgcgaggacgtcctnaatgtttcagcatgctaacatgcctactagtaggagacatcctagcaattttggtgttcagaatggagctct

SEQ ID NO: 50531 - DNA, 294 bp, Setaria italica
  Peptide Sequence Number=SeqID_116505
aatactccagcaaaatggataatccctggaggggtgtgtagcagctgaaaacgaacagcctgaatagtactcaatggggccacaagtgatagtttagagagcatcagagtgactaatggcaaccctagaggcacggaccagcggttgaatgacttcaatgacatgcgggcatttaaaagagcgactgcaatctgcagataagtaggcaattcatagcaaatcagtagctacagtctacagcatgacacagacactacgaacagcccagacaaaaagcctgctcctgcagtacag

SEQ ID NO: 50532 - DNA, 477 bp, Setaria italica
  Peptide Sequence Number=SeqID_116506
ttaaacctaaaaataacccctaaccctaagaacccctaacctaagaactacaacgacgtacctacaaccgaccctccgccgccaagatgaacaaggagaggcttatgaagatggccggcgccgtccgcaccggcggcaagggcaccgtgcgcaggaagaagaaggctgtccacaagacggccaccacggacgacaagaggctccagagcacgctcaagagagtaggggtcaacaccatccctgcaatcgaggaggtcaacatcttcaaggacgatctcgtcatccagttcttgaatcccaaagtgcaagcttccatcgccgcaaacacatgggtggtcagtggatctccacagacgaaaaagctacaagatgttctgcctgggatcattaaccaattgggtcctgacaacatggagcacctgaggaggattgctgaagagattgagaagcaagcggttgctgctggtgccacggcac

SEQ ID NO: 50533 - DNA, 267 bp, Setaria italica
  Peptide Sequence Number=SeqID_116507
taccagcagcaaccgcttgcttctggtgccacggcacaggccaaggaaaataacgatgatgatgttccagagcttgttccaggagagacttttgaggaagtagctcaggaggcaaaagcctgatcataggactccaaaaagagtgccatcacaaggaaaccatgacctcacatttcactatttggagtcctatgatggcactcttttgcaaaccccccattaggccagccactctttgatttgcagtcggaaaacttttgtttctcc

SEQ ID NO: 50534 - DNA, 229 bp, Setaria italica
  Peptide Sequence Number=SeqID_116508
agttcttgaatcccaaaggtctgctgtcccttctatgttgctgctgctgttctgttacatgttgaaatggggaatgcatggtgttactgactcgtttgtctgatgtttccttatcccctaataatgcagtgcaagcttccatcgccgcaaacacatgggtggtcagtggatctccacagacgaaaagtaatgctcaccctctgttcaataaaatttaacagagggtgag

SEQ ID NO: 50535 - DNA, 247 bp, Setaria italica
  Peptide Sequence Number=SeqID_116509
ggaaggaatataagtgtaagttcttcaaaaaactgaagtaaaagcagagagcatattgtcaaaaccaaggctatcatactgcaaaaggatcagagacatgtagtgagtagttttaattccttagctcgggggaaaaacacggacgaatgaattcatgataatttgcaggaagattgctccatgaagcatgcgtagaggcagcccttctcctcgtggcgcctctgcacatggtcgtagtaggacatct

SEQ ID NO: 50536 - DNA, 417 bp, Setaria italica
  Peptide Sequence Number=SeqID_116510
tagtagggtagtactactttaaatttgtattcgtagtactttttcttggtactaaggtcttgtaagtattttacctactacttagggaaacagtttgttcctccaatgatggatcctgttctaggtgattatgctagaaatgtgcctgatgcaagagaatctgaagttttatcattatttgcgactattataaacaagtacaaaggtgagatgcttgaggaagtacctcgcatctttgaggctgttttccagtgcactcttgagatgatcaccaaaaactttgaagactatcctgaacatcgccttaaattcttctccttgcttcgtgcaattggtacacattgtttccaagcgtttattcagctctcaagtcagcaactgaagcttgtaatggattccataagctgggcatttcga

SEQ ID NO: 50537 - DNA, 302 bp, Setaria italica
  misc_feature (225)..(225): n is a, c, g, or t
  Peptide Sequence Number=SeqID_116511
aggacgggcgcaatggtggtgcggcggaaggggttcagggttgtgatgatgtacgatgccgtcatgcgggcctgcttcaagggagggatgcacggggacgccgtcagactgttcgatgaaatggccagggccggggtcaagcccgacgagcgcgtgtattccctcacaatcgcggcctcgtgcaagctgcgcgatgcagacagagcggtccaggtgctggggganatgagggaggccggcttcaggccatgggacttgacgtacagttctgtggtggatgtgctcgtgaaggcaggaaggat

SEQ ID NO: 50538 - DNA, 395 bp, Setaria italica
  Peptide Sequence Number=SeqID_116512
actgcacaaggatgaatggctcaggcatgatgagcaagcttcttcactattgaggccatgtacttgccctggtgctctgcgagggcaagctctgtgtcgctgggttgtctgctgccgtcgcctgcaaagacaccagcaccataggggctgcctcctctgatgtcgtccatgttgaacatgcctgcaccaaaggtgtagccaatggggacgaaaagcattccatggtgcactagctgggtgatcgccgtccaagcagtggtctcctggccgccaccctgcgttccggtgctgacgaagaacccggcgggcttcccggcgagcttctgctcctcccaagaagaagaagaccggtaggaagtacgaaagaaacgaccttacaattactagacgacgga

SEQ ID NO: 50539 - DNA, 257 bp, Setaria italica
  Peptide Sequence Number=SeqID_116513
agatataagaactcttcatcttggaaagaataatagagcttaactatgtaagcactatcaacttctgcaagaagattccgttcagctttgacatgttctacctggcccctacgaagcatttcagtattttttgaacttttgacaattattgggagaggtgcatttggagaggtgcgtctttgtagagagaagacctctaagaatgtgtacgcaatagaaaaagctcaaagaaatctgaaatgcttcgtaggggccag

SEQ ID NO: 50540 - DNA, 255 bp, Setaria italica
  Peptide Sequence Number=SeqID_116514
cttggaaagaataatagagcttaactatgtaagcactatcaacttctgcaagaagattccgttcagctttgacatgttctacatggtacctggcccctacgaagcatttcagatttcttgagctttttcattgcgtacacattcttagaggtcttctctctacaaagacgcacctctccaaatgcacctctcccaataattgtcaaaagttcaaaatcttcaactcccactgagacaaggcacacaggggatagg

SEQ ID NO: 50541 - DNA, 239 bp, Setaria italica
  Peptide Sequence Number=SeqID_116515
atttccatcaagcgagggtgctccagtgtcacctgattgatggtcaaggtaaagtttgttacttgcagactcagtgacccttgctgccacaaaagctgtcatagtttcattatatgtgaatcgactgattttcttaccaatttcaaagttgccatcagaaatctcgttcacaatatcagcagggttcttgcaattagcagcagtttctagcccaacagatttacaagtaagaaaaagac

SEQ ID NO: 50542 - DNA, 450 bp, Setaria italica
  Peptide Sequence Number=SeqID_116516
aaacaacgtctaaagtccatcatcaatagttctgtcacataggcagttaggcacacatcatgtatgcaagtgaaacaaagacagaaacaactatatgggtggagcaacctagaacagcttcctttcaattgctgcatgtgtgaatcccatctattgaaatctctggggttcttctccatagcttgctcaatatttgtcattagtctggctgagtccttgaagaataaggaaacaacttcttctgcaaaattaggacttgcttcatcctgcaagtcttcaatctgacaaaattgctcatccaagtacccctgatcaaagaggttctttttcaagcatgctgcctggcgctgcaaattataacactccatttacaagtgttgaatgatgggaacagaggcaaatgaatgccttcaaggtagagtaggcacaaaatgcatgtgcaactggtcg

SEQ ID NO: 50543 - DNA, 371 bp, Setaria italica
  misc_feature (36)..(36): n is a, c, g, or t
  misc_feature (73)..(73): n is a, c, g, or t
  Peptide Sequence Number=SeqID_116517
tcatcaatagttctgtcacattaggcagtttagcanacatcatgtatgcagtgaaacaaagacagaacaactntatggtggagcaaccttagaacagcttccttttcaatttgctgcatgtgtgaatccatctattgaaatctctggggttcttctccctgcacagtattgttagctattagaaacaaaagttgataccagtgagcatgtaaagaggaagagccatcctagtttatcacatcgccgatacttacatagcttgctcaatatttgtcattagtctggctgagtccttgaagaataaggaaacaacttcttctgcaaaattaggacttgcttcatcctgcaagtcttcaatctgacaaaattgc

SEQ ID NO: 50544 - DNA, 235 bp, Setaria italica
  Peptide Sequence Number=SeqID_116518
taaggggaggtggagaagcacctgcaccagtaagaatagtcattttttttacatatcaccaataagtagatggtcatgatgttcacttatgaaaaatataagaaccttgaagatgaccagaataactgatgtttgctcttcgtttgctgctagactcaaccaggttgtacataatggttaaaccacccattgttaacgtaacctaacttcttagttaaacttaagtttaaactta

SEQ ID NO: 50545 - DNA, 292 bp, Setaria italica
  misc_feature (37)..(37): n is a, c, g, or t
  Peptide Sequence Number=SeqID_116519
atatttaacttcaatccatttgagatttctggcttancaggcttgaggaaccgtactttgtttagaagttgatgtgcttgggtcaacaggttgtgcagttgatgatgtgcttgcgtcaaaaggttgtgcagttgatctaatggggtctctgggcacaggcaatacatttgaattgactcaagtaaagcgagtgataaatcacaagcaatggaaacaccaaaaacttctggattagtcaattcaaattgttatttgtccttgttgtccctagtagtaccccctatttaagtaa

SEQ ID NO: 50546 - DNA, 377 bp, Setaria italica
  Peptide Sequence Number=SeqID_116520
ggctacgcatctttgcttttttgaatatcatctgcagatagcggtctgctattgtttgtagagttcctggcagaattaacattcttcaccgcagctttcttatttggatgttctacaagtagaacttcctttttttgttttggattttgtttgcatagcactccttttattcgtctcatcagcagaagcagtgagaagcatttgtgtctttctgggctcaggcttactgctctcatttgcaccatcagtcaaggcaaagtaacctacctacggtaaataatacaaacttacggaatttaccaaagaactacgtacaacgtaaaaatttacaacttaatacctttagtttagacaataattaaagtaccttactagaa

SEQ ID NO: 50547 - DNA, 404 bp, Setaria italica
  Peptide Sequence Number=SeqID_116521
gctcttagcaagatcgtgagtacaggtgcggcggcgatgaggtcggccgtggcccgcttgatccgctcctcctccgcctccgcctcgacctcccgtctcagctcatcgccagtcttgctgaaaactggcaatgtattcttcagcagtgccacgcccagcgatccgaagcacgtcgaggagccttttaaggtggaggaggcagaaactgtgaaggtgacaccaccttctccagacaaggcaacctcctggaaccggcttcatttaaggatgctatggataatgtttctgcagtgatatcctgtgttggaggtttttgggtcaaaattctttcatgtacaagattaatgggactgcaaacatcaatgccattaaggctgcagctgagaaaggtgtaaagagatttg

SEQ ID NO: 50548 - DNA, 272 bp, Setaria italica
  Peptide Sequence Number=SeqID_116522
aactttgttctatcaatggtaatgtagttaatatctaccttcttctatcggacaggcaacctcctggaaccggcttcatttaaggatgctatggataatgtttctgcagtggtaagcctcccacccccatccccaaaaccatttgagctaagtttgttgttgtacacatttcttctcttatagttgatttcgttgttatttacatcgttcttgcatatcaatagtgtcatgaagagtagtttatagggtggcgatattataccaaggttttt

SEQ ID NO: 50549 - DNA, 165 bp, Setaria italica
  Peptide Sequence Number=SeqID_116523
gttgatccattgcattgcagttgtgttccctgtaagtctgtattgttggcaataattggtatatatatgtatactttttttttggtttcagagagctgctgaagctgaattgctgtcaaagttcacctatggaggagtgatactgaggcctggttttattcatgg

SEQ ID NO: 50550 - DNA, 229 bp, Setaria italica
  Peptide Sequence Number=SeqID_116524
gtagtctacgtcttgcacagccgtgctttggcatgcgcaatataacactgagaatcacctccatagtaaagacttcaagatgggatcaactatgcatacagcacatacaatcccattctgcagacaatggagcggtaatactcagatatgtatgatctcgatcgacaacacacttattcctttccttggaagcttctagtaggtcgggcaggaacaacaccgacgacta

SEQ ID NO: 50551 - DNA, 221 bp, Setaria italica
  Peptide Sequence Number=SeqID_116525
tgacggaggctacaacaagtccagcggcgatgactatggccgcagccatagtcgtcggtgctcgacttgttgtagccgctgccgccgtagccatcagtgctggagttcttgtagccaccatcatagtcgtcggagcttggcttcttgtattcgtcgctggtggtggacttgctgtatccaccgatgactacagtggcagatttgttgtagtcgctgactta

SEQ ID NO: 50552 - DNA, 214 bp, Setaria italica
  Peptide Sequence Number=SeqID_116526
tggacttgctgtatccaccactgccactgtagtcatcggtgccagatttgttgtagtcgctgcttaggtcattggacttgtagccaccatcgtttctgtagtcgtcggtactggacttgttgtagccacccccgctactgtagtcgtcagtgctggacttgttgtagccgccacaatctcctcctcctcgtcttcctccctctctctctcctcc

SEQ ID NO: 50553 - DNA, 145 bp, Setaria italica
  Peptide Sequence Number=SeqID_116527
tgtagtcgtcggtactggacttgttgtagccacccccgctactgtagtcgtcagtgctggacttgctgtagccaccttcgtcaacactggtgcttctgtagctgctgcgatcatactcatcagccattttaagttgtgaagtaaa

SEQ ID NO: 50554 - DNA, 330 bp, Setaria italica
  Peptide Sequence Number=SeqID_116528
aaacccattgcctaaatctctcctatatagcttttcaaacacatgccccagcagagtgtagaacacgaatgtgtgagcaggcatacaacaaagttgctacgatcgactgcgcagcccgcagcacgacagcctacggaccgatatcagcgcagtgatgtctggcctgcgagatggagcaacgcctgcttgtggtaggcggtgcggatcttcttgtacttctgcacaaaggtaggcaggtcgatgtccttctcgaggaacttttggtgcagctcctcagactccttgtccaactttgccatcgatgtttggagcttgtcgagcagtgcagca

SEQ ID NO: 50555 - DNA, 241 bp, Setaria italica
  Peptide Sequence Number=SeqID_116529
cgaggatcgtcctcaaggcgttctgaaggaagtagaagcatgaagttgcggaaatgcccatatgagattgatccttctgaatccgcattaagataacgtagcatggcagcagcgttatcttcattggcaggaaggccttctaggtaaccgtctcttcctcattgcaatttcgagatcttctagagtgacttggccatcaccatctctgtccaactcttcaaagaatcgctttccttcttaa

SEQ ID NO: 50556 - DNA, 356 bp, Setaria italica
  Peptide Sequence Number=SeqID_116530
taggactagactaaaattagtaatggactggacgttcttgctgagaatattcaggacgacaaagataatgtcacccgttttatgatgctagctcgagaacccatcatacctcgcaccgataaacccttcaagactagcatagtcttttcactagaagaaggacctgggcagctcttcaaagcacttgctgtattcgcactgagggaaatcaacctcacaaagattgaaagtcgtccacacaaggaaaggcctcttcgtgtatctgatgattgtctcataaacaggaacttcgactatctcttttatgttgatcttgaggcttcaatggctgatccaaaaactcagaatgctcttgg

SEQ ID NO: 50557 - DNA, 240 bp, Setaria italica
  Peptide Sequence Number=SeqID_116531
aacgaaagaacaaacttaacgaataactaagacaatttacaaggactagttacaaaactgggtggctgatagggctgtactgccacttgagaattcattgggaggtagtatacatcggaactatgaccttttgcttcggcatagtttgcacattgttggagaagttcgccttgcagttcgtcattgcttgttagccaatcctggtgtggagattgaaaaccttaaaagtgctatgagtca

SEQ ID NO: 50558 - DNA, 251 bp, Setaria italica
  Peptide Sequence Number=SeqID_116532
ccttggagcagctgaagggaatcagattggaggtgtagttcccgctgcttcttccggggtctctgtgccggtccacatggcggaagcatacaggtcgccgtacaagtaccttccatacaagcagggatcagcggaccctctatagacataacctcccatgattgatgcggatccaatgttcttgtttaccatccagcatgggcacctggagggaacacgtcactcgactccataaacgccatccctcctat

SEQ ID NO: 50559 - DNA, 237 bp, Setaria italica
  Peptide Sequence Number=SeqID_116533
tgctctccggggtctctgtgccggtccacatggcggaagcatacaggtcgccgtacaagtacctgaaaacacattaacagatacaccttaaaagtgaagtttcaactttcaaggattgagcttccatacaagcagggatcagcggaccctctatagacataacctcccatgattgatgcggatccaatgttcttattcacatcagaatggctgtaacccatgataggagggatggcg

SEQ ID NO: 50560 - DNA, 239 bp, Setaria italica
  Peptide Sequence Number=SeqID_116534
tacttgacagaaaaaggcaataaggtgagatcccctttatattgctttaatgtattattatctaatgaaagaacggtagacaataagcataatgaagtgctagagttgtatgattgaaacagtacaagtatcctgggatatgacttgtcccgaaagcttgagtaacgcggacaacttgttcagcttgaagtaggaaaattcttctgccttcttcgtagctaacaccgaaaacagttctt

SEQ ID NO: 50561 - DNA, 246 bp, Setaria italica
  Peptide Sequence Number=SeqID_116535
gtcagagcaaaaacaatctcactcttgcaagattattgattcagtcaggatggcacaaagcacgtggccgtcagaccgtaccatgccggcgcgcggtgctgcctctgacgacgatggccggtgtcggcgcaccagtacaacttgtcggagttgcggtggtacttgtaggtcggggcgaaggtgacgacgccctcgcgccagccgtagaactgccggccttcggagagctcgagcagcagctcgtcg

SEQ ID NO: 50562 - DNA, 189 bp, Setaria italica
  Peptide Sequence Number=SeqID_116536
catcgattatcaactatgcactttcacgccataacgggacaccttcaacacactgtatattgaaggtgtcccgttatggcgtgaaagtgcatcgattatcaactatgaattcttaaagggttatagacaaagaggaggagaactaaatgaatatgcagtgttatcattataagtagagttgtaccaaac

SEQ ID NO: 50563 - DNA, 434 bp, Setaria italica
  Peptide Sequence Number=SeqID_116537
tggttatttaaacttgtctatttgttatttggtactttttggtctattacaagtgtcgttctcagatttatttggaaggatttatataattgtcgaagtgcggggttgtggaacatgctgtactgcaagaagaaactgcacattctacttatctgaggtagatgagattaatttcaaggtatcccgaggatggtgtaaggggccgatacattgtcatgtcgccgctgccttctggaggtggtgggcatgagggatcagttgaggatgagctgagctagtaaatggttgctttctgacaaggttaatactattgttctttctcacacccggggtagagttgcaaactcttgtacaggcgcagacttagtacattgtcagtttacatggtggtaattaaatggttaaagttaaagttaaactggtttaaaactctc

SEQ ID NO: 50564 - DNA, 316 bp, Setaria italica
  Peptide Sequence Number=SeqID_116538
taactgggcgcggaatgctactccatcagaaagagctcgtgtgagagggtatcgtgtccgttctattctttctgcctcaaataagaagttgtggaataattctcaagacaagatggtttcatctgcaagaacaaatcgggttaagctgcggcggctgttaagagcctatacaggtgctgagctgctgaaaattactcaaatgaaggcaaggaaaaagcgtttacgttttcagaggagcaagatccatgattggggtctggttcgtccctttgtagtttgtattcgtaagtctagtaagtatttttgtttattagta

SEQ ID NO: 50565 - DNA, 180 bp, Setaria italica
  Peptide Sequence Number=SeqID_116539
catgtacgcgtccacgaattttccaaatgcgtgtggttgctggacttgctgctgctggagctgaagtccactctgtagagaacccaggcccattttcggtgacatgtgaagcacactctttcagtacatcggtagagtagttatctctttcttttcgtcttcttttctttttcttttttg

SEQ ID NO: 50566 - DNA, 347 bp, Setaria italica
  Peptide Sequence Number=SeqID_116540
acaaccatttgtatcctgtttgcagcactgctctggatactgtggatcatttactggagacgtgcattatctaatagagctgaagcaaatatatgagcaggtgtgtgaaatccttgaagataatgccataaatgcgaagacttcctactccaattgtgaaccttgggtggttgccctcttggctgagagatcatctgctggttcctcgagagagaaagaatgctttcttgtggaagaaggtagttaatttgcaatgcacttcaccacataatcatgtagattttaagttatcttggttggtgttaatcaagttattttgggctaccatatatagttgttacgacttt

SEQ ID NO: 50567 - DNA, 229 bp, Setaria italica
  Peptide Sequence Number=SeqID_116541
atgctagtgtttccatgaataatgtgctgccttatttgacaaaaagggtgcatggtgtttacttactaaatgtatcatatctcttttactgtttagttattcttattaccttgaggctgctgtaatataagctctcttgcagttacttcatcaagctatttctagacaagaaatatgctttgccataccgggcgcttgatgcagtgcttgctcatttcatgtcggtttc

SEQ ID NO: 50568 - DNA, 356 bp, Setaria italica
  Peptide Sequence Number=SeqID_116542
agaagacttactaacctactaacgacctgacaatcaatggcggcggggtgggtgttcatgtacttcttcctgccggagacgatgggcaagagcctggaggacactgcgaagctcttcggcaaggacgccgacgacgatgacggtgttgtcgtggccgccggccgccacgagagcaagaagtcatccactgagctcagtgctcagcagcactgagtaaagtgccatccatgcacaacgtgtccgtacacacatgtcatccagagtgtaggaacgaagctgttccgtaaagcttcgatgatactgtactactgtattattttttttcttggtgtggtgaatcttttagaatccctgcg

SEQ ID NO: 50569 - DNA, 248 bp, Setaria italica
  Peptide Sequence Number=SeqID_116543
cctgattcttcgtcaacttcaggtatgcatgtgtgacaaactgccagcagccggaagaacatctcgatgacatgagagtggggttggctaacccagttaccgtccatgacgcgctcatccgtgaaattaaatccttcctcttcctcttcttcttagtagtagtgttagggtagagctccctctgcggcctcccaatcttgcttagccaagtagtaagctgattcattccaccgctgccgcgcgcaaaa

SEQ ID NO: 50570 - DNA, 251 bp, Setaria italica
  Peptide Sequence Number=SeqID_116544
gtaataacattgtatatttgcctgtacgattatattgcatcagaatttaatcaagttctgcaaagtgatagctgccgcctttcccaacttcagtcccatacctgttctcaagggcaccctttgaacagatttacctggggtatgttcatcagctagacatatttttgaacgaaatcagtttaacactctcatgttgtgctattcgttgaactgcatttggactgatattatccaataggcaacaagaaaag

SEQ ID NO: 50571 - DNA, 262 bp, Setaria italica
  misc_feature (33)..(33): n is a, c, g, or t
  misc_feature (248)..(248): n is a, c, g, or t
  Peptide Sequence Number=SeqID_116545
cgttctcgccgacgtcgttgccgacgccgagcnatggtgagcgccttctggtcgtacccgagcgcctccttgacggcgtgcgagtagagagggaacacgtaggcgctccccgcagccacctgcacccacaccgccgccgccagccccacccacggcggccgtctccccgccttcaccttccccggccctggccctcctccccccgccatgccgccgcagctcaaggttcctgatctcctctcctctcntctctcctcctacc

SEQ ID NO: 50572 - DNA, 353 bp, Setaria italica
  Peptide Sequence Number=SeqID_116546
tgtacaaaagtatctattgtctctcagttaataaacgaaaaggtgatgcagtcccgacaatccaggtgctgtctgtctcatccctagcaagtgaaagcacttctgggcaatgttgaccatatctgtatagtgctcaatggagaatccttgaatgtttcgatggaatgaccattcgatactgatgcaccacaacttaaggctcactactccatgtctggatcttcaagattagtaacaatttcatcaacaacctcatggcaaagggtgcaagtatcttcatgtcttggcagacgaatgaatgttgcttccgcacaaaaaacttactgatacgcagaagtcttcagggcttaaag

SEQ ID NO: 50573 - DNA, 276 bp, Setaria italica
  Peptide Sequence Number=SeqID_116547
ggacggaggaagcgccgccggtggcattgccatgggtggggaggccactggagccggcgtcgtcggggctggcgcggccacggtaggcggtgtggccgcaggtggcgatgccagcggaggtgacgtggctggaggtgttgcggagacgggaggagcgggagcgggaaggggaggcggaggaggtggaggtcaagttccggctcttcgacggctccgacatcggccccgtccgctgcaacgccgccgccaccaccgtcgccgcgctcaaggaccgcg

SEQ ID NO: 50574 - DNA, 436 bp, Setaria italica
  Peptide Sequence Number=SeqID_116548
taagtctaaacttgtctattcttactttctattcgtactattcctactaacaaccttgtgcgcgttcaaccttgagcatggtacaaaggagcttgtcgaaacccttgcaattggcctggaccgcaatgactactaccgtcgcccccagcgagaccagctcttatggttcatcccttcactgaaataaatagccaatagtgaaaagttccgtggccgtttatcccaaagtggagctcatatggtatagtaggctccagtggcttggaattccaaagtattggacgttctggtatgcatagtactagtgttatacggagtatgtctctgaactcctaagtgttggacataatcatggtagtttgttgctaaaaattgtgtgaacatttgaacttttcaaagctgtgcgtatcgtgtgtatgaacttggaactttattt

SEQ ID NO: 50575 - DNA, 314 bp, Setaria italica
  Peptide Sequence Number=SeqID_116549
gccacccctgcgcctgccgcggaagcatcaggttcgtccatgacgattgcctgctccgatggctcgccacgcgacgcggcagcagcacggcgtcggcatcatccatatgcgaggtgaggtttccttggctgctccccatccattcccattctgttcttcggatggggagaaaatcgattggggttttaggcgcctgctgtgctggcttcgattcttcaacggaattggaattgatcgacgaggctactatgcaatccaattcaggtgtgcaagcgcgccatctccatcgcccccgtctacgccgcaaacgctcc

SEQ ID NO: 50576 - DNA, 260 bp, Setaria italica
  Peptide Sequence Number=SeqID_116550
ctcgagtacccgctccagatccccaaggacgagctcctcccgcacccgctgccacggcccagccacgaggaggagaacaagctcatcctgctcgtccaggtaagcagacgcctcgtctcgattcgagccgcattgcgcggggttgggtcggctcgccgtggattcgaggttcccgcctccctgactgaccgccgcccgattcgacgcgtgcaggtgacgacgttcgcgtgcggtggcttcgtggtggggttccgcttcag

SEQ ID NO: 50577 - DNA, 327 bp, Setaria italica
  Peptide Sequence Number=SeqID_116551
agaatatatatattgattctgataattgaataaaaacaacaatttaaacaacataagcatactaccaaacagcacctgatatagtgatataacacaaaagctgtataaatgatactagtaagttacgaatgcaacataccaattcatatagaaggcagcgatagtgatggggggaaaccacaatataggtaggcttcggtgacagtgagaagagtagtccgacagaaactcccaagctgcatggtcttgacatcaagcgaatggtattcaatatgttgctcactgtggtcattcaggttctccttagggtgatctagttttataaat

SEQ ID NO: 50578 - DNA, 456 bp, Setaria italica
  Peptide Sequence Number=SeqID_116552
tagtaactttcgggtacttgtcgtaggtctagtctagtattaggatttactttggcatctggtgagaaactcatgcctcttccacttgctcttcctcttcctggagaagattctccctgttgtcatgggcccagaagccgcgcacatctataagcatgctggcgatagtaccaccttgtttgcaagaaagcagatctgatagcgagatcctgagaggatctgccggcttcaccatgtcccagatttcatccctcacgtcctcaatgcaaagttcatagttcccgccctcgatccatttctggtgtacatctctaaacagagtgtggatatctgcagttgtaaggaacccccttcattaagatcaaggcatctaaataaatatgtcaagccttcagcagtatctttgtttctagagccaaaaacaaatcaagaaagctttcgaagtccatctcccga

SEQ ID NO: 50579 - DNA, 349 bp, Setaria italica
  Peptide Sequence Number=SeqID_116553
gtgtgcgtttggtgggtcgatggagagtggggataagtatttatgagaattccagttggcataccacatatgcgctgggctgaagttaaggaaaaccaattttctgcctgttcagtgtcagttacctcttcctcgctctcctggaaatatcagtgatgagaatcagccatcagagcacgcaaataacaaaaataatgtgaattatgcagcaaaattcactgtcaaaatcaagatgctcaagtcaagttcaccacattgaacaatgtgataatacattaaaaaaatttacctagatgtagttccattagctcctgcagacaattactcagcaatactttctttatacacg

SEQ ID NO: 50580 - DNA, 202 bp, Setaria italica
  Peptide Sequence Number=SeqID_116554
cagcgcagttgtgagaacttcgggactgcgaggcagcagataggattacttggcatctggtgagaaactcatgcctgctgcctcgcagtcccgaagttccaaaaaccactacagaacacttacaagttacggggaactggtagcatattgatccagtacactatcaaggttacagacttacagtaactgatacagcgcagtt

SEQ ID NO: 50581 - DNA, 178 bp, Setaria italica
  Peptide Sequence Number=SeqID_116555
tggatcacagagaaaaagaacttgcgtgcagctatgcggcagtacatttgaacaaattgggtgggcatgtcacgcaattgtgccaaattggggatgagtcctcttatatatgcttccatttcatgtaggtcttgtaaggtaaacctattctagtaattctttctattcctagttctac

SEQ ID NO: 50582 - DNA, 198 bp, Setaria italica
  Peptide Sequence Number=SeqID_116556
acatcaggagagcgaggaagaggtaactgacactgaacaggcagaaaattactcagcaatactttctttatacatgctttccctcgtctgtgtggatcacagaagaaaaagaacttgcgtgcagctatgcggcagtacatttgaacaaattgggtgggcatgtcacgcaattgtgccaaattggggatgagtcctctt

SEQ ID NO: 50583 - DNA, 192 bp, Setaria italica
  Peptide Sequence Number=SeqID_116557
acatcaggagagcgaggaagaggtaactgacactgaacaggcagaaattactcagcaatactttctttatacatgctttccctcgtctgtgtggatcacagaagaaaagaaacttgcgtgcagctatgcggcagtacatttgaacaaattagggtgggcgatgtcacgcaattgtgccaaattggggagtga

SEQ ID NO: 50584 - DNA, 245 bp, Setaria italica
  Peptide Sequence Number=SeqID_116558
ccctcgtctgtgtggatcacagaagaaaaagaacttgcgtgcagctatgcggcagtacatttgaacaaattgggtgggcatgtcacgcaattgtgccaaattggggatgagtcctcttatatatgcttccatttcatgaggctgaaggaaaccatcagaatcttcatccagttcactcatatcaattcttgcttgagtaagagaaaccgtccgcataacataaaagataaaaacggtaggaatgg

SEQ ID NO: 50585 - DNA, 228 bp, Setaria italica
  Peptide Sequence Number=SeqID_116559
tcatggcgcgcgcctgcacgttctagcaatcacacacaccgtgtcaccgtcgccgtgcagtgtgccgcggcaggctcgcgcagggagatgatgagcgcgggggacggggagagccgggaggagggggtacttgaagaaggaacgggatgggcgggaggatggagatggagtccactcactccagggcagggcagggaggggaagaaaagaaagagaggcgcggcgggg

SEQ ID NO: 50586 - DNA, 247 bp, Setaria italica
  misc_feature (4)..(4): n is a, c, g, or t
  Peptide Sequence Number=SeqID_116560
ccanatggaacaggcatcttatgaacactagcacatgcggtagacagtaccttcagcttggagcagttggatgactcgattctcagtgcccgcagcagctcttctctctccaccgctaactgcaaatacaaaaataaaacacattatcattactaacataacttttaccaaaaaatcaaggtagataaggttatttgggaaactctgattggtgcaagaaaaactctggatttctgcacatcaacaa

SEQ ID NO: 50587 - DNA, 247 bp, Setaria italica
  Peptide Sequence Number=SeqID_116561
ttttaaatttttaaatttttaagtttaaggttaatttaacgtttttagttacctaaaatttaaggtagctagaaaggtagagcaggcctaaccagttgagcttgaatttcttcctgcaatctctccatgtcagatgtcaactggctgattacatgtgcctgttgattgaacttatcagttagtgcagagttatctgtggccaaattctccgctaattcttgagatttctgaagagtacgttgcaagg

SEQ ID NO: 50588 - DNA, 210 bp, Setaria italica
  Peptide Sequence Number=SeqID_116562
attagccatcctttgagaagtcaatagctcaagcttctgtgtctgcatctccagcttttgtgttaggtccttattcaactccttcaggatataagagtaaattgcattagaagatgcaccattacagaagtaacacaaggcagaacttgctgcacagttgacgagtaaacattattttccaatatatagaagcttgatacaccagaaccc

SEQ ID NO: 50589 - DNA, 303 bp, Setaria italica
  Peptide Sequence Number=SeqID_116563
catattgttggacctcaaaattgatgttccagcatcttccaatgtgtcgacagtgctggtcagcgtttctgaagaactgatttccccagtatctaaatccactgtcgcagttgatgcatctcttttatcagctgaaggtttctctgtagcagctgttgccttttcattcacaggaatgttcctcaatttagagtacaagagcttcttttcttcttgaagagcttcaacagtagattgaaagaatagactaggacgactaccttttacttaagaaacttaaagtaaaaactttttaagtacgta

SEQ ID NO: 50590 - DNA, 400 bp, Setaria italica
  Peptide Sequence Number=SeqID_116564
gtggaatccgctgcattccaagttccaacatttgtatcatgatctacactatcagtaatcctagaactactgaaggtattgccataatccatactgctggcatacacagattgttccactttggaagagtctttggaggtagctctcaaccgaccaaagaggtcattgcttgtggagtaatcttgatctgataaagaatttcttccccaactcggcaaggtgttggtagaagaaggtaaactcaaactgtttgtgttcccaaagacacttaatttagatgttgattgcacatccttgtcgggactgtgctcgtcccttttaagggcagcgtcacctctccaattctcatgatgaccattaacaaggtcggagaagctcaagttcccatagaaacttaaca

SEQ ID NO: 50591 - DNA, 241 bp, Setaria italica
  misc_feature (190)..(190): n is a, c, g, or t
  Peptide Sequence Number=SeqID_116565
acctaccgaatactacaatacccaaccaaagaccccaataccgaccgtacgacgaacgaagacgaaggagaagcacgggggagccagccccagccgccagccatgagccaacccgacttctccccgtcgcagttcacctcctcccagaatgccgccgccgactccaccacaccgtccaagatgcggggcncatccggcaccatgccgctcaccgtgaagcagatcgccgacgcgcagcaat

SEQ ID NO: 50592 - DNA, 272 bp, Setaria italica
  Peptide Sequence Number=SeqID_116566
ggcgggagaggagggtgaaggcggaggagagggtggtggacgccatggggacttgctcggggagctcgggcctcgggagtgagcagcggcggcgggaggaggcggggggaggacaaggagaagcaagtccaatcatgatgaggacgaaccacaaaatatattctttctaaaacaatccatgaggaccaaaatacacaattcttggattgtgatacacgacatacggaatttcccgcttgctctcctactcctagatgcaaatactaaggggg

SEQ ID NO: 50593 - DNA, 401 bp, Setaria italica
  Peptide Sequence Number=SeqID_116567
tactggccgatcttcaaggacttggtcagcaccttgccagcctcaatgcggacagggccctttggccccattggcgcccaggtatccagcatgtcaagcgaccactggcagttgcgcagcaagagctgccagtgttcgagcccaatccagttcttgtcgtcgtagatcatctcgtcccagccgtgcatgatgaggttgtacggcccgtagcgttcccatgggagctcgaatgccatgtcggtgaacatggcgtcagagtccatccaccagatgaactcgacctccgggtgcgccaggagcagtgcccgcatgagcgggagcttggcccagaagccggccatctcggcgtcgaagacaagacgaccaatagttagtaagaaagaaataactaacgaaaggaa

SEQ ID NO: 50594 - DNA, 275 bp, Setaria italica
  Peptide Sequence Number=SeqID_116568
ccagcaggatccagaacgaacaaacaaaataacaagtggaattgtactctaattatcatgtggaagtcttcacagccttgaatgctgggtggagcaacccaagctcatccttcatctcgagtgggttactagtctcattcctgatcctcttcactctcctgcttgcaagtgacttgtgcgtgaacccatacatctgcaagatctggttatccccaaatttggggactaccctgttgagcgttgcctcaagcagatggaccgtgcattcaatttgg

SEQ ID NO: 50595 - DNA, 247 bp, Setaria italica
  Peptide Sequence Number=SeqID_116569
agattcagacccagcaggatccagaacgaacaaacaaaataacaagtggaattgtactctaattatcatgtggaagtcttcacagccttgaatgctgggtggagcaacccaagctcatccttcatctcgagtgggttactagtctcattcctgatcctcttcactctcctgcttgcaagtgacttgttgtcgttgtaaccctattactattcttgtctaagttattcttggttttattcccctaaaa

SEQ ID NO: 50596 - DNA, 204 bp, Setaria italica
  Peptide Sequence Number=SeqID_116570
tatctcggcctcgacctccccgaggccgcgccggcgcagtcctacgccgccgacccggatacggtcgttgagattacctacggttcagtgatcaagttgatgcatgagaggaccaagtttcggctacattctcacgacgttccctatggatctggcagcgctgagacacgcaacgaggggtagcaaggcacacgaggggatagg

SEQ ID NO: 50597 - DNA, 463 bp, Setaria italica
  misc_feature (448)..(448): n is a, c, g, or t
  Peptide Sequence Number=SeqID_116571
tgttcgtccgggtcgttctattggtagtaacgtagtcccggtctattgtaagtaccgtacgttgtcttctacccttgtctaggggtcttcggtccttcgttgtctacccgtcgtcgtctgtgtaccgcttctacgacgagctccacgcgtacctcgccgacgccggcgtcgacggcgtcaaggtggacgtgcagtgcgtcctcgagacgctcggcgccggccatggcggacgcgtgcagctcaccaggcagtaccaccaggcgcttgacgcctccatcgccaagaacttcccggagaacggcatcatcgcctgcatgagccacaacaccgacgccctctactgctccaagcagacggcggtggtgagggcgtcggatgatttctacccgagggaccccgtctcgcatacgatccacatcgcctcggtggcatacaacagcgtgttccncggcgagttcatgct

SEQ ID NO: 50598 - DNA, 262 bp, Setaria italica
  Peptide Sequence Number=SeqID_116572
ccccgacgaacccgccggcgtggccaagcagaagcatccccacctgcctcggctcaccggtatcagggagaacagcaagttccagaacgccgacgacccggccgccggcatcaggacggtggtgcgcgcggcgaaggaggagcacgggctcaagtacgtcttcgtctggcacgccatcaccggctactggggcggcgtccggccgggcgccgccgggatggagcgctaccgctccagcatgcagttcccggagatctcgccg

SEQ ID NO: 50599 - DNA, 489 bp, Setaria italica
  Peptide Sequence Number=SeqID_116573
cggatatattggtagttattcttcttcctttagtcccttgttcatgcacaatctgtggatctggaggggcactggtaatgcaaatttctactttgccaccggtttggcttatacttgccttcagactgtgttggttgtagagagtgtaggttcaatgataaagcacgacagaaagctaagactacttgtgacgagttaacttggcccctcagctgcaattttccttgtggtgctcctgaacacagacggctcgtcatcctgaagtttgtagtaggttcgcattctgtgtatcatattgtattgtacaccaccacttttgtacaatataaggaccacaagagtcaaaagactaaggaacacgaaagggttctccctcagtccctcagactaattgtagtcagtgccaagctccgatgtggatcctgtgatgtcaatcatccagcatggttgaattgagcacatgtacaatatgtactgtctgtttgccag

SEQ ID NO: 50600 - DNA, 328 bp, Setaria italica
  Peptide Sequence Number=SeqID_116574
ggtacttctttgctgaagttttttgacttcttcagaagtttctttcttatagtcttcaatatgaacattattttcatggtcttgccattggccattcgtttgaagcaccgtccgtactttcttgcgtttgtttacacagcaattatcgctatgttgaaatcctatccctctgctggagattcagctctgtatctaggtcttctgggcctatttgccaatgaattagcagagatgcagttcacctttcttctttgtttttcggtattaattaatttaggtaagtttaatttactttactttaccttttaagttaccctttagttactta

SEQ ID NO: 50601 - DNA, 406 bp, Setaria italica
  misc_feature (331)..(331): n is a, c, g, or t
  Peptide Sequence Number=SeqID_116575
acgccactggtatattagtatagtattgttccttcactcgacttctcatcattggaacaagttactgcagtagttgcatacttacatgtcaacgtgtaatggatgaaatcatgaaaagactcaaatatttatgaatccatgaaccaagttgctaagtccacgggaaacaagccttggaagtcttagatgtactcctcttttatgatgtgtgagattttgcacctttttctttcaacatcgtgtatgctgaccatgttgtttgttttcttttcattttcttacctttcttcagccctgcaaaggtatattactttttgggcctcctggaacnggaaaacgcttttagcaaaggcacttgcaacagaagctggagcaaattttataagcataactggttctactctca

SEQ ID NO: 50602 - DNA, 392 bp, Setaria italica
  Peptide Sequence Number=SeqID_116576
cgttggatgggctagaagtcactatctatcatcgacaacccttccttctatcaagggtgacaggttaataattccccgtgagagtctggatatagcaataaagagactaaaggagcagggtattacaactaagaaatcctctcaaaatctgaaggttttggctaaagatgagtatgaacgcaatttcgtttccgctgttgtacctccgaatgaaattggagtgaaatttgatgatattggcgcacttgaggatgtcaagaggacgttggatgagcttgttactcttccgatgaggagacctgagcttttctcgcatggaaatttattaaggccctgtaaaggtgtttgcttttggccccctgggacaggaaaacgctcttggcaaagccctt

SEQ ID NO: 50603 - DNA, 259 bp, Setaria italica
  Peptide Sequence Number=SeqID_116577
ttcctttgcgagtcgattagcccccgtcatcatatttgtggacgaggtatgtttactaaaagaaagaagacacaaatgcttatgtactcttgaaccatttattgccatttctttggctgaagttttgacaagattcaacatacaatggttttgcacaacctcttggtatgacacagtttggttgttataggttgacagcttacttggtgcaagaggaggtgcatttgagcacgaagcaacaagaaggatgcggaacgaa

SEQ ID NO: 50604 - DNA, 457 bp, Setaria italica
  Peptide Sequence Number=SeqID_116578
gctaaaccagcagtttactgggttgacactcaggatatcgagcatgaccatgatactcaggcggaagattggcatattgcaattgaagcactttgtgaggtactgccatctctagaaccagccatcgtttactttccagacagttcccagtggctgtctagggcagttccaagatcaaatcgtagagaatttgttgaaaaggtagaggaaatgcttgaccagctcactggacctctagttttgatatgcgggcagaacatagcggaggcatcaacagaagcatctaaggataaagaacctaagactctgctgttccataatatggctcgcctgtctcatctgacatcatccttgaagcggctggtagggggcctaaaaggacggaagccttcaaggtccaagtgaacaataaacgaaagacttttcaaaaaataagaattaatttaattcctcttca

SEQ ID NO: 50605 - DNA, 368 bp, Setaria italica
  misc_feature (358)..(358): n is a, c, g, or t
  Peptide Sequence Number=SeqID_116579
ttcgtttttccgttctttgttttgtttacctttccgttaatttgtaaattttggtagttgtaaattttgatgatattggcgcacttgaggatgtcaagaggacgttggatgagcttgttactcttccgatgaggagacctgagcttttctcgcatggaaatttattaaggccctgtaaaggtgttttgctttttggcccccctgggacaggaaaaaacgctcttggcaaaagcccttgcaacagaagctggagcaaattttatcagcataactggttctacactcacatcaaagtggtttggagatgctgagaagctcacgaaggcccttttttccttgcgagtcgattagccccgtnatcatatttg

SEQ ID NO: 50606 - DNA, 146 bp, Setaria italica
  Peptide Sequence Number=SeqID_116580
atgcatgtcaagataataatttgtttaatcacctcacaaagtgcttcaagtgcgatatgccaatcgtctgactcagtatcatgatcatgagcaatatcctgagctaaggcacaaggaaatcagatggaatcaaggtgatggaaata

SEQ ID NO: 50607 - DNA, 388 bp, Setaria italica
  Peptide Sequence Number=SeqID_116581
agaaggaaagtagaatttaccaacaattaattacccccctaacctccaagttggtaagcatgatttaatcaaatgtccaaacagtagcaagttgcattcacagactacgcaaacaaagaaattttacaaaacagataattgaccaaatcatactgagaataaggatatgttcaacatgacgggaaagttgcagtatgaagagctcactttagtgcctcaagggggcggcttgggaaaagaagaggagagagcatcattcaaatcttcaacttcttgtatctcatcctcttcaggccttccagaacgcaccatgggttgaccctttcctggtaaataagttctgggtcattgtaagcatcatgtgagtcatccctaactttgttatccc

SEQ ID NO: 50608 - DNA, 264 bp, Setaria italica
  Peptide Sequence Number=SeqID_116582
taggggttagggttagggttaattaaatttttacgttactaacttaatttactttttttaacaaatccatgttggatactgtacctactaaatagcaaatactagcaaacaagtgaacgagggcgacgctacaactaccgtgttgtgttggatgcaaagccttgatactacaagcgcccatgtagttgtaactgtataatttgctatatataggttgcttttgctgtgaaacatattatttgtttcagcattcttgctggatgg

SEQ ID NO: 50609 - DNA, 251 bp, Setaria italica
  Peptide Sequence Number=SeqID_116583
aagcaggtcgagcgcagccgcgcggaccccaccgtgctgctcgtcacctacaccttcgagcacaaccacgagtcgccgcagcccaagagcagcagctgccaccagcagggcaagcccaagcctggaggccaccgcgccgtgctcctgatggtcatttgatcccttctacctttcacccttccctttgggtcttttagtttactcggagcaatttggaggtactagtacatagctaagatcgatcgatgcgg

SEQ ID NO: 50610 - DNA, 237 bp, Setaria italica
  misc_feature (222)..(222): n is a, c, g, or t
  Peptide Sequence Number=SeqID_116584
taacccttttccgagtgagcatatgttgcccagcttcactgacaattaattcaactacaaacatattgctatttgaatacaatgattttgtgattgccagctcatgttgaaattattgtgacaccacatgtccaacatataagaacctccactgagaaatttttagcattcaacagatgaagatcgcaaaatcaaagtgcccacgagcatgacaggacaagnttgcattgtactggg

SEQ ID NO: 50611 - DNA, 451 bp, Setaria italica
  Peptide Sequence Number=SeqID_116585
gttttcccttcttgaagaccaccaccagtaataataaacctattattgtagacctaggagtgaagctactttgacaaataaaaattgcatctgctccatcaaaatattctagtcattcctgtcgatcctattcatgaagataacaaaacttaccatgattgcgtgtatgatggcccttgcgagcatttcatcaagcatatggtgagcatgcatggagcaggagcaatgattttgtaacaaaatgtggtttcttgagatcagtagcaaaatgcagttgaaggccaaggaaagagagatactgaatatacccaagtagaggtatttcttaccattagaatagccaattctggcctcccaccagccattgtggtggtgcattgcaggcaagctgaaagaaatctcatcctagaatttgtggccttccggattcaagaacgctgatctagtgggt

SEQ ID NO: 50612 - DNA, 266 bp, Setaria italica
  Peptide Sequence Number=SeqID_116586
cgcgccaactgcaacctggcgtccctcggcgccaagccgcggccccagccgccgcacctcctccgcccctcgccgccggccaccccggcgccacacgcgcccgcgctcccgtccccgccaccagcccgctccaggtactcgccgaactacgtcgctgacctgagctacaacgcgaagctaggccaggctgcggctgcggctgccggcacggccgggtcctacatgcaggggcacttcacgtacccggcggcgcagggcggcatggg

SEQ ID NO: 50613 - DNA, 186 bp, Setaria italica
  Peptide Sequence Number=SeqID_116587
cgagctctcctcctaccagcgcaaggtcttgttggcggcggcgagagcgtgcctgcgtggggctccgatcccgcacccacgccgtcctcgccgccgccaacaagcccgcctccgagctctcctcctaccagcgcaaggtcttccgcgtcgccgagcacgccggggtcgcgctggcggggctcaccg

SEQ ID NO: 50614 - DNA, 143 bp, Setaria italica
  Peptide Sequence Number=SeqID_116588
caacatcgactactacctgctactgggcgttcggcgcgggtgcacgcgctccgaacgcccagtagcaggtagtagtcgatgttgcacgcctcgccggcggcgacgcggctgcggagtccctggatccgggcggtcagcttgcg

SEQ ID NO: 50615 - DNA, 322 bp, Setaria italica
  Peptide Sequence Number=SeqID_116589
ttcaaggcgcgagggccggtagcaagtggcatgcggttcttcgtcaccgctgaaccggcaaacgtccggcacatcttcacctccaaccatgcaaactaccccaagggcgaggattttgctgaaatcttcgacatctttagcggcaccatcttcaccattgatggtgaggccggccgccagcatagagccatgttccagaacatcttgagcaatccacggttacttgccttgatggcaagttgctgccgtgacaaggtggttgaacggtacttccttcccgtttctttgttacccgttcttatttggggtttagtttctttaa

SEQ ID NO: 50616 - DNA, 223 bp, Setaria italica
  Peptide Sequence Number=SeqID_116590
aggagactgaacacctagtctaccttcaggcagccttattggagtcgctcaggttgtacccaccaggcccgatcgagcgcaaggtggtgctagccgacgatgtgctcccaagtggtcaccagttgtgctccggtgaaaccatcctgatctccatctatgccctgtgttaaacgccatgaatttattggacggcacgtaacgcagtttagcaccgtcctcggac

SEQ ID NO: 50617 - DNA, 390 bp, Setaria italica
  misc_feature (313)..(390): n is a, c, g, or t
  Peptide Sequence Number=SeqID_116591
ttgttcttagttagttagttagtttaatttctaattgttgtactattggtaattaagtcttaggttgcaatgcaactacagatcgactcagtcctggcatatatggtttgaacaaaatagttaaatccaaacttataatgaagtaaatggaggcgtaacatgtattttcgtcattaaataaagtctacggacgccgtcgtttggccatctgaaagctgggaccatacccaactacagactctttgatttcagtaccgatagtttgtactactccctctttctaaaataagtgatgttttcagattataacttnnnnnnnnnnnnnnnnnnnnnnnnnnnnnnnnnnnnnnnnnnnnnnnnnnnnnnnnnnnnnnnnnnnnnnnnnnnnnn

SEQ ID NO: 50618 - DNA, 220 bp, Setaria italica
  Peptide Sequence Number=SeqID_116592
taggtggcagcgacctcgactcccccatgcacagccctgtctcagacaagtctcaaggcggtggctgtgctcagaggaaggggttctccggcaatggtggtgggcccagcctcagcagtgggagcagtgtgtggtccagctcaaggagtgtgagtgatgctgaggaggaccatacactgctcccactgctgaggctgggcccaccaccattgccggagaa

SEQ ID NO: 50619 - DNA, 260 bp, Setaria italica
  Peptide Sequence Number=SeqID_116593
ggcaaataatatttggtcatgtgagttttcctctgtattagatatgtatagtaatatggcttggtctacaaggatatctaatactctggctaagagctaagtccatacctgaatgactggcatgtgaagaattgcacttgacgaactaacaagattagcatgatttgctacagcatcaagatgacttgatttgttgaattatccgcatcaggatgttctaatgcaacaatggttagatgtaataaaaggcatttctcctt

SEQ ID NO: 50620 - DNA, 264 bp, Setaria italica
  Peptide Sequence Number=SeqID_116594
gatgtaaagtgttttgtaacattttgttgatcaaggtttcattttttatttgcaatttatattatttgttactactaaacagcatttcttgataacatataaaagataaaaggacttatcttccttcttgagtccaactttgtttctaaataatcctgttggtctttggtaattccacctcctcgacttctgtccttcagtaactctgcatgatttcttccaagattttcagaaacctgaatgactggcatgtgaagaattgca

SEQ ID NO: 50621 - DNA, 325 bp, Setaria italica
  Peptide Sequence Number=SeqID_116595
tactaggaacctgctgctcgctgctcgctgctcgcaagaataaggtatgtgccggctctgccgctcagcgaaatattcaaagttcagaccataccaaaagccgccaaacacagatataataagatgatcacatcacctagtccgctggtctcatcgcaaaaaagactcccagttgcttgtcattttcaccagaatcctggacatattcttggaaactaccgaatggttgacccagactcccgaggacgtgcaattatccagattccagaacaggtacggcataacagcaaccaggcttgtccccgcgacacgcgaggtgcatttc

SEQ ID NO: 50622 - DNA, 274 bp, Setaria italica
  Peptide Sequence Number=SeqID_116596
ttatttaacttattttcgggtttgttcgttagccgactcaggatgtatatctcattgcaaaaatcttccatattttcagttgttagatcttgttctagaaacactttgatggcaacatcggttccgttccatataccacggaaaacctctccaaagaatcctattccaacccgtgtgccaatggttatctcggagaaatctatgttccattcctccaaagggatcatgttgaaggttcatgctcatatgttacggaggaccaaaacaatgcaaa

SEQ ID NO: 50623 - DNA, 250 bp, Setaria italica
  Peptide Sequence Number=SeqID_116597
tgctagttgatcttatgcgatttccaggccagttgattcctttttctagctaaggctatctttatatcacatatctctgctgcgggtgaaagcgactcagctgaaaatgattcgtgtgattctcctcttgagcctaacagccctctttatggattgtctgataaagttgaagctgaagggtatgcttatgtattaaatatgtcctctcatttatgtgattctggcactgtactaaaaaaaaaaaaaaaaa

SEQ ID NO: 50624 - DNA, 221 bp, Setaria italica
  misc_feature (67)..(67): n is a, c, g, or t
  Peptide Sequence Number=SeqID_116598
gaaagaaacaagtcactcattttgcaagcgccaagccaagcagtgtcgttgtagctagctctgtccnccttttgctcctcccctgatcttcggtggtggtagcctttttacagcaatggcggcgtggcactcacagcccaagcaaggaatagttaagttaagtaacgtaagtacgttagttaatttacggttaacttaaagtttaacgtttaacgtttaaa

SEQ ID NO: 50625 - DNA, 280 bp, Setaria italica
  misc_feature (272)..(272): n is a, c, g, or t
  Peptide Sequence Number=SeqID_116599
ttcttgggctgccccttggccggcgccgccatggccgggttgggcgccgggtactggccgtactcgttggccttgccctgcgcgtcctcctcgtagttggacggcctgggcgtggcgccggtgcgcaccccgaaggcgtccccggcggcgaagttggagctgcggccgaccatggagtagaagtcggtgtggttgaagctggagccccgcggcgtggggttccgcgacgactgcagcgagtagatctcggcgttggtgaggttgctggggcncggcgtgg

SEQ ID NO: 50626 - DNA, 376 bp, Setaria italica
  Peptide Sequence Number=SeqID_116600
ccttctccatctcaactttctcaaatgctgatgtaggttcagaactaaattcgggcgcgttcaatcgaggcggatgatccgccagccctaatttctgcctttgctccaaatgactgccctttcttatgaaggaatcatctgcatccaaattgttgcatccttttagtcaaaaaaagcaccatagccaataccacgcagtgcaagtttcatttttcaagttgtcatcttgtagtctagtttaaggtggcaatagaaattacctctacttagcataggacccctgattgtgccgttcttctttggcttccacttcttggaaaatagacccccaagatcacccaatagcttctcactcctggagaggtcctggtcgatg

SEQ ID NO: 50627 - DNA, 440 bp, Setaria italica
  Peptide Sequence Number=SeqID_116601
gttgttgttgtttgcactttcatcatgttgacacttagttcttattatcccagagaaaacaaaaggcaaaacagaattaatccagtttgttagatgagaaatctgaagaacaaccgtgcgcacttttccgcgacgtctgatgctgaatctctaacagatcttggagaccaataaatgagcaatcggacagttagtctttagtaacatttttaccattttgacacacatgtttgacacagaatatatctaggtcatggaaactatcactgcatagaaaagttcttcaaaaagtaaaaaggaaaagaaaagttcagaaaattttcttgcgttgagcccagaaacatttcaatatcatactattaggctttggcatgggcaagtgctaacagctaacacctctcccctctctttttttttcgcgagaatgatacgaaattcct

SEQ ID NO: 50628 - DNA, 372 bp, Setaria italica
  Peptide Sequence Number=SeqID_116602
tagtttaagtacttagttaatttaatttaagttaattagtaactaaagtaaacttaagttctacctagccctttgcattgatgttcttctcatccgtgtcaagacaagtattttgtttcccataattgtgtagcacaagatggttccagtcttccttcacatcaccattagtcacagcaccttcatgcttgagtctatcgctggcagacggatctaccttctcccgagttgatttcttatttttcgagaacaggctagaaactttttcccgaaatgatgatgacttcctgattctttccttttgagctgcatgagtgccagaggctactccatttgactcaatgcctccataagacaaagaaactggaagag

SEQ ID NO: 50629 - DNA, 213 bp, Setaria italica
  Peptide Sequence Number=SeqID_116603
tgtccttccttatttgtttatttattctactagtattaaattggttcctattcttagttactagtattacagggcttggttggtcctgagggtcaccaaagattcctggggcgccaagacttgacatagaagaaatatccttggctgggatgttagctgtattattagtatgacaagaactagtcaccagcccttgcatgatgttcttctcat

SEQ ID NO: 50630 - DNA, 269 bp, Setaria italica
  Peptide Sequence Number=SeqID_116604
tgaaatagaaataatttaccgtggaggagttgatagtgaagggcgcccagttatggttgttgttggtgctcactttcttcttcgctgcttggatcttgaacgatttgttctatatgtagtaaaggtgatttatccttaacacactaattggacatgttaatgaggagtatctattttgttctttccaccaatgtaaataatcttgcaaatgccccactgatcggctatgaatttcttgcattgcatttctcagttatggtattccaaca

SEQ ID NO: 50631 - DNA, 372 bp, Setaria italica
  Peptide Sequence Number=SeqID_116605
tgtactacgttagtaaggtaacttcttttcaagttggactcatatttggatcctgcctttatgtcaataattaaagatcctgatctccgacacaaggagcaatgggaaaaaatctgctcaggcaaacaagggaattaactttgctaacttgctcgggtttggtgatcttggcagccctccattatctgctgctgaagaatattcgcttcattcacgataccttgctaaagcaaattctatgaatctttcagatattgctgaaatgaaaataatgtatgcaaacttatctaattcttgtccttatggattctctttagtttgcattgctttacctttgtgtatactaatagatctcaatccatctattgtttt

SEQ ID NO: 50632 - DNA, 202 bp, Setaria italica
  Peptide Sequence Number=SeqID_116606
gcttctgtgctattccttttcctttagggaggcgtaattatgtatgtcaattattctgtattaaacaaataagggatgtatctatatgtctcttaagtttctctagagctcggtgtactctttgggtactgtaaaattttgacaggtccataggtattgagaaataaagaacgttttagttacttagttacttactaaaaaa

SEQ ID NO: 50633 - DNA, 410 bp, Setaria italica
  Peptide Sequence Number=SeqID_116607
gccggtacatgaaagtccatgtaacggtagtctacagcatcttgcttgttctccacaacaccaaccaccacctcagcattcatatgatcgtgcaagaaatggtgaagattgctctcaacagggaaggcctcaaaaaggaacttcttgtagtactctttgcgaggtgcatgacataatataacacatttccctgagttgtcttgaagtggcctgctggcatgacccatcatctggagcagatctgttattggataatcagtgtgagcattctcacggccatcataatactgagtccccatgacaacaaccaaatgagcaggcaatggtcttccccagcacattgtgctgcttgcaacaacaacaacttagaaatacctacccaaccaaaggaaacaagactagggttaaca

SEQ ID NO: 50634 - DNA, 286 bp, Setaria italica
  Peptide Sequence Number=SeqID_116608
tgatcagctgccaggttcccaacaccatgtgccttgaaaatgggcttgcagtagagcattggccttcacatgtggatcaccatacttgggcttctcaatagagaatctctggtggcgaacaagcctctcaatgaaatcttcctcacctggacgacctggaagttctgcatattctgatgcagatgctagaatctctaggagtcctttcatcttggccttattgcttcatactactatattagctacacaactattgaacgtttcagttctatgcttgtaccctagt

SEQ ID NO: 50635 - DNA, 246 bp, Setaria italica
  Peptide Sequence Number=SeqID_116609
caccaatccactcaccaagatctttagcatttgcgagtgatgctgaaagtgctacgatccgtatgttactaccaatatggcttgaaatacgcctcatcctagatacaatgacctccaaaacatgtcccttgtcagacccaagtagatgaagtgcatccaccagctaccaaaattgaatctgtcagcccatgtcccaaccctttacccgtactaggtttttgggttttgagctgaccattactcctg

SEQ ID NO: 50636 - DNA, 176 bp, Setaria italica
  Peptide Sequence Number=SeqID_116610
tcaacactagagtacgcacacaagtccaatgcagtcaaccttgcatgcttccttgtcggtacatacaccagggcaggcttaccactctttgcatgctgtgtgatggcagtgtatgtaggactttagtacaattagacttagacaatacctttaagtaaccttaactaaaaagtaaa

SEQ ID NO: 50637 - DNA, 232 bp, Setaria italica
  misc_feature (196)..(196): n is a, c, g, or t
  Peptide Sequence Number=SeqID_116611
cttcacctttttaattgtgttttgtcattgttccatctttaatgaatgcattcttacttgttcacatcacatggttcataggtgcagaaagcaggcctcattgcatgtgacaaacacgaagataaatataatggctcattgaaggtggatgctggatcactggatgcagaaactggatcgcctacatgaaaaaccntggatcgaagggataatccaatgtccacggagtgtt

SEQ ID NO: 50638 - DNA, 225 bp, Setaria italica
  Peptide Sequence Number=SeqID_116612
cctatcccctgtgtgccttgcctatctcctgttgcgtgtctcaggcaaccttgctgggtagctctttattactttgggcgacatcaagtacttctgcaacattgttgctctgttcctcacttttcttggttgtatcaagctgtgcgccacttatcaattgtgtttgctttttaatttctgcaggtttctcagctttcggcaatgggtgatcaaatgacgtagtaa

SEQ ID NO: 50639 - DNA, 238 bp, Setaria italica
  Peptide Sequence Number=SeqID_116613
gttatagaactgtgacaccaactcgtgtgcatctgaaagacgcctctttctaggttcctgatctatgtaccaccgctcaaatgattcaccatcaaaagcatgtatgatggatagattttcagtcttgcagagtgggcatctaacagaagacataggttcttcatgcttactcgctacgatccttacccactggcatatacatttgagcaaaaagatggaagcaggtgtcgaggtacgg

SEQ ID NO: 50640 - DNA, 250 bp, Setaria italica
  Peptide Sequence Number=SeqID_116614
gaaagacgcctctttctaggttcctgatctatgtaccaccgctcaaatgattcaccatcaaaagcatgtatgatggatagattttcagtctgcaaaatggcaaaaggttacatctgtcaggacttcaggctatgtctcaggcaaacaatagtcggccaactaccaatcaagaaataaggctaccgagacttaagcaacaaatagcaaaggtgaagctaacacatcccgaatttgttgatatggttcacga

SEQ ID NO: 50641 - DNA, 231 bp, Setaria italica
  Peptide Sequence Number=SeqID_116615
tagggtattaggtgaatataataatactctcccaagtcatatatgaatataataatactctccctaggaagtgatacctctgcttgtctgattattattatattcatatatgacttgggataggtgaaacacccactactatatcaggctttcaggtgcatgactgtgaattggtgatgtcagattaatatacaggttagttgcttgtatccgctcctctagcatttttgg

SEQ ID NO: 50642 - DNA, 255 bp, Setaria italica
  Peptide Sequence Number=SeqID_116616
gctaccggttgtcgttgtagcatcgttcccgacgccgacctccctcgccgccggcgacacgggaatcgccgcgtccttccatcgagcaccttctcttgtggggaggtgtcacgcatggagcggaaatccgggatcgatttctcctgctgttggttgagctgctccgattcaatcaataaagaagggcgaaaggctacgtgagctcttgctgctgctagaaatactttcgccaggatcatggcaagccttgccgta

SEQ ID NO: 50643 - DNA, 478 bp, Setaria italica
  Peptide Sequence Number=SeqID_116617
cttcaagcttatttcctggtgcttgatgatataatggacaactcccagacacgacgtggccagccttgctggttcagggtgcctcaggtcggccttattgctgtaaatgatgggattatccttcgcaaccatatttcacggatcctccaacgccacttcaaaggaaagccatactatgttgatctcattgatttgttcaatgaggttgaattcaagactgcttcagggcagttgttggatcttatcactactcatgagggtgaaaaggatctaagtaaatataatttgacggtgtaagcatttaacacagtacattaactcaattcacgcacgctttattacatatatcttggtaaccaactgtaacaaaagaaaatcttcacctctgcccgtgtagtttcagaatgaatcatcattattgtttggtacctcaaacttggatatctatttttattgcttaatttctttcgatgacttg

SEQ ID NO: 50644 - DNA, 206 bp, Setaria italica
  Peptide Sequence Number=SeqID_116618
cggcgttcgcgcagatctacaacacgctcaaggaggagctgctcgccgaccccgccttcgagttcaccgccgagtcgcaccagtggatcgaccgcgtaacgatccctcctcctcctcctcctctctctcggcccacctttccttttccgtcgctgtttcctggtttgatccttgtggcgtggggctccttccttgccgcgtcgccg

SEQ ID NO: 50645 - DNA, 384 bp, Setaria italica
  Peptide Sequence Number=SeqID_116619
ggctggtgcatttgaattggcttcaagctttcttttctggtgctttgattgatatcatggatggctcccacactcgtcgtggccagccttgctggttcagggtgcctcaggtttggcttcattgctgtcaatgatggggttatccttcgcaaccatatctgcaggatcctcaagcgtcactttaagggaaaaccttactacgctgatctcgttgatttattcaatgaggttgagttcaagactgcttcaggtcagctgttggaccttatcacaacccatgagggagaaaaagatcttacaaaatataacataacagttcaccggcgtattgttcaattacaagactagtccttacttatttctatttttattcttgtaccggtt

SEQ ID NO: 50646 - DNA, 261 bp, Setaria italica
  Peptide Sequence Number=SeqID_116620
ctcgtcgtggccagccttgctggttcagggtgcctcaggttggcttcattgctgtcaatgatggggttatccttcgcaaccatatctgcaggatcctcaagcgtcactttaagggaaaaccttactacgctgatctcgttgatttattcaatgaggttgagttcaagactgcttcaggtcagctgttggaaccttaatacaacaaacccaatagaagggaagaaaaaagaatacttaacaaaaataataaacaataaacaa

SEQ ID NO: 50647 - DNA, 339 bp, Setaria italica
  misc_feature (228)..(339): n is a, c, g, or t
  Peptide Sequence Number=SeqID_116621
cggacgagtaacatgtactgtgttgtttgtgtttcgttttcgtgttgtaccgtactcctggtctattatatgtcataaagcatagtgctatttagggtgtgtattgtgttaaccagcttgtgtcgctagcatgtattcctgtccctgttgtgtgcttgtgttcatcctgcccttttgattccaaaaatttgaggcggtgagaagccaggcgctaaaaaaaaaaaaaannnnnnnnnnnnnnnnnnnnnnnnnnnnnnnnnnnnnnnnnnnnnnnnnnnnnnnnnnnnnnnnnnnnnnnnnnnnnnnnnnnnnnnnnnnnnnnnnnnnnnnnnnnnnnnn

SEQ ID NO: 50648 - DNA, 240 bp, Setaria italica
  Peptide Sequence Number=SeqID_116622
ggaaattggttgagcgcattcgttctttatctttcaaaagcattgttcatcaagagatcagcagacctaatattggaaagataacacctgatacgactgcagccattgtacctaacagaaggactggcatctcaggttcattcagagaaataagacgagagaggggcaccttcctgcattcttcaccttcgtctgataccttagaaagtagttcagcatgtgtgctataccggacaatca

SEQ ID NO: 50649 - DNA, 370 bp, Setaria italica
  misc_feature (1)..(1): n is a, c, g, or t
  Peptide Sequence Number=SeqID_116623
ngttggcatagccagagtattacttttgatctttttttctcctttcactattagaatgaatgagcctagagagtaaaaggaactcgtaccatgtgttctccagctgcatctgatagttgaggtgcctcttctaattgtttatcatttcgttgatcagatgtcgagacattctcctcttcaccatacccatcagcttcatgaccaccctttttcccttttaccttcccttttattcatgcaagtactcaacaatcgtactctgagcccacttctccagttcctctcatcattaagttctacaatcgctctggaagcatcttccatagtatcatactcaactaaaagcattgtaagttttgtttggtctaaa

SEQ ID NO: 50650 - DNA, 414 bp, Setaria italica
  Peptide Sequence Number=SeqID_116624
ggagatggtagaaactatgacatgaaaaatcaaactacaagctgtttttgcacactacacccattaaggttacatgttgaagggtcatatgtactaatgaataagcatatagcaaacactgcttagtagagccgatctttaaaaaacacattatgacataagcaactgatgtaacccacattagaaagcatatagtcaaatgaaacagaagacaagccattataatgctgcatagaagttagcagaataaggtttcaggtttacacacctcatcttcctgaggacattcgccatctcctctctcttcttctttgccctcttgtgggttccgagctttctcttggcaaccttcagagcacgcttgtccttaccaaccttcagaagctcagtgatacgcttctcataaggagcaaa

SEQ ID NO: 50651 - DNA, 238 bp, Setaria italica
  Peptide Sequence Number=SeqID_116625
tttgacaagtctattaggttctacagatatgaaaaacagacacaggagaatgtcgccgccagcttcacaaacttgagatgatctatttcttcttatcagtgtgagtacctcccctgttgcgtgtctcagattacagaaactggtctccttgatatgttgagagttgtgaagatcgatttgaaaggtcgtggtcaaactgatagcgatgatgaagatgatggtcgtgttgatattgaag

SEQ ID NO: 50652 - DNA, 348 bp, Setaria italica
  Peptide Sequence Number=SeqID_116626
cttgtcagctaagcattgtgttgttagttaggttctacagatatgaaaaacagacacaggagaatgtcgccgccagcttcacaaacttgagatgatctatttcttcttatcagtgtgagtaccagccgacctcatcttcctgaggacattcgccatctcctctctcttcttctttgccctcttgtgggttccgagctttctcttggcaaccttcagagcacgcttgtccttaccaaccttcagaagctcagtgatacgcttctcataaggagcaaacccagcaacctctctggtcaggggcctgatcagagaggttgctgggtttgcttctcataaggactgagactg

SEQ ID NO: 50653 - DNA, 228 bp, Setaria italica
  Peptide Sequence Number=SeqID_116627
acatgcccctaatgtgctagtcatttattttcttgaaactgcaggttttccgcgtgttctgtgatgatattacagaaactggtctccttgatatgttgagagttgtgaagatcgatttgaaaggtcgtggtcaaactgatagcgatgatgaagatgatggtcgtgttgatattgaatcatcttccgtatcctcatccaaatcatctgcatcatcaatttcaccaacct

SEQ ID NO: 50654 - DNA, 213 bp, Setaria italica
  Peptide Sequence Number=SeqID_116628
cacataactaacaacacaatgcttagctgacaagcactttgacaagtctattaggttctacagatatgaaaaacagacacaggagaatgtcgccgccagcttcacaaacttgagatgatctatttcttcgtatcactgagcttctgaaggttggtaaggacaagcgtgctctgaaggttgccaaacttgagatgatctatttcttcttatcag

SEQ ID NO: 50655 - DNA, 404 bp, Setaria italica
  misc_feature (14)..(14): n is a, c, g, or t
  Peptide Sequence Number=SeqID_116629
atcaccgctcaacngaaaacgccgaaaaaagctccttggcagttcaatggaaaatactgcatcaccaaacaccatcgcaaacatatggataatggggccccaggatagcctactgctgcttgcactccggtggttgttcagcatttccttgtgtcactttctgcgttaccttttgtttgcggcccgagcccgactgctcaaacaattagaaaggaaatgtattagcaaggggccaaggctgaatgaccacatttaaagtttctaacagattgctgccctactgcaagcctaccttccttgctggtttgctttcttcctcctcatcctcctcatcctcttcctcttcctcatcttcatcttcatcatcatcctcgtcctcattgtcatcctcatcatcatcaccc

SEQ ID NO: 50656 - DNA, 204 bp, Setaria italica
  Peptide Sequence Number=SeqID_116630
aatttgcggatatccacatggaaagcgttgtgaagaacatcatcctagacgaaggtgccagagaggccgaaagttcacttccccttttcacttgaaagaccttgaccttcggatcgaaggagtatgccagcctgtgcaacaaccatattgacttcgccagcttagaaagcctgatagaaaggtgaccttgaccttcggatcgaa

SEQ ID NO: 50657 - DNA, 193 bp, Setaria italica
  Peptide Sequence Number=SeqID_116631
ttgcaggagtggttaggcacacatgttttctgatgtcaccagtaagaagattggtggataagtcatatctttgataggcgcattttggaaacataacaacccccgtactttttgcagctcataaatctgcaggaccaatgatggacattgtgcttgatgaggacggccatcgaacaggatttctagcctcgga

SEQ ID NO: 50658 - DNA, 216 bp, Setaria italica
  Peptide Sequence Number=SeqID_116632
tccgcgcagccaccgccgcatcgacctcctcaaggtacgcgtgtacagaagagattgatccctccctccctttggctctcggttgatccatccattcctgattccttccccaggctgaggccgccatgaacgccgccggcctccgccgctgcgtcgaggacaaggaggctatggccgccgcatacgccgaactcaacgccaagtgcgccaaggagt

SEQ ID NO: 50659 - DNA, 302 bp, Setaria italica
  Peptide Sequence Number=SeqID_116633
agagaacctggctcacggttcctgaagctgcatcacagtgccggtaccagtggatgcaagaggccttgctcacaggcttctctgagtggcatgacaagtggagcagaagtggcggtggtaccgactgcgaccctgcctaaccgctgaacctatcagcggtcctccaatttgttcatcttctctctttccctaggcgccaaccttgcagaatacaataatacagtgtaattctcttgatgctgggtggtcattgacccttgattgttctactattgttctaggtattggtttattcttagttt

SEQ ID NO: 50660 - DNA, 129 bp, Setaria italica
  Peptide Sequence Number=SeqID_116634
ccggtaccagtggatgcaagaggccttgctcacaggcttctctgagtggcatgacaagtggagcagaagtggcggtggtaccgtgagccaggttctctgccgggtgctctgttcaggccatgaggttag

SEQ ID NO: 50661 - DNA, 463 bp, Setaria italica
  Peptide Sequence Number=SeqID_116635
tatcgtagccatatttgtaattgtaagtatatggttgatttatagaatttcccccaacctgtcaagtagacattggggtcaaatcaatcaataaatttcggtgaatgaacaggtctgcgagaagcttggcccaagcttatatgattttctgcggaaaactggctaccgcccattcccaattgatctagttcgccagattggagagcaactttttggaatctgttgcatgtgtgtagatacagtaccctgcaaacttcaaatatgtcaatttttttctatcaagattcttcctcactttttttgttttctgtgtctgatgtcctaatcgtctttagcttcaactcaatatttcgagtccaaaatttttcacatttgaaagacagtggatagtgcttgtcatgttttttccctttctttaagacaaaacttttttacttaattttttacaaaataacttttagta

SEQ ID NO: 50662 - DNA, 252 bp, Setaria italica
  Peptide Sequence Number=SeqID_116636
gaaagaaagaatgtacaatacatgctttcaagttcttacttataatctgtcatgtactacgcctgtgttccttgtgctattatccactgtatcccttttttcttatttggctcacttatcactgttaccatcacatggggaagtatttgtttatatttttctcttgcatagaaaaaaatgaatggatggatgtgtgtaggctcagataggaacattttgtgggcaagaagttggtggtgtggccagcctgct

SEQ ID NO: 50663 - DNA, 192 bp, Setaria italica
  Peptide Sequence Number=SeqID_116637
atttcgcagttgcaaccttgcattgcgcattgacagagagagatggccagagaaatggagaaggcaaggaaggccacttcttcccctaaggttagggagcaaaattaaagcaacatgcatcttgttgtatgatgcttgcttcagagatagagttgcatatgtgcatgccatgcttgtcagtgttcatcttta

SEQ ID NO: 50664 - DNA, 377 bp, Setaria italica
  Peptide Sequence Number=SeqID_116638
cgcagttgcaaccttgcattgcgcattgacagagagagatggccagagaaatggagaaggcaaggaaggccacttcttcccctaagagctcaacgattaatactggtcccaagagcccagttaggaacggtggaggatctccaccccataagaagaatgttactgaggtatgaaataattttttttgcgggtatgaggtatgaaataattaacacatagatgtatacagagtgttcagtattcgcagttttatgtttctacaatacaataatgtgtgttttagttttaaaataaaaatcttcttcttgtttcaaattattttcctaactaattaattttccttaatttaagtaaactattattattattaaaactaa

SEQ ID NO: 50665 - DNA, 399 bp, Setaria italica
  Peptide Sequence Number=SeqID_116639
gtaggtcaagacctggtgttccctattgtattgtagggtaaagtcgtccgtattcttccaacttcacaaacctcacccaagagatcaccaagacacgaacagccccttagctactgtaggcttcacactgaggagagagcaataaggcgagccggttacaattatcaggttgcaagcaagataaacacacaggaaatcattcggagatttgaagagaagttagaacagttgatggaggaacgcgagataaagctgatgaggaaggagatggttccaaaggcccagctcatgccagcgttcgacaagccattccacccacaaaggtctaggaggcccctgaccgtcccaaaggagccgagcttcctaaagctgaaatgctgcatcggcggagagttccat

SEQ ID NO: 50666 - DNA, 279 bp, Setaria italica
  misc_feature (278)..(278): n is a, c, g, or t
  Peptide Sequence Number=SeqID_116640
tttactttaacttttagtttaaggtttaagtttaagtttaagtttcttaatttaaggttcgttagttccggtttactaatttattctaggttgtcaagcaagataaacacacaggaaatcattcggagatttgaagagaagttagaacagttgatggaggaacgcgagataaagctgatgaggaaggagatggttcccaaaggcccagctcatgccagcgttcgacaagccattccacccacaaaggtctaggaggccccctgacccgtcccaaaggng

SEQ ID NO: 50667 - DNA, 378 bp, Setaria italica
  Peptide Sequence Number=SeqID_116641
ctgcttcggctgcagctgctgcatccctccctccatctcctcgcccccagctcccagtctgcggctctgcgcgactcgtttcgacacaggaactgaacccagcaccaaacggaaggatgggttccggcggctggatggctgccgtgggcggcggcgaggaacccgccgtccagcgcggcggtgaagtcgagccccggggcggcggagtggcccatgagcaggctggcaacgtagtcgctgtccattggaaagaaagaaaaggaagaaaggcgcggcacgccgccaagaattgcgcaggaagcaaagcgggggtggcgacgaaggtaagtacccgggtacgtactacttactacctacgactactacgaagtaccgaca

SEQ ID NO: 50668 - DNA, 247 bp, Setaria italica
  Peptide Sequence Number=SeqID_116642
cgtgcatctgcttcggctgcagctgctgcatccctccctcgtctcctcgccccagctcccagtctgcggctctgcgcgactcgtttcgacacaggaactgaacccagcaccaaacggaaggatgggttccggcggctggatggctgccgtgggcggcggcggcggcggcgagcggtgaccggcggggggctggcaggtggggggaggggatcgggcgaaacggagaagtcagagcaggaggacggaa

SEQ ID NO: 50669 - DNA, 450 bp, Setaria italica
  misc_feature (428)..(428): n is a, c, g, or t
  Peptide Sequence Number=SeqID_116643
gggtttcctagtttgcctgtattcatgctggtatacatatccataaagcgagttatgtttggtgttctcgtatggccacaaggttgccatatggttgggtagagctatgtttggagagttggagacaatgtcatgaagtggctcctcacgattctctctcaaaaaattcttacagaggcttatttcttcttaaacactttgttttaggaacctatccgaaaggtgctgttggtcacacccttatggtggaggaacttggtcgccggagggtcaatcatggggatgtttatgtcctgaggttgtacaatcggttggatcaaacaaagaaaggagagatagcatgtgctactcctggtgaagcccggaaatggattgaagcattgaacaagccaaacaacaggcagaccaagacctgatgagagggttancgtaggaacagattgcagaatg

SEQ ID NO: 50670 - DNA, 289 bp, Setaria italica
  Peptide Sequence Number=SeqID_116644
agccgcgagacggaggcgcgggggcgggagcggatggcgacctagggttcgccgattcaaatcggcggcgcgcggtggccatcccccgccggatccgggcatccggcgacggcgactcgggcgacgcgtcgacggagggagccagggagggaggagaggaggagcgagccggcgacctcgtccccgcctcccaagtcggggatcccggcgcggtacgacctggacgccaagtgggacgcgtgcctcgacctctccatccgccgcgtcgcctactcctccctcgccggcg

SEQ ID NO: 50671 - DNA, 354 bp, Setaria italica
  Peptide Sequence Number=SeqID_116645
aaagaaattccgtgtatcagtagagcagttaccaaagtagttcatgaagagcagaacttgacacaccaggaccaactcgtttgcattcgacacctcgaggaaccacctggaggcgtcggcgacggcggcaattccggagacggcacggttgaggaggacagcgacgagggaggcgccgccgacgaggatgggcaggctgcggacgagcgtgtcgttgctccggacccagccctccacccactcctgccgcggccgcagcgccctgctgacgcagcatccatgctctcgcacatcggaaagcggttgcggcggtgagaaggctccgaagggaagccggcggccgaggcgcggggc

SEQ ID NO: 50672 - DNA, 224 bp, Setaria italica
  Peptide Sequence Number=SeqID_116646
acctacctgcacatgcactatttggtaggctttgtactataggggcgtctggttcaggcgtatcagcgtccagccgtccacatgtatgcttgatgaattatcacgtcagacaaggacgatgtcctcacttgcaggagaacaaggcgaataggtagaaaccaaaacaataccaaataaatactagacccaagtaacttaaagggttaataaagaacttacgaaca

SEQ ID NO: 50673 - DNA, 318 bp, Setaria italica
  Peptide Sequence Number=SeqID_116647
aggaggggctcgggggtaggcgccatggaagggggcagcagaggaggaggcagcgacgcggatgtccaccttttggccgccggcgcagtggcccgggatgccgcagaggaagtagtggtggccggtggtgttgaggaccacggagtcgttgcccgaattccaggtggccatcggcttgttggcgtcgcagttcttgtagtccgccttgctcaccgccatcacgttgttggtaacttgtctttgtttgttacgttgtaacttacgttacgttacgtttcgttttgttaaccttttgttaaacctttcttttgtccggta

SEQ ID NO: 50674 - DNA, 477 bp, Setaria italica
  Peptide Sequence Number=SeqID_116648
ttctgcgggtacagtacaggtggcgcatcacacctatcacgtacaagatcagctgcgcaggatccccagtgccttgccgtactccaccatgtcgtcgtagatgtgctccagcgtcttgaactcgaactcgaacccgtccttctccagcttcgtcgacggcagcagcgctatcggcttcttgaggaggtcgccggagctgcaagaggtttattaatgtaattgttcatgcaaccagatcgatcgtcgctagccatgatctccaggagggcaaagaaaggatcaatcaaagcaatcgggtgatcttacagctcggtgttgacgttgtactgcgggtacttgtccgccaggaatcgggcgatctcgacgatggtggtgtcgagggcgttgcagatgtacctgccggcggccgcctccgcctcggcgacgaagatctcggcgcggcagacgtcgtgcacgtgcaccagcggcaccgacccg

SEQ ID NO: 50675 - DNA, 261 bp, Setaria italica
  Peptide Sequence Number=SeqID_116649
ttacggtttaccttttttaggttacggttagtaaggttaacttacgtacgttacggtaagtaaaggtaacttaccttcgttccagcacgtgaccgtcgccttgcagcggcttgctggagacggcggccgttgacgaggtcaggatcacgcgcttcaccgtcccggccttcacgcacgaccgcatcacgttgagcgtgccttggactccgagctccatcagctctttctcagggttcttggacgtgtagtccaccggggctg

SEQ ID NO: 50676 - DNA, 141 bp, Setaria italica
  Peptide Sequence Number=SeqID_116650
ccggaggccctctcgatgcccttgagcacgccgagctccttgtcgtcgcccgacagcagggagaggatggccgcatcacgttgagcgtgccttggactccgagctccatcagctctttctcagggttcttggacgtgtagt

SEQ ID NO: 50677 - DNA, 407 bp, Setaria italica
  Peptide Sequence Number=SeqID_116651
cagactttatctagaggtgcctgtgggttgatctttgcaacgctgacatcatgcaccacggtgtactggctgaatgttgatgtccccatgaaatggtaaatgggctttccatttatcgagaacctgctcttgagatcattcatcatgacacctgcccctgtggcactacgaattttaccgcagaggttagtctttccactcttgcaaaacttgcactccttgcattctgcttggtagcaaggaatgacatgatcaccaggctgcacatcagttaccccttcgccgacactttcaacaattccagcagcttcatggccaagaatgcaaggaaagagaccctcaggatcctttccgctccaggtgttagttgtattcggttgttggtctagtagtcgtcggttgtaagt

SEQ ID NO: 50678 - DNA, 256 bp, Setaria italica
  Peptide Sequence Number=SeqID_116652
gtttcgaggtctggttgcatctttactgaactaattgctctcctcacaaaaaaaaccccaactaaactaagcttagttgaaatcaactttgtaaatacagtatgattttgctctgattgattggatacatgcagatggttcgtgactctaggttgaatctcattaaccttttggagactggcaacattgacctttgcttcgccaatgaggatgaagctagagagcttatagagggaggtccaacatcagatccagg

SEQ ID NO: 50679 - DNA, 236 bp, Setaria italica
  Peptide Sequence Number=SeqID_116653
ccggcgatcggggagagcaacgcggtggacacgaccggagcgggcgacctgttcgcgagcgggtcggtgacgcgggcgctgggcggggaggtgcggccggagaactggcagtggatgtacaagcagatgcacgccaggggcctgctgcctccccgagctcaagaactgaactgctgctgctgctgtagcttagcatcaccagctgctgtatctcaccattcctaagaggccattat

SEQ ID NO: 50680 - DNA, 236 bp, Setaria italica
  Peptide Sequence Number=SeqID_116654
gaatttatcttttttgcccttattttactgcatagtggataaggctgaaaagcatacctgttatagtgtgcgtgcttggttgatgcaagcggcaatcgcaccatgcggccatgcctatctagtgcagtcaagctgcaggtatacccttgtctgatgcagtgttaaatttacatctcttaacaatcttatgattggtgagatcatttgtccatctaacaggccaatgagtttagagg

SEQ ID NO: 50681 - DNA, 230 bp, Setaria italica
  Peptide Sequence Number=SeqID_116655
agtggtgtagatctcacaagattaaggcccaaaaaagggcacaccgctcagatggttcgtgactctaggttgaatctcattaaccttttggagactggcaacattgacctttgcttcgccaatgaggatgaagctagagagcttatagagggaggtccaacatcagatccagaggaggcacttgcattcatgggaaagtactgcaaatgggctgtggtcgacccttgctt

SEQ ID NO: 50682 - DNA, 447 bp, Setaria italica
  misc_feature (447)..(447): n is a, c, g, or t
  Peptide Sequence Number=SeqID_116656
taggaattactagtagaaaaacttacaaaagaagacaaacaagacaaacaaacaaataggctctcaactttgtaactgggggagtgcaaatgatatgctcccggcaagtgtgagcttcgtcaagctggctgacatgggacccgagatgtgggggctgttcctcgagaagttccgggagctgctgcctgaggcattccgctcacgcaagtgcagcgtgacagcgcaaagggcaaagcagagactgggcacttcttgccagttttgagttagcgcaggactagggaggtgagcacctgttcagctgctgctgtttgctgtggctttcttgcaggtgttaagctatgccgttctagaataaagccatccttcacgggattgcgatagggcttgagggattgagcgcctgatccagaggtccatgtcgtgatgatggccttgctctgtacn

SEQ ID NO: 50683 - DNA, 268 bp, Setaria italica
  Peptide Sequence Number=SeqID_116657
gcggtggaaggcgctgagcgggagtgcgcggcggagggcgaggccttggacggcgcgcgcgaggagcgggtggtcggcgaggccggagaagccggcgtgcgggaacgcggcgatggccgggtgcgggtgggtaacgaggagggtccaaattcaaattttcctggaccaacatctggaagcacagcttgtgtggctgtcataagaaatgatcaactcattgttgcaaatgctggggattcccggtgtgttatctcacggaagggtcagg

SEQ ID NO: 50684 - DNA, 244 bp, Setaria italica
  Peptide Sequence Number=SeqID_116658
atccaatgaaggaatggagggattcctttcagaactgacaaatgcgattcctggagtagatgaagctatgagttttgctgaaatgctaaattcccagcaaccctagaaaagggtcttgagaaaatgatggagttgaaaaatagatttggcggtctgttgaatcaggccagtcgattgtttggtcttggtgatgaactgaacgaggatgcaatgcttgggagactcgagggcatgaaggacgtga

SEQ ID NO: 50685 - DNA, 251 bp, Setaria italica
  Peptide Sequence Number=SeqID_116659
tggtgaattatcaatgagctttacctcctctacaagatctccagcaattcctctgacaacttcacataagttgttctccgtaaatgcatcattgatccagaaactcatatccttgtaacatggtggaaactttgaaaatgccttgaacttgacaccaagcttgccttctgagaactgggtaacaagagcttcttagaaactaaagtagatgagaatgaatataaacaaagatggacatgaccccttatcaa

SEQ ID NO: 50686 - DNA, 386 bp, Setaria italica
  Peptide Sequence Number=SeqID_116660
gttgaattgttgactattacagtgtatgcagcagaccagttcttcaccccagctgacttccatgttaacctatgctgacaggatagccgtaccggacacaacatcccaccatttgattgggttagaaggtgcggaaacaattagtgaaaccaaatacctgaattgaggtgcatgtctgcgtttaattagcccttccgcggctatatcctgaactgctgaggcatcagaccttcagtcagtacgatcaagcccgggaaacagctggcaatcatagctcgtctttcacattctgatcagtgtctttatcatccggttttggtgtctcagatggtggggaagtggcttccggagactcgagattatccccccaagattcgtgcagtaaa

SEQ ID NO: 50687 - DNA, 230 bp, Setaria italica
  Peptide Sequence Number=SeqID_116661
gcgtgaggagttactaaatgctgccgatgaccaccactttcaggaaaagatggataacaaaggctggaataacaaccttctgaaatgggcttctagtctcattaatggtgatgcatcatcaaaaaataaagctgataaaatcaccgaccgtaaggatgcaagacaaggggagaccataaacaattttactactagttagacttactagggacaaataactaagtaaataa

SEQ ID NO: 50688 - DNA, 221 bp, Setaria italica
  Peptide Sequence Number=SeqID_116662
atttggccaaatttcgacaaactgctgctggggatactctacgtgtcatctatgaacaactcagcaaggacccaacagtctctccaatcttgatcaggatctcccaaattatgctcaacataccgtgcctatattctagcaccctgaagctttggctcctttgtcattggattgttgcacagatcaatggtctttgctcttgcctttgtggcgtttccaca

SEQ ID NO: 50689 - DNA, 125 bp, Setaria italica
  Peptide Sequence Number=SeqID_116663
cagtctctccaatcttgatcaggatctcccaaattatgctcaacataccgtgcctatattctctcttcctcaagaatggagagactgttggggtccttgctgagttgttcatagatgacacgtag

SEQ ID NO: 50690 - DNA, 370 bp, Setaria italica
  Peptide Sequence Number=SeqID_116664
cttccccttcttttctttgtaacttttattgttttacctattgttctagtctagtagttaagtcttctacgtctattttcttcaactctacattctacaagagcagtagatacgactcttgcctcagctacatctctcagagaatcattagccctccacatcagaaccaaccataacattttggtgatagctgcacgcctatgttactatcatgagacaaccatgtttcaatcatcacgagacatgagcaaagacccatacagattatcccacggatccttttacatccagccaccggcttgggataacacttactgatcctactaccaatgtacttcagctaaatactaccattacctatactctcagg

SEQ ID NO: 50691 - DNA, 156 bp, Setaria italica
  Peptide Sequence Number=SeqID_116665
gatgccgttggagaaccatcttgtctccagtgcaccggctggctcctgctcgaactcccaattgcttgaaccgaccggtgctgagcgtcatcagcccaagacaagacaagacaagtaccgaagaatagacaaggaccgacaattagactaggaata

SEQ ID NO: 50692 - DNA, 393 bp, Setaria italica
  Peptide Sequence Number=SeqID_116666
ttttttttttttttttggtttctgtccagtgttggtcggtgtgaagattattaagaatatatatgctctgaactcatattcccaaactgcctcatctgggacctcacactctctttgccagcaaggtactctgcaatcttggaatgtaacgggttgcctaaattatgattgttgctagcagttagcacaatcaagacaattgcagcacagggattatgagaatcgagaattcggacaaccctcacctcctcctggttagcgtcaacgccctcactttcaccttgcccttcttcagcatcaccattgccatcacctacaacgactatctccccggcatcgttcatgtcagcatcctccacagccccctcctcctgcttccttacttttcttttt

SEQ ID NO: 50693 - DNA, 229 bp, Setaria italica
  Peptide Sequence Number=SeqID_116667
tgaacccggccggtgacggtggcgatgatggtgcgggggccgacctctccaagctccggaccgtgctgtacgtcgccgcgcagctgctggcatcctccctcgcctgcatcctcctccgctacctcaccggcggcatggtacgcgtcccatccaatccatccatggatctactacctatttttactctgctttacatacgcggtccggaggatccgggggaaaggggacg

SEQ ID NO: 50694 - DNA, 360 bp, Setaria italica
  Peptide Sequence Number=SeqID_116668
agtaaattttgttctcctcaaatcttgacattagagattgtgttactggtctgaggacaaaccagtaaaaccaaatggttttctcaataattgcctgtacataacatgaggcagctctataatccttaagagcaaggtagcaacagaaccttagtacgagcttgaatcccaggatctggttgatctccatcaatgcagcttcaacgccttgccttttcttaaaagatgcagctcggaacatatagggatatgtcagagtagggtccaactcagtatgtagccttgttaggtttccgacttgccatcaccatccaaatgttagttgtcttattttcttggtattgtctattcctattccct

SEQ ID NO: 50695 - DNA, 346 bp, Setaria italica
  Peptide Sequence Number=SeqID_116669
gaaaaacaatcagaaagagattataatttgacaatccattcattcataattcataaaagggaaaatatctaagattggaaggacaaaagatgaatagcataccaccagtaaattttgttctcctcaaatcttgacattagagattgtgttactggtctgaggacaaaccagtaaaaccaaatggtttctcaataattgcctgtacataacatgaggcagctctataatccttaagagcaaggtagcaacagaaccttagtacgagcttgaatcccaggatctggttgatctccatacaaatagacaaagaacttaacaaaacgaaccttaagaaccttttaactaa

SEQ ID NO: 50696 - DNA, 257 bp, Setaria italica
  Peptide Sequence Number=SeqID_116670
actgggagttgggcacagatgaactacatctattaacaattaaattaattgcatctagaattttcttataccaagtttcaatctgctttgaatcttgtggtctaaaatcacatcacttcttagctttgtcgtaccaaaataataaataacctagatatttcatgcaggaagcagcgcttaccagcagcacggtatctgtaggggtagactcgtagagggtcaagtttggtgaccatctgcaagtccgcctttgtcag

SEQ ID NO: 50697 - DNA, 267 bp, Setaria italica
  Peptide Sequence Number=SeqID_116671
gtgatactgccacataccaaaccaatagtgcacactacttggcccttccttgaggtgtcagatgatgactgctgctcatctctgtgatactgccacataccaaaccagtagtgtgcactacttggtttggtatgtggcagtatcacagagatgagcagcagtcatcatcggaacagatcagggaaggaccacatgatgaacttggcgtagaggtcagtctccaggaactcgatgtgggctgctctgccaatcatggtgtttaggctt

SEQ ID NO: 50698 - DNA, 237 bp, Setaria italica
  Peptide Sequence Number=SeqID_116672
acggtgagatgagtcatcattcatactccgcaaatagcgatgagggatctcaatttttgagtgaacagtccatattgaccattctgccttcctgtcaatagcccaaacatcgtgcaagtagtccaatatctttgttttgtttgccctgaatagatcaagaaagcgttgtcggacatggcaatacacagccactaaaacactgcaaatacaggataaactcaattgaacacttgccta

SEQ ID NO: 50699 - DNA, 149 bp, Setaria italica
  Peptide Sequence Number=SeqID_116673
cagagatacactccatagagaagttaaatataatagtgcttatgtgtgaacttctatatttaacttctctatggagtgtatctctgattagtcttttatgctgaacttttgagtgttctcttcgttgaagagaacactcaaaagttcag

SEQ ID NO: 50700 - DNA, 430 bp, Setaria italica
  Peptide Sequence Number=SeqID_116674
ccctacagtatctaatgacaagatccaacggcaaattacgggtatctcatccaaaatgcaacattgttacaatgtttttacatcactagaatggccagcaatgcggctactaggtgagtcaaccagcaggattgggatttcgaagcaaaactgtcagggcttacaggcccggaggctgtaccgccgtcgctgccgttggcgcccgtgcttccagcgaaaatgcatgaaccatggcttggatcagtagatgttatcattgcagtgccattaaagctgcatgtaccaccgctagattgtgttctatgataataatcgttgaaagcatatgaagcaacagctacaatgttatctgattcatagcatggttgcccaggactagaaattagacaactagacaaagtttaagaacaaagaaaagaaccaaagggaa

SEQ ID NO: 50701 - DNA, 206 bp, Setaria italica
  Peptide Sequence Number=SeqID_116675
cctggtgaaaaattcgatcatacatgcagtatttttaatgaacgaaagcaaactgcataagcatctggagaaagtgaatcaggtcaggttaccagaagatagacccaaaaatgtactctagtggcgttggcgttcttggcaaaaagtcatcctggagcacgacggagctgacgacgtctgcgtacttgacggcgaggttgagcgac

SEQ ID NO: 50702 - DNA, 412 bp, Setaria italica
  Peptide Sequence Number=SeqID_116676
aagttggaagtcaaacacattctccattaattcaaggtagtctgaaacaggatctatcacttctacagtgaaatcaccatagcttacaactcctatagacgatagatcaacatcaggaatatctgctgtttttatttcagaaatctgcagcgaagattagcattgtgcataagcaacagtacaatcagaaatgagcattagatacatatatgatgaaatcaaatgttagagctacaaactgaaagtgtgtttccataaatctggtcagtaattatctctggcgctggctgcccgctgctgtagttaaactgtgacacaacatttttacattagaatagtatgaaatctcacaatatgacaaggaaattccatctattttatcataagaatattttttaattccaaatattag

SEQ ID NO: 50703 - DNA, 235 bp, Setaria italica
  Peptide Sequence Number=SeqID_116677
tacactgatcctgtagacggtagtactgtatccaggatcagtgtagctaaaatcatcagcaaattgaagggtgtaatctccatatttctctccaggtttgctacttgcaataacatctctaaggtgatccatcatcttgtttacaccatcagactctgttgcaataattgcagccaatgcacaaacagcaattccttatttccagtctggtataaaaggcttgctcgatcaatcg

SEQ ID NO: 50704 - DNA, 475 bp, Setaria italica
  Peptide Sequence Number=SeqID_116678
attgatcgagcaagtccttttataccagactggaataaggaattgctgtttgtgtcattggctgcaattattgcaacagagtctgatggtgtaacaaagaaccttttcccagaatcatgttccgatcaccatcacctgaaacaattcaaatccatcatcacttgcggcaccaaagtcaggtgcacgggttccaaacatagtaaaaacaagctccttggcataagttaaattgggatctggatgaccatttccaaaatcttcaagtggcacccccatttaatatgcagtccggatcagcaccaagtttctcgacaaaaataggtcctgcgtacgcaccagtaattgcatgcatggcatcaaatatgaacctgaaatcaggccgagaaagcaaatccttgataagttggaagtcaaacacattctgcaagacaaaaaactccattaattcaaggtagtctgaaacaggatctatcac

SEQ ID NO: 50705 - DNA, 266 bp, Setaria italica
  Peptide Sequence Number=SeqID_116679
ccatgtgaaggtcaataaaaacaagtggatcacaaggggtttgatagttgtattactcaagcaatattttaacaaatagcatgctaaagacaaagggaaacatatgagacctgaaatcaggccgagaaagcaaatccttgataagttggaagtcaaacacattctgcaagaacaaaaaactaacaaattatttctggcattaataggctattgctccttaatcacttcactagatacctccattaattcaaggtagtctgaaacag

SEQ ID NO: 50706 - DNA, 103 bp, Setaria italica
  Peptide Sequence Number=SeqID_116680
cccgcctggtgaccaggcgatacattgatgttgggcaggccggctcggcctcagccttatcttcagctaccaagccaagtgtacacaggtcagcatgaggaag

SEQ ID NO: 50707 - DNA, 408 bp, Setaria italica
  misc_feature (105)..(105): n is a, c, g, or t
  misc_feature (132)..(132): n is a, c, g, or t
  Peptide Sequence Number=SeqID_116681
atctgggattctaagtttcttctaccagatttgcataattgtcgtttctcacagttacaaatctcctctgttttcagggtcacagcactttagtgtatgccggtntggggatcgttgatggtacaaacccancttttgaatgggatgagcttgatctcaaagcatctcagtttgcaaagttattgcagtaccaagaacaacatattcgctaccaagaggctgaaaatatgggaacggtgatacgaatagagaagtagtaactagtaagtcatcacaaagttcagcattcattttagctagttattgcccccttatttgtttgatagtaacctagaaggaattcaattgaaattgtgtaattatggaattcagaagagcagtagtgctgaaaatacattgattgaatca

SEQ ID NO: 50708 - DNA, 260 bp, Setaria italica
  Peptide Sequence Number=SeqID_116682
tgctcctgcatttgttggaaatagtccagagaaactatttcaccggaaatacttgaacatttccagtgaggctttagccggtactcgagcaagggggaaaacaagggcagatgactttcaaattggtcaggatttgcttctaagtagcaaagaggatattgaatttactatagtgcgggacagcataaagaagaagctggagatgatatgcgatgaggtggttgtccatcccagcaaggctcttcggaaacttccaagag

SEQ ID NO: 50709 - DNA, 209 bp, Setaria italica
  Peptide Sequence Number=SeqID_116683
gttgatggtacaaacccatcttttgaatgggatgagcttgatctcaaagcatctcagtttgcaaagttattgcagtaccaagaacaacatattcgctaccaagaggctgaaaatatgggaacggtgatacgaatagagaagtagtaactaggatattttgattcgatttgaagattccaaggtgagagattttgtcttgtagaaaacta

SEQ ID NO: 50710 - DNA, 230 bp, Setaria italica
  Peptide Sequence Number=SeqID_116684
gtccatcatatgaaatagtgttggcaaataatgctcatcaccatagcagttgcgaccgtcttccatcccaggctgtaaagagaataaaaaatatgttgaattgatacacacacacacacacacacacacatgcaatgtagcagagagtacatggttgccaggtccgaaagggtaacacaaagaaaaaggtgcactatttggtaacttattaattttttagaaatgaagac

SEQ ID NO: 50711 - DNA, 460 bp, Setaria italica
  misc_feature (432)..(432): n is a, c, g, or t
  Peptide Sequence Number=SeqID_116685
tcatccactgaagacaagattatgatatatgcatagggcacctacaagccaatcttgcatttgattatagtccctagtacacttactagcatatatccaagacgatctagaactaagtattcaacttttaacagagaacagtaacatcttaaagaaggtggtgcaagatacaaaaacaaataaaaaagtttcctaggatgtgcaagatgaatgtacctcaagggaagaatataattcttcttcaacacttttttggatcgatgcttctaaggacagtgcgttggcgtcagtatatccagtggaattgtatatataatcagtgacactggtgagtgaataactcttcagatggtggagcacttgatagcagttgcattccaaaagggccctagacaatagattgtggtgaagaagaagaaaagaaaggattancctgctacaaatgacaaatggatgatag

SEQ ID NO: 50712 - DNA, 455 bp, Setaria italica
  Peptide Sequence Number=SeqID_116686
ctgctgtgatcttgcgctgttgctgtggatgcagctgaggcttctgctcactaaatggagtggcagcgttgaagctgctgctggaggtactcagcttgagtatgaccttgaactgtgttgtcatttgatattttggttgtacatttgctgaaactgaggctgcacctgctgcataatctgattagataggagagcagatctaccaacgatattctgcggctgctggaactgcattaatgaaggtgagatttgctttgtggtgccctgtaatgctgctgcggctgctatggtctggtacatgtcagattgcagaccaagtagggaattatccatcctcggctgcatccaaggactcggactcgtaccaagcccgccaaaattcaatgactggaaacttgggtttgtgccgttcttcgtaagtcctactattaagtagtaagtaggttctaagtcct

SEQ ID NO: 50713 - DNA, 325 bp, Setaria italica
  Peptide Sequence Number=SeqID_116687
tccgtagtaaggtaagtctaaagtacttcctacttgtctaacttcgtctttcgtattgtacctattgggttctagtcgacaggtaccgcagtaggccttggcatgctcagttgagaagctgcttctgctgagaatggcctcagcgtattttgcatggcagtggcattagatggagacaatgagctcatattcgtttctgcaaagctctgcgcctgtgaaaaatggtagtattgtttgcagcgccacaggtgaagactgaggggctgacgacaattgagaaaatgctgacaatgcattagacactgactggtagttggtcatgttg

SEQ ID NO: 50714 - DNA, 250 bp, Setaria italica
  misc_feature (228)..(228): n is a, c, g, or t
  Peptide Sequence Number=SeqID_116688
agctgcgatctttgggctgcaggaggggaagcagcgtgaagaaatgcacagagcaagttacctcggtgtccccggagccgagagccggaggcctccgccgccgccgccgccgctggctcgatccgaggagccgccgcggcgtcagatcccgcacccgcttggtggagaccgctagcgccgagctccccgcgccgctctacggcagatccgcccgccgccgccggggancatgctcgctcgctcgccgccg

SEQ ID NO: 50715 - DNA, 221 bp, Setaria italica
  Peptide Sequence Number=SeqID_116689
agagcagatctaccaacgtatattctgtcggctgctggaactgcattaatgaaggtgagattgctttgtggtgccctgtaatgctgctgcggctgctatggtctggtacatgtcagattgcagaccaagtagggaattatccatcctcggctgcatccacagcaacagcggcaagaatcacagcagcagcaggaatgttggctaaactaattgtctagttt

SEQ ID NO: 50716 - DNA, 450 bp, Setaria italica
  Peptide Sequence Number=SeqID_116690
aagaaaaccttagtaaccaatacaatttactaggacaatagaaacttctagaaccaaccaaagccaggttcaactgtcatcacaagaaccaattccactggattttctgcttcgaccaggggaaaaacttcctccactggagttcctggcctcaatgatacaccaggcctcatacccttcgatttaatgctttggatgagctcttgccagttttctctggttacttcaatatggaatgtgaatcctgaggcgccggcctttcccaatgattctacataatctgaaggatttgtgaccataagatggcagtccaaatatgctttggtgtgtttcctcaagctctgaatcactggagccccaatagtcagattaggaacgaagtgcccatccatgatgtccatgtggagccagtcgcgccgaggcggaccactgcgctcggcctccgaggcg

SEQ ID NO: 50717 - DNA, 249 bp, Setaria italica
  Peptide Sequence Number=SeqID_116691
agcagatgctgccacatcgatggttgaaggacctagaccaccatcgacctctatgtcaagggtagggtacttccttctcagtgtacgaacctaatttaaccagatttcagaaagtgagcagaattgaactctatcataaatatagaatgaagaaactggggagctaaatggcattctaacaaacaacaataccttgtccatcatttctggcatgaacttctgaccaccaaagccaggttcaactgtcat

SEQ ID NO: 50718 - DNA, 435 bp, Setaria italica
  Peptide Sequence Number=SeqID_116692
aaagaacagttcacctactgatccaacatcgtgatatcattccccatatgaagttgtggagcagttgttgcataccaataaaaaatgtgacaagagacatttttttgcacctatatttgcatgctctatttgagatagatatacatgctggaaaagattttcatgatatgcaggtattcggttactcccttttaacatagttcttgtaatgtctaccttattgttaattattatgcccatttgtttacatctactttgtgttttgacaataactagtaagtcaaaactgtttgctttataggtgtagctttatgcagactatgagcaaaggatgctactacccttcctccgtactagtcagcattacaggcttgacaaggcatatgaaatctttgcacaaagggaacttgtaagggaacaggtttttgtccttgg

SEQ ID NO: 50719 - DNA, 400 bp, Setaria italica
  Peptide Sequence Number=SeqID_116693
tagtaaaactctgatgacaccagaatcaattgaaaactgtggccgtcataggattttgtcaattttcatccagctgatacatgcccttgtttagtccgactgtttcctcatgcttttgataggttgcgggatcggcttgtgaaaattgtgacggactaccggacggaaacttcactgcgaaatggatgcaacgatatacttaaggctgactgtgtgaaccttttggttaaatactaccacgaggctcggcgtggagtttacatggcaagcatggacgaggaggtacatggaaacagggttgatgatggatcatcgcgagcaaatgagagatcatccagtgttcgggctctagatattaagtccagaacgagatgtggtgcccggtgttgcttatgcttcg

SEQ ID NO: 50720 - DNA, 289 bp, Setaria italica
  Peptide Sequence Number=SeqID_116694
tcatgcttttgataggttgcgggatcggcttgtgaaaattgtgacggactaccggacggaaacttcactgcgaaatggatgcaacgatatacttaaggttaactatattttggtttaccatctttcatccatctgaaattcagaacattttccaaacttggtcttgtacaggctgactgtgtgaaccttttggttaaatactaccacgaggctcggcgtggagtttacatggcaagcatggacgaggaggtacatggaaacagggttgatgaatggaatacaatacgca

SEQ ID NO: 50721 - DNA, 248 bp, Setaria italica
  Peptide Sequence Number=SeqID_116695
tgcgggatcggcttgtgaaaattgtgacggactaccggacggaaacttcactgcgaaatggatgcaacgatatacttaagaacattttccaaacttggtcttgtacaggctgactgtgtgaaccttttggttaaatactaccacgaggctcggcgtggagtttacatggcaagcatggacgaggaggtacatggaaacagggttgatgatggatcatcgcgagcaaatgagagatcatccagtgttcg

SEQ ID NO: 50722 - DNA, 495 bp, Setaria italica
  Peptide Sequence Number=SeqID_116696
atctgacgtacagatgatgtttggctcaaaatcgccctgacttcaggttcaaaacccaaatccagcattctatctgcttcatctagaaccacaaatgaaaacctcattaagcttacaaacacccatttcaataaggtctttcatacgtccaggagttcctatgactatatccactcctgatttaagggcagctatttggggtccctttgaagttccaccataaaggcaaactgaatttatcccacatggtgtaccagcctcactaagtacatctgcaatctggcacaatacagaaatgtgtaaatcatcctttgcatgttaatattcagccatattgtttctttcagacccccaccaagcctacaaattaatatgttaagttgttctactatcccactaaccaaaaaggatatgatacgcatttgtagataaaggtaaaagcatttgccactcttatccaagattttttttctatgtacactagaagttttttgg

SEQ ID NO: 50723 - DNA, 250 bp, Setaria italica
  Peptide Sequence Number=SeqID_116697
ttcccggatccagtggcggcgatgcctatgaagtcgcggccgtcgaggaggaacggccaagcgtgcgcctggatgggcgacggccgcgcgaactccttgcagcagtcgagcacctgggacggcagctcggcggcggagaacgaccgcagcggcgcgtacttggtgtcctcggagccctttcccggttctacggtcctacggtccttttctttcggtttcgtttccgttttttctttttccgttttccttt

SEQ ID NO: 50724 - DNA, 206 bp, Setaria italica
  Peptide Sequence Number=SeqID_116698
ccatcggcatgaacctttcgcttgaccttcaccgcacgccgtcgaccgccacgtcgcatcctacacctgcacatcacaagccaagagcaacatcataccaacacaacgttgtcaatcactcatcatccaagggtgaccaccattgatcctcaggttttcgcaacgtaccagagtgagctcttccaatgctgggatctcgatcaata

SEQ ID NO: 50725 - DNA, 240 bp, Setaria italica
  misc_feature (185)..(185): n is a, c, g, or t
  Peptide Sequence Number=SeqID_116699
gcccggactcctcgggtccatcggtccaagcctactcgcgttcatccttcaccgcccttggtccatcggcatgaacctttcgcttgaccttcaccgcacgccgtcgaccgccacgtcgcatcctacacctcatgatcctcttcactgcttgacggtgagatgtcctcggtgaagcctgaaaacgngcgcaacaaacacacggcgaagtgtatggtccggcctcgtcgctgtcaggtacaa

SEQ ID NO: 50726 - DNA, 445 bp, Setaria italica
  Peptide Sequence Number=SeqID_116700
tacttcctgcatccatcagtgtagagatgacaaagggcagtcatgtacttcatttgcttcggaagcatactaagttcctcacaaccagaaagtttaagtgtctgaagattatatagtatgcttatgtcatctggaagtgcttcgattgtactctcagagatatcaaggtacctaagctggtgtagatgctttggtttcattggcaaagatgctttggcaaatcttggtagagcaagtgctcgcagagaactatatttggatgaatgcagcacatctacacagtactcaataaacatcgttcggataggtgtagataaaatatcaatatttgcaaactgcattaccccccatgtttcaaaatgtatatggcgggtagcacttggaagtaattcaccactttcattcatttcacgagttatatatatgcactcttttcctgtagcag

SEQ ID NO: 50727 - DNA, 433 bp, Setaria italica
  Peptide Sequence Number=SeqID_116701
ttcatctcaaatcttggagaaaaccgaaaccctagcccaagaacacgatttaggaaaaaactcaaaatcaagccggattcgtgagagatttgaatggagatcatatcaaagatgctctccaaagtcctagcaacatttcccttaaccaatctcacgagattcgggctcaaacatgatgaacgaaaattccccaaaaatagctccgaaaataaggaaaaagaaaaacgcacgggaatcgaagatttcgcacgatttgagacaacaaccaaagataaatcacaagaacatcttctatacaagatgagtactagcctcctcccttcatccacccactaaagatgaagaaataaagagaaaaagagtaatcaccctctaatctccctctctcctctcactctaagcacttgactagcatctaagcaagatgataatg

SEQ ID NO: 50728 - DNA, 444 bp, Setaria italica
  Peptide Sequence Number=SeqID_116702
taaataaaagactcacatgcttggcgcatgtctgtaggtctggtgcatgcgttggcctgccttccttcgtgcatgggcctgcaggtctgctttgctcgaatgcccagatggcctgctagctggcctgcttcgcgtcctgggctgctacctggcctgcttcgcgtcctgggctgctacctggcgaagctgggcctagtgcactgctgcacctgtctacctgctgggccgccttgctgggcctgctgtagctggcccgcgtgcacgtgctgctctggctcgctcgctgcctcgcttccctgttcctgcgcacgaacagacagaggaaaaacaagaactccaagaacaccactcaatcttcaaactaaaaaactccctcaaaatttcatgaatcgagacaaaacttgagctatagatgcgcaaccacaagtgcgaatagatccatga

SEQ ID NO: 50729 - DNA, 419 bp, Setaria italica
  Peptide Sequence Number=SeqID_116703
tcaccacatgagcaggcacctagttaagaatcacccaagcaagaatagactagtccatcaagagctcatactaggaaaacccattctcaacaagacatcattgcaaaaaacccatatatgcatcacatgtcatgtttaaaacttgttgaaaccaagtgcctacttattttggtagacatcttgtaacaactaagcaagcaaaaatatcacattaagcacaaaaaattggtgaatttatgaatttgtcagcatttttattttcattattcacacaaagcaaaatacatgaagtacctttgcggcacaaagaagccaatgcttccccaagggtgcatcatgggctaaacatttgcaatgatacctaaatctttgacccaattgaaaagaacatggattccaaatacaagcttgatacagaa

SEQ ID NO: 50730 - DNA, 391 bp, Setaria italica
  Peptide Sequence Number=SeqID_116704
ctaagcctagaggtgctgaaataaccagccccccatccctatttatagtccaggacgaaagactataatacccctacagctacaactaagataactacccacgcaggggcattttggtccaagttttttatccgcacatcggatggacacgccgtcttcacgactttgcttcgcctcgacgcaagcttcgcgatgacgccacgtgccctccttctcgaagctccggccgcaccgggctcgcccccggttttgaggcccaaaccgggaaacctgcctgcgcggtggttttgaggcccaaaccacccaaaccgtccattgacgtcgttgttccggtccttccgttccttaagttccttcccgtcttttgttactcgaccgatgccgtctccgt

SEQ ID NO: 50731 - DNA, 269 bp, Setaria italica
  Peptide Sequence Number=SeqID_116705
caagtgactttatacctggacagttgtgaactgataggtcactgagagatgagtattctcctgtcccactgggcaaggatgtcaggttttgaaggaccgaaagggcgaccagaggggggggtgaatgggagcctataaaaattcttaacaagaacaaggcctatgtcccaaacgcaaccccaaagcacactgcgcgttgtatcgtcaagatgacgcaagtcaactcgtgacaggctcaccctaggaacgataagaaatattcaattcac

SEQ ID NO: 50732 - DNA, 246 bp, Setaria italica
  Peptide Sequence Number=SeqID_116706
gccatgtcgcatcctacacttgcacatcacaagtcaagagcaacatgaaaccaacacaacgttgtcaatcactcatcttccaaaggtgaccaccattggtcctcaatctcccccttgatgagtgtattgacaacaccccacaaattcatagtattgaaacagaaaacaagaaactcaaatagaaaatctcagtcccctaagataagggaaacagctctacacaactgagacaaaatcatgtgatct

SEQ ID NO: 50733 - DNA, 207 bp, Setaria italica
  Peptide Sequence Number=SeqID_116707
tgaagcaagcttttcttagaacttggaacatggagaatattatttagatgcaaagtacgatttggggtacataaaaatgaatgaccaacattgctaattctcatacctgaaccgctggtggtgtgcacctgatcaagtccattgtacttgtcgcacacggtcagctaggtgatgtgatcagaggggccactattagcatatcagttt

SEQ ID NO: 50734 - DNA, 219 bp, Setaria italica
  misc_feature (20)..(20): n is a, c, g, or t
  Peptide Sequence Number=SeqID_116708
ccaagcctactcgcgttcanccttcaccacccttggtccatcggcatgaacctttcgcttgaccttcatcgcatgccgttggccattacaccgcatcctacacctgaaccgctggtggtgtgcacctgatcaagtccattgtacttgtcgcacacggtcagctaggtgatgtgatcagaggggccactattagcatatcagtttgtgtccacctcgtag

SEQ ID NO: 50735 - DNA, 249 bp, Setaria italica
  Peptide Sequence Number=SeqID_116709
gtgcgcctgcccgcagtgcggcgaggtgttcaccaaggccgacagcttggagcaccaccaggccattcgccatgcaggtatggccgtatgggatctccttgctctgcatctagtgcgctcttctctgtgtttctgtgcatcaacattgggaggaaaaaaactggatttctcttaattttgttattgatttttttttgtgttttgtatttcctttctcttctgtggtgagcaatagtatagctacaagta

SEQ ID NO: 50736 - DNA, 284 bp, Setaria italica
  Peptide Sequence Number=SeqID_116710
aagttataatacaacagaaaaaaattatgccattgttggtcgagcagggaggatcttacctgctaattcccggtcgtaagattccttactagaagactagttgggaggtccctagcacggcccccataacgaccacgaggacttggactgcgagctcttctcctataacctcttggaggtgagggactgtaatcgtagcctcttcccatgctttttctagggctcgaggggcggaggcggtctcgagaagcttccgaagtccgaacgcgaccgtggggaacgag

SEQ ID NO: 50737 - DNA, 354 bp, Setaria italica
  Peptide Sequence Number=SeqID_116711
ctggaacctattaaagaagctggaattttggaaggccggaatggcatcaaggaaacatgtctacagcatgcagcaaggtgtcttacaaaccaagactgggttaggagtgattccctcaaaacagttgaaaacacagctatacctgtgattatgcttgtagcagatgtaccttgtgacacaaatatgttcaatgagtattcttcagtactggatagctcacaagaatattcagttaatgtgcttggagaacaagggagtcctcctcggtctgatacctctagttcagaaggcagcaacatgctggtgtcctcaaaaattgaataaggatgattgtgacattgtgcagtcaattcg

SEQ ID NO: 50738 - DNA, 535 bp, Setaria italica
  misc_feature (18)..(18): n is a, c, g, or t
  Peptide Sequence Number=SeqID_116712
aggagagcagagttgaanaagacaatactagacttagaaccttaggtagtagggtagggactacggaaggggtcgaggtaggagcagacgcggtagccgccggtgagggaggtggaggacatgtaggtgcccgtgaagaggttcttcttctccaccttgtccatgtcgaaaagcacggggaagctcttggcgtcgaggacggcgaccacccgcgggtccttggccatgaacgggcccggcggcacgttgatgcgcacgacggtggagccgtagcgctcgacgcgggactcgaagtacttgtcctggccctggaagtagtagaagtcgaggcggtcccgcacggcgccgatcaccggcagcccgtagctgcccggcaccggcttcggggcgccggacgaaccctgatcggagctcgccatggacgtatgggaaaaactctcgcggctaccttggattctcactaccttggatcgatcagagctcgcgcggcttattagcttgcgcaatttctctctccttgtcactgacgcgatct

SEQ ID NO: 50739 - DNA, 418 bp, Setaria italica
  Peptide Sequence Number=SeqID_116713
tcgttgggttgggtcttcggtaggggttcgtaggttaggtagtctagtacgtcggtagccgccggtgagggaggtggaggacatgtaggtgcccgtgaagaggttcttcttctccaccttgtccatgtcgaaaagcacggggaagctcttggcgtcgaggacggcgaccacccgcgggtccttggccatgaacgggcccggcggcacgttgatgcgcacgacggtggagccgtagcgctcgacgcgggactcgaagtacttgtcctggccctggaagtagtagaagtcgaggcggtcccgcacggcgccggatcaccggcagcccgtagctgcccggcaccggcttcgggcgccggacgaaccctgatcggagctcgccatggacgtatgggaaaaaactctcgcggcgtaccttgga

SEQ ID NO: 50740 - DNA, 475 bp, Setaria italica
  Peptide Sequence Number=SeqID_116714
atccgaaattccaaatccaataatataagtacatccaatggttcgatcatttcagcgcgtgctaagcaaccgtcggtgcggacgtgcggtgaaggttactgagtgccaggaccggaagttgctttggtaatgccggtgaaggtcaccttggcaccgagcggatcttttccaacctcgacagcgaaagtgtcgtaacggaggaacagctccacgaggaagagcctcccgacgagtaccaccaggttcttgcccgggcactgcttgttcccgacgctgggtgtctcggtctcgcggccgttggaccagtacacacgtactgcagcagcttgctgccctcgtcgccgacgaaccggtcgcccacgaactgccccgccgtggagccgaacacgcgggcgtccttggtggcgcacggctggtagccgaacagcatctcgcccttgttcaccacgtacaccgcgtcgtggctctcgatctg

SEQ ID NO: 50741 - DNA, 452 bp, Setaria italica
  misc_feature (1)..(1): n is a, c, g, or t
  misc_feature (4)..(4): n is a, c, g, or t
  misc_feature (9)..(9): n is a, c, g, or t
  misc_feature (16)..(16): n is a, c, g, or t
  misc_feature (24)..(24): n is a, c, g, or t
  misc_feature (33)..(33): n is a, c, g, or t
  misc_feature (42)..(42): n is a, c, g, or t
  misc_feature (50)..(50): n is a, c, g, or t
  Peptide Sequence Number=SeqID_116715
nttnttttnttttttntttttttnttttttttnttttttttntttttttnttttttttttttgttgcaacatgccaacatgcattgcaaagagtcaaatcaacacctccgatcacacgtgaaagagggagaaatcttattacaatgcaagggggaaacaacgggacgaaataaaggcacccgtcctgcacccatccaatccaatcatatcatccaaccgcgacaaagtccttggcgggtgcaggtttgattaaccgccgtgatttaatttttactcgctgcctggaccagaggtcgccttcgtcacgctggtgaagttgacgctggcgccgagcagctccgtgctgacggtggcggtgaaggtgtcgtagcggaggaacagctcgacgacgaagagcctgccgacgagcaccacgaagttcttgccggggcactgcttgttgtcgacgctgg

SEQ ID NO: 50742 - DNA, 274 bp, Setaria italica
  Peptide Sequence Number=SeqID_116716
cgggggggaaaacggaaacgggacgaaataaaggcacccgtcctgcacccatccaatccaatcatatcatccaaccgcgacaaagtccttggcgggtgcaggtttgattaaccgccgtgatttaatttttactcgctgcctggaccagaggtcgccttcgtcacgctggtgaagttgacgctggcgccgagcagctccgtgctgacggtggcggtgaaggtgtcgtagcggaggaacagctcgacgacgaagagcctgccgacgagcaccaacg

SEQ ID NO: 50743 - DNA, 271 bp, Setaria italica
  misc_feature (156)..(156): n is a, c, g, or t
  Peptide Sequence Number=SeqID_116717
aaagagggagaaatcttattacaatgcaagggggaaacgaacgggacgaaataaaggcacccgtcctgcacccatccaatccaatcatatcatccaaccgcgacaaagtccttggcgggtgcaggtttgattaaccgccgtgatttaatttttacncgctgcctggaccagaggtcgccttcgtcacgctggtgaagttgacgctggcgccgagcagctccgtgctgacggtggcggtgaaggtgtcgtagcggaggaacagctcgacgac

SEQ ID NO: 50744 - DNA, 241 bp, Setaria italica
  Peptide Sequence Number=SeqID_116718
tttttttttgtgcaacatgccaacatgcattgcaaagagtcaaatcaacacctccgatcacacgtgaaagagggagaaatcttattacaatgcaaggggggaaaacgaacgggacgaaataaaggcacccgtcctgcacccatccaatccaatcatatcatccaaccgcgacaaagtccttggcgggtgcaggtttgattaaccgccgtgattttaatttttactcgctgcctggaccaga

SEQ ID NO: 50745 - DNA, 241 bp, Setaria italica
  Peptide Sequence Number=SeqID_116719
ttttttttttttgttttgcaacatgccaacatgcattgcaaagagtcaaatcaacacctccgatcacacgtgaaagagggagaaaatcttattacaaatgcaaggggggaaaacaacgggacgaaataaaggcacccgtcctgcacccatcccaatccaatcatatcatccaaccgcgacaaagtccttggcgggtgcaggttttgtatttaaccgtccgttgattttaatttttacttct

SEQ ID NO: 50746 - DNA, 208 bp, Setaria italica
  Peptide Sequence Number=SeqID_116720
ccaatcatatcatccaaccgcgacaaagtccttggcgggtgcaggtttgattaaccgccgtgatttaatttttactcgctgcctggaccagaggtcgccttcgtcacgctggtgaagttgacgctggcgccgagcagctccgtgctgacggtggcggtgaaggtgtcgtagcggaggaacagctcgacgacgaagagcctgccgacga

SEQ ID NO: 50747 - DNA, 180 bp, Setaria italica
  misc_feature (9)..(9): n is a, c, g, or t
  Peptide Sequence Number=SeqID_116721
ttttttttntttttttttttttttttttctttacacgtgaaagagggagaaatcttattacaatgcaaggggggaaaacgaacgggacgaaataaaggcacccgtcctgcacccatccaatccaatcatatcatccaaccgcgacaaagtccttggcgggtgcaggtttgattaaccgcc

SEQ ID NO: 50748 - DNA, 245 bp, Setaria italica
  Peptide Sequence Number=SeqID_116722
gggaaaacgaacgggacgaaataaaggcacccgtcctgcacccatccaatccaatcatatcatccaaccgcgacaaagtccttggcgggtgcaggtttgattaaccgccgtgatttaatttttactcgctgcctggaccagaggtcgccttcgtcacgctggtgaagttgacgctggcgccgagcagctccgtgctgacggtggcggtgaaggtgtcgtagcggaggaacagctcgacgacgaag

SEQ ID NO: 50749 - DNA, 192 bp, Setaria italica
  Peptide Sequence Number=SeqID_116723
gggggaaaacggaaacgggacgaaataaaggacacccgtccctgcacccatccaatccaatcatatcatccaaccgcgacaaagtccttggcgggtgcaggtttgattaaccgccgtgatttaatttttactcgctgcctggaccagaggtcgccttcgtcacgctggtgaagttgacgctggcgccgagca

SEQ ID NO: 50750 - DNA, 140 bp, Setaria italica
  Peptide Sequence Number=SeqID_116724
ttacaatgcaaggggggaaaacgaacgggacgaaataaaggcacccgtcctgcacccatccaatccaatcatatcatccaaccgcgacaaagtccttggcgggtgcaggtttgattaaccgccgtgattttaatttttac

SEQ ID NO: 50751 - DNA, 230 bp, Setaria italica
  Peptide Sequence Number=SeqID_116725
ggaaaacgaacgggacgaaataaaggcacccgtcctgcacccatccaatccaatcatatcatccaaccgcgacaaagtccttggcgggtgcaggtttgattaaccgccgtgattttaatttttactcgctgcctggaccagaggtccgccttcgtcacgctggtgaagttgacgctggcgccgagcagctccgtgctgacggtggcggtgaaggtgtcgtagcggagaac

SEQ ID NO: 50752 - DNA, 106 bp, Setaria italica
  Peptide Sequence Number=SeqID_116726
ggaccagaggtcgccttcgtcacgctggtgaagttgacgctggcgccgagcagctccgtgctgacggtggcggtgaaggtgtcgtagcggaggaacagctcgacga

SEQ ID NO: 50753 - DNA, 449 bp, Setaria italica
  Peptide Sequence Number=SeqID_116727
actaccttagttacttagaatagaaggaaaaaatgtcggcatggccttcactccgtacttggatgaaacactctgcattcaccatggtggtgtagcttaatcaggctttcttcagacatgtatgaagaagagtgagtttctctatatgtttgtatcataatatccaaataaaataaaacattggggatcctcaagacctaaagaaattttaaagattctatatcaagcatcaatttatgcttttaccccgtgcttctatttcttggaagaaaaatgtgatgtgactgagcaagttcctttctttccttagaggttggatcataaaagcccagacacaagacaagtaagaagaaatagtgattacctgtagatcgtcaacatccacatagaggaacaagacctcagggtggtctgagctagctcctcaaacttgtagttcatggacaggg

SEQ ID NO: 50754 - DNA, 423 bp, Setaria italica
  Peptide Sequence Number=SeqID_116728
cccaaacacaagcaacgattcagagtcacacccactgcgttcacagttgcaggatcaacaggtaagactactgagctacaaatcgacagccatcagagtcgcacgagcgacaatgtacagtctggaacatccagacgcatttcagaagacctgaccaggtagtgctcacggtcacagagcagtttcagaggacatgacggcaacgaatgtctattccaccactatttgagtttcgaagggatcagtagaagaatccaccagcttcttcaactcatcgggattcgccccaaccatcttcctaaccacctccttgttcttgatgaggaaaaatgtcggcatggccttcactccgtaacttggatagaaaacaactactagtaagaatacgtacggacaataggaaccttaacaaactaaccgtaa

SEQ ID NO: 50755 - DNA, 258 bp, Setaria italica
  Peptide Sequence Number=SeqID_116729
tttaactaattagtttaaattaagtaattagttattggtttgagcatattgcaaataaattaatgaatctggatttctgcactttctgctgtcaattaaattacacatgttacaacacgattgtttattgaagttagctttgtcatctgaaatgttttagcattaggtactgcagaggctcaactgaacaggggtagagtatgccattcttaagtgacttgtcgacattggtatttccgtatctttagcaggtgatgc

SEQ ID NO: 50756 - DNA, 428 bp, Setaria italica
  Peptide Sequence Number=SeqID_116730
ctgtgacttctgcgacaatgcccgtttcttgttctgatgagcagtaacactctgtgcagatagatatgatgacatcaaaggcacctgtcctgaaaggaagctgatagtactgttcgcaacattgttacgagaaatatcatcatccaaacaatggttcagtgacgcaacaatagcaagacccaaaccccattgattcacatccttcacttgggcgctcaaggaatttctcaaacaggagtcatccagagacaactgacttaaaagtacttttaagaaggcaaaaatattggcagactgaagaactgtagcaccatcctttgttcgccccaaggtcaaaagaaaattcagtataacttgagtagacaataaaccaccatgttggcatctccaggctatactgcatagatgccaacatggtggtttattgt

SEQ ID NO: 50757 - DNA, 396 bp, Setaria italica
  misc_feature (4)..(4): n is a, c, g, or t
  misc_feature (322)..(322): n is a, c, g, or t
  Peptide Sequence Number=SeqID_116731
tgtnttgtctttctttttgtctttgtacttactagtaggtaactttctattaattaagtaaaagtcttatttcttgttaaattcttgtaactagtcttaactattcttctagttaaagtcgtagtttgccttacagaatcagaatctcctgaactcttgtctctgatcactagaggtaatgctgtactggcagaaactgaagcacctgaagttgacaaagtacaacttgcagcaaatttgaaccatccatgcttgctacgaatatgtggtggtttctcattaagtgctagttcctctttgacaacagcagggcagaaaaaancgagttccaattagaggaactgctagcctttacacttcctttgcttacaaatgctagcaggtggataataatct

SEQ ID NO: 50758 - DNA, 397 bp, Setaria italica
  Peptide Sequence Number=SeqID_116732
taggtcatgactggctgctcaactggggcaatccaggcatgttggaccttatgttactgctatggttttcaattgtgcctaaaggttatctttggaaattatactaaatccctgcattcaaagcctacagtgctaaaaaaagactagcttaccttctcattgtgtaaacttaaaattagttagaaaattaatacatttcttgttatattcaggcaaaaagacttactaatacttggaaggatggacagtggagtgcaagtttgtatctcactacccactcacgtccatagtttgtatcattcgtttcaccaaggttgtgtaaggaggctcaccggcaatgggggttttttttactccaattatattgacagcggcagcctggtatgctgttaggtta

SEQ ID NO: 50759 - DNA, 326 bp, Setaria italica
  Peptide Sequence Number=SeqID_116733
aagacacggcgtattcctgcattacaatgggataggaaaagtacagatccacagctggtctgtccattactgttgaactgatttggtacacgagttccatgctcatcaaacaacctggacatacatccttccaggtacaacaacaaatttgcaaatccgagcgcaaggctgtgcttatttcagatgacaagcaggtcaaatgcgaagaaatacagcaagcgaacaataacaagaacggacttccatcactggtggaccaagtgatggaagtccttgcgcctgttgatcttcttttggtccaccagtgatggaaggacttccatcac

SEQ ID NO: 50760 - DNA, 245 bp, Setaria italica
  Peptide Sequence Number=SeqID_116734
tactcctactctgttgtccgtcgaaataacccatcgaggctcaggcatttggtcataaaccttgcggagggccggcgccatcttgttggtgagtgttccggcgacgatcatgcagtcggactggcgcggcgaggggcggaagatgacgccgaagcggtcgaagtcgtagcgggctcgcctgctgcgccgtggagatgatgcacgccggcgccgtcccgctacgacgccgaagcggtcgaagtcgt

SEQ ID NO: 50761 - DNA, 424 bp, Setaria italica
  Peptide Sequence Number=SeqID_116735
tctattttctagtttaattctagttctattgtcttcagtttaaatgttgttgccttagaattataagagaacttttgttgtatcttctcaagagagagaacttatccacaagccagtgtgaagtacactttacaagattttgatcaccaacttaccattctggctagttaatgtgtgccaaatgtccatttctggcatagcccaagagtgccattttctgaaattgttcctgaagtgttgctttcatgctttgaatggtattttgggaaagagcaattgatgctatacatcttacatatgtatctcaaatgttggaacttgcagctatctctccagtcatggaccggcgaattatctgagagctttgttgttaagaggcatgcagacaatgcctttaagtccaaggattttgcaactgcagtcg

SEQ ID NO: 50762 - DNA, 394 bp, Setaria italica
  Peptide Sequence Number=SeqID_116736
tttaggacttaagtggtagtgggctagtgattggagattggatttcgggttaataaggacgatcgtcattgtgatggtattgccctgaccaagagaccaaccacatggcaatcgcaagatggccacgcgcacgcacgcacgcctagctccgctccgctccatcccgctcactcccagatgccgacctccatgaagccgtcctccgtggcgcagcccctgaacatgccggtgcagttgaagccgtacgcgacctcgccggtcttggacacggcgatgaggcccgcgaagccctcgtcgaggcgctccttgacgcagagtcgacggcctcctgcagcggcagggcccttgtacctccatgacggcgcgacgtcgcgcgccagcgtggagcggatga

SEQ ID NO: 50763 - DNA, 113 bp, Setaria italica
  Peptide Sequence Number=SeqID_116737
ctgcaggtgtccgtcccggtcagcgggatccgatagtcaaactgcatgcacgggaaatgatgaacaatggttctagtttctacttgtcttgtattttgaatgacacgaattcg

SEQ ID NO: 50764 - DNA, 459 bp, Setaria italica
  misc_feature (441)..(441): n is a, c, g, or t
  Peptide Sequence Number=SeqID_116738
agtccagcgatgacgagggcggcgaggacggcgaggtgcccatgacggacgaggagcggaggacgctgcgccggaagatacgggagatgatggaccgcgtcccggagacggcggagctcacggacccggaggagcggaaggccaagatgcgggagctgctgaccaaatacgagctggtggtggaggaagaggacccggactggcctgaggacgccgaggatgggatgggcttcagcctcggccagttcttcgacaagatcaccatcaaggccgagaagaaggatgacgccgacgaggaggatgacacggggaatcagggtgacaaggagattgtttgggaggatgacaattacatcaagccgattagggatgtcaagacacaggattgggatgcgtccgtgttcactgatttcggaccgatggttgtgcttgtgcataacngatataagagaccacagg

SEQ ID NO: 50765 - DNA, 299 bp, Setaria italica
  Peptide Sequence Number=SeqID_116739
ttccatacacaaatcgaggttcgccaagccgatacgtactggagggaattacacctgtatagaagcacagtacatcgccaccctttaccagaaaagcccctggaaaagtaaaattacagcgcgcgcacagcttccagcagcttctcatcgtcatcctcacgcgcgagctccaccgacagacgccggagctcgagcagatcttcttcctcccggcggtgttggaggacctgcaaccgccggagacgaaaccgagcaagacgcgccgcgcgctcccctgaccatcgactgacggctcgaca

SEQ ID NO: 50766 - DNA, 381 bp, Setaria italica
  Peptide Sequence Number=SeqID_116740
taaacctaatagtacgtttaaaattagttaggttacaaaggctatgaaagcagatggtctggaggttagcatcttagtgttgaattcgttgattaatgcttttggtgaagacagaagggttgttgaggccttctctgtgctgcagttcatgaaagaaaatggtttgaggcctgatgttataacatacacaacattgatgaaagccttaattcgtgttgagcagtttgataaggtaagcacaaactcttgtgtgcatcctttctcctcgccacaataaactagagacaactcagatcaaaaatcttacgtactcactaagttacatgctatcaaatccattagatctaacagatctgatccaatttgctattctagcttttg

SEQ ID NO: 50767 - DNA, 404 bp, Setaria italica
  Peptide Sequence Number=SeqID_116741
tcatcatcctcttcttcctcttcgtcttcctcctcgctttctgatgaagatgtatatgtttcccggctttcctgcagtattaagtgatctagatccgagagttatgcctgagaaaacctaggttgctgctactacagatggagaaatctgaacaagtgtgacgtgctattgtaatgctgctgctaaactgtgcaggaacaggatcaggactgcatttggaacagcgggattgtaaggtttgtctacagatgtgcaggttccagcagtggacaaacattcagtgatgaaattacctgcagccaccgtcgacggtggaagcctgccattgctctgaccatcaccaggattgggaataggattcccgcagtcctcagcaccagaagctttattttccagaagctagt

SEQ ID NO: 50768 - DNA, 241 bp, Setaria italica
  Peptide Sequence Number=SeqID_116742
agatgtatatgtttcccggctttcctgcagtattaagtgatctgcagccaccgtcgacggtggaagcctgccattgctctgaccatcaccaggattgggaataggattcccgcagtcctcagcaccagaagtgagaacatggtcaacgaatactccccatttgcaccgatcatgagaggaagagtgtgacgaaggactaggagtgccacgaaaattatggcgactgtccggcaacacagcg

SEQ ID NO: 50769 - DNA, 305 bp, Setaria italica
  Peptide Sequence Number=SeqID_116743
gcaatgctaagttagtttccacaaaacaagaaattaacaaggacgcacacaagaatagtggcacttcacctagttccaatggttctgctgtagtgaagaagcaaatgccaaaggagagcaaaaaggaatctgcaaccgaaagaagatcaccaccaaagctttataggagttcaccaacaccagtgaggacttcaccaacaaatctcagttcgccagcaaagcagaatggaaactctggtccagttccttctagttattcttagttgtttaaacgttaagttagttttacttagttaagttcttta

SEQ ID NO: 50770 - DNA, 423 bp, Setaria italica
  Peptide Sequence Number=SeqID_116744
aagcaactaggactacgaatacaagttagacaaggaacgaaggaccgttaaataccggaagaaatggtttagtcgaaaccattgagcagctgaagcagaaggtgtacaagtgcttgctcggaacagttgaaaccgcggcatccgcactggaaggaaggtagcacacgagagaaatgaccacaccagtgaagaagggcgattaagttattgcagttatacaacatcacgtaggcggtgaagaaccgaagatgatggagaggtgtaaatagccgggttgctgattttaagttatgaattaattaattttttcggcattttccctaatgttgcgtacgtgtgaaatggcgaattattggcgattgatgcctcgatcttcaaaatactgtgtgttcatcacaaatggttgaatctttttacattttt

SEQ ID NO: 50771 - DNA, 216 bp, Setaria italica
  Peptide Sequence Number=SeqID_116745
ctaatcaaatcaggaaaggctgttgtcaggaggaagaatattgctcttattgtagcagctgaggctcaaagggaggctgcagcagctgcatatcttgtaaaaggccttggtatttttgctgagataagggaatcttctgaagtggatccacatgctgcaattaccaagttctttcagctacaccggcttatagttcagcaaagtgctgtctggaaa

SEQ ID NO: 50772 - DNA, 178 bp, Setaria italica
  Peptide Sequence Number=SeqID_116746
cagttgccccgaaagtcagacaggaggccaaacctaagtgaagaagcaaatgccaaaggagagcaaaaaggaatctgcaaccgaaagaagatcaccaccaaagctttataggagttcaccaacaccagtgaggacttcaccaacaaatctcagttcgccagcaaagcagaatggaaac

SEQ ID NO: 50773 - DNA, 445 bp, Setaria italica
  Peptide Sequence Number=SeqID_116747
tgggcagtaagaaacagagggagaagaacatcactgacatcatgccagatattccctgtaaacccacccaatgcaaagcaatggccggtatggcatgcctggatgtgcaacttggctccagttgggaagcgttcagggatttgacagtcaccttcttgatccatggaaggcttttccgggactgtgccggaatgctccactcttcgccattggaagtgcgggactgtgggacataaattacagtagaggagtggccgatggtgcgagcatcaccacaaagctcacagatgtcatagcgctggttggagagatcacagatggttgttccagttccaggtgtgcatctcgagtactgaactaaaccggatcctcctgtgcttctttctccttgtgccggcactgccttttgcttgttcccttcctttcgtccctacttagttaattt

SEQ ID NO: 50774 - DNA, 254 bp, Setaria italica
  Peptide Sequence Number=SeqID_116748
gacataaattacagtagaggagtggccgatggtgcgagcatcaccacaaagctcacagatgtcatagcgctggttggagagatcacagatggttgttccagttccaggtgtgcatctcgagtactgaactaaacctgttagtaaataatatgaaatcaccagttctaaatgttagtacttgtcattgggaaatagttgtgaatttttttgtttggtcatttgataaacaattacaattgtaattgcaagtaaag

SEQ ID NO: 50775 - DNA, 193 bp, Setaria italica
  Peptide Sequence Number=SeqID_116749
tacagtagaggagtgccgatggtgcgagcatcaccacaaagctcacagatgtcatagcgctggttggagagatcacagatggttgttccagttccaggtgtgcatctcgagtactgaactaaaccattgtttgataacaataatgttcctattttcagcactcttggatctctgttgtccggatcctcctgtg

SEQ ID NO: 50776 - DNA, 396 bp, Setaria italica
  misc_feature (17)..(17): n is a, c, g, or t
  misc_feature (156)..(156): n is a, c, g, or t
  Peptide Sequence Number=SeqID_116750
gtacctgcacacagacngaaccagcacgtcgttggccgtcaaaaacttggttactctgcaacttaacagtgagcagtagcagtgttaccaagctgataggagacagttgaggagcgtcatgttgtacggtactcctgagaagtcctccgttgatcnccttctgatgatcctccagaaggtaggcctgtgaaaaaaaaggggttgcccactgatgatcagcttaaaaaagctttaagctagcagtgtgactcgcatcaatggagattagcaacagaatgacagaaaacgtgttccgaaaggaagaacggattgtcagaaatggacaaagaaagagacgtctacgtagcttaaggtggcaacaagactctacccacggtgcacttgggcgttggaata

SEQ ID NO: 50777 - DNA, 241 bp, Setaria italica
  Peptide Sequence Number=SeqID_116751
gcgccgttgatcgtcgacaccaggattgttgttcggggacacgaacggcagcccgtaccaagctgataggagacagttgaggagcgtcatgttgtacggtactcctgagaagtcctccgttgatctacttctgatgatcctccagaaggtaggcactggggataggaagagaaagagcgcaatgacatttccagaaattccaaagatgaacttcaccacattctccatctcttcaaaccct

SEQ ID NO: 50778 - DNA, 244 bp, Setaria italica
  Peptide Sequence Number=SeqID_116752
ccttttcttgagattacttttaatcactggagttatgatgatggttggctgcagcctttggccgggttcgtgcgcccagatggtgacccagacacagatctggagacagatgggttggccacttcctcctccagtggtaagcacagcgctgtaaccagctcacagtttggattcttactggtgtctcaatcggcctgagagcaacctgacagccctttaaaacgagctcgtattgttcataagc

SEQ ID NO: 50779 - DNA, 303 bp, Setaria italica
  misc_feature (287)..(287): n is a, c, g, or t
  Peptide Sequence Number=SeqID_116753
agttttagacgacaaccgaaataggtagtagtactacaatgctattcgatcatcaagagttcgtcgtcaattagatgctgctgtcgagtcatctgcttcattgcctagcacacaagaatctatccaaggtgagcaggttgaaatcacagaagattcagctactacttttgcctcaatgatttctaggaaagatgctgcaactcaaactagcccagagctaagtaggtcctcttcgcccaacaccagaccaacatttacccgttcattgtcgacgcaacagtcaaagngagcgagagctgtttc

SEQ ID NO: 50780 - DNA, 417 bp, Setaria italica
  misc_feature (183)..(183): n is a, c, g, or t
  Peptide Sequence Number=SeqID_116754
gtggaagtaaacaagggcttacgcattaatagcatctaagagagtgcacatcgatcaatcttctcgagtagtacggtacaacagcgctttcagctctcgcgccaatttttttcaccaaaagaaacgcaagaaacccaagctaattctagttttattcttctccatgaattgaggtaacatatntaaaatcactataaccagagccgacgatgttacttggaggctccatcactcggttaattagtgcttgatgaagaggttgtactcgacggtggcgtccccggtcttgaggtcgagggtgtgcgtcctggcctgcgcgtaccctcgcgccatcctgaacactcccgtgccgccgacgatggccatctccctgacggcgtcgaacgcggcgttcttgcccatgatggcgacggtgct

SEQ ID NO: 50781 - DNA, 394 bp, Setaria italica
  Peptide Sequence Number=SeqID_116755
aaggaggaggccaccaccccatgatggatggcttcgaggagtaaagcatgtttcatggggtggtggcctcctccttccgaagtgtttttcgatgactgttttcgggctgtgccccgcctgcttttggcttttttgccttcatcctccgcttcttctcggtggcgtcaacccaggtgtaatcagaaggtatgtggaatggatcgacctcgtctttccagttccggctatcaccaccatcactagactgtgtacctcggccaccctttacccacgaataccatgagcctgatccttcagattctttggccttcgcatcctggaactgtgttggacttgaaggtggtgtggcaaactcatctaaaggctgtagttcttcaaactttgtgaacgtcac

SEQ ID NO: 50782 - DNA, 287 bp, Setaria italica
  misc_feature (196)..(196): n is a, c, g, or t
  Peptide Sequence Number=SeqID_116756
taatacaccaaccaatacaactaagaactagtagtaacctacggaccaaccctttaacccacgaataccatgagcctgatccttcagattctttggccttcgcatcctggaactgtgttggacttgaaggtggtgtggcaaactcatctaaaggctgtagttcttcaaactttgtgaacgtcacaatgacacgtancgttggaacaatggggatggcaatcttgactggaaatgtgccggtaggaagcttggttgtcaagagttccctaagcctcctgacagccttc

SEQ ID NO: 50783 - DNA, 256 bp, Setaria italica
  Peptide Sequence Number=SeqID_116757
ccggcgccaattcaagtgcggcacgagctccgcctgtgtcacgtcgatcccaggccggtacatattcgtattggacatcaatgccacctcatgtgccacctccgactctgtgggctgcacacccgctccctccagcgcatctgtaatctccttgtccttgtgagccagaactatgagagaacccgggtgcaattccttacccccagctattccttctaggtccttcgtctacctattccccttagttaaacaggaa

SEQ ID NO: 50784 - DNA, 260 bp, Setaria italica
  Peptide Sequence Number=SeqID_116758
taagaagaatacaagtgagaataatttagaagaccgaatagaactatgaaatacagggcaaccatgaactgatatattttattgatgtgaacaatcaagtgcttagaccttctcaagggcctggacaagatcattcttcagatcctcgaaatcctccactccaatgctgaacctgatcaggttgtccttgatgccatagatgtccctttgctcctttgaatcccagtaagacataatggctggctgatcaataatgctct

SEQ ID NO: 50785 - DNA, 256 bp, Setaria italica
  Peptide Sequence Number=SeqID_116759
tccaccaacgacgtcattgtgtccagcaatgtactttgttgcagaatgaataactaggtcagcacctaaagttagtgccttctgattgataggggaggcaaaagtactgtcaatacaaagcagagctcccttgctatggcacattgtgaccaccactgattgctaccgcaagacaagaatttacatggaaaacgagctccctaagaggggagtttcggtaatactttgccatcctctaattaagttcttgttttag

SEQ ID NO: 50786 - DNA, 250 bp, Setaria italica
  Peptide Sequence Number=SeqID_116760
ctactggcgtggtgatcgcatccgtggcgatccttcttcccagcctctcgcccgcgtggacggcaaggctggcgtcggagccgagcagtttacgctcggcctgtacgacggcggatggctgcgcaaccttagcgttggggattgcgctgacctccgccgccgcggaggcggcgacgccgatgttgctgcagttgcggcgggccttggtgctgagctggcgcacgaagtttggcgggaagcggaggatggt

SEQ ID NO: 50787 - DNA, 240 bp, Setaria italica
  Peptide Sequence Number=SeqID_116761
gtgatcgcatccgtggcgatccttcttcccagcctctcgcccgcgtggacggcaaggctggcgtcggagccgagcagtttacgctcggcctgtacgacggcggatggctgcgcaaccttagcgttggggattgcgctgacctccgccgccgcgtggtcggaccgccccgcggcggcgacgatctgcgcgacgccgatgttgctgcagttgcggcgggccttggtgctgagctggcgcacg

SEQ ID NO: 50788 - DNA, 400 bp, Setaria italica
  Peptide Sequence Number=SeqID_116762
ctcgccggcgcgctcagcgtctggaccttcgcgcgcggcgggggtggcgccggcgccgtcttcgccaccgtcctccagatcgtttgtgctgtggtattgactgttgtcatgggaataagatatttcaaaacaagaaagataatgcctgctggaattattgctgctatcagtgcaatcgtgttgatattctacgtgtacaagatatcaactggtggtaacaaggattacatcccggtgagtgccgagtgagtctgctggagcttgtgaaggcaacaacttgatcgctgctgtccatcgattgtactctagtgaggccaacactgtactacactattatacactagttcactaatattaaaccttctcctttgctgcgtgtggtgccacatgttcttcttgt

SEQ ID NO: 50789 - DNA, 227 bp, Setaria italica
  Peptide Sequence Number=SeqID_116763
atccgctggctgcagagtctgaagcgcacttctgcagacgggtaccctgagcaaggtcgcaatggatttgcaggtgagtgcctgtatcagattctagttcggggcgctgatggatctcgccgcaaatagatatctatcctcgattagatgtttcccgctgtagctcgaacgattgcttcacactccggtggcccttatagcatgcttagtcatctcaggttgcctta

SEQ ID NO: 50790 - DNA, 454 bp, Setaria italica
  Peptide Sequence Number=SeqID_116764
gcacggcctgccttgaaccctactcttgcaaaggaagaagttagcttggcagagtgggcattgcacagaggacctcaaacagcacaacaccgaaagagtagacatcagatttctcggtgagctgctgcctgcggaagtattcaggatcaaggtaaccaaaactgccctttaccactgtgctcacatgagtgtggtccatagatgggccagtcttggacagaccaaaatctgaaaccttggcaacccatttctcatccaggagaatgtttgttgtcttcacatcacggtggatgatggtgtgctttgcaccggtgtgaaggtagtgaagaccacgagctgcaccaatgcagatatccaagcgctgcctccaggtaagcggtggcttctgggtcttgtacaagtgctcgcgaagagtaccatgagccatgtagtcatagacaaggatcatctcatt

SEQ ID NO: 50791 - DNA, 457 bp, Setaria italica
  Peptide Sequence Number=SeqID_116765
acttccagttcggccaagtcgcacactactggtagctatgcttcatctttgccatccaacctttggcaacccatttctcatccaggagaatgtttgttgtcttcacatcacggtggatgatggtgtgctttgcaccggtgtgaaggtagtgaagaccacgagctgcaccaatgcagatatccaagcgctgcctccaggtaagcggtggcttctgggtcttgtacaagtgctcgcgaagagtaccatgagccatgtagtcatagacaaggatcatctcattcttctcctcacaatatccaatcagtgacaccagatgacggtggcggagcttggacaacatttcaatctcagtctggaactcatgaataccctgctcagacaacggattgccgcgcttgatagccaccttggttgttcccccatcaacctcgccacggtaaactttaccaaatccacc

SEQ ID NO: 50792 - DNA, 313 bp, Setaria italica
  Peptide Sequence Number=SeqID_116766
gaaaaatatgctgaatgaataaattatgcctgcgagggaacgaatggaaccagtttttacctcaccgcccttggggttcatgatctgtgagaagacggcgctaggcgtcagcccgtctgagtccatactcgcgacactttgatcgcccatgctgatagaagtggtggtggttgtggtggtgctcgattcaatggacgggtcattgggatccttctttcccaccatcacaaggggagttgcccttcgtcagacattccctactagtccttaaggttcttttccttactttctttcttttctttgttcgttcttt

SEQ ID NO: 50793 - DNA, 264 bp, Setaria italica
  Peptide Sequence Number=SeqID_116767
aaaagattgctccgcagtgtttcccttcaggtagggatcaacaatctgatcgagaatggcccttcttctgacagtgccaatgcccactctgccaagctaacttcttgaaacactgcggagcaatctttcccttcaggtagggatcaacaatctgatcgagaatgcccttcttctgacagtgcaatgcccactctgccaagctaacttcttcctttgcaagagtagggttcaaggcaggccgtgcacagaggacctcaaacagca

SEQ ID NO: 50794 - DNA, 168 bp, Setaria italica
  Peptide Sequence Number=SeqID_116768
agacaacaaacattctcctggatgagaaatgggttgtcttcacatcaaggtaaccaaaactgccctttaccactgtgctcacatgagtgtggtccatagatgggccagtcttggacagaccaaaatctgaaaccttggcaacccatttctcatccaggagaatgtttg

SEQ ID NO: 50795 - DNA, 184 bp, Setaria italica
  Peptide Sequence Number=SeqID_116769
aggatcccaagggagtgccctcgtcagacatcccacagccaaggcttccactctcttctgcgctttcctgcatttgaagggcaaactccaagttccagagtacatcccccatagaaggacgggcattgcactgtcagaagaagggcattctcgatcagattgttgatccctacctgaagggaaa

SEQ ID NO: 50796 - DNA, 229 bp, Setaria italica
  Peptide Sequence Number=SeqID_116770
ctctcacgatggtacaagatgcatggaataccaactcgctgcaatatgtcagagactgaattggcagcatcaacagtgtttgtgaacaccatagtgcgtttcggtgcatcatgatctttattctttaggccatatttacagcatctagaagagcatcaacttgtgtatctgcaccgccacaaccccagattagagcggagatggatggaggtcactgctgatacacaag

SEQ ID NO: 50797 - DNA, 269 bp, Setaria italica
  Peptide Sequence Number=SeqID_116771
tgcagcctacggagtcgaaaggtctacagtgacttgactgttgattacttcaagatgttcctgctaaatgttccagcagcagtcgtagctctaacactattcttcttcttggatgatttgacgggatttgagatcacatatcttcttgaggtaagtattgcaaattgaagttctactgtatgtttcttattgatgatgttacaacaattgcatacaagtgctatttgaatgtgctttttgtttaagtaataaaactacgaaattactaa

SEQ ID NO: 50798 - DNA, 418 bp, Setaria italica
  Peptide Sequence Number=SeqID_116772
ctgctgaacggcctgctctttgccctatccctgaattagactcagacccatctgcgacaaatgctgggtgagagctacgtactccacccgtcccaaatttgattttttaatttatatattttgctatgcacctagatatatattatgtctaggtgtatagtaaaaggtactccctccgttccaaattgtaagtcattctaagaatcttggagagtcaaagtatctcaagtttgaccaaatttatatgataatataataacatttatgatgtcaactaagtatcattagattctttatcaattatattttcatagtatatctatttgatgtcataaatcttcatattttctctataatttggttaaacttgagatgctttgactctccagaatgacttacaatttgggacggagggagt

SEQ ID NO: 50799 - DNA, 381 bp, Setaria italica
  Peptide Sequence Number=SeqID_116773
aagttaatcctttcttagtgaatttcacacacaacatcaagttcttcaggcaggtatgcatatgctaagatagttcaaacatatacagctagttttctttgtacactctatgcacgaccgcacgtatcgccattgcgtcaactctgtatagtacaaatatctacatttgatcaagatatacatagagactagcatataccaaacaaacatcactacacaattgtcacccgattcaaagtctgtcttgctttgtacaattgtactgtagatgtagatcaagcaccaggggccctccatcctgctagtgaaatctaggaatatccaagtagttagtattatcttatacacagaagtggcaatgtatgtcctactcgatcttac

SEQ ID NO: 50800 - DNA, 212 bp, Setaria italica
  Peptide Sequence Number=SeqID_116774
tgttactatgccagtatacagatgaatgttttctgtatcttaaatataggtctgagtattatacacagtactccctccatcccaaattataagtcattccaagaatcttggagagtcaaagtatctcaagtttgaccaaatttatatgataatataataacatttatgatgtcaactaagtatcattagattcttcatcaattatattttca

SEQ ID NO: 50801 - DNA, 282 bp, Setaria italica
  Peptide Sequence Number=SeqID_116775
ctgattttgaagggcccatgtaaacccccccccccccccccccccccccccccccttgtggaaatgaaaacctttccttcttcgggactatattgtcagtgcctagtggtggtgcaaaaaacaatgtgaaatgtgcaaactgcggcactgagttggagtatgactccgcatcccggttgattacactcccagaactggcagaggcataaggtggatgtggtttagatttcactagcaggatggagggcccctggtgcttgatctacatctacagtacaattg

SEQ ID NO: 50802 - DNA, 261 bp, Setaria italica
  Peptide Sequence Number=SeqID_116776
aatgtagatatttgtactatacagagagactagcatataccaaacaaacatcactacacaattgtcacccgattcaaagtctgtcttgctttgtacaattgtactgtagatgtagatcaagcaccaggggccctccatcctgctagtgaaatctaaaccacatccaccttatgcctctgccagttctgggagtgtaatcaactgcggcactgagttggagtatgactccgcatcccggttgattacactcccagttctggg

SEQ ID NO: 50803 - DNA, 170 bp, Setaria italica
  misc_feature (134)..(134): n is a, c, g, or t
  Peptide Sequence Number=SeqID_116777
aattacgacgacctacctaccgaagggcgaggcgcaggtcccggtgcagcagcaggaggaagacgaggttgtggacagcaacgtgctccaatactgcagcatcgaccgcaagcagaagaagaccatcggggganatggagcaggagttcctccaggcgatgcaggcgttc

SEQ ID NO: 50804 - DNA, 164 bp, Setaria italica
  Peptide Sequence Number=SeqID_116778
tatttgtactatacatagagaatagcatataccaaacaaacatcactacacaattgtcacccgattcaaagtctgtcttgctttgtacaattgtactgtagatgtagatcaagcaccaggggccctccatcctgctagtgaaatctaaaccgcatcccggttga

SEQ ID NO: 50805 - DNA, 216 bp, Setaria italica
  Peptide Sequence Number=SeqID_116779
ccatcagcctcctggaggagtctcctgttgccggaagtgagagattcagcttcaggtcaaggcccctagagctcttcctgttgctgcggctcatcctgggaggtatgtggctgctgttttgtggggcgatcaggcgctgggtgtaagcaggtggagatgagagcgatatgtgatgctctcagaggagagaactcttgagctttagaatgctcagag

SEQ ID NO: 50806 - DNA, 246 bp, Setaria italica
  Peptide Sequence Number=SeqID_116780
ctgctatgtatggcttgggtgtgagtgattgatgaaacgatatttttcccctcccacccaagccatacatagcaggactacaaggtgccaagagacaatagcttcggcatcaccagactcactctttgaattcagcatgtataaaaatacgccaaaaagttggccaggatcaactagaaattgctcaattcaacagttaactgtttctaatgtgccatacgctgactggaacatgctcaaactttg

SEQ ID NO: 50807 - DNA, 188 bp, Setaria italica
  Peptide Sequence Number=SeqID_116781
accaagtgacactcttgatggatagtcatttacattgctgaaacccatatgctctttattggagaagagtttgactgttttggggccttcttcctcgggccctttgaagagcgcggaatgcagtcaaactcttctccaatatagatcaagagtgtcacttggtggatagtcatttacattgctgaaac

SEQ ID NO: 50808 - DNA, 216 bp, Setaria italica
  Peptide Sequence Number=SeqID_116782
tgggacactttactggatgctgatcttgagagtgatgcactgggctggcagtacatcactggctctcttcctgatggccgagagcttgaccgcattgacaaccctcaggttcgtgaaacttttaaattctgaatagattaggttattaagtgatggaaactagaactgaatactgattcactgtcatggcaatccaatctttaattccagtttgaa

SEQ ID NO: 50809 - DNA, 124 bp, Setaria italica
  Peptide Sequence Number=SeqID_116783
cagaggagcagctcgccgacgatctcctcctgcacttcgagcgagtcctccactccgaccccctcattgacgaggtggggttcttgcatccgacgcagttcggctcgctaggctgcggccaaga

SEQ ID NO: 50810 - DNA, 430 bp, Setaria italica
  misc_feature (363)..(363): n is a, c, g, or t
  Peptide Sequence Number=SeqID_116784
aagtaagaacgaacgaaccccgaacaaagaacaaataaccaagtacctagggaacaattagtacaataccaagacgtgtgggcaacaagctgttctttgacaagcgtgatggctctcagcttgatctgctcacagtcaacgaaaccgcccaggagccactccctgaggctaaggaagacatcaactctgcacattcccttgcagttgaggccacatacgtcaaccagaacttctcacagcaggtactgctccgcaatggtgagaaggtcacttttgatgagcccaacccgtttgccactgaaggggaggaagctgcttctgttgcttatcgctaccgccgttggaagcttgatgatgaaaccngcttggttgctcgctgcgaggttcatgctgtgaatgttgatccacgtggtgagcgccagttccctta

SEQ ID NO: 50811 - DNA, 298 bp, Setaria italica
  Peptide Sequence Number=SeqID_116785
aagaagtaggacgaaagacaagacggactagacaatagaaaggcaagaaggctacagaggtctctttgggccttgaataaagttaaccttggctagctgtttacaatcaagggctgcttgggaagaggttttgaggtttctgctataaaaggttatgctattgtcgttttggtgaaccaaaccagtgaattgtttatctatgtatcgtatgcacctgtcctaatttctgttaatttggagactacttgttgcaataatacattgcacgttttagaatagttaaaaaaaaaaaaaaaaa

SEQ ID NO: 50812 - DNA, 245 bp, Setaria italica
  Peptide Sequence Number=SeqID_116786
ttagctgaagataacattgcaagaagagtcctacgagaacatattcgtgagtcccttggagtacggagtgaagatctcctgtttgcaataataaacataaatatcctgtaatccaggtgtatcacgaggaaaagggcaagacttgtttcttcaggcattttatcagagtttgcagctcatccaacagcagaagttaaaagtgcctacgatgcatgccgtagttgtgggaagtgatatgaatgctc

SEQ ID NO: 50813 - DNA, 242 bp, Setaria italica
  Peptide Sequence Number=SeqID_116787
tggaagtactgagtgattttactttaggagacttgagctgctctagcaacaatccgaggttctggctggcttccatggctagatctccgacattaagcaaagagtgacctcctcgtaaccatgctacattgaatcccatatcttttgtagctttgcttggtggatctgatgggatattaggatctggtggttcaattgctcgccttccgttgcttgctcacttgggtccaattccagaggaa

SEQ ID NO: 50814 - DNA, 239 bp, Setaria italica
  Peptide Sequence Number=SeqID_116788
cggctctcctgccacgagcccacgactcctccgccgtcagtggttgcgccgaagagcggggcatgggcgccggcaccatggggctgagatcctatatgtacggtggtccttcttcacctcctgcgcctcagacccaaggaagagcactgctgcagtggtggtggcaagaatggcgatggccaagaccgacctcatcttcatgatcaccacaaccacaagccccttggcagcacctgtcg

SEQ ID NO: 50815 - DNA, 468 bp, Setaria italica
  Peptide Sequence Number=SeqID_116789
ggtacacaaaacagcaaggtcattcctttatgaactatgtgctgcaaactattggaaacctcctgaatttgagttatgcaaagacgaaggaccaagtcaccttcgaaagtaagctcttctacttactgaatatctttgagtgaggaaatttattaacttgtatcgtttacaattagaattatgtcttgaaactggaatgatgtctgtgttctagtatcattaaaaggtttatcgtttagatatgggaaatgatgtcggtattgagtcaccaagatgacccatgatttatacatctaactattgtccacttgtgaaatgacgctcacaggttcacttgcaaggtccttgttcagatcatgggaccttcagcgactcttttggagtgctacagcgatcccaagctacaaaagaaagccgcgcaggagcatgccgcccagggggctctctggtgcctcaagcaacttggat

SEQ ID NO: 50816 - DNA, 416 bp, Setaria italica
  misc_feature (404)..(404): n is a, c, g, or t
  Peptide Sequence Number=SeqID_116790
aaagtaaccaaaataagtaaggttaaacgaacaaagaaaataaggttaagtactaacctaagaaggggaagactgactaaaataaacaaaaaagagtatcatggtgatatggtacacaaaacagcaaggtcattcctttatgaactatgtgctgcaaactattggaaacctcctgaatttgagttatgcaaagacgaaggaccaagtcaccttcgaaagttcacttgcaaggtccttgttcagatcatgggaccttcagcgactcttttggagtgctacagcgatcccaagctacaaagaaagccgcgcaggagcatgccgcccagggggctctctggtgcctcagcaacttggatacctcccaaaagatgaaactcatgtctagcaccatttcaggtttttgnggtccttcagtc

SEQ ID NO: 50817 - DNA, 259 bp, Setaria italica
  misc_feature (227)..(227): n is a, c, g, or t
  Peptide Sequence Number=SeqID_116791
tggaatcctttagtattgtaactctgtccagctcatctaatatcttagcaactgtttttgaaaatagattttcttaatggatcacataatttataggaagagaacatagtgttttgtttgtcctcaatgcttgtattcttttttgttgtaaccatgcaggttcttggtgatattgttgaatcttgtgttggtgcagtgcttttagattccggcttcaacctgaaccntgcttggaagctaatgctaatgcttctaaacg

SEQ ID NO: 50818 - DNA, 253 bp, Setaria italica
  Peptide Sequence Number=SeqID_116792
ccccagtccgtggccagaggacaaagaacaactgccggacactcaagggaaagagggcttcagttgccaagaagaagtcatcttcctcccaggaggaataagtcgcattacatgtatttaagttctgtttggttctttttgtgtaacatcactactgctgggtgttccgttttgagctttgtttagcatcgatccatataagctatttcacagctatagaatttgcagcagctgatcatatcccaatgattcg

SEQ ID NO: 50819 - DNA, 322 bp, Setaria italica
  Peptide Sequence Number=SeqID_116793
actcagtgtgagtagtataaaattacaaaaataggacaagtaatgtaaatcacaatgaatatcccaaagcagatgatacaataattgcctgtaagctaaactgtcacaaagtcagaaaaagttgattattttacactggagatattaaatttgtacctcactgctgaatctggaaggttaaaaagcacataacctctgccggttgagaacctagtggttttatcgacaacaatatgggcctgttcaacatcaccatactggctgcacagctccaccaaatcatcttcagtggttgcatatggaagattgcagatatatagac

SEQ ID NO: 50820 - DNA, 253 bp, Setaria italica
  misc_feature (60)..(60): n is a, c, g, or t
  Peptide Sequence Number=SeqID_116794
cctggcactgatggtgattctgataccaaaatgtgccaccttcagtaagctccaccttcnctttttcataaaatattgtgcagtattcatcagcggtgtcctgtgagccttttcttgagatgccaaactgttcataaccaggcaagcactgttgtaggtagtccaactgccatctcaagccaatagggccaaacaactgctagcattgcccaatccaagcaccacacctcttggccaaatggggaaaaaagga

SEQ ID NO: 50821 - DNA, 362 bp, Setaria italica
  Peptide Sequence Number=SeqID_116795
aattgttgatgattttgagtacagtgagttggacgctgttttgcaatattaccctcatggttatcatggagttgacaagaggaaggccagtttatatcgaaaggcttggtaaggttgacccaagcaagcttatgaatgtcacaacgatggatcgatatgtaaaataccacgtgaaagagtttgagaggagcttctcgatcaaattcccagcttgctctcttgctgcaaaaggcacattgattccagcacaacaattctggatgttcagggtgtggtatgtcactgaagatttagtcttccatgatgcctctctttctgcaacttgatggtttatgagagctaatttgtcacctatgctttct

SEQ ID NO: 50822 - DNA, 213 bp, Setaria italica
  Peptide Sequence Number=SeqID_116796
tcgatatgtaaaataccacgtgaaagagtttgagaggagcttctcgaaaggcttggtaaggttgacccaagcaagcttatgaatgtacacaacgatggatcgatatgtaaaataccacgtgaaagagtttgagaggagcttctcgatcaaattcccagcttgctctcttgctgcaaaaaaggcacattgattccaaccccacaccctgaacat

SEQ ID NO: 50823 - DNA, 443 bp, Setaria italica
  misc_feature (323)..(323): n is a, c, g, or t
  Peptide Sequence Number=SeqID_116797
gcgggattgagaaaatgacctgaggagcctccatgggataatgctcggggaagtcaacttgcaactggtaggtttcgccggcatagagggtgcctgccgctccggtgacctcaatcacccacctgttcagttatcaagacagaattatgctactagggaagcagtccaaatccacccctccacacataacaagtgagatcaaggaaaacccctagaaatcaagaacaaagatcaacaaaagaaaatggttcttgaacggttggatccatccgtctggaagtttcaagcaaggccaaagaaaaatcccagaataaacaggaaanaaagggggacatgataagtgaggaattgcagggagggacgcgggggagaaaaggcggcacctttggagattatcggagaccttgtgcttgaaccgcgggggctgagctgccactcgcgag

SEQ ID NO: 50824 - DNA, 262 bp, Setaria italica
  Peptide Sequence Number=SeqID_116798
cttagcaactggtaggtttcgccggcatagagggtgcctgccgctccggtgacctcaatcacccacctttggagattatcggagaccttgtgcttgaacccggccggggggctgagctgccactccgcgagctccttctgcagccgattgcaagcgatcttgctcagcgcctgcacacgcggaaagggatcgatcgaattacagaacgaatcgagaaggaaaacccaccggtctgcgggcgaatcggacggattggggggag

SEQ ID NO: 50825 - DNA, 242 bp, Setaria italica
  Peptide Sequence Number=SeqID_116799
agtttaaactgcatctgttgacgccttgacgggcacattcagggacttaccagccagcgcttgaaggcggacaggtcgatggtgccgtcgcggatggagacggtgaacgggtgccgcgtggcccgatcatacatctgcccgtgcctctccatccatgccgccgtcgtgctcgcctcgaccccgccgccgtccatcgccgccgtctgggatcccggttgctgccttgctgaaccccaagtccg

SEQ ID NO: 50826 - DNA, 224 bp, Setaria italica
  Peptide Sequence Number=SeqID_116800
gctgtcttcttgttttgcaacacttgagcagtacactagctataaatgcgacaaattctctcacaaacaggtaatcctggctctgaatatggaaaagaagcaaggttatttatttttttacactgttgatactgatagcaaaaataattttttttgaagcaaatcaccgggaataaagttgaccaacaccaaacccagttattataaaaccagccataaaatcc

SEQ ID NO: 50827 - DNA, 409 bp, Setaria italica
  Peptide Sequence Number=SeqID_116801
cgtggacggaaccggtaaattccaaagccctatcaagaacatgtagaggtaagattgttggcaggataaggtctggatagaacacaagcatgacaaagagcacgtgaaccaatactgtggtgactgggtttttccactgacaaacgtcgccaaaccactttcctgcagcaatgactccagagaagacttgcataagacggaagaagttagctttgctccgtcgcatgctccacaggtgagagcgagcatctgacatgaactcaacaacttccctgcgaactggtggctccatgcgccccaggcgctctgcaacaagatgcaccgcctggtggcggagcatttcctgctaggaactaattagaacaagaaggactagacgaagtaaatagacaatacttagggacaaaga

SEQ ID NO: 50828 - DNA, 446 bp, Setaria italica
  Peptide Sequence Number=SeqID_116802
attcagaccatttgcacttaaatagccaacttcaagcatgccaattggtggcttccacaactgcttcattgttggccgagatcactgcaatattgtgtggactcatcaagcacatgataaccaccttcaaggcaaacacgaaggttacctttgcatagaatttgtcttccttcagctggttcacatcaatcagtcctggtcttctgagatcaaaccatgctggccgtactggcttgtgatcagcccgctttggaatccttgtgagtggtatgatagtttcaccaataatctcgtctttgttttgtgctacacggtcttcaattcttatgatcaagtcttcctcaaaaggctctgctgcgacaaacatcatctcttcattccacatgaagtttttggtttggttgtagtcgtaactttgtcctttgttctttctaactaatttggtt

SEQ ID NO: 50829 - DNA, 315 bp, Setaria italica
  misc_feature (53)..(53): n is a, c, g, or t
  Peptide Sequence Number=SeqID_116803
ctggatagaacacaagcatgacaaagagcacgtgaaccaatactgtggtgacngggtttttccactgacaaacgtcgccaaaccactttcctgcagcaatgactccagagaagacttgcataagacggaagaagttagctttgctccgtcgcatgctccacaggtgagagcgagcatctgacatgaactcaacaacttccctgcgaactggtggctccatgcgccccaggcgctctgcaactaagtattgtctaccgtccttggttggtcggtagtctattttccttgttcttggtacttatttgttacttagtt

SEQ ID NO: 50830 - DNA, 174 bp, Setaria italica
  Peptide Sequence Number=SeqID_116804
tgcacatccagacgagcttgatgaggaacatcagcataagatattcttgtgttcatgtgtggtgggaagcgtggacggaaccggtaattccaaagccctatcaagaacatgtagaggaagattgttgatagggcgtggacggaaccggtaattcaaaagccctatcaagaacat

SEQ ID NO: 50831 - DNA, 462 bp, Setaria italica
  Peptide Sequence Number=SeqID_116805
aagcctcttcggagggcgaactaggcttagtccctgccattgtttcccttaatccctagatcaataaagctaatctgccattgccccaacagttctcaatcgaagttaattgtgttaaaatgggtgaataagctaggatacaagtttgtaattaaagagcattcagtaaggtacaaaactcagagaaaagcatgcgggaaattattgcttgatgttacaaaggtcatacctttgatgcagcaattgtagagttgacaaccacagcacttgcaagtacattgtctgagaatattgcataatgataatagtcatccaactgcctgctttctcttttagggaattcacgttccttaggatctaatgaaaagtactctgtggtaagttgcattgctaggcagtggtggcctttgggtaatgttctcacagcaacctgctcaaggaatgaagattcactttggtgtg

SEQ ID NO: 50832 - DNA, 331 bp, Setaria italica
  Peptide Sequence Number=SeqID_116806
tactagtagtacttacttggtaactagtacattcttaactacgagaacccatacttgcagcagtgcaacatccacggatagaagtgatggggtgggaagattcgcacagtagaacatgaatacacagttttgctctatactttgggatggagatttccagccagggtttgagtttcccgctgtagtggatgacagagccgctctcaagttcatctgttccaatggtagaatcatggccaagctctagaacatgccatcgacggtcgagaggcagtgtttggttgtagaagacgagctggcccagtggcaagcttcctgccttccataactt

SEQ ID NO: 50833 - DNA, 236 bp, Setaria italica
  Peptide Sequence Number=SeqID_116807
tgatgtgtcattgcacgaagctttgatgtcatctgagagcaacgtgggtacgtcctctgagccttggaaagggtctgttccatcgccttcattttctgcaatgcactgcatggtgtgcattctcccaggtacatgggaacctccacttgagcggcttattgccctttcaatctctttatccttaatttcagctccctaactaaatgtgcactgccttggggagaagcgaaatgcaa

SEQ ID NO: 50834 - DNA, 468 bp, Setaria italica
  Peptide Sequence Number=SeqID_116808
agaaaagaaagacaaacgactacaatacaataataatttaatattcatctatgtgtcagtaaaatggaggacatggttccattaactgtatattacatacaattaggccagtacgaatggaacaataatgcagagtaagatctaaatgtaccctcaaatactttaaataaagtatcagctactatatacagttgatcatttcccactatggacaaaactatacagaaccacacacagactatgactaacttctcagtcacaattgatttggaagttgcatgtaagtgcttgaattgggtaggcaccctccaacaatcatccgaccataggcagcatatgcattctcagtattaccagaaacactgtaacccctgataagggcattatatgtgaaaacgctaggtttccatcctttcatcagtagttcttcattacatctgaccagcttcagcagccttccctgccttt

SEQ ID NO: 50835 - DNA, 266 bp, Setaria italica
  misc_feature (223)..(223): n is a, c, g, or t
  Peptide Sequence Number=SeqID_116809
tttttttttttttttgtttaattataaatatatgatgagcgttgcttctttcaatgtgtcagtaaaatggaggacatggttccattaactgtatattacatacaattaggccagtacgaatggaacaataatgcagagtaagatctaaatgtaccctcaaatactttaaataaagtatcagctactatatacagttgatcatttcccactatggacaaaactntacagaaccacacacagactatgactaacttctcagtcactaa

SEQ ID NO: 50836 - DNA, 454 bp, Setaria italica
  Peptide Sequence Number=SeqID_116810
ttttttttgttttttttcttttttttgtttttttcttttttaaggttttttcgggtttttccttttctttatttaaccttattacctattactggcttggctgttgcgcttaagcaggcaactaccccagagtaccgagcttatcaagagcaggttatcagtaactctgctaaatttgcacagagcttggtagcaaaaggatacgagcttgtctctggtgggactgataaccatttggtcctcgttaatctcaagaataaggggatagatggctcaagggtggagaaggttttagaatgtgtgcatattgcagcaaacaagaacactgttcctggcgatgtttcagctatggtaccaggaggcatcaggatgggaaccccagctcttacatccagaggatttgtggaggaagattttgctaaggttgctgacttctttgatgcagcagtgaact

SEQ ID NO: 50837 - DNA, 244 bp, Setaria italica
  Peptide Sequence Number=SeqID_116811
aaatcctctggatgtaagagctggggttcccatcaattggatttgagaaagagaccatgaaatacaagaactaagatctgaatgcaagaaaagatgtcgaggcaattattgggggtgtttaagtgggcatgatcatgtaaacataaacccaagccccatccccaaggtggaagtagaatggcatcttatcttaaaagagagattggcaatttacagcatgtggaacttgtgtcgatagcccata

SEQ ID NO: 50838 - DNA, 170 bp, Setaria italica
  Peptide Sequence Number=SeqID_116812
cccaaggtggcgaagctttgcaatctcagcttggatgctatcagattgcaaagtggcaacgaagtccttcagctttgttccacctgtcgttgcaacctctatcgggttcacctgccaacttccatgtatacaccgccctattgaagccacatgaaaggatcatggctttg

SEQ ID NO: 50839 - DNA, 180 bp, Setaria italica
  Peptide Sequence Number=SeqID_116813
cagagttgtgattaccgatcatgtagttgcaaatgcagtagtactgaagagcacgacagctgggacatgtcgagaagctttggcactactgcatttgcaaacagagttgtgattaccgatcatgtagttgcaagttgtaggtgatgcacagatgattgcgatggtggttctcggtagaat

SEQ ID NO: 50840 - DNA, 480 bp, Setaria italica
  Peptide Sequence Number=SeqID_116814
cctctgttcgtatatgagtttgccgcaaatggaagtctgtacgacgttctgcacggtgatacggtaaatgtcgtctctcactggattcccgcctcaatattgctaattggatcggcagaaggattagcatatttgcactcagtggggcctaccccaagcggatacggtaacatcggatccaacagtatattgctagatcataatttcttgcccaaggtctccgtatcattttgcgaaatgactaaaatcatcaaaggtcttaaatatgggatttcattcagtccctacgttgacccagtttactggaaaactggacgcttcatacgaaagagtaatgtctactctttcggaacggtcctcttggaactcatcaccagaaaaggagcagaatatcgggacggggccacctacccgtttggtccccgttctaccttcgggtatttgtaattattacctaaagttcttggttaaggttaactt

SEQ ID NO: 50841 - DNA, 326 bp, Setaria italica
  misc_feature (190)..(190): n is a, c, g, or t
  misc_feature (203)..(203): n is a, c, g, or t
  Peptide Sequence Number=SeqID_116815
gacggggccaacggtggtggccccgtcccgatattctgctccttttctggtgatgagttccaagaggaccgttccgaaagagtagacattactctttcgtatgaagcgtccagttttccagtaaactgggtcaacgtagggactgaatgaaatcccatatttaagcctttgatgattttagtcatttcgnaaaatgatacggngaccttgggcaagaattatgatctagcaatatactgttggatccgatgttagcatatttgcactcagtggggcctaccccaagcggatacggtaacatcggatctagcaatatactgttggat

SEQ ID NO: 50842 - DNA, 382 bp, Setaria italica
  misc_feature (1)..(1): n is a, c, g, or t
  misc_feature (88)..(88): n is a, c, g, or t
  Peptide Sequence Number=SeqID_116816
ngtgcagatgcattaggatacatgcattcctccatgtatcaaccaatcattcatggtgatatcaagcccgataacatacttctggacngtaaatggttgccaaactgtctgactttggattgtcgaggttgctttgcatggataaaactcaatacaccatgcatgtcgcaggcagcagaggttacacggacccggagtatattgagacagggcttcttgatccaaaaagtgatgtttatagttttggggttgttctcttggaactaattaccggatccaaggcaagtcaaagtgggtttggtactagcctcaaaagaagaacttacaactagaatagactacttaaaggtaaaaggtaaaagtaaaggtaaggtactaacta

SEQ ID NO: 50843 - DNA, 449 bp, Setaria italica
  Peptide Sequence Number=SeqID_116817
tttaagatgagatgatatatcagcaccagagggtataaattcaggtatcttattggacattcatttggtcaatcacttccatattttttacatttttttattctacaacaatataggaccaaagatttagtcataattatccattagccactgagaagttgacaatttgtttgttatctttggcggattttttgtaagtttcaatggttccagcgtctacagcttcaagttttcatggctcaggaattctcactccgcatgcttcctagtccttgcagtgaatggcacatgtaactgtctaaacaagtgctcttcttgttacagcttcctgaggatatcgagtggcacttcattgggaacttgcaaagcaacaaagccagagccctacttgctggcgtgccaaatcttgatatggttgagagtgtagatgaccagaagatttgctagcc

SEQ ID NO: 50844 - DNA, 385 bp, Setaria italica
  Peptide Sequence Number=SeqID_116818
caaggagcaggtaattacttaattactagtggccttaccagttctaaaagaaggaaataccgcaatgccaatgccataccttatatgacagattgacgatcattctttccttttcaatttttgctgtaaatgtctatgacattgctacaatgttattgaggtccatttttaccataaaaaaatgtaagcatggtccattctgtatgagttttattggtttccccttgcatcatcattaaatgtttctttaatccaccaggtcgaagcagtaatcgacaaaataattgaaaaggcaagaacaggagaaattggtgatgggaagatattcttgatccctgtctcagacgtggtaagaatccgcaccggcgaacgcgggaaggaagcc

SEQ ID NO: 50845 - DNA, 266 bp, Setaria italica
  Peptide Sequence Number=SeqID_116819
ttcttccgtgcccaaatcgagctgggcttgttggatcccactgattgcgctgcctcggccagtcgttctctcagggtactcgcctgaatcggagttctacaagattgaggccattatcagaccgtggagggtgtcgcacgtgtcctcgggcttgttggagatggggattagaggtgtgacggtgtcggacgttcggggcttcggggcgcagggagggtcgacggagcggcatggagggtcagaattttcggaggacacatttattg

SEQ ID NO: 50846 - DNA, 272 bp, Setaria italica
  Peptide Sequence Number=SeqID_116820
tgagacttaacaatctttctaaaatttgattcaatgagactaagccttctcttctaacccatccaagagagctagaacccaactgcagttattaataagcttgttaagcttagaaagttccttgctccactgttttaaaccaacccttagctgcttgaatttaccactgatggtcttagccataatagcaaaagaaaggatttgagtgccaatgcaactgaacagtgtcaaagaaacctggaaaaatctgcccaattagttttcaaatctga

SEQ ID NO: 50847 - DNA, 208 bp, Setaria italica
  Peptide Sequence Number=SeqID_116821
ttcgatgccattcacctatcttgggctcttggcttgcctcttagaactacaagaccgaatacactgacggtcttagccataatagcaaaagaaaggatttgagtgccaatgcaactgaacagtgtcaaagaaacctggaaaatctgcccaatagttttcaaatctgaatatcgaagcttttggaatgtgagagtccattctgacaaca

SEQ ID NO: 50848 - DNA, 242 bp, Setaria italica
  Peptide Sequence Number=SeqID_116822
agcagggcatgccgagatctgaatgctcaaactgttaaatatctggatacgctgcatgaacatttaagcataatgctgtctgtccacactgcattgtctgatcgggcaagtgcattattgactgtacaaacacttatgtcagatttggcatcattacagtcaaggattgagaaactcgaagctgcatcttcagtagccctaattgtttcccttagctcttcgactctgcgaatcctagctct

SEQ ID NO: 50849 - DNA, 260 bp, Setaria italica
  Peptide Sequence Number=SeqID_116823
ccggccactggtggaggaggatagggacgttcctggagaagaaggggaaggctgcaggagtgggagcagcatctcaccagtgcgtcacaacaggtgatttcttctcctcagatgccaaaactagtggaggccgcatctcatagttttgatcagtgaggcagtggatttcttctattctactactaattaataaataataactagtggagagtgtttaattggtgattcattgtctcggttgaagatgaaccttaaccccc

SEQ ID NO: 50850 - DNA, 439 bp, Setaria italica
  misc_feature (1)..(1): n is a, c, g, or t
  Peptide Sequence Number=SeqID_116824
nagggcttgacagatagcaattacgatgacaccttgacctccagcaatacggaatccaggaaatcccaaggtaatcaagggtatcaccctgtaacatcgagtgaacaatataaggggaaaatgctagatgaaaacgaccttgagaatattctataacatccaacaaagatatttttctttcaaaaaactcttcaaaaattccagatgtagtggattgcatgttctacaccttttcaaatctgatggtcctctcaataacattttgaagataataaaaaatgtataagcagtgaaatggtgttttgacagcttggcatttatttttctgtttttctgtattgcagatgtgataaaatttatattcgaatctgtcttttcacttttcgttcaaaatttctaagtttgattttcatgaaagttctagataccgctgtaaaac

SEQ ID NO: 50851 - DNA, 432 bp, Setaria italica
  Peptide Sequence Number=SeqID_116825
tattcccagtggttctagtgcctcgatcccacagtacctcgcatattcaggtccaaccatcaagagggcttgacagatagcaattacgatgacaccttgacctccagcaatacggaatccaggaatcccaaggtaatcaagggtatcaccctgaagttttgcataaccaactttccaccagacaggctcaacaaaatgaactaacccaaatagatctaatagctcaggaataacaacaccgagagcagcaagcatggcccaccgacaatgcaaaatctcaaagctgcaaggtatctagttggtcattactaggaaagtatatattgtacagagaaaagtaaaagcactaacaaagctacaatgaaaaaggtatatacatcacagtttatacattcctagttgtgatcaacaaggctgctgctttggcagctt

SEQ ID NO: 50852 - DNA, 289 bp, Setaria italica
  Peptide Sequence Number=SeqID_116826
cagcccactgttacatgtctaaattttgcatgctgaagacgcaatacataatgattgatctgtacatagaccacagcccactgttacaagtctaaagaactggtagctaatattgcaaacccatcagtgcaaaactgtaaacactatgcatacttgggtacgatgcacaggtaaattccctaactacttctttgttcttaaatttttctttacttggttaaggttaggtttatttaagtttattttgtttttatttttatttttggttttattttggggttttcggttt

SEQ ID NO: 50853 - DNA, 429 bp, Setaria italica
  Peptide Sequence Number=SeqID_116827
agaccacaggtcaactggcggagtaaaatttgttgcaaagttttacggcataattggtttcatcaagttccttggaccatattacatgctaattattactgagcagaaaaaattggggagatctttggtcatccagtgtaccaggtgactaggactgcaatggttgaattagcaaattctaagacaagatctacctttcaaagctccaaggatgagaacaggtttggtttgcctcattttagtatcaaagtaccaatgctgtatcaatcgaggaaaactagatgtatcaaaaatagtagctgtagacgtctactattttcttcattaacttaaaatggttggatcaatcaaggaaaaaaacaatgtgcaaaaataagtctgtggatgccattgtttttagcttatttagtttacactttttattaactc

SEQ ID NO: 50854 - DNA, 413 bp, Setaria italica
  Peptide Sequence Number=SeqID_116828
ttgttcactatacagttcacctctgctgcgctacctcaagagttggtactacttgttctttaaaatttaatttgttttttcattcgtgctttataggagtggtcttgatccatacttatgtgatgacaacagcaatagtgacaacacagaatgcactgagattgttggtgatatatcccaagaggatatctctggcagctctgattcctctggtaatgcaactgcagaagacaaagttgataatagtgaactgccaccactaaaacctccaaaattccaaaaaggtgttttgcggacaaactgtatagattgcttggatcgtacaaatgttgctcagtatgcgtatggtttagctgctcttggacatcaactgcatgcgcttggttctatagaatctccagagctaggtttag

SEQ ID NO: 50855 - DNA, 456 bp, Setaria italica
  Peptide Sequence Number=SeqID_116829
ttctaactgtatatactgaaaagtgaacattatgacctgctgaaggtcttgatgaagaccacaggtcaactggcggagtaaaatttgttgcaaagttttacggcataattggtttcatcaagttccttggaccatattacatgctaattattactgagcagaaaaaattggggagatctttggtcatccagtgtaccaggtgactaggactgcaatggttgaattagcaaattctaagacaagatctacctttcaaagctccaaggatgagaacagatacaagaagatcttgaacgcacttgatcttaggaaggatttctttttcagttattcataccacatcatgagaagtcttcagaagaacttgagtgatccacatcaggaaggatggaccttattattgagtactaattgttttgttcttggtaattgtagttttcttgactacgttcggta

SEQ ID NO: 50856 - DNA, 253 bp, Setaria italica
  Peptide Sequence Number=SeqID_116830
aaaaaagagtcctttagggaagcataacatctacctactcgcccatagtaaaaaggatgtgaccaaataaacagatgttatgctatgggcgagtaggtagatataccttttcttttgaatgaaaatagaaataggcgtggtgattattattcatctgaaattgtatcattattcagggaacttctattttcatgtgtaaatatatatgcttgaggtgcctttagtggaggtggagagacaaaaaaaaaaaaaa

SEQ ID NO: 50857 - DNA, 451 bp, Setaria italica
  Peptide Sequence Number=SeqID_116831
gacttaatgaagttaaagtatggttcacaagaacgaatgaagagatacttcagaaatccatagtgaactggatcagcatcagataggaaagcaaatcagtgccccgtgggaaattctcaaactccacatttgcatcagtattcaaaccctcctggcacaatgtaagacctgcaaacttagggaaacaaatatttccaagggacttaacatgccttcttaattcctcagtgtgtagataaacttccagaagagtgacttctgaagtggaattgcaactcactccatctgaaatcttggaaggcatacattgtgcaaatgaacgcctgagcttaattgatgctggtaaagtattcaaggaacataaatagccttccagggccttttcaactgctgcagcaaatgcttggttactagactgaaaggttgatgctgctcagtgtcttatcatcag

SEQ ID NO: 50858 - DNA, 397 bp, Setaria italica
  Peptide Sequence Number=SeqID_116832
aactaaaagcaaatgaatcactacaggcttagataggttccctgaaactgtatcctgatataccagtgctgtaaaatcagagtgtttccccttgctcccgtgccacggaagttgaaaggatggaaaggctgtgattcaagaatgtcagtgcagattcacagtctgaaatgattttggtgactgatgaaggctcattggacgctgacagtgacccagcagccattgcagtatatgaatctcgcaggctcctcaaatttcctaggaactggaaaatcacaaataagcacccaggtcaaagcatgttttgtaggttagcaacaagtagccaagaaagaacagagtgtagtatctagtcagaaagagcatgaaatgaaatggcctgagaagtgaagattcc

SEQ ID NO: 50859 - DNA, 443 bp, Setaria italica
  Peptide Sequence Number=SeqID_116833
ttgaggaattgcaaactcggataatttcattggaggaagctgtgagtttggcgtgtttttccatatcaaagctcagagacgaggagttgtatcctcagattattgaattatctgcagggtaagctccagaagttagctaactaaaatactcctacggcttgtgcatatgtggagaaacatgtacgagtgtcatcaggtccagaacaacattgctcagcaaggtagtctcctatataacggacctgggggtgagccaacaagtgacagtcaattccaggcaacatctcagctggaaattgaggtctctggatggcacagtgccttctgtaatctcatcacattgcagcgcgaatacataagcatccttaacaatggattaaactcacggactgccttcctgatgatgatggcttaatgaaaagctcatccggaatccgtagtct

SEQ ID NO: 50860 - DNA, 168 bp, Setaria italica
  misc_feature (167)..(167): n is a, c, g, or t
  Peptide Sequence Number=SeqID_116834
tttgttaggtaggtagtaaggcaagatacctaacctctgtaaagacaagccgaaccatgacgctgaacaatctgcagacaggccttccgaaggtgttccatgctctgatgctgaatactgattcttagttagagaaacacagtgaaaatgcaatgcaaaactcagcnc

SEQ ID NO: 50861 - DNA, 253 bp, Setaria italica
  Peptide Sequence Number=SeqID_116835
gcctggcgatgaaccactgcatgttcgacggcatcggcgccatggagttcgtcaactcgtgggccgagacggcgcgcggcgccgccgagctcaccgtgccgccgttcctcgaccgctccctcctgaaggcgcgcgacccgccgcagcacccgcagagcgtcgcggcgcgggccgtggtgaccgtgcggcggaggcgcaaggaggacaccaagcgccgcgtcgccgagcagctggacgcctacgccgacagggg

SEQ ID NO: 50862 - DNA, 221 bp, Setaria italica
  Peptide Sequence Number=SeqID_116836
acccctgcccgccccacgtcccgtccttcacctgggacaggaaccgcgacaccatggactcgatcgccgcctccgtcagggtgtcctcgtccaggagcagcgccgtcagggacgggtcgctcaccttctgcaacaaagaatccatgcatggaaacctaaaaattttcaggctaatttgaattggctacttttcttgttatatagcacaacaaacgagtgac

SEQ ID NO: 50863 - DNA, 186 bp, Setaria italica
  Peptide Sequence Number=SeqID_116837
ctgatatgagtacattttggtagcgctccaagtgccaaccgtcgacggccaattgaggattagttcatgtcagcaatataagctagtgcgagaggagagccttgtggcactggcagctgcggcagtgcgcgttcttgctgacatgaactaatcctcaattgccgtcgacggttggcacttggagcg

SEQ ID NO: 50864 - DNA, 461 bp, Setaria italica
  Peptide Sequence Number=SeqID_116838
cgctagaaaaaataggtgtggagacacgagtccagaccgcactgatgattcaagaagtcgcagaaccatatgttagacggcgggccatacgccaccttgaaaaagggagggtcgttatctttggtgggattggtgctggcatagggaatccacttttcacaacagatacagctgctgccttaagagcttctgaaactgatatggagaggaagtctgactagatgtacttgtcaatcagtcagtgcagatgttgtccttaaaggtattgttggtgatgaggaatatggttgccctcctaggagcaataataatgcaccatttgagcacatctccttcagggagttcgcggcaagagggttcagcagaatggacatgacagcagtaacgtgttgcgaggagaacaacattcctgttgtcatctttaacatgttagagcctggtaacatctccagagcgatttg

SEQ ID NO: 50865 - DNA, 472 bp, Setaria italica
  Peptide Sequence Number=SeqID_116839
ttgaaactgatatggagaggaagtctgactagatgtacttgtcaatcagtcagtgcagatgttgtccttaaaggtattgttggtgatgaggaatatggttgccctcctaggagcaataataatgcaccatttgagcacatctccttcagggagttcgcggcaagagggttcagcagaatggacatgacagcagtaacgtgttgcgaggagaacaacattcctggttagtacatcttatcgactaatcatttatagagttgttttgctgctgtattagcaatttggtaaaatgacatttgtgttgtacatttcctgcagttgtcatctttaacatgttagagcctggtaacatctccagagcgatttgtggagatcaaataggcaccttagttgaccagtctggaaggatcacttaaaattatgatgattctctgtagcagagcttcaggacatgtcaatactatgggggaca

SEQ ID NO: 50866 - DNA, 430 bp, Setaria italica
  Peptide Sequence Number=SeqID_116840
gcgaactccctgaaggagatgtgctcaaatggtgcattattattgctcctaggaagggacaaaccaataattcctcatcaccaacaatacctttaaggacaacatctgcactgatttcagaagctcttaaggcagcagctgtatctgttgtgaaaagtggattccctatgccagcaccaatcccaccaaagataacgaccctccctttttcaaggtggcgtatggcccgccgtctaacgtatggttctgcgacttcttgaatcatcagtgcggtctggactcgtgtctccacacctattttttctagtcgatgcttgaagaagtaccgaattcatcactgatgccatcattatgctgattgctagagaagttcaagtggcatgtcatcatggtgtggaggtggcaattgtggtaggaggacgggaatagt

SEQ ID NO: 50867 - DNA, 274 bp, Setaria italica
  Peptide Sequence Number=SeqID_116841
ctagaggcaatgatccgtgtggttaactagctgctaatggctgctgctggcttaacctgctgcggcaccagaacctgaaaaattagttcttgcttgggggtactactagactagaagcaaaatgcctgcaagcttcaaatggagaaacgaagaggaggaggtcgaagaaaatgatgcgcgggggcagggagcagcagagggtggccttctcgccgacgatgaaggaggcggcggcggtgcccaaggaggaggtgtgggaggtccgcgggcgggc

SEQ ID NO: 50868 - DNA, 190 bp, Setaria italica
  Peptide Sequence Number=SeqID_116842
cctatcccctcgtgtgccttgcctttcccctgttgcgtgtctcagtagcccaatcatggcctcatcaaggacacgagcgctctcatggatcctatcagatttctgccggggcacgcacgggggtgggtgcaattcttggcacacaagcattgcatctcatctgcactgcatttccgcctttcgcttttcc

SEQ ID NO: 50869 - DNA, 184 bp, Setaria italica
  Peptide Sequence Number=SeqID_116843
cccgcttctcctgcattcgccgctgcaccttgacctcgccttcggcggcgatggagtccagcttgaccagctcgttcatgagcgcctcggtgagggtcaccacgtcggcgtccactaccttgccgcccttgcccacgatgctgagacacgcaaaggggataggcaaggcacacagggggatagg

SEQ ID NO: 50870 - DNA, 245 bp, Setaria italica
  Peptide Sequence Number=SeqID_116844
tcaaggcgcagagcggatgcaggtgaagcgcgtgcagaagtacgtggagacgctccgtcacctggaccacgtcgttctccgccactttctcccccttgcgcaccgacgcgtccagcgccgccaccttgggggcgagcttgtcgacctcggcggtgaccgcggcgacggccttggcggccttctcgaggtggccgttgcggcgctgctcgatgagccgccgcgccttggcctcggggtcctcgacg

SEQ ID NO: 50871 - DNA, 356 bp, Setaria italica
  Peptide Sequence Number=SeqID_116845
taagttgaagactagtgagcagtggatatcgaaatgaagtgaagttaaattccagaaaaaacatgaaacctgccaaagctttagcccttctgtggtcatccgcaagcttctccacagaatcgcgaacggcaacatgggcagcagcacagagaactccaacctgcctcattccaccacctagggtcttcctaagaattttggcctgaaggtattgttcagatttccaatatcacttgatctttgcggttcttttctttttttaaaaaaaactatctgcaatttggaacttagaaatacaattgatcggaccttgtcaatgaaggcctttgaaccacaataactgatccaacgggggc

SEQ ID NO: 50872 - DNA, 248 bp, Setaria italica
  Peptide Sequence Number=SeqID_116846
ttttctatgtccttttctcgagctggaacaacattgggtgtgtgcctggtctcattccgatactgaattcctatcctttctttgtcatgcaggatcatttcaagaagaagcccaacttccccataactctcaaatacatcgacccgacttacatgatccgtgccgtcaaatcaaacgcatccgacaacgtctactgcaccctgctggctcacagcgccctccatggcgcaatggcagggtacaccggc

SEQ ID NO: 50873 - DNA, 320 bp, Setaria italica
  Peptide Sequence Number=SeqID_116847
gtgtaatatagtatgaaattaatactttaccaatatttttgatctgtcttattttattttctggactaattatgtgtgtaatatgtagggtggatacaagggtttttattctaaaaatactattccgttgacaccgaaatcggtgaatgacatccataagagaggcgggactgtccttggaacttcaagaggagggcatgatactgccaaaattgtggattgtcttcaggaccggggtattaatcaggtttatattattggaggtgatggtactcagaaaggtgcttccgtaatttatgaggaagtccgtagacggggca

SEQ ID NO: 50874 - DNA, 314 bp, Setaria italica
  Peptide Sequence Number=SeqID_116848
acggcgggaagccgtccccggcggggaagtgggcgatgaagaagaagctggcgggcggcgacgcggggtaatccgtgaggtgcggcacatcctcgaggacgtaccgcacctcacggattacctgcccgagctcccgactttcccaaatcccctccaagacaatccggcgtattcggtcgtcaagcagtatttcgtcaacccagacgacaccgtcacgcaaaagattgttgttcataagaccagtgcgaggggcactcacttccggcgtgctgggccacggcagagggtttatttccagtctgatgaggtgaacg

SEQ ID NO: 50875 - DNA, 384 bp, Setaria italica
  Peptide Sequence Number=SeqID_116849
gctacgccaaactggactgaaatgctgcagtctgacactactgcttcagaaaaaaaaaaaactttagcatttttgcagagacacgtttgagctcattcagagaagaaaaatatgcagggaaccaatggatcaaatctgcaggcaacaaaaccttcatgaaatttgtaaggcaatttaaggggtgaattttgtgcctaccacattttttatatccatgattaacatacaaaagttgatgggactaacgtatatatttcatcgtaagttctccaaccagtctctttagaaatgtgtatacacatagtaggcaagtaatagcagccaaattaggaccatagcgaacaaaataaataaatgggccattgtgccaccatttctccaatg

SEQ ID NO: 50876 - DNA, 239 bp, Setaria italica
  Peptide Sequence Number=SeqID_116850
ccaccatggcatgcgctcgatgcaggtggctaaatggctgcagtcacaggtgattggtgcactcacattactatggctcttgcaaaaggatgctcttgctctttgttcgatatgcaaacaatatcgcatcttgtaatcctccttttccatcattttgtagggtttcaaaaaagtttacaatgtcactggtggaattcatgcctacgcggttaaagccgactcctccgtgccaacttact

SEQ ID NO: 50877 - DNA, 231 bp, Setaria italica
  Peptide Sequence Number=SeqID_116851
gaagcgagtcactagtcggacgctagctagctcttgtgtttggtttggaatgggtagacaggaaagctcattgcagttcatgctgagtcgtctactaccttcccactccaaactgcatctattgagcaggcaaacatgcttaatcaggatgcactctcaggtggaatattgtcaaatgcatttcgtggtagtttgtatacgactatgcattatatggaatctgatggtatt

SEQ ID NO: 50878 - DNA, 160 bp, Setaria italica
  Peptide Sequence Number=SeqID_116852
atttccttcttgcttatactccgtttcgtgttctggcaacccagcgcgtagatcttggacgagaatttctccgcaagctctctgatttttgttctcgcgccgcttagcgcttcaaccccaaaattcttgcctccgaaacttgggctgtagccaagaagat

SEQ ID NO: 50879 - DNA, 184 bp, Setaria italica
  Peptide Sequence Number=SeqID_116853
ttccatgtccatgtacctcacgcaaaattgccgaagggataaactgacagactggggtcagtgaagcagatcaacaagagcgcgtagatcttggacgagaatttctccgcaagctctctgatttttgttctcgcgccgcttagcgcttcaaccccaaaattcttgcctccgaacttgggctgta

SEQ ID NO: 50880 - DNA, 258 bp, Setaria italica
  Peptide Sequence Number=SeqID_116854
aaaggactgcgacaactgtccgcgcttcacaaaaaactagcaacatcctcaaagaagaaacgacccaagggttcctcacctagcatgaatcctttaggttccttgtggaagatgactggcaggagacttcttacagctaaggaagaagttgagttctcagaaggtattcaggtgggactattgtattagaagtcaagagcatctttcttcctttcagttgtatatatatactaatggatcttctcaactgagatgtta

SEQ ID NO: 50881 - DNA, 262 bp, Setaria italica
  Peptide Sequence Number=SeqID_116855
ctcccagtagagtaataggctttattacagtagctgatgaggttgtggacagtatcgataaagaggaacttgcaaagtatttatatctaaattcggaccctgaagacgaagaagcccagaaatttaagaaaaaactggaagaaacacgggatcagttcgctgatgcactataccagaagggtcttgcattggcagagattgagtcactaaagtctgatgaatctatcgaggcatcttctaaagatattttttgaggtaaaaa

SEQ ID NO: 50882 - DNA, 346 bp, Setaria italica
  Peptide Sequence Number=SeqID_116856
tagtatttctaaactaagtcgttgttttacttctttcttggtcgtattgttcttaccctagttatgtcaaactttcaaaaggagaatacacactgcaactgtacataaggcatgagaatgtgcaattcttggagaaactcaagcaattggttctgtttattgagaggaaactagataaaaaaggatttcattccattgagtttttactctgaacctgatggccctatagttggaagtggcaccttcagatccacaattttagttccaggagaacctgaagcattctatgtgagtcctccatctagagaacaactcccaaagatgctccacctgggctgtttgtggt

SEQ ID NO: 50883 - DNA, 271 bp, Setaria italica
  Peptide Sequence Number=SeqID_116857
ttaaagaaaataactaaggtaacaaataaattaagaaaaggaaggttacaataaaatagtagaccttttaggagacttcatgggcagaagttaccatgcggacatcagcttttgatactcctagaaagttctttttggacactgttcagatctgtccactgaagcgacctatcaaatgggaggctgctgttagtttctcttcaccttcttcaaaaaatttcagttttcctgtagaggtggcttaactttggaattgtcaatagcccagttc

SEQ ID NO: 50884 - DNA, 431 bp, Setaria italica
  misc_feature (245)..(245): n is a, c, g, or t
  Peptide Sequence Number=SeqID_116858
ccgccatcgtctgcatcgtcttcctcgtcttcatcatcatcgtctactccatcggatgctgcgctttcaggaataaccgcagggacaacgcctaccacggcggctggaagggcagcatccgatggagtagacgatgatgatgaagacgaggaagacgatgcagacgatggcggtgcgcttccagtcccgcttgacggtggccaccacgccggccttgcacgactggcagtcgtagcagagcgcancgttgctccaggtgttgcagtccgggtccgacgacgagttggtggcggtggtcttggtccagtccgtgccgctgacgtaggtgaagccgcagctggtggggggcttgcagcacccagactcgatcggggagaggtcggaacgcatgaagtcggtgaccgacgtccttcttgtcctgcagtctgcag

SEQ ID NO: 50885 - DNA, 308 bp, Setaria italica
  Peptide Sequence Number=SeqID_116859
gccttccagccgccgtggtaggcgttgtccctgcggttattcctgaaagcgcagcatccgatggagtagacgatgatgatgaagacgaggaagacgatgcagacgatggcggtgcgcttccagtcccgcttgacggtggccaccacgccggccttgcacgactggcagtcgtagcagagcgcatcgttgctccaggtgttgcagtccgggtccgacgacgagttggtggcggtggtcttggtccagtccgtgccgactagaacgtaaggtagaaaagaaccgaacaaaagaactaaggtaagggggaa

SEQ ID NO: 50886 - DNA, 134 bp, Setaria italica
  misc_feature (104)..(104): n is a, c, g, or t
  Peptide Sequence Number=SeqID_116860
gtggcggtggtcttggtccagtccgtgccgctgacgtaggtgaagccgcagctggtgggggggcttgcagcacccagactcgatcggggagaggtcgggaacgnatgaagtcggtgaccgactccttcttgtcc

SEQ ID NO: 50887 - DNA, 290 bp, Setaria italica
  Peptide Sequence Number=SeqID_116861
tttaagttttcgtttagggtttagtttcttttgtttatttgttttccccttagttaacggttcgttccttgttcttgtaactcaaatggcgctatatatggaaactagtcgactctgcaattgcattctcctcaattggtgtaccattgataggttatctggtgattcgtagcaatttatttaggtcacccaaacgaattccttgctgttgtaagagcttaccaagaacagtttgcatggtatgccattgtttaccatgcgatcgggcgctaccgagtagtaaccattaa

SEQ ID NO: 50888 - DNA, 203 bp, Setaria italica
  Peptide Sequence Number=SeqID_116862
aacggttttcttgctatccccttgattcttctatccttagaacgcctgggtccttgaacgcaaaggaaaaccatggaagagaaccttgtcattgttgcagaaaggaagcaggcgttctaaggatagaagaatcaaggggatagcaagaaaaccgtatataacgtctcacgagtagtcaataagatgagcatactgtaatttct

SEQ ID NO: 50889 - DNA, 412 bp, Setaria italica
  Peptide Sequence Number=SeqID_116863
gaaataaaaagggtcaccagctgttcaatattcttttggcattacattgtagggtttcttttgttctttttaagcttaacaatcttactgtttaaattggattgttttgagctgacaagtgtttctgttgtgcttgtgagaattttgatgatatctcatatgctgctatactgggatctgttacgtattttattgtcttatcaggtgagggatgaaatagaacatcttctggatgataatgaagacatggaacatctgtatctaacaaggaagcaaagtacaaaaccagcaggttgaggctataatgtcatctgctgcttccaacagcattgttcctgcccggaacagggtgtggccaggctgaactctagctttcggcgaagtgtgagcattgctaccagcatgcatttgg

SEQ ID NO: 50890 - DNA, 237 bp, Setaria italica
  Peptide Sequence Number=SeqID_116864
agccccaaccagttcgtgccaccgccacaagttaattgcctaggcaatggttgatttgcctgctctgctctatttgggaataatcagataggaaccaggagagagaggtatagcacaagcttggctacaaagttccctttctgctgaccactgcttgtggttgagggaaagatgctgaggaatattttgagccagtcatggaggaatggagcacatgtgctgcaggaaggaatccag

SEQ ID NO: 50891 - DNA, 234 bp, Setaria italica
  Peptide Sequence Number=SeqID_116865
gaaggaaatgacatatttatatggattggtagagtttctcctcgtttcagatctacagacatctgcagacagtatcaactggtgaaggattcatcgtacagatactggcaaggatcaactcatgaaaataaaattaaaccacagcagatgaatgtagcagaatctcataatgataattacagattattacaacaatcagaagacatctcagttgttcagcaacgtaattggttt

SEQ ID NO: 50892 - DNA, 328 bp, Setaria italica
  Peptide Sequence Number=SeqID_116866
ttcatccagtggattatgaattcctggatacttgggggccaaaggacagatcgtgaataacatggctaacattcacatggcttgacccttcaaaaatctgtatgaaaaattacaaatattagtaaattatattaaaagccagtagaaaaaaatgtactaataaaggcaatggaagtacaaaattgcagaacagccctctgttaatgggtaaggcaagaaagaaaagtttgctcgacaaaaacagtgatttctttcattaattggaaactactcatatccatagaagttaaaaccaaaacttaagtaaggggaaaaaaacaaacgaatt

SEQ ID NO: 50893 - DNA, 477 bp, Setaria italica
  Peptide Sequence Number=SeqID_116867
tcaatactttctttgagagatatctatactcagttggaacaaccttgatatagtacttgaaagttccacttgtgtcatgaagtatcctcgtggtttcatccagtggattatgaattcctggatacttagggccaaaggacagatcgtgaataacatgactaacattcacatggcttgacccttcaaaaatctcgagcttttttgccagccctacttgtgttcatgaagcaaatgagctattatcagctttaagggcatagagctttaagggcattcaacaagaaaagatcaggattgccaaacacccagcttctatagacagcagattttccaggcagcagcttctcaggaaatccttttcagcaacaaaaatgttcaaaccatgcactgagatatggaagttaccagcaaccctctgcacatctaacatcccatagactcgacacccttcaccattttccactagtgcgactgagt

SEQ ID NO: 50894 - DNA, 178 bp, Setaria italica
  Peptide Sequence Number=SeqID_116868
aatggtgtgctcatgcttctttgttcatcgttatgctcatggccatgatcatgatcatgatgagccccatgttccttttcaactaggtcagacaagtactctgtacaaatatatggaagcttcgcttggatatatttgtatgcaattgacatgtctgggaaacatgaagttgatttgc

SEQ ID NO: 50895 - DNA, 201 bp, Setaria italica
  Peptide Sequence Number=SeqID_116869
tttcccttcgtctacaatggaattcacagctaccgcagcacgcttctggtctttgagttggtgacagactcaataagccggtacatccatcggtcaagcattcctgtcatggcaaatgtgccaccgagaaccgcacatagacgagttaggaaaatagaaaggaaagttaccgtcaactaactacaacaactagaagtacga

SEQ ID NO: 50896 - DNA, 348 bp, Setaria italica
  Peptide Sequence Number=SeqID_116870
ggttaaacctgtcatggcaaatgtgccaccgagaaccgcacatagacgagttaggaaatgaaggaagttccgtctttcctctttgatggtgaccgtaattggcgagagatcataaaggaagtaaacagctgcagggcaaacaaaaacagtttagcttttaaaagagatgaacacacacaccttgcttgaaagttgaaacaaacagttacctggccaggccctgtcagttgggcgaatgggaagaaaatactccgtgacagaaaattgatttgttagcaatactttctttgagagatatctatactcagttggaacaacctgcatatcagttggcaaaacacactttct

SEQ ID NO: 50897 - DNA, 430 bp, Setaria italica
  Peptide Sequence Number=SeqID_116871
aaaggaacaaaggaaggaaaataataattgttgaagaataaaaagaacgcggacgactgtgatgaagcttgccttgttcctatatccgcagagaatggagcagtggaaaaattggacataaatcgttgtagtcctgatctgccatcatttatggaaagaaataagaaacctaatttctatcataatgggtgtacacagcgtatccatgcacttaaacagcggactaaaggaacaggtgcatccctgaaacaaaatccaaaagcaggctactgcattgaatagctgttcaaagaccagaaagaataatgctgctaaaaaacccatgccacacaaggtccatcatggaagacatacttcaaacaaaatttctgggcaagtacaagggcaagagaggcaagaagaagcaggcccagtggtaagcatgataatt

SEQ ID NO: 50898 - DNA, 413 bp, Setaria italica
  Peptide Sequence Number=SeqID_116872
aaaaaaaataaaaaacttttaaaaacaaaagaaaacaaaaacaaaaaaataagttaacaaaaccaatagacaactgagatatggaagttaccagcaaccctctggcacatctaacatcccatagactcgacacccttcaccattttccagcgcttgtttgacactcttcaccattttctctgcatcttcattgaaggtgggctcatgcttcttttgttcatcgtgatgctcatggccatgatcatgatcatgatgagccccatgtcccttttcaactaggtcagacaagtactctgtaccaatgatatggccatacctatccaagcgaagcttccaaatatttgtatgcaaatcaacttcatgtttcccagacatgtcaatcgcatccacactcaatacttcacatggcaaag

SEQ ID NO: 50899 - DNA, 398 bp, Setaria italica
  Peptide Sequence Number=SeqID_116873
ttttttagtttttacttttaaaagttttacggttttacttttaatttttactttaagttaaggttacttaacttaaacttgcattttttaaccattctgttcaggtaataatctctgggagatcaaatcacaatgtttccccagtgtctgaaggagtgctttctggtgatgagaactacattgaaggttggtcatgcaaactttgacatattagtctgttgtgtgctttaaccaaacatgattttcataaacaaagttagtatccgtttacactaagatacttgtcacatggcacttctaaacttcaaatgatgaaatctaagctctctctcctcctccattgtgaaagtaatgtgagtttctatgattttactatcttgtgtaagactcactgtaaa

SEQ ID NO: 50900 - DNA, 258 bp, Setaria italica
  misc_feature (76)..(76): n is a, c, g, or t
  Peptide Sequence Number=SeqID_116874
aggaatcgccgaaacccatgagatctccggagacgaataagggcgggcgaccatggcgacgaccgattcgatttcncggggctactttttgcgggccttgcccacctggaagctcatccagaagttgaggaaggcgtaggccaccagcaccaggacgacgtaaccgtactccttcgtgagctcgatcgccaccgccatggttgcttcctcggttctttcttccttggaaatggaggagtggaggagagtcggggaaac

SEQ ID NO: 50901 - DNA, 295 bp, Setaria italica
  Peptide Sequence Number=SeqID_116875
tctaaaggagaatatgggtagttatgataacaagtgaagtggtaagctaaagcaggtggccatatctgaagggcaacagtgatcttgatgattttcagatgtttccatcttgcttttcatgcttccatcagcatctattttatccaactcagtcttattggatttggagcctctccttcgatcatctcgagatggcctgttgtataaatccttgtatttttcaagcaacgcttccttttcttctagtagtccaagcatttcatatgcatcttcaactttccgtataatatctttg

SEQ ID NO: 50902 - DNA, 251 bp, Setaria italica
  Peptide Sequence Number=SeqID_116876
gctcgacaggcttgtgaagctcttcaaagatttagaagcctgtggtcgtaaacctcgaagcaaagatattatacgaaaagttggagatgcatacgaaatgcaaggaaaactagaagaaaagatagtgttgcttgaaaattacaaggatttatacagcaagccatctcgagattatcgaaagaaaggctccaaatccaaaaagactcagatgaataaaacagacggagttcttagagttcttggccaatcat

SEQ ID NO: 50903 - DNA, 332 bp, Setaria italica
  Peptide Sequence Number=SeqID_116877
gaatcagctgtgaccgttcagtcatgataagagactcgttactgatccactgacacgtgacatcagatcagaccaaaaccagattctgccagcacttgcaatcttgatgctctcagtacagggaaatgttaagccttgctgaagctctgaaagttaaagaaaaagtatgtgtcaaaggagaatatgggtagttatgataacaagtgaagtggtaagctaaagcaggtggccatatctttgctttcatgatgctttgccttcctttcccccctgtgtacaaagcaggccatcagaattcacggaacatacaatgggaactttgaagcttgcta

SEQ ID NO: 50904 - DNA, 395 bp, Setaria italica
  Peptide Sequence Number=SeqID_116878
cggtgacggtggcggcggtgatggcgcgcctcacggcgcacccgggtgccagcgcgcgggcgtgctgcgagctctcacagggtacttgaagctgttgtgtagattccatccttttgaaaggataaaagatgtgtctttggaaagctattctggcatttcatctactgcaaagttagaagacttcacccagcaatgcctttccagcctaagttagaatagactgaaataattttatgctacacggcatggcgtgtgcccatggacctatcttttctttttgatggtatgtgataccattattaccgtctgctgagattctttgggtgtcaaattttagttgacctgagttaagtgaaagtgttaccacttttgtacccttgcatgaggtctttgct

SEQ ID NO: 50905 - DNA, 261 bp, Setaria italica
  misc_feature (22)..(22): n is a, c, g, or t
  Peptide Sequence Number=SeqID_116879
atgctaaaattcctacaatcanggtttttctaggataaatgaaatgtaaaaacgcaccattgatgttttaatatgaaacaataaagttttcactctagagctgaatgcatgaactctaattattttaaggaagcattatttcacggtccatggaagacagaaccttacaatgtgcccaagatagcttaccaaatgcaacttctctttctcatgtgcttgaacacccttcagtaaatcggcaagatcactacgacaaaaatc

SEQ ID NO: 50906 - DNA, 291 bp, Setaria italica
  Peptide Sequence Number=SeqID_116880
gaagcagcctcttggatctcatcagcttcctcaactaccagctcgtcctgatatagataaaaacaatgtacattaattttgatctcctgattatagcttaacattgttttcgagctgagaatgtaattgaagcatcgccaaccactgccagagccagaagcaggagctacatctgcatggttcctgttttgcagaatagaatagagctgtatcatctttttttttttttttttgtcgtgtattgtgacggttgtatttgtttgtgttaggttgtgaattgtgataatataa

SEQ ID NO: 50907 - DNA, 317 bp, Setaria italica
  misc_feature (54)..(54): n is a, c, g, or t
  Peptide Sequence Number=SeqID_116881
gaataacaataaacagttaaaagatcagttcaagcgctaaaggacaacgtattnttacccagttcattacctataaattatagtaatgacaaaacagtttaaacataggttaatataaaattcatcagaagcaagagtgaaacagtcacaaaagaaagaaaccttcatcgtcaggggcgctaacagtccggttgttgtccaagttagatttttcatgcactgggacactctgcacctgctgagccaactgttgagactgttgtgactctgcagtcccccactgtggccttcgctttttgttacgtctaactacttgt

SEQ ID NO: 50908 - DNA, 399 bp, Setaria italica
  Peptide Sequence Number=SeqID_116882
atggataggctatctggtgtgatggatgaccgtgggaagttcatctacatatccactgaggagatgaaggctgttgcagagtacatcgaggaaacaggggagagtgagcatatccgcatcctggccaacaactcgaaccaatttatagatttggagccaaaggcccagtacgaggaggagagccaatcaagatgacagcgctgcagcagagacggagccatgagagcgcgttatcgtggcgtgtttaggtgctcagagatgtttgtattgatttcaaagctgcgttaacatgggttgagttggatatttgagaaggtgtgttaagcaagccactagtcatgatattcggcatgtcagcacaagtatcaatgtattatataccactatattattgtacct

SEQ ID NO: 50909 - DNA, 357 bp, Setaria italica
  Peptide Sequence Number=SeqID_116883
gaccaaggtatccaccgttgttcttcagtacttgcactggatacctggctgccatacaactataggtgcatttgctgcgtcctgtagttcatacagtttacaataattgttgtgaagtgtatagttggaggtgcagatgctgatccaatatgcaaatgggggcttcttgaaatctgttatgtagaataacatgcttgaataagcaaacgtagcctcacaggctacactccatgtactggggcttacaacggtaataacttaacagagtggtgtaactgaattgttgaacagtaataaacaaaataagtcagtaatgctaccttcaggatgactaaaacaaaaaaaaaaaaaaaaaaa

SEQ ID NO: 50910 - DNA, 265 bp, Setaria italica
  Peptide Sequence Number=SeqID_116884
tattaagtagaaaattttgatagagcttaaaacatagtgctatatggagttcttttgtttgaaattttctcatgtttagtttctttaatttctttatgtattccaggggcagcgctatcaagtttcttggaacaaagcgccaccacgacaaatggttgttcgccacagaaaattatgatatcaagggttgttttgcaatgacagaactaggtcatggaagcaatgtgcgaggaatagagacaatagcaacttatgattcaaaaga

SEQ ID NO: 50911 - DNA, 254 bp, Setaria italica
  Peptide Sequence Number=SeqID_116885
tggcgttgataatgggcggatttggtgagtaattttatttcttgttttttgttattgttatatatgtcatttattgtatatcacgtcctattttttcacctctataccaggtttcagaatatacgtgttcctcgcgagaacttgcttaattgggttgctgatgttttgccagatgggcaatatgttagcatgatagatgatcaagatcagaggtttgcagctttcctgtctccgcttacacttggtcgagtaaa

SEQ ID NO: 50912 - DNA, 238 bp, Setaria italica
  Peptide Sequence Number=SeqID_116886
cttattcaagcatgttattctacataacagatttcaagaagcccccatttgcatattggatcagcatctgcacctccaactatacacttcacaacaattattggaaactgtgcagtgaactcaggccccatgcccttgctgttgtcagttctttcggaattcccgatgctttccttagcccacttgcttttgactggattgaggcaaatgcgctgtcaaccgggagccactgatctca

SEQ ID NO: 50913 - DNA, 326 bp, Setaria italica
  Peptide Sequence Number=SeqID_116887
aatacaataatcaaggaaccgatgttgatatgcaacaagaattgtttagtcttgtccagcccaactatgttcaaacgatttggctttttagctttatctttcccactagaagaagcagtgtctgaaggaccactaacaggaacagaacatagtaaagcagtaacagctgcgccattccttctatgagtagcagcaacagccccaggcaacacatctgttaccaggtcaccgctaattaccaaaatatcatttgctgtcagtcgcttggaagtgctggtgcattacgagctatttcaaagcgactgacagcaaaatatcatttgctg

SEQ ID NO: 50914 - DNA, 214 bp, Setaria italica
  Peptide Sequence Number=SeqID_116888
ttcaataacaacatggttcatcacaacagagttgacaatctttacattggaaccgattcggcaatgacgaccaatcacagatcgcttgacactacacttgtcacctagctgcgaaccctcagcaagaatacaatgtggccctatctaaacaaacataagaaacaaacaaaaatgaaaccaaaatagaagtttgacgaaataaaaaacaataacc

SEQ ID NO: 50915 - DNA, 307 bp, Setaria italica
  Peptide Sequence Number=SeqID_116889
ggttgccagggagatgctaacataagcctaccattgcaactcaatgtcagacattcctgtaccctagcatacacccatcctgttctccagaagccatcattggacatgctaataagcttttctatccaaggagctggatcatcatcaagctcatcccacatccaattagggaggcgaaggtaaacagttagaataacacaaccaggcctaatatagctttccatatcagttgggcaatgtgacaaccagtttaggatctgttcccgaagatctacaggaaaatccttcggctcttttccaaagagct

SEQ ID NO: 50916 - DNA, 389 bp, Setaria italica
  Peptide Sequence Number=SeqID_116890
actagtgtcagaataagattttgtctcgcagaatttgtaaccaagagcagagatgttgctgttttttgatgtatgccgtaactcaaactccttctcaaagaccaaaccaatcatacactgagggtatttgtcaactgacagtgtgccaaccagaatttcattgccaccaactttcacaaaaaactctcacatcctcattccccttgtcatcctgcaacgcaatctgtgaaacatgacaatacacctctcctgggttacacttcactgtctcaccaggtctgactagaactcctgcgccttgtgaggactacgcttctgcttcttcaccttgcaatgagttttcagagcgatgtaggagtagaaagtcctgctgcacgactcgcaggcat

SEQ ID NO: 50917 - DNA, 230 bp, Setaria italica
  Peptide Sequence Number=SeqID_116891
taaagaagatggtaactcacacattggactgtatggcaagaggtggagttcatgaccatgtcggaggtggctttcacagatatagtgtggatgaatgctggcatgttgcacgcgacatacttgattacttgaggagagacatgataggaaaagaaggtgaaatcttctcagcagaagatgctgacagtgcagaatatgagggtgctccaaagaaaaaaggaaggggcttt

SEQ ID NO: 50918 - DNA, 237 bp, Setaria italica
  Peptide Sequence Number=SeqID_116892
tagtgtggatgaatgctggcatggtaagttggctctgagctcaaggagaaatttcttcaggaatttgcagaactctcctctcacgtgtccccttcacattcagttccacattttgagaagatgttgtacgaccagggacagatagtaaatgtatacttggatacatttctgattacgggagatgagtattattctacagttgcacgcgacatacttgattacttgaggagagacatg

SEQ ID NO: 50919 - DNA, 333 bp, Setaria italica
  Peptide Sequence Number=SeqID_116893
tcttcatgctcattcttcagcatccttccgaactgttactggggtagtggctggattcatgtacttggatattctactagggcaatagatgaaatcaagaccacggtatcttcgagtgcagaagtaagctgcagaccgtagcctgcctaccttcttcatgtcaacagaaaagaatccatgccttcgggtgcataaacttctccctggccaccaagtaaacgatatcttcaccactgatgcaaggagagggcagagactattcgtagtaggtttctttgtcttaggttttttctttttgtttcttttagttttcctttcttattttttcccgtt

SEQ ID NO: 50920 - DNA, 251 bp, Setaria italica
  Peptide Sequence Number=SeqID_116894
attcaggcaaacaattgaagtaactcgactgaacttttttctttaccaacagcagcaagtgaactttctttgcttgccgatttctgcagaaccgagggtgagttcagcgctgggcatcccgaaggagctgtaaatatcccctacatgaacaagaccggctcaggtaatgcccgctgttttgtcttgtgtttgtgtgtcctgttttagttgagattgtgacagtgatcatctccatgatctgtcgtcgttga

SEQ ID NO: 50921 - DNA, 243 bp, Setaria italica
  Peptide Sequence Number=SeqID_116895
atattcggcaaggatgatgagatcatcgttgtacgtcttactgaatacattacggtgtccaaataattaacttcttgtttttttcagttgttttatctatatgtatctgaaactttcgagtctttatttccagggatgccaaagtggcaagagatctctcatggcagcgactgagctctgctctgctgtaagcatgatctcccccggcccatcgtatctattctagcacaaccaacaaccggc

SEQ ID NO: 50922 - DNA, 240 bp, Setaria italica
  Peptide Sequence Number=SeqID_116896
ctaaattaaacttcttgttttttttctagttgttttatctatatgtatctgaaactttcgagtctttatttccagggatgccaaagtggcaagagatctctcatggcagcgactgagctctgctctgctggcttcaccgctgtgaccgacatcgctggtggattttcttcttggagggagaatgagctgcctatcacccagtgatctctgaagtccaacatctgtcaaggcagcctagct

SEQ ID NO: 50923 - DNA, 255 bp, Setaria italica
  Peptide Sequence Number=SeqID_116897
gcagaggaagagcaagaaagcaatggcgacctccctcccggcagcgcccctcctagcccagctcccgtcccacgccaccaggtgcgcctccgctccgctccgctccatcccatccacccacttcgattcaccgcgtcgcctctgaacgcttccattcgcaggcccctgcggcggcacggtggtggcgccgcacgagctgctccgcctcgctccgtggcggccaccaggaggacgtcgctccgcgtcgccgggcgt

SEQ ID NO: 50924 - DNA, 232 bp, Setaria italica
  Peptide Sequence Number=SeqID_116898
cggctgcgctccggatccgacgtcgaggtgcgccgcggtccgtgccggtgcgcgtcgcgtacgagctgcagcaggccggacaccgatacctcgacgtcagaaccgagggtgagttcagcgctgggcatcccgaaggagctgtaaatatcccctacatgaacaagaccggctcagggatgccaaagtggcaagagatctctcatggcagcgactgagctctgctctgctggct

SEQ ID NO: 50925 - DNA, 305 bp, Setaria italica
  Peptide Sequence Number=SeqID_116899
ttagtaattaatttagtaattagtacctaaattggtctaatttgttgtaaggttgttcagcgaaggacaaatccactggcaaagaacaagaaatcacgatcaagtcttctggtggtttgtcggagggtgatatcgagaagatggtgagggaggctgagctgcatgctcagaaggatcaggaaaagaaggccctgattgatctcaagaactctgcagataccacaatctacagcattgaaaagagtgtcagtgagtacaaggacaaggtccctgctgaagtcaccaaggagatcgagtctgctgtc

SEQ ID NO: 50926 - DNA, 481 bp, Setaria italica
  Peptide Sequence Number=SeqID_116900
gaatgaattcaaatcaattgagaaattcaagatattcaacacgaataatctgtaagatcgtagttttaatttattttttgaaagaaaattacaagattttctgatactattgctggttttggcagatgggtgaacttgaaggctatcaaacgccttgttgaagctgatgcactcaaaatggagatcatcccgaatcctaaggaagttgaaggcgtgaaagttcttcagctggaaacagcagctggtgcagcaatcaggttctttgaccatgcaatcggtatcaatgttccaaggtcccggttcctaccggtcaaggcaacatcagatttgcagctagtgcagtctgatctatacaccttggttgatggcttcgtcacacgcaattcagtgagaacaaatccatcaaatccctcaattgagttgggtcctgagttcaagaaggttgggagtttccttagtcgcttcaagtcaatccctagca

SEQ ID NO: 50927 - DNA, 251 bp, Setaria italica
  Peptide Sequence Number=SeqID_116901
ctcgatgaaaatacaagctgatagcgcaattgatgtttttaactagcatggtatttattcttttattttaggatatcaatggccctgatgacctttaaatgagcaaccgttgaacaagctgcattcaccaagtggcagatcgttgttcactgttttcctgtagatctgaagaggctccatgacatttagttctgattcttgttcctttttttgtgggctggtacaaaagatcttatcccagcaactaccat

SEQ ID NO: 50928 - DNA, 247 bp, Setaria italica
  Peptide Sequence Number=SeqID_116902
ggcggctggaggctttggtgctgcttgcgctgagtatagcccattggcattgtctgtgaagtcccgctttcgttctttcccaggcggtgacccaacaatgaactcataaggctgcgcgatacttctgttccctgctagaagcttggactcgcggcttgacactgcggtgataccacggtatatgcagtcgaaatgaacctgcacggctgaacctttctcagcagttggacccttcccttcaataaga

SEQ ID NO: 50929 - DNA, 230 bp, Setaria italica
  Peptide Sequence Number=SeqID_116903
ggcggacgagaagcttgccaagctgcgggaagccgtcgccggcctcggtcagatcaggtgatagtacctcccgtcgcgctttcactttcagcagatcactcatgactgatgtctgatgagatcttgatcttttcttccctgccattgctgcatcttcctaatgtgttctttggtctgcagcgagaatgaaaagtccggcttcctcagcctcgtcgcccgctaccttagcg

SEQ ID NO: 50930 - DNA, 209 bp, Setaria italica
  Peptide Sequence Number=SeqID_116904
tctgggccgtggctttccgaccgccgggtggggctggagtccgtgcaggccggcttgccagcgcctcggatgacaagagcatctccctgtatgattactcgtagctttccttgcaagttaggagctcaattaggattgtacaacaggtcctggccaaatgacagtctcagactccaacaaactacaatagaggccttgcaggggcatgg

SEQ ID NO: 50931 - DNA, 113 bp, Setaria italica
  Peptide Sequence Number=SeqID_116905
ggatgacaagagcatctccctgtatgattactcgtagttttccatgcccctgcaaggcctctattgtagtttgtacaacaggtcctggccaaatgacagtctcagactccaac

SEQ ID NO: 50932 - DNA, 281 bp, Setaria italica
  Peptide Sequence Number=SeqID_116906
agcaacctgctcactatggccctgaggaaagtagacgacccggctcccaaccataggcaaggacacaaggggcccagcgcatgcatgccatagctcggagttcagacacctttgttccccatcactttccggtgcggtggagctaggtgttcttgttccgggtcgtattggtggtggagatgaatctctcccgtccaagtatgtccggtagtcccttcgtccggtaaagttgttatttggggttaacttaaaaggttttgttttctttgttaactttcctt

SEQ ID NO: 50933 - DNA, 244 bp, Setaria italica
  Peptide Sequence Number=SeqID_116907
aacaatttgttacacaaaacctaaccagcaacaaacacggtggccaaagtacgagtacaatacatgtattgcaatgctgtcattgcagcatttgctaaaagtcaaaccttaaacaatctcatatattgtctacaacacaacaggacaggaggtatgaaccaattgctatgatgtccgttcttttgatgagctttctgacgacgaaggggtctatgaagactctgattaagcaatcaatcagtca

SEQ ID NO: 50934 - DNA, 290 bp, Setaria italica
  Peptide Sequence Number=SeqID_116908
taaactaaacaaacaaaaaactaagaaaataaaattaagaacaaaaacttaaaaacaattagtaagacaagactagacaatccttccagggtccagcacaggcatgtgactgattgattgcttaatcagagtcttcatagaccccttcgtcgtcagaaagctcatcaaaagaacggatatccagttgatagcgcaacatgccaccgatgccaccaaatcctctgcaaaactgtgatccctcttgagatttgttggtaacaaactcaagtgtgcacccaaactttttgtac

SEQ ID NO: 50935 - DNA, 309 bp, Setaria italica
  Peptide Sequence Number=SeqID_116909
ttcggttcttaaggtttgttatttcttagggtactattcctactattcgttggtactaacggtctagtcggcaggccgccgcagaagatggcggaaccgccgccgtcgtccccgccgccgatgaaaaacggcaagcagaaacacaaggggaagccgccgccgccgcccgctgccgacgagccaccgccaccgcaacctgcaccggcgccggagccggtgccggtgcacgagatgccaccgccccgtcccgacgcaccatggtccacctcaccggggagatgtcggcgatggtgccggcctttgtcgagg

SEQ ID NO: 50936 - DNA, 248 bp, Setaria italica
  misc_feature (9)..(9): n is a, c, g, or t
  Peptide Sequence Number=SeqID_116910
ggacatgcncatgccgatgccagcatcaccacttccgccaccgccagtgaaggaaagatcgccgccgctgctaatgccggcgaggccgtgtgatcagccgccggtggagtacgtgatcccgacggtggagatcccgtcgtggccggcgccggcggcgtgcggcgggtacaggggctgccggaccttcagcgacgaggaccccacggcggcgtgcaccgtcatgtgatcttcagtggagtctgtcttag

SEQ ID NO: 50937 - DNA, 172 bp, Setaria italica
  Peptide Sequence Number=SeqID_116911
cctgagcctgagacgaccgaggaagaggttcaggagtgaacattccactggcggacatcaattccctcgagggtgcagtcgtgcagaactgcagatgcctatggagtagagtattactacctaggtatttctttttgttacgtttcctttatttgttactttgttttccttt

SEQ ID NO: 50938 - DNA, 236 bp, Setaria italica
  Peptide Sequence Number=SeqID_116912
acgggcactcgctgtacggcgcgtgcgccgcccgcgcggccgcctccgcggcctccctcaggcgcgcctccaggtcgccggcggcgaagccattggcgaccgcggggacggggtcgcccagggggttgccgtgcttctcgaggacgaggggcacatcttctgggaggaggtcgtggggcccgaaggggcggaggaggagggacgcgaccgtgcgccactcaggcgcgcagccttcc

SEQ ID NO: 50939 - DNA, 244 bp, Setaria italica
  Peptide Sequence Number=SeqID_116913
cctttatcttctttagtgccagttccattgacatattgtgctccttcatgcaactgtcaattgttgaagcgacatgcaatgccatttgttcacgctacatatgaaattgttcggtcaaagattttacagcatttttttaaattaaaggtaaacaacactaatgaaaataatgacattacctcatatgacttcggatcatctaatagcctcagaattatgcaaagtgaatgtactatttcaggca

SEQ ID NO: 50940 - DNA, 388 bp, Setaria italica
  Peptide Sequence Number=SeqID_116914
gcagagctgtgtcaaatgagagtaacggaggaaaggggatgcttgcgaaaggttgctccagaatgtttatgcagcctccacatttggttcagcatccccattatcttcatcaggccccccatccttcttcacaaagtcaaatccatattcttcctccgaatagtgctcctcggcgcttctgccaaagatgaatggtcttctacccatcgttgtaaaaggcattagcccaaaggcacgcgcggttttgatctctcttgcaatcttacgctgagctttcgcacttatgcgagtctgcaaagaagatcagtaagtcaaaaaactgtggcaaacatatgttcaatgcagaattacatgtgcaacggcactctctatggtagtaatgtaatgg

SEQ ID NO: 50941 - DNA, 257 bp, Setaria italica
  Peptide Sequence Number=SeqID_116915
tacttgtattcgtactgacggcttgccatgcttatcagatttcacgcgactgaccgaccaacctcgtacattttctgatgacagactgatcaccaagaaggaggtaacgcagaccatccgtgtgaggcccggtatgaggaaaggctccgcggtgacgatggagggcgccggcgacgagcggccgggctgcctgacgggcgacgccgtgttcgtcgtgtcggagaggaagcacaagcggttcaagcggctcggcgacg

SEQ ID NO: 50942 - DNA, 265 bp, Setaria italica
  Peptide Sequence Number=SeqID_116916
ctttttttacctattggaagaaaggaacaccttttgctgatgaccagggaatgtacaatgcattgacttggtgggaacaaatggacaatggcaagcagcttactcgtaacaggaagttcctcattgtcgttcctgtagtcctgtgagtactgacggttatatgcctgttatatttctgtgttccattgaattttcattccttttggctaagtttaggagaaatgctatgtgatccatacactcaaaatgtttccttgacccagat

SEQ ID NO: 50943 - DNA, 340 bp, Setaria italica
  Peptide Sequence Number=SeqID_116917
caacagtggcagttttcgtgctggttgtggcaaagctgccaaatatgcacaaggtccgcatatttggaatcaatgcagacatctgagggccccttcaggaagtatgcggatgtttgcttgcgccaagctctgaaagagggacgtggaacaagtgaatgctttgcaaaggtgactcagtcgccgcctgtaatatctgtcttcttcctttagagttggttcactggaagtgtagtctgtcagtgcaatgaacacagcagtatgtggataagaaaagagtgtagcaaatgctgtttgctgtcttgtatagaatggaaccctgaaatcagtgaaatcatctttc

SEQ ID NO: 50944 - DNA, 237 bp, Setaria italica
  Peptide Sequence Number=SeqID_116918
cgaaggcccacgcgatgccgaggatgcccacgccgccgcacgcgtcggtgccggccacgttcgggtccgtctggtgcttgtaaccgatgacggtgagcacggtgatgtagaggaagagcagcgtggcgatgaactcggcgatgacggcgcggtacagcgaccaggaacccagccgtcaccttcggcctcttcctggcgcgcaaggtgtccctggtgcgcgcactgcgccacgatgta

SEQ ID NO: 50945 - DNA, 366 bp, Setaria italica
  Peptide Sequence Number=SeqID_116919
gaagccaaattcacgcacgcagctgctgaaacaaaacgaccagcggcaagaacttcactgatgatgatgatggcagattgcagacttattctccccacaaagcgtcgatcgccattgcttcaacacgcacacgtagcagcctttgcaagcagctctcacggtaattctgaagactagtttcatgcgttgctcctgaaggagccgagggccttgatggcgccggcccggaggatgtactggtggtagaacgccgcgatggccgcgccggcgaaggggccgacccagaagatccagttggttctattccctattggtctttgttcctttgttttgtttagttatttgttacggttcggttcgttcctt

SEQ ID NO: 50946 - DNA, 462 bp, Setaria italica
  Peptide Sequence Number=SeqID_116920
ctgaacaaaacgaccagcggcaagaacttcactgatgatgatgatggcagattgcagacttattctccccacaaagcgtcgatcgccattgcttcaacacgcacacgtagcagcctttgcaagcagctctcacggtaattctgaagactagtttcatgcgttgctcctgaaggagccgagggccttgatggcgccggcccggaggatgtactggtggtagaacgccgcgatggccgcgccggcgaaggggccgacccagaagatccagtggtcatcccatggcttgtccttgttgtagatgacggcggcgcccaggctcctggccgggttgatgccggtgccagtgacggggatggtggccaggtggaccatgaacacagcgaagccgattgggaggggagccagcactcgtgcatgcgtccaaattctcgtcacatcatcactactcacactgagtcggag

SEQ ID NO: 50947 - DNA, 262 bp, Setaria italica
  Peptide Sequence Number=SeqID_116921
ttggttggttagtaacgtccgtcgtattggtccgtcgtccggtcgtaaggggccgacccagaagatccactgcgcaacgaaaggggatggatgacaaaaccgtcagatcagagaacacagcaagttgctggtgagtgagtggaaggtgaagtgtgaagcatgaactgtgacaaagctcgttatgtgaatggagatcgaacagggtgagtggaaacataacgtacgtggtcatcccatggcttgtccttgttgtagatgacgg

SEQ ID NO: 50948 - DNA, 212 bp, Setaria italica
  misc_feature (57)..(57): n is a, c, g, or t
  Peptide Sequence Number=SeqID_116922
cgatgacggcgcggtacagcgaccaggaacccagctctgccgcgtcgatcagcggcncccgggggagggtcccgtgtagtccttggcggcgaactcgccgccgccggcgccgctctcgatcacgtcgtccttgcccatggcttggtcttggcttagcttggcagctgcgggactagccggccgggagcagaggttggcttgcaagaaatgga

SEQ ID NO: 50949 - DNA, 287 bp, Setaria italica
  Peptide Sequence Number=SeqID_116923
tgaggaccttcaacatattctactgattttcctgtcaaagttatcgtagctagcaaagaaccagctatcaatgaggaggattatcagaactaccgcagggctgcaaagcagcactgggatatgatgaagcagtactatgaaaaggctgctgatgcttttagggagggtaacaagaaagaagtcgattatcttatacaggaaggcaagcgctgttatcagatggctcgactggctgatgagaaatctgctggggagattatcaagtccaagaaagtagagtccagaaa

SEQ ID NO: 50950 - DNA, 255 bp, Setaria italica
  Peptide Sequence Number=SeqID_116924
cattcgcggaccgtgatgatcctgtcctgttcagggtggaaacacatgcgaccttgcccattggctggggatctgtgacagatgtggggaggctggactgggagggcaacttccccacatctgtcacagatccccagccaatgggcaaggtcggcatgtgtgacagatgtggggaagttgccctcccagtccagcctcccgtacagacccttccactgatggtgcctgcccaacactgccaagaggcacaatcag

SEQ ID NO: 50951 - DNA, 259 bp, Setaria italica
  Peptide Sequence Number=SeqID_116925
tttaaagttaagttacttaatttactaattttagggactagactagacaacctaggaagaagaactacttacctggaattggccagagccaatgcatgtgtttgctagccctgagctgaagataacgctgcctgatggccaatactatgcagctgccagaagcactgctggtggagcacctttccgagcaataactgttagagatacaatcggggatctgcctaaaagtggaaaaatggtgccagcaaaactcacactt

SEQ ID NO: 50952 - DNA, 164 bp, Setaria italica
  Peptide Sequence Number=SeqID_116926
taaaccttaaccccgttaaccttaggttagtaaagttaagtaaatttacaataaaatggtggtcctccgtgtcagggattttctgggatgaatagattcaaccagagcccatggagtaaagttcagtgcgagatgattctagcattcctctcatttgcagagta

SEQ ID NO: 50953 - DNA, 336 bp, Setaria italica
  Peptide Sequence Number=SeqID_116927
tcgtctacttactttctattcttgtctaacgttccccggtcctacttgtcttccgtacggtcattgaagttcgccgtcaccgtctccgccacgccctccggcaacaccccgtccgcgggcgccccgcaggtttctgcggcggcgatggcctccgtcgtcgccgcggccgccggcgctgcgatcaagctcgcgctcttctgacggagcacggccatcgtctcagggtagagacagtgcatgcagactacgttcttggcccgtttgatggttcgtgtgatcagtaatcgttgtccacatctctgctacgtttttctggcgattgctcgtcgagcagct

SEQ ID NO: 50954 - DNA, 423 bp, Setaria italica
  Peptide Sequence Number=SeqID_116928
atagtttttggtatgcatctaaacatgctatatctaggtgtagagcaaaaactatgtatctagaaaagtcaaaacggcctataatttgggatgaagagagtactttttctgttcatagtataggtagcactgtgtgggctcataaccttgtgtttacttatgcaggtacatgaggccatcgcacgagaagaatcctcgcagttcaaggcagggattgtctcgcatgaaatccgccgagggttcctcttgaaggagaggctactaaggcctgctactgtgaaggtttctactggctctggcaaacaaagcgcgagctcagtggaggcggccaaagatgccgctgtgtgaatcgggttgaaactgtcagctgcagctgatagccaaagcaccatatagtttgagaaacttttttctgttcataac

SEQ ID NO: 50955 - DNA, 344 bp, Setaria italica
  Peptide Sequence Number=SeqID_116929
gcccatatgctctgcatactcgaggtccaaacgtaagcaacacccaacaaccaagggctacatgtaggaaacctgagtgcaggcacataggtgttagtagtctccaccactcccctgaaagtattaagttgtttatcttggcaccatacaacaaagggagagacaaatattcattttcagaatttttcactggacttgctatttcgaataacagaactgcaatattaataccagccaataagtttctgcattattacagagttcaaaagttagctaacaaaatgtggcaacatgaaaattgtttataacttctgctaaactatgcagagggacaagtagtgcat

SEQ ID NO: 50956 - DNA, 269 bp, Setaria italica
  Peptide Sequence Number=SeqID_116930
ttaacagatgcaaaccacaataacaacgtaagggaagagaattttgtgatacttcatctagcatagaggtagaagaaataccaggcacataggtgttagtagtctccaccactcccctgaaagtattaagttgtttatcttggcgacactaatgttcctttcttaaactcaaaccagggcccagtattttctctaattggagcatggctggtgtatcagagtcaaaacaagatgcgcccagttatcaattacccccaaaaatgctcagt

SEQ ID NO: 50957 - DNA, 336 bp, Setaria italica
  Peptide Sequence Number=SeqID_116931
tccaccactcccctgaaagtattaagttgtttatcttggcaccatacaacaaagggagagacaaatattcattttcagaatttttcactggacttgctatttcgaataacagaagtcaaacagaaaccggacgtttgatcatctgtatgcatgtccaggaaactcttttcatcaaatatcaagtactccttgtaatcttcaatggaagtattgcgataactcttggtacctgcaacgagtctatcatgttcttcacattggcaatgattgcatcaacttcatttgaggatgatgggccatttttgcttgttcttctgaggaaagagcatagctgct

SEQ ID NO: 50958 - DNA, 115 bp, Setaria italica
  Peptide Sequence Number=SeqID_116932
attcttgcaagaattctcaacaggctcatgatcatctgatatgtcctcaacagtcgagtccatatgaacactctgtgaatgttgacaacacttatactgatatggttaacagaac

SEQ ID NO: 50959 - DNA, 257 bp, Setaria italica
  Peptide Sequence Number=SeqID_116933
ccgtctccgtgtgataggggctttcagagctttggttgattgctggggaccgtttcttgggcacctgagtcttgggagacccgagtcttggctccttcctcctccgcttccatgggagcttgggagctgctggatctctgcaactgaccatgagccagacacaaatttattagcactatgccttgtcagcttatcctgttattctttggttctttttgtgtctgtaggttttgacatcaacgttcttcgcgaggaag

SEQ ID NO: 50960 - DNA, 263 bp, Setaria italica
  Peptide Sequence Number=SeqID_116934
ttagtttctaactaattaactaaattgttcgttgtcgtatttctatttggttgtcgttgtctactaaaacctaccgtctagtttttgtctattaattacagaatacatgtctggaggaagcctgtatgactttgtgcacaagcatcataatgtcctaaacctcacaactctcttgaagttcgcagttgatgtatgccgagggatgtgctacttgcatgaaaggggcatcatccatagagatttaaagactgccaaccttttaa

SEQ ID NO: 50961 - DNA, 253 bp, Setaria italica
  Peptide Sequence Number=SeqID_116935
agtgctctttcacactgttaaaatagggttaatgagtggcaaggtagcactaactgcagccatgttttcttccctggacttatgttttgaaacagcaactcctggtaatatgacttgtattgtgaaacgaagggagtatctgtacttctcaaatttccctccaatgatgcttacttcataattttatgatcaggatactgatggcttgcacaaagcactggaagcatccattttaagaaatgagggttcatgg

SEQ ID NO: 50962 - DNA, 204 bp, Setaria italica
  Peptide Sequence Number=SeqID_116936
ttacgtttactttaagtactaagtaaagtactaaaggtatcctgacaggcgcccgcgttctatgtccgtttcttgagggcaggacacagaatatactcacattcatgagattgttttctccacaattgacaagcctaagctacttagtcagctgtctgcgttgctatctgacattggactgaacatcagagaagcacatgtttc

SEQ ID NO: 50963 - DNA, 446 bp, Setaria italica
  Peptide Sequence Number=SeqID_116937
atgtttgagtaataatttactgcctctctgtgctgtgccgattggttccttattacaggttgtggaaaagaaccttctaccaccagtggacctatcattcccctgaaacggactttacaagaatagtggtcgagacagagatgtgctatttctgtggggatggccgcacgacgcttggaaatattgatcctgatacaatagtcttctgtaaccagtgtgagagaccatgccatatcagatgttacaacgatcgaattggaaaaaagaaggtttgtgaacatttatttcatttacatttgcaaaaggaaagtttgccattgtgaaaagtactgctgaatggttaaattaaacatttcaggtgcccctggaaatattgaaagaatatacgcgattttgcttcctgtgctagacgaaaaaatagtacgaattagacttacgtagaacca

SEQ ID NO: 50964 - DNA, 348 bp, Setaria italica
  Peptide Sequence Number=SeqID_116938
ctgaagaaatattaatttgatttccagatggtaaaccccaatggactccttccaagagtcgttccacatacaccaaggatagtaaacattcactgccacatgattcggttgatacatcttgttttgggtcatctgtgcattatggtggtcgagattatttctacggcagctctacaaccaagcaagggacagaatcctccactaatgtaagaaatactatacccaggaaatagaattattgtaatttgtagttacttcacagtttttatatcattgtgaattactctgcacgcctgcaaggctttgaatttaatgtgtgtgtttcttttccagttacaaggtcggtac

SEQ ID NO: 50965 - DNA, 366 bp, Setaria italica
  misc_feature (231)..(231): n is a, c, g, or t
  Peptide Sequence Number=SeqID_116939
tccgttcttttgtcaaagatagaaatgctattttgtcaacagttctcatatgagaagcaatgtttgattacaatttcaaagatctggatgcatgattccctgcctgttgttatgcggtgttttgatgaatatttattcatgtacaacattgtcgcagcttgttattaatagttttgtcaacttctctcaccagtctattggattctgtatggcaggaactaaaaggggganacagtgaagttcgatttccttgactattggtagtgtcatcagttacctgcatcatagtggacccgctttcgtccaatggtggtgccaatatttagaagcgtcaccacacctgggcagatgtagtgtgtgtctttc

SEQ ID NO: 50966 - DNA, 467 bp, Setaria italica
  Peptide Sequence Number=SeqID_116940
catatctgcatccaggaggatgttgctggctttgagatcacggtgaacaacacgtagccttgagtcccggtggagatatagaagccctctagcaatgccttcaattatatcaaaccgtttactccaatctagaagctcttgcttttcaggattgaacaggaatgcatctagacttttgttaggcatgtactcgtacaccaggatcttctcttctctctgtatgcagcatcctagtagtcttacaagattacggtgctgcaactttgcaataagtatgacctcattcttgaattcttcaaggccttgacctgaattcctacagagcctcttcacagctacttcttctcccccaggtaaatgttcccatatagacaggaaccaaaatcctccttctccaaagcttgttggaagtcaactaaaaaattaacaatagtaagacaagactttacaatagacggtaccaagga

SEQ ID NO: 50967 - DNA, 275 bp, Setaria italica
  Peptide Sequence Number=SeqID_116941
tccaattagaatttgagtcaccgtataacagcaccatgggggaggggggagggagaaaagctaatctacaccaaatggcatattatcgacagcagaaaaggtgaaaaaacagaggtgtcatttgacttcagtatttgttgctattctatcttccatgcagctgtgtcattgacacagagccactccattggcacgtgtgtcaatgacacagctgcatggaagatagaatagcaacaaatacagaggtgttctattgtactttctagttattttgt

SEQ ID NO: 50968 - DNA, 448 bp, Setaria italica
  Peptide Sequence Number=SeqID_116942
atatctgcatccaggaggatgtttgctggctttgagatcacggtgaacaacacgtagccttgagtcccggtggagatatagaagccctctagcaatgccttcaattatatcaaaccgtttactacaatctagaagctcttgcttttcaggattgaacaggaatgcatctagacttttgttaggcatgtactcgtacaccaggatcttctcttctctctgtatgcagcatcctagtagtcttacaagattacggtgctgcaactttgcaataagtatgacctcattcttgaattcttcaaggccttgacctgaattcctacagagcctcttcacagctacttcttctcccccaggtaatgttcccatatagacaggaccaaatcctccttctccaaagcttgttggaagtacaactaaaaattaacaatagtaagacaagactttacaa

SEQ ID NO: 50969 - DNA, 220 bp, Setaria italica
  misc_feature (10)..(10): n is a, c, g, or t
  Peptide Sequence Number=SeqID_116943
gaagaagaanaggggaatggaatggatcatgctgctgcgtgcctgctgcatagacaacaagcaaagcaaagtatgtggaagctcacccacccaccaccgtacctaccaatcagttagcagcggcgacgacggggaggagggcggccagcggcgaagacggccggagaggaggcgcacgacacgggaaggggaggcagctgaggtgaggcggcgttgcgtt

SEQ ID NO: 50970 - DNA, 190 bp, Setaria italica
  Peptide Sequence Number=SeqID_116944
atgaaaacactgactaccacattgctcatcaggttcatcaatcatgatgtacaccagatcaaatcttagaaagaatagcgtgggggcaatgccacattgtacttaagtggtttagacttgtcataaccgccctcctgtacaatgtggcattgccccccagctattctttcaagatttcatcaggttcatc

SEQ ID NO: 50971 - DNA, 243 bp, Setaria italica
  misc_feature (21)..(21): n is a, c, g, or t
  Peptide Sequence Number=SeqID_116945
ggttattggtagagctgggtntaccataaagagtataaggcaagagagtggtgcaaggatagatgttgatgatgcaaagaatgacaaggaggaaagtataatcaacattacatccactgaggttagaccaaacctcctcagtcctcccttaggccaccgatgatgttaagtctgcagctgtggaagctgttttacttcttcaagcaaagatcaatgattatgaggaagatagaatgagtctac

SEQ ID NO: 50972 - DNA, 396 bp, Setaria italica
  Peptide Sequence Number=SeqID_116946
taggtagacgaagaaaattaagcggcgatgggaacttcaggcttgggaacctgggcttgtatgcctgaacaattccgacattttcatgatctttcaccgaaagggagccacaagtgatgagctgcatcaatacattagtcggcttcagcgttgccgatttcggtactgcgtgagtttttaaagttgattgcatggaagaaaggtttttcccaggctcatggggacattgctactgctcagagggctcggatcgagctttgtttggagaatcactcaggatcagcttcggctgataatacagagagcactttggccaagagtaacattcatcatgatagagcccacagttcagtagagtttgccctgacatttgtacttgaccatgctctcattcct

SEQ ID NO: 50973 - DNA, 323 bp, Setaria italica
  Peptide Sequence Number=SeqID_116947
caggattgaagctgtcggtctaatgagcttgtggttcagttatggcaccatgccgatggtacacattgttgttgaatgggagattgctaagggtggttgcacaatgcatgtttctccggatcagctttggccacacacaaagtttctggaggatttcgtgaatggtggggaggtagcatccttcttggattgcattcgacttacagcaggaccattacttgcccttggaggtgcaattcgtcctgcaaggatgcctgtaactgtttcatctaggaataattaagactacttaattagtacctaaaaacttaaggttaccttaa

SEQ ID NO: 50974 - DNA, 226 bp, Setaria italica
  Peptide Sequence Number=SeqID_116948
cgcaagattttctctgttgacatacgctgctttagtggggatcaggtgtggctgcagccagcaacccctccaaagggtggaccttcagttggtggatccttaccttgcccacaatttcgacctttcataatggagcatgttgctcagggtctaaatgcttttgaatccaattatatgagtgctaggcatagtggtgcacaattgaaagccaatgtcaatacagctt

SEQ ID NO: 50975 - DNA, 126 bp, Setaria italica
  Peptide Sequence Number=SeqID_116949
aacatgccaccatgataggcatctaacctatcaataatttgatcatttgcttttcgaaaggacgcagttcaggatggggatgcaccaagtgttgaggcagttgaatagttgtgatcatcatattac

SEQ ID NO: 50976 - DNA, 390 bp, Setaria italica
  Peptide Sequence Number=SeqID_116950
gaaccgctagttcagtaaagcttcagtatattgtgtcagaataatctctagtgcccagccatccactacaaagctaactccttaggctctgatgatgttatccgcatggtaagaagaactctttccaagcttctagcaacttcatctcgagttctcccattgatatgcaagagctgccctttaggttctgaagaaatcaagttgcacaaaagagcaatttgaatggcagtgctttgtttatcgccagttaacatccagaagttgattcctgactgcctcagtatttcaatagtttctggtaccccatcctggagcgatcttctattgcgctgacacctagaatctccaggctatgttctaatctttgacaaacctcagcaactttccact

SEQ ID NO: 50977 - DNA, 250 bp, Setaria italica
  Peptide Sequence Number=SeqID_116951
gccacgtgtcaaaatcaaagctcatctattctatctctctatttctctcctacctccaaaagcaaggatgtaagaaacagaccaattcacaggaatccagtttagcttaattgccaactcttgggccttcagaacaaaatatttgtaagcatcctttgtggtcatgttgcgctcattaagccactgccttacatgaggtgttgcattccagcaccctgtatatacttcatcaccacccaagtgaaacacg

SEQ ID NO: 50978 - DNA, 268 bp, Setaria italica
  Peptide Sequence Number=SeqID_116952
acggaaacttaggacaaatagaagagagagcaagatccgtgaccccagggcaagaggtaatgctctctcttctattgccaagttctgcccaagcttgaagcagctttacctcaggaagtgtggatatgtgtcggatgctggccttacggcttttcacagaatcagcaaaggtgtttgagaacttgcagcttgaggaatgcaacagggttactcttgtcggtattctttctttcctccgcaactgcagccagaagttcagggctctctc

SEQ ID NO: 50979 - DNA, 212 bp, Setaria italica
  Peptide Sequence Number=SeqID_116953
ccattatagtcataaggttttttaggttgccgtagtgtccaagtccttttccattttactgcttcctggttatgaagttgcaggcgctagcgatccattggcagctctggagtgtcacaaatcacaaattaactcaacccatcactcatgctggtggaggacatcaagactcaacatactcaaactcgacaaccaaacacactgcacagtcc

SEQ ID NO: 50980 - DNA, 314 bp, Setaria italica
  misc_feature (246)..(246): n is a, c, g, or t
  misc_feature (281)..(281): n is a, c, g, or t
  Peptide Sequence Number=SeqID_116954
tcttgtagtctaaatttggtctagtcttgtcggttcttcgtacggtcgccaatgctccccaccatgctcttctttggacgctgccggtgcgggagggcgatcggcaggttgaactggaacaaggagaacggcgtgctgtcatcatctttctgtttttgcttggtggcgttgtcttctgcacagccgttctcagccaccggcactgcctggtttaatttaggaaggagaggatggctctgctgcctntctggattcatcatcatcggcactccgcttctacntagcggggcgtggtggcactggcacagcatgga

SEQ ID NO: 50981 - DNA, 316 bp, Setaria italica
  misc_feature (92)..(92): n is a, c, g, or t
  misc_feature (95)..(95): n is a, c, g, or t
  Peptide Sequence Number=SeqID_116955
tccttaaaagagacgatctagtttcttcacccagtgctgaccaaaaatccaccagagtatcacaagaaaggcgtgcagtgtgcaaagcacanggngtcgtcgtgttccatgccccctgccatagttaggtatcactgggctaatccatcctctgccaccaccaccacatgcatcagggtaaagcatttcacgttcacgttcccttgcacgtgcgttgtcaaatcctagtcaaaacaatgttgagtgcatcagaatgagaactctagaatggtgtcaaggaacaacatcaaagaaggaatgccacagaaagatgcca

SEQ ID NO: 50982 - DNA, 295 bp, Setaria italica
  Peptide Sequence Number=SeqID_116956
agggtcattgctgtctctatccattgcatcatcttcattcctcttcctctgcttcttcagcatgctcaaagaaacttctaatactttcacctttggtaattgtcacaaatccatcccccacaatcagcctgcggtgaacacatgattggcccttcaaggcatgagccttcacacagaactctgtacagcgcccatccagtctacatgctctcagtgtaacaaaatagtcttcaaactagaatcaaagaatacgaaggacctttttactagtaggaacttagacccaattacaata

SEQ ID NO: 50983 - DNA, 138 bp, Setaria italica
  Peptide Sequence Number=SeqID_116957
tccttggttcacagggaccttcttgatgcagtgacttaccatacatgactatttgtgtgaaactttccaaaagcagcccattgcaccttgaacagtacaagttcttgcgagcatgctcgatgagggtctgtttatcaa

SEQ ID NO: 50984 - DNA, 343 bp, Setaria italica
  Peptide Sequence Number=SeqID_116958
taatgtagatgataaaattacatcctcacaccctgtattgttttcttgcttttcctttgtcgatttccttgattcagtcctagaaacttccgcatatgtttggtttatgagctggcatccaagattggagatgcaatcccatattgtgcaaaagcgatttcactatgcaagtcacgcatacagtctctgaaaaattccaaggatgcttctttggctggtaaagatggtgaatctgctgctgaagggggctcagaaaaatcagctcctgaagctgagatagagcagcttactggcatattgactgaacttgagaagaagcttgaagacctggagcaagccatgt

SEQ ID NO: 50985 - DNA, 248 bp, Setaria italica
  Peptide Sequence Number=SeqID_116959
cttctgggaaagttggtgctgaagaaggtgaaagctcaaatggcaaagatcacggggatggaaatggtgaaatcgagaaggatgacgatgatgacgacgataacgatgatgagaagatgggagatgaagaagattctgatttggatctttcaccttcttcagcaccaacttttcccagaagacacagcatcctcagcattgctaccagaggcctttgagcattcactatcagctttagcagttgtact

SEQ ID NO: 50986 - DNA, 185 bp, Setaria italica
  Peptide Sequence Number=SeqID_116960
tgggttactttaaagtctaattgtactaagtaactttctaactaattaacgttgtattggtctattaaaccacaagtaccctcccgagtgggtaagctaatcttcattccctgcttgcagaggtgaactgattcacagaacttttcagggttaaccattgaaacctccaagaagaaaaggggtac

SEQ ID NO: 50987 - DNA, 293 bp, Setaria italica
  Peptide Sequence Number=SeqID_116961
tagtaacaaggtacggaatagaactaattaggaactcttcttctctagtgctgaaactgtattgattcacatcgtcttcacagagtggcagatagaggtatgctctccattgatgcttgcgtgcctgttctgcatgcatgtatcgcagagcagacatcgttcgtctcgaggaacttctggcccttgaccagaatcagcggggtatacttgaggaccagccgcttgcactgctgttcatagttctgcgccttgctgcatgttttgaggagtaggtcgataacctcaagctgcgt

SEQ ID NO: 50988 - DNA, 349 bp, Setaria italica
  misc_feature (289)..(289): n is a, c, g, or t
  misc_feature (330)..(330): n is a, c, g, or t
  Peptide Sequence Number=SeqID_116962
ttacttaaaacttaaatttaagttattgttattactatttacttattattaattaattcttctttactacctttcttctaattcctaatgctgaagatggctgcaggcgctcagtttatagtttacagaacagtggataaggctccaaatttacactaatgatttcagcacgtcgaatttttaaccaatcaatacagtttcagcactagagaagaagagttccaatagtcatccgacctgacattcatcttttctctccaatttgatttcctaggcagataagccttanactgattcacatcgtcttaacagagtggcagatagaggtangctctccattgatgcttgc

SEQ ID NO: 50989 - DNA, 164 bp, Setaria italica
  Peptide Sequence Number=SeqID_116963
gacacaacttcccacctggctgcagttagccctggtcccttggccaagatattaaaatctctgctctcagcaacctcgtttgttaaggctatagctagtgcaagcacaaacgctagcctcgtcgttggacacagcgtacctgacctggttgacttgggcttctc

SEQ ID NO: 50990 - DNA, 270 bp, Setaria italica
  Peptide Sequence Number=SeqID_116964
gcgccttcctcggttcttcggtcgggcttgggagatgtcggacgaggagcaccatttcgagtcgaaggccgacgccggcgcctccaagacctacccgcagcaggccggcaccattcgcaagaacggctacatcgtcatcaagggccgcccctgcaaggtacagatccctgtttcccgcctcagcctatttcgttagattcagtggattttggcgatgtccccttacgagcggtgtgctgagctgtctagcctttagtagaccgtaacgcg

SEQ ID NO: 50991 - DNA, 329 bp, Setaria italica
  Peptide Sequence Number=SeqID_116965
gagatgtcggacgaggagcaccatttcgagtcgaaggccgacgccggcgcctccaagacctacccgcagcaggccggcaccattcgcaagaacggctacatcgtcatcaagggccgcccctgcaaggttgttgaggtctccacttccaagacagggaagcacggtcacgcaaaatgccactttgtggccattgacattttcaatggaaagaagcttgaggatattgtgccctcctcccataactgtgatgtgccccacgttaaccgtactgactaccagctggtagtcagtacggttaacgtggggcacatcagctggtagtcagtacg

SEQ ID NO: 50992 - DNA, 312 bp, Setaria italica
  Peptide Sequence Number=SeqID_116966
ccaaacgaactaagaaaacaaataaataaaataagtagttactaataataacaaaacttaacaatccatcacgctgtccgaatgagcaaatatagacctgtggcagtccccaaaatccataccccaaatctttaaatttttgtctgcagagccagtaactatcaaagccccatcagatgatatgtccatacagagaactggaagtttgtgcccataaaggtttagaaaatgtttcagtgtgtccatgtgaagaccttgacattgcaatccaagagagcaacagcaatatgctttccttgtggactgatggag

SEQ ID NO: 50993 - DNA, 302 bp, Setaria italica
  Peptide Sequence Number=SeqID_116967
gaatgcccttgcattatgacattaggttgaaatctagctgccctcccattattttgctcttccagtttatgctgattaaggcgttttacttcttcctcagcagtgtcaagggcatccataattgcatcagcagaagtaactgtctcttttgttttcctaccaggaacacccacagaaccttcatcaggagcatcatctttctgcccgtatctatactcattatcaattagtactaaaatacaagacctaacaaaaaggtttaacttaaccaaaataacttttaactaaccttaactaactaa

SEQ ID NO: 50994 - DNA, 273 bp, Setaria italica
  Peptide Sequence Number=SeqID_116968
ccaaatttatcagcatcccagtacttcacagtgcgatcttttcccacgctgaacatataatgtgttctatatacaaacttaacatccatcacgctgcaaagtgaagacaaaccaaaaaaaataataaaaaaggttctgcctataataataaataaaaaactgaaagtcaataacatacctgtccgaatgagcaaatatagacctgtggcagtccccaaaatccataccccaaatcttttaaatttttgtctgcagagccagtaactatcaaag

SEQ ID NO: 50995 - DNA, 402 bp, Setaria italica
  Peptide Sequence Number=SeqID_116969
tgtagtcagtggtaacttaatttgtcacttattcatccctaaaaatgatagttcaatctgaaatcaagtttacacctttgtttgaatgcatatgagattaatgagcacaatgtaggattgttattggccctcatatattttctgtttgtgttcattgccagagtaatgtaactgctatttttagtctccttctattatcttctgtgtgttgaatatttagtttaattgttatcacttacaaatgcagatccctgttatgctgcatttcatgatgaagagtggggagttcctgtacatgatgacaagaagttgtttgagttgctagtgctgtcaggtgcattagctgaactaacatggccagcgattctgaacaagagagccatattcagggaagtttcatgg

SEQ ID NO: 50996 - DNA, 282 bp, Setaria italica
  Peptide Sequence Number=SeqID_116970
tgcacctggaagtcccagcagttcactgttatctgaacagaaactgcgtggtgttattgaaaatgcacgccaaatactcaagattgtagaggaatttggatcatttgataaatactgttggagcttcgtgaaccacaaacctatattgagccgattcaggtaccctcgtcaagtgcctgtcaaaacatcaaaagcagatgccataattttcttctcacttaattttgagaccaatactgggtcaaaatccatgaaaacttccctgaatatggctctcttgtt

SEQ ID NO: 50997 - DNA, 336 bp, Setaria italica
  Peptide Sequence Number=SeqID_116971
gcagcgtgttgatatctcggtgatggagaccacgccaggggcaattgcccactcccagcgcccatctctatgttttgcaagcccatatgcacttgatagaggcacactattggcatcccttccaccgcaaagcaaaaggaggccatcagaacgggcacttgcagttgcatacatgcacggtggtggcccttcaccttccggctcaagttttctccattcatatggcttagctgcagtatcaagggcccatacatctgccagggggcgcttttccgttctatttgtcctacctaatttgttctaattaagtaattcgtcttgcccaaaccaaggcca

SEQ ID NO: 50998 - DNA, 309 bp, Setaria italica
  Peptide Sequence Number=SeqID_116972
tagtaagtacgaaggccagagaagattcaccagtcaccaccgacagcgcttggtttcgctccctgaacggttttcctttcgccgatgttttggttagcatgtgctttcaacacaggccacctgcctgtgtgcaagactggatggatatatagcctcgagccactagggagactagaaatgggttgttcagaatatggccaggctgctatatccaggcaagggagcctcggtcattattgggcgcttgagggcggcccctggttggcgttggcggtctgttggcattcaactcctgcatccatgtgtcct

SEQ ID NO: 50999 - DNA, 295 bp, Setaria italica
  Peptide Sequence Number=SeqID_116973
ccgaacacaagtagcagtgcatatagaaattcatctgaagatcctcagaggcttcacttgtatatactcagctgggtggatagggcgcggcggtgtatggtcaaatgaaatggagagcgctgtccaagatcaagctcccttctaccagcttatagtccgctcagctccctgtacataatctttcggtatggctttggaccagcctctctcccgaacacaagtgaaaacagcaagatcctgctgagggcttcatatggatcataccaaccaatgtgtggcgaatctactatatcca

SEQ ID NO: 51000 - DNA, 252 bp, Setaria italica
  Peptide Sequence Number=SeqID_116974
taactctataatgattctaagtttataatcataaataatataatataagataaatgaatggtcaaactgttatttggaagaccgtgccaagtcatgccatgccttataaatatagatggagggagtacctcaacaatcactactatgtgaacatatattatattaatgacaaggtgaaagtacctttttaggaacactattaatagacatctgtctatctagtagcttccttgcggcagttgcattctccgg

SEQ ID NO: 51001 - DNA, 228 bp, Setaria italica
  Peptide Sequence Number=SeqID_116975
gcgtgttgatatctcggtgatggagacacgccaggggcaattgcccactcccagcgcccatctctatgttttgcaagcccatatgcgacttgatagaggcacacgtattggcatcccttccaccgcaaagcaaaaggaggccaatagtgtgcctctatcaagtgcatatgggcttgcaaaacagcagcgtgttgatatctcggtgatggagacacgccaggggcaatt

SEQ ID NO: 51002 - DNA, 225 bp, Setaria italica
  Peptide Sequence Number=SeqID_116976
gtctggagacgatcactcttcttcttgcactgaaggttgaatatcctcacaagagataatcaatgtacgcaatgtctccagctgttgaaggagcaccgtactcatcaaataagcgcatgagatcaccaaattgaccgtgcagatcaccaaatatcttaatgggagctttaagctgtaggacacttggttcacttgaaaatattctttcagcgctatcgcatagat

SEQ ID NO: 51003 - DNA, 231 bp, Setaria italica
  misc_feature (192)..(192): n is a, c, g, or t
  Peptide Sequence Number=SeqID_116977
aacaaattaacgaactaactaatagacaactactaattacggaaacccaaaacaagaagcaattgatatctgctgcttcatgattccctcgaattaaatgtacattgtgaggatattcaaccttcagtgcaagaagaagagtgatcgtctccagactatgctgaccacggtccacataatctcctaaaaagngataatcaatgtacgcaatgtctccagctgttgaaggag

SEQ ID NO: 51004 - DNA, 245 bp, Setaria italica
  Peptide Sequence Number=SeqID_116978
cagcagcagcaagatcctcagccacaagaagatcatcgagaagtacaacctccccgtaaacccccccataaaatgaatattagatcattaacagcagctgctgcgtgcctgcaccgtcgtgtaagctcaacagcagcatcaccgcctgccgcatctgcactatatcttcctgttctgggagttgtaacaactgactttgttgttcgtctacctagtacttcctagtcttagttcttagtttgtta

SEQ ID NO: 51005 - DNA, 231 bp, Setaria italica
  Peptide Sequence Number=SeqID_116979
gaactaagattgcacctgcgttgtttgccgttcctgtacgcataccatgctaaataactgaacaatccaggtgcaccagaagaccagaaatgggtcagacatctgaaagcgtatccataccgcagtaatttgtagctgagaaaagagtgatcaggtgaccttgagcgaaacgctcaaagccatccatcacacactcatgtgctcgcacgatcaactgcaggtcatttgttg

SEQ ID NO: 51006 - DNA, 256 bp, Setaria italica
  Peptide Sequence Number=SeqID_116980
aactccataacacgatcaggcccaaatgtaacaagaccagggccccgggcattgggtctcagcccttcaacactgtcgttctctgttggatcagaccatagaagatccataaggacaaccgagccagcttccatcgtaattggcctttgaagattctcaatctgctcaacatggttgattgaccgaccaatgccaccatgcatacagatttatttttctttttcttattaagtcgtctagtccaaaggaagccaat

SEQ ID NO: 51007 - DNA, 164 bp, Setaria italica
  Peptide Sequence Number=SeqID_116981
ggctgagacccaatgcccggggccctgggtctcagcccttcaacactgtcgttctctgttggatcagaccatagaagatccataaggacaaccgagccagcttccatggtctgatccaacagagaacgacagtgttgaaggtcattgttgttgcagaactccat

SEQ ID NO: 51008 - DNA, 156 bp, Setaria italica
  Peptide Sequence Number=SeqID_116982
tggggacatgtatactgatattagtcccgagaatgctattatccaggaggtggtgttgaattgttcaaaagggcgggatctggttttatgaggcttgaagtttgcttgccacttgatgcagcatctggagactgctccctgtcaggtgaatgttcc

SEQ ID NO: 51009 - DNA, 419 bp, Setaria italica
  Peptide Sequence Number=SeqID_116983
acatacagcacggagccacggagccacggagcctgagttcactcgtggaagctacatgctacttctccagacactttcgtcggaagtaaacggcgatattatacacccagataacctcaattttgtaacctaacaagctaaccactaagggcccttcagatagtccctatgcaggtggtgtgtttctggtttctatccacttccctccggattatccgttcaagccaccaaaggttgctttcaagacaaaggttttccatccaaatatcaacagcaatggaagcatctgcctcgatatcctcaaagagcagtggagcccagcattaactgtttccaaggtgctactttcaatctgttcactgttgacggatccaaacccagattgattccgctggttccagagtattagtcttctacta

SEQ ID NO: 51010 - DNA, 407 bp, Setaria italica
  Peptide Sequence Number=SeqID_116984
ccgatcgatcgattggtccgcgaacccgtcatattctgttcttgcttcttcatcttcatctatttatatggatttattgaattctgcgtgtatattttgccttgtttgggtttaaatcggcggctggggcgcagttcttgagtcgtcggcgatggcgtcgaagcggatcctgaaggagctcaaggacctgcagaaggatccccccacatcctgcagcgcaggtcctgtaggagaggatatgttccattggcaggcaaccatcatgggcccttcagatagtccctatgcaggtggtgtgtttctggtttctatccacttccctccggattatccgttcaagccaccaaaggttgctttcaagacaaaggttttccatccaaatatcaacagcaatggaagcatctgcc

SEQ ID NO: 51011 - DNA, 236 bp, Setaria italica
  Peptide Sequence Number=SeqID_116985
ccagttatattagacctacaggagcaggcagggaatccgttataacatactaatggacctatccctactatgctatgattctgggtattgtaatataactggctaacccattgcatacttctgggtccagctcctcgcagtggtctcgtacttgcttcggtccaccttgtacatgtgagctatctctggaaccagcggatcatctgggtttggatccgtcaacagtgaacagattg

SEQ ID NO: 51012 - DNA, 246 bp, Setaria italica
  Peptide Sequence Number=SeqID_116986
tcttggtcatgtggggaaccggagcatgattgcaatgcccaaactgctccagctgcctcctttcgttcttttaaagtcttcaagattaaagtcttgaggaaattcatcacctgaactgagtcatattgggtgcgaaaaccatcgcaatgtttcgggcgttcatcttgttgtggctttcatgctctacaacatcggccatcagattaattgcccaatcaagtagtgctgcttccactggtggtaaca

SEQ ID NO: 51013 - DNA, 215 bp, Setaria italica
  misc_feature (5)..(5): n is a, c, g, or t
  misc_feature (70)..(70): n is a, c, g, or t
  Peptide Sequence Number=SeqID_116987
gtagntaatagattatgggcagtagctacaattgatcaaaactgttgtttgattatcctactgtggtatntttttaatcaatcccttctctctcgatcatggatggaatatatcgtgctattctgaaagtatgtctgatgctgctaggttgtctttctaagtactaaaggttttcctattcctaaattattcttaacttagttcttaattgttaa

SEQ ID NO: 51014 - DNA, 250 bp, Setaria italica
  Peptide Sequence Number=SeqID_116988
tacatgatgaccactgtttaagttctgattagtatttttataaggagactaatgtatgattcagatttttcagtagtccactaattcctagtgtccatagaaatactgatgatgttgtatctgtgaaatactactatttctatcatcctaactgttctattcttacagcttacttacatttacaaatttcaggttgaatctaccattgcagcaaaagttatgagtacggaagtcaatgtaaaaccatcta

SEQ ID NO: 51015 - DNA, 260 bp, Setaria italica
  Peptide Sequence Number=SeqID_116989
attctggaacaaaaattgagacatatataatctctttcaattttttgtttgaatctgagctaagatagaaaaggactaatttagactatcatcctgcagccaacttttaccacatggtgctagtatcatacggcttataacagagtacttcaaaatagcaaagttgcctactttgaggacaaaagcttatatcattttgcagctgttactaacctccatgggcgttggtaggtcattctttgtttcttgcatattccttt

SEQ ID NO: 51016 - DNA, 159 bp, Setaria italica
  Peptide Sequence Number=SeqID_116990
agtacggaagtacaagggtctaccgtcaacgatatctttactgcttgtgaccttttaagactccttgggttaacctttttgagttacagaccaatgaacacaatggtgtttgttatctctgacccagtgaaatcttttttgtagaaaaaaaaaaaaaaa

SEQ ID NO: 51017 - DNA, 414 bp, Setaria italica
  Peptide Sequence Number=SeqID_116991
attacaaacgctacgagacaatatgcaacacctagattgctgtcctcgtgctcacctctgtgccggctggaatgtcatagctggctaagtttgtgttctcatggacaaatcttggaggcactagtggaactggagaatgtctcctcagggtttcatggaatactgcattcaagtaaggcaaccgtgggaggtgatcctcagtaactatctcattactgcagacctcttggatttcctggtaaaggcgatcctgatgtgcaaaagatgtgtggttaacaattgtgaccaaaggagtatgagaacttgcatgtctttctggaaggtgaaaaacaagtttcggtacttgcctgtttttctgggtgctttgcaatctcaaacatagcccactcggtggtgaccagagtagtatcagca

SEQ ID NO: 51018 - DNA, 222 bp, Setaria italica
  Peptide Sequence Number=SeqID_116992
cgcctgcatgctgccagcacaggccctccttcctgcgccaaaggccatggtcttgtacatgtctgcagactcaaacctcccatccagaaaatctctctggcttccattcctcaggttcatcccagtctctcttattcatgttgcatccgaacaggttgatgatcatctagcatatttgtgaatatgttagaactcaactgtcagcagccaacattacaaacg

SEQ ID NO: 51019 - DNA, 426 bp, Setaria italica
  Peptide Sequence Number=SeqID_116993
cctatggtgaatactgctgcctccattcaggaacctttggcgaacctgtcctctgaccaagctcttgcacctgttcccactttgacagaggttgatgagtccgcattcctccagggcacctccaaagctgtggtgcctcctgtgacaggggatgctagtgttgatctccctgagtttgagccatatatgaatttcctgatggacagtccagatgagccagtcaacccaattttggactgtgatggatcccaggatgtgggtggcaacatggacctttggagctttgatgacatgcccatgcctggtggtggcttcttctgagtttgagcgcctgcagtagccagtcgcctgacatgagcgcttcattatctctggaatattattccgaagccctatgtacaagcaccagtcgctaggcctcaaact

SEQ ID NO: 51020 - DNA, 239 bp, Setaria italica
  Peptide Sequence Number=SeqID_116994
aaagagacgatctttatgactgcagatgcttaccgaagccctatgtacaagcaccagtcgctaggcctcaaactcagaagaagccaccaccaggcatgggcatgtcatcaaagctccaaaggtccatgttgccacccacatcctgggatccatcacagtccaaaattggatggacagtccagatgagccagtcaacccaattttggactgtgttgccacccacatcctgggatccatca

SEQ ID NO: 51021 - DNA, 225 bp, Setaria italica
  Peptide Sequence Number=SeqID_116995
cagactcaaaacatcagtctggatgaatggctcaggtatggagtggtcgacaacagggaggtgatatacagttgagttggtcatgttgttgacaatcagcttctttgagtgcccgccttggctactttcacagacgtaaggctcagcaaggcgcttctcagaagaagctgattgtcaacaacagggaggtgatatacagttgagttggtcatgttgttgacaatc

SEQ ID NO: 51022 - DNA, 357 bp, Setaria italica
  Peptide Sequence Number=SeqID_116996
agaagtaatagaccaaatgttggaagccttccattgtcttggaggacgaggtagaagattgtacaccaaccaccgactttagccccacccaaagttcttcatcatggtagttactaccaatatcgaatagatactcgtcgttctgtgttttgtcagcttctttgtcttccaatagctcaccaacatactcacatatgaaactgccctattgtggcatgttggcgggcacctgcacgatgggccacactcgtatatgagaggcctggcctcgatgattgcaccatcggaattgaacgggatttcccctccattcttcactgcacaagcacatttaatagagtccgtgcagccgttttg

SEQ ID NO: 51023 - DNA, 348 bp, Setaria italica
  Peptide Sequence Number=SeqID_116997
ttgttcttaacttaaacccttttagggttaaggttttcttttttctattacctagtctttggtattattattgtacttttagttggttgttattttaaattggttgtcttggtcctttgttgttctattctaatttagttagtttgatgacacttatgggcatcctctcgcttccttgggatatatcaggcaaacaaagaccttcacgaactttggacttccttgtcgccttgactgcatgtagggctaattctggttgcccagcaatcctatgtaacttgtacttgaagaccatctcgcctttcagaccttcttgccagcattccatcacctcgtacaacccatcat

SEQ ID NO: 51024 - DNA, 255 bp, Setaria italica
  Peptide Sequence Number=SeqID_116998
gtttcccctgctcatccgggccggggcgaatggtcacgagaggctgccctgcttcgtcacgccattgcgacgtccacgaggaggagatacgcgtagcaggccgcctgttcttggcagttgccagtttggtgcgctttgatgctgctaaaaaggtctgcaggacagaaggccagtgttatgtgtgaagggtaggttctcgccgagcaatggatcttgagttcgggaggggcctgagatcccaaagagggactctta

SEQ ID NO: 51025 - DNA, 270 bp, Setaria italica
  Peptide Sequence Number=SeqID_116999
cccaagctctgacgtcgtgattcgcgtgagggtttctgtggaagcacggaggtcccttccacgttctgtattgtgcgtcgcccaaccattgacgctatgtataacttatggaggcgtacacgccccgtcccacttcctcgccgcgagctgctcggcgaacttgaaggcctccgccgccgtctcggccgcggaggggtagacggcgtccacgatgcccatctccttgccctccgcggccctgaccttcttgccccggagcacgacgtcgcg

SEQ ID NO: 51026 - DNA, 428 bp, Setaria italica
  misc_feature (240)..(240): n is a, c, g, or t
  Peptide Sequence Number=SeqID_117000
gctcatttgttttctgcaataaaggaaaatggatatcagcttctatttctaagcgcacgtgctatttcacaagcccacattacaaggcagtttcttttcaacttaaagcaggatggaaaagcacttcctgatggccccgttgtcatatctccagatggtctctttccttcactttacagagaaggtgagcacatcctgacatattctcactattttctactcagttaattgccaatgagngaaaaaaattgcattcactacctctatttattaatctgggtccacatgagtaatcttggggtacaaccttttactaaaaacttggtagtgtgcggtagctttttccaaaccagttgtatctcaatacaaaatcaccactccttttggacccccttcaaacccactttagttgggaataccaggtctat

SEQ ID NO: 51027 - DNA, 338 bp, Setaria italica
  Peptide Sequence Number=SeqID_117001
attgtgacacagaaaaacaggaagaaggtgatttagatcttgcaaatgtattggaaaactgctctgattcattaaggcctgtgactagccctgtttctattcctacatgcaatctgcagtcagaagataatacaatggaggctaaatctctaccaaatctccgttctcacatacatgatcttgaaaggtctgatagttttcagctaagccgctcactacaaccaaatgctgaaaataatggggttgacccagtcaagagtacggattcttcttttcttgagcagaaatcagaaagttaactaggtagaattacaagaaagaaaaattaccaagaccca

SEQ ID NO: 51028 - DNA, 306 bp, Setaria italica
  Peptide Sequence Number=SeqID_117002
ccaatgttattggctagatgtggatgctcctgatataagctcctgcaagaacgaaactgtatatataggatcataatagatgactagcgatctgcagccgatgaggcagcagaagcaatgtagctgtttcttgtgactcccatctgttgttgtaggactgaacctccatgtaactgagaggtgtatactttactgaatggaggaatctgatcgagtgttgtttcccgtgcagtttcatttcatctttctattgcattattaaactgctcctgtacagattacatggcaccacaattacatcaaagt

SEQ ID NO: 51029 - DNA, 371 bp, Setaria italica
  Peptide Sequence Number=SeqID_117003
accaacgtacttacttacctacgaccaaagacctagaccgaacgaatgatgtcgtggcggagctcatggaccgcctcgtcgcattcttcactgctactggcgggaactgatcgaaggccacatctttcttgttggcaaggcatcatgtaaaacagtatctgggccacagcatagttatcatgtgcagtgcacacgacgaacaattgcagccaggaatgaggtccattttcgtcctgatatgatgtaactagcagttttgcggagtgttttttgggcttcgccgtgtgccgtggatacacggcaaacgtctcctgtgctcatggcaacattactgaatcaagtcaagtagtaaaaggaagtgaactttgctg

SEQ ID NO: 51030 - DNA, 238 bp, Setaria italica
  Peptide Sequence Number=SeqID_117004
aaccgcattgatttcagtcacgcttccgcttcaaatgttatatatggaagcttacgttcaacatgttagcaatgatgccactgtaaaacatctgcccacctccccctcgcgatctctagcggcgccactaggagctcacgtcgccgaagatatttttgacggcgccacgtccaactccccaccgccgtcaagcttgacgcttccgaatcaggtcgctagcatcaggatcaggttgctg

SEQ ID NO: 51031 - DNA, 322 bp, Setaria italica
  misc_feature (260)..(260): n is a, c, g, or t
  Peptide Sequence Number=SeqID_117005
actacgtacgaacaagaccaatacccctttacggacgaatagtaccaactgtaggcgctcaggcggaatcccactgcagcgccgtcttgatcttcttgattgtgcaggagatgaggttgttcacagtctctactgattccacagtgagcttggcggtcggctggctgttgacgaggatctggaaggcgacggtgagcaatgagccaccagtcttgtggtcagcaccggtactgggaccatcaggcaggatggcaaacccngacggcagcagagcaaacataggtggaatccccgcgttcatgacgagctgcattgccgggat

SEQ ID NO: 51032 - DNA, 188 bp, Setaria italica
  Peptide Sequence Number=SeqID_117006
gaacttgacctggcgcgggtcgaggccgagcctcctgctgagctcgccgcgctgcttctcgtccgggtgagggcactccttgaagagcgcctcgagctcctggatctgctgcggcgttgttggcggttggttattcgtctttctttgtcgtctttgtcgtcgggtttgttcctttggttctttcggta

SEQ ID NO: 51033 - DNA, 483 bp, Setaria italica
  Peptide Sequence Number=SeqID_117007
aacgggcttctgcagagccgaggagagcatgatggggtcgaccagcgtccggtgcgtgcacacgtagaggacgcccctgcgctgcttgccatcagccggcggagtgcggaggccggaggtgcggtagcggaggccgaagatggcggcggctaaaagctggatcttgaaagggaggacgatgccgatgttgatgcggatgacggagaggatgacgccgagcggcaggaagaggaagaaggcgagcatggcggcgggggtggggaggaaggcgaggcggccgtcgtggaagatgagcgccttcgggtgcttgtcccgcggtagcttggcgctctttgcgctctctctgctcacgacataaacttcctgcgagaaacgaaatcatagccggtcagtaagatattcctgtgagaaatgaaatggttcgatggaatgaaattcgggttggcatcttgccccacttaggttcatcgggaaaagtttatt

SEQ ID NO: 51034 - DNA, 392 bp, Setaria italica
  misc_feature (213)..(213): n is a, c, g, or t
  Peptide Sequence Number=SeqID_117008
agaccaaccccagcgatgttcttccactctcaggtggattgctccttccaagctgcaagctttctcaggaaatccatcacctcagctggatcccctcaaggagtagaaggcatcgctctccttgggtatagacgacaccaatattccaaagccacggttgcttgccttcagcacctatttgcaccaaaaagaaaattatgtattgtagaaacngtctagatgttttacaagttcctgtgagcaaattagacataataaggcataccttgaatgcatcttcatcagttctgtcatctccaacatagatagggagaacatcttcactctcattgagcccaagcgattcaaagtaaaaattccacagctttacctttgttccaatcaatcacagg

SEQ ID NO: 51035 - DNA, 135 bp, Setaria italica
  Peptide Sequence Number=SeqID_117009
cccttgcctaaggctaacccatggaagattacccttgcctaaggctaacccatggaagggtaatcttccaaaacagcagttacacgctggaaaccttttatagtcttcttctgccacattacggtaatgcacaga

SEQ ID NO: 51036 - DNA, 326 bp, Setaria italica
  Peptide Sequence Number=SeqID_117010
taggtaaaatttaggaaaggtcctaataaactaaaacttaaataagaacaaataactaataaatgaaagtgttacaggaccggaaatacgtgacaataaaaagtcgagttctgcaccctgaattccgtggtcgaatggtttcagcattccttttgcaccatttctccgaggttgctgattacagctttacagctaacatggagacagagctagacaatgtatctggtggttcaactgaatggaagggtcttctgaaagattactgggaacgatttcagtaaatattgtgcagatgctagtaaaactggatggcagaaaggtagaga

SEQ ID NO: 51037 - DNA, 505 bp, Setaria italica
  Peptide Sequence Number=SeqID_117011
tgttggttcgtttccttttgttatttggttaagtttgttaaagggttttgttttgtcttgttctattcctattcccgttttcagtgatgtaaactggtgggctattgtacctctccttgacatagttcatcagcttcctcatcccgctgggtacgatgtacagccatatcgaattggccctatctccaatcggcttcccgttcttgtcgaatggaaggctgatggttccagtgtcggccaaggtatcattcagcagtactccaatgatattggtatcgttatgcctcgtgtagaaagtggtgtagtggtttatgcccacaaagtccagagcccccttgacaagggcagcctcctctgccgtgaacttgggaagtctttctgcaacccgcgttctcatcgtcgccgggtaatcgccgaagaagaacggatccgcgaaccatcctaaactgaaactcttgtgccctcttggtagcttcaatgtcaattgtgcttattgtcatcggtt

SEQ ID NO: 51038 - DNA, 414 bp, Setaria italica
  Peptide Sequence Number=SeqID_117012
cttgtatacatgacttgatggcatggcctgaacaagaaatggcaatgggagacgcgaaacaatgtacatcaaggcatctatccctcagctggagctcagcagggtcttgaaccactgcaccgagctcttggggtatctcttgaggttgtccttgtagtccacgaagtagagcccgaatctcgaggagtacccggccgtccactcccagttgtccagcagcgaccacgcgaagtacccacgcacgtcgcatccgtcctccttttatggaggcagcaaggttggtgaggtagtcgttgtggtacttgatcctcttgctgtccttgagcgcgtccttgatggaggtgaaagggctgttgccgtcatccatcccattttcggttatgtagattggtgggctgttgtaccttccttgac

SEQ ID NO: 51039 - DNA, 247 bp, Setaria italica
  Peptide Sequence Number=SeqID_117013
ttggccctgtcaccaaatcgctttcccgttcctgaatgggaggctgatggttcccgtgtctgccaaagtgttatgtagcaggcgcccaatgatgttagtgctgttatgcctggtgtagtaagtggtgtagtggtttatgcccacaaagtccagcgctcccttcacaagggcagcctcatctgttgtgaacttggggagcctgtcaccaacccgtgatctcatcgaagctgggtaatcgccgaagaag

SEQ ID NO: 51040 - DNA, 178 bp, Setaria italica
  Peptide Sequence Number=SeqID_117014
cagcccagtggttcaaaacgttggtttgcctcagccctctgcacctgcaactgtcaccgacaacgcgaaggtccacaaggtcatgcctgctcctgtgagcagcttgcctgttgctcaggctccttcttgactggtgctgcattcggcaggagtaagttttggttattggttgtctttt

SEQ ID NO: 51041 - DNA, 175 bp, Setaria italica
  Peptide Sequence Number=SeqID_117015
accataccaaacttctcctgccgatgcagcaccagtcaagaaggagcctgagagccagccatggcttggactagggccgaatgccgcgaagtccaacctgagctagcgcaaaactcagtactctaatggcaagcatattcggaacgttatgcgaaggtttggtgaggttgccaat

SEQ ID NO: 51042 - DNA, 359 bp, Setaria italica
  misc_feature (309)..(309): n is a, c, g, or t
  Peptide Sequence Number=SeqID_117016
aagaagcttcaacaaaagctttgattgttcattgcctacgttctttgcatccatgccgggttgatgagcaggctcagcagcggagagagaggattcaagaactcgccgctgctgagcctgctcatcaacccggcatggatgcaaagaacgtaggcaatgaacaagaagctcaacaaaagcttgatgcggtgacaggcagtgttccaagacctaatcaagagaccttgaaacagttcgcagattcagacgctggaaacatcagtccagcaaatggccaggaagctgacgtgaacatggaagctgccatcnccaccgaggacgtcatgcgagctggcgggtttggaggagggctggccaat

SEQ ID NO: 51043 - DNA, 201 bp, Setaria italica
  misc_feature (36)..(36): n is a, c, g, or t
  misc_feature (124)..(124): n is a, c, g, or t
  Peptide Sequence Number=SeqID_117017
aggcaccatcacatcctggactgggctgaagggggngaaagctgatgatggtagcaaaccatcagatgtgccgcagcagttaccatgatatcttaccttgtaggctagtccagcttcagcttcngaaaacatttgctgatcacgtttatgtacgttatcctcatgatcacacagcactgatagtctgaaacagcagaatgc

SEQ ID NO: 51044 - DNA, 251 bp, Setaria italica
  Peptide Sequence Number=SeqID_117018
tctcttcgtcgtgcttcgtcttcctgcggttgtggttggagcgtccggagccctcgcagggtggtggctcgtagacgctcacggcgaaccctttctctgcggcgatctcctggagcaccatctgccggctctcgaggctcggctgcttggtcgacagcttctgcacgatctgttccgttccgacaagggaatcaaatttcgttagaggcatccaattttgattcgagtgtcgagtcagaaggttcgtcttc

SEQ ID NO: 51045 - DNA, 228 bp, Setaria italica
  Peptide Sequence Number=SeqID_117019
ccggggagaagaggacgaagccgccgccgtggaagaagagcacgacggggagcttgttgttgttgctggtggcgggggaggtcggcggcgggacggggcgtcggcggcgggtgtggcggcgtccgtgatgtcgcccatggcgattcctctgatcctctcggcttgctctgtgcgcgtgtgtttcttctgccttgtggtggtggcctggtggggactgcggtgcggctc

SEQ ID NO: 51046 - DNA, 225 bp, Setaria italica
  Peptide Sequence Number=SeqID_117020
aaaaggacacagggcacagcggggataagagcggagacggcgaatcgaggtcgccccttgcctaagtttggtgaatgggatgtgaacgacccagcttctgctgatggattcacagtgatattcaacaaagccagagatgagaagaagggtgggaatggacaagagaccgagtctccttcgaaggacaccaggaccgagagggtggaatcttatgccgccaagcca

SEQ ID NO: 51047 - DNA, 237 bp, Setaria italica
  Peptide Sequence Number=SeqID_117021
agccgccgatcagaaaaagggagaacatctatttctagctgacaaactgaacagtgcaagcgcaatgaagccacgtttcaatccaattccatcgcattatcctgaatgctgcttctgcatgaccaaatctccttcgaaggacaccaggaccgagagggtggaatcttatgccgccaagccaaactcgaagaaatggttttgctgcgtgacatccagccccacacaagcgggtggttg

SEQ ID NO: 51048 - DNA, 301 bp, Setaria italica
  misc_feature (113)..(113): n is a, c, g, or t
  Peptide Sequence Number=SeqID_117022
cgagacaagccgaagctaaaaaaaattcttcacagaaaaaccacacccaaagtcctgctaaacgagcccttatcacgctgtactagtaacaattatgcatatatgctagcccncccctaaccatgcgtcttaccagtcttttacacccttgacaacttacctgcttcttccgtgtcgctgcccagatcacgagttacgacagcaccgcccgtggcgagggcttggcaccggtgtcgaagagcgcctccatctcctcgagggttctccccttggtctccggcaggcacgcgtacacgaacac

SEQ ID NO: 51049 - DNA, 452 bp, Setaria italica
  misc_feature (1)..(57): n is a, c, g, or t
  Peptide Sequence Number=SeqID_117023
nnnnnnnnnnnnnnnnnnnnnnnnnnnnnnnnnnnnnnnnnnnnnnnnnnnnnnnnnaacctttaagtaatactaattggttaattgaatctttgttctctgtcctctgtgtgaccaatgtcatctgcctcgtagtcactttgcttgtgacctacttatacacaaacagactgaaatcggatcgtgaaaacaacatattgaaacatgtgggcatctaaacaatagtacaactttttatgcactgcactactaattcctggcgtcttaatcagaagcagaccatagtgagctcgttgccatctctgttagtgtattcgttcctgaagtttgcttgtgacctcgttgtactcactgccgcccgagcctgcttcttccgtgtcgctgcccagatcacgagttacgacagcaccgcccgtggcgagggcttggcaccggtgtcgaagagcgcctcc

SEQ ID NO: 51050 - DNA, 220 bp, Setaria italica
  Peptide Sequence Number=SeqID_117024
atgcacatacaactggttcagtccatttagatgcgaagctaaaaagcctcgactagagaaatacatatgaaaggcaacctacctgcaaaatccctcaaacagcaatgtagctgccactgaagcaaagtatcaacactctgaactagtaatcaataaaaactattaatccccaaaaactgagacacgcaacaggagataggcaaggcacacaggggatagg

SEQ ID NO: 51051 - DNA, 189 bp, Setaria italica
  Peptide Sequence Number=SeqID_117025
atgactattgggaagaaatgatgagtgccttcaattaggaatcaagctttagccttctttctgattagtgcatcaaatttggaatttgcaaaaaatgattggcaatcctaaagacacatgaacaggtgcatggatatcacctctcctgaacccatggataagtgaattatcatcagcactgtgcaccat

SEQ ID NO: 51052 - DNA, 258 bp, Setaria italica
  Peptide Sequence Number=SeqID_117026
cttttgtatgtgcacacttgacacttgaaaaggtatcagctcaattttcatcgatcaagttcgctattagttgtacaaaaatatttatgtatgctcatctgaaccgtctattcaaataatcattcagatacattccatctgcaaaggaatgcccattatacttacaacttcctgatggtgggctttcaaaactaatgcatttatatcccctatgtggggaggtgttcttatctggaacccaccatgagtcttctggga

SEQ ID NO: 51053 - DNA, 207 bp, Setaria italica
  Peptide Sequence Number=SeqID_117027
taaacctctaattggattatcgtgcttctaatttcctcttcttcctgcagggagttagatttactatatagacatcatgcatcttccaatctgttgtcatgtctcaccaccttggagtctctatctagtctggtccattctctcccaagaatgattgtcatggatgaaattggaagacaggtccgaccatctaccactcttgctaaa

SEQ ID NO: 51054 - DNA, 383 bp, Setaria italica
  Peptide Sequence Number=SeqID_117028
taagaacttaaagtaacaaaacttaaactaagaaataaacaaaaataacttagacctttagttttagaactacggctgagagcgtcagcggttcttttttctgcgtatccatcaacagcaagtacgcttctcaagattttatttcgcttgtgggcaagtggtgatcagagcttgtctctgtctgcatttcttatgatccgagaagtagcttcactgttacccgattgtttggatctctgcttaattaaagcctacaatacataccttgccagtaccaagcttgtgaacgacagaaatacaaagcatattgattttctgatgaactgtctggtagagctgtattctctggatgttcagaactcatgtgagagggcagtaacctc

SEQ ID NO: 51055 - DNA, 437 bp, Setaria italica
  Peptide Sequence Number=SeqID_117029
tttctactattgtattaaaattgtctttaagtcttgttgggtactttgtctaagtagtcttcttgaatggcccgcaggcagttaatggtgaggaacctgctgagtctggtagcgatgatgacaatgacaatgacaatgataatgatggcatggatgtagacatggcaccaacctcttcgaaaggatcaaggagtaaaaaaggcaggcaagggtcagagttcaagtagaccggcatcagatttctttgcagatttataggcgccaagctcccaaagcagaagctgctagttgttttgttactgtacgtgagtgcgagtgtgcaactttgactgccagtgcagttttggattttccaatgcagggcatgtcaaatgttgttttttaagtgtattggcgatgtaatgctagaggtagaagtagtaagctgtggtttatcg

SEQ ID NO: 51056 - DNA, 380 bp, Setaria italica
  Peptide Sequence Number=SeqID_117030
ttaggtctagttcttttctactattgtattaaaattgtctttagtattattcttctttattctattttgtagtaaagtctaagggtccttcctaattgggtattatttcttgtaattgttctagcgagtggcccttgctttctcaaatgataagagatatctaggcagtctttcacatgataaaatgcttaagctgtgggacttgcaagagctcttgaatggccgcaggcagttaatggtgaggaacctgctgagtctggtagcgatgatgacaatggacaatgacaatgataatgatggcatggatgtagacatggcaccaacctcttcgaaaggatcaaggagtaaaaaaggcaaggcaagggtcagagttcaagtag

SEQ ID NO: 51057 - DNA, 274 bp, Setaria italica
  Peptide Sequence Number=SeqID_117031
aagcgtcgcccctccgccttcccatcgatacaccgccgctgctccgtctccctgtccaggcgccgcctctccacctccgatttgcgacgacgcctccgcctcggccaccacctccgcatccaccacggtggctccatacgtcttcctcctcagcacgccatattgctcgagacgccctcggttcccgcccgcctctgtccccgcccgccaccacgatggaggttctccacgaggagatgcccttcgacctcgacttccacccgtccttcccccc

SEQ ID NO: 51058 - DNA, 310 bp, Setaria italica
  Peptide Sequence Number=SeqID_117032
tgttgtctagtaactaacttcctaattagtagttactattctagtaagtagggtctaatttgtaattgtattggtattttccttttgttttgtaaacttgtaattctatttaaaattattccttggtcttttgttgtagtttgatgatgttaatggcaaagtattgaccttttcagcccaggatagcacttacaaagtttttgatctaaagaactacaactttctgtattccatatgcgataagaacatccaggagaataaaaataagtcctggaatcatgctcgtgatatatcagaagacgaattgtca

SEQ ID NO: 51059 - DNA, 265 bp, Setaria italica
  Peptide Sequence Number=SeqID_117033
gaactatagaagtactaagcattgagattcttttatgccatagcccatagaacattgaaacatttaggataatgatgaaatcttataacagtgtcaaataattcttttaattaacgaatcatcaaaatatatgaagacaaagtatgcaaataaaacatagaaatcacttacaatggtctcattagttgtgaggaaactagcaaaccgtgtaggaacaaaacctggggctatacagttaacacgagtattgggtcccatctcacca

SEQ ID NO: 51060 - DNA, 245 bp, Setaria italica
  Peptide Sequence Number=SeqID_117034
accagcaagagcctttgtgagaccaaagagagcagtctttgtaacaccgtacattgtcaatccttgttctggattgtaaccagtaattgaagaaataataatcacagatgatccctttcgtagatggggagcagcttcctgaaaagaaattgatacatgaagcaaataatgccaaacattatttgtcgagagtgtaaagtaggaggaatttgcccaccttgtaagtaagtaaagtaattaagtaa

SEQ ID NO: 51061 - DNA, 462 bp, Setaria italica
  Peptide Sequence Number=SeqID_117035
ttagacttagttacaaagaaagaatgtatgacattcaggcaaagaaggtcaacaccctgatcaggcctgatgggaagaagaaggcttacgtgaagctgacaccggactacgatgctcttgatgtggccaacaaaatcggcaactccgatgggaactggaggagctgagcggtggggcccgcgtggccaagttatcttgtcgctactactgttaccagagttatccctatgtgtcgtctagtgtcttcgtcgtcgtctccgacctgtgttggtcttctgtttcctgttgttgcccatctgtgtttttgattcgcaagcttgttcgtcgtgtctgtcgtcagagctatcctcatctccaaacatcccatgaaccgggtgttgggattgggatgctgttatcctcgtgaaactttgttaccatccgtttttaagttaatcagatgaaaaaaaatggtagctgctt

SEQ ID NO: 51062 - DNA, 284 bp, Setaria italica
  misc_feature (223)..(284): n is a, c, g, or t
  Peptide Sequence Number=SeqID_117036
ttgggccgcagtggctctgttaccatgtcttgatgcacacttatgaattcggtatcgtccaagtgaccggttgagctaatttgagctttgcacttgcttgtactatcagttcctttatgagcagaccattaggttttcttgcatcaccagtggttttgtatgtcatattggatatgttgtttgcaactatgccttgctctgagctctgagcctagaaaaaccnnnnnnnnnnnnnnnnnnnnnnnnnnnnnnnnnnnnnnnnnnnnnnnnnnnnnnnnnnnnnn

SEQ ID NO: 51063 - DNA, 262 bp, Setaria italica
  Peptide Sequence Number=SeqID_117037
gaaattttgataccacttgatgtagcactggtccgatcttccgataggtatgggtaattcgattggtggagaacttgatgttgacgatccaggtttcaatcaaatacgatttgaacccctgcaaccactatagcgctactccgttggttatcaaccaagcacaactcgattgacctcaccaagaaggcttttcccttatcgtagtcacacagaatgatccacaatatttctggagctaggtccagaaccaaatagaaaagac

SEQ ID NO: 51064 - DNA, 279 bp, Setaria italica
  Peptide Sequence Number=SeqID_117038
agttacgggttacgtactaccttcaggactgcagaggatgcacaggctgcattggaggctttggatggagtggtatgttctgtcttgatctaggactatgctattcagtgcccattacattctttactcaatataggcaaatggcaactgatgcagattacagcacattaggtagctaatatatgaattttcagtgttaaacattactggacaatgcatagctgctaattgtactttgttcattgtggcatgtgaattgtgatttcattatcatgcttg

SEQ ID NO: 51065 - DNA, 380 bp, Setaria italica
  misc_feature (1)..(52): n is a, c, g, or t
  Peptide Sequence Number=SeqID_117039
nnnnnnnnnnnnnnnnnnnnnnnnnnnnnnnnnnnnnnnnnnnnnnnnnnnngttacacccaacagaatataacatgtgaattggatcattttacaggaagccaatggctacactgttgcactttagaacttaatttatatttagcataatacatcacaagaacaacggcagtatctaggtacctaacaccttctagtatctatagctgaaatgttgaatcctcactacagcattggtggtgtcaaaattttcgctcaaataggtacaacttggatttgaatggtggaatttggaaatcataactacggaccagggtttataagacgttgtaatgatttccaaattccaccattcaaataggtacaacttggatttgaat

SEQ ID NO: 51066 - DNA, 407 bp, Setaria italica
  Peptide Sequence Number=SeqID_117040
acgaagactcaaacgatgctttctccgaggccggaagggtcgacgacgcgcagataatctatgacaaggtcaccaaccggagccgcggcttcgccttcgtcaccatggccaccgccgaggaagccgccaaggccatccagatgtttgatggcgccgtaagttccacaccaattggaccagttcctgctcaatccacagaattggggtcttgcccatgccttcaatgtgtatgtgtactgacatgatcttggcatgtgtccggtgtcccaatgaagctgctgggagggaggacggcaagggtgaactacccagaggtgccgcggggcggggagagggagaacggttacaagtggatggccgcaggcgtgatgatggcacttacgaagattatgccggcaaccgtgggg

SEQ ID NO: 51067 - DNA, 487 bp, Setaria italica
  misc_feature (465)..(487): n is a, c, g, or t
  Peptide Sequence Number=SeqID_117041
tttttccctttttcttttagttttcgtttccttagggtccttcctccaccgccgaccgccaggcggcctgcacctgcctcaagagcatgaccggggggctcggcggaggcggcgccagcatgggcaacgccgccaacatcccaagcaagtgcggcgtcaacgtcggcgtacccatcagccccaacgtcgactgctccaatattaactgatcagaaggtggcagggcatcatatggatggatgtcggttatcagattcggagcagtgatcactcgtgtttactaccttccctttacaccatatatgcatctatacatctctgtcgtcgtcgtaccagctgctaggccagcaatacaatccttgccttgttcaatgggtttgctgggcctctgtttttcctgttgctgcatatgcttcgttataggcaggcagctctccgaatgaataaactctttgtaataacggnnnnnnnnnnnnnnnnnnnnnnn

SEQ ID NO: 51068 - DNA, 116 bp, Setaria italica
  Peptide Sequence Number=SeqID_117042
tattacttacctaaactaattctagtcttagtctttactactttctactgatcagatcagtagtcacacagtatacacttgtcgttgcgtgtgcaatggctcctcgcgttgccgtt

SEQ ID NO: 51069 - DNA, 400 bp, Setaria italica
  Peptide Sequence Number=SeqID_117043
catgccaccaatctgcttcagcatctgcggcggaaggaccttgctcatgtgctgaacattcatgttgcgggacagtgcactcatctctcctttctttgggatcttgagccccttcatcttgccccagattttagcaagccgcttgtactcttctagcatgtccatgacatccctgacaggccggccagaaccccgggcaatccgaataatccgtgactcggtcattagctttggatttgtgctgtcaagctctgagaagaaaatggttacatgaacacaacatctacaatattgacccagtaatttctgtatggaagtaatttctgtatggaacacaacatccacaacttaccagcatctgtcatggaatccatcatcgtcatgtaccgcttaatcttag

SEQ ID NO: 51070 - DNA, 263 bp, Setaria italica
  Peptide Sequence Number=SeqID_117044
gttttcttttgtttctttaaccgtttcgtttctttaagttagttcgtcctaccttcctttcgcatgaccatccatttttgtaataatcacagcaccaacagaaacactttgtttaaatgcttgtgcctgatcaaatgcagcctgaccaatactactgtccatcacaaatattaccaagtctggtttagttgcttctgaaacttgccgcatttcctcaaaaagtgctgcttcttgtttgtgccttccacttgtatctacaataa

SEQ ID NO: 51071 - DNA, 250 bp, Setaria italica
  Peptide Sequence Number=SeqID_117045
aagcgtcctcgtcgtcggatgcggcaactccggcatggagatcgcgctcgacctcgctgaaaacggcgctatcacctccatcgtcgtgcgcagcgaggtcagtcatcggatccgcctcactgattaggtcattaacatccatatgtgcaaaaaacaaaagagggagagaagtttttgcacggatttagatagaagaaggaattgggattcaaatatgctggagcggaataatttcggtaccacaaggaat

SEQ ID NO: 51072 - DNA, 256 bp, Setaria italica
  misc_feature (178)..(256): n is a, c, g, or t
  Peptide Sequence Number=SeqID_117046
cagacagagatcaacaagagtctaggtctagctgtccttggggcttagcttgcctgcaaaacggaaatagaaactagcaaccccttgtagccgtgcgggtagcttgcttcaattctgatggttgcgcttgcattgcatgagtgaattgaatagatttataaaacgttcttgaatttannnnnnnnnnnnnnnnnnnnnnnnnnnnnnnnnnnnnnnnnnnnnnnnnnnnnnnnnnnnnnnnnnnnnnnnnnnnnnn

SEQ ID NO: 51073 - DNA, 230 bp, Setaria italica
  misc_feature (151)..(151): n is a, c, g, or t
  misc_feature (201)..(201): n is a, c, g, or t
  misc_feature (221)..(221): n is a, c, g, or t
  misc_feature (226)..(226): n is a, c, g, or t
  Peptide Sequence Number=SeqID_117047
agcttctccaggaaccccaactctgccgcaagcagtgccagcatgtagacgacaagcccggagcgaacgtgccatgggagcattctgcgccgcactgttggcgaagcaccagggaagaagaaggttgtaacgccaagtagccactgaaatntgaaatcaatgcatcaatgtttcaggatcattctgttcttgtgaaaaacntaactgtctagaaaaaaacncaatntcag

SEQ ID NO: 51074 - DNA, 339 bp, Setaria italica
  Peptide Sequence Number=SeqID_117048
tgtatgccgtgttatgtctggtttctcagatgagttctataaagagatgaaggagttttattctggggaaaggatactgctcaggaagcctgtttactacaaaacagatgagcaaccagaggtgtggttcactgcagaacaagtttgggaggtccgaggcgcagacctcaccctatcgcctgttcaccatgcggccattgggtatgtccacccatcgcgtggcatctcggtgaggatgccgaggtacatccgctcggttccagatcggagcccagaggaattgacaagacaacggtacgactagaataattagaccaacaaatagttacaaaagtacta

SEQ ID NO: 51075 - DNA, 277 bp, Setaria italica
  Peptide Sequence Number=SeqID_117049
gggaaacaccaccgactacgatatgggtgcgcgcgtactttctccttccagcgccgcgccgcgccggcggtggccagctagctcgctcactcaccattgatcttgacggcggcggggcgcgcgggctgcttgcggaggcggccgagcccggtgtccgggcggggccccgcgacggtgtcgtcccacagcttgtcgaggacggcccatccctctcccgtcgtaatcaccgaaggccgatccggtgcacagtctcccttcccttcccccaaagctttcg

SEQ ID NO: 51076 - DNA, 278 bp, Setaria italica
  Peptide Sequence Number=SeqID_117050
ccccataccagtagccaatggttaatgcgaatggagggagagcccgggggtctcggggcactcaccggcgccggcgaacggcgagatgggcggggtggtccccagcggcgaggccggcggcgtgctggccgcgctcctcggcgacgacgggtaccccgcggggcgcttgatcatgatgctgcgcgtcaccttcacgggcgtctcctcgctgcccgacgccggcgacggcgggacgaacgccgtggcgtcccctgccggatctgcacgaccaacgggaa

SEQ ID NO: 51077 - DNA, 268 bp, Setaria italica
  Peptide Sequence Number=SeqID_117051
gaaggaggaggaggtgatggtgatggaggtggaggagacggcggaggaggtgaaggtggtggtggagaaggggaaggtggcgggggagatggtggaggaggcgatgacagctctcgaggtcatgaggacatatttatgtttgataaattggacgaactaaatgaagaaaacattcattacaagagcacggaatctatggagaactccccaagcatagtaaaacgtcaagtaagtgacaaacaagacttcgacatggaaggaagtggaa

SEQ ID NO: 51078 - DNA, 176 bp, Setaria italica
  Peptide Sequence Number=SeqID_117052
cttaaccttgcacttctgttctaacggcttctcattgttctccggatgctccacaaatttgaacactgacattcaaataagagaatgccactcacaggtcaggtcatcataattggtgaacaccacaattaccgatgacattcatcaggctccaatcaaattacccgttgctatga

SEQ ID NO: 51079 - DNA, 336 bp, Setaria italica
  misc_feature (246)..(246): n is a, c, g, or t
  Peptide Sequence Number=SeqID_117053
cagaacaaacgacgagggaactttctaatgtctatttgagcattcataatgggaaaatcttaagacgaacttatattaaacctgctagtatcctgcttcaaaacatattagttaatgccttaactgtaggatcactaaataacccactttgttttaatataaaagatttctttagcttcgatgtcctccagtgagtctataaaagtaataacttcattttttaacctattgttttttcttataacngatttgggatggtacctcctgagtgtccctataaatgtaactggtctgttatcattgtattcaagaattatatgcctgaacagccgattt

SEQ ID NO: 51080 - DNA, 263 bp, Setaria italica
  Peptide Sequence Number=SeqID_117054
tttgtgtactttaatcaccttgtaaatatggttaatctatgtgaatataaaattctcgtcttggacggtaaattacattgtccaagaaaaaggtaattttcaaggattgcacaagtgaatgtgatggccgtgacaatttggaagcgctggcaaaatgtatccggatccagctcctgctccctggattttgcttcaagacagggcaagtcaactaactgttcactctatcgtcaagcttctgcaacttggaacctacaaccagg

SEQ ID NO: 51081 - DNA, 245 bp, Setaria italica
  Peptide Sequence Number=SeqID_117055
gctgcacggaacaatggattaactgctgttcctgtcatccaaggtaggcttgctgtggtgacaatagccacatgtcttttattgtctgagacctcatacttagcaggttcactccagaaaccatcatcaggatgatacgggacggcatcaaggaattcgagcgccggagccaaaccagcgagatttttgaggggttgcgcagcaccggggagctcgttgagaaattcaagtccagcctgaagtcg

SEQ ID NO: 51082 - DNA, 342 bp, Setaria italica
  Peptide Sequence Number=SeqID_117056
gacttgaagagctccattcttctctctcttgatatattccaagtagtttgtatgaactacaccaacaacatggttgaacttgtcagtccagcgtttcccatgatgataccaattgagatgctctggttcttccaatattgctatatcagcttctcttgacggtatgaactgagacgtatcaccagcaggaatgatgctacgccgctcttttgagaacttgctaggatagaatagaataatacttagaaagtttagaattaacaaaaagaaccaaaagtaactttaacctaactaaagaaccaaagttaacctttaaattaaattaaaaagttttaacctaaa

SEQ ID NO: 51083 - DNA, 206 bp, Setaria italica
  Peptide Sequence Number=SeqID_117057
aggaattgctccgcacctttatgtagagctggatttcaaggaggtaaccagcaaaaaagccgccatcattaaccactatagtgaaatgaaggaaaagttaggctcagaagcttcaatatcgatcggtatatctctcatttactatctgtgtaccaccacatttttgtaatgtaattggtccaaacttctaaactatttcattgact

SEQ ID NO: 51084 - DNA, 258 bp, Setaria italica
  Peptide Sequence Number=SeqID_117058
gggagggggtgcgcttctcgccggcggtgagctgagaccgtgagaggccaaacttgttcttggaactaagtcaagcggttgtgactctagggtttgtctcaataggaatttggttttcgtcattccttgcattacagtaagtaggactagttctgttcagatgtgtacattacttatcgaattgcatcttccgcttgtatagctgcaaatatatgtacattcttatagggttgattaatagggtaatctatctgataa

SEQ ID NO: 51085 - DNA, 231 bp, Setaria italica
  Peptide Sequence Number=SeqID_117059
cgatcacaaatccatgaggtttcaatctaacagcaagacaatgcaatgggtgctcatcgttatagtgtccacgaattcgtgacgcacatgacatgctcgcatgtttttacctgaaagaacccccactcctcgcagccattggcgatctgcgccatggtctccgccctctcggcagcggcgccatcgagcttggagaagtcgatcaccgggaccaccattgttaattgtgcg

SEQ ID NO: 51086 - DNA, 340 bp, Setaria italica
  Peptide Sequence Number=SeqID_117060
gtgtagccgagtaactgtgcacagtaaggcacttatttcatttgtatttcaataacgttctcatttcttacatttacagtcttttcaactcatacgatcgttccatgttgatgtcactgcgtattatcgaatggatctttatgagcggcccttaaatgaggtatttctgaattactatatatttcttgattgtaattcaccactcaattgttcacacaatatattttccctttatcttctgtcatcgatcaggtgcctgtgacaaatttctttggatcagtcatgaagactctccacacagattcagcctacacaggtttcttggctgcacatgacgatg

SEQ ID NO: 51087 - DNA, 197 bp, Setaria italica
  Peptide Sequence Number=SeqID_117061
tgagagataatcaacatgatcatttcatgtcaaagaatgaggctagtgcaagaagattaaacagagaaaaggaggcacaaataattccccatggatggacagaagttctgcttgaacagctggagggcaagaatactgacattgttgcgctgtactgagacacgcaacggggataggcaaggcacacaggggatagg

SEQ ID NO: 51088 - DNA, 392 bp, Setaria italica
  Peptide Sequence Number=SeqID_117062
gcttgggaaagaaggcaaaacataagagggatatgatccatgcttgctacatagagcattgatggcatcctccccagcagtttctccaaattcagtgagcccaagttcagctgcatgaatccctccagtaatgaacgcagatgcgattcctgttgcatttgcccctttgatgtcgtggtgcagtgaatcacccaccatgatgcattcatgagcatcaactccagctagggacatcgctgaggtatagatcaccttatcaggcttgcccatccatttcacttcccaccaagactctcatatttagctgccagagtgcctaaaaagatagaaattgccatttcgtcaatttgagccaggcatgacacgcagatctcgagcttcaacggtgacat

SEQ ID NO: 51089 - DNA, 401 bp, Setaria italica
  Peptide Sequence Number=SeqID_117063
cacggacacgctcgtgatcgcgccgggggcagaccgtggacgcgctcgtgaccaccagcgcggcgccggggagctactacatggcggtgctggcccacgacaccatgagcccgctggcgttcgccgcgtcggacaccaccaccgccaccgcgatcctccagtacaacggcacgtcgacgaacccgccggcgatgccggtcatgccgtccagctccgactccgcgacggcgaagtacacgttcacagtggggagcacgcagatcagtcagctatgcagcaccaccagtattattgcagtgaacggtcagttgcccgggcccgtcgatcgaagtgaacgaaggtgacgcggttgaggtcaaagtcatcaacaattcaccatacaacgtaaccatccactggca

SEQ ID NO: 51090 - DNA, 224 bp, Setaria italica
  Peptide Sequence Number=SeqID_117064
gctgcactctgctcgaccttccattccacccatggtgcggcttctcctggcgctcgcgcttctcctcgtcggaccggtggcggatgcggcgacggcgaagtacacgttcacagtggggagcacgcagatcagtcagctatgcaactgaccgttcactgcaataatactggtggtgctgcatagctgactgatctgcagcaccaccagtattatgcagtgaacgg

SEQ ID NO: 51091 - DNA, 235 bp, Setaria italica
  Peptide Sequence Number=SeqID_117065
atctcagcggggctcagcctccagccgagcgcgcccaagttctcctcgacgtgcctgaccgttttcacgccggggatagggatcgtgcctctgcagatgcaccagtttatggccacctgcgttagagatcatagcatcggttttgttcagaaaccttgtcggaagttcagatgaacacatattgacccaaactgaatcacaagaaacagatgacaaggaaatcaaatgccatact

SEQ ID NO: 51092 - DNA, 285 bp, Setaria italica
  misc_feature (226)..(226): n is a, c, g, or t
  Peptide Sequence Number=SeqID_117066
gagatctcagcggggctcagcctccagccgagcgcgcccaagttctcctcgacgtgcctgaccgttttcacgccggggatagggatcgtgcctctgcagatgcaccagtttatggccacaactgcggttcagaattcaggcatgccacccccgtcatttgctctatgcatgcttgcatagttgtattgtgtgcatgaaaaaactcctgagacatggttttcccctnttttctgcaattcttcttagacaggacagcaaagactccaacccaggaaagaaattttg

SEQ ID NO: 51093 - DNA, 267 bp, Setaria italica
  Peptide Sequence Number=SeqID_117067
ctagtcctaggaaccagcacttgccacgcggctcgccggcttgccgacgacacggcgcctgccgcggcaccggccgccatcccggccattccggcagtgccgaagccgacggtgccggcagttcccaccgtgccgcagatccctgccgtgcccgcggtcaccgtgcctcctatgccagcggtgcccgcggttgacctttgtccgtccgtattgtccggtcggttgtaccgttgtcctagcggtgcccgcgatgccagccgtgccggg

SEQ ID NO: 51094 - DNA, 238 bp, Setaria italica
  Peptide Sequence Number=SeqID_117068
aacgtggtggcggagatcgacgccgtcgtcggcggggaccggatcgccggcgaggcggacctgccgcggctgccatacctgattgcggcgtacaaggagacgctgcggctgcacccggcggcgcccatcgcgcaccgccagtcgtcggaggagatgcagctccgagggttcaccgtgccgccgcagaccgccgtgctgagacacgcaacaggggaaagcaaggcacacaggggatagg

SEQ ID NO: 51095 - DNA, 264 bp, Setaria italica
  Peptide Sequence Number=SeqID_117069
aggaaccacctcctcccaaaggttgagttaaagaagatccctacaacaagacctagatcaccaaagcttggcattggtgctgcttagaaagagtttaaatttcaaggcagcaccaatgcctagctttacaaggaaccacctcctcccaaggttgagttaaagaagatccctacaacaagacctagatcaccaaagcttggccgctccaagaacacaacctcaacaggcactgtaggatttgtatttccttctgtgcctgttgag

SEQ ID NO: 51096 - DNA, 433 bp, Setaria italica
  misc_feature (313)..(313): n is a, c, g, or t
  misc_feature (398)..(433): n is a, c, g, or t
  Peptide Sequence Number=SeqID_117070
accaaccggaaggacgaataggacaataggttaaagactaataggcaaggccaaacttggatggagtttggcatgagcaggctgttcttgactgcagcggatcacatgtctaggggttcccaaaaccattttcgtttcccttgtgcagacaggtcacaaggtggtggtgctcttgctgcagaattcttcggtgtctctttcttatctcctgcgacctatcatagtacggtttttttggcgctatcgaaatctggtccctcaaggtggcgctgctgctgttctcatgacatgtcacgtgtcactgatgtaaacngttttttatggcgtacctgaagggtgattgtaacacagtagcaatcgactttgaaaaggaatggcacactcgttttaaattaggnnnnnnnnnnnnnnnnnnnnnnnnnnnnnnnnnnnn

SEQ ID NO: 51097 - DNA, 289 bp, Setaria italica
  Peptide Sequence Number=SeqID_117071
catttcggattacatctgggaagtctgaaaatggttactccatactcagatggccaagtcaagatttatgagctcttggattccttggaattagacaagtggcagcttcaggcagagttccaaaatgttaccgatccagtctctagatttggaaaaccttcatgcacttctgcatctatagcatggaatccaagaagaggtggaagccaacaagctagttttgcaattggcttcgattcagattcgtctcattttaactcttgtaagatttgggagtttgaagaagctc

SEQ ID NO: 51098 - DNA, 201 bp, Setaria italica
  Peptide Sequence Number=SeqID_117072
gcctcgacaagtagtcgtacacgaggaggagctcgcccttgcgccggcagtagcccaggagctgcacgaggttccggtgccggaggtggccgatgctgacgacctccggcaccggaacctcgtgcagctcctgggcttcgtcttgtcgtagaggtacttgtcgaggctgccgttggacatgtagtcgtacacgaggaggag

SEQ ID NO: 51099 - DNA, 407 bp, Setaria italica
  Peptide Sequence Number=SeqID_117073
taaaagaactgcacttttcttcgagggttgtctgagtgttgatggatatagggctgtcgtggagcgacatctagatgttgaagtttcaggtttggaccataatgggaaccccattaaggtacaggcctcaggatggcaagcacgcatcctacaacatgaatgtgaccatcttgaaggcacgctgtatgttgacaagatggtcccaaggacattcagaattgttgataacttggatatgccgcttccaattggatgtcctccactcggtgcaagataatgtggatagcttgcaatctttcctcatcaaatagaggagtttgataaagtgtatgggccaacgtggcactgcatcgttggcacaagctacggctccttcgtgacacattcccgaggctgtttcctctact

SEQ ID NO: 51100 - DNA, 226 bp, Setaria italica
  Peptide Sequence Number=SeqID_117074
acgcatcctacaacatgaatgtgaccatcttgaaggcacgctgtatgttgacaagatggtcccaaggacattcagaattgttgataacttggatatgccgcttccaattggatgtcctccactcggtgcaagataatgtggatagcttgcaatctttcctcatcaaatagaggatgaaggcatctgccttgagaagtctagagtacatgtatctggtctggggcag

SEQ ID NO: 51101 - DNA, 479 bp, Setaria italica
  Peptide Sequence Number=SeqID_117075
tacgtagaaaccaagactaagaatagggtttagaatagactaaggggaaaacaatacaaaggtagactacaataggctaaccaacaggccggacacattggaccctgctcttctgcgtccagggaggctggataggaaggttgagttcggcttgccggatcttgagggccgtacccagatcttcaaaatccacacccgcaccatgaactgcgagcgggacatccgctttgagcttcttgctcgcctctgcccccaactccactggtgccgacatcaggagcgtgtgcacagaggccggcatgtacgccatccgcgcgcgcaggaagaccgtcaccgagaaggatttcttggatgccgtaaacaaggtcatcaagggttaccaaaagttcagtgcgacgcccaagtacatggtgtacaactaggcagtcttgttgtcgttcttttcctgtgcctcgttgggcttcttctgcacgagtgtt

SEQ ID NO: 51102 - DNA, 282 bp, Setaria italica
  misc_feature (112)..(112): n is a, c, g, or t
  Peptide Sequence Number=SeqID_117076
acctaagctagaagtctaatttttcgatgctctgttgtccaatagggtctcgggccgtactcgaccagcatcaagaaggtcgagaaggagataaaggagatggcaaaaaagntcaatgacctttgtggcatcaaggagtcagatactggattggctccaccaagccaatgggatcttgtatcagacaagcagatgatgcaggaggagcaaccgttgcaggttgccaggtgcacaaaaatcatcagtcctaatactgatgatgccaaatatgtcataaacgtg

SEQ ID NO: 51103 - DNA, 261 bp, Setaria italica
  Peptide Sequence Number=SeqID_117077
gcggcaccctcctgaccttcgactccatccgctccgcgtcctgccctctctgcggcttcaagcgcaaggccaaagagattgaagggaaggaaacacggtacaccgtcaccgccgaggtaaaactcacggctctctttctgtagcagtcgtgatgcttttctcatccccttgtatttcaatccagaacgaaaacgcatagtcttagaagaattctaatgtgcgacctctgtgagaattgttcaagtatatgaatgacggtta

SEQ ID NO: 51104 - DNA, 457 bp, Setaria italica
  misc_feature (447)..(447): n is a, c, g, or t
  Peptide Sequence Number=SeqID_117078
acctagaataatttaatacgtttaagcggcgagaacaaagggggtttttaatcaactgtgcattcattgaaccatttggacttaccttgattgaggctgctgcatatggtttacccatggttgccacccgaaatggtgggcctgtcgacatacatcgggttcttgataatgggattcttgttgacccccataatcaaaatgaaatagctgaagcactttataagctggtgtcagataagcatttgtgggcacaatgccgccagaatggtctgaaaaacatccatcaattttcatggcctgaacattgcaagaactatttgtcacgtgttggcactctcaagcctagacgtgacaaatagttccatcaattttcatggcctgaacattgcaagaactatttgtcacgtgttggcactctcaagcctagacatccccgctggcaaaagngtaatgttgc

SEQ ID NO: 51105 - DNA, 457 bp, Setaria italica
  Peptide Sequence Number=SeqID_117079
ctgctgtgtgtttgctatgcgtcgttcctgcttgtactgttcctttgcggattagtattcttgttgatttcttccgtttatgttcgattgctccctctgtcttctggatttcttgcatagctttatatacctcgatgactctggtgctaatggggcaaattgattttcagatcaggagttgggcgctgcgctgccacgctgctgaacgtttggagaaggtggagggcttgtgttgacctgcctgttagattctgcacttcggtgtttctgatcaatcgctcctgcccggttcctgtcttgtgaatccgtctccccaagcatggctgggcaagcggcaaaggcgaaggagtcagggaaagacgacagacaagaacccggagctgaggtgatgaaagagaaaggtactgccatctcaccagcaggaagagtcttcagcgtctctgatggacaaggattc

SEQ ID NO: 51106 - DNA, 235 bp, Setaria italica
  Peptide Sequence Number=SeqID_117080
ttaggtaataattgaaagactaaaattttgaacttgccggtcagcagaggaatcaaattaaataggtaccttgacattctcatcttccattggataagtgggccatggaatcttcattgtgcatgtgtaaactcccctggaatgtaggaatcgaacaggaactctgcttatctggtctccagtaaaaccggcactgcatgcaggagctaactaactgttctatgtatgagacacc

SEQ ID NO: 51107 - DNA, 270 bp, Setaria italica
  misc_feature (269)..(269): n is a, c, g, or t
  Peptide Sequence Number=SeqID_117081
gtcgacaaatggaaaggtcgcacctgtcgccaatccaaaggggccagataattacctagagtttgaattcttctagattttttcctttttctttttttttgtatacctgaactgaaagagtgcatctgggccgatgttgcaaaagaaagcgaaagacgaggagctactcttgacccccataatcaaaatgaaatagctgaagcactttataagctggtgtcagataagcatttgtgggcacaatgccgccagaatggtctagaaaaacnt

SEQ ID NO: 51108 - DNA, 234 bp, Setaria italica
  Peptide Sequence Number=SeqID_117082
tagagtttgaattcttctagattttttccttttctttcttttgcaacatcggcccagatgcactctttcagttcaggtatcaaaagaaagcgaaagacgaggagctactctaggcatgagaatgcttggctggaatgtttccgcttatagactgtatgctcgctccaggacgccccccaagttgtttacttgttgaactgcttgactctaagatgaatggagtacatcctagag

SEQ ID NO: 51109 - DNA, 204 bp, Setaria italica
  Peptide Sequence Number=SeqID_117083
catgatgtcgatctggatggctaaactccatgccaggaggtattgcaatcatacgaggcatgtaacgaccaaagcagctcacaccacgctttattcttgctctaagttttcgggccatagttagatcaaaaccatcatacaggtggtcaggtcaaatatggtgttgaacctaaagccctagcaagttccacaacatatttgacc

SEQ ID NO: 51110 - DNA, 202 bp, Setaria italica
  Peptide Sequence Number=SeqID_117084
acgcccttgcttcaaaatctgctccaacttgtctctgccaagagaatggcctgtgaataccatgggttcttgataatgggattcttgttgacccccataatcaaaatgaaatagctgaagcactttataagctggtgtcagataagcatttgtgggcacaatgccgccagaatggtctgaaaaacatccatcaatgttcagg

SEQ ID NO: 51111 - DNA, 128 bp, Setaria italica
  Peptide Sequence Number=SeqID_117085
cattcagccctcgtgtgttgctccaactacttgctttggccctcggttcttcaggaaatccaagtctgcaaatccaggcctagatgcacttcagaggaacaatgcagcaggctgggcacagtatgctg

SEQ ID NO: 51112 - DNA, 349 bp, Setaria italica
  misc_feature (275)..(275): n is a, c, g, or t
  Peptide Sequence Number=SeqID_117086
gtggtggggttgctcatgctcagatcgggtgcgtgttcgtctccttgacttccatgcattaagggcacaagatttttcgtccttcattgactgtaaatattttcactgcccttgacctgcatcttgaaattcatggacttcggtacctaagctcattgactgtaaatattttcactgcccttgacctagtaaagaagaaggccatgccatgatgtatggatgaaagtggccatcagtttttccataaaagagcttttccagcttccttgtttccnggcagaaggataggtaccaacaaggtgaagtaaaatctctgaatgtctcaaaagttgacatgtacacaatgcca

SEQ ID NO: 51113 - DNA, 210 bp, Setaria italica
  misc_feature (10)..(10): n is a, c, g, or t
  misc_feature (50)..(50): n is a, c, g, or t
  Peptide Sequence Number=SeqID_117087
aatggaaacnggtttagtaagaatcatccttgttgacctcttgattgtcngaaaaaaataggtgctgatttccaatctgaatcatgccctagcggaagtattgttaatgcagtgtccccgttccttggatgaacagaaacaggtttacatatcagatagccctttgaaaagtggctgccaatattctggtctaatgatctgttgcactga

SEQ ID NO: 51114 - DNA, 314 bp, Setaria italica
  Peptide Sequence Number=SeqID_117088
gacaagtcagaagtctgagagcacttgaataaaggttgaagaacaaagtcactgttacaaaggttgaagaacaaagtcactgttgcaaagatttgctttgatcagtttattggttggtctggcgataggataggttgaaaagggtgaacacatagcggccggcaaattgctcagtagcctacaaaaaagtgtaccggcagctatcctgatccatcaccatctccttgcacggacaagagtgtaaagacacaaggcatgaatgctgaataatctgctagatttgaactgcgcctggatgcttgtactaccctttt

SEQ ID NO: 51115 - DNA, 238 bp, Setaria italica
  Peptide Sequence Number=SeqID_117089
tgtggcaaattcagaacttgttagtgcgatattgcacaatttgatttgtggggaagtcaaattgatatgacccagagaaagaagtcactgttacatctggatgcactgaagcgatagctgcaacaatactgggtctgatcaaccctggtgacgaggtgatattgttcgctccattctacgactcatatgaggccacactatcaatggccggtgccaatgtaaaggcccttaccctccg

SEQ ID NO: 51116 - DNA, 408 bp, Setaria italica
  misc_feature (71)..(71): n is a, c, g, or t
  Peptide Sequence Number=SeqID_117090
accactgagacggatacgaaggaagcctctcacaatcccgaaggagaagaagaatcggtccctaatggaanaggctaaagaaagagaggcaagagatgggggagaacttatcccagcgtctccggctgtgtctccaaggccaggcccgacataagagactaaatcatcttgacaacttgtgaatacacatttaactcagacaaatctgctaggaactcgctgatgattcaccaacagagctgcaccgccatttggagtttctgacatttctagtcgccaaaatcatgctgtgtacattggttggtcattacttagaatcttctgtcaggtcatcgattgttccaagacccccaaatagtagtagttaacctaaccaaaacaattaccaataattacgttacgttaata

SEQ ID NO: 51117 - DNA, 254 bp, Setaria italica
  Peptide Sequence Number=SeqID_117091
ctaaatcatcttgacaactgtgaatacacatttaactcagacaaatctgctaggaactcgctgatgattcaccaacagagctgcaccgccatttggagtttctgacattcagcgccaaatcatgctgtgtacattggttggtcattacttagaatcttctgtcaggtcatcgattgttccagccccaatgtgtgttacctaccaaacattggggctggaacaatcgatgacctgacagaagattctaagtaatg

SEQ ID NO: 51118 - DNA, 232 bp, Setaria italica
  Peptide Sequence Number=SeqID_117092
caccgtctcagaacagcaaatcttctgcctgttctagactatatttagcttagatcgaccgccttcgtcatggcagacccatcagcatacacatgagcagtgcgagggcccattgccattgacaagaatgcctttaggtggcatatgctgcaattgcacaaacaatatccggttagtacttagtagcaagagaggaaatgtcgatagcgtttgaaaaggagatacaaggtag

SEQ ID NO: 51119 - DNA, 466 bp, Setaria italica
  Peptide Sequence Number=SeqID_117093
cataggtgctggaataggtgcattagtacacccccactatgccaaacacagtgttgatttctagtccaagtttcctgaggacgaattagcaaatgtttgggccaactgcttcatccttggaacggatggctggtgattcccaacttcaagaataatggaggcctgaacaattgttggaggagcaaccgttgagccttttgaatttgtcaatttgatggagaggttctcgacattttctcgaacagcttgcaggcagtggagccaacgtggttgctccatggagtcatggacttcgattgctcgcaagcctctcgtcgagcatggcctcatcctgccactcacatccagcaggttgaatgatactggaatctttccaatggacctgaccattgtaattgtggtccatactttctggtggtcttcacgtgacactcggactatgcaaaccttttgtttacagggttta

SEQ ID NO: 51120 - DNA, 420 bp, Setaria italica
  Peptide Sequence Number=SeqID_117094
ggacaggagaatgtacaggagcaggagatggagcaaaatgcttcttttcctcatgactattgtgatggtggtggtggtggtggtggtgagggttatcttgataaggcataggtgctggactaggtgcattagtaccaccccactatgccaaacacagtgtgattcagtcccaagtttcctgaggacgaattagcaaatgtttgggccaactgcttcatccttggaacggatggctggtgattcccaacttcaagaataatggaggcctgaacaattgttggaggagcaaccgttgagccttttgaatttgtcaatttgatggagaggttctgcaaagtacaagaaaggagacttggttgaacaacaaaatctaatagtgcacattgaactggtgtggcctttgcagcatgtcatttctcc

SEQ ID NO: 51121 - DNA, 178 bp, Setaria italica
  Peptide Sequence Number=SeqID_117095
ggcagacccatcagcatacacatgagcagtgcgagggcccattgccattgacaagaatgcctttaggtggcatatgctcgacattttctcgaacagcttgcaggcagtggagccaacgtggttgctccatggagtcatggacttcgattgctcgcaagcctctcgtcgagcatggcct

SEQ ID NO: 51122 - DNA, 324 bp, Setaria italica
  misc_feature (18)..(18): n is a, c, g, or t
  Peptide Sequence Number=SeqID_117096
aatggggctgcaagcagngttgacagtgatctagaggagaaggatctgtgacaaactgggaaggaaactgagagtatcagggaggatggggagctcccggttgttgttcatgctgagaacgagccaagaggttctgcaattttgccctctgagatgtcacctgaggttcggagccattctagaggcttatccctgatatcaaagagtgcaacaccatctaagctatacatcaagagatctagatcatcctcatttctaccaaaactgtgtgagatgcttagcttagatggtgttgcactctttgatatcagggataagcctcta

SEQ ID NO: 51123 - DNA, 150 bp, Setaria italica
  Peptide Sequence Number=SeqID_117097
ccactttatatagcatacactcagttgttagggcagaaagaagcatttggagagaatattgaagttgggttggaagcaactcagcagcatggtgctgctttagtttcttggtatgttgcatgcctagctgctgctgcactggcaatgatg

SEQ ID NO: 51124 - DNA, 321 bp, Setaria italica
  Peptide Sequence Number=SeqID_117098
attgtgacatcctcagaatccacctgctttgctgcagctgcatcaccatcaccttcctttgcatcctcagcaaagcaggtggattctgaggatgtcacaatggatgcagatgccaaggaagataccagtgccaggacagaagaaggcgaggatacaaagatgactgaggctgaggcaggaaatgcggaggtcaaagataaagaagagaaggaagataatgttgacaacacaaatgtggataaggtggatgaatcgaaggagcaagagaaagagggttctgcagagcaagaggaaaaagaagtaaaagaaacagaagagaat

SEQ ID NO: 51125 - DNA, 262 bp, Setaria italica
  Peptide Sequence Number=SeqID_117099
tctgcagctgattctgggctgtctgatgaccagggatcaaattctaggaaacgcaagagaggaggtaaaagtgcaagtaagactcctgaaggcacacctagtagttcgaggaaaacagtggagaggttggttgggttccttctcaatcacctcaaccaacctctccactgttttcctctcacgttgagggcgatcaataccatatgggctcggggtctccagcaaacttttggcttccctggatttggacccatcctgtttc

SEQ ID NO: 51126 - DNA, 165 bp, Setaria italica
  Peptide Sequence Number=SeqID_117100
accttgtagctgactgataggagaggtacaaggtgtggggagtgctcagggctccctacaccttgtagctgactgataggagaggtactcctaggtaacttttgtgtctctagatttgcaaatggtgtctgaaactctgcatttgctgtggcagagcatgtactg

SEQ ID NO: 51127 - DNA, 182 bp, Setaria italica
  Peptide Sequence Number=SeqID_117101
gagaggaggagcagggaagtgtctagaagcggatagggtggatgaatcgaaggagcaagagaaagagggttctgcagagcaagagaaatatggtgctaatgggaagcaacaggaagaggaaggagaagaaaaggactctgctgataagaaagatgaagctgataaggtggatgaatcgaagg

SEQ ID NO: 51128 - DNA, 486 bp, Setaria italica
  Peptide Sequence Number=SeqID_117102
ggcagaacacgaagcaattgaagataagtgtgttcaagactagatcggagttatcaccattgatgccaaacagccacttcccctctgtctgtaggtaccaaattacaaggaactggtacaaggactgtcccaagatgttcctccacataatgttactgatgaagtttcctttccttccaacaggtgttctcttcatcagttcattgtttggggttctgtagccaatgccattgcaccaagtgtatccatgatcatgttgacccagagcaattggacagcagtaagaggagcactccctgaattagaatgcatacaaacaatgagatgtatatttataataaaacaaaactagaaaatttagattacgcttaagcagtacaaggatttccaaacaatgagctaattcaggatttgagatgtacctgtcaggcaagctgaagagaagtttacaacaagagcaaccacgtttactgtcagctgaaactg

SEQ ID NO: 51129 - DNA, 369 bp, Setaria italica
  Peptide Sequence Number=SeqID_117103
aagaacagcagcagcctcaagtgaaggaggtcgaggcatgaagattcctggaacccccagtagctgtagtacctgctgttaattatcctgtacttaacatgtatgccttgccttgtacaggcatcctatgttaattatagccgccaacctaacacgcccgtccatgtgttatttaaacctatcgcgaactatttcagtacatgctctgccacagcaaatgcagagtttcagacaccatttgcaaatctagagacacaaaagttacctaggagtacctctcctatcagtcagctacaaggtgtggggagtgctcagggctccctacacatcatgtctttaacatacacaatcaaaggctgggttctcaag

SEQ ID NO: 51130 - DNA, 305 bp, Setaria italica
  misc_feature (1)..(67): n is a, c, g, or t
  Peptide Sequence Number=SeqID_117104
nnnnnnnnnnnnnnnnnnnnnnnnnnnnnnnnnnnnnnnnnnnnnnnnnnnnnnnnnnnnnnnnnnntttttttttttttttaggttgtcaaataagcacattgcggtgagcaataatatacagttccagcctctgttccaggggaaaaacaccagggaaaaaaacaaagcaaagaacagctacgagtccgaggcattttctaagaatcaagcccacaaccttggcccatgctctaagatcaaatacaggataacaatggatgcagatgccaaggaagataccagtgccaggacagaagaaggcg

SEQ ID NO: 51131 - DNA, 281 bp, Setaria italica
  Peptide Sequence Number=SeqID_117105
tgggaaagaaaaggcaaggaagttctcagaagtaaaagaatcttcaggcaaaaagaagacagacagagcaagtggccataaaacaggtccttcaaagacaatcagtaaaagtccagtaaaaaagccatcatccaagatttctgaggaaaaagaaagccccaatgacagtgcaaaggtcttttctaggaagaagaaaactacagtaaaggatgaaaaggatataaaagaaacagaagagaataagcaacaggaagatgcaaaaggaagagaaagatggtgct

SEQ ID NO: 51132 - DNA, 339 bp, Setaria italica
  Peptide Sequence Number=SeqID_117106
tccgaactcaagtgtgagtagttcagtaaaagtccagtaaaaaagccatcatccaagatttctgaggaaaaagaaagccccaatgacagtgcaaaggtcttttctaggaagaagaaaactacagtaaaggatgaaaaggatatcaaagaaacaaagtcatcaggtaaaaaggtgacaaagggtaaaggagaatcagccggagtggatcttcccagcaaggatgaattgaggaagaccattactgctatcctcaaaaaaagttgacttcaacacggcaactttcagtgacattcttaagaagcttgacaaccactacaaaaatggatctgacctccaaag

SEQ ID NO: 51133 - DNA, 253 bp, Setaria italica
  Peptide Sequence Number=SeqID_117107
gagcgcggttctgtgagctccggagcatctctggtttgcgggcgaggctggggtttgtttggtggcgcccgaattcggcaattttggtccgaattgctagggtttggacgcggaaggcagtagagcaataagggtcggcttggttgcctgaggccgacccagcacctgcaatggaggagaaggccgtcgcaaatggcgcagcagctgctgatgttactgctcctgatagcacggatacagccaacaaggtaag

SEQ ID NO: 51134 - DNA, 256 bp, Setaria italica
  Peptide Sequence Number=SeqID_117108
taatgattgaaatcagaatttatgggaatctacaacttacaaaatcattctctctgttctttatccttccccacttgccagggatcaaattctaggaaacgcaagagaggaggtaaaagtgcaagtaagactcctgaaggcacacctagtagttcgaggaagaaatttggcgatgactccacttcagataaaaggaggaagaaagcccttaagtatgatactgatgaagatgaggatggtgatgaatccatgaagt

SEQ ID NO: 51135 - DNA, 204 bp, Setaria italica
  Peptide Sequence Number=SeqID_117109
tgactggataccaggttaagcaaaatggtaggtgtcaaataagcacattgcggtgagcaataatatacagttccagcctctgttccaggggaaaaacaccagggaaaaaaaacaaagcaaagaacagctacgagtccgaggcattttctaagaatcaagcccacaaccttggcccatgctctaagatcaaatacaggataacaa

SEQ ID NO: 51136 - DNA, 342 bp, Setaria italica
  Peptide Sequence Number=SeqID_117110
tgccaataatgcttctatttaggcagaaacatccatcttatacgccaatgaagatgtacaaaactccattgccatgatcagaatgaagtcctacccaagttcattggcgtataagatggatgtttctgccataatgcttctatttaggtgaatctttgcccttgttatcctgtatttgatcttagagcaatgggccaaggttgtgggcttgattcttagaaaatgcctcggactcgtagctgttctttgctttgtttttttccctggtgttttttccccctgggaacaggaggctggaactgtatattattgctcaccgcaatgtgcttatttgaacaaaaa

SEQ ID NO: 51137 - DNA, 240 bp, Setaria italica
  Peptide Sequence Number=SeqID_117111
tggaagaagcgatccccaagccatcagagaagaggtgcgggaagaacacaacataatcagtctgatcagtgatcagcagcagctgaatactgcatctttactccctgctgtcttgacgtgcccttacctatcggcttgtttccttggggtcagggtcgcccttgtcaccggcgggaacaggggcatggggttcgagatatgccggcagctggcgtccagcgggctcgccgtcgtcctgac

SEQ ID NO: 51138 - DNA, 374 bp, Setaria italica
  Peptide Sequence Number=SeqID_117112
tctaacgtagtctttctagtaatgttgccagaagaggtctttccatcaaaccaaagatgggagatgcacttcttttctatagcatgaaaccagatgccactctggatccattaagtttacatggttagtctgatacttggaaacatttgaaggatgttgtaccatggtaaagaactgctgttcacatttgcatcggggaaaatagtctcacccccttcttcaacatctgatagatacatcagaagagtagccatcctctgaccaccattcttgggtgttgaactcatcaagaaaataatcaaagtgaggctcatacttctgcccaacttcataatgcagcacttggagtccctcaccgtgttctacaggtatga

SEQ ID NO: 51139 - DNA, 141 bp, Setaria italica
  Peptide Sequence Number=SeqID_117113
ctttggtttgatggaaagacctcttctggcacattctgaaagctcgttgtaccaatggtaaaagaaactagactagttacaacaatttagacaatacggggaaaaataagtactacaaccccccttactttacaaacaata

SEQ ID NO: 51140 - DNA, 314 bp, Setaria italica
  Peptide Sequence Number=SeqID_117114
caaatacaaacgaaacgctacagtgttgctacagtaatttggcacctcccaaattcgcgaagtaaacaagggccaagtcttgctgggtagtctgtttcagattttgatgttagtttgacgattttctgaactcatttatgttaacctgatgtgcgcagggagtgagcgctgccattgtggtaatagcttgtggggctatgttcctcaacaacagatgaaatattgcgtcaagcttcaatgctatcatggtcctatcctttctgttgctctgttcgctttagcttatcagccaccgaacaatatttttctctcac

SEQ ID NO: 51141 - DNA, 259 bp, Setaria italica
  Peptide Sequence Number=SeqID_117115
tatggattgttgtaccagcataggaccggatccaaactcctccatttttgatttatatttatcagtgccatcaagttatcgtttacatgtagaataccagtgtctcttacacaaacaaaaagctatatgtacctcaaatagaatctcaaattggcaacagcggtttcctctcatcagttgcgctaagatggcttgcctgaaaccattgccagcttagaaattagaaactacctccataaagaaaactgttaattcttga

SEQ ID NO: 51142 - DNA, 404 bp, Setaria italica
  Peptide Sequence Number=SeqID_117116
tttgaaataaatacaattgagatgcctagaagaaagttaacagtcaaaggttgtcccaaaaatgcagccgaagctaaaccagtaaaaattgtggcaactgttgatgagtacttcttcaaaaatagtatctgcatacttgaaagaagaaagaggagagaatgccttgtgccgcattgttacaaatgagaaacatcgttgccctcgaatgccctcgaaggatatcaaaactctctggaccttgaaatatgacagtccctaagatgccaaggaagttgaaaattgcaccataaccatataagaacaaattctgaaggtagatgcttgtatcaaactggctttttagagcatacttattggaatcagtgtcaatcaacttcgctccattaccttgtcgggtctaccta

SEQ ID NO: 51143 - DNA, 216 bp, Setaria italica
  Peptide Sequence Number=SeqID_117117
gaacagcaatgaccagcaccttcaggttgcttagcatcttcacagttgcagggttgaagtataactgcattggaagtaaaaaaacaacatcatacagcaagaccgaaagctactgaagacaatactgcatgtctgtctatgaatttatacgtaacaagatatgctagacttcatattataaagacagatgaacctttaaaaagttagttactatta

SEQ ID NO: 51144 - DNA, 212 bp, Setaria italica
  misc_feature (160)..(160): n is a, c, g, or t
  misc_feature (179)..(179): n is a, c, g, or t
  Peptide Sequence Number=SeqID_117118
atacaattgagatgcctagaagaaagttaacagtcaaaggttgtcccaaaaatgcagccgaagctaaaccagtaaaaattgtggcaactgttgatgagtacttcttcaaaataagtatctgcaatgttatcagtcgaccattcagaagtatgaagttagnggacaatggacgaaaaagntataaggattgagaaactagtatcataaaagtt

SEQ ID NO: 51145 - DNA, 320 bp, Setaria italica
  Peptide Sequence Number=SeqID_117119
ttgaatgaagtcgggctgtggacatagatttgagtaaggcggccgtagtggtaggctccttttagttatcctggtgattgggacttgttagctttaagatatggttgaagaagcaggttaattatgtacagcagcagcagcaagcacagcagcagcagcaggtggtctgtctggctgttgctttctgtcgcgcgaggcctggtctatcttaatgctattctctcattcggtgtttatgaatcaatttccatgttgacatctgtttaagtttgtggtatggtgaagatgggtgatgataatggatgcgatgatgtttagaa

SEQ ID NO: 51146 - DNA, 383 bp, Setaria italica
  Peptide Sequence Number=SeqID_117120
ctgctgccccaatagccgccttcccctcagggtggctggacagtattgagagtattgccattgcctcatccataagagctcccgtggggttggtcaccagcaacttgtgcatctggcccgtgcacaagagtgcggcatcatggtcccactgcgggagctggccttgaacggcacggagaggggggaagagaaaggcagtgcatctgctcgagcgaatgagcagattcctggttcagcagcaagaggaaaggagccagctgctggcatcgacacaggccattcctcagatccctgaacaggtccaagagatcgacatccctgaacaattggacagtccttcatctcaatatccacggtcgcatgatgacatgaatatcttcacg

SEQ ID NO: 51147 - DNA, 281 bp, Setaria italica
  Peptide Sequence Number=SeqID_117121
atgctattgaagaaaatcaaggacttgtgcaattcagaaccctgagatggggccggccaataggtaccaagctaatggattcaaacgggagccaagacctgcaaacattcctgatgagttccgctgtccaatttctcttgagttgatgaaagatcctgttattgtttctactggccaggtggctatatctgattcaattttttcatacttaaagtacaatccaactttaatgcatagtctgagatagctgtcctttgtgttttgcagacatatgagcgggc

SEQ ID NO: 51148 - DNA, 308 bp, Setaria italica
  Peptide Sequence Number=SeqID_117122
ttatggatgaggcaatggcaatactctcaatactgtccagccaccctgaggggaaggcggctattggggcagcagagcctgttcctgtgcttgtggagatgatcgggagcgggtcaccgaggaatagagagaatgctgcagctgtgatgttgcatctttgtagtggtgagcagcaacttgtgcatctggcccgtgcacaagagtgcggcaatacaataggtacccaactaagaacgggaaagtaacttaaggtaacctttaaagtaaaaacggtaaactaaaacggtaaaagtaaaaagggggtaaaa

SEQ ID NO: 51149 - DNA, 123 bp, Setaria italica
  Peptide Sequence Number=SeqID_117123
aatcttttaaggatgtccagttcagcacttgggtcatagctcttgttatacaatgacgtgctgtctctgtataacaagagctatgacccaagtgctgaactggacaatcttttaaggatgtcc

SEQ ID NO: 51150 - DNA, 438 bp, Setaria italica
  Peptide Sequence Number=SeqID_117124
cttttcctgaagttatatttcaatgtatgccagacatctacatcacatcaaatcctgaaaagcttcttttcaagtagatggtgatcatataaagtgggggatattaatctttgctgcattcagcagacatctcttgctgccctagttagttgttttgtttttgagtaccatttgaggtcagggctcaatccttgctacattttgcaactccatactatggttgcaacaggcttgtagtggaacagaatcccacacactgagacaagagattgctcagctaaaacttgcgaacacacttgcgttggctgttcatatttctctggacttggttattctgaagggaaaaacttgcacaaggcagctggggtacctaacaatggatagattcaagttgataaaggaagttggttatgggactttcgggagtgtatggcgtgc

SEQ ID NO: 51151 - DNA, 461 bp, Setaria italica
  Peptide Sequence Number=SeqID_117125
tatgggtgccataatggctgagctgttgacactcccatcctcttttccctggcaccagtccagatgagcaatcttggccccaaggattgtctcttgcagaagccatgaagtatcagttcccacagatcaaaggcaataaactatcggaagtgatgacatcagctagtagcgaggcaatcgacctcatatcatcactgtgctcatgggatccttgcaagagaccaaaggccacagaagtcctccagcataccttctttcagggttgtacatacgttccaccacctgtccggtcgaaagcttcagcacctcctaaaactcctccatgtgttggagcaaaaggagtttcagagaacaatgttgctcgaagatactcaactggaactctatccacgatgaaatctcatagcaccacatccacaaaattaaatagtttatctaaaactggtgtccaaagaaaactt

SEQ ID NO: 51152 - DNA, 328 bp, Setaria italica
  Peptide Sequence Number=SeqID_117126
aaataactaagaacaaataaatagaattactagacaagttgaataatgtgggctatgggtgccaataatggctgagctgttgacactccatcctctttttccctggcaccagtgaagcggatgagattcacaagatatgcaatgttatcggtagtccagatgagcaatcttggccccaaggattgtctcttgcagaagccatgaagtatcagttcccacagatcaaaggcaataaactatcggaagtgatgacatcagctagtagcgaggcaatcgacctcatatcatcactgtgcttcagtgggattccgttgcaagacgaccaagg

SEQ ID NO: 51153 - DNA, 378 bp, Setaria italica
  Peptide Sequence Number=SeqID_117127
tctgatgtccgcaactggtgctttcagatttttcaggctcttgcttacatgcatcagaggggctactttcatcgtgacctaaaacctgagaatttgttggttaacaaagatgtcataaagttagcagactttggtcttgcaagggaagtctcatcagtgccccctacacagaatacgtctcaactcgctggtatcgagcaccggaagtcttgctccagtcatctgcatatgattctgcagttgatatgtgggctatgggtgccataatggctgagctgttgacactccatcctcttttcccttggcacctagttgtaagtcggtatttgttagttattttcttactttaagttttatttttatttttgtttcttttaa

SEQ ID NO: 51154 - DNA, 233 bp, Setaria italica
  Peptide Sequence Number=SeqID_117128
gagcttcacgatgttaggatgattcatgcgccgtaaagctcaaggaggttatcagggaaaatgatatactttacttcataatggaatacatggagtgtaatctctaccaacttatgaaagatagggtcaaacctttcccggagtctgatgtccgcaactggtgctttcagatttttcaggctcttgcttacatgcatcagaggggctactttcatcgtgacctaaaacctgag

SEQ ID NO: 51155 - DNA, 373 bp, Setaria italica
  Peptide Sequence Number=SeqID_117129
agagaacaatgttgctcgaagatactccttttgctccaacacatggaggagttttaggaagtgatgacatcagctagtagcgaggcaatcgacctcatatcatcactgtgctcatgggatccttgcaagagaccaaaaggccacagaagtcctccagcataccttctttcagggttgtacatacgttccaccacctgtccggtcgaaagcttcagcacctcctaaaactccctccatgtgttggagcaaaaggagtttcagagaacaatgttgctcgaagatactcaactggaactctatccacgatgaaatctcatagcaccacatccacaaaattaaatagttttctttggacaccagttttagataaact

SEQ ID NO: 51156 - DNA, 267 bp, Setaria italica
  Peptide Sequence Number=SeqID_117130
caccacatccacaaattaaatagtttatctaaactggtgtccaaagaaaacttcacatggatcgtccggcaccgcagaagagtacgaggccaccagagaacagcaataaactaactatgaatcgggtaccagctcggaatagcccaggcaagtctcctataaatagttgccttgcccaattccctgcatggcatttgagttttgattgttggaaatatccttttcttttcttgggattgcagggaatcctgtacttaggcattcacg

SEQ ID NO: 51157 - DNA, 319 bp, Setaria italica
  Peptide Sequence Number=SeqID_117131
cttcactggtgccagggaagcggatgagattcacaagatatgcaatgttatcggtagtccagatgagcaatcttggccccaaggattgtctcttgcagaagccatgaagtatcagttcccacagatcaaaggcaataaactatcggaagtgatgacatcagctagtagcgaggcaatcgacctcatatcatcactgtgctcatgggatccttgcaagagaccaaaaggccacagaagtcctccagcataccttctttcaggttgtacatacgttccaccacctgtccggtcgaaagcttcagcacctcctaaaactcct

SEQ ID NO: 51158 - DNA, 311 bp, Setaria italica
  Peptide Sequence Number=SeqID_117132
catcagtgccaccctacacagatgagacttcccttgcaagaccaaagtctcaactcgctggtatcgagcaccggaagtcttgctccagtcatctgcatatgattctgcagttgatatgtgggctatgggtgccataatggctgagctgttgacactccatcctcttttccctggcaccagtgaagcggatgagattcacaagatatgcaatgttatcggtagtccagatgagcaatcttggccccaaggattgtctcttgcagaagccatgaagtatcagttcccacagatcaaaggcaataaactatcgg

SEQ ID NO: 51159 - DNA, 319 bp, Setaria italica
  Peptide Sequence Number=SeqID_117133
acaatacaagtagaccaaccctacacagatgagacttcccttgcaagaccaaagtctcaactcgctggtatcgagcaccggaagtcttgctccagtcatctgcatatgattctgcagttgatatgtgggctatgggtgccataatggctgagctgttgacactccatcctcttttccctggcaccagtgaagcggatgagattcacaagatatgcaatgttatcggtagtccagatgagcaatcttggccccaaggattgtctcttgcagaagccatgaagtatcagttcccacagatcaaaggcaataaaactatcgg

SEQ ID NO: 51160 - DNA, 183 bp, Setaria italica
  Peptide Sequence Number=SeqID_117134
aattaaataattatctattttgttctcttttctcttcatggtgttttctcttatcccttattaatttcaccatttagtgaagcggatgagattcacaagatatgcaatgttatcggtagtccagatgagcaatcttggccccaaggattgtctcttgctagaagtcatgaagtatcagttccc

SEQ ID NO: 51161 - DNA, 249 bp, Setaria italica
  Peptide Sequence Number=SeqID_117135
tacaaccggaaagttactttagacttaccaagtcatctgcatatgattctgcagttgatatgtgggctatgggtgccataatggctgagctgttgacactccatcctcttttccctggcaccagtgaagcggatgagattcacaagatatgcaatgttatcggtagtccagatgagcaatcttggccccaaggattgtctcttgcagaagccatgaagtatcagttcccacagatcaaaggcaataaaa

SEQ ID NO: 51162 - DNA, 219 bp, Setaria italica
  Peptide Sequence Number=SeqID_117136
caccggaagtcttgctccagtcatctgcatatgattctgcagttgatatgtgggctatgggtgccataatggctgagctgttgacactccatcctcttttccctggcaccagtgaagcggatgagattcacaagatatgcaatgttatcggtagtccagatgagcaatcttggccccaaggattgtctcttgcagaagccatgaagtatcagttcccac

SEQ ID NO: 51163 - DNA, 188 bp, Setaria italica
  Peptide Sequence Number=SeqID_117137
acaagatatgcaatgttatcggtagtccagatgagcaatcttggccccaacggattgtctcttgcagaagccatgaagtatcagttcccacagatcaaaggcaataaactatcggaagtgatgacatcagctagtagcgaggcaatcgacctcatatcatcactgtgctcatgggatccttgcaagag

SEQ ID NO: 51164 - DNA, 154 bp, Setaria italica
  Peptide Sequence Number=SeqID_117138
ggctactttcatcgtgacctaaaacctgagaatttgttggttaacaaagatgtcataaagttagcagactttggtcttgcaagggcctgaaaatctgaaagcaccagttgcggacatcagacgtccgggaaaggtttcgaccctattctttcat

SEQ ID NO: 51165 - DNA, 459 bp, Setaria italica
  Peptide Sequence Number=SeqID_117139
agcttcctcttcgtttcaactaccccagaacctcctcttccccttttcaaccaaaccctaaccaaatcttactgagactagccacttggaccactcgccagaagctaaaactccagctcgtgaccatcaaggcctctagtttcgaggcaaataaataagaaagccagcggtccacgattttcctgctcgatttcagcaaaggagatggggaacagtaccttgatgttgatgacttcttcgagggagggctccttgtcccgatcctgctccgcgctcggcgtcggcggccgattaatcgacgccctcctgcaagaaaccatcgccccgccgcatcacagtcagaaaattttctcaggggaaaaaggacgggagcagaaaattttcgagtaaccattggcagagcagtttgcagatcaatctagattgcgcatacgaacagcggacgattgtattgagccg

SEQ ID NO: 51166 - DNA, 386 bp, Setaria italica
  Peptide Sequence Number=SeqID_117140
cagcagttctgccttcactgaatcaggcactgatgctcttccttttggagtaataacatgaataagatcatccactgtcacattatttcttcctttcttccttgcataggccctacacacaagcacataaaggagatgtaaaaaaacaaagaatgatgagcacaaggaaagatatatattcaccagttaaaaccacacctattcccaacctatggaatgtgtaatgtagcactcatttcagatgctctaatgtggcagcttggggttttgaagacttcagagttagactaatttgattagcatagaatttggacaaagttagtaaaagaacccactttcagctggaacctgtcagcaaaagatttttaactattactttactttta

SEQ ID NO: 51167 - DNA, 336 bp, Setaria italica
  Peptide Sequence Number=SeqID_117141
acaaagtggaatctattcacgttggacccactgaagatgacccaatcaggtttcacatgatgcacattaatattatcatttatatcaagatatttcagttttctaatcctgaaagcaagcatcagttgagcaatgacaacacaatgcagcattacacgctgaggttcctttaacaatacaatattcaaggattacaactccgtgtcttggtacacctgaaaaatcgcaccaactgcctgtctgaccaaggagcatgtggacagaatcatgaagatcgccctggttcgttttcaatgctacaacaactaattgaccaacaatagacaaactagttaa

SEQ ID NO: 51168 - DNA, 304 bp, Setaria italica
  Peptide Sequence Number=SeqID_117142
cacattaatattatcatttatatcaagatatttcagttttctaatcctgaaagcaagcatcagttgagcaatgacaacacaatgcagcattacacgctgaggttcctttaacaatacaatattcaaggattacaactccgtgtcttggtacacctgaaaatcgcaccaactgcctgtctgaccaaggagcatgtggacagcatcatgaagatcgccctggttcgtttcatgctcacaactaattagaccaacaatagacaactagtttttactagacaacctttaggtacccaaacaaagaata

SEQ ID NO: 51169 - DNA, 201 bp, Setaria italica
  Peptide Sequence Number=SeqID_117143
cttgcataggccctgcatagcgccttcatctcatccctccagccgcactcgacgagccgctcacggaggagctccattaacttctccttctccccactctctaccaacttcacaaaccaaaacccacctcattgttaccacacccaaggaacaacagctaagatagaaacaaaactaatagcttcctcttcgtttcaacta

SEQ ID NO: 51170 - DNA, 276 bp, Setaria italica
  Peptide Sequence Number=SeqID_117144
taaaagaacttttaagaaggaatagaatacaaaggaaatagaaattagtagactagacaaataataccgaaggagagtgggcagatacccttactgatatcagtgttgggtacttactgactgaagcatccaagggcactcattttggattgcataggaacttctagtgtcaaaaaatgctttgctccttgagaatccatgcagctatgactcatttgatgctgccgttgctcttcatgtttctcgtttcaagcatcagagcagccagcccatacc

SEQ ID NO: 51171 - DNA, 162 bp, Setaria italica
  Peptide Sequence Number=SeqID_117145
aggcaaggtaggcaaacagaaacaaggggtactagatccaagcaacagatctctccctcaacttcgtgagcagcatcgagcaaaatggacaacagcattcctgtagttagcaagattttttgctcaggcactccaacaatgctgatgatcaggagacgaccc

SEQ ID NO: 51172 - DNA, 333 bp, Setaria italica
  Peptide Sequence Number=SeqID_117146
tggaagaaccaatctcacccgccgaatcacataatttacagacaaaatcttccgatctcatggctgtgcttcaaaatccagccactccgatgatttccagagagaattctcagcaaattttgcttcgaactcaaatcccctgcactgttgatcgaggctcgacggtagttgcccagccaatgagctgctgttttaccggatccccatggatgaagatgattctcggcaattatgtggaggcttctttactgcgacccaaaaaaaagaccctaccaaaaccaatactaccaacaatacgttagacaaggtaagaactaacttaaggttaactaa

SEQ ID NO: 51173 - DNA, 252 bp, Setaria italica
  Peptide Sequence Number=SeqID_117147
attgcccatgacaataaatcggacctggagaaaggaattgtcagaaaccatgactgttgcaaacatttgcaataagaggttcttagtaaatatcacaaaccttctgtccattaaaaggcttcacacagtgtacaccatagaacctcgtgattaaagagttcttgtattgactgacatgttggtagtagctatttaacattcgaattagcagctgcagcaacaagataccaaggcaattagcccctctacaca

SEQ ID NO: 51174 - DNA, 386 bp, Setaria italica
  Peptide Sequence Number=SeqID_117148
ggccataggatgaacctttcaaatcaaaacggcgaatgaatccggtattccgaacagaacagattgcccatgacaataaatcggaccttctgtccattaaaaggcttcacacagtgtacaccatagaacctcgtgattaaagagttcttgtattgactgacatgttggtagtagctatttaacattcgaattagcagcttgacttctgatttcctcactgttttaatcatgaagcggtcatcttgggtaaggtaaaagaagctcccactttttccgggtgaagacagctccctcagagcatcaattagaccaacaagaataggacaaagacaatagtaaataccgactaggaatacaaacaagacgaaacaaacttactacaaata

SEQ ID NO: 51175 - DNA, 399 bp, Setaria italica
  Peptide Sequence Number=SeqID_117149
aactagaatttaggtaggaaattaatctacatttctttggctcttgttcatagaaatgtctagtattctactgctgtggctacattgctgattatttgaggccttaagcgtccataatttttttgctgagtaacttaactattttgcaggatgaagatttatacactattttttctcgttttggaactgtgacatcagctgaaataattcgtgatttcaagactggagatagcttatgttatgcttttattgaattcgagacaaaggaggcttgtgaacgtgcatatttcaagatggacaattgtcttattgatgaccggagaatccatgttgattttagtcagagtgtttcaaagctatggggtcaattcagacaaagcaaaagaaatgcgaagaaag

SEQ ID NO: 51176 - DNA, 153 bp, Setaria italica
  Peptide Sequence Number=SeqID_117150
gatctagtctttgacgaagatgatgctgattattctgataagaaagatcacgaaaatggccacagaagaaagatccaaagaaatgatgatcgaagatcagagcttccccctctgttcctatcatcgtctttaccacgcctgattcctttctca

SEQ ID NO: 51177 - DNA, 437 bp, Setaria italica
  misc_feature (423)..(423): n is a, c, g, or t
  Peptide Sequence Number=SeqID_117151
agaatcattcaccatttcattcttgcaagttatttttatttgctaaagcttggtgttttttattaggttagatactcggattgctgcaacttctttattttgatatatctttaccaaaataatatacttaattaaatatttactgtgtctttcagcattctgtgttaaacagtgatataatttgacatttagtttcttctacctcaggttttattggattttattcgacaaataaatgatgacaatgggtatgtatgcatatctttccattgaaaaaatgaaatgaattttagcaaatcgtgccatgcatatctaaaaattgagtatgtgaagtaactgcatgcataatgctgaactgctgatgttgcaactgtcttatctttcaatctcaaatttcttccagacctatggaagagcaaaagngaacgttcggccag

SEQ ID NO: 51178 - DNA, 347 bp, Setaria italica
  Peptide Sequence Number=SeqID_117152
ttacaaacgaaatttaagaaataaactaacaagttaacaataaaaataagaaaactagaagaataataccaaaaagaacatcttcactgttcatggacgttgataggattaatccattttttatagcactgtgtatagttttgtggttttacaaaatggtttgattgttatgaggggtctcttgtcatttttaccgcacagcaagtatgtgtttgcctttggtgttctatcgtatttccatcacttggagcattctcttgtttctgataagccactatggaagatctgttgatggcattggcacaaaacactttctcatgttcaagttgcagtcttgcagagtccca

SEQ ID NO: 51179 - DNA, 212 bp, Setaria italica
  Peptide Sequence Number=SeqID_117153
tgatgaatgcctaattctataccagaaaagaaagtgtttactgtagccatgtgcacagagtacatacacgtagctttcacagtgtgagtgcaatatagtgtactctgtgcacatggttacggtcactttgcccactgatgaatgcctaattctataccagaaaagaaaagtgtttactgtagctacgaatgagacacggatgctctcaatcg

SEQ ID NO: 51180 - DNA, 310 bp, Setaria italica
  Peptide Sequence Number=SeqID_117154
gacaaggatgacattgctgtgctgcagcatgctgtaattatatacaccgaggagtttgtgaagttcactgaattcattggcgaggtttttgtgaatgcaccattctttatatctgctgaggatgcaggtgctgcagatgcaaggaaaaagtgatgaatacaaagaaactattattccagctggaaagactcatgaggtcatcttgagtgttgaagccataaactcatacattgcattggggaactttacttacctttagacaaacaaagggggaccctacaaacaataggaacaatttaggaatttacta

SEQ ID NO: 51181 - DNA, 360 bp, Setaria italica
  Peptide Sequence Number=SeqID_117155
aagtgttgtagacaaccatgcgttttgtttctaggagatgcttaaagaagttgagagtttgaattgctatcttgtagctgactacagacagcgacaacttctgtgaagggcatctatgtcatacctctttcgttgttctgtacaagctcttcaaaagttctaatatgtttttcatttaaattccttccagcaaccgggctgcagcttttctgcagctggttaagcttagcaaagcacttgctgatgctgagacaacagtcaagctgaagccagagtgggagaagggtcatttcaggaaaggttgtgttttggaggccatggagcgctatgaagaggcaatatctgcttttgagatagctt

SEQ ID NO: 51182 - DNA, 219 bp, Setaria italica
  misc_feature (215)..(215): n is a, c, g, or t
  Peptide Sequence Number=SeqID_117156
tctcgccgctcttggcgccgagcccggcggccacctcgtcgttgagtcccaggttgagcaccgtgtccatcataccgggcatcgacacctgcgcatatcacataacacaaaggcaaagcgatcagaagcgagcaggcgaatgaaccaaacgaacaaggatggcatggccatggcattaccgcggcgccggagcggacggagagcaggagcgggcnctgc

SEQ ID NO: 51183 - DNA, 425 bp, Setaria italica
  Peptide Sequence Number=SeqID_117157
tgttccactgccacctgaaatcgagaaagatgtggttgatcgggacatccttgatttaaatttgaggatttcacaacctaatgtgcatgatccaaaaagtgatggtatcctgactggatttggatcaaatcgtgattctcctgaagcttcaagttcaattgcttctcagccaataagacctcagtggcttgtgcatccccatagcacattgggttcaccccagcagccacagttgtacgcatctcctccagggttctttgtgaacctcaggttgcaggctcaagcctggggtatatttctcatttctcgacatggcgtacactactgcaagagactcgccggcacaacgctcctgttggctgtggcaagactagagctagcgtcggtgcgtagatctgcaaccgctcgcggcgggaatggagaat

SEQ ID NO: 51184 - DNA, 377 bp, Setaria italica
  Peptide Sequence Number=SeqID_117158
tcgtgattctcctgaagcttcaagttcaattgcttctcagccaataagacctcagtggcttgtgcatccccatagcacattgggttcaccccagcagccacagttgtacgcatctcctccagggttctttgtgaacctcagggaggctccaggtatggagaactaccggaccgttgagccggcccctcaggcgttccctccttgggcatggcaaatgcagggctcccctgcgccgttgctccctgctactgcagcatcatcaggattctctaccgccgccgcagcggccaccgccggcgtgccgccgccgccacttccaccaccaccgccgccaccatactgccacatactccgccgcccagcaccaccaccaccgc

SEQ ID NO: 51185 - DNA, 218 bp, Setaria italica
  Peptide Sequence Number=SeqID_117159
taaatttagggcaagggactgcgggaagcaggtgtacctgggtgagctcaaattctagtttcccctgttcaagctgccgttaactttcagtgtgcttagctttgattctgttctgctggtgccgtttctgtttcaggtggattcgatacggctcacgccgcagcaagggcatatgatcgtgctgcgatcaagttcaggggcctcgatgcagacatcaa

SEQ ID NO: 51186 - DNA, 351 bp, Setaria italica
  Peptide Sequence Number=SeqID_117160
acgggacgacgaccgaggggacacacgagaagaaggggttcatggagaaggtcaaggagaagctcctggtcagcactgagcagcttccagcttccatgccgaaagaaagattgtgccgtgctagggacagaataaattgacgaagaataaagcggcagctctgtgtgtgtttgcattgtagtactggctaccgtaaagtgtgtgtgtttgcattgtagtggctaccgtaaagtgtgtgtgtttgcattgtacgtgtttccagtaagtgtttagtatcttgatacttgttatttcctattctttgttgtaaaaataaaatcgtatccttccttttattataaaaaaaaaaaa

SEQ ID NO: 51187 - DNA, 265 bp, Setaria italica
  Peptide Sequence Number=SeqID_117161
ccaattatttgtcccgctggggtctcttagacagcgtgatattgccgtcacagcagcttcaattgatgcatcctcgcccttgccgtctgcttcacttgctttgttggttcggccaacgccaggactggggtaaacaaaccagaattgcttcctaaagaatttactaccgtcattgatgtcgctggttttctttcctctggtcaggaaaaccgtttgcgccaagagatagaagacctggagaaggatacagggtacaaactgcgag

SEQ ID NO: 51188 - DNA, 229 bp, Setaria italica
  Peptide Sequence Number=SeqID_117162
gcccttccgctccctcccgtccgctgctgcgccagtcggacctcgcaccccgccgcctctgctagggaggctgccgcttcctgggccagcgagttcgccggcgttgtgccatggaaggccgcagtctccggcgcgctcgcccttgccgtctgcttcacttgctgtaagctcgcttagtctttcttttagtctcaagtttgccatgcttggtggaacattcctaagtgaa

SEQ ID NO: 51189 - DNA, 332 bp, Setaria italica
  Peptide Sequence Number=SeqID_117163
ctttttctggtgacattgtgcatgttgaaatgcagaggttagtaccatgtccatgatgcctattttcatgctgtgctatgagttgtactaaccatttagtgctatgcagtggcgatgagctgtctcaagttgcctacattacttttaaagacaatcaaggagctgagacgacaatacttgttacgggggccacgatagttgacatggctgtcattgtcacacctgccactgattatgagctagcagcttatgttttagctgatctagagcccaaagacacaaaaccttctgccctccaaaaggccgaggacattgttgggaccatgctggcg

SEQ ID NO: 51190 - DNA, 384 bp, Setaria italica
  misc_feature (340)..(340): n is a, c, g, or t
  Peptide Sequence Number=SeqID_117164
aggaccaacgaataagttagaatatggctgtcattgtcacgcctgccactgattatgagctaccagcttatgttttagctgatctagaggtataactggagccatactatttactgcacgtgcatgatatagttgctgtgcaggttcataacattgcttttcaccccccagcccaaagacacaaaaccttctgccctccaaaaggccgaggacattgttgggaccatgctggcgaaaggatttatccttggtagggatgcactggacaaagcaaaagctctggatgagaagcatcagctcacatcaactgctactgctagagtatcttccttcgacaagngaatcggtctaagtgagaagatcagtgttggtacttcagctgtc

SEQ ID NO: 51191 - DNA, 252 bp, Setaria italica
  Peptide Sequence Number=SeqID_117165
gttgaggttgatgagctccgacgccgcctcctgccttcctcctcctccgccgccattcccgccgcctcccttgagcgccatgatctcggcgtggagcttcttgttgtgggcgaggagggcgtcgttctcggcacgggcggcgtcgagctgcttcgtcttccacctcgcgcgccggttctggaaccagatggccacctgccggggctgcagccccagcgcgcggccagctgcgccttccgctccggctccagt

SEQ ID NO: 51192 - DNA, 243 bp, Setaria italica
  Peptide Sequence Number=SeqID_117166
taggctgtagacctgtataaagcagttactctcatctggaggtgtgtatatagtaggcagcggcggatgatcaagaaccgggagtccgccgcgaggtcgcgccagaggaagcaggcatatatgatggagttggaagctgagatagcaaaacttaaagagattaatgaagagttacagaaaaagcaggtcgaaatgctggagaaacaaaaggatgaggtcctggagagaaggagccggcaagtt

SEQ ID NO: 51193 - DNA, 458 bp, Setaria italica
  Peptide Sequence Number=SeqID_117167
ttgaagggtcacaagcataaggctcggttgaaaaaaaaatcactgtgcaatgcagccgtcgcagtttgacgctcagctggatcaattgcaagcaaagtttcaaccaatggcagagccgaagcaggaaaatctttaaatgtctccctgatgcaacgtttatagggctgttggggtttgaatattgttgcatgtggcagtttagacttcttccaatactcctctgaaggggagccacatagcttgaaaatcttgtgcaactgttccacctcggtgcgcccaggcattatgggcttcccatacaaaagctctgccagaatgcacccagcactccacaaatcaatgcctacaccataatcagtggcaccaagtaacagttccggtggccgattaccactagtcgttgtacctacgtcggtcttcgttctatttggtccgtctttattgtccgttggtattct

SEQ ID NO: 51194 - DNA, 378 bp, Setaria italica
  misc_feature (67)..(67): n is a, c, g, or t
  Peptide Sequence Number=SeqID_117168
aaatgtctccctgatgcaacgtttatagggctgttggggtttgaatatgttgcatgtggcagtttanacttcttccaatactcctctgaaggggagccacatagcttgaaaatcttgtgcaactgttccacctcggtgcgcccaggcattatgggcttcccatacaaaagctctgccagaatgcacccagcactccacaaatcaatgcctacaccataatcagtggcaccaagtaacagttccggtggccgataccacagcgtgaccacgcggctcgtcattggccgcttaatagaccgtaggaatacaaaagaaacgtacgaaccaaacccaaaaataaccgaacaaataacttaaagaaaataaccaattaattaa

SEQ ID NO: 51195 - DNA, 269 bp, Setaria italica
  Peptide Sequence Number=SeqID_117169
aagtttgcttggatctctgcattagcttctggtgctggtccagccctgtgagatcgatcccgtggtcgagtcctttttgcttctcctttggcctttgcagcagctcgtagccttctagcttcctcatctctcaacttggcatccatctccttgcttggtggatatgttggcaaacttgaagggtcacaagcataaggctacggttagaaaaaaaggaactacgaaccaacgggaatacgaattacttactaactaagggtacttaggta

SEQ ID NO: 51196 - DNA, 172 bp, Setaria italica
  Peptide Sequence Number=SeqID_117170
attcagttgcccatgtgtatatatggagtaattcttttttcaatcatcaaagcaccagccaaacaattccactaaagtgcaagcagtccctttacataaaaagaagaaagaattactccatatatacacatgggcaactgaatagtcataaagagcataaatacaagggcga

SEQ ID NO: 51197 - DNA, 491 bp, Setaria italica
  Peptide Sequence Number=SeqID_117171
ggggttgaaggaggtgatcaagctgacctgatgacgctgctatcaatcctaagaaaagcggagatggcttgccaggtcttgacttgaattcagggtgaaattgtgcgccaacgaaaaacctatgagttggcagttctaaaatctgcacgcggtaaatcaaacacattagaacatggacatcaattggttaattattcatgaaaagtgctagtgattgtacctccatgcgtcttccgctttcatccctgccaacgaaagaaagccctgccttctcaaattctgggaccatatcaggattcacctcgtatctgtggcggtgcctttcatcaacataactaacattgcaatacagcttagcagatttgcagttgtcgacctgaaaaaaggtcctccttgatccaaggcgcattgttgcacccatatggtttggatccctctggcatgaaaacaacacatggtgttttgtggttggatcaaattctgtgctgtta

SEQ ID NO: 51198 - DNA, 180 bp, Setaria italica
  Peptide Sequence Number=SeqID_117172
cgcagcacacagccacttgaagaacaagtccaagtcctcttagtccgcggacactatgttgggtaggctttgttttctgctcaccaacaacatttagaaccggtacaagactgacatgcaccaagcagaaaacaaagcctacccaaaatatcaggtataagtccaagtcctcttagtccg

SEQ ID NO: 51199 - DNA, 136 bp, Setaria italica
  Peptide Sequence Number=SeqID_117173
gtcgtttcccctttccggattcgtgccttttctgtgatgctgcaactagaactgctctgttatcacgttttctagatgattatcatgatatagaaaactgtggacaatcagaggaaggagaagcagaagaaaagaa

SEQ ID NO: 51200 - DNA, 259 bp, Setaria italica
  Peptide Sequence Number=SeqID_117174
aatgtcgaacatggtcagtggagatgggattggcatgatagaagttggggtagattccttctatcgtcccccaactgggtttgctggtcctttcattactccaggaggaatcccaggtgtgcaaggtcctccacatatggtggtttataaccactttgccccagtagggcagtttggtcaaatgggccttggtttcatgggagccacttatatccctggtgacaaacaacctgattggaagcagagccaaggaccacct

SEQ ID NO: 51201 - DNA, 266 bp, Setaria italica
  misc_feature (43)..(43): n is a, c, g, or t
  Peptide Sequence Number=SeqID_117175
tttagtcactgaactatggttatcttaattttctggtctttanaattttttttgcaacttggtcttatgtcaggttatgccattaactcaaactcaacttgaagaagctatgagaccagctaaatttgaacaacaggctggttccagcttttccttggagtccaacaatgctttgtctccaacagtaaccacagaaaaggcattcccttcatctgctagtcctattaactctcttcttgctggtgagaagatccaatttggggcag

SEQ ID NO: 51202 - DNA, 453 bp, Setaria italica
  misc_feature (16)..(16): n is a, c, g, or t
  Peptide Sequence Number=SeqID_117176
aaaaatggcatgcatntaagttgtttcagcgctttattcttgttactttctgttgaaccattactcatgtcgcagcatatcgaactggtctctcctccctctcctggtgctgaagtagcaacctttgatattgttggaccagtttgtgagtctgcagatttcctcggaaaagatagggagcttccaacacctgatgagggagttggacttgtggttcatgatgcaggtgcctactgcatgagcatggcttccacctacaacctgaagttgagaccgccggagtactgggtggaagaggatggttctatcgttaagatcaggcatgaagagaagcttgatgactacatgaagttctttgatggtcttcctgcttagacatttatctgcaaccgcggcaagccggcaagcacgttttctttgggataattagagtttctttgccaatctcattta

SEQ ID NO: 51203 - DNA, 183 bp, Setaria italica
  Peptide Sequence Number=SeqID_117177
cgccggagtactgggtggaagaggatggttctatcgttaagatcaggcatgaagagaagcttgatgactacatgaagttctttgatggtcttcctgcttagacatttatctgcaaccgcggcaagccggcaagcagataaatgtctaagcaggaagaccatcaaagaacttcatgtagtcatc

SEQ ID NO: 51204 - DNA, 473 bp, Setaria italica
  Peptide Sequence Number=SeqID_117178
aaaactaaaacgaaaataaacctaaacttaaacgaaacgaaacgggaaaaggaaccgaaagaaaagaaaaggaactagaacgacggacggacgacggaatcaatcaacggcgctggggacgctggagggcgcgttcaaggactgctcccgtgggggtgactacttcggcggcgacggcatcgggttcgtggacgtcgtgctgggcagttacctcgggtggttcaaggtgttcgagaagatggtcggcgtcagggtcctggacgcggcgaggacgccgctcctggccgcgtggggcgagcggttcgccgcggcggatgcggcgaaggacgtcctgccttctgacgttgacaaggtgatcgagttcctgcaaacgttcctggattagtagttagtttggtgggtgctcctccggtgttgttgctgaacgccgattgaattgttgttgtttggtactttggtatggttattttcac

SEQ ID NO: 51205 - DNA, 210 bp, Setaria italica
  Peptide Sequence Number=SeqID_117179
tgggtggggagctgcccgccccggacgactcgctcgctgcctgcggggaactggccgattccgagtatggctgcggttggtgcagcaaccaaggagatggaggcattgcatgttggacaaaatgatgaaaataaaaagagaatctgattaaacaggacaaagttgcaagtagcactagtgcagttcttgcaatactaaagtcctacacca

SEQ ID NO: 51206 - DNA, 225 bp, Setaria italica
  Peptide Sequence Number=SeqID_117180
gtttcgtgcaagctttgcgtgtcatcatgcacccaaagatgggatcgagcaggtgtgatcgagatcaggtatgtagtacctttctcggagcacttcaagaagtcaccgggctggccgttgatggtgaacgcgtcggagacgttgggtgcgccgcccgtcctctgcgcctcccggatgacatcgacagggttcgcgttccaccactcacctgtccatccatcaccg

SEQ ID NO: 51207 - DNA, 133 bp, Setaria italica
  Peptide Sequence Number=SeqID_117181
ggatgtgaatggggtggttctccggcgtgacgatgctggtgtcctgcaggacgagctgcacgacggagccgaacctgagcgggtacagcaacttcgaccccaagaaggacgtcgagaagttcaactacgtcga

SEQ ID NO: 51208 - DNA, 409 bp, Setaria italica
  Peptide Sequence Number=SeqID_117182
cgcactagtaaatcggcaattttttatgtcgttaataagagcatttctgtgagcatctgaaactgccgattcattcatttcaatcccaacaacctgccacaattagtaactagatttgaaaagattattccaaagaaaacagattcctctaataagctacataagttaataagagctcagatctggcccatgtattatattacatgacaaacacttaaaaacatatgaattggcaaaagaaatcaccattccaacacgatgtgctaaggtcagaccaatagttccagtcccacaacatacgtcaaaaagtaacgtgtccgaattgaggttagcccaatcaccagcaaggctatacaatctttctgcagcaagagtattaacctggaaaaagctgtcggtgattatggag

SEQ ID NO: 51209 - DNA, 270 bp, Setaria italica
  Peptide Sequence Number=SeqID_117183
cttttactggtactattggggcccttctccttggtttgtttcttggcaaccccagtcactacttcaaatattgtgggcaagttatttatcatgttgaagagtcgcctcctgttaggagagaaacaaaaatacatgttttcaaacatccatagcagcagaaaactgtattcaaacagatagtaatctgaatgctccgaaccagtggaacccagatagcagtattggaatccattacaagaacctgtctattgtttacttaagagcccttcg

SEQ ID NO: 51210 - DNA, 421 bp, Setaria italica
  Peptide Sequence Number=SeqID_117184
gtgtcagttggtattttctagtagggtgggaatacctcaagtttttgactaaacgagatttggggacaaccctgaaagggtttaatgttatttttagtcagctcgtgttgtgtttcctgtttggctgtgtcactatggtaacatagacttccagtccaggttactggttactgcctgttgaatttgctgaactatatcattttgtttcagagaaaacaagagaaagagattgctctatatggtagagtgctgtcatcggatgatgttgaattagaaaatgaagatattggtgatgatggtgaggagatggaaaacgatgaacctttgtctgaaatcaaaacttatgaagatgacgggactagaatcacagtgaccaccagcgaaattacttgtgaagacgatgatattggaccgagaaatg

SEQ ID NO: 51211 - DNA, 263 bp, Setaria italica
  Peptide Sequence Number=SeqID_117185
cggcggctgctggcggtgcgcgggctccggtgggtcccggcgcttgagcaggtactggtccttcttgctggacttggccttcatggcggaggcccccggcacgatcttctccatgagcctggcggcggccccgccggcgccgcccctccggcggccgggcatcggcgaggcctggtccggcgtcttcctgggcccacccttgagaggccgagctgcaaggcgaacgaggaggccatgtcagtcagccactcggtcaatgctcc

SEQ ID NO: 51212 - DNA, 263 bp, Setaria italica
  Peptide Sequence Number=SeqID_117186
gctgctggcggtgcgcgggctccggtgggtcccggcgcttgagcaggtactggtccttcttgctggacttggccttcatggcggaggcccccggcacgatcttctccatgagcctggcggcggccccgccggcgccgcccctccggcggccgggcatcggcgaggcctggtccggcgtcttcctgggcccacccttgagaggccgagctcgttgtgctcgatcagccgctgctttcttctcggcttcaagcaccttctccgga

SEQ ID NO: 51213 - DNA, 455 bp, Setaria italica
  misc_feature (347)..(347): n is a, c, g, or t
  Peptide Sequence Number=SeqID_117187
taacttaattagtacaatttagacggtacggaaacaaaaacaactgagctcctccttgcaggcacttgaatggaaaataccagtaaaggttagaggatttgagacccaaatggagaagtggatgggtgcttgtgattgtattataacaaaggctggaccaggtaccattgctgaagccttgataaggggtcttcctataatccttaatgatttcatacctggacaggaagttggcaatgtcccttatgttgtggacaatggtgcaggcgtgttctccaaaagccccaaggagactgctagtcttgttgcccgttggtttggtccagactcagaggaattgaaaaggntgtcagaaaatgcactgaaattggctcagccggaagctgtctttgacattgtcagagacatccatgagctctctcgggagcaaggcgtgatttcacagatatctagtt

SEQ ID NO: 51214 - DNA, 276 bp, Setaria italica
  Peptide Sequence Number=SeqID_117188
atcacgccggctggccactcaacaacatggagagctcatacaagttcatggtgaagcatgtgcagccggcgtgatccttgcacagatccttgacgaagaccctgtactcgtcgccgaactcgatccggaaggcgtccttgatggcctccgcggaggctcggtggccgccgccggtgtcgctcatgaggatgaggacgttcttggcgcggttggccccgagctggacgagctcgacggtgccctcctcctcctcccagaagggctcgtcgtcgtcct

SEQ ID NO: 51215 - DNA, 408 bp, Setaria italica
  Peptide Sequence Number=SeqID_117189
aattattatacaatttagacggtacggaaacaaaaacaactagaagactacctaccttagacaaggacaacttagaatggaaaataccagtaaaggttagaggatttgagacccaaatggagaagtggatgggtgcttgtgattgtattataacaaaggctggaccaggtaccattgctgaagccttgataaggggtcttcctataatccttaatgatttcatacctggacaggaagttggcaatgtcccttatgttgtggacaatggtgcaggcgtgttctccaaaagccccaaggagactgctagtcttgttgcccgttggtttggtccagctcagaggaattgaaaaggatgtcagaaaatgcactgaaattggctcagccggaagctgtctttgacattgtcag

SEQ ID NO: 51216 - DNA, 259 bp, Setaria italica
  Peptide Sequence Number=SeqID_117190
gcgccaagaacgtcctcatcctcatgagcgacaccggcggcggccaccgagcctccgcggaggccatcaaggacgagctcgacggtgccctcctcctcctcccagaagggctcgtcgtcgtcctcgggcccgcagagcgaggataccgaggcggacgatgacgcgccgtccccgcgtgcccggcccgcggaggagagctcccccgcgtaggtgaggctcttgcgcagcttgcgcctcatccgctgctggttgtggtacg

SEQ ID NO: 51217 - DNA, 233 bp, Setaria italica
  Peptide Sequence Number=SeqID_117191
caccacgtgagaagcttctatgcatcatgagctgctgtcaagtcatcaataacttgcttctgaacatatcaatgtcaaatgatcgaacactatctggggctgatgagttccttccaattcttatctatattactatcaaggccaatcctcctcagctgcactcaaatctaaagtttgttcagctctttaagaagggaaacaaagctagtttcagaagtcgaatattatctacg

SEQ ID NO: 51218 - DNA, 223 bp, Setaria italica
  Peptide Sequence Number=SeqID_117192
tgacaacttgcctatacaggtcatgcaaatgcttgacttcctctggactcaaactttcagtttctgagtccatgaaagggaacttggagcctgctagatcagcttcctccttacgtgcccttgcagatgtgggaagcccctgtgagctactagggctagcaacagatatttgagtaactgtcttgctgattccatatgcttctgaaactcagtttcctccatt

SEQ ID NO: 51219 - DNA, 435 bp, Setaria italica
  Peptide Sequence Number=SeqID_117193
cggtggcggccgtcgtcggtggccagtcagaggcgtcccagatggagccgtacacccacatggggcggtcggggaacgtgagctcggcgcggcgctcgtagcggcggacgggcacgtcgtcgacgaagaaggtgatggcgtcggggttccagaggatggcgtaggtgtggtaccccgccgtggggtcgaaccagaggtggaaccgcatctcgcggcccacgatgcggccgtcgccgctgccgcggacgtacacgttggtctgcagcgtgtagggctcgcccgggatggtgcccaggaactccatgtcgatctcgtcgtggaaacccgggtgcgcctcgttgttcgacagctgcaatacgagacatctttgctatcaggtactctgttgttgttgccacattacaagtgcagaagcaaagcaattttgctcagagt

SEQ ID NO: 51220 - DNA, 369 bp, Setaria italica
  Peptide Sequence Number=SeqID_117194
accaattcaacatgatatttctttgtgcacatgtttacttaacttttagtgcatattatagcattggtactgcttagttctgtgatcaccttgaattcttttcttttttaaaaaatggaaattaaaagcatgcaaatttgttagcaattaggttattgcacctatgagttttatcattagcaagatattcttaaatactgataatttgctgatgcaggatgctgttctcttgttgttcatcaaactgtgaatgtgataacacatgtgccaacaaaccattccagcacagacctctgaagcaaaccaaattgattacgatttgtccagtttggagcagatcaggattgtcattgtggatcttcaaactgc

SEQ ID NO: 51221 - DNA, 353 bp, Setaria italica
  Peptide Sequence Number=SeqID_117195
tgggtgaagttattgatgacagagcatgtgagaaaagattatggcaaaatgaaaaggctgagtgacactaacttctacctttgtgaggtcagtagcaatatggtcattgatgctactgacaagggaaacatgtcccgttttataaacccatagttgtgaaccaaacacagagatgcagaaatggactgttgatggagagaccagagttggaatcttcgcccttcgtgacataaagaaaggggaggagctgacctatgactataaatttgtccagtttggagcagattctaggtatttgttctatttgttggtattctttcttaaactttgttccgtttaaaaaatttgttctt

SEQ ID NO: 51222 - DNA, 293 bp, Setaria italica
  Peptide Sequence Number=SeqID_117196
ggttggtttcctatttctaagggtccttcttgtattgtctagtcgtagtacttccttcttgtattggggtctttggccgggagaagcggggcacctggcggtggagggaggaagggagggatggagccatggaggggatagagagttgatgaggcagagagaagaacgaagatggcagccacgtcagtgccacgtgggatttagaaggtgtttgtggcagttttggacataggtgatacgctttaaaaagtttggtaaagaaagtttaattttcttatgtatagaactttctt

SEQ ID NO: 51223 - DNA, 346 bp, Setaria italica
  Peptide Sequence Number=SeqID_117197
tcccaagacctgctataggcctgttcacaatgagcccacaatgaggcttgcaagttgtagtttggaagtagctcattctttcctgcttcttgaatagttaaattaacaagagccaaaccaacaagaggaatcagtcccaagcgccgattactctctacaccaatccgattccagaagaggagacgcggaggggaacgaggaggaagacgggcggaggcggaggattccttcctcctccgaggtggctcgcctcctggcgtggcggatggatgacgtcgcaaagcttgctccagtctgggctcctcatatccgcgtctacggggaagatagaaaaactactcacact

SEQ ID NO: 51224 - DNA, 236 bp, Setaria italica
  Peptide Sequence Number=SeqID_117198
gaaccaccactgcctccacgtcgatttccattccctccacctccacctgacgcttgttctctcagcttagccatctgctctttcagcaagtcttgtatggggcgaggcttttttgcatcagccatagctttcttcaaagattccattaaaggctgcaacaaagcaacatacaagttcaccaacatcatcagcactgtcagggtttccctttccattaaggcgcaaaacaggagtaa

SEQ ID NO: 51225 - DNA, 156 bp, Setaria italica
  Peptide Sequence Number=SeqID_117199
catggctgtttcgacgagttgttagatgtccttgtcacctggagcaatgcaaccaagtatttgcccacccctattctgcattctgcaatgggtcaaaaaacaaaggtgctggaacacccgagttaagattcctggggcatgtggacgccagttccc

SEQ ID NO: 51226 - DNA, 491 bp, Setaria italica
  Peptide Sequence Number=SeqID_117200
agatgtacttgaagcccgagtcatcatggatcgggaatccggcaggtcaagggatttggatttgtaacttatacatccagtgaagaagcctcagctgcaattactgccatggatggcaggaacttcaaggccgacctgtaaaggtgaaccatgccaatgaccgtgctggtggaatacgtggaggtggtggattttggctccggtggtgcttatggtggtggaggtggatatgctactggtgggtatggcggtggcggtggatataattctgggggatatggtggtaacagtggtggatatagttctggagggtatggtggtaacagcggtggatacggtggagatggtggcggcagtggcggctatggtagcaactccaacaatgcttctggtggcggatatgctggcaagagtggttacaatgatggaagactaaccaagtaggacggttaatagactaagacaaacttacaaacaagtagacttactaa

SEQ ID NO: 51227 - DNA, 427 bp, Setaria italica
  misc_feature (73)..(73): n is a, c, g, or t
  Peptide Sequence Number=SeqID_117201
tgggtacagttctccaaacacctatggtgcaggcaataacaacagtggagctcccagtggtggaagcttcggnggttttggtggcagttcagcaatggaggtttcactgctgctgctgctgctgctggtcccaacagtggtagtaactttgctggaaatgcgactagtgtcggcttcagtggccacaacagtgctggaggattttctggtggcggggcaacaggatttggggctaacaagccgcagtacaatggccaagacgacctgctgggcgacagctacttcgctgacaaggaagcggcagagaatagatgagagtgctgcacccattcatgattcatctgatgcacgttgctgcagatcctttgtttatccaagctgcatcggatcgaccctaataagctcagacaaagtttttatttgctct

SEQ ID NO: 51228 - DNA, 375 bp, Setaria italica
  misc_feature (20)..(20): n is a, c, g, or t
  Peptide Sequence Number=SeqID_117202
atattgaaaaggaatgaagntggcctctatatcagttgcataacatcttgctccaatctctgggctctaatcatggatgctggtactggtttcacttctcaagtttatgagcttacgccacatttccttcacaaagaatggataatggaccaatgggagaggaactactatataactgcacttgctggcattcccatcctgatcttcttctttggttgttcatctgcctcttcctctatcaataagcggcctcgcttctggccaacttgatgtataagcttctgagcaccatcagtgttaattggtctgatatctggatttggacccactacactatcaaaaaagtgacaacaacaactttagacaataagttta

SEQ ID NO: 51229 - DNA, 309 bp, Setaria italica
  Peptide Sequence Number=SeqID_117203
ctccaaaccacatgaaagattgctaggatacagtacgcccatagcatactgatgctaggtagagattcttggaccattttctccttaacatgttgactagggaatgcagatgtcctcaatgtctcttgggtttcatcagtaggccgcctccttggcacacttaaaacaaatgcagcctgatcccaagttgcagcagtcgcggttatccggtaaccattgtcccacctcttatgaattcccctacaaatggataaacaagaagtggcgagatggtttctatgttacttccattggctaacttgtcttggt

SEQ ID NO: 51230 - DNA, 499 bp, Setaria italica
  Peptide Sequence Number=SeqID_117204
atgcagcctgatcccaagttgcagcagtcgcggttatccggtaaccattgtcccacctcttatgaattccctcactgggatacaagaagtccagttcaacaacctgatcagaaaatcctgcattacgagacatgacaactgcccacctacttccagcagttgccatggaagtaacatagaaaccatctcgccacttcttgtttatccatttgtaggggaaatatcactaactttgtaggactgctgtgtatacgctgtgcctggatagatttaccacatagtcaaaagaatgtttccgcagtaagacagaaaggggcattactactgcaggctttagctactttacctttagacatcactactagggagctgccattgtttgctccagcaagtgcagttatatagtagttcctctcccattggtccattatccattctttgtgaaggaaatgtggcgtaagctcataaacttgagaagtgaaaccagtaccagcatccg

SEQ ID NO: 51231 - DNA, 379 bp, Setaria italica
  Peptide Sequence Number=SeqID_117205
atgaacatacccttttgaatgcattttctcaagtatggagatagcttcaatagcgatacaagcaaccatctcgactgacattgtgtgagagttattattccagacatcccacagactgggtccaagcatatccatgaccataacatagtagtccccttggcgtcctttgtagtggactcgaggaaccccatgaatgccaccaacggcattgtagaccgcccactcgtaaggaggggcatggttacatcctttactggtcctatgctcaaacttcaacgccacctcaactgcacctggaccagtaggtgacatgcgatggaccaaacaataagaacttaggaccaaaaacctacctttacccaaagactttactagtaca

SEQ ID NO: 51232 - DNA, 340 bp, Setaria italica
  Peptide Sequence Number=SeqID_117206
acttgagttcttcctctaggtggctatttttatctggcgataaatctgtccatgggaagatactattctccagaattgagcttgtgctttgcagctcaaatcccaagctattgcttccactgctccctttccagcagttgatgtgttacagcaatgaatttggcggcaagcatggaggcagcacgaatccactctggtttaaccagaattagtcaagctgcagcaccatttccactgtgatgccaccagtttcgccatcaactctctcaacatcaacaggactcaataggtcaccggacaatccacactctggaggtactggcattcagagtaaaccaaa

SEQ ID NO: 51233 - DNA, 369 bp, Setaria italica
  Peptide Sequence Number=SeqID_117207
ctcaggaggaggaagaccttatcattgaacttcatgctgtcttgggcaacaggtaaatttaatccccaaatcacactgtcagaattttgcacctattgcttcaaagcaagctttccttaactatgcctttttcacgtaaatgaacaggtggtctcagattgcaacacggttgcctggaagaactgataacgagatcaagaatctctggaattcaagcatcaagaagaagctccggcagaaaggcatcgaccccaacacccacaagccccttgctgaggttgatcgcaaaatagctccaacaatcagtactgtagtagtaaccttccgtagttcctagtcgtattatttgtaccctttcttaagttgtta

SEQ ID NO: 51234 - DNA, 317 bp, Setaria italica
  Peptide Sequence Number=SeqID_117208
ctccaacaatcagtactgagagaacctccgagtccagcgatattgacccttcaagtggtggtgcacttggcaacttgagccatctcctcagtgagacagcacaatcaccagagctgctgccagtgctcgctgccgctcaacaggcccaattccaaatttccctttccagcagttgatgtgttacagcaatgaatttggcggcaagcatggaggcagcacgaatccactctggtttaaccagaatgagtcaagctgcagcaccatttccactgtgatgccaccagtttcgccatcaactctctcaacatcaacaggac

SEQ ID NO: 51235 - DNA, 253 bp, Setaria italica
  Peptide Sequence Number=SeqID_117209
gtttgggtttaatcttgcaaatgcatattatatggctggtgagcataggaattcaaagaagtgcttggagcaggtaacaactgttgttatatttcaatttcattttattgacattattgccaagacatgtattgcaaattatctgttacaaaatttgataatattgatttggtttgtcaactgctggagaaatttctctgatgagaacacaataagtgcttgcctagcacccaattttttttgcattcacggg

SEQ ID NO: 51236 - DNA, 247 bp, Setaria italica
  misc_feature (243)..(243): n is a, c, g, or t
  Peptide Sequence Number=SeqID_117210
tttgtattaacattcttttctttgcaaattcatagttcctatgctgccgataaagatgttatcaaggtcgttggaactgtgtcctggatatgcaccggccaacaacaacctggggcttgtatttgtcgcagagggtcgttgggaggatgctagaagctgttttgagaaagctctgcaatctgatcccctgcttgatgcggccaaatcaaacctgttgaaagtccttgcgttgtctaagaaacngtag

SEQ ID NO: 51237 - DNA, 350 bp, Setaria italica
  misc_feature (298)..(298): n is a, c, g, or t
  misc_feature (309)..(309): n is a, c, g, or t
  misc_feature (321)..(321): n is a, c, g, or t
  Peptide Sequence Number=SeqID_117211
cctaaagctgcatcagtttgggttaatcttgcaaatgcatattatatggctggtgagcataggaattcaaagaagtgcttggagcaggcatatgattgggttccagtgtactgacgatcaacttctctgggctgcaaatgaaatggcaacagttctgaaagaaggtgacccttcagcagttgatgccccaatcgcatgggctggcttggcaatggctcacagggcacaacatgaaattgcagccgcctatgataccgaacacaacaatcttaacgacgcagaagaacgggctctttanactctaaaacnggcaatccaagnggacccggatgatgctgttcaatggcatc

SEQ ID NO: 51238 - DNA, 443 bp, Setaria italica
  Peptide Sequence Number=SeqID_117212
ttttttgtttttttgttttttaggttttttgtttttactttttatttttcgttttagtttcttttccctttgttaggtactttgtccactaaaggaggcacacgccatcggagaatcactccagatcaagatcgaggagctccccgaagtcgagcgagcattcgttcacctcgatttcgagtgcgaccacaagccggagcactcgattctcagcaagctgcccagcaaccagccttgacccgaagggatcccacgtggtggttggcaaatagattgtcgcgcaggatctgctacagtgctcggtgtcttgtgctgcatgtgacaaaaaactagagtctaaatcagttttgtggtcgtaagatgtagatcaggcgcgtctaagactacgagggactagcaggtgcacaaggccgagattgttctgagtgagtgtggaaccctct

SEQ ID NO: 51239 - DNA, 225 bp, Setaria italica
  Peptide Sequence Number=SeqID_117213
agtaggtggttctttcagcaatcagacctcaatgttagattgtaatagcatgatcatctcatatgatcactggactcacaggttgacatcgagctccctgaggacttgccactaaaggaggcacacgccatcggagaatcactccagatcaagatacgaggagctccccgaagtcgagcgagcattcgttcacctcgatttcgagtgcgaccacaagccggagca

SEQ ID NO: 51240 - DNA, 232 bp, Setaria italica
  Peptide Sequence Number=SeqID_117214
ctggctctattgccgaacatctggtaacaagatcgtccgtgcttacgctaagtgggtttggctgctgctgtccttggcgatagattctactggtggattgatccagttggtgcaattgcccttgcagtctacacaattacaaattggtctggaacggtgtgggaaaatgcagtttcactggtaggtgaatcagctcctccagaaatgcttcagaagttgacatatctagcta

SEQ ID NO: 51241 - DNA, 374 bp, Setaria italica
  Peptide Sequence Number=SeqID_117215
gagtagaacaatataataatttggttgattaagggctccaaaatttatctgtaaacttctaaatataataaattttggttgattaagggctccaaaaatttatctgtaaacttctaatgtttatacatgttttataatacttatgcctctgaaaataaaccacaagctttacataccagcatgtactgatagagcaataggagattgcccattgttgaaggaagactgcccatgtactgctaaaatggaactatgggttaaccagaaaatatacatggtagtaatttctggtttggatcagcaatacatgggttaaccagaaaatagtttgcatagaagcccagcaaataactactgctgctgcccattgtttg

SEQ ID NO: 51242 - DNA, 391 bp, Setaria italica
  Peptide Sequence Number=SeqID_117216
tagctgcgagtgcagctgctgtttggaatacctgcatgatgaagcacatcctccagtcatttaccgagatattaaaccatcaaacattcttcttggtgaagggtatcatgcaaagctctctgactttggacttgctaagcttggcccggtcggtgataagacacatgtgacaacccgtgtcatggggacacatggttattgtgctcctgaatatttcttaactgggcagctaacaattaagtccgacatctatagttttggtgtcgtgttccttgagctaattacagggcgaagaccaaatgacagcaatcggcctcctagaaggaaaacaaaagaaatttaaagttaagaacaaataagggaactaaacgtaaaccaaaattaaagtaaa

SEQ ID NO: 51243 - DNA, 385 bp, Setaria italica
  Peptide Sequence Number=SeqID_117217
cagttggcagcatctgaggttcaagcaaaggattaatctttgctttctgtactatagttgatacttaatttcatgcagactagttggtgttattgttgattgttctaaatacttcagacgcatgcatgacttggcattaaattattgggctgttactagataacatcgagtatggcatatgacatgatggttcattcttcaggtgacgtacaaaactcttctgacagcacgtagcaattatggatcattacaggaagtccagcagtgcttagcaatctatcaggaaatgaggaaagcagggtatcaagcaaatgactactatctcaaggaattaatagtagaatggtgtgaaggggttttgtctagtgggagtgataatcgagta

SEQ ID NO: 51244 - DNA, 282 bp, Setaria italica
  Peptide Sequence Number=SeqID_117218
atgagtaagcatcatccatgctgagcctgaaattgcagacagcaagcatttatattccctaggtgcaaagtaaagaaacaaagatatggatgatgcttactcatcagtttattgaatactgcaatatggggatgggacaatctaccaaggacagtcctgatgtattatgccaatttttctttcttcaccagagggttacttccacacagtcatctgcaatgtcccggagttccgcaacaccacagtcaaccatgatctacatttcatttcttgggacaaccc

SEQ ID NO: 51245 - DNA, 112 bp, Setaria italica
  Peptide Sequence Number=SeqID_117219
atcagtttattgaatactgcatatggggatggggacaatctaccaaggacagtcctgatgtattatgccatccccatatgcagtattcaataaactgatgagtaagcatcat

SEQ ID NO: 51246 - DNA, 130 bp, Setaria italica
  Peptide Sequence Number=SeqID_117220
aatctaccaaggacagtcctgatgtattatgccaattttctttcttcaccagagggttacttccacacagtcatctgaaatgtagatcatggttgactgtggtgttgtcggtaaacttccgggttactta

SEQ ID NO: 51247 - DNA, 205 bp, Setaria italica
  Peptide Sequence Number=SeqID_117221
actaataatgcttaccggtccttatccctattcaggggcagccatttcagctgagcacttggatctggaagctcattcctaaacctgtgttaaccaataagaaaaggtaatagaggatcattcaagtgcacaattattacgaaacagacatagatcaccgagacttaaatatttgacaaattgggatctgtttaaggctctataa

SEQ ID NO: 51248 - DNA, 219 bp, Setaria italica
  Peptide Sequence Number=SeqID_117222
atgttgtaggatcatctttatcatacctcgtcacgtttgatgaggaggaaggtacaggaaaatgctcaatttcatccccagatctcccctccttagctttcttcttctgcaaaactagcttagtaggaagaggcaaatatcttgcaccctcctcctcatcaaacgtgacgaggtatgttgtaggatcatctttatcatctcctcttacgtcccagtgat

SEQ ID NO: 51249 - DNA, 244 bp, Setaria italica
  Peptide Sequence Number=SeqID_117223
aaatagtgcaaaatgggaagtctatattatcaaaacaaagaagttgagaaccacttcaagagttaaagattcgacttctttacaatgatgtctcactttctaccatcgctacaaagatcaaagtctcgaagtccggttacactcagctttctttcatatactctgcccttcaaaaaccaccaacactcccaagccaccaccagccatcccatctccactcgtccacagccaaaatccgcctacc

SEQ ID NO: 51250 - DNA, 239 bp, Setaria italica
  Peptide Sequence Number=SeqID_117224
ttgctaagtaaaccatgatttgagggctaacctttgatcattccgatctatatgtttttatgaatcttttcagtatgcaacataggtgactactgcttagagaagtgtaggttctacatacaaggatttatgtttgccaagctaaatgtgttatttccctgctttgcctttctattgatacaggagcctcatcatgaggcaacagcacctgttgatggtatatcagcagatgaagaaga

SEQ ID NO: 51251 - DNA, 231 bp, Setaria italica
  Peptide Sequence Number=SeqID_117225
gagccagaggggcaataatttgtccgttgatttgactgttggagacatatatggggaagagggttatccgaaggaaaagaaaataagaaaaatacatagcacattgcagcacgtgcccgaaacagtcatcatgatcttagttaaactacaactctttgcatccatcagggcacagtaaatatcagaggcttcagattggtcttccagcatccactactgcggctagctttg

SEQ ID NO: 51252 - DNA, 228 bp, Setaria italica
  Peptide Sequence Number=SeqID_117226
agcaacttacgtagtcagctcattagccacacattatttaattattttgatgcagaacatgtttctcctttaactgatgttatcttgcagaatatccctggcgcagccttcacacacatggaatggacagaggaatccagtagatgtttccccaaacaacttgtttccttacctacttgtcaacattggctcaggagttagcatactgaaggtcactggaaatagaaa

SEQ ID NO: 51253 - DNA, 213 bp, Setaria italica
  Peptide Sequence Number=SeqID_117227
ttaagtaaacttttaacgaataagtaacaaactacttagacttactaagactttagggaaaagttaattacttaccaaaaaaaagctgacagattataagcctgaagaccttgcatccacattgttgagcgccttcacttacaacattgcacagattgctttccttgttgcatcactcctgggcctccgaagggtcttcttcggtggatcata

SEQ ID NO: 51254 - DNA, 397 bp, Setaria italica
  misc_feature (50)..(50): n is a, c, g, or t
  Peptide Sequence Number=SeqID_117228
aggctgatctccaagaagtacaagcttgcagacatgcaggccatgcccanaaacgactgctttgacagctcgcttctggccacaatagtcaaatgcaagaggcagcatttcatgcagagtgaggaaagccataacaccaccaacagatccaagtaaaccttcaagaatgtcaggattcaagctgcttggaaacaagtaagctacagcaattactcctactggctcggccaaaccggatcctgctgccatataaaatgccttccatttgctgtgacataaaataaataatagacagatatatcatatgcataaaaagaaaggtccgacaaatataggaatggttataatactatgagcaaccattacaaaatggaaatgctaactaggatctgccttc

SEQ ID NO: 51255 - DNA, 445 bp, Setaria italica
  misc_feature (147)..(147): n is a, c, g, or t
  Peptide Sequence Number=SeqID_117229
ggtgtagtgcctactgcctaaacacattgtcggatgaaatcctccaggaacacactgactgaaaagctcagctttagaattcagatgctgctgtgacacgtgtggaggactttgcggcgctacagatgtgatgctacaagcttatcncctttggtaggctgatctccaagaagtacaagcttgcagacatgcaggccatgcccacaaagactgctttgacagctcgcttctggccacaatagtcaaatgcaagaggcagcatttcatgcagagtgaggaaagccataacaccaccaactgcaaaatgacacacatgatgttgacagagtattcaatatcaaaaccagtgttcgatttactcaacaaactaaccagatccaagtaaaccttcaagaatgtcaggattcaagctgcttggaaacaagtaagctacagcaattactcc

SEQ ID NO: 51256 - DNA, 396 bp, Setaria italica
  Peptide Sequence Number=SeqID_117230
aatgacacacatgatgttgacagagtattcaatatcaaaaccagtgttcgatttactcaacaaactaaccagatccaagtaaaccttcaagaatgtcaggattcaagctgcttggaaacaagtaagctgcagtaaaatcatatcagcgctaaataaggttgcagagtaagagacagaaaatagatagattttagtatagtttccatctgaagaacatcatttcaaaaggggttcatgagaaagcatacctacagcaattactcctactggctcggccaaaccggatcctgctgccatataaaaatgccttccatttgctgtgacataaaaataaataatagacagatatatcatatgcataaaaaagaaaggtccgacaaaatataggaatggtta

SEQ ID NO: 51257 - DNA, 219 bp, Setaria italica
  Peptide Sequence Number=SeqID_117231
catctgaattctaaagctgagcttttcagtcagtgtgttcctggaggacttgcggcgctacagatgtgatgctacaagcttatctcctttggtaggctgatctccaagaagtacaagcttgcagacatgcaggccatgcccacaaagactgctttgacagctcgcttctggccacaatagtcaaatgcaagaggcagcatttcaagctgcttggaaaca

SEQ ID NO: 51258 - DNA, 296 bp, Setaria italica
  Peptide Sequence Number=SeqID_117232
gaaaaatgtggtgaacacggattcttcttgtagcgcattttcttctcgtagatcaaattcaacaactagagaaaaatgcgctacaagaagaaaaatgtggtgaacacggattctgaagattgatgtaatcatgagaagtcatgttggtatgcaaaaatatcctgtaggctgtagattttgacaatattgattatttggatgctgtagactatttatattaaatggcaggttactttatttccttcataaaatcagataccacattgtaaagtacatgtaggcccagttgtactcac

SEQ ID NO: 51259 - DNA, 364 bp, Setaria italica
  Peptide Sequence Number=SeqID_117233
aaaagtaaaaaacaaaaaagaaaaaactaaagaaacaaagggggttacaagacaagcagatcagtacaaactgatcgcgctgcaaaggtatctgccataaaaagcaagttaaaatctcttgaggaagaagggtgcagcacaaaaaaaccaagactcacaccaaatgacttgacaggcactagggaacactctcataagaagttttgaactgagttttcgagttcttcagaatgtttgggagtttgcatcctctcacgctggtgacacttctaaagctgctgccattctatatggtttttagctttaggaagctagccacaccatatgtgtaacattccactgttttggatatatgtacaacagc

SEQ ID NO: 51260 - DNA, 197 bp, Setaria italica
  Peptide Sequence Number=SeqID_117234
ctgtttctgaatcaatttgttgtacatatatccaaaacagtggaatgtttgggtaggtttgcatcctctcacgctggtgacacttctaaagctgctgccattctatatggttttagctttaggaagctagccacaccatatgtgtaacattccactgttttggatatatgtacaacaggtaattggtacaagctgtt

SEQ ID NO: 51261 - DNA, 313 bp, Setaria italica
  misc_feature (225)..(225): n is a, c, g, or t
  Peptide Sequence Number=SeqID_117235
aaggaaaagaatagaaataggacaaagttaagtactagtaggaacgtaccaaatggtggttcacctggctagtgagaaaagctctctagactctggtccttcacaaagagcactcaaagacaagaaacttgacagggggttcagcaagcagatcagtacaaactgatcgcgctgcaaaggtatctgccataaaaagcaagttaaaatctcttgaggaagaaggtncagcacaaaaaaaccagactcacaccaaatgacttgacaggcactagggaacactctcataagaagttttgaactgagttttcgagtt

SEQ ID NO: 51262 - DNA, 448 bp, Setaria italica
  Peptide Sequence Number=SeqID_117236
atatctgcatgcaggtaattctgcatatgtttaataaggtaaatgagtaatctctgtagcacatcttaagaaagttatatcagcacaaagcatgtcatctttcacgggaaaaaaaataaaactttctatatgaaatacaggctgctattccaaggttgcacaaggttagaaagcttaacatgagaaaaatacctaaaaaaaggactttcagacttccttaccagctatcccccaatcggtatattccttgcccctctagaagcagaagcccatgttgattatagtggacctcctggtagaaaaaatttaaaaaaatatgaaaagaagtttcaaggttggatgtatgcattgaaccacaacatctcatgattcatgcagcaaggccagtatgcaattattgttcaaacacctcctaatgtaagacacaaattttacaaaccttcaacaa

SEQ ID NO: 51263 - DNA, 392 bp, Setaria italica
  Peptide Sequence Number=SeqID_117237
tcttgtccggtagttaattgtttgttatttgtttttactattaacctattgtttcttctattattaatttttattattcagcttgatgacatgattgaatactcttccttattaccaaattgaatggtcacaaaaattcgaatagcattttccagatgcggagtggactagagctgaatggggctccccttacaacatagtgctgcatgaagatatgcataaacgaaccaaaatctttgccgtcataaattcatcatgtaatggaatttgtattctttcaacccccaatgcttagagagttctgtacaaagtagagtgcatagatatacagaattattttgtttaaagatttagaaagaagaaaaaaggacacatactacatgtctacatct

SEQ ID NO: 51264 - DNA, 258 bp, Setaria italica
  Peptide Sequence Number=SeqID_117238
aggaatccaccgacagagaatgggtagtttcagtccccgcagacaataaaatgctatgatctcagatgaatcaaccactcttgtaatatttgagaggaggtacagtgccaccgaggattcccaccctgatctaattgttggttcaacagataagcaaccccttcttgaaaccccaggagaggtatttcaactgaggaagctgctaccaacttcgatgccttatgactttaatatccatataatggactttcaaccagg

SEQ ID NO: 51265 - DNA, 235 bp, Setaria italica
  Peptide Sequence Number=SeqID_117239
aagaaattccctaggagatggttacaggaaggttacaggaaggagaaaaaaggaatcttattgtagattgtacctgagaatgatttctttgatcatatcaatgggttcctattgacatctttgtacagcaagtatctggtcctggttttaccaagcgcggcataccactgaggaacaaacggtgccatccaaatggtatcacctgcttctagaggggcaaggaatataccgattg

SEQ ID NO: 51266 - DNA, 253 bp, Setaria italica
  Peptide Sequence Number=SeqID_117240
aagaggtccttcatgtccaagatgtacaggtgcctgttcccaagggtccgagagtgtgagtgagagagtgagtgaggccgcatgtcggtaattactagtagtggtataatccaacgacaattaccacacaatcgtatacgtgttcttcggcagggactgtactatgctagcatttcttgaaaagatttgttcgttcttttgttcattattacttctatatactgtatatgcatgtataactcccggcattagt

SEQ ID NO: 51267 - DNA, 271 bp, Setaria italica
  Peptide Sequence Number=SeqID_117241
ggagtaggaggggtaatcgctccagatttcttctctagcttgtaggtgtagttgctggagcttttatttttttttggttttctttcttctctaccattagctagctcatctggttcgatgcctgtaaaagatgatgtttttgtagtaggtttgtgcaaaagaactgcaaaaacatcatctggttcgatgcctgtaaaagatgatgtttttgtagtaggtttgtgcaaaagactgcaaaaacatcatctttgcacaaacctactacaaaaac

SEQ ID NO: 51268 - DNA, 218 bp, Setaria italica
  Peptide Sequence Number=SeqID_117242
ctcacaacgcagagcagatagcagagcgtgcctcctgtttctccgtcgttcagcttcctccctccagaaatctcctcgcggtaggttggtctccaacgccgccggccggccaccgccatgggcatcgtcgacgtcgtctccgagtactgctccttacccaggacccgccgccacgtccacggagctcacgcccttcatgccctccagggctttccgga

SEQ ID NO: 51269 - DNA, 363 bp, Setaria italica
  Peptide Sequence Number=SeqID_117243
caagcaagttattttcagaatttcagattaagcgctgcagaaactacttgaaaatgccagccctgattatagatgagagagagaaggaacgctcagggtttgtcagcaagaatggcttggttgatgaccctgttttagtcgagaaggagcgggtaatgataaatccatggacacaagaagataaggaaatatttatggagatgtttgctaaatttgtgctaaagttgggagttgggggtgaactaaacaagagcttaacttacatgagttgcatcctctttgttggtttctgcaatcaccccagttcggaaagccctggagggcatgaagggcgtgagctccgtggacgtggcggcgcggcag

SEQ ID NO: 51270 - DNA, 463 bp, Setaria italica
  Peptide Sequence Number=SeqID_117244
tggttcctgaatacctaaccgtagaatttagttttagaataggacaataagcttacaataactatgcccaattttgatgacagtggcaacagagtcagcagtgctttaggggccaaagacatgagcaagtacccagcttttaaagacccaactggtaatcagcatgacgcattgtttcgtaatgttgatggttacacgaatcatctgacaactaaattaccatttttttctgaaagaactgcaagtggcactgtgagtacttctcagactgatcggttcactctaacaaaattccagaatggcaggtccagcagcttgggccttccaaacacttctgatgggattcaatgggccagaaaaacacgaagaagtactgcaaaggctctttgaggtcatgctctcacaatacaagctctgagggtgatgaacaacaaaaaagcggacctggtgatgtcaagttatt

SEQ ID NO: 51271 - DNA, 297 bp, Setaria italica
  Peptide Sequence Number=SeqID_117245
gatctctcaagcatctcatgtgatgaaagaaccaggggagctcatcccttctcccaagccacctgtggtgcaggatgctgatgtcaaaggtgctgatatgatggaaatcgagccagctccagttcgtaatgctaaaacactttcctcagaagagagtgctgtatctcctggagttgcagagggtccggtctgtgctgctgctgatcttagcccattgaaagcttctgaacgagctggctctcaaaatgatatgacaacaaatagtaattaaggtttaggtaaaactttactttacta

SEQ ID NO: 51272 - DNA, 433 bp, Setaria italica
  Peptide Sequence Number=SeqID_117246
agaagtagactacaagaaagaagaagactacgactttacaataggatggagaggtttgacataatcatcggtgtggcccgcgcacttgtttacttgcaccgccatggtataatccacttcaacctgaagtccagtaatgtcctcctagacacaaatggtgagccgagggttggagactacggtcttgtgaacctgctgccgatgctggaccgctacgtgctgagcagcaagatccagagtgcgctggggtacatggccccggagttcacctgcagaactgccaatgtcacagagaagtgtgatgtgtacagctttggagtgctgatccttgagattttgacaggcaggaggcccatcgaatacctggaagacgacatcattgtgctttccgatctggtcagaggtgcagttgaagagacaggctggaggactg

SEQ ID NO: 51273 - DNA, 388 bp, Setaria italica
  Peptide Sequence Number=SeqID_117247
aaacgaataccaagttgaactggaggcaagaatacaagagccctctttggtgtctgaagattttccaagccacccatagtgtacagaacctcagcataggctatatgataaagtggaatggttgggtgggctaatattagctcctcataacaaaaagcagcttgcttgtacatttgtaaggaaacatatgtttcagcaagttctctccaggcatcatgatcagacataaatagttccagatacttattgagataatcaacagctaacaacatatcgccttgtgcttttgcaatagcaatcttcctcttgtggacaatctgatcaaatggattgtttccaggattagcgcataggctctttcagcttcagcccattcaccctttgcttc

SEQ ID NO: 51274 - DNA, 269 bp, Setaria italica
  Peptide Sequence Number=SeqID_117248
caccgccacctccttcttcagattctggagcctcttatcaatctgcttgcggaggtcgacgagctccttgcacgagtgcttgaacagcccgagcagctcgtcgacggcggggaagacgggcggggccgccccgagcacgagcgggggcggcggcggcgcgggcgcggcgtcatcctccccgcggtactccgggagcagctcgtccaccaggcccccgaacagcgcatcgaacgagaagtcccccttgaagtcctcgaggtcgagggtgg

SEQ ID NO: 51275 - DNA, 447 bp, Setaria italica
  Peptide Sequence Number=SeqID_117249
cccaaaagggaaaacaaaaacaaaggaactaacaaaaactaagaaggtaagacaatacaaagtaaagtagaaagtttaccaaataggacaaacaaactagatgttttggcctggatgggttctcaaagcaatacaaacatcgctccttctgagtcaacatttgcctattagtgcttctcctctcctcatgtgcctctttattctttcttttgccctttttactaggagcatcaccaaaatcatattcatcctctatacttttagacatactgtactgcttattgtgcataatcttattagctaaatgcaggtcagcattctcttctcttctcctgcgatcagctgcactaggcttcaatgtatccctgattgagctccttcctttttccattgacaaggttcctcagggacagtatcctgattctccaacaaagcctccatttctct

SEQ ID NO: 51276 - DNA, 209 bp, Setaria italica
  Peptide Sequence Number=SeqID_117250
gcatttgctcttcaaccaatcaaccctgtgttattcagcagtgcagtttcaactatgagtcagtgtttgcatttgctcttcaaccaaactgcactgctgaataacacagggttgattggttgaagagcaaatgcaaacactgactcatagttgaaacacactagatgtcactgtttgcatttgctcttcaaccaggatcacactgccaa

SEQ ID NO: 51277 - DNA, 116 bp, Setaria italica
  Peptide Sequence Number=SeqID_117251
atttggtttctatcttccatgggttcattttcattgtatgtataggttgtagtggaaagggacacaggccgctccaggggatttggatttgtcacattttcagaacctcgagctgt

SEQ ID NO: 51278 - DNA, 217 bp, Setaria italica
  Peptide Sequence Number=SeqID_117252
tcgacgacctcaccgcgcaggctgccgcacctgcgccgcgagaacgcgcacgtcgccaccgcgctcggcctcaccgcgcagggactcctcgccgtcgacgccgagaacgccgtactccgcacccagggccgccgagctcgccgcgcgcctcgcctccctcaacgacatcatcgcctgcatgaacaccaacgccgccgccgccgccggggccgtcgcc

SEQ ID NO: 51279 - DNA, 310 bp, Setaria italica
  misc_feature (8)..(8): n is a, c, g, or t
  Peptide Sequence Number=SeqID_117253
aaattctntccagcatgccacaaatgctgcatttctagctattgtttacagtgactacatgctctcaacacagactgcggcggtgcagtgcagtggaaagtactacagccctactgatatacgcaattttgctgcatcacaggccaattacatcttgggagacaaccctatgaagcttagctaccttgttggatatgggagcgtctatccacagcaagtacatcacagaggagcgtcgatccccgcagatgtcgtaaaactaggtcttgtctaaaggtatttcctagttattcttcctatttctacccgt

SEQ ID NO: 51280 - DNA, 293 bp, Setaria italica
  Peptide Sequence Number=SeqID_117254
agctatccaaagctccaagacttctataattccactagttatgttgatgaacttctatgggcagcaagttggctctatcatgccacaggagaccagacatacctccattctgtacagttacataactgaggtatgtctggtctcctgtggcatgatagagccaacttgctgccatagaagaccagacatacctcagttatgtaactgtacagaatggaaaaactatgctgattggggaaggccaacatggttcagttgggatgacaaaaatccaggcacacaggtccttctgt

SEQ ID NO: 51281 - DNA, 117 bp, Setaria italica
  Peptide Sequence Number=SeqID_117255
ctccagcatgccacaaatgctgcatttctagctattgtttacagtgactacatgctctcaacacagactgcggcggtgcagtctgtgttgagagcatgtagtcactgtaaacaatag

SEQ ID NO: 51282 - DNA, 374 bp, Setaria italica
  Peptide Sequence Number=SeqID_117256
agcagtgctacctgaccctggagaaggggtacaactcgatgccggtgaacctgccgggcaccctgttccacaaggcgatgaaggcccgcaagcgcctgggcgacatcgtggcccacatcatctcggcgcggcggcagcggcagcgcgggagcagcgacctcctggcgtccttcctggacgaccgtgaggcgctcaccgacgcccagatcgccgacaacgtcatcggcgtcatcttcgccgcccgcgacaccaccgccagcgtgctcacctggatggtcaagttcctcggcgaccacccctcggtgctcagggccgtcatcgaggagcacgactcgtcatgcgcatccgccgggtgtccgcccacgtcagggccg

SEQ ID NO: 51283 - DNA, 259 bp, Setaria italica
  Peptide Sequence Number=SeqID_117257
caggaggagatcgcgcggtccaagggctccgccgacgcggccctgacgtgggcggacacccggcggatgcgcatgacgagtcgtgtgatccaggagacgatgcgggtggcgtccatcctgtccttcaccttccgggaggccgtggaggacgtggaataccaaggtgagcaggcgtcaccatccctcgctcgctgccagccgagttattagtcggctgtttaatttcatgcccgcggcggcagtgtccctgtccccgtcg

SEQ ID NO: 51284 - DNA, 211 bp, Setaria italica
  Peptide Sequence Number=SeqID_117258
cctgtccttcaccttccgggaggccgtggaggacgtggaataccaagggtacctgatcccgaagggctggaaggtgctgcccctgttccggaacatccaccacagccccgaccacttcacctgcccggagaagttcgacccctccagcttggcgagctcgttgcccgggcacgagtgggtcccgttgccgaagggcatgaacgtgttgggc

SEQ ID NO: 51285 - DNA, 327 bp, Setaria italica
  Peptide Sequence Number=SeqID_117259
tacctcctcagctacgtcggcgtcgagggggacacggtggagtcgctgtcgagcaggttcggggcgagcatggatgccatcgaggctgccaatgccatggccggccccgaccccatcaccgccgggaaggtgtactacatcccactcaactcaggtgagcgatcccaatgtcagcgatcatttccgacgaatcgatcaaacatttctctctttgtagaattcgctgtgaaaagtttgatactcggtttgttcctttcgcctcagtttgctgggttgttgcaactttgcaagcacggatctactaaaataaattaaccaacacgttat

SEQ ID NO: 51286 - DNA, 378 bp, Setaria italica
  Peptide Sequence Number=SeqID_117260
catagcaatatcctcaaccattgtcttctttatttggaataaccggtattgcagtgatgatatccttagcatcctcttctttatccggaacaacgggtagagcagcgatatagtcaacatcctctggttcatctcttggacgctgcacttcagaaacagcaacaatgtcacttgacgagctcgcagcataaggtgaaacacttgtcgaagaagagccttgtttattcagctcacttggagatggcacctcaacccaaacgccacagtttctggaacttgtgaggtgtctattctttttcacattaactctaagtagaagaatacaactacttttagtttaagacaaatacaacaacgaagaaagaaataaagaaccaa

SEQ ID NO: 51287 - DNA, 432 bp, Setaria italica
  Peptide Sequence Number=SeqID_117261
ggtcggccccgttgctctgggtcagctgcagagtcaggtccaccggaaccaggcacagcccgcggttccggaggctgtagtgctcgggatcctgaaccatgtgacaaacagcaagtacgcgtgttatgatctcgtgacaggtttcttgcaaattcagggcattcggattttcagtggagatgaggggtggcaagagctcacctcaggcgcagcgccggcggccggaggagcacgcatgtaaggggagctcaggacctcgagttgctggtgcaggaacttgatgtaccctgacgcctcctgcagaacagaagccgtatccgtctttccaaacggtgacactagctgctggagcgcggcgaccctctcgccgatcctgtccttcttctcctttggtgacacgggagacgtcctcgggctcgtgttcctcggctt

SEQ ID NO: 51288 - DNA, 165 bp, Setaria italica
  Peptide Sequence Number=SeqID_117262
ttatgtttccacctatggttgcagtgttccgaacaaacggtgaagccactttgttcaggtgattagcaatcttgctgaagttccagtttccgatgacggctggtaccgtcctaagagcattgacgagcttcacaggctgttcgagtctgtatttcctttgatgag

SEQ ID NO: 51289 - DNA, 349 bp, Setaria italica
  Peptide Sequence Number=SeqID_117263
tttttttttttttcgaaaccagaaaagagaaactgtctttgtaccgcaagatatcttatgggtattaacataaatatataagtaagaaacagaaatattgcaataaaagcaaagcattgtattgaggatactcaatgtgcaatccgtcattatcagaagaagcgagtagagtcccttggaggctattcatagcagctgtagatgattctatatccgtaaaatcagcaaaagctacaggcattccaccacggcgacgcatcttaaggacatgaaacccaggtccttggataaaacttccttcagttcgtcctctgtgcatgtatgtcccaaatttgcaataagagagtag

SEQ ID NO: 51290 - DNA, 343 bp, Setaria italica
  Peptide Sequence Number=SeqID_117264
cgctcacgcagctgctgtacgtggcgatgctgcacgcggccgtggccggcgaccgctgcgagcccgggtgccccaccgaggacgaccaggagcaccacaggggcggccccacctgcagtgtcatgtgatcgccccaactcctcctgctacctatatagcacatgcacattgcatgcttcgtgttgtctgatgtgatttccgttcgtcttgtgcctgtgtgtcgtttggaaactaagcaaattaagctagtttccatttttgtgttgtatcatgtgctcgtttcgtttgtgtaatagtagacaatagacgacgtagtagtaatagtacgtttagaagaaataga

SEQ ID NO: 51291 - DNA, 314 bp, Setaria italica
  Peptide Sequence Number=SeqID_117265
gtgctcgtttcgtttgtgtatgtgcatgcgcgtgtgtatgtcgtttgagaatgtgcatgtgtaagtgtgttgtggtgattggtggaattggtttatttgtgtacatgcataggcactactgttcatcatacatagtcttcattgttcattatttaggtagcctatagggaatagtagctagatagtcaaaggatcgattctttcattggtgtatagtactgtgcatataggatatatgtatgtatataaatataataaaatcaaatacaaaaaaaaactaaaaaagagactacgccgaacggacgacacaggga

SEQ ID NO: 51292 - DNA, 445 bp, Setaria italica
  Peptide Sequence Number=SeqID_117266
gcgagcccgggtgccccaccgacggacgaccaggagcaccacacggggcggccccacctgcagtgtcatgtgatcgccccaactcctcctgctacctatatagcacatgcacattgcatgcttcgtgttgtctgatgtgatttccgttcgtcttgtgcctgtgtgtcgtttggaaactaagcaaattaagctagtttccatttttgtgttgtatcatgtgctcgtttcgtttgtgtatgtgcatgcgcgtgtgtatgtcgtttgagaatgtgcatgtgtaagtgtgttgtggtgttgtactgtattgtgatgtccatttgctgccatgttcccgcggtgcaataggacaagacaacgtaattaggtagttagaatagtagaaaataaataataggaacaataatttaataagtttaggtacaaaaaaaaaaactaactacaacaa

SEQ ID NO: 51293 - DNA, 257 bp, Setaria italica
  Peptide Sequence Number=SeqID_117267
cttcacagcatctacttggctcttatcgaactccaccccgaccttcttgagcttcttccctcgggttagtagaaaaaccatcagttcattctgaaattcttgaggctagtcaccacatggagatggagtttttctgatctagttcgtgtatagataggttttgcgcctttgctaggcatcaaacatgtgaacgttgcattccttgttacagaataatggcatgggtgttggataaaaaatatatgctttattgcttc

SEQ ID NO: 51294 - DNA, 379 bp, Setaria italica
  Peptide Sequence Number=SeqID_117268
cgggagccaaagttagatgaatgggttgcaagagctacgatatttgatgcccttcaagacaccgtgaggattgctatggttgggaaatacactggcctatcagattcatacctttctgtgttgaaagccctactgcatgcatctgttgattgccgcaggaagcttgttgttgattgggttgcttcaacggatcttgaggactccacggccattgaggtttggcagtcttctattatttaacatgctcagtcttaagttggtgtctcattttcctggctctcgctaaactttccaggcgcctgatgcatataaatcagcttgggacttattgaagggggcagatggaattttagtaccaggtggcttggtgatagaggtg

SEQ ID NO: 51295 - DNA, 263 bp, Setaria italica
  Peptide Sequence Number=SeqID_117269
gtggtggtcattggggcgtggagggctagaagagaagagagaaaaactactgcgaggagctttgaggaggccatttttaaccacaggaaagatctatccttaccttaacactgatgctgggactatgtccccatttgaacatggcgaagtgtttgtgttggatgatggtggcgaggtggacttggatcttgggaattatgagaggtttctggaccttaaactgactcgggacaataatataaccacaggaaagatctatcagt

SEQ ID NO: 51296 - DNA, 260 bp, Setaria italica
  Peptide Sequence Number=SeqID_117270
gcaggggatagttaagccagccacgacaaaactgatgcaacaggaactgcaaaattgaagcaaacagttgcaaatcctgggaacttctgtttggtgcatgttagtcttgttccagttatgaatgttgttggtgaacagaaaacaaagcctactcagcatagtgtacgtggcttaaggggactcgggctcacccaaatatttggcttgccgcagtacaaaggattggaggataatgtgaaggagaaactctcccaattctg

SEQ ID NO: 51297 - DNA, 184 bp, Setaria italica
  Peptide Sequence Number=SeqID_117271
ggcatatctcgggagccaagttagatgaatgggttgcaagagctacgatatttgatgcccttcaagacaccgttagcatcttctgcccagtgaggattgctatggttgggaaatacactggcctatcagattcatacctttctgtgttgaaagccctactgcatgcatctgttgattgccgcag

SEQ ID NO: 51298 - DNA, 412 bp, Setaria italica
  Peptide Sequence Number=SeqID_117272
ctaccgcaccggcggtggcgtggacggaggcggcgctccggcgccggcgcgtctgtgggaggaggtatgctgggcgaaggagtcgctgagcgaggcccttgccgaccaccccggagatggccggccggctccggcgccgcgaggacgggtcatgggaggtgaagctcaacgacgccggcatgaggttcgcgcaggccacggcggaggcgaccctcggcgagttcctggcggcggtccgggacgacaaggaccgggcgcgcagctgggaggccgcgctggcgccgtgggccgacgtgaacgccgaggaccccgacatgtgcgctctcttctacatgcagcgagatgtgtgggatgatgcaggggtggcggctctccagcaagcacgctggcgggtggagcatcgtgacgtgca

SEQ ID NO: 51299 - DNA, 364 bp, Setaria italica
  Peptide Sequence Number=SeqID_117273
ctgtggcccttggcgacctgagtgggatgccatcagcagcagaccttagaggaattccttcagcggcgtagccatcctcatcctcatgtttaggaagtcggatgggtaaatttggtgggagaccatccaccatatcctttgtcttgtgaagaagaaaagtcccagaaaggatcgtaacaaagccacacatttccgtgacaatttgtgtcggattttgacgatcccagtcctgttttggctatccggcatagctatcagccttcctactatgctttcacaagaaacacattattgagaaagcatagtaggaaggctgatagctatgctttctcaataatgtgtttcttgtgaccgaaaatttttg

SEQ ID NO: 51300 - DNA, 339 bp, Setaria italica
  misc_feature (244)..(244): n is a, c, g, or t
  Peptide Sequence Number=SeqID_117274
tagaccttaggtagaacctagaagtagggaatagaccaatctgcagcggatctaagaggaattccttcagtagcatagtcatcttcatctgtgtgtttaggtattcggacaggtagagttggtggtagaccatcagccatatcttttgtcttgtgaagaagaaacgtcccagaaaggatggtaacaaaaccacacatctctgttacaatctgagttggattctgacgatcccagtccttgaacnttatcacactagccaaaaatggttagtgatgtaaacatcgtataatatatcggtgacacaactgctgtattgaaagtatcaagagccttgttcag

SEQ ID NO: 51301 - DNA, 258 bp, Setaria italica
  Peptide Sequence Number=SeqID_117275
ggtattcggacaggtagagttggtggtagacctatgataccagagagttaaaagtcaccatagatttttaacatattgcatagttcaaatgttaagaggtgaaatcataccatcagccatatcttttgtcttgtgaagaagaaacgtcccagaaaggatggtaacaaaaccacacatctctgttacaatctgagttggattctgacgatcccagtcctgcatgcaagtagaatagttgtcaataactattttgagtaa

SEQ ID NO: 51302 - DNA, 238 bp, Setaria italica
  Peptide Sequence Number=SeqID_117276
ctgaccatattgtgggatgaaatagtatatgagcacaaaagttgcagcaagaacgatagcagcataagatagaaaggctggttcagtagcaagatcccacacttctgctacagattcgattgcacgctcctgaggggcatggagtacaatagttgttgaacccacaacacagagaacacatccaagtataccaaatatatgtagcttctccttcaactattaattgttctttgttctt

SEQ ID NO: 51303 - DNA, 287 bp, Setaria italica
  Peptide Sequence Number=SeqID_117277
gggaagagaattacagcatgatcaattaaatcatactgatagaactactgccaatagaaagtgtgtaacacataccgacagagatcctacaagtgaacagacaccaatatagaccatgatgtgcgtctgaccatattgtgggatgaaatagtatatgagcacaaaagttgcagcaagaacgatagcagcataagatagaaaggctgcaagacccaaacttatgacattagttcttactgagatcttgctactgaaccaggtgccctcctctcttgcccaattagttg

SEQ ID NO: 51304 - DNA, 240 bp, Setaria italica
  Peptide Sequence Number=SeqID_117278
ggcgtgtggagttgtaccatcattccatcaatgcacaatgtaaaaaatgcctgctagtaatccagcacttgacccattcaaagtaaagtctgctatccagcgtacttattgatatttcaggcttgaacattatcacactagccaaaatggtcaaagatgtaaacatcgtgtaatatatgggcgaaacaactgcagtgttgaatgtgtcaagggccttgttcagatagttcatctgtgtta

SEQ ID NO: 51305 - DNA, 402 bp, Setaria italica
  Peptide Sequence Number=SeqID_117279
gtctaggaccgaaggttgctgagtataatccttgaagcatcatgatttgagtgcacttgcaaatctcagtggcacatcatgatgaccgaaatgaatctgtggcccttggcgacctgagtgggatgccatcagtcagcagaccttagaggaattccttcagcggcgtagccatcctcatcctcatgtttaggaagtcggatgggtaaatttggtgggagaccatccaccatatcctttgtcttgtgaagaagaaaagtcccagaaaggatcgtaacaaagccacacatttccgtgacaatttgtgtcggattttgacgatcccagtccttgaacattatcacactagccaaaatggtcaaagattgttaaactattcgttgttaattattattgggtcgtaaa

SEQ ID NO: 51306 - DNA, 209 bp, Setaria italica
  Peptide Sequence Number=SeqID_117280
catgcatcccaagcccgagccggggacgccgacgggggcgccgcggaggtggggtccccggcctcgggcttgggatgcatgcctccttgattccgttcgtgctccgggggctacaaggctcgcattgcgcgctgcgtgcgtgggcgcgcgcgcggcacggcgctagacaggattgccggtcccaatgccgcggcgcgggcggggatctg

SEQ ID NO: 51307 - DNA, 276 bp, Setaria italica
  Peptide Sequence Number=SeqID_117281
cgaaatgcctggagagccttcgtgctggtgtatggaccttgttcactgagctaccatgttctgcaattattgaataaaggcctatctcagcagcagcgacttctcgtagctctgcttcaagcaactcaaccttaagttcgagttctcgaactttgctgtcatttcgattatttgaaatgcgtattggctcctggacttgcaatccatcatcagcacttggttcgttatttcttctattgtagtctaattcgtcaacatcctgggaatcaaattcct

SEQ ID NO: 51308 - DNA, 240 bp, Setaria italica
  Peptide Sequence Number=SeqID_117282
cgtacaatggagaaatctgatccagagacatgtaagacacctggttatacaagtggtagaacacgctctgagcagcaatccacctacaaaattcaacagtaacacattagaaaaatatcaacatgtataaatttgtgatatgagattgccataaatactgacactaatccagcatattttatagtccttcataaggacagcgatgaagtctaacatgtatatgcccaacagaagagtaaa

SEQ ID NO: 51309 - DNA, 316 bp, Setaria italica
  Peptide Sequence Number=SeqID_117283
tgatgcttgcacaagcaaaactggattcgttgtgcggagacgttcatcatccatggccctctgatcttgccaaagtttcaacctcatgcctttgcctgcatcagaatgcaattttgcagggagtttagcatacatatcactcacttgatgaatcaaaatccatacagcacaagattatcagtgattttctctttccagttttgtaaataaggttttgcaagcacataattcttatcactgtactgtatgtatttcaatgtggaagaaacattttaagatttatcttcatgcctacctacaactatgctaattacta

SEQ ID NO: 51310 - DNA, 424 bp, Setaria italica
  Peptide Sequence Number=SeqID_117284
cacaagcaaaactggattcgttgtgcggagacgttcatcatccatggccctctgatcttgccaaagtttcaacctcatgcctttgcctgagagtacaggaatgtgccaaggatggcaatggcagctcctagcgcattgacagggcggacaggtgtgtggaagatgatgattgacgaaacaatcactgatatgcgcttcattgtattgccaatgctaaacgtcaatggagaaatctgatccagagacatgtaagacacctggttatacaagtggtagaacacgctctgagcagcaatccaccagataacatttgggccaacttccgcaagagccttttgccaaccagcagcccacatttgggggccttccatagcaatagcaaatggagttagtatgcttgcctgtcaataatgtcccttgtcat

SEQ ID NO: 51311 - DNA, 410 bp, Setaria italica
  misc_feature (241)..(241): n is a, c, g, or t
  Peptide Sequence Number=SeqID_117285
tttttagttttttggttttattcatactacaatctacaatacgacaaatatagaaggaaattgtaaaccattaacttcttgtttaccagataacatttgggccaacttccgcaagagccttttgccaaccagcagcccacatttgggggccttccatagcaatagcaaatggagttagtatgacaagggacattattgacaggcaagcatagtaattcatgccactgacagacttcccttnatgcccttcttcgagaagatgttgcggaaaacaaatgcaaggttggatatcatagcacccataaatccaaccaataataaaagttcagctctgtgacagcagctagagcacaacaccaatgattggaagaagagagagatagactggaactgggaatgtctcccaagga

SEQ ID NO: 51312 - DNA, 459 bp, Setaria italica
  Peptide Sequence Number=SeqID_117286
gtgacaagtagtcaaaagagagctgtcaccctaagattttacagaccgaaattcaaatatattttctgtgatatggatggtacactgctcaacagtaaaaagtcaaatcacagcaaggaacgcagaagctctaagggaagctaggtcaagaggagtaaacatagttattgctacaggaaaggcacgtcctgctgtaattgatgctctcagtatggcagacttatctggaagaaacggcattgtttcagaatcttcacctggcgtattccttcaggggctgttggtttatggtttggaagggagacaaatttataaaagaaatttggatcaagatgtatgtagagaggcactcttatattctttggagcacaagataccattagtagcatttagccaggatcattgttattctatgtttgaccaacccaattaggtacgaattaccctaccaattaacaa

SEQ ID NO: 51313 - DNA, 174 bp, Setaria italica
  Peptide Sequence Number=SeqID_117287
tgcgctacgtccacaccgcgaaggcgagctgctgcgcgctcgtgtccgttgccggtgccgacgtcccaggcgaggtcgcggcgggcgtcttggaggcgatgaaatcgaagagctccggcgggtaggacggccgcgtcgccacgtactgcttcgcctgcttcaggaacaggttcg

SEQ ID NO: 51314 - DNA, 458 bp, Setaria italica
  Peptide Sequence Number=SeqID_117288
ctgattgaatatagtatgcatatgacataagaagtttatttcccttgtgcattgttcttttttttattagtcaaattgttcctgatcctctgtttctgtaacattgaaaactggattatgatgaatggataatgtttttctcagaatggagttgttcaatgcatatatttaagtggttactacttactagtcattatgaacataaatcacttgtgtacattctgaaccttttttttcacgagtgctgcttaaatattcaccatttgaactgcactgagtttattagcatgctgttcattctatttgtttagctgttatggctattgctgaatactgatcacagacaatattacaaatatttaatgccagattacagaagttcttctggaggagcagtcattctcgatgattgtaacttccatgagtcagtacatctggacagctttgacattgacaga

SEQ ID NO: 51315 - DNA, 277 bp, Setaria italica
  Peptide Sequence Number=SeqID_117289
gatgtcttgtgctccccgctagttgaagcaaagaagaacgggacagacttggtggtaagtactaagtagtaccattatttgaaaacagggttgtgaagggtaacagttttcaagaatcaaaatctggtgactaagttgctgatttttcccttttcgaaaagtgtttgttgttagcaagcacatgataattccttgtaggccttgattcttatttcagtcgtgctagcaaactttctcgtaatctaataactgttatcatgcaggaaacattcgctta

SEQ ID NO: 51316 - DNA, 145 bp, Setaria italica
  Peptide Sequence Number=SeqID_117290
caaggaagcacttcaagaagtaacaagacttgttgatgggcagcttcagtctggccgcaactcagttaagcagttgtttggagcagcagactccccaatctgtttgtcgaaatcagtaaagttgtaaacagcaagaacaactcct

SEQ ID NO: 51317 - DNA, 275 bp, Setaria italica
  Peptide Sequence Number=SeqID_117291
tttgttgtctagtaaattgttttttggggtaaggtagttcttacccttgtattgttctttcattgacaaacttattactatggaggcacaaaaattgcaggttctaaaattgtttttgcaaatggctctcaagacccatggcgccatgcttctaagcagaaatcatcagaagaattgccatcatacttaattgagtgcaagaactgcggacattgcagtgatctctctggatgccctcaagctccttcaaatattgaaggtgattcatccaagtg

SEQ ID NO: 51318 - DNA, 272 bp, Setaria italica
  Peptide Sequence Number=SeqID_117292
aaatgagttacaaggatcgaagttgcaacaatagtgtctacttcagttttgacttggcagaacttttcagtggcttcgcaatagaaacaggaggactactttttgccgtcttctttacattgtaggttatggacataaatgcacagatcagtgcaatcaaaatggtcgggtagacataagctgattgtgttggatcgctgttcactggtttcccgaattagttgtctttcttttctacttagtacccctagttatttaaccttaaaagggtt

SEQ ID NO: 51319 - DNA, 505 bp, Setaria italica
  misc_feature (448)..(448): n is a, c, g, or t
  misc_feature (468)..(468): n is a, c, g, or t
  misc_feature (482)..(482): n is a, c, g, or t
  Peptide Sequence Number=SeqID_117293
ttcgggggtccgtacggttcgttcgggttcgttcgtcttcccgtcccccgtccgggtctacggtactattgtacggggtattcttgcttccgcgaccagctgtggctcaacagctacccgctcgaccgcaacctcgtcttcgactacttcgcgctctcccccttctacgacatcacctgcaacaacgagtccctccgctcgcgacaaatccaccccctcgacatgtcccaactcacgaagatgaccgggatagagtacgtgctgagcgatgtgatggagccgcacctgttcgtgatccggaagcagaagcgggagagccccgagaaatcaagcgccatgctcgcctactacatccttgacggctccatctaccaggcgccacagctctgcaacgtcttcgcctcacgcataagtagggctatgcatcatatatcgaaaagcctttacngtggcatgctcgaattgganaagattaggaatgnggaaactgagtctgatgcagcag

SEQ ID NO: 51320 - DNA, 305 bp, Setaria italica
  Peptide Sequence Number=SeqID_117294
agaaaatgtagctgtaaaaactttctgttagttgagcctttcatcctgtggacattttcagtgggttgtaccaatgggattgtgtgtttttagcccttatgagttttacttgaactgctcatgtaacattgcagagtagggctatgcatcatatatcgaaagcctttactgtggcatgctcgaagttggagaagattaggaatgtggaaactgagtctgatgcagcagcctctgaatcaaagacacaaaaggaagcaatcgacctgaaggaacttaaacgaattgatcatatcctctcatcctta

SEQ ID NO: 51321 - DNA, 232 bp, Setaria italica
  Peptide Sequence Number=SeqID_117295
atgtttttaagtcgcagatgtggactttggattcagtcatgatggtttatttaaggccaaaagacagaactaaccacctggcatgatatttccatgggttaggctgcagattaggcaatggcatttgatccggtgttatctgctattgttgttgacttgtttccactgagattatttttaatggatgagtcccccagtcttgcacacttgtaaaccgaaaactatagccact

SEQ ID NO: 51322 - DNA, 418 bp, Setaria italica
  Peptide Sequence Number=SeqID_117296
agggcgcgccggagcacgaggtcaccgtcggctgcaccaccacctccggggcggcggcgaggagctctgggtcagcgtcgacggcaagcgcaccgtgcacgcgcgcaggctgcgctggaacttccggggcaaccagacggtcttcgtcgacggcgcgcccgtcgacgtcctgtgggacctccacggctggtggttccgggacccgcccgggagcgccgtcgtgatgctgcgcgcgaggagcgcgctcgagagcaggctctggctcgaggaggaggccgccgcgccgggcttcgcgctcgtcgtgcaggcgttgagggccccgccttgatggccaattcttcaggtcaatgctgctgctcaccatgctttgcttcccctggtttcttgtctgttgacttggaaaaatttgatggaattt

SEQ ID NO: 51323 - DNA, 235 bp, Setaria italica
  Peptide Sequence Number=SeqID_117297
gcaactatgcatgcctaaacatacgtacatctgattatgctgcagtatctttttcatgtgtctggattttagttagaccttgtcaaggaattggtacaagaggttcatgctccatatgacggttctcggcacggcagccatggaatctggccaacttcatcgtggtttgtgagctgtattgccttgatttggtgttggagtttgacaaatgcagtgttgctttcaagttatgcaa

SEQ ID NO: 51324 - DNA, 236 bp, Setaria italica
  Peptide Sequence Number=SeqID_117298
ggctgatgcattttaacagagtggctaatgaatttggttagctccgtaggcacaatgcacatctcagattgaattgaagatcatacctttcaaattacacacataaaaattcaaaatctgcatagacttgtaaagttgttcagacagtatgttaggcatttacctctttttgcctaatcctgccacccctgtcattgtcagctccctggagacatgattgtgcatcagtcaagaaa

SEQ ID NO: 51325 - DNA, 464 bp, Setaria italica
  Peptide Sequence Number=SeqID_117299
atgcctgctcgatcggctgggcctccctgaatgcagtccataacaagcaagcgtccagagcttggctccctgtttatcgaataccccaaccccttgcacattcccatcgcttcctatcctgaaactctgatactccgttgggctgatgatccttgtaaatgggtcgccgagcgtggaaggcattccactaatcttaccataggccgcgtcagctgatttcagtggaaacatctctaccattgtttgctgcagtttctgatcccaatctacacactcaggaaaataagcacattgaaaataactagtcctatttcttttatcttcagccttcaggtggtgatttccaagaacatgcattctgccttttttttactgttggtaataatgcagacttgacataattactgtacccaccaaacacttgcaatttcatttcacttctatcaaaattaacaattgaaagc

SEQ ID NO: 51326 - DNA, 242 bp, Setaria italica
  Peptide Sequence Number=SeqID_117300
ctagtctaacatacccagtcttgcactcatggccatcgtccgacctatgagagataattgtagttgatagaggagaaagattgataatttcacgagatagctggacctctttttgcctaatcctgccacccctgtcattgtcagctccctggagacatgattgtgcatcagtcagaaaagaaatacactaatacgtggaaagatgcttcccacccctaactatgtaaaagggatatgggata

SEQ ID NO: 51327 - DNA, 386 bp, Setaria italica
  misc_feature (1)..(1): n is a, c, g, or t
  Peptide Sequence Number=SeqID_117301
nctttttgcctaatcctgccacccctgtcattgtcagctccatctaatagtttcactttcactgttgttcctacacggcctctaagcctctgagctgcagcctctccatccaacccagaaacacttttcccgtctatctcaactagctcatcgccttcatgtatgcctgctcgatcggctgggcctccctgaatgcagtccataacaagcaagcgtccagagcttggctccctgtttatgaataccccaaccccttgcacattcccatcgcttcctatcctgaaactctgatactccgttgggctgatgaattccctttagttaaaaattaggggttacgtaccgtaagtacgttaggtaaaaagtactaatttacctaacttaaa

SEQ ID NO: 51328 - DNA, 181 bp, Setaria italica
  Peptide Sequence Number=SeqID_117302
tcgtcctattgttccgtactacctacgtcttcttaccttgtcttgcttagaccggttctcgcccagctgagctggcggccgggtcccacgctggccgccgccgtccgcgcccgcgttccggcgaccccggccggtcgtgaccatctgtacaggcgaaataattgcccgcgatggttgttgt

SEQ ID NO: 51329 - DNA, 421 bp, Setaria italica
  Peptide Sequence Number=SeqID_117303
ggacatctgaagtttcagctgcttctcattccctgtatcaatgtttctgttatgagccaagcaaggacacaaacagttgatacagggaatgagaagcagctgaaacttcagatgtccttgaacaactatcatcaacaggatgctgatcagttggcacatgtcggcaatccaagtgctgtatcaaccggtctaaggctttcttatgaggatgatgagcacaactcgtctattacatctggcagtggtagcatgtcctcgttgcctaccacgttgcctcttcttgatgatcttatggctgaaattgataaagaaacgaggagattagctattacttgagacttcaggctgaacagattggcaagcagatgaaggaggtgaaccagcggcggatgatttcttcctggcaatctgaacggcggta

SEQ ID NO: 51330 - DNA, 273 bp, Setaria italica
  Peptide Sequence Number=SeqID_117304
tagaaggaatagaatagaagacaacaaactacgtactaattaacaatctggcagtggtagcatgtcctcgttgcctaccacgttgcctcttcttgatgatcttatggctgaaattgataaagaaaaccttagaccggttgatacagcacttggattgccgacatgtgccaactgatcagcatcctgttgatgatagttgttcaaggaacacaaacattgatacagggaatgagaagcagctgaaacttcagatgtccttgaacaactatcatc

SEQ ID NO: 51331 - DNA, 272 bp, Setaria italica
  Peptide Sequence Number=SeqID_117305
cgggaagaggcgtcggtgctggtgatgccgtgccgccacctctgcctgtgcgcagactgtgagagggtctccgacgtgtgccctgtctgccggttccccaagagcggcagcgtcgagatcaacatgtcctgacaggaaatcctatgtacgtcaaagcgcactggacgagcaatgatatacacagtaactagatgtaagcgtgttccaacggtggtgtacatcaaagcgcactggacgagcaatgatatacacgcttacatctagttactgtg

SEQ ID NO: 51332 - DNA, 393 bp, Setaria italica
  Peptide Sequence Number=SeqID_117306
aatgcgcacaattttagggttgtaagtgttgttatttttcatctcgaattcctgtgttaagaacacgtaacacaatctcatcgagtgctgagttggatggagcacagaccaacacatgggcccgatacttgcgactggaacttacaacttcaggtttcagttcatttccagtggggtaaaaccatcatcaccatcgacaggcataatcaaatctctagggtttgcaccaagtaaccaaggagatgcttttacccagtgtgcatacttgccatcaatgtccagctctggtccatgcctttgaacatcaaatcctcctctgcattacaggatcaaaaagaatacgagatgcatgtgccaagtttagctatgaatgaagaatgtgcagagggaaaa

SEQ ID NO: 51333 - DNA, 236 bp, Setaria italica
  Peptide Sequence Number=SeqID_117307
tgtttcctgcgggattaccagctatcaaatgaagagataaatgcacttcgcgaggaagacatagatgagaaattcttcaaagcattactgcatgttcaggaaatacactcaaactgcaaggtcctgttgcgaacacaccaccagcgtgctggtttggagcttatggatatgatgtctgtgtaccaagagggcctgagacacgcaacaggggaaaggcaaggcacacaggggatagg

SEQ ID NO: 51334 - DNA, 184 bp, Setaria italica
  Peptide Sequence Number=SeqID_117308
aaaaggcatccccgatgctctattactctcttatgatgttgattgaagactcttcttcttgctgctgcttctgctcgacgtcgctgcagacttcacagcacttcttgtcctaggccccagaaacccgacagccctgcttttgtttaggcaagatgaacaggaagccaggagactgggactgcag

SEQ ID NO: 51335 - DNA, 247 bp, Setaria italica
  Peptide Sequence Number=SeqID_117309
gggggaggaggaagaaggggaaggggagaggaggaggagcagaggtggtgcaggaggaggcgtctcggtatcgcggtccctgatgcttccagcggtgatggaggcagtggtgcgcagagaaggcccgtgtatgagtcgaagaagtctaaatcgcagcctaagcgtcatgagaatgtccaatctgaagccaatttgggagaaactcaggtatttgagcagcaattggaagatttgcagagcaatgggt

SEQ ID NO: 51336 - DNA, 263 bp, Setaria italica
  Peptide Sequence Number=SeqID_117310
cgccctcatcgaggaagcggaagcggatgcgggagcggaagaggcggaggtggaggacaactgcttggagatcttgtaggaggccttgttgagggacttgagctacgccggcgaggacccgtccgccgcgacgcccgacagcgccgctggtgccgcgtccgcgcccaaggacggcggcggaggaggaggaggcgggcaccggcgcgaggagcggaagagcggcgtcgacgtggggaagagctgctccaaggcggagcaggagc

SEQ ID NO: 51337 - DNA, 316 bp, Setaria italica
  Peptide Sequence Number=SeqID_117311
ttcgtatatggacttctaaagtagcttgagcaaagagttaacttgtgatggccaaggatgcatcaagttacatatgctatacagacttgctattggagttgatactaaatggacattctattacaccctatacaggaagttggaaggtgcacatattactgttcttcgcaaaaggttattcaatggttaatgctgccaccaacgccaccacggtgcccgtggaatggaaggctgcgtcctgctctctcgcatcacctttcaggagtatgaattgaagctgaagcctatggttgctggtgtgtagggtgctagcggc

SEQ ID NO: 51338 - DNA, 421 bp, Setaria italica
  Peptide Sequence Number=SeqID_117312
atattactattgtcatctctcatccaatttaaggctatttctcagttgatacgttcctacaattaccctgcgcatataacgattccttatttttcttggtcagtcaatgctgcagaaagaactggaaattatagacgaacttcatgaaacagtagacatggaggacgtgagtgctttgtgtgctgatgagagttctgctgaaaaaactgaagaagataatatcttgcctgagcatggtgttccagtcgagaatgggttggccagtgcttatgaacatgatttgctttggggttggaaggtcgtgcagcagctgctgatgaagctgggcatcagaatggatactacatgaaggaagcataatccagtgctatctacctatgcgcgtgctgcagtttggatgaaacggtgtttgctttctaaa

SEQ ID NO: 51339 - DNA, 305 bp, Setaria italica
  Peptide Sequence Number=SeqID_117313
ggtaggttcattgccaaagacagttttcacaaatgcccctccctccatcagtgcaactggggtcaggttgatcctattggtaacgtctcccacggcccaaattgaatcaactgaggtacgagaatactcatcaaccactactgcaccattcttatccatttcgaccccacctcttctagtccaaggttctaaaaggatagcaagtacgttaggaattagaatgaatgcatcaataaatatatgtataggatctcaacaaactgcaagtgctcttaacctttgttatttggcctgcgcctgttgaa

SEQ ID NO: 51340 - DNA, 254 bp, Setaria italica
  Peptide Sequence Number=SeqID_117314
caataataattgtataagcttgctcctaaaaagtatgtagaggaaatcaccagataaaatgcagttcagtcgaatctggttttagtacgccgtagctccactgctttgcaggacctgctgaccttcaagtgggtcttttggcagatcttgaactagtgttaaggcaagtaccagtgttgcccagacaggtcgatcctgtgccaggtgctcggaatgcctgggtgtgctgcctggtgcaggcaacttttccgggg

SEQ ID NO: 51341 - DNA, 479 bp, Setaria italica
  Peptide Sequence Number=SeqID_117315
aggaagatggattttgacagcaaggctgacactctcccagcactcagtctggttgacatctggtctttaaggtctgagaagtactctatctgctgcgtcatgctgattgtagatccagtggaatcaagaaggccagagcctccagaagcaaagttagctccggtagcgtaggctgctgcagctgccatcgtcatgttcctcgtcatctcactgctgctgttggcagcattggccaagagtgagaggtatggcggtgggctcctgctgaaccccatggcaatggcgatgaagtcgacgccgatgaggccgttgctgaacctgccggtgggcttgccgccggggaagtcgacgccgttgtgggggaagtcggccctggcgatgctccacggcaggtagtcgttgttccccacgtcggccgtggagtcgccgaacacgtacatcgccgggaccttggcccccggcggccacactcgccgcct

SEQ ID NO: 51342 - DNA, 250 bp, Setaria italica
  Peptide Sequence Number=SeqID_117316
gaggaagatggattttgacagcaaggctgacactctgccagcactcagtctggttgacatctggtctttaaggtctgagaagtactctatctgctgcgtcatgctgattgtagatccctgttgtattgaccatttggaattttggtgttagtggttttcttcggagtaattatggtactaggtaatgttgattgtactagcaatttaatttgtaagggagaaaaattcttgacaatcacatatgcgttta

SEQ ID NO: 51343 - DNA, 510 bp, Setaria italica
  misc_feature (434)..(434): n is a, c, g, or t
  Peptide Sequence Number=SeqID_117317
ttttaaacaaaagaaaataaggtaaataaataacaaccaaagaaggacttacaactacgaaggaatctcgtttgcaataccagcccagccatcaaccattatgtacgtcatgaaaaatgtggccttcattggtatagctactccgattgtcattggtatttgtgtagcaggcttgtggaggaaagtgtatagctgttcaaaggctgtgccagcgattatgcttccaaggaatacattcaccagcatgaagtaataatatttcgaagcagtcctcctttccagcgatgataaagagatgtagccttcaacttttgacatgatcagtaaaactgtagggaggatatagagaaagatcttcagagccagaccgggaacaaacccctgcaggaaggattttaccacttttacttctattactggcttcagaaaaaggngcctaaacttttttcaaacgaccctcaagattggcaaggtgattgcacaatgtgataggtatcatgtaagaaaaac

SEQ ID NO: 51344 - DNA, 467 bp, Setaria italica
  Peptide Sequence Number=SeqID_117318
atccttgcaatgttcttcaatttcttcagtggacatgtacttggatctaaaccgtggccacccattatccatcctcatattattgacctcataaccttggtgaggatatcgttgtcccagccttccatgttgcaacatcgatcttgctcttggatcactcaagtcaggcatagtgaagtttccatcaaatctacccatcacttgcgaaggaggatgctgaggaccaaacatttgcatgctttgtggtggggaatgatggggaccaagcatctgtgcatgcagttgtgagaaatgaggtggagactgttgtattggcagcattccatgttgttgacgaggtggctgcatttgaggaggcatcagtccattgggacgttgcaattgatgctgcatcaaacctggcataaacctggcaccattcccattgtctattttgttcctacttattttaaaactattgttatttt

SEQ ID NO: 51345 - DNA, 422 bp, Setaria italica
  Peptide Sequence Number=SeqID_117319
aagcaaattctcaaggacgtgttgcggccagcacgacttccacaccttcaggccaacagaattacaggggaaaacaaggcaactactcgctgaaaataacaccttgaagagcagttaaacagtgtcttcaagtaacagctacagaccgcctggggcttcctcttaagagcaacagacccacaggagctttgcaatcttgtcccaaacacagctaaccacgtaatagatgcaaaacatctggctcccatcagttctttgatgctccagtctgctttactttgtttcttgagattcatattattatcacagttcagccctctcttctttcagcaaaagcataacaggcatcttaaagagacatttttatcaagtagtgagtaccataacaagaactcaatgcttcctcccatttgcctgaccat

SEQ ID NO: 51346 - DNA, 251 bp, Setaria italica
  Peptide Sequence Number=SeqID_117320
ctggatgatgtgatgactcatttttattttacttctgattgttctggaaactgaacattactgcaattcatgctgctgaaaaagcttcctgcatgcaggtcctgcttgttacccaaagattcaactgtagctgtccggtagttatcagtttgatgccgcctgctcatctagatcccatcaaagtgctatcagagcgggttacgctcttctctgcaatcttgaagtttccttacccaccccccccccccccc

SEQ ID NO: 51347 - DNA, 344 bp, Setaria italica
  Peptide Sequence Number=SeqID_117321
taccggaagtttcctatgtttgcggataatgatctctctgaattcgatgaatcacgggaaataatagagagtctagttgatgagtacaaggcttgcgagtcaccagattacattaaatggggaatggaggatcctggagaggcaaatgttgcagctgcactggattctaagttagtggtgtaaatatcaaggtcctgcttgttacccaaagattcaactgtagctgtccggtagttatcagtttgatgccgcctgctcatctagatcccatcaaagtgcttattctagagtcgggtttacgtcttctttcttcttgtcttaatttctttgttaagtttttcctt

SEQ ID NO: 51348 - DNA, 244 bp, Setaria italica
  Peptide Sequence Number=SeqID_117322
tttgctacagtaaactgcttctgtctcatcatcaccttcttcgtaaagccattcttcagtctgttgtaggttctcgggtaccttccattgccaaggtgcttgcgggattctttagaagggaaactagtcgtactctcaatgctagcgaatgtgtggctcgggggtgtgcgttgcagtgtgcaatgcttagtcctacattccgggttcgggaatatgaggtgcaagatgctatccctgcttcgat

SEQ ID NO: 51349 - DNA, 369 bp, Setaria italica
  Peptide Sequence Number=SeqID_117323
aaaagaggtcaaaaagaagttagcacacaaagatgcattgcatccaaatttcagaaactgggtactgtataactgaattttatacctccaattacgctgaagctcagcttagccacagttgcatcaaggatgcccaagcacacatttccaattttctggtacaaaacatgtaggaagacatttagccatcatttcattctgtaagatattgtggttcactgatgttagtaagttgaggatttacagtgacaatgaggtagttttcaggagggatctccatgacggcattcttgccagtggcaaagctcagatgcagtgacttgaattccttcttgacgtcaaacacggatttgaatgccttctgtcctt

SEQ ID NO: 51350 - DNA, 258 bp, Setaria italica
  misc_feature (1)..(34): n is a, c, g, or t
  Peptide Sequence Number=SeqID_117324
nnnnnnnnnnnnnnnnnnnnnnnnnnnnnnnnnnttttttttttttttttttttttctttagatacgatcatgctactaatcactatgatctcagacaacaaacatcacacagatcagaaacgtatactgtatatagtaggaaaacgtatacgtaagtatgcacaaggcaacccaccacatgctacacacgtgcacccaccccatcagcagccatggcgccgccctcggtgtccacctcccacctcctcatcaccgcc

SEQ ID NO: 51351 - DNA, 267 bp, Setaria italica
  Peptide Sequence Number=SeqID_117325
tccggccctgcgtggcgaagacgttgtacgccgccaccctccgccgccgcttcgcctccgggtcctcgcgggcgctcggcccgttgaagctgtacgacttgccctgcccggcgccgccgccgcagccgtagtacgccgacgagtgatcgtgcggcaccgacctgcacttctccatgggcggtcgggatcctcagaaccaccaccgcttgatgatcctcttgttcttggatttgctcgtgagatgaggtgggggagtggcgaggggaa

SEQ ID NO: 51352 - DNA, 358 bp, Setaria italica
  misc_feature (37)..(37): n is a, c, g, or t
  misc_feature (146)..(146): n is a, c, g, or t
  Peptide Sequence Number=SeqID_117326
gcagatttaacattcaagcagagtacaaccaccattntttcctcacatagcaaaaccgagaacacacagacagatctgaaaaaagcaggcacacagtaacctgagatgacacacatacacagttcatacatgcgcacatgcctacntaaacatagcatgtacacagtacctcccatatatgcagcaactatcttagcatgcatacaacttcttctgcgtgcagatgcatatgagcatcatatataatatatatatcatgtatgtgggggtgtgggattacggatttgcagttggggtttctattgtctttctagtaggtccgtccgttagtcggtatttgttcggtagtaactttgta

SEQ ID NO: 51353 - DNA, 244 bp, Setaria italica
  misc_feature (222)..(222): n is a, c, g, or t
  Peptide Sequence Number=SeqID_117327
gctgattggaaggacaccaatggtttacctgaacaaggtcaccgagggatgcggcgcccggatcgcggccaagctcgagttcctgcagccgtccttcagcgtcaaagacaggtgactccattcagtctactggtatcttcaggtgccagccacccgccattaaacaaaaccaattgtctatttgtttgtggtcttgatgctaattcctcctcacatgtcacncctcagttcgtcgcgttaattt

SEQ ID NO: 51354 - DNA, 258 bp, Setaria italica
  Peptide Sequence Number=SeqID_117328
tggaaaaggttcttgaggtgaaaagtgaggatgctgttaagatggctcgagaattagcagttaaggagggtcttttggttgggatatcatcaggagcgaacaccgttgctgctattgaactagcaaagaagccagaaaacaaaggaaaactcattgtgactgttcttccaagtcttggggagaggtacttgtcgtctgcactgttcgatgagaagaattgaagtacagctggcaattgcaacatggttgctgggtaag

SEQ ID NO: 51355 - DNA, 343 bp, Setaria italica
  Peptide Sequence Number=SeqID_117329
attagctttatccccaatcgcatgtactgcaacctgaagtccagatctgtcagactctaatgttctgttgagaagattgtccatatctgtcacttggagaccataattatcaggatcaccctcataaggctcatggaacaatgcacttgaagaacccagagacccatcaagaaaagctttaacaccacccagatgtatccattgacttagtgatcgaccattctcaccaataagatcagaaacacgagaccatgtgggcattgggaagaataagcatactctgatcatcattttttgcattagtagttgttgtccctacttctattagtactattctttgtta

SEQ ID NO: 51356 - DNA, 254 bp, Setaria italica
  Peptide Sequence Number=SeqID_117330
tcgagggataagcgttctgcagggatccagggggcctccccatccaggaggcttacgggacattgctgtctgaatcgcctgtaaggggttgatatctgaaacctgcaagacagtaacaatatacctgctaacttactatgtggtgacagaaaaacagagttcaggtgttgaaaaatctgcagaattacgtacaggccagtcggaaccaaaagctagctgtgcaccgccagctaacagtgatcggaacgtatagg

SEQ ID NO: 51357 - DNA, 188 bp, Setaria italica
  Peptide Sequence Number=SeqID_117331
cttccacaacagtggcaccgccctcttcttaatccatcggatgaactgtatcgcttctggtggtgactcagggtccatcggctcggccacatgtttctgttgatgctccttcttccttttcctgttctgtctttgcttcttattcttctccttggcctcataggtgtcagtagagggagggggagttt

SEQ ID NO: 51358 - DNA, 364 bp, Setaria italica
  Peptide Sequence Number=SeqID_117332
gttcttatagcgatattgcaggtgcttcgagatggatacacttgggatggaaaactttgtcttgatgatatttatttggactgaggttagagggtttgttcaggtcatgattcttagaaggccaacaaaaaagaatggcaaggatgagcagttagcatcagatatgaagagtatttggaataatctgatgggcccatattttgatgttggagacggaatacttcctacatacttttcaaggctcaagaactagaatactacaacaaaagggtagtacaaattacttttagttacaatttagttaaatttaaggtttttttaagtaaatttaaacctttaaattaacttaaacctaaaccctaaa

SEQ ID NO: 51359 - DNA, 317 bp, Setaria italica
  misc_feature (221)..(221): n is a, c, g, or t
  Peptide Sequence Number=SeqID_117333
tttctttaactttaaaagttttaggttttaattttgtttagtttattttaaaattttgggtttaaagttctttacttagttctaaccctacacaaagttattgtgcatcatgtggctgttcaagtagatcaactcaaagccgctgttggagatgaggaagctgttggggttcgagatgagcttgctaccggtgatgatgaagtgagtgttggggagaaagntagccaggaaaatgatgatgatgataagatggggtgttgggggagaaaggcattcaggaaaatgatgatgctggtgctgctgatgatgctgctgat

SEQ ID NO: 51360 - DNA, 382 bp, Setaria italica
  misc_feature (216)..(216): n is a, c, g, or t
  Peptide Sequence Number=SeqID_117334
ttaaaaaatttttaattacaacaaggaattcatttctttacagaatgaaaattgccatgatacaaaaaccaagaatataaagggcacccaaccatcattcttaccagacaaagcatcgcacgtgttgcttcagaaaagaatgtagtgcacgcaaccagattgttcaggttgttatcaagtccaggagcaaccgccaagtgaaggctcatgaaaagnttagctatctcaggaagaggcagcggtttcacaccttttaccacttcttgaaccttcagcaaatgaacagttagtgccttccactgggggaaaaattcttcagggctaagagttataggttgcaaaaatttattcaagacaacagggagtcgaagtttggcatcca

SEQ ID NO: 51361 - DNA, 317 bp, Setaria italica
  Peptide Sequence Number=SeqID_117335
agacaaggacaaattagtaggactagtaaccggggactggaaggtggggactagacctagaagtaccttagggataatcgatcaaatgctccttgatgaattccttcaactcgaatgtcaaatattggtcgcccgatgcaactgttagccggagttgtgtcctgtcttgtggatctgtttcaactcttatcagacaaagcatcgcacgtgttgcttcagaaaagaatgtagtgcacgcaaccagattgtcaggttgttatcaagtccaggagcaaccgccaagtgaaggctcatgaaaagattagctatctcaggaa

SEQ ID NO: 51362 - DNA, 266 bp, Setaria italica
  Peptide Sequence Number=SeqID_117336
tagtctcatgcatagcaggcttatcaagatattctctcgcctttgctgcagcatatggctgcagatcttcgttgttagtgacaaattgcaccactcgataccatatcatcacttacaaaatctcctgctttatctataagctgaagaataacatcaacataccatgaaagatctggagcaaacttctctgcaagaatagctgccttcaagaagaacaagactacttacaacgacaattagacaaaattacggactagtagtttaaa

SEQ ID NO: 51363 - DNA, 407 bp, Setaria italica
  misc_feature (298)..(298): n is a, c, g, or t
  Peptide Sequence Number=SeqID_117337
ttttgtcttttggatttgatgactggttccatgaggtataggtcaaagttcttctctccagttcatcttcaagacctttgatagaaaataatgtctgcacatagtgttcatccggaatacaatcatgctcctgtagaactgctcctttctggtttctccgtaaattgaaccctaatcgtctagcatttggccttcgtccaagcaacatcttggtcactaccatctgcagtggttaaaaccccacagaactgttactcccgcaggctgttgaatgtgaaacctatactatttgtgttangttggcacaaaactagttatattggtgtagtgttttgacagcttcacgtaagatatagatcataataatctgcactagccataaggaatgggaccaagatcatggtgct

SEQ ID NO: 51364 - DNA, 133 bp, Setaria italica
  Peptide Sequence Number=SeqID_117338
tcttggtgtcagcatgaagagaataacaacataccttacaatgtcttctgaatacttgtaatacattcttgtcacggacaacaacttcaacatgttttctgagatcctttcctccatttatcctttggaatgg

SEQ ID NO: 51365 - DNA, 408 bp, Setaria italica
  misc_feature (365)..(365): n is a, c, g, or t
  misc_feature (371)..(371): n is a, c, g, or t
  Peptide Sequence Number=SeqID_117339
tcacgtgcccaatttcaagagttttcttaataagctccttcgtttcaggatcacatgatatttttccttgctcgttagcataaaccttgataaattccccctgcaacagcaaatagaagatttccagaaaaaataacagtagaagttattgaaggaaatcaattttctaatttctgcaaagcatttaacttgcatcctaccttaactcatttgacaaagtatattggtgattgtgatgaaataaactttacaaaacttttgacagaaaatctagtaacccagttattcaaatgccagtatgattctgtaacattaactgaaactttcactgcatcccttgagttatgacataaataaaaggggtnttaggnttccacatcatgttttgccacatccagcatgcagctc

SEQ ID NO: 51366 - DNA, 258 bp, Setaria italica
  Peptide Sequence Number=SeqID_117340
tttcaagaataactatgtctcaagacctcatatagcgccacccatgattatcatgagtttattactttacttacctctacaaggatacctgccttaaagaattagttgatgtcttgacctcatctatcacaccaggtgatgcacaattttcttattttagaatggtactattcattattatcagcctcttgccaaatttcttttagtagtttggacccttttgtaatcccattcattccatcttctctactttcagaa

SEQ ID NO: 51367 - DNA, 251 bp, Setaria italica
  Peptide Sequence Number=SeqID_117341
tgcccaatctgatcctgacactgagtctccagtgtcatgactcgagtttgagtctaaaataatacacgatttcaagaataactatgtctcaagacctcatatagcgccaccatgattatcatgagtttattactttattactctacaaggatacctgccttaaagaattagttgatgtcttgacctcatctatcacaccagaatgattactgttagtctatttgttaactaattgtcttattgtccttgta

SEQ ID NO: 51368 - DNA, 470 bp, Setaria italica
  Peptide Sequence Number=SeqID_117342
tacagggtcgaccatttgtttccaaacacttcaatgttattgatcctttacgtgcaaacaataatctcggaagaagtgtcagcaaaggtaactatggacctactttaagatcatcttacaggtgaactgaacagagtaaatattctttggcttcacctatttccatgctattgatggtatgttgtgttccatgcaattatttcattcactgttggtaattggttgctagtttgtctccttgtagaatgtcagcattctactgatatacgcatataaagtgaccaacaaatccgaccactaacaataagaacttcattctttgcgacctgtaataggaccttctggagcaagtgttgggatagacatacctgccatacttctattcattcttacaatgttgagtatatggtaattaagagcagcaatcgattttacttgattgtctggcacttaatatcataaattttcct

SEQ ID NO: 51369 - DNA, 459 bp, Setaria italica
  Peptide Sequence Number=SeqID_117343
aaatgttgaagatggcagtgagagtgagaagcctattgcatcagatgcaaaccatgatactggcaaaacttggcatgagtatggtgttggatattctagacagtttgatcctgaagtgagagatcctcgcatctatgatattgatgggaaggaacgcccttctttgcctaatggtgtacacggtgccccattggaaaggcagatggaattcactcttgagaataatggtgccgcaaaggcaggtctttttccccatttgtctcttgatgatcttgttgtatttacagtcacttcattccacgaactagcatccagagctttgcctctggatgaactgccttgtgaagaaggaatgttcacaaaaccactccgcttagagtaatctacattgcgttctctacttgtttgattttggaacatgctggtataggtttcatcatctgcaccattattctcaag

SEQ ID NO: 51370 - DNA, 451 bp, Setaria italica
  Peptide Sequence Number=SeqID_117344
ggtgctgtctgataatttacaacaaagacaactaaaataagtagaaataaccaatcaaaaagtctggtgctttctgatatctcacaagcattggaatagcggatagcatcaaaagagacatcatcatcggcagattattttaccggtcgcttatgaactttcctggaaccgaagcaacaatcttcagaacaaatcgtggaactgtcaagcccagaaatccagaatatatatcttcatgcagaaatcagaattgaactaagattatgagcaaggatgaattgagttctgaccttctcaaggatatgttattaggttgaattggaaccggaacaagcatttctcgtcaaaatcaaatacaatcttgaaaaagcattgggttttactacaattatcggggcattatatggccatgtgtaactgaaaactaataaagagttctcgtttctaggta

SEQ ID NO: 51371 - DNA, 502 bp, Setaria italica
  Peptide Sequence Number=SeqID_117345
tacaaaagaagaacaatacaagacaagacaagacaaggttacttttaaccggtacaacgtaatgcccttcttggagtcgaagcaacaatcttcagaacaaatcacggaactgtcaagcccagaagatatatcttcatgcagaagtctgaattgaactatgattatgagcaaggatgaattgtgagttccagccttctcaaggataagatattaggttgaatggagctgaaacaagcattttctgcgtcaaaatcaaatacagtcttgaaaaggcattgggttttactacaattgtcagggaatcatctgaccatgtgtaactgaaagctaataatgagtttcttgtttctaggttaggatcaagatcctgtaacacatacagcaaactttttgcttaggtgtactatgagttaggtgggaatcctaggttacaattatcgtggtgtttctagcttggagggacatgaatccatgatgcactcacgcacgagtgaaaaatgaa

SEQ ID NO: 51372 - DNA, 206 bp, Setaria italica
  Peptide Sequence Number=SeqID_117346
attatgtattacttttaagtatttagcaacattgttgacaccaactgaaattatttttctgttcactttcaaggtagttgaatgatggcatggtcacttggttctggcattgaagccctgcgatagtaatatttcgctctggcactcgtgaccacatcctgcatgggttcagacggctgaggccatcagcagccaacaacaaaagc

SEQ ID NO: 51373 - DNA, 237 bp, Setaria italica
  misc_feature (72)..(72): n is a, c, g, or t
  Peptide Sequence Number=SeqID_117347
atttcctgtgatgcctctgcaacctgctgcggaaagaggtactggcgttttccagcactatggagaagatgnacccagataccgtggaggcacaggaacgtacatgccaaatccttctggactgcgaaatactaagccatcaattctgtggcttctgttcagaaggttccgtttagggaccggcactcaaattaaagaaactaccgaggaggttataatggtgactaggtagttgtt

SEQ ID NO: 51374 - DNA, 241 bp, Setaria italica
  Peptide Sequence Number=SeqID_117348
gaaattgatagtctggactgcgaaatactaagccgtcaattctgtggcttctgttcagaaggttccatttagggaccggcactcaaattcaagaaactacagaggaggttataatggtgacaggagtgactacagtgataaggaaggaagctggataaactcaacacaacgaaatccaaatcgcagctatggacgtagccagtcggagaggtctggcatggaggtctgatagacaggccaa

SEQ ID NO: 51375 - DNA, 234 bp, Setaria italica
  Peptide Sequence Number=SeqID_117349
gaatagatggcgtgaaaccttgagcatgttgtaagttgtgcaggactcctgggtctcagtggtcagagcttcagctaaacgctttggatcggacaagaattcactgacagatgtgccgccagtcgcataggcatgagaggaattcactgtgtccatgaagaaagttgcaatttccttgtcatccgagttaagattatggtcagcttgaactagtattttgcatcagaacagacg

SEQ ID NO: 51376 - DNA, 259 bp, Setaria italica
  Peptide Sequence Number=SeqID_117350
ggcgtaggcgtagaagggatagggcacgagggtggcaatgtctccttaggcaagagggctgcaataaataagaggcggcgtgattcatatgctagaaagagattatttatgacgccaaaagagaagaaagagaaaacaagatagtccaagagagactatagaaagagggccaaagaacaacaggcaaacaatttgcatcctgactcttattcgtcttattgttccttaagtttccttttctttactttttttacctttt

SEQ ID NO: 51377 - DNA, 186 bp, Setaria italica
  Peptide Sequence Number=SeqID_117351
tggtccattgaatatctgatgtttgcacggaaatgcctagcatcagctatttcaatggccacttctctttcacttctatgtactgtaagcttgatcgtgtgaccaccgacatcagaaactatggaatttacacattccgtgcccatggtcaaatctaccataacataagatcatttggtagattga

SEQ ID NO: 51378 - DNA, 176 bp, Setaria italica
  Peptide Sequence Number=SeqID_117352
ctggagtgcccaaggaggaggcggagagtatcgccgagaagatgcgggcagtcggcgccaagatcgttctcgagtgagacgacgagagctctttgttgcgattaggcaaatgagaaggggtggttttaggtaagtttttgcatcccagcgtggtgtaaagtttgtttgcactgggg

SEQ ID NO: 51379 - DNA, 323 bp, Setaria italica
  Peptide Sequence Number=SeqID_117353
aactaactaagggaaccgaaaaggaacaaactaagaatacaactttagtacaagggttaaccgatcttctcgatggtcgcatcatcaagatcatctgcaaatctgcgaactggagctacgacgacgaacaaccggccctcctttgggtttgcaaagcgcaggtcgatctctgtgccaccgagatcagcaattgacacagggacctcgtcccagccctcaggaactttgaagctgtaggggatgatggggctccagccgactccatggccgccggacttgtcatctggcctacggtatgttctccagccattctcatcaggttc

SEQ ID NO: 51380 - DNA, 243 bp, Setaria italica
  Peptide Sequence Number=SeqID_117354
atttgtttctagatccttgtaatgcctcttccattgcagaccgtttgcagttacgctgaacaggtagagtctgttcccagctgcagtggctgtaatgaacacatggggcggctccagctcaaactggtagtaagttcttcctgaatgctctgctgtcgctgaggacaagaccttcccttactaacaattaactaactaaccgaaataaagaaaacctaaactaaagggaaaccgaaaaagaaa

SEQ ID NO: 51381 - DNA, 361 bp, Setaria italica
  Peptide Sequence Number=SeqID_117355
tctgctgtcgctgaggacaagacttcccttcctacattctctccgatgacctctgggccgaaggcactgatcactttgtcagggttaccgatcttctcgatggtcgcatcatcaagatcatctgcaaatctgcgaactggagctacgacgacgaacaaccggccctcctttgggtttgcaaagcgcaggtcgatctctgtgccaccgagatcagcaattgacacagggacctcgtcccagccctcaggaacttttgaagctgtaggggatgatggggctccagccgactccatggccgccggacttgttctattcttggtccttacggttattgtttcttccttagttccttattttctta

SEQ ID NO: 51382 - DNA, 228 bp, Setaria italica
  Peptide Sequence Number=SeqID_117356
ccagtctaagatgatgccactgcgtgacttacctgaagaacaacatgatgcatcagagatccagattttgactgaacaaacgcatcgtagcaccactgaatatctaggttcaggcattaccgaaaagggtctgtgcaaggctgttgttctccacgtaattgtagaccagcatcttctggcctccatcgaagcagcagccatgcagtttgacaaggttgtgatgggtta

SEQ ID NO: 51383 - DNA, 302 bp, Setaria italica
  Peptide Sequence Number=SeqID_117357
actcgttatttaccactaacaacctaataatgatactataaacagattagctcaagactcatcccgaactgaagcgttcgtacgcacacatgtaaaaagtgatttacacgttgctgcttgaggcttgcatcatgccatcccggatctgctcgctgatgtccttcacgtggcccgggccgtgggggatgaacactgtggtgttcttcgagccgtccccgagctccttgatggtgtcaaagtactgtgtgaccatgaatacaaggtaccaatagaacttaccttaggacgactaagtagaccca

SEQ ID NO: 51384 - DNA, 227 bp, Setaria italica
  Peptide Sequence Number=SeqID_117358
cctatcccctgtgtgccttgcctatcccctttgcgtgtctcagaccatgatcaggtccatgacttccttggcgctagtgcccgacaccgagtgcgagaagttcaggatgttctccctgaggccgtcggttatagcttgccgttgcttggcaatgccaacgccagagagatatttcgcctctgcttctgcttcggccttcttcaccagaagaatcttctctgcttctc

SEQ ID NO: 51385 - DNA, 398 bp, Setaria italica
  Peptide Sequence Number=SeqID_117359
taggaaataaactagaatgtttcaaagctagagcggaacgcatcctgaagtatctgcttggtggatgtctgaaactgtgtttggatctgcctagcgacgctagcttcaagttttgtggatatagacttatctagctgattagcaaccttatcacccagcactttctgaaaagggagttcaatgagagagatgacaagaaaaatcagaatatcaaggaaaaaacaataccacaacctgaagtgaatcagatacagcagaagataaatgacttctcaatgataggtgctgttgtccgagcaacagcaggtcccagcgaagatatttctttcttaatgacttctccagcataacaggaatatccttgttactagaagttgcaattaagtagccatctgctg

SEQ ID NO: 51386 - DNA, 253 bp, Setaria italica
  Peptide Sequence Number=SeqID_117360
gatacttcaggatgcgttccgctctagctttgaaacatctgcttggtggatgtctgaaactgtgtttggatctgcctagcgacgctagcttcaagttttgtggatatagacttatctagctgattagcaaccttatcacccagcactttctgaaaagggagttcaatgagagagaaaatcaaatcaaactgttggattcgaggctggtaaggaaaaccaattcttcctgagaagaaagggagacctatcaagt

SEQ ID NO: 51387 - DNA, 194 bp, Setaria italica
  Peptide Sequence Number=SeqID_117361
ggccgcatgggtcagcactcagcagtcagcacatgacccaacagcatgtacatgccacttgacataggttagtttattcctaaatcaagtggcatgtacatgctgttgggtcatttgatggccgcatgggtcagcactcagcagtcagcacatgacccaacagcatgtacatgccacttgatttaggaataaac

SEQ ID NO: 51388 - DNA, 327 bp, Setaria italica
  Peptide Sequence Number=SeqID_117362
cttatggatgattatgtgggctcggtaagtcatcgttaaaaaattgtactctgagctgataacccttgtgcatctgttaaagagaatgtgtctcctgtggctcaccaatttttgaatatgtttcaggggaggcgtaagagagggtgatgcgatatatgcagtatctgcaatgcttttaaacccagctgcgtgttgctcaattccttgtgcacctgagctcagcctggaacggaggctcgactttgtagtgtaatttatgcaatgacataggttagtttattcctaaatcaagtggcatgtacatgctgttgggtcatttgatggccg

SEQ ID NO: 51389 - DNA, 463 bp, Setaria italica
  Peptide Sequence Number=SeqID_117363
tggtattgtcctatttaaaattttaagtattggtattgtattaattgtcttgtaatttgttattgtatttttgtattgtattgagaaggatgaaaacaaggttgatttcaagaaacttgtcagtgataactggatcgagccacctagaagagaaaggaagaggaactattctgagtctgagtactttaagcaagctcttcgccaaggtgcaccagcaaagcctagggaaccaaggattccaagaatgccacacttgcatgatttccaattcttcaacaaccaaaggctaaaatgaattgtatgaaaaaggaagtgagatacctcatgcaagcaaaaccagaagaaagataccatagatggtgaagatgaagatcagttggagcctttgactgctgaggagcaggaagagaaggagcagttattagaagagggttttgcatcatggacgaggagagacttcaac

SEQ ID NO: 51390 - DNA, 403 bp, Setaria italica
  Peptide Sequence Number=SeqID_117364
cgtgcatgtgagaagtatggtcgaaatgacataaaaagtatagcctctgaaatggaggggaagacagaagaggaggttcagcgttatgctaaagttttcaaggagcgatacaaggaactgagtgattatgatagaattatcaagaatattgaaagaggagaagcaaggatatcccgcaaggatgagattatgagagcaattgggaagaagctagaccgctacaagaacccatggttagagttgaaaattcaatatggccaaaataaagggaagttctataacgaggaatgtgaccgttttatggtatgctctcccacttcatttatatgtatattcgagtacatggcatggttagtaagctgctgttacattacagctttgcatggtgcataaacttggctac

SEQ ID NO: 51391 - DNA, 366 bp, Setaria italica
  Peptide Sequence Number=SeqID_117365
ttaatattgaaacttcaatgttttatggaggaagtgaatgaatcgtaactaaaaaatgcttactgtcttttgttgattagctcacgtttcctggtttctttggcttacaatgtagatgtagcccatcgagctgcattgatatctacttcatatatctcggatattcaagcttgatctttgcaaacaggggttgctattttgaggctggaggtgtgcttaaactgggaacttccattaatgctgctttcaaaatggcactggaaacttgggcttcatgggtgaaagaaagagttgatttaagacgaacacgtgtgttcttccggacatatgaaccatctcattggagtggactactcacactgagtc

SEQ ID NO: 51392 - DNA, 185 bp, Setaria italica
  Peptide Sequence Number=SeqID_117366
tttctttatttgccccttcctgaattctgatgactgacatcttatatttactgtatgctgctatagatacatggagaaaggatgtgaaatctgaagatataaaagatgctataaaggaggctgctccagataaacttaaacctttgcatgtgtcagaggttgcacgtgagtttcatcctaatttt

SEQ ID NO: 51393 - DNA, 517 bp, Setaria italica
  Peptide Sequence Number=SeqID_117367
ccgatggtgctccggtcgacgaagtagaccatcttcttcgccacctcgcggtccttcaccagcgcccacccgagcctcgtgccggcgtggccggtgatcttggacacggtgaagagcatgatgtcgtgggcggcgcgcccggtgatgggcgtgtactgcggccagtagtagaccaggtcgtggatcggcttggcaccggcggcggagctcatgacggactcgcggacggcgccgtcggggttgttgggcgagcagacgagctcgatgcactcgccgccggcgaacgtgctggcgtcaccggcccagcggtaaaaccccgagagctggagatccgtctgcggcggatacgaggagtagtacggcgccggcgagacgacggggacgggcttgtccccgcgcgccggcgagctgagcgcgtacatggcggcctgggtagagttgggtggcgccgtggtcgacggctaccacctcgtcgtcggcgcacctcgcgctcgaactccgaccccgacgcacctcg

SEQ ID NO: 51394 - DNA, 266 bp, Setaria italica
  Peptide Sequence Number=SeqID_117368
agctggcggcgcgggccgggcccaagaagggcgggatcgcgctggtgctcaccgcgcaggacgtggccgtggacggcttctgcatgagccgctgcggcctgcacggctcggacgcccgggccggcaccgcctatatttgggtcggcaacgccgccacgcagtgccccggccagtgcgcgtggccgttccaccagccggtgtacgggccccagacgccggcgctcgtgccgcccagcggcgcgtccttgtcgccctggtagaacccg

SEQ ID NO: 51395 - DNA, 254 bp, Setaria italica
  Peptide Sequence Number=SeqID_117369
cgccccgccgccgccgccgcttcctccgccttctcccctcccctacaagagagattggcacccacccgtataagtacataggatattgcctccgtcctcccctctcctgtcctctgccaagcagaagcacaagcgcagggaggttgctgcggtgcggaggcgtcttcttcctccctccctgcctgcttgcttgcctacctgcccgccctgggcgcaaggtgcaggcagataaatacgtgcacaagtttcctcct

SEQ ID NO: 51396 - DNA, 229 bp, Setaria italica
  Peptide Sequence Number=SeqID_117370
cttccgctctgctgtgttattaaaggcccttctgcaaaagaggttgaatgcatcagagcggaagtgccccccagagctcgaggatgtggctacttctatagtagataggtgtaagggcctgccattggcaattatatctatgggcagcctcatgtcctcaaagaaaccaacaaagcatgcctggaatcaagtgtacaatcagttccggagcgagctagctaaaccagac

SEQ ID NO: 51397 - DNA, 257 bp, Setaria italica
  Peptide Sequence Number=SeqID_117371
aaggactcgtcttgaaataacgaaagcaacaaatcaatctttgagttacaggtgctatattttccattaaaacaccaagggagaaggtcatcattgaacaactccagataagacttcacatctgaattttctcaatttgatcctgctcctgaggttgcacaggctgctcgacgttcattcgaggaaagttagttcattttccacctgaccaaagggattgggcccaatcccacgagttcaggcagcattcccacagt

SEQ ID NO: 51398 - DNA, 275 bp, Setaria italica
  Peptide Sequence Number=SeqID_117372
cagcagcagccggcgccgccgccgccgccgctgccgcctcctcaacggatcccctaccggacttctcgccacagccacagcagggccttcttctccgtccgagctcagccgcgctcttttcccctccttctccgattcgtgctcgtccagctctggtggatagtggtagacggccggcgacgaggtgggtcctcctcctcctcctctctcggattgaggcatggtggtggctgggttagggttggggtttcgggttcggggttttcgggggagag

SEQ ID NO: 51399 - DNA, 265 bp, Setaria italica
  Peptide Sequence Number=SeqID_117373
cagccggcgccgccgccgccgccgctgccgcctcctcaacggatcccctaccggacttctcgccacagccacagcagggtcctttctttctccgtccgagctcagccgcgctctttcccctccttctccgattcgtgctcgtccagctctggtggatagtggtagacggccggcgacgagttggcatacaggacctcttgctgccaatcaacgtgcggttacagctttgttttccaagtaaattttggggttttgagctgaagcc

SEQ ID NO: 51400 - DNA, 243 bp, Setaria italica
  Peptide Sequence Number=SeqID_117374
ctactaatagctcctcctcggtaaaattgtaaagtgctttcatcaatgtggcagcattgccaatttcaaggctgagatccaggaaaggatcaaatttgttcgaacagtgtgagcactttgtacatctcacctgacttcttaagcggccatctggtatatcaagtgagtctccaagtgcctatgagaggagtctagttcacagaatatttggtggccgcttaagaagtcaggtgagatgtacaa

SEQ ID NO: 51401 - DNA, 253 bp, Setaria italica
  Peptide Sequence Number=SeqID_117375
ccgtcgaagtcgccctcggcgagcatcccgcggaggtcgtcgtcggacatgggtcccaggcccagcagcggcgcgttgcggcggaggctgtcgaaggtgatgagcccccgggacgggtccatgagcaggcggaacccgctcgccagctcccgcatgaggccgtcctcccccagccgcttcccctcgtcatcttcctctccaaccagcatccagccatccaccggagctcccaatcagcggcactagcacagag

SEQ ID NO: 51402 - DNA, 311 bp, Setaria italica
  Peptide Sequence Number=SeqID_117376
tttacgtttaccttaattacccgtcttcttcagccgaccacaagcccgaccgtcccgacgagctcgaacggatccacgcggcgggagggcgcgtcatcttctgggacggcacccgccgccgccacatgttcgacgtccagaacaaggtgtcgctcaagtggctgcacgcgctgggccccagcctcggcatcgtccgcgtccccggcatcggcctcatctactccgagctcgccaccggcgtcccggccatccttctcccacttcgtcaccaacctgccggcgttccaccaggtgctcgtcttcgtgtgcgt

SEQ ID NO: 51403 - DNA, 273 bp, Setaria italica
  Peptide Sequence Number=SeqID_117377
tagaccgtcggctcaagggacactaccggcccggcgcccacctgccggtgcgagatgcagatgcccaagtgcgaccacgtgggctccacggccgtcgtcgccgtggtagggccgcgccacctcgtcgtcgccaactgcggcgactcccgcgccgtcctctgcagcggaggcgccgccatcccgctctcagccgaccacaagcccgaccgtcccgacgagctcgaacggatccacgcgccctcccgccgcgtggatccgttcgagctcgtcggg

SEQ ID NO: 51404 - DNA, 254 bp, Setaria italica
  Peptide Sequence Number=SeqID_117378
gtttcttgtcaagtctagcaaacagagcacagatgaacagactattgatgcacgcgttgttctaaacaaatccgtgttattcgcttcagcccgaccgtcccgacgagctcgaacggatccacgcggcgggagggcgcgtcatcttctgggacggcgcccgcgtcttcggcatgctggccatgtcgcgagccattggcgacagctacctgaagccgttcgtgatctccgacccggaggtgagggtggtggagagg

SEQ ID NO: 51405 - DNA, 394 bp, Setaria italica
  Peptide Sequence Number=SeqID_117379
acatatagctgatatagcacgtattctagttcatttgatgtttacttagttaaatgcccctatgcttcatatagaaaaggaaatattactgttgttcatgtgatagccaataagctatattttttttcaaataccatcaaagttatatgttattatgcacacaagttttctaattatctttgaatctaggaacaacaaaagtgaagaaccttgatgataacatgggtgctgtaaaggtaaagctaagcaaagaagacctcgaagaaatctcggctgcagtcccagctggtgaggtggccgggtccagacttctgggaatcctggagccttattcttggaggcttgcaaataccccacttccaaagtagccacatcacatcttcaagtgcaaatt

SEQ ID NO: 51406 - DNA, 245 bp, Setaria italica
  Peptide Sequence Number=SeqID_117380
gtggtcgctatggaccagagatatagaggaagatataataccagtctgcaggttcatccactccttatcccatataatctaacaaagctgtctattttacttccagaaacttttagcatttgatgtatcttgaaagttttattagtctttaatccaatcttcttttttccatcggaacttgtgcttggagcgttaattaggatgattggtgcttatggaatgtccatgtatcatgtatggtgcat

SEQ ID NO: 51407 - DNA, 405 bp, Setaria italica
  Peptide Sequence Number=SeqID_117381
ttttgggtttccttttctttaccggtttagttttctttacttaacgtcccctagttccctgaggaagccggaatcgccataatcatgcacgcgtttgaggctggtatcaccttcttcgacactgcagatgcgtacgggccacacaccaacgaagtcctgcttggaaaggtaaaatctttctcaatccagcccagcgatttgcggaggatgtccaatttggctgaaggatgatgtaatttgacaaggatgtttgatttggctatgtcctgttggctaagaaagtttggcagatccgatgcctattcgtgggatattttaagatctttattgtttattaggatattatctttcggacaaagatgttggtgaattctaaaattggatattcaggtgaaaatgaattgg

SEQ ID NO: 51408 - DNA, 272 bp, Setaria italica
  misc_feature (251)..(251): n is a, c, g, or t
  Peptide Sequence Number=SeqID_117382
gggtcactgatgtgcctattacatatgacatggagcatgctgacccctatatcggttgctgtattcctccttgattgtatacttaaaacacattttggtacacagattgtatattttcatcattatcataattagatttttttaagcaggcacttaatcaatttccccgtgagaaggtacaagttgccaccaaatttggcattgctggatttgatgtcagtggcatgcgtgtgaagggcacaccagattangtgcgagcatgttgtgaaagc

SEQ ID NO: 51409 - DNA, 225 bp, Setaria italica
  misc_feature (201)..(201): n is a, c, g, or t
  Peptide Sequence Number=SeqID_117383
ctgaatgaatatgtttttcatgacattctctaagtaaaattgtatctaatttctacaggagtgaagtatgttggcttgtcagaggctagtgcagataccattcgtcgggctcatgcagttcatccaattactgcagtacagttggagtggtcgctatggaccagagatatagaggaagatataataccagtctgcagggancttggtattggaatgttccataca

SEQ ID NO: 51410 - DNA, 409 bp, Setaria italica
  Peptide Sequence Number=SeqID_117384
cagtgcacgtagtgaagatgttaaatctcccatgcgctaccttcataattgtcatcacaaatggcttcaaacattctcaggttggtaagctggcctagctcttttagaaagctgagtggctgcctgtggatcgagagaagtgttagttgttccaatcgtttcattcttgctgaagccttctgctgggaacttgactttcggactgacgaaaagacgtgccagcttttcaagatgaacaatagttgatggcaatttttccacttgagtcagacttatatctaatgtttctaaattctggacttttccaattccagcagggagctcgctgacacctgttcctttaatgttcaaataccgcaactgaagtaacacctctacatttgcaaggtgcgcatttgtcaatggcaaa

SEQ ID NO: 51411 - DNA, 315 bp, Setaria italica
  misc_feature (11)..(11): n is a, c, g, or t
  Peptide Sequence Number=SeqID_117385
ctgccatcacntaaagcaggtcattcatgacgccgagctctgacctgaggaactcgatatccttgcgaaccccttggcaagcttgtacttctcatggagcagctcggccagctttgtgaggacgtcgccggagctcaccatggctcgctccatggtacatgaacggaggtggatcgagggttgttgtgtccagatctaggttgacagctgatacgccatgtccctcccaatcctatcctcaccaccaggcaggaattaattgaatgtgtcctgtgcttctcgacgatcgtggatgcaaaggccaattagagccaa

SEQ ID NO: 51412 - DNA, 272 bp, Setaria italica
  Peptide Sequence Number=SeqID_117386
gttacaaaccttagtaagtggttttagatgaacacagccagtgtctttcgtggatgaatatcttctggctttaatatcctcctcttttgaaggtctatgatcgtggtacaacattcggcctaaaaactggaggaaggattgagagcatactcgtgtctcttccacttacagcacgatggcagtatgatcataaaccggaagaagggactgaagaatggaaacttctcgacgcatgcataaacccaaaggaattaggatctgattagccgaag

SEQ ID NO: 51413 - DNA, 303 bp, Setaria italica
  Peptide Sequence Number=SeqID_117387
gttggcggtgctctcgccgtggtagtccatgacgtcgctgcggagctccccgatggacctctcgagcttgtagcagtagagctcgagctgcgagaggcggcccccgatgccgtcgagcgagtggagcagcgcgtcggcctgcttccgcatgcactcctcgacggccgccatgacggcgtccttggggtagaaccctccgtcctgctgctggttctgctgcagctgctggtggtggtgctggtgcagcagcggctgagcgtagacgccaacgaaggtcctgttcgcccgttcgtcctgcgagcc

SEQ ID NO: 51414 - DNA, 414 bp, Setaria italica
  Peptide Sequence Number=SeqID_117388
tgtattggtaagtcctagtcttaccttaactagttagtaattttttccgttaaactttccttacttgaaccagagaaagcagctgataagaacactccagtgagtgataggtatcaggacaatcatctcagaagaatcggatcaaatgtgtcatcttatattaacatggtctgtgagacgttgcggaacacaattccgaaagccattgtacattgtcaagtgaaagaggcaaaaagaaatttgcttaatcgtttctacgctcacgtgggaagcaaggagaagaaacagctcagcgcgatgttggatgaggatcccatttgatggagaagagggatgccttggtgaagaggctagagctgtacaaatctgcaaagggaacgagatcgactcggtcgcatggaaatgatcggctag

SEQ ID NO: 51415 - DNA, 410 bp, Setaria italica
  misc_feature (25)..(25): n is a, c, g, or t
  Peptide Sequence Number=SeqID_117389
ttctgcattagctgcatgctttctntgtcagtaaaattcaccaccagtgtgaataaccatgtaaattgagtccattatgatgtatgctaattatggcttaattgttgttttactttttttcctttgtcaggatcaaatgtgtcatcttatattaacatggtctgtgagacgttgcggaacacaattccgaaagccattgtacattgtcaagtgaaagaggcaaaaagaaatttgcttaatcgtttctacgctcacgtgggaagcaaggagaagaaacagctcagcgcgatgttggatgaggatcccactttgatcggagaacgagggatgccttggtgaagaggctagagctgtacaaatctgcaaggaacgagatcgactcggtcgcatggaaatgatcggctagttga

SEQ ID NO: 51416 - DNA, 333 bp, Setaria italica
  Peptide Sequence Number=SeqID_117390
taagtaaacttagtaccaatacaaaatcaaagctttgttaagactccaaaagtcctgtcacctgaaggatcaacaaagcttgatttgatggacaagggtaccaatgccgttgatgtaacttgaaggaggcagtatcgcttacaacacccctgggtgggaaattgtcaaccgctcacaagctgatatcaacaggaatgttgacatgctctcagcaaggcgcaaagaaaaaagaatactttgagagtagtcctgaatatggacacttggcacataaaaatgggtgcagagtatcttagccaagcttctgtcacagcatttagaggctgtgatcag

SEQ ID NO: 51417 - DNA, 401 bp, Setaria italica
  misc_feature (175)..(175): n is a, c, g, or t
  Peptide Sequence Number=SeqID_117391
gtctaccgtattcaaaatagctaagtgtttcatcatgggtacctgtcaatttgtaatcaatagactgacactgtttgatacagataagaacacacaagcttcatcaatgtcaattttccaagtaaggtatttacattgtacagtagagagtattcgatagaaaggattagtttgngttttagcatggaactacaataggataaacaccttgagtattgctagtagcatcgtcaagcagctatatgtcacatgagttacagccatcacaaatataaaccggtgcagctgctccagaccttcatgtgaaacaaatgactcgtgtccctgcacacaccaaatgaattttctaaaagaaaacccaaaggaacaaaagtaatacaatttctagtaggataactgaa

SEQ ID NO: 51418 - DNA, 436 bp, Setaria italica
  misc_feature (1)..(73): n is a, c, g, or t
  Peptide Sequence Number=SeqID_117392
nnnnnnnnnnnnnnnnnnnnnnnnnnnnnnnnnnnnnnnnnnnnnnnnnnnnnnnnnnnnnnnnnnnnnnnnncagtagtttcaaacatagtttcagttccattcggatgtgtatatatcatcagaatcctacctcaataatgtgcagttctactacactagcagcccaatgtcttcagtgatctgtacgcacgttgttctagaaactccaccacaaccgtcctagaggctagagcactagtactgtcatgtctgtcaactgcgtgtcacaatcttcagtgatcggcagcgcgtcacgactcgtcatggctcgtgcgcgtcggcgtgcccgtgcccgtccgcagcgaggcgatcccgggcattggacgccgaccttcgttcacgtttgtccttccccggttacgtacggtcgtacgtcttgtagtacttgtcctaa

SEQ ID NO: 51419 - DNA, 454 bp, Setaria italica
  Peptide Sequence Number=SeqID_117393
tcttccattgagcgtatcatgtaattgtggaagtcgtatgttggcgacagattatggttcattatgaaacccttgcggaggataaggtagtctgctcgaacaacagactgaccaaattgtgcaataaagcaaacgagaaaacgattcgtgattatccctgaatgcttcatcctcccattttctccacttatggatcttgagtattgctagtagcatcgtcaagcagctatatgtcacatgagttacagccatcacaaatataaaccggtgcagctgctccagaccttcatgtgaaacaaatgactcgtgtccctcagggcagccttgatggttatggtaactagcttttagatttctcctgagtgaatggtgcagaatgacctcaattagacgcttgcgcgcgtgagcaacggcatgctctgcatttaagattcttcaacctcttctttggtgc

SEQ ID NO: 51420 - DNA, 430 bp, Setaria italica
  Peptide Sequence Number=SeqID_117394
tacgtaagtcccctactagcactccactcactccaacaatcttctcaaattcctcttccattgagcgtatcatgtaattgtggaagtcgtatgttggcgacagattatggttcattatgaaacccttgcggaggataaggtagtctgctcgaacaacagactgaccaaattgtgcaataaagcaaacctgcatggcaacatgatcaaaatctttaagtgcggctgcaacagtgaaatgataatagtaatatttgtacgccctatggatggaagagaactttatgcctcaaatgagctataaaactatcggcgtcaacatacaatccacatgaccgcattattttgactccatgagcggaacgaataggatttggtgagcgctggttgccttctagttgctgactcatatgcgatctgagaaaacgattcg

SEQ ID NO: 51421 - DNA, 387 bp, Setaria italica
  misc_feature (43)..(43): n is a, c, g, or t
  Peptide Sequence Number=SeqID_117395
gttgatccagcattaaatggaatgtaccctgctaaatcgctancccgttttgcagacataattgccgctctgcgttcagcctgagccagagttccgtccaccaatgtcagaggttgttcagcaacttgtgcgcctaatgcagagggctagcatagtaaggcggcaatcaggagaagagctagggttctcatacagagcccccgaacgcgaaggagacatgagagacatatccttctgagttcaaagcaaatccttccatgatacaagcgcaaagcagctccgtggctcaacttgcacaggcaagatctggaacatgcatatgaattggagaagtttgtagtcttgtattgatgacaactcagaattcgtaattgtaattttgtagta

SEQ ID NO: 51422 - DNA, 333 bp, Setaria italica
  Peptide Sequence Number=SeqID_117396
gttcaaagcaaatccttccatgatacaagcgcaaagcagctccgtggctcaacttgcactaggcaagatctggaacatgcatatgaattggagaagttgagctgatgatgacaactcagaatcgaatgaatttgaagaaagaataaattttaggtaacttaattagatcaactttgttcattcttctacattcctcccgttttccagtcagtgtacttgctgctggatctaaactgaggctcaaattgatggtggtgtatagctggttattggtagagaagaaggaaaagaatgtaaaatgattcctgctcggactaaactaaaaaaaaaaaa

SEQ ID NO: 51423 - DNA, 252 bp, Setaria italica
  Peptide Sequence Number=SeqID_117397
tttctgaatatgttcaatgacctccctattctgaagcttactcccgtcctgatcagtcacattgaacacatccatgaaccagttgccatccgaagaaatatacgccttcgtgatgacgaggttgagatcgacaaggacttggactgcctccagtaaaatgccatgcttcttgaccctatcaacctggcatgaaagaaaggtccatcacttattaattgatatttagtacaaactactaaaagtttttcaggc

SEQ ID NO: 51424 - DNA, 268 bp, Setaria italica
  Peptide Sequence Number=SeqID_117398
acttacctacttactacaaagaattccgttgcaatcgtgtaggcacattgataatttcagacaagggaatcttgagaagaggaagatggaatcaactagcagccctctgaggctacacaataaaggagcttgttctccaacaggccaagtgaaggagagtacgtcacctacaagcaagtcttgttgcagacagatttgagccatccaaacaaacaatgaagtcagtgctgaagagcaaagctgcttctcagatggatactgatgcctg

SEQ ID NO: 51425 - DNA, 396 bp, Setaria italica
  Peptide Sequence Number=SeqID_117399
tttagttagttgtaggtattgtaagtatttggggttctattgtactattaagtaaagtaaaagtaagtaactacgttgcagccagtgtacaggataattctgttgatggtttctcgaatgttatatctgatgaaaagactgagaagaagggggagaaaactcttcaggattcctcccacggcagtcgaggtgcttcgcaaatcttttgctgaaaatgagctcccaccccgagatgtcaaagaaaatctctcaagagaattggacatttctttcgaaaagattgataaatggttcaaaaatacgcggtgtgctgctctcagagatcgtaaggctgaagggacagtcataatcccgctcccagcaaaaagctacaagaagtaaaggaaaagctggaat

SEQ ID NO: 51426 - DNA, 277 bp, Setaria italica
  Peptide Sequence Number=SeqID_117400
gaagcggcccgaccacccctgcggcgcgtacagggagcgcgactgccccggctccagcgcgaagcccgtcgtctccagcggcggcgtccccgagcccgacagcaggcccggccacaccgtgtcggggcaccggttggtgaaggtgaacgtgatgccgcgcaccgaccctgcgccagggcgcacctcgattcaaatccaaatcccgaaagctcgcgccttcgccccccaaatccgaagcaatccaggccgaataatcgctactagaacattacgggcg

SEQ ID NO: 51427 - DNA, 242 bp, Setaria italica
  Peptide Sequence Number=SeqID_117401
agtatttctcctgacttatcttcctgcttctattgtgaaatgtgccgaattagcagggctgatccgtaagtccttctaagcttcaatattgtcctgagctcaacaaggtcgagttactcactagtcctgtgatcacccgcttttagtttgcaatcttatggcattagtctgtgttggttgttctgtggcatcaatcatttatgaaaatctccttgccccacaacttaaaacttgatcgattt

SEQ ID NO: 51428 - DNA, 241 bp, Setaria italica
  Peptide Sequence Number=SeqID_117402
acagaaagctgaatatgatattcaggtttggtgtatccttctgaatgacaaagtaccttttaggatgcactggcctttacactctgatatgcaagttaatggtatatggcttttatgtatagtaagcatattttctgataggattttggcgcaagttgtttattttttttgagaactgtacaggtgggggaggcccccactgtggtaaattatattaaaaaagagaagaaactgtgcagga

SEQ ID NO: 51429 - DNA, 237 bp, Setaria italica
  Peptide Sequence Number=SeqID_117403
tggaatgagaagattctgacattagaacagctgaacaagcacgttctgattcttaatttcttacagctagtcctgatcgtatgtgctccgccgtcgagtcggtgagcttctcgatcttgcggccgccgccgtcagcgtcggcagtgatgatgctccggtccaggtagaaggggagcacctcctgcctgacctcctcggggatcttcgacagcctccgggtctctctgttcatcatca

SEQ ID NO: 51430 - DNA, 477 bp, Setaria italica
  Peptide Sequence Number=SeqID_117404
tggtattcgtaagtcgtccttctattgtaacgtaattccgtccgtccttccgtccttcctaacccttgtacgtacgtccttcccttcgtaccttcttcctttcttctagtaggtattggtaagtaaattggtacatttatgattgacaatgaaaggtttcctgcatctctcttggatttacctgcggtggtggagtcatacaagacttatgatgactctgtactaattaaaactgctgatattggtcagatgattatggtaagagaagaaaatgaccctgctccagagggagttgaatacaagcatgggcttactcctccaatgagggatgcacgtagacgccggttccgcagagaaccagacttgaatgcagagctggttaaccaagttgagaagcatctcatcaatattatgcatggagtatctgtcaaccagaatgccagtgtaataggaggtgaggaaggtggtgagcgtaag

SEQ ID NO: 51431 - DNA, 476 bp, Setaria italica
  Peptide Sequence Number=SeqID_117405
ttcatcttagatcctccttgttagggagtgaacatgccacttcttgcctagtgaggttgttaaattttccagaagatattgacataaagagcttaatcgagaaagctacgttattgcaatcttttgcccttgaagcaaatcttccttcatctcctgtgagaggaaaaatctctcttgactacaccaaactattgggaagagacatggaagatcctccaatcatcaatagaccaaaagggtggtggtgtgttcaagatgaagggaaggggcttcttgagaagaagctggtctaacactgaatcaaatgttttggagattagcagccttgcttctggaaacatttggcgagatgtttgtgtgtttctgtacctcatttcaatacagtcttcactttttgatgcttggataatggttgttctctgtccatgtggaaagatatcttgcttagtttgatctgcatacaatagagttaacat

SEQ ID NO: 51432 - DNA, 393 bp, Setaria italica
  Peptide Sequence Number=SeqID_117406
taacgtttaggtaaaattaagtaaaacttaaagttacccttaattgttgttctagtagttttgttgtctttctttgagtccaactcaaccttcactggcatgaaaaagcccctccacttcaaggaaaaccgtcatcgctttggatttgctgaatcacggctgacatatggtatggtcgggggaaggttcatgaagggggagaacccatttgttgaggagtcatatcagagggttgccctggaccagcttattaggattgcaaaaaatagaagatgatgacctgctgatcatgtcggatgttgatgaaatcccaagcggccacacaattgatctcttgaggtggtgtgacaacattccagacattcttcatcttcagctcaggaattatcttta

SEQ ID NO: 51433 - DNA, 229 bp, Setaria italica
  Peptide Sequence Number=SeqID_117407
atggctgtggcggttgcatctggtatgattggctaacatagtcggacaattgcttggggaagtggtctgtggatgagagaagtcgatgactttgtgctgtgtaatggaacttggggaagggatctaacagcatagcgcgtgacttagaatacctaggactagggactagtaaccttaccaagaacgaagaatagaatagaaactagttagttagttagttagtaagtta

SEQ ID NO: 51434 - DNA, 288 bp, Setaria italica
  Peptide Sequence Number=SeqID_117408
ttggggtcttctgttcacattgttcaaaacttcctgccagacaagatcacaccttcggatgttggactagagtgtgaagctcaagctgcacgtgtttggcggagtccacaagccctgagtaagaaaagagtttttccttccagccctgcgatcagataccgtcacatatatgagtgcaaaagcttctcagtaagcattaacatctttacccatacatcttttttctgcattgcagcatccaagtgttccgtgttcggcagtcatccttcattctttgcctgcaggttt

SEQ ID NO: 51435 - DNA, 316 bp, Setaria italica
  Peptide Sequence Number=SeqID_117409
agagttatgacgatcatgcttggaggtcatgctcagcgcaataattatgctttctttagtttcttaagttataaagaagtacacagccatgcagagcattccgtttccccttttagctttgcactttttattttataggaacttaattattcaatacagtctggtgtatgtattttttaagataattttattgtatatttacaataataataatagtaaacttagactagaacaagaaataatttaataataaattaataatagaaaagtaggaaaggtaatttttagaagaccttacaattagtaaaaaaaaaaa

SEQ ID NO: 51436 - DNA, 140 bp, Setaria italica
  Peptide Sequence Number=SeqID_117410
cggacccatcgggtgttttattgaaccgaacaaagggatctgaattttaacacctccttactcttcagaagccgggaggcactgctcctacttccggagatgcccaaagtcggacccatcgggtgttttattgaaccgaa

SEQ ID NO: 51437 - DNA, 227 bp, Setaria italica
  Peptide Sequence Number=SeqID_117411
gggggggggcatggcccaccttggccccaatgaagctccaaccctgctaataagctagtagtcactaataagtattaggggcttaatccaaaagaaccttacctctctgtggagtttgatattgcggaacaatttcaacaaaacaggtatctctgaatgatgttagaagacagatcttcgcagcaaactgccaaaagcaaaaggaaaacattagacatcgtcactct

SEQ ID NO: 51438 - DNA, 344 bp, Setaria italica
  Peptide Sequence Number=SeqID_117412
ctccagtctgttctcatcaagcaaatggcaatagattaggactgaagtatgacgggttattacatcaagaacagcactgggttgtcatgcaccgctcgcatacaggcgagtccattccttcgctgtttcaacagcttcagcctcattggctttccagtgttttgcaatgttatcagacagagggtcatctggatttggtgcactcaagagagcctggatactgaaagctagaaaaatgtcaagaactagctagcatgccaatgaatatgaaaggtatagggactgaacaagaacaaatgagatacagctccactaggtaggctaaagtagaaactatgtttttt

SEQ ID NO: 51439 - DNA, 362 bp, Setaria italica
  Peptide Sequence Number=SeqID_117413
tttcttgcttgcattgtatgcgcaaccaatcaaagccgtcttgttccatgcccagtcacagcaattcatttccacatgcattgctgccccttgtttcttgctggcctgcacccctcatatggtgactgcgacgggccaaggatcatgacattgaagtagcgcatgttctcctccgttggcgaggcactgattcctggagctggctcgctgagcagccgctgcgtctccttgatgatgcggcggggaggttgctgtgggccatggtggactgaggaggggggccttcgggctagggtttggtggtccttgggatcgcggtggaggcggagagagaatttagggggactaaagtaaggtacgta

SEQ ID NO: 51440 - DNA, 269 bp, Setaria italica
  Peptide Sequence Number=SeqID_117414
cccaaagccaaaccattcaacaaacagtatcccaacccttcctcaaataacgaaaaccttgccgaaatccgccgaaaccgccgtgacagaaagcacccgcacctggctcgctgagcagccgctgcgtctccttgatgatccggcgcgggaggttgctgttggccatcggatcggggccggggcgcggacttcctcctctgcgaagttgcggcgccgctgatgccttaaggatcgcgcggtggaggaggaggaggaagcagtcggtcgag

SEQ ID NO: 51441 - DNA, 381 bp, Setaria italica
  Peptide Sequence Number=SeqID_117415
ctcaagcaagtgatattcaatcgggatcaaactatgacactgttattacaaagataacaacacacttggttgtcatgccccacttgcatacaggcgagtccactctttcgctgtttcgacagcttcagcttcattgcttttccagtgttttgcaatgttgtctgagagaggatcatctggatttggtgcgctcagcagtgcctggatactcaacagaacagtacgtatctgaagagctggactccatttgtccttaagaatgtcaaggcatatcctaccaagcttatcaatattgggatggtaaattttggtgagaaatctaacctgtatcagcagcagacataataaaattaccatcagaaaggcttactgttattagtt

SEQ ID NO: 51442 - DNA, 199 bp, Setaria italica
  Peptide Sequence Number=SeqID_117416
tcatgcaccgctcgcatacaggcgagtccattccttcgctgtttcaacagcttcagcctcattggctttccagtgttttgcaatgttatcagacagagggtcatctggatttggtgcactcaagagagcctggatactgaaagctcaaaagaactgttcggattcttgtaagttgtcttgggtcttccttatttttgtt

SEQ ID NO: 51443 - DNA, 257 bp, Setaria italica
  Peptide Sequence Number=SeqID_117417
ctccactggcctgttcttctgctctacccagaggtcatgtcgagtgatttcattgaggattttccggagacggacactttttcgccccaccttgatgtcatgttctcagaaagttctccaccattgccatgggatgagaaccacgcttacacaagggtggttttggcaaacctttgtccaaaagtgaaagattaagatatcttctagaaggcactgtagactcgaagtctcttccagatggcctacttgatggggag

SEQ ID NO: 51444 - DNA, 221 bp, Setaria italica
  Peptide Sequence Number=SeqID_117418
taggtaccgtaaggtagtcctaaggttggtcgtcggggtctttccttctagtccttcttactaagtacggtccggggtagtaaggttctaagagcctgtcggaggaggtcatggacgaggtacgccgcctcatggacaagtacaagggcgaggagctcagcatcacggtcatcggccacagcctcggcgccgccctggcgctcctcgtcgccgacgaggtc

SEQ ID NO: 51445 - DNA, 359 bp, Setaria italica
  Peptide Sequence Number=SeqID_117419
atatgcaaactaaaaatttcatagaatgaagtaccccttgcatgctatagctggctagttgattttaaaggttctatggaaagtaatggtaaatagataggtgctgggcatgatgtagcttttcttaatttgtttgaccgagttacattttttctagtgttcaatgtatttgcattttgttttaccactccataccgtgtaatgatttctatatgccatgttgtagctgaaggtggcacctctgctggattaactcccaagtctgatttgaaaagaaataagtttggcactgagaaagctacagccacaaatgaaaatggatcagagactaccaaacgacgaagaggaaggccaaagaa

SEQ ID NO: 51446 - DNA, 277 bp, Setaria italica
  Peptide Sequence Number=SeqID_117420
tacctatttcgtgccttatacacctagcttgattataatttccaagatatgatgttcaaccccctttttacgatatttgatacaagtttttcttggaaaatcagccccaaagtatgctgaaaagactaagagcagaaggacaaacaaagcaaaaatcgaggagagcactggtcttgtacaaggaattaccgaataaccagacttcaaatcactgtaagttctggttatatggtatttacaagtatagaccttgcaggtatagtatatgtgtttgttt

SEQ ID NO: 51447 - DNA, 301 bp, Setaria italica
  Peptide Sequence Number=SeqID_117421
acaaaaggaagaaatagtacaattagaacaatagtaattacaatttagaacaagtgtgtagatctgccccaaagtatgctgaaaagactaagagcagaaggacaaacaaagcaaaaatcgaggagagcactggtcttgtacaaggaattaccgaataaccagacttcaaatcactctgaaggtggcacctctgctggattaactcccaagtctgatttgaaaagaaataagtttggcactgagaaagctacagccacaaaatgaaaatggatcagagactaccaaacgacgaagaggaagg

SEQ ID NO: 51448 - DNA, 398 bp, Setaria italica
  Peptide Sequence Number=SeqID_117422
atttacacacaaaaattggttcattattgggggacttgatttttattaagaattattagaagagatatgggcatattgcattttttttttgaattagtgtcttttgcagttctattttcacccgcctactggaatgcgattcttgtcaaaagcagaagtattgcactatgttaatgaggggaagatttctgcatccgatatggatgtgctgtgcgacacaagaactgatgacaatgtataactcttgctggcaatggcattgttcgtcttatttttaactctattagaagttttgtaatttgtttttagaactgaccagatgataatttgcttatttatagatacttgcacatgtggaattcaatccagatggtctaccagatggatgggtgaaagaa

SEQ ID NO: 51449 - DNA, 318 bp, Setaria italica
  Peptide Sequence Number=SeqID_117423
tccatctaccggtgctacacttcccctgtgtccggatgcacattcacatcaaagatggagacattggattatcttttctcagggatggaagaacgtatgttggagtctcaggaaagcgctgaggacaacgagcttcttggttctcatacatggcttccaggtgggtggttgattgaggtcagagctggtgggaagaaaatgaataaaatgtacaaggatggaaatggaggatacatatcatggagggtgaggtgagtgaagccatgcttcgaccgtggatggaatgaaagaagcaatattgtctcattatgtgttgtg

SEQ ID NO: 51450 - DNA, 253 bp, Setaria italica
  Peptide Sequence Number=SeqID_117424
attgacatgtattcatttgacaagtgtgtagatctgccccaaagtatgctgaaaagactaagagcagaaggacaaacaaagcaaaaatcgaggagagcactggtcttgttacaaggaattaccgaataaccagacttcaaatcactgtaagttctggttatatggtattttacaagtatagaccttgcagctgaaggtggcacctctgctggattaactcccaagtctgatttgaaaagaaataagtttggca

SEQ ID NO: 51451 - DNA, 234 bp, Setaria italica
  Peptide Sequence Number=SeqID_117425
agtgagggggttgatatctgcagtggcatgtttggttaggagccaaggtgatggagcatgattgcacctcaatcttggattatggcatcagatcatcctccaattttacaggatggaaatggaggatacatatcatggagggtgagttctattttcacccgcctactggaatgcgattcttgtcaaaagcagaagtattgcactatgttaatgaggggaagatttctgcatccg

SEQ ID NO: 51452 - DNA, 444 bp, Setaria italica
  Peptide Sequence Number=SeqID_117426
cagattccagcatgacctccttgtcttatgagttatgaccaaacgcgctcatgcataagccatcttagactgtatcaacaggtacatccaaggcgctcctcttctggggaactctgcagttgcttcagatgaggtcctagcagtggacactccttcagaaggaggcgaggctgttattatcagtaccaaagacaaatctactccatcaagtgccacatggagagcccggtttgtcggacaagggtacaagcaggtttgtggccgtgcggatgtgtggggcgacggcgttgttcctgaaatggctgcgcatctagaaggtgcactgaacataagcttcgacggtgtgtaccattcgcctgtaggtgctgatgatgaaacaagaaggaccctaggtaataggactactaccggacaaatacctagaaagacaagttagggttagta

SEQ ID NO: 51453 - DNA, 372 bp, Setaria italica
  Peptide Sequence Number=SeqID_117427
attatcagtaccaaagacaaatctactccatcaagtgccacatggagagcccggtttgtcggacaagggtacaagcaggtaaggaggatttttattgatcagctgagatagaattacaatcttgcaagaatcaattgtgaaacagattcatctgacatcaaattatcaactaggtttgtggccgtgcggatgtgtggggcgacggcgttgttcctgaaatggctgcgcatctagaaggtgcactgaacataagcttcgacggtgtgtaccattcgcctgtaggtgctgatgatgaacagaggccctggtatggctctccggcaatcctgaagcagtgggtgcatcaccttctcagctgagctgacgtacgat

SEQ ID NO: 51454 - DNA, 396 bp, Setaria italica
  Peptide Sequence Number=SeqID_117428
tgctgcacgacgtctcacctcctgagttgttttgatttgtggccacaaacctgacccagtgatggtcgtgttgaggctgctttagcgaaccggtctatattgaagcgattctgtcgcaggctttgatccagatgagctgaaattattgctggtaagcaccaaggggagccttgtctgcgtacttggatgataatcatctgggtgataggcgcaatgcttggtgtagacataggctcagtagttggggaaagcgatgttgacctcactcttattataattgtgccacatgatctgtgttaggagctagacattttgtcgaacatgttacaggcagctgagatactgcgtcgtgctttctgttggtgcttacttattccacgattggttgtcttgtct

SEQ ID NO: 51455 - DNA, 285 bp, Setaria italica
  Peptide Sequence Number=SeqID_117429
aactacatgatttctatttcatttcactgatacactatggcagggagggagatgtgagtaataggagcagatgcacctgggcacatgaatgctggatgcacaggagcaacagagatggtcggaggagagaatgggttgaagtccttgctgaggaggttgcacacactggtgatgccttcagcagcacgtcccgctgctgcacgacgtctcacctcatattgaagcgattctgtcgcaggctttgatccagatgagctgaaattattgctggtaagcaccaagggg

SEQ ID NO: 51456 - DNA, 339 bp, Setaria italica
  Peptide Sequence Number=SeqID_117430
accaatgatcctcttgaagaattcttcctttgtgttctcaagaatttgtggaagtgctccctagtaagtccaacatatactcttagttgtctgagataaaatgtataggaaaatgctgacaagtagagggggaaaagaaaaacttcaagcatgtgtagtacaaatagagataatgcgccattttccagctctcgtgcttattatggaacttggaatattttctgtaaaattattttgaatttttcccggaatagatcatgcaccaacagaccatactcttcaaagcgaatcactaaaactcagaatctatcaactattatgttgctacatttcaaagac

SEQ ID NO: 51457 - DNA, 382 bp, Setaria italica
  Peptide Sequence Number=SeqID_117431
actctatttgacaagtgaaacttaatgttaccagaatctaccatatttacacggaattctaaatacttcaaactggagagctgccatggcaaactggatgaggaaaaaagtacaagccaaatgggaacctgaatgaaagttgccggatcagttgaaacattaaggaagtttgtgattgacgtaagaatctgcaaaattaagattgctatgtggttagtaaaacagcacgtggcaagctttgaaataagtacatactgttgacttaccttagtttcttgaagaatcttcttgggatcacatgcagcaacccagccaagtcgccatccaggcactatccatctctttgagagtgatcctattggttctaaaactaaggggtcta

SEQ ID NO: 51458 - DNA, 254 bp, Setaria italica
  Peptide Sequence Number=SeqID_117432
aaatataaaattacagcttcaccatcacaaacatggaaccttctggcttgtgaggacaggtgatgcacttgatgtcctttatttctctataacatatctctgatgtttcctctagcaaaccaatgatcctcttgaagaatctgcttagtggcttttaagtgtacctcaatcaaagttgttgctcagttccagtgttccattgtaccgtcgataaatgtggaactataagtttcctaataaagtgctaatgtttc

SEQ ID NO: 51459 - DNA, 229 bp, Setaria italica
  Peptide Sequence Number=SeqID_117433
gcaaaccaaatgatcctcttgaagaattcttcctttgtgttctcaagaatttgtggaagtgctccctgaatgaaagttgccggatcagttgaaacattaaggaagtttgtgattgacgtaagaatcttagtttcttgaagaatcttcttgggatcacatgcagcaacccagccaagtcgccatccccccgattcgcaagctccttcccgtctcccggccttagcccagt

SEQ ID NO: 51460 - DNA, 244 bp, Setaria italica
  Peptide Sequence Number=SeqID_117434
catctgatgacgagactgattttagtaatttatttttgtcttgatctgctatattgcactctctttgttttttctttaataacatccataacggttatcaaacttctgtacccatttcagatgagatgacttatgtgaatcttcaactgaatcctgaacgttacactggctatactggtgattcagctagaaggatatgggactctatttacaaagaaactgtccaaaatatccctcagaagaa

SEQ ID NO: 51461 - DNA, 232 bp, Setaria italica
  Peptide Sequence Number=SeqID_117435
accatcaactgacataagctccagataaatgctagcaatcacatcagctaaggaaataaccaggtcctccaaaattcgtgctccatgttcagcaagaaatttagcatcaaaacagctgtcggaccttgcagaaccaaatcttagagttgtcagatattgcaatgcctttcgtaagggctgctgtcagcaaagtgagcgcagcagtgtcctacttctgggtgtccatgattgg

SEQ ID NO: 51462 - DNA, 255 bp, Setaria italica
  misc_feature (2)..(2): n is a, c, g, or t
  Peptide Sequence Number=SeqID_117436
anagttttcctatcactcatgagttcatcctctctgctatccaaacttgcatcttgaacatttgcttgtaaagcttcagaaagtttagctctcacttcactccacatatccctggggtcaagcccagcattcctttccggtaagaattttaaatccccaaatttgcaaaaggaaattgcattagcagtcatttttccagctaagacaccagtctgatatgtagaagtaatacttatgcagctactcttacctacc

SEQ ID NO: 51463 - DNA, 374 bp, Setaria italica
  Peptide Sequence Number=SeqID_117437
ttgtagttgcagggccattttgcttggggcccttctgttggtggtgatggtgttcgtacagaacttagtctgccaaacgttgcaaagacagttggggctgttgcaggtcatcttctaccataagctttttcttatatattccttttcagttattatctattattttttaagggaattattatctaacgttgtactcttcctgatgctggtgtactttgtctttgttctgtctgtcaagtatttcaaataataaattctctcattggtttcctaagcagctagcatgttctgtaatgcatctgcattcttcacatgcagttttcacctgattcgtttttgttaacctggggtctctgtatgctattctatgtctt

SEQ ID NO: 51464 - DNA, 338 bp, Setaria italica
  Peptide Sequence Number=SeqID_117438
cggagttccagcaagatgcgattggtcgtaactacattattacctcagtggaggaatccatacaaatagtcaattcagcaattcagcgattggtaacagagcgggctagtatccttataatttttctgtaatttctgatcattcaatttttagggtgcttttgttttgtgaataaccttattttgtaaaggtatcagggacttggattgccttatctgtttcccttatgagctagtagaacctattttcctacttcattttcttaaatttctattcctgaactgtgttttgtaaaatgatttgcaaagaactgctatgggtctatgcaattgttattc

SEQ ID NO: 51465 - DNA, 246 bp, Setaria italica
  Peptide Sequence Number=SeqID_117439
agagggttgtttggaaactgaagtttacctttgattcaagtagaaaaacgtccatgatagttcaaatatgtttgcattgtttactctcaagaaataccttatttgaagaaccttaatgcttgttagctgaaaaaggcttcaaaattttcaaggctcatgaaagtgtgatgattgagaagtacaatgctgttgtaagcttgtggagaagggtctcagctatgtccaaaggattaaaatatggtgacg

SEQ ID NO: 51466 - DNA, 183 bp, Setaria italica
  Peptide Sequence Number=SeqID_117440
tttaaggaaaacgactaaagctgtattctagtggaccatgatgttttagtggtttcttttcagaataagaccctgcaagctcggatactccaatctaaaagagacgagaaactctttcttgatatcgagaagggagtcaatagaaagcccttatatgaaagtcatcctctatcatcattttct

SEQ ID NO: 51467 - DNA, 148 bp, Setaria italica
  Peptide Sequence Number=SeqID_117441
cgcacagccacagccataccacaccaagtcaaggagaaggtcatggccggcgtgagctcatccagcgtcgtcgggctcaagcccgccgcggcggtgccgcaggccgcctcggcggcccgctccttgggcgcgacctgcacccgcttcg

SEQ ID NO: 51468 - DNA, 466 bp, Setaria italica
  Peptide Sequence Number=SeqID_117442
taaccaaaaggttttaaataacaaagtaaccttaaccaaagaacaaagaaataagaacaaccaacaatagacttagacaattacaagttagtacttagacctaaaggaggaacagtgattagagttgcctggaattgaaagtggcgaggggagatcctgcggtagtgaagtaagaagcaaggtctacatgcaggtcatcatacatgctcaggtatggatggttcaacaaggcttgtgctgatgacctatctttagcatccttctgggtacatgcagagatgaatgagcagaattctggtgaaaactggtccgatggtgcagatggtggcggttgatcaacaacagcttcgaggagttcataaaagctatcacagggaggaaacggaaattgccggttgcacattccagtattactaggcccaaactccagatatcactcatataaccatgtttctttgcattgatt

SEQ ID NO: 51469 - DNA, 325 bp, Setaria italica
  Peptide Sequence Number=SeqID_117443
ttatgctagctgagctagtgcattctgttgcagacttcgctaaccaggctcttcttgcatatggtttgagcagctcaagacgtgctccagatgctctacacccgtatgtgtcatcaattattttggattatgggcttcgccagaaaataaatggaattttcttactctactttctttgtttgataaattcattccctcccttctcatggaagagaaccactcctttccttgaagtaaaatatcatggattcagggttaggaaaaaagcttgttttagttatcattccaatttcatactagtcgtatacaacaatgatgagattac

SEQ ID NO: 51470 - DNA, 246 bp, Setaria italica
  Peptide Sequence Number=SeqID_117444
aatattttgcttgggttcaggtgctaccattgtgcacggagttcaaaacttatggagttctcagcatgatggtcatatccttatacttttgatcgacagcccccggagaacattcactgggctgcactagtgattggtggttccttcctaattgaaggtgcttcacttcttgttgctataaaggctgttaggaaaggtgcagaagcagaaggaatgagtatctgggattacatctggcgtggtcat

SEQ ID NO: 51471 - DNA, 212 bp, Setaria italica
  Peptide Sequence Number=SeqID_117445
ccgccgccgcacccgaatgacaacatgttcagcgacgagaaccccaacagctgctcggtgatgtgaggcggcaaggtcgccgactcgccgccgcctgccaaagctttctcctgcggatgattcagacaaaggacaccagacagaaaggagggagctcaggagggagtagttttcaattcgctagctaattgccagtgcccgctgtgtccaag

SEQ ID NO: 51472 - DNA, 244 bp, Setaria italica
  Peptide Sequence Number=SeqID_117446
gtttgtcaattatgaactgtgtgactggtgtatgtgcaaatcatgttacatcagtttcatatgcagaaggttgctggctttatatagtaagttagtgactaatgttggcatgttttgctagttgccaaaattgtggcatcagctcaagacttaccccagcaatgcgtcggggcccagctggtccaaggtccctctgtaatgcttgtggcctaatgtgggcaaataagggtactctaagaagtcc

SEQ ID NO: 51473 - DNA, 341 bp, Setaria italica
  misc_feature (283)..(341): n is a, c, g, or t
  Peptide Sequence Number=SeqID_117447
tccgctccgtcccctctgacgggaaacaaggttttggttccggtgaaaagaacaatagtagcgtcaggtgagaagaaggttatagccttataggttgtcctaaaaaagtgggcgagatgtgttgtggaacggatggtatggtgcctgtagttgtgtgacgacgtagtacgacaaagaaactggaatggaaactcgtggctggtagtacaccagggagtcgtgtcggtattctttcaagaaattttgacttggtaataaattaaactattgtttgtgcgtaccnnnnnnnnnnnnnnnnnnnnnnnnnnnnnnnnnnnnnnnnnnnnnnnnnnnnnnnnnnn

SEQ ID NO: 51474 - DNA, 224 bp, Setaria italica
  Peptide Sequence Number=SeqID_117448
ctgctgcagcagcagctctctttctctctgcacttagctgctccaactgtgccaatcgcttgttggcttcttccaaaataggcagttcttctagcttctgttccttaatgaacttctgcaatgttccgagcagcgtgcgctctttagaatcagctgcactctggcatatgctggtcgaggtcgagcccaaggccacgaacacaccaaacttctccagcaagcgg

SEQ ID NO: 51475 - DNA, 209 bp, Setaria italica
  Peptide Sequence Number=SeqID_117449
tggagcaggctagacttttggtcctagaagcagcagatcaactagaccgacatgggaacaagaaagcccggggtatccttgcaatggccaaggtaaaccacagttctccaccacctttttcttttcaaccgttgtagcaaaaagattcagtaaatctggcccccatgtaggtggcagctccaaatatggccctgaaggtgcttgacatg

SEQ ID NO: 51476 - DNA, 252 bp, Setaria italica
  Peptide Sequence Number=SeqID_117450
ttgtcattttggaaagaggattgcacagcatggttcctttttatcagatccatcccacgttctgctgcccctattagcctcatgcaatgatgtagtcttccaggaccgagccttccttgagcaatctcaaaaccccgtccttccccaagcaggatatttgttactgggacacgcacattctcaaaagtaatctccgcgtgtccatgaggtgcgtcatcaaaaccgatactaacaacggtctctttacgtgca

SEQ ID NO: 51477 - DNA, 237 bp, Setaria italica
  misc_feature (90)..(90): n is a, c, g, or t
  Peptide Sequence Number=SeqID_117451
cttgcgaagtgtcgggttgatctggagcaggctagacttttggtcctagaagcagcagatcaactagaccgacatgggaacaagatctgntaaaaaggaaccatgctgtgcaatcctctttccaaatgcagtcctatttaaggccctctcgaccatcagatccatcccacgttctgctgcccctattagcctcatgcaatgatgtagtcttccaggaccgagccttccttgagcaat

SEQ ID NO: 51478 - DNA, 187 bp, Setaria italica
  Peptide Sequence Number=SeqID_117452
tcgtggatagtcgacacaatgccactaaaatgggtaacagtcggagtacagagatcagcagcagatgtgaacatcagctgtaacagaatgtgtttttttgtacaggagagacaatcagacaaatctgaaggaatggttagccttcggctattactgattttaatgaagaagaatcatatggaaaaaa

SEQ ID NO: 51479 - DNA, 356 bp, Setaria italica
  Peptide Sequence Number=SeqID_117453
gacattgtaatagcggcagcgatttaaattgatggttacattccatttactggtgaaatggggagaaagcaactaagcaaagattcctatgaatgatgatagtcactgcggtttccattcaggcattgtactgtagtcttttgttcatcattttagcaacatatattgacaattattttgcttgcaggaaatacatgacccagttgataactggataccttcccagtgtgatcttgcaaatatttttgtatactgttcccccaaccatgatgctattttctactttagagggtcctatctatcacagtgaaaggaagaaaaagtgcctgctgtaaagtattgtacttcaccatttg

SEQ ID NO: 51480 - DNA, 209 bp, Setaria italica
  Peptide Sequence Number=SeqID_117454
tcaaatgaatgattcaagcttgagcttacctgatgaggtcaaactagcaacaatcatggtttttactattcttaatatattactgcaaattagtaattaatatgagggaatttgatcacaggaatgtggtgctgcttttatatttttcaaaactcggtatgcagcactagttgtagcgaaaattcttcagacatccaaccctatgagat

SEQ ID NO: 51481 - DNA, 255 bp, Setaria italica
  Peptide Sequence Number=SeqID_117455
taattgcaagctgaaccacaactttgtaagcaagcttccgtcggctgttctttatcaaatattgcttcaaagttcctccagcgagatattctaccacaacacaacatgctcttgctggcaagttagtacgtgcaccaccgttggaattgttggctggaatcttaagatctgtggtacccatagatgcaccaacaaactgcaaaagaaataacactatgcatttgaaacttcttgaatagcccagcagaagaaatc

SEQ ID NO: 51482 - DNA, 250 bp, Setaria italica
  Peptide Sequence Number=SeqID_117456
aagcccaaactatggatagacgaactcctttactggagatgcagaatcggtgtgctacagaacatactgcagcaccagagacgaaacaagaacacgaatccaagaactggtaaagcttcaatcaaatcttgggcgagccttgactggaagattgctgaaatcttggcggagacttgactggagatttgtaccaaacaaactccccaattagaacgtgacctggcaggagatagacaccgactgagacacg

SEQ ID NO: 51483 - DNA, 288 bp, Setaria italica
  Peptide Sequence Number=SeqID_117457
ttagttatttagttcttagtttatttagttcttacctttacttgttcctgtggatctgtgcctcatgtacatgactactttttatatgaccttaatctcctttagccaagctgtgtggagtgggcaaggatctggctttcctgctgcaagtgccttctcggtgagagagtaaaaaccaaccattccctccatttgaactctttcacagcaggtagggaatgtgccacagctcttgagtatgcacagagcccgctcttctatacctttcatcaaaatgtaagcccccct

SEQ ID NO: 51484 - DNA, 213 bp, Setaria italica
  misc_feature (14)..(14): n is a, c, g, or t
  Peptide Sequence Number=SeqID_117458
cctggatgccgagnaccaacaagcatgaaagctgaaatccatatcaacttctctagcatttgcttcttgcaggtaagtccgccattttgcaggcgggctgccacagcaggagcccagctgccaaatgcagcggtaagtccgtctggattggtgtcagtaatcccatcgactggtggctccccgagtttggacacggcgaagtaggccaagacc

SEQ ID NO: 51485 - DNA, 339 bp, Setaria italica
  Peptide Sequence Number=SeqID_117459
ctaaggaaagcttgttccattattgctcgtagtcgtagtcttgtaagaatgtgcagcatgtaccaagttgcatctaagctgactagttcagcagttgatggtgggtaaacagaatgcagattgctgccattttaaattaaacgtttacaagcaggggctagtcaaagttttcaatcttgattggagttatgtcatcagccaccttgaatttccccactaatcttgcgaagaacaccatctccttgcggaaaccgtgttgttccccttcatactcaaccaaagcaactggaagacctttgtcctttatcgccttgtatattttcgttgcctctgagactg

SEQ ID NO: 51486 - DNA, 400 bp, Setaria italica
  Peptide Sequence Number=SeqID_117460
atttacagaagagaaggggatgtcaatttttgaaaaggactctgaatcatagtcaagcaccccaaagtatgacttcccattctgcttgagttgtcttttccaaggaaatcataggagctgacaccaaaaatccacatgggcttggagaattcagcatcaagtgaatacagtgttgttaccacatttctctgctcatccttttgaagaccacttgggttcagtaggagattctactagtgttgggtctccaccagcaacacagatccgttttgttacctctctgcacataataagtacctttctcgttgaaatatccaacccatagttgtgatttatcccatgacatattcgggttactccactcgatccatgccatacgtttttagtttgatcaacacgt

SEQ ID NO: 51487 - DNA, 257 bp, Setaria italica
  Peptide Sequence Number=SeqID_117461
tgtctgaaagcaagacaagctaaagttgtgaatccaccagcagattctcctgtaacacaaagccgttgcccgtccactcttctggtttccaccaggaatgtagcacaactgcagcaatcatttacatcaacaacaccccattgccctaaaagcctctctcggaattctctcccatagccttcaagaaagaaacatcaataactatcaacaccaaaatcttttatcacaaacaaagttaaggtgcttctgaataagag

SEQ ID NO: 51488 - DNA, 169 bp, Setaria italica
  Peptide Sequence Number=SeqID_117462
tccccactaatcttgcgaagaacaccatctcctgttccaaggtgaatttgatgttctcagccttgcggaaaccgtgttgttccccttcatactcaaccaaaggtcttccagttgctttggttgagtatgaagggaacaacacggtttccgcaaggctgagaacaccatc

SEQ ID NO: 51489 - DNA, 248 bp, Setaria italica
  Peptide Sequence Number=SeqID_117463
atgaatggaagattccagtagatccacgcctataaaacatagctacaataatctatacatccaaagaagattgttgtttaatgcagtagtaatagaatggagcgtgaaattgcctggtaatatgtaacgcctgtggtactttggcgccttgatgagaagagcttgttgagatcttccttcctggtcaattgtctgttggcaaattcgtaccctctgttcaactgaagatactagaaattctgtttcgt

SEQ ID NO: 51490 - DNA, 200 bp, Setaria italica
  Peptide Sequence Number=SeqID_117464
cctatcccctgtgtgccttgcctatcctctgttgcgtgtctcagtgcctgatttgctctgacttctaccgtccacaaaattttgatccctagtgctgatcttcagagcttgctagatttgtttgcttcagaggcgtctctggtttggcattctcctgatgggaaccagtattcagaagaggaggatcgattttccattcg

SEQ ID NO: 51491 - DNA, 238 bp, Setaria italica
  Peptide Sequence Number=SeqID_117465
ttgcaacttgctagcttccatggttgcactggcacttgtcttgttagttgctgtcagtattggatgacatggcctgttccagcttaattactaattgtgtttggcttaattactgatgaaacaacaactaactagtaattgcgccatggcagtcgatcccccgcacggtgctgttcgacactaagaccggcagcaacctgctccagtggcccgtcgatgaggtcgagacgctgcgcac

SEQ ID NO: 51492 - DNA, 431 bp, Setaria italica
  Peptide Sequence Number=SeqID_117466
tgcgtggtgatgccgccgtcgaggcccttggcgacgtagaagtagacggcggtctgctcgcggaggtgcttgtcggcgaggacgagcaggccaaagggcccgagcgcgccccggttggcggcgccgggtcggcatcggcctgcgctacgactggggcaagttctacgcgtccaagaccttctacgacccggcgaagcgccgccgcgtgctctggggatgggtcggcgagaccgactcggagagagcagacgtgtccaagggatgggcgtcgctccagtcgatcccccgcacggtgctgttcgacactaagaccggcagcaacctgctccagtggcccgtcgatgaggtcgagacgctgcgcaccaactccaccgacctcagcggcatcaccatcgactacggctccgtgttcccgctcaacctccaccgcg

SEQ ID NO: 51493 - DNA, 405 bp, Setaria italica
  Peptide Sequence Number=SeqID_117467
ggtgcaggtgcagtgcctcgccgtcccctccgacccctccgacccgctcctcaccaactggaccaagtacgagggcaaccccgtgctgttcccgccgccggccatcggccccaaggacttccgcgacccgaccaccgcctggttcgacccctccgaccgcacctggcgcatcgtcatcggctccaaggacccccaccacgccggcatcgccgtcacctacaaaaccaaggatttcatccacttcgacctcctcccgggcctcctccaccgcgtcgagggcaccggcatgtgggagtgcatcgacttctaccccgtgggcaacaacgacggacaaggggactaccgaagaaacggacaatacgaacaatagtaccgaacgaccaataataccgaagaaacggacga

SEQ ID NO: 51494 - DNA, 267 bp, Setaria italica
  misc_feature (267)..(267): n is a, c, g, or t
  Peptide Sequence Number=SeqID_117468
tgtagtctgggtggcgcggtggaggttgagcgggaacacggagccgtagtcgatggtgatgccgctgaggtcggtggagttggtgcgcagcgtctcgacctcatcgacgggccactggagcaggttgctgccggtcttagtgtcgaacagcaccgtgcgggggatcgactggagcgccgccgcgtgctctggggatgggtcggcgagaccgactcggagagagcagacgtgtccaagggatgggcgtcgctccagtcgatcccccgn

SEQ ID NO: 51495 - DNA, 436 bp, Setaria italica
  Peptide Sequence Number=SeqID_117469
ggcaagcagtgatcctagaaactgttcttcattatgaatttatgcaagactacaaggttcacttgaagcatttagatgggcatattgaagaggttccctattttttgcctgccagcaaattgacctggttgatgttattgcaccatcatgctacagctgctttgactacacaaatggcttggcggatttagtggtggggtatatgggtgtaccaaaatattcaggggtttccatgacacagcatcctcagtacattacggtcaggaacgatcgtggaagggagatgctgagcctggtagagggccttctggagagtacgcctacagttagcagcggcgcaaggcaaccgtttgttatggaagaacggtagaaaagactagaacgaatagacaagacaaaagttaggggaaaaggacccttacgaaaaccaagacga

SEQ ID NO: 51496 - DNA, 313 bp, Setaria italica
  Peptide Sequence Number=SeqID_117470
cacttgatcacagaatattcttatgcatgtggaatgtcagataatgtaatatcatcttgtttaaactatattaattagcataagattgtataagcttgacaaggaacaattcaggaattataagaaatattatctttacatatgaattggtaagggcaaggagacatgtaagagtgattattacagttaggagttacttacttgtctaaaaggcttttctggagttctccaaaatgcttgctcaaaataaagcactctagaaccatccaccatctcagttgcagggcatgtgagcattctcaagttgaagtag

SEQ ID NO: 51497 - DNA, 158 bp, Setaria italica
  Peptide Sequence Number=SeqID_117471
tatttggtagatctgttattttctacttcattatttcttgaagcatcattctgccttttctttatgctagttaccctcattaatattctgcagattcatcaagaaacagtgggtcaggtgaatagttgtcatgtgtagattgatcaggtaactactga

SEQ ID NO: 51498 - DNA, 252 bp, Setaria italica
  Peptide Sequence Number=SeqID_117472
aaccctaaaaccccgtaaaataaaaaaacccggaacgaacaaagaacgaataagggactacccctacccttacgaattccaatccaatcgccgccgaaatccccattgcccctctcgcgcttcaccaagctctcaagtttcctcgcaggcggctgcgatggaggaggtcactgaggccgtgaacaaccttagcatctcgggcggaggggccgcggcggcggcggcggacgatgccggcgcggagggcacaag

SEQ ID NO: 51499 - DNA, 232 bp, Setaria italica
  Peptide Sequence Number=SeqID_117473
acaaatttggttccagacagtcgaggaggcgaagcggccaggccgaggaattcgacctagctccagcgcagaagaggggcgcgctggagtgagatgctggagcaatgtcatcggcggcggattccaagggcggcatgggcggcatgaacatggtgaccacggtgatggccttctcggtcagcgccttcttcgtgctcttcgtcttcaccaggctgctctgcgcgcgcctcca

SEQ ID NO: 51500 - DNA, 194 bp, Setaria italica
  Peptide Sequence Number=SeqID_117474
aggaattcgacctagctccaggtatgcatgttctgctcacagaggcgagttgatttctctgatgggaatatgggatgaagaagcagcagaccttgagtggtttggctgctgcgcagcgcagaagaggggcgcgctggagtgagatgctggagcaatgtcatcggcggcggattccaagggcggcatgggcggca

SEQ ID NO: 51501 - DNA, 308 bp, Setaria italica
  Peptide Sequence Number=SeqID_117475
ttaaccttaaggttaaggttaagttaaacggtttattttctttgttagtcttggtattgtcggtagtatatttgagattgctccttcttttgtattggttgggttgaagaagactaatggtgacacattggagtaccagacgctgatgaaagatggcattaggccatcactcaaggatattgtgtggacatggcaaggtgatcagcagcagtcatgtattcttagcatgcagggcagcagcagctgcaactgcccaccactgccgccatttccactacaccagtaatacatcagtagtacagagttgc

SEQ ID NO: 51502 - DNA, 264 bp, Setaria italica
  Peptide Sequence Number=SeqID_117476
tcgggactctccgctggcaccgagtctggcgcttccggccacggccgccgcgcagccctgccatctgttcctggacccgacgacgacgacggtggtggtcgtggcgccggcgctgctgcagttcctgccgccgaagagcgaggaggagcatagcttcgcagggtcgagctcctcgccgtacgtggtgtttgaccctccgccgcccaggcccccgcgccagcgcccacctccgacgcctcggccgcggtcgcccctcgcggcggc

SEQ ID NO: 51503 - DNA, 281 bp, Setaria italica
  Peptide Sequence Number=SeqID_117477
gcgagtaaaaagaagaagatggccggtaacaccacttctttgcatcatccttcttttctgccataatacatgctgtgtctaatttgtactggcttcctttttgttgatggaatacttaggcgttgtgaccatcactactactacacaattggaaagagaactgagtagaaaccccaacaagctggtatcaagcttttctctcgagttttttttttacttttatgtaaaatttacctatctctgtctctctaatttccctatctccctcccaacttcaaaag

SEQ ID NO: 51504 - DNA, 235 bp, Setaria italica
  Peptide Sequence Number=SeqID_117478
ttcaatctttcccgttctcgatcgacgcatgcatggatgatcggatcacttgctccagtctcctatggccttctcgagctcctgccgcttcatgccaacgatcatgtccttcacgtcctcgtccttgaccaggaagttggtgtggaggcgctgccgacgtactttctggtcaaggacgaggacgtgaaggacatgatcgttggcatgaagcggcaggagctccacaccaacttcc

SEQ ID NO: 51505 - DNA, 236 bp, Setaria italica
  Peptide Sequence Number=SeqID_117479
ctaaagacaaagtcaacttctacacgctcaacgtcgacaagttcagagatttggcggaggaagttggtgtggaggcgctgccgacgtactttctggtcaaggacgaggacgtgaaggacatgatcgttggcatgaagcggcaggagctcgagaaggccataggagactggaagacaaagtagaataccgaatacaataccaatagacaatagacgtacgaatacgaagaaacggga

SEQ ID NO: 51506 - DNA, 264 bp, Setaria italica
  Peptide Sequence Number=SeqID_117480
cctacctccacagcgagcagaagcaaatggtgctggacaacttgaaagattatgctgtcagggcccctggtcaatgctgtcgaccaccttggcacagttgcctacaaattgacagacctgtacgaacagcaggcttcagaaatttcaacccttgaattgaaagtagcatgcttaaaccagcattgccttgcatctcagaaaaagattgcattcttttatttcccgcatatggtacgatgtaatgtttgtggtgtctcctggcag

SEQ ID NO: 51507 - DNA, 251 bp, Setaria italica
  Peptide Sequence Number=SeqID_117481
cagtttctgacgctatgcaaaaggttggcactaagaccatgtctttatttttcagaaccaatctggtgtaaaggaattttcaacatttcattctttcgacaaccctaaagggcgtgcaatccaaaaggctcctgttggcactaaaagcatgctagcggctctcttcatcaagcacaaatcagcgaagatgaaaaagatagcagttcgctgatgagctcgcatttgattggggggcaggtatcactgttaaa

SEQ ID NO: 51508 - DNA, 224 bp, Setaria italica
  Peptide Sequence Number=SeqID_117482
ctgaaatcttcttcagtcataacttctgaatggcaatggcgcttcatcaggtggagttgcaggctcccaaagggaatcagcagctgctcccatattgtcatgctgcactagaagttctgaaaggaaatcctgttcttcagggaaacatggttggcaaactacaacaaatagggaagaataggaacaaagtttaagaagttaaaggaactaacaaagaactaata

SEQ ID NO: 51509 - DNA, 431 bp, Setaria italica
  Peptide Sequence Number=SeqID_117483
cagaaaaggctgaatgggggatttaaggctctcaaacaaactgtcaagctttactataagctggtgaaatacaaagaaatgatggatgcctacagggagatgttaacatacataaaatctgctgtgacccgaaactacagtgagaaatgtataaacaacataatggattttgtttctgggtcagctagtcagaacttttctcttttgcaagagttctaccagacaacactgaaagcgcttgaagaagcaaaaaatgaggttggatttgttgcattacaagaactaaaattttatgtgctgaatggttctttatagctttttattgtttgtggtgcagagatttatggttcaagacaaatctgaagctttgcaaaatttggtttgatatgggggagtacggtcgcatgagcaagatactgaaggagttgcat

SEQ ID NO: 51510 - DNA, 246 bp, Setaria italica
  Peptide Sequence Number=SeqID_117484
tgcttattgtatcctttactttgctccataagaatacattttgctcctgggataatatattttgctcgccccttatctattccttttaccttccaggtggaggatttgcagagacaacttgtgtctgcaaccaaggaacaagaagcactgattgacatattctccgaagaaagaacccgtcgagacctagaagaggacagcctgaagaagaaactgaaggaagcatctctcaccatacaggacttg

SEQ ID NO: 51511 - DNA, 380 bp, Setaria italica
  Peptide Sequence Number=SeqID_117485
tctttaattgttcctctcaaaacacaaaggaaagcagcaacatgcataacacaatctacaaactaggaatagtaagatataaaagcaaatggtacaaaagcaaaatggaggtatgcagcttccagagaaaaataaaatgacaagagtaaagaatagtacctcagggaactattcccccagctccaccagttgatcctaaagattctcatcctcctcaacattgagcccaatggctgcagggtcctgcaaacaaatggaacatgcaatcagaacacaaccgattacacctaagagtatagagcaacaagatctacaattagagatcccctaatcaaattacatatcaacccgacagcaaatcccaacctaatcaaattaaa

SEQ ID NO: 51512 - DNA, 434 bp, Setaria italica
  Peptide Sequence Number=SeqID_117486
cctgaggttatgggaactgggtacacaacgtcctgaaaatacatgatgttagcgaggacattctcatatggaagcaaattctttcaagattaacaaactctcacctcagggaactattcccccagctccaccagttgatcctaaagattctcatcctcctcaacattgagcccaatggctgcagggtcccgtgcagatcagcagcgacgtgcttcaatggatttttcctcgtcatcctacgcatatggttcccagttgtggattgccctcttggtgatgcagcagtgggtagtggagcttcttgatgaggtcaaagcggcagaccttctggcaggtggcggtgagtgttgcacgagggacgcaggaattggtagggagggctgctcaacctggtccaccagaacatcctcagtgagaggtgcaagcagaggggg

SEQ ID NO: 51513 - DNA, 239 bp, Setaria italica
  Peptide Sequence Number=SeqID_117487
ataagctcatcaatcatattacaaaataagtggagcaagaagatccctcttatcattaatttacctctcttatcattaattattgtgacttaaaacatacccgtgcagatcagcagcgacgtgcttcaatggatttttcctcgtcatcctacgcatatggttcccagttgtggattgccctcttggtgatgcagcagtgggtagtggagcttcttgatgaggtcaaagcggcagacctt

SEQ ID NO: 51514 - DNA, 188 bp, Setaria italica
  Peptide Sequence Number=SeqID_117488
ttacccggtacttacctaattaaatgtcatcagctattccaaaggctcgcttctccaaaggagttgatgctcctgcagctgatgctcggcgccacagtccgtctgacaatgctccagcaccaacagatgaataccttcattgtccaaagtatttcttagatatatcctcactgatattaaacaaaggt

SEQ ID NO: 51515 - DNA, 419 bp, Setaria italica
  Peptide Sequence Number=SeqID_117489
gcaaggaaggtgttcttgtggaaggtgaatcctcaccgataaagagcgacatagtgatatttggaaccgggttcaggggagatcagaagatcaaggacatgttcaaatcagagtactttagaagtatcgcagttgggtccacatccacaactgtacctctctataggtaattctgtatgcacaatgttacaatgctgtgaatgtttaaattcttcgtttaaaccattttctttgatctgcgacatgtaattcacagggagtgtatacatcctaagataccgcagcttgctgttctcggttattcagagagcattgcaaatctgtacacgtcagaacttcgagccaagtggctggcgcatttcttggatggtggcatcagattaccaagtgtggcagcaatgcagaacgatgtcctggaa

SEQ ID NO: 51516 - DNA, 302 bp, Setaria italica
  Peptide Sequence Number=SeqID_117490
tcgtaccgtaaccttcgttgtctaccgtcttacggtcgtagtagggtcgtttcccgtttctacggtcggtcgtcgggttggcggtagcttggtaggctgacgaccagcacaagtacgcgtcccagacgctggagaagctcttctccatcgacgggaaagagttcgtgaacggtggcaacgaacaggttccgatctcgagcctggtggggaagacggtgggcctctacttctcggcgcaccagtgcgcgccgtgcatgaagttcacggcgaagctggcggccatctaccgcagcctcaagggg

SEQ ID NO: 51517 - DNA, 291 bp, Setaria italica
  Peptide Sequence Number=SeqID_117491
acatccccaagcaaaataagagcattcttctttcccgttccaacgcacttttgtatccaaaacctgtatgaggcacggaactgatttgctgtagcttgcccaagtgggtgcatggcctgaagtttttctggctgcacctgccaatggataggaagtctgttctttctctgtgttgatcatgttggaataaaccggctaccaattggtggttgtggtatttgttgtaccccctattttgtctaggttgtcttggtaactaccttttgtcggtaccttaaaaaaaaaaaaaaa

SEQ ID NO: 51518 - DNA, 244 bp, Setaria italica
  misc_feature (28)..(28): n is a, c, g, or t
  Peptide Sequence Number=SeqID_117492
acgtgctgaattggagcttttcagctanaaccctgatccttctgaccactcttggctctgccaaacatctgatagacttaggactgcttggtccagcaccagaagtaccctcttcagtaaaaatcaatatcaggaaacgtattctgcgaggaacctgaaaatgctacaatagaaaaactactaggacgaatagaaacggtagtactttagaagtagactactagttaactttaatacaaaacaa

SEQ ID NO: 51519 - DNA, 246 bp, Setaria italica
  Peptide Sequence Number=SeqID_117493
tcttgagaacaaagaggaagaaccccattacgtgaagctttctctctctgctgatgggttgagaacttgaattgctttcagatgatgccttaagaaaaagcataccagcgagaagtatgattgtatgaatgtgctttatttttcctgtttagtagaccaacatatggtatggttgatttctgtttttctttaagtagtcgtgtgttaaggtagacggatcctaatttgtgcagagaacatagcacc

SEQ ID NO: 51520 - DNA, 185 bp, Setaria italica
  Peptide Sequence Number=SeqID_117494
tggcccttgatgtgttcgatctctagcctaccccgacttgcttgagattgaaaggctttactgtatgcatttgcaggtggcaaccttcatcgttcaaaagattctcctagatgatgttggactgcgctacatctgcgccactgctgagcgtttctttgctgtaggcagtgtcttagctaacatgg

SEQ ID NO: 51521 - DNA, 429 bp, Setaria italica
  misc_feature (5)..(5): n is a, c, g, or t
  Peptide Sequence Number=SeqID_117495
taatntcctaaataaaggtagggttgtctaaaagttaatttcttccctaattaattaattgtaaattggtattatttgggtattaccctacgtttaacttagtttatttgggtaaattattttatttgggtagtatttgtcttggtagtattgtcttctaaggggttatttgttttagtacgttattgcatcaaaagaaatgcaggggtccactaataaacaaggactacttcagaactgaattaacttgagcatcgtagcttgtaaaagaattaataaaggagagtaaaaatgcaaccatcatattaccttatggtctgatccgtgtgaatgcccacaagcaaaaaagtccccaagttctccgagcaaagtcgcaaaatctcaacatgtccagcatggaacagatcaaatgcaccatctaatgtaaac

SEQ ID NO: 51522 - DNA, 213 bp, Setaria italica
  misc_feature (211)..(211): n is a, c, g, or t
  Peptide Sequence Number=SeqID_117496
gagattcatgattgggtgatgtcgtcctcacgttgaacttgtatggcctgatcattgtgaattcccacaagcaaaaaatctccaagttctcgagcaagccgtaatatctcaacatgtccagcatggaatagattgaaagcaccatcagtgtaaactggctaagaatttggacctggacctgcattggcagtgtctgatgtcgatgccccgntg

SEQ ID NO: 51523 - DNA, 130 bp, Setaria italica
  Peptide Sequence Number=SeqID_117497
aattcattcctctcaaataacctgtacatattaattgggaggaatgaatttgttctgctttatcctggtggtgttcgtgaagcccttcataggaagggtgaagaatacaaagttgttttggccagatcaa

SEQ ID NO: 51524 - DNA, 485 bp, Setaria italica
  Peptide Sequence Number=SeqID_117498
ttgtttaattttgtttatttttttggtttcttttaccctttagtttctttagttaacttaaattggggtctgaggtacaagcattacagcattggtgttcacgaaagcagcctcacagatcaataccccatggatcatgagatcttcaaaaacccgcttgcattccacaagaatggatttgagtttgtccggcagaccttcatggatacacagaatgtgaggcttgattgtaaccgattccagacctatactcctcgaggcccttgatcaattgaaccaatgaagaccactggtattattccggggctgttgtactagattctttttcgttaccaattttgtttgtccatttctctctttgtaaaatttcttgatcatcttctgataacatgagcaagaagaaaattaattattgtctaaacgtaggaaatgtcatcaccacatggatcgaaattcaggtatccatgatttgttgggacctttcc

SEQ ID NO: 51525 - DNA, 276 bp, Setaria italica
  Peptide Sequence Number=SeqID_117499
tgtctcggtggcgtccggcttgttaatcttgattgccttgtcctcaggcttggaatctgtctcggcaagcctctgcttgatgtcacgcgcaatggagaaaacacttgctccacgttaaggtttgtcttggcactagtttcaaagaacttgatcccgtactcatcagcaagcgcttgtccttttgcaaaagggctgtacctactgcaaaaggacaagcgcttttgctctcatccatatctgccttatttgtcctaacctaattattttgtttgtact

SEQ ID NO: 51526 - DNA, 181 bp, Setaria italica
  Peptide Sequence Number=SeqID_117500
gtgaggggtaaaacgagcacacggtggtggttttgattcgacggggccgggcgcatgagcgagcgagcgtgtgttatgatggggtcaggtcgggtcgggtcaggtcacttggattggaagacagggctgggtctgcccgtctgggttacttgcggcgctttgcgatgcttaacccgaggcg

SEQ ID NO: 51527 - DNA, 335 bp, Setaria italica
  misc_feature (112)..(112): n is a, c, g, or t
  Peptide Sequence Number=SeqID_117501
attatagaaatagcagtatgttctgttggtgacaccgttcaccagtttatgtttctcggaattgcattgcgaagtattggtgcatctcaaaaaaaaaacctctagcctttgntaaaacttgacccattgctctgactttctcaggagcgctgtgatgcaggtcagcatctgcagcggcctctccaacagcccgctggctttccttgattcgggtctgcagttcttgaaatagaccactcttgttctttgatttagcaagcgcagaattcagactccacagttaaggttgactgaggaccaacttaactgtggagaatgagaattcagacttccac

SEQ ID NO: 51528 - DNA, 297 bp, Setaria italica
  Peptide Sequence Number=SeqID_117502
ccctcatcaacctaactgtggagtctgaattctcattctcattctcttttctccatatgctgtatttcccaagcacagcagaatcgacagcctttgatcgctcaatagcggcattctccagcttaacacgcgcttcatcatctttgcgcaccaactccattgctctcttctcacgccttttctcccttagtttctacagtatccaggcaagtaaaaaagatgtaagaaatgcataccaagctaccaacagagaccagaacaaggcaatatgtatacaaggttagtactgttaccctt

SEQ ID NO: 51529 - DNA, 206 bp, Setaria italica
  misc_feature (193)..(193): n is a, c, g, or t
  Peptide Sequence Number=SeqID_117503
ccggaaccagtgaggtgtgatgggaataagcgcgcgctttagcttctgctggtgctcggaagaagaaccgatctcagtgtagtgtagtgatctgctagctgagtattgagtgtgtgacgatgatctcatcaagcatcgtcacacactcaatactcagctagcagatcactaatgctggacttaaaaaaaaaanaaaaaaaacaaaa

SEQ ID NO: 51530 - DNA, 239 bp, Setaria italica
  Peptide Sequence Number=SeqID_117504
ccttcatcctccgtctttatgtagtgcttccttctcacagccaccgtagctttagtactatacgccaatatgttttcatgccacacctgtgttactactgctgcctcatttgagaccactgctgaaccatctatacaggaacttgcagacacaagtcacatcttgctacattgtggcccaaatccatgcatcaacaccaaagcaataaaataataggggacacagaaatccaaagaagt

SEQ ID NO: 51531 - DNA, 234 bp, Setaria italica
  misc_feature (212)..(212): n is a, c, g, or t
  Peptide Sequence Number=SeqID_117505
cctgcaccgtctccttggcgtccttggagatcttggcgttcgccgggagcgccttcttcatgatccggctcacgttcgcgatcggcaggaaccggtcctgctcccgcggcgacgagaactccgcgttgctcggcccgccggactcgttgtcggagtccggcatcgccgccgatccaaacaacacagcaagctcctcccttctccctccggtnaagtcaaacactccaagtctcc

SEQ ID NO: 51532 - DNA, 260 bp, Setaria italica
  Peptide Sequence Number=SeqID_117506
tgggccgccgtccctcccgagcccggtaccttcgccttcatcgccggcgagcagttgagggtacgatcctcccttcgcgcttctcgatcggagccgtcacgattcctcgattgattctcacgccgttgcgcgtttgtatgtgtgttgtgcggcgcaggtcgtcacgaacgggcgcgtgccagcgtgcctccaccgtgtgaggacgccaagcaaccgcgagcggttctcggtgctgttcggccggcggcagaaggacggcg

SEQ ID NO: 51533 - DNA, 281 bp, Setaria italica
  misc_feature (1)..(133): n is a, c, g, or t
  Peptide Sequence Number=SeqID_117507
nnnnnnnnnnnnnnnnnnnnnnnnnnnnnnnnnnnnnnnnnnnnnnnnnnnnnnnnnnnnnnnnnnnnnnnnnnnnnnnnnnnnnnnnnnnnnnnnnnnnnnnnnnnnnnnnnnnnnnnnnnnnnnnnnnnnnaggttttatgtaaggcctatgcaattgcatccagaaagcatttctgacagcagagcggcataatcaaactgaatgttgagttcagatgtcaccttttgagccaatggtttcagatttttcatgtgaaatatttacattcctagctgtg

SEQ ID NO: 51534 - DNA, 219 bp, Setaria italica
  Peptide Sequence Number=SeqID_117508
tttagagaacatgtaacagcatacacagaaaacggaacgggtagatagacacataattatgttaacatctggatggcaattatgttaacacagaaaacgtcaaagcaacgctgcatctcttcacggctccgctcctcaccccaaaacttgcaccagcgctcatacaaggcccacagggcttcatctgactcgaggtccttgtcgtcgaacacaaaacga

SEQ ID NO: 51535 - DNA, 217 bp, Setaria italica
  misc_feature (110)..(110): n is a, c, g, or t
  misc_feature (134)..(134): n is a, c, g, or t
  Peptide Sequence Number=SeqID_117509
gaacagagataatggtattgctgactttgatcttgaatatcatgatccctttcaaaatctcacatgtctgtaaagattgtgaaagggatcatgatattcaagatcccttnacaatcttacaggacatgtggganagttttccgaattctccataccaggaataaccggaaaatctcacatgtctgtaaagattgtgaaagggatcatgatattcaag

SEQ ID NO: 51536 - DNA, 254 bp, Setaria italica
  Peptide Sequence Number=SeqID_117510
ccagaaacttacaatatcagtcacaagataaataagtttctggttggaggttcaacagatcttgcaggaagttgaatgactggtccaagcttttcccaggggcaaagtgaaagttgccagctactttattcacatttacaaatccatggatgttacaaccttctccttgttctctagttgctgttgatacaatggatgtcagtggagagcaacattatgatataaaacacgacataataaagaaaagaattgat

SEQ ID NO: 51537 - DNA, 183 bp, Setaria italica
  Peptide Sequence Number=SeqID_117511
ctttgtacaaagccctctctcttgcactgatcaattgattctacgttggtgagagccgcaccctctccggcggcctcatcaccatcctctcctccctcgccatcctcctcctcctcttctccgagatccggctctatctatattctgctacagagagtaagctcacttgttgatacctcaaga

SEQ ID NO: 51538 - DNA, 404 bp, Setaria italica
  Peptide Sequence Number=SeqID_117512
tagggggttacaaatacttagaagacttacaacttacctgagggtcaacaaattcagcaatcaacttattgccattgtttgggggccactgtaggttgtaaacagcatccctggtagcaacagcttcatcaaccgaggaaaacgtaacatagcaatgagtcttgatatgatccatccagaagttttgtactgatccagttttaccaagaagctcctgcacagctttcagagtaaatgggcgtacaaatcgatcaattctcaaagaagttgttgcaggtttctgagacggtggcacaatccgctccttaggagaatctacactagctgttgaatcggacctcccaaaagagcgtttaagagcaggctgaaaaacatccttgggagcatcagaaccagtttgatcc

SEQ ID NO: 51539 - DNA, 407 bp, Setaria italica
  misc_feature (54)..(54): n is a, c, g, or t
  misc_feature (60)..(60): n is a, c, g, or t
  Peptide Sequence Number=SeqID_117513
ttcggtgtagcagcttggcgcggcacattttgattagcctgagcctgttgaacnggaggngcccttgcggcggcagctgggctaacaggagcagctggtgggggaggggggttcaatcttgagcttcacttcctgagggtcaacaaattcagcaatcaacttattgccatgtttggggggccactgtaggttgtaaacagcatccctggtagcaacagcttcatcaaccgaggaaaacgtaacatagcaatgagtcttgatatgatccatccagaagttttgtactgatccagttttaccaagaagctcctgcacagctttcagagtaaatgggcgtacaaatcgatcaattctcagaaacctgcaacaacttctttgagaattgatcgattttgttacgccctatt

SEQ ID NO: 51540 - DNA, 347 bp, Setaria italica
  misc_feature (221)..(221): n is a, c, g, or t
  Peptide Sequence Number=SeqID_117514
taagttaagaacaaaggtttaactaagaagaacggtaggacaacaatccgctccttaggagaatctacactagctgttgaatcggacctcccaaaagagcgtttaagagcaggctgaaaaacatccttgggagcatcagaaccagtttgatccaatgtttgtctctctggaactttggcaccgtctgcagtccaccggcgctgccgcttgattggttcggngtttgcaacaacctcttcagcttcaagtttcctctttttctgttgaagctgctgacttttctcagctataacctccttggtatcaacagaggaagcctcaacaacagaatcagggagggtcaccga

SEQ ID NO: 51541 - DNA, 330 bp, Setaria italica
  misc_feature (310)..(310): n is a, c, g, or t
  Peptide Sequence Number=SeqID_117515
aagtttaagggggaccaactagtaaggttagtaaaacaagacaatccctggtagcaacagcttcatcaaccgaggaaaacgtaacatagcaatgagtcttgatatgatccatccagaagttttgtactgatccagttttaccaagaagctcctgcacagctttcagagtaaatgggcgtacaaatcgatcaattctcaaagaagttgttgcaggtttctgagacggtggcacaatccgctccttaggagaatctacactagctgttgaatcggacctcccaaaagagcgtttaagagcaggctgaaaacntccttgggagcatcagaacc

SEQ ID NO: 51542 - DNA, 421 bp, Setaria italica
  Peptide Sequence Number=SeqID_117516
gaacaggaggcgcccttgcggcggcagctgggctaacaggagcagctggtggggggagggggttcaatcttgagcttcacttccgtaacatagcaatgagtcttgatatgatccatccagaagttttgtactgatccagttttaccaagaagctcctgcacagctttcagagtaaatgggcgtacaaatcgatcaattctcaaagaagttgttgcaggtttctgagacggtggcacaatccgctccttaggagaatctacactagctgttgaatcggacctcccaaaagagcgtttaagagcaggctagaaaaacatccttgggagcatcagaaccagttgatccaatgtttgtctctctggaactttggcaccgtctgcagtccaccggcgctgccgcttgattggttcggtgtttgcaa

SEQ ID NO: 51543 - DNA, 224 bp, Setaria italica
  Peptide Sequence Number=SeqID_117517
atcctgatgccaggagatcccacggagcagatggcgcaccaccctcgaccgagacgccaaaacccagccgccgcgaatcctccgaggccgcgcgctcccgaaactattgtgggggactggagctgcgcgcggcgcgcctcccccgcggctgcgctagggtttgggggcacggcacggttggagtgggagggcgagcaggagggagaggatgatgcggtttgcgg

SEQ ID NO: 51544 - DNA, 167 bp, Setaria italica
  Peptide Sequence Number=SeqID_117518
gtaggttgtaaacagcatccctggtagcaacagcttcatcaaccgaggaaaacgtaacatagcaatgagtcttgatatgatccatcctagaagttttgttacttgtattcctagtttttaccttaagttaagttcttttccttttgtttcttttacttttagtttta

SEQ ID NO: 51545 - DNA, 155 bp, Setaria italica
  Peptide Sequence Number=SeqID_117519
gcaggctgaaaaaacatccttgggagcatcagaaccagtttgatccaatgtttgtctctctggaactttggcaccgtctgcagtccaccggcgctgccgcttgaattggttacggtgtttagacaaacaaacctacttacaagacttacaaagta

SEQ ID NO: 51546 - DNA, 441 bp, Setaria italica
  Peptide Sequence Number=SeqID_117520
ccaaccttatccgcttgacagcagcaatcatcagaatcagaattgtctttcttattcccaggagaactagatttatttgattttttacaatcactctccgcattcggatctcccttttctgattcgtcatttgacttgcagttctgtccaccgctgcagccttggttccagaaggcatgtcactcaagtcatagttgcagaagaaagtatgaagtggagtcttctccgggttgctcacgaccagttgtatgcgacccttcacagggatgcgtaggcgactctttgctgatcgtgaatcattattactatagcttctttggagcttcgggcttttgctgttatttgcgggcaacctccccgcaagatcaatagaagaatagtacaataaggagctatcctcatcgatgcttgttactgagaatggaagtttctgagttgggg

SEQ ID NO: 51547 - DNA, 246 bp, Setaria italica
  Peptide Sequence Number=SeqID_117521
cttaaatgatcgaggagatgcattttattggaagattaaacctgtacagtttgccggccaaagatgaaacggctggtgactgagttagtcattgtaaaatatttacagattctttttatgcgcagcagcgcaagctatacatgtgatgttaatgttgggcccaaatcttctcagtcagtctcatgtggaagtgaacctagagaacggggaactctatgttctgaatgctgcagcggtggacagaac

SEQ ID NO: 51548 - DNA, 178 bp, Setaria italica
  Peptide Sequence Number=SeqID_117522
gccgcgtggttttaggggtggtgctcgtcatgtccatctcggcagcttcttatacaacaccttcgtgtaagtgctcaacattggtagaacccttcagcttcatcctttctccacattgttcttatgcctactgacacctgtgtaatttgtcattgggtaatccaagcttcggctctta

SEQ ID NO: 51549 - DNA, 470 bp, Setaria italica
  Peptide Sequence Number=SeqID_117523
tgtagtcgtaccctagtattgttgtcttggggtagtccttcgttcgtcgtccggttggaggcggagctggagacggaggaccaagcggagcacgtacggacgcggcagaggtacgaacaggccgtcgccgatgagccgaacaactcgctcatcctcgccaacttcgcgcagttcctctacctcgtgcagaacgaccacgaccgggcggagcactacttcgagttggcggtgcgcgcggagccggcggacgcggaggctctgagccggtacgcgaccttcttgtggaaggcgcgggacaacctcgccggcgcggaggacacctaccaggaggccatcgcggccgaccccgggaacgcccaccacgccgccgcctacgcccacttcctctggaacaccggaggtgaggacacatgctaccccctcgattgacgcgcgaacaccggcaccgacacgaaccggccaggccaaag

SEQ ID NO: 51550 - DNA, 437 bp, Setaria italica
  Peptide Sequence Number=SeqID_117524
tgacgcgcgaacaccggcaccgacacgaaccggccaggccaaagatcgaaaaaaaatgaaaaatttagaattcaagagtcaagttctgcagcatgcgcggggcggccacgcggcgagacggctagaccacgacatcacacccatggcccgggcggtggagtggagctgacacatgatatcgtcccccttttacttagaagtgtgcgtgcgtggcgtgggcagtggagtgagttgtgatccaggaggacatggcggtggcggtggtggtgcttcttcccccgctccgggaatccgggcaattggagcttttggccgggaacgtggacgacgggcctctcgggttccggcgagcttgtcggggccaaccggcgcccgggaagcatggatggctgtagaactgtgtggtagagcacagtggcgtggagcgcgacgaggtg

SEQ ID NO: 51551 - DNA, 387 bp, Setaria italica
  misc_feature (266)..(266): n is a, c, g, or t
  Peptide Sequence Number=SeqID_117525
ccacgcggcgagacggctagaccacgacatcacacccatggcccgggcggtggagtggagctgacacatgatatcgtcccccttttacttagaagtgtgcgtgcgtggcgtgggcagtggagtgagttgtgattccaggaggacatggcggtggcggtggtggtgcttcttcccccgctccgggaatccgggcaattggagcttttggccgggaacgtggacgacgggcctctcgggttccggcgagcttgtcggggccaaccggngcccgggaagcatggatggctgtagaactgtgtggtagagcacagtggcgtggagcgcgacgaggtggacatcgaccatgaatggatgttctgtatagcagctcgcatcctgtaattatgt

SEQ ID NO: 51552 - DNA, 372 bp, Setaria italica
  misc_feature (268)..(268): n is a, c, g, or t
  Peptide Sequence Number=SeqID_117526
gcgaacaccggcaccgacacgaaccggccaggccaaagatcgaaaaaatgaaaatttagaattcaagaagtcaagttcttgcagcatgcgcgggggcggccgacgcggcgagacggctagaccacgacatcacacccatggcccgggcggtggagtggagctgacacatgatatcgtcccccttttacttagaagtgtgcgtgcgtggcgtgggcagtggagtgagttgtgatccaggaggacatggcggtggcggtggtggtgcttnttcccccgctccgggaatccgggcaattggagcttttggccgggaacgtggacgacgggcctctcgggttccggcgagcttgtcggggccaaccggcgcccggg

SEQ ID NO: 51553 - DNA, 267 bp, Setaria italica
  Peptide Sequence Number=SeqID_117527
gacggaggaccaagcggagcacgtacggacgcggcagaggtaacgaaacaaggccgtcgccgatgagccgaacaactcgctcatcctcgccaacttcgcgcagttcctctacctcgtgcagaacgaccacgaccggtaggtcccctcggctacgcccaccaactgttcgacgaattgacaacgccaccgtggttactgatcataagcactcgtttcatttcatcgcagggcggagcactacttcgagttggcggtgcgcgcggagcc

SEQ ID NO: 51554 - DNA, 309 bp, Setaria italica
  Peptide Sequence Number=SeqID_117528
gggcgggaaagaacaaactaaacttaacgaagttaggacggtagcgcgcggagccggcggacgcggaggctctgagccggtacgcgaccttcttgtggaaggcgcgggacaacctcgccggcgcggaggacacctaccaggaggccatcgcggccgaccccgggaacgcccaccacgccgccgcctacgcccacttcctctggaacaccggaggtgaggacacatgctaccccctcgattgacgcgcgaacaccggcaccgacacgaaccggccaggccaaagatcgaaaaaaaaatgaaaaaatttag

SEQ ID NO: 51555 - DNA, 364 bp, Setaria italica
  Peptide Sequence Number=SeqID_117529
gcgaacaccggcaccgacacgaaccggccaggccaaagatcgaaaaaatgaaaatttagaattcaagaagtcaagttcttgcagcatgcgcgggggcggccgacgcggcgagacggctagaccacgacatcacacccatggcccgggcggtggagtggagctgacacatgatatcgtccccctttacttagaagtgtgcgtgcgtggcgtgggcagtggagtgagttgtgatccaggaggacatggcggtggcggtggtggtgcttcttcccccgctccgggaatccgggcaattggagcttttggccgggaacgtggacgacgggcctctcgggttccggcgagcttgtcggggccaaccggc

SEQ ID NO: 51556 - DNA, 264 bp, Setaria italica
  Peptide Sequence Number=SeqID_117530
ttacttagaagtgtgcgtgcgtggcgtgggcagtggagtgagttgtgatccaggaggacatggcggtggcggtggtggtgcttcttcccccgcctccgggaatccgggcaattggagcttttggccgggaacgtggacgacgggcctctcgggttccggcgagcttgtcggggccaaccggcgcccgggaagcatggatggctgtagaactgtgtggtagagcacagtggcgtggagcgcgacgaggtggacatcgaccatgaa

SEQ ID NO: 51557 - DNA, 276 bp, Setaria italica
  Peptide Sequence Number=SeqID_117531
ccggcggacgcggaggctctgagccggtacgcgaccttcttgtggaaggcgcgggacaacctcgccggcgcggaggacacctaccaggaggccatcgcggccgaccccgggaacgcccaccacgccgccgcctacgcccacttcctctggaacaccggagttcttgcagcatgcgcgggggcggccacgcggcgagacggctagaccacgacatcacacccatggcccgggcggtggagtggagctgacacatgatatcgtcccccttttacttag

SEQ ID NO: 51558 - DNA, 274 bp, Setaria italica
  Peptide Sequence Number=SeqID_117532
ccgggaacgcccaccacgccgccgccgtacgcccacttcctctggaacaccggaggtgaggacacatgctaccccctcgattgacgcgcgaacacccggcaccgacacgaaccggccaggccaaagatcgaaaaaaatgaaaatttagaattcaagaagtcaagttcttgcagcatgcgcgggggcggccacgcggcgagacggctagaccacgacatcacacccatggcccgggcggtggagtggagctgacacatgatatcgtccccctttt

SEQ ID NO: 51559 - DNA, 268 bp, Setaria italica
  Peptide Sequence Number=SeqID_117533
cccccgctccgggaatccgggcaattggagcttttggccgggaacgtggacgacgggcctctcgggttccggcgagcttgtcggggccaaccggcgcccgggaagcatggatggctgtagaactgtgtggtagagcacagtggcgtggagcgcgacgaggtggacatcgaccatgaatggatgttctgtaatagcagctcgcatcctgtaattatgtagatgtgaaaaaagaataaccaagtgaataaggagatcgtggtaatcccgg

SEQ ID NO: 51560 - DNA, 219 bp, Setaria italica
  Peptide Sequence Number=SeqID_117534
gcgaacaccggcaccgacacgaaccggccaggccaaagatcgaaaaatgaaaatttagaattcaagaagtcaagttcttgcagcatgcgcggggcggccacgcggcgagacggctagaccacgacatcacacccatggcccgggcggtggagtggagctgacacatgatatcgtccccctttacttagaagtagtgcgtgcgtggcgtgggcgagtgga

SEQ ID NO: 51561 - DNA, 171 bp, Setaria italica
  Peptide Sequence Number=SeqID_117535
ccaaagataacgaaaaaatagaaaattagaattcaagaagtcaagttcttgcagcatgcgcggggcggccacgcggcgagacggctagaccacgacatcacacccatggccgggcggtggagtggagctgacacatgatatcgtcccctttacttagaagtgtgcgtgcgt

SEQ ID NO: 51562 - DNA, 260 bp, Setaria italica
  Peptide Sequence Number=SeqID_117536
cgtgggcagtggagtgagttgtgatccaggaggacatggcggtggcggtggtggtgcttccttcccccgctccgggaatccgggcaattggagcttttggccgggaacgtggacgacgggcctctcgggttccggcgagcttggtcggggccaaccggcgcccgggaagcatggatggctgtagaactgtgtggtagagcacagtggcgtggagcgcgacgaggtggacatcgaccatgaatggatgttctgtatagcag

SEQ ID NO: 51563 - DNA, 256 bp, Setaria italica
  Peptide Sequence Number=SeqID_117537
gtgatccaggaggacatggcggtggcggtggtggtgcttcttcccccgctccgggaatccgggcaattggagctttggccgggaacgtggacgacgggcctctcgggttccggcgagcttgtcgggggccaaccggcgcccgggaagcatggatggctgtagaactgtgtggtagagcacagtggcgtggagcgcgacgaggtggacatcgaccatgaatggatgttctgtatagcagctcgcatcctgtaattat

SEQ ID NO: 51564 - DNA, 225 bp, Setaria italica
  Peptide Sequence Number=SeqID_117538
gttccggcgagcttgtcggggccaaccggcgcccgggaagcatggatggctgtagaactgtgtggtagagcacagtggcgtggagcgcgacgaggtggacatcgaccatgaatggatgttctgtatagcagctcgcatcctgtaattatgtagatgtgaaaaaagataaccaagtgaataaggagatcgtggtaatcccggtgaacaaaaaaaaaaaaaaaaaaa

SEQ ID NO: 51565 - DNA, 189 bp, Setaria italica
  Peptide Sequence Number=SeqID_117539
ggccaaccggcgcccgggaagcatggatggctgtagaactgtgtggtagagcacagtggcgtggagcgcgacgaggtggacatcgaccatgaatggatgttctgtatagcagctcgcatcctgtaattatgtagatgtgaaaaaagaataaccaagtgaataaggagatcgtggtaatcccggtgcaaa

SEQ ID NO: 51566 - DNA, 151 bp, Setaria italica
  Peptide Sequence Number=SeqID_117540
tgtgtggtagagcacagtggcgtggagcgcgacgaggtggacatcgaccatgaatggatgttctgtatagcagctcgcatcctgtaattatgtagatgtgaaaaagaataaccaagtgaataaggagatcgtggtaatcccggtgcaatct

SEQ ID NO: 51567 - DNA, 162 bp, Setaria italica
  misc_feature (8)..(8): n is a, c, g, or t
  Peptide Sequence Number=SeqID_117541
cggcacgncccgggaagcatggatggctgtagaactgtgtggtagagcacagtggcgtggagcgcgacgaggtggacatcgaccatgaatggatgttctgtatagcagctcgcatcctgtaattatgtagatgtgaaaaaagaataaccaagtgaataagga

SEQ ID NO: 51568 - DNA, 338 bp, Setaria italica
  Peptide Sequence Number=SeqID_117542
cacggcgtcaggtctggagggaaggatagcaagaaagacactgtgaagacagcatctccagggaacaacaatgcagctgcagctgcccctgcttctgtgcctgcggcagccaaggaagacgccgcctcccacatttctgggaccgatccggtcccgagcacaccgtgatctttaacctagcgtcgtatattagatataagggactctttttctgatgtttttccattgtttgtggtaatatattgtaatgccttcgtagagaagagtaattacaatgtttttccattgttttgtggtaatatattgtaatgccttcgtagagagagtaattatgacgt

SEQ ID NO: 51569 - DNA, 324 bp, Setaria italica
  Peptide Sequence Number=SeqID_117543
tacgtaaagtaacctaagggtactaattggggtaaagtaagtaaattcgtcggttctgtcctttatgtatgatggtgtacctcttctagctatgttggatgagtatgttatgctcagacaggaaagggaagaagagaagaaaagaatgcgggaacaaaagcgctacattgagcagcaactcaacactgatcatgaagggccattcggctcacgagtgagcccgaaccgacctgccagttcgaagaaggccattggtcccaaagttgaacggcagcgtctcaaatggcactcctccaaacagaaggctatcaatcagtggtcaac

SEQ ID NO: 51570 - DNA, 425 bp, Setaria italica
  Peptide Sequence Number=SeqID_117544
gataaaagttgaaagatggatgtctgcatgtgaagaagagagctggctagaagattataaccgggatgataacaggtataactcaagccgaggtgcccacctaaatctgaagcgtgcagaaaaagctcgtattcttgttaacaagatcccaggtatctgttcgaattatttcagtgattcaatatgttgctttatctgctaatcagtttgtgcctttctagattttattttatgtgcatggaccttatttcctaatctgctagctatacaccatattctattaattgctgatgtagtgtctccttaattctagcgcttgttgaaactctggtggcgaagaccagggcatgggaagagaatcgcggtctgtcctttatgtatgatggtgtacctcttctagctatgttggatgagtatgttatgct

SEQ ID NO: 51571 - DNA, 262 bp, Setaria italica
  Peptide Sequence Number=SeqID_117545
gaccatgtcacctgcaacagatcagcatctgtggatgaagtcactgcacctagatctcttgccctagacttaattgaacaggctgaggttgaggttcaaaggctggaccagctaaaatacagcaagatgaaagagatagctttcaagaagcaaactgagctggaagatatatatgctggtgctcatatagtaattagactactagtcttgtcttgtccctattgttagttaagttattttacttttggtttcttttactttt

SEQ ID NO: 51572 - DNA, 180 bp, Setaria italica
  Peptide Sequence Number=SeqID_117546
ggcaccatagaggtcggtgatttcaccacatatttgatcaatttgttaatgtacaatcacaaattgatcaaatatgtggtgaaatcgctggcaccatagaggtcggtgagcaggtggcaacaccccaagtcaatgaggatgacttgacacttgaaaatcttcaagcctttcaagtgtcaa

SEQ ID NO: 51573 - DNA, 369 bp, Setaria italica
  Peptide Sequence Number=SeqID_117547
atgatgcaaccttaaaaccatctctgagttgttcagcatgtgtgactttacacaacacggcaatcagctgagaaaagtcatttattgtggtaatcttgtaaagggcatactctacggttttatgtggttaacggcatctcctggctcaaataaccattctagacctcagaatacttcaattcctatcagggcctccagccctgttgggaaaatctcatctactgccacatcttgtacggcagccattcctcattgtggaagagcagaatctgagataacatcccttgttgaaccatgttcaggaggacactcatcatttgacgatagagaggaactagaacctgaagctttggaaattccaactaggaa

SEQ ID NO: 51574 - DNA, 220 bp, Setaria italica
  Peptide Sequence Number=SeqID_117548
accaatacaaggtagttagactgaacaataagttgggaagacgattcgggcaggtgaagctccctcacaaccctgaaaaatcgtatgctggaagcatcgcgaatttcatggctggtttcatcgcatcagtgttgtaagtatcaaaatccatctacattttttttgctgctgaaacctcaagacctatgtatggatcaccgatacttcactgaccctaccg

SEQ ID NO: 51575 - DNA, 393 bp, Setaria italica
  Peptide Sequence Number=SeqID_117549
tcctaagtcttttgttcgttagtacgtacttccctagtcctatttacatccatacagctgaggctggctgatggcactcgtatggtcgccaggttcaacatgcaccacaccgtgggggacatcaggtccttcatcgacgcatcccggcccggagctgcaaggacgtatcagctgcagactggcttcccacccaagcagctggctgacccaacgcagactgtcgagcaagctggcctggcgaactccgttatcatgcagaagatgtaaatgcttcaccaagctgggaacccagatgcataatgcgtcttttgaaaacttgtatcatcgagtggttggtcatcgtatcagacactgtactgtgtactggcctattgccgtatcagcctcgttgac

SEQ ID NO: 51576 - DNA, 255 bp, Setaria italica
  Peptide Sequence Number=SeqID_117550
catgaaagtatttcccattaactaataacaatgttaagttcagcctagggattaccaaaagtataagtgacacgcttcctttcacgacgagagcgcccagatgtgaatccattcactgtcaagtagctgtcaaggaggagggcttctctttgttgctttttgagcagcttctctttcttcttatgaatcttttctatctctggaaggtgattgaacttcagcttcttgccaagcgagacttctgtcctgttccta

SEQ ID NO: 51577 - DNA, 410 bp, Setaria italica
  Peptide Sequence Number=SeqID_117551
atttgggtcttgaaaatggacttgtccaactgaatgttatccactggtgatatgaccagatcaccagtggataacattcagttggacaagtccattgaaaataaatatttgggtcttgaaaatggtattctagatccatcagccattttgctttcacgctatggttatctcaccttcatggactgcaagaccgcttcaccttcccacgtctacttctcggagctgagtaaaagccagcagcctcagggagagctaccattcaagattttgttggcattttcagggctgcagcataatctacctaagaagcgtggatataatacacgagtttttgagtgcaaagaggctgcccgtgctcttttgcacactgcaggctgtgaagatacaccaaatatacttcgtaaacgttg

SEQ ID NO: 51578 - DNA, 259 bp, Setaria italica
  Peptide Sequence Number=SeqID_117552
ttcaagattttgtttggcattttcagggctgcagcataatctacctaagaagcgtggatataatacacgagtttttgagtgcaaagaggctgcccgtgctcttttgcagcaacttttttataatattttcgtttgaattccagcactgcaggctgtgaagatacaccaaatatacttcgtaacgttgacccagttgtatatgaaaccaagaagggtgtattggaagaaaatctttccagaagagctgagcactactttt

SEQ ID NO: 51579 - DNA, 248 bp, Setaria italica
  Peptide Sequence Number=SeqID_117553
ctccgggttgccgcccttgcttgtcagcagttcgagaatgcacagcctccagcagttctttcacaggcagtaaaacgtgggaagcgtgaaggatttgatgtggttctgtgtgatacatcaggaagacttcatacaaattatggtttgatggaagaattggtttcttgcaaaaaagtcatagctaaagcccttcctggagctcctaatgagattttgcttgttcttgatggcacaactggcctaaacat

SEQ ID NO: 51580 - DNA, 492 bp, Setaria italica
  Peptide Sequence Number=SeqID_117554
gcagtctcagagaaaagtcaaagccaaaacgaatagttatttgggacggagtgagtagaaggcaatactcaaaacacttgctttgacatgtgatgtttggttattaactattatacacaaaaatcaaatatagcaccaggctacaacatcaaaggagcatgatgtctgtaaaccaccatgaaataatatcaaacttcacagtgcaaggcggcatgaatgtgcatttggtagaactatctgtcaagctgtcagcttgttgctcttattgtaagaaaaccaaaatttgattcgagcttgatcttacccatctggcatgtgtgtgtactggaccaaagcctgcgacagaagtgtattcgttgaaatactgtggcaccgacaaacccataaacaaagagaagcccaggatgaactttgtccggaagctattcaggttgcagaactgaaggaacccaacacctgccatacctgtttgtacagcagaacgcattgctt

SEQ ID NO: 51581 - DNA, 265 bp, Setaria italica
  Peptide Sequence Number=SeqID_117555
aacctgtcccagaaatggtgcccccggtccttcctcacggtgccgtcacgcctgtgcagggtgttgtccagaaaatatgctacagcgcctccgacgaatgctttggaggagaataccacgttgatcatatcattgaactggacatgagcagaagagaaaacagcagttaggttgcagctcttcagtgtatcaaagcactaaaactactactccctccgtcccaaattactattcgttttgacttttctagatacaaaacttttaa

SEQ ID NO: 51582 - DNA, 417 bp, Setaria italica
  Peptide Sequence Number=SeqID_117556
gttcacgccatatatgaactgaacaattaaagcatgcatgcagtcattaaggacgagtagcagagtggacgacgacggtgaaatctatataattattggacagcaattcaagaagtagagatagatgaaaagagtaaaagggaattaggtagctagatgtcgacgacgcatggtgcggcgcggttgaacttgaagtagccgagccctcctccggcgtttgatccgtagcttccctggccgtcgttgacggtgagcagcgccgggcagcgcaccctgaggtggtagtggctggtgatgaaggccccggccttccaccggatccatccgtcgacgcggatggtgacgaagacaaggtaaccccgaccgtactacgtacctagaacgaacgaaaagaaacgaaacggtaaaggaaacaaa

SEQ ID NO: 51583 - DNA, 351 bp, Setaria italica
  misc_feature (220)..(220): n is a, c, g, or t
  Peptide Sequence Number=SeqID_117557
tacgaaccgacgaccgaacgtgtacgccgagtaccgggcctccaggtgacggtggccaccgcgctgccggcgtcgcctgcatcgtcaccgccagcgccgaggaggagctcacgttgatgcacacgatgtcgacgttgctgaggaagaagcggggcttgctcgggcggaggacaagccacacgatcagcacgatgaggagggccagcaggatgatccccgngacggccgcgcagcaccggcggtaaagccgctgccgctcgcagtccttgtgctggtcgcagtacttgatcgacatcctgtatacccctactgatgatgatgcttcttcttcttcttgatcgtgtgtgtgag

SEQ ID NO: 51584 - DNA, 204 bp, Setaria italica
  Peptide Sequence Number=SeqID_117558
agcgccgggcagcgcaccctgaggtggtagtggctggtgatgaaggccccggccttccaccggatccatccgtcgacgcggatggtgacgatgcaggcgacgctggcggcgaggaggagctcacgttgatgcacacgatgtcgacgttgctgaggaagaagcggggcttgctcgggcggaggacaagccacacgaatcaagaca

SEQ ID NO: 51585 - DNA, 413 bp, Setaria italica
  misc_feature (389)..(389): n is a, c, g, or t
  Peptide Sequence Number=SeqID_117559
ttgttcttattttgtttttattgtctattctacttcatttgctctagttgaagataaaaatgtcaatgctggcttcagttttttccctaatcttactattttcaatgtaaacaggagagtctcacacgtggaggaaattctgacaatagatgtaaagcctggttggaagaaggggacaaagataacatttcctgagaagggaaatgaagctccaaatatgagacctgctgatattgttttcatcattgacgagaagccccacgacgttttcactcgggatgggaatgatcttgtcatgactgagaaaatctctctggttgaagcactgacgggctatactgcacgtgttactacgcttgatggacggagcctgtcattgcccattaacncaatatccaccccagctacgaaga

SEQ ID NO: 51586 - DNA, 387 bp, Setaria italica
  Peptide Sequence Number=SeqID_117560
gccgcgggaggagcggaaggcctacatggagcgcctcgcggcctcgccgcctgatcagaaatttttgggaggctggtgggaactgcaacttagcctttgccgcggctaggcttgggcttcgctgttccacgctggggcatgtaggagaggaaatatacggaaaatttcttcttgatgtgcttcaggcagagggcattagtgttattgggatgcttgaaataccgatgctactgcatgccgtcaggcctatgaaacacttctatgttgggttcttgtagacccatttcagaaacatggtttttgcagccgtgcagattttagtgaagaaccagctttcagttggatacgtaaactcccagcagatatcaggacagcaattcatcacta

SEQ ID NO: 51587 - DNA, 228 bp, Setaria italica
  Peptide Sequence Number=SeqID_117561
ttgctggtataatgtgcttggttatttatcagtgttgctttctttgcaatgtcagccgtgcagattttagtgaagaaccagctttcagttggatacgtaaactcccagcagatatcaggacagcaattcatcactcgaaaatactgttttgcaatggctatgcttttgatgagttcttccctgatgtgattgcatcctctattgactgcgcgattgatgcgggaacag

SEQ ID NO: 51588 - DNA, 233 bp, Setaria italica
  Peptide Sequence Number=SeqID_117562
agatgcatccttatcaagtgatcactccctggtgttgccgaaggacaaactgtatcaagccacctgatgctccatcctggcttgatatcttggtgcgtactgagccatgtctgtatgaaaaggaaatgctgcaagccacgtagtgatcacttgataaggatgcatctgacgggtgaaccctcagctccaaccagcctgagaggtaagcaatgcagattgtatattcccgccgg

SEQ ID NO: 51589 - DNA, 353 bp, Setaria italica
  Peptide Sequence Number=SeqID_117563
gggagcgcgcggctcagcgtagcagagctcgcagagcagagaccagtgcggggcccaatggctgctgctggttccttcgtggctttcttggccgccgctgcgatgggcctcttcgacgcgctctaccgcgtggtgatgcgccgcaacgccgtctacgtcaccttcgtcgtcgccggcgccttcgcgggcgagcgggcggtggattacggagtccacaagctctgggagatgaacaacgtcgggaaaaggtatgaagatataccagttctggggcaaaggccagcggaagaatgagagcatcgagctcagggttcccaggatgtcgctttccatgaaattagtttccatttgag

SEQ ID NO: 51590 - DNA, 226 bp, Setaria italica
  Peptide Sequence Number=SeqID_117564
caccaaccaacccgcccagcccacgagccaagcgacgagcagcccatccgccgaaacgccctgccgtctcccgagccgccgctgcgatgggcctcttcgacgcgctctaccgcgtggtgatgcgccgcaacgccgtctacgtcaccttcgtcgtcgccggcgccttcgcgggcgagcgggcggtggattacggagtccacaagctctgggagatgaacaacgtcgg

SEQ ID NO: 51591 - DNA, 446 bp, Setaria italica
  Peptide Sequence Number=SeqID_117565
taagggttaacgaacgtaacgaacaaagggaacgaacgtaacctaccaacgggactactttaagcgcccgcatcaagctccccgccgaccacaccgccggtgtcgtcgtcgccttctacatgtcgaacggggacgtgtacgagcggacgcacgacgagctggacttcgagttcctggggaacgtgcggggccgggagtggcgggtgcagacaaacgtttacggcaacggcagcacggcggccggccgggaggagcgctacggcctctggttcgaccccaccgaggacttccaccgctacgccattctctggagccacgacaggatcatattctacgtcgacgagacgccgatcagggaggtggtgcggacagggtccatgggcgcgcagttcccgcaagcccatgtccctgtacgccaccatcctgggatggctccagctgggcca

SEQ ID NO: 51592 - DNA, 277 bp, Setaria italica
  misc_feature (173)..(277): n is a, c, g, or t
  Peptide Sequence Number=SeqID_117566
gacactgctgttggagtttcgtggtgcatggttagaacctgttatccagccagggatcggcatgtttggttgccccgccctccgtcgaaaacttgtaatactatgaatgagaaatgttttgttggcaactgtgatttagagatccatcatgcatcctttggtactgaaaaagnnnnnnnnnnnnnnnnnnnnnnnnnnnnnnnnnnnnnnnnnnnnnnnnnnnnnnnnnnnnnnnnnnnnnnnnnnnnnnnnnnnnnnnnnnnnnnnnnnnnnnnnn

SEQ ID NO: 51593 - DNA, 363 bp, Setaria italica
  Peptide Sequence Number=SeqID_117567
ggaaaaagtatcttctgtggagggtgagaagatggtgcttgttgcatgtggatggcgccataccattactgtttctgactctggtacaatgtacacttacggttggagcaaatatggtcaattgggacatggtgattttgaagatcatttagttccacataaacttgaagctttgaaagatagcactatatcccagatttcaggtggttggaggcatacgatggcacttacatcagagggaaagctttatgggtggggtggaacaagtttggaacaaagttaggaagttaggacaaacaaacgaatagaatacaattagttacaaccaagtaacaaggttacaattttaccaagaaggaaaca

SEQ ID NO: 51594 - DNA, 322 bp, Setaria italica
  Peptide Sequence Number=SeqID_117568
ggggtacgtagtggacagctcggtcaattggtagtaattagttgacaggtggttcccatctagttcacttgctcaatatctttttcttttttccggaagaaactcgatatcttatatttgctatctatatgttgctcttccgtgctaacaatttatcgacctgtgccatcctgaaggaatacacctgtgctgattgacgccttaagcccagacggttctggctgcaagaagttagagtcatccgcagcagctccatttgcagccaaggtctgggtctctccgtcagagagatacgccatagttcctgatgagaatgttccca

SEQ ID NO: 51595 - DNA, 327 bp, Setaria italica
  Peptide Sequence Number=SeqID_117569
acaatagaagaacaaggaagtaggttagaataccgaaagaaagtttaggtttagactaggacaaaactggcagcgggactacacaatggaaaacatcctaacccagctcaagaaagagatggctgcctcacacaatcgcaagctagtgcagcctccagaagggacattcttctaaagaagtgctgggcgccccatcttgggattcaacaacagtaactgataagctgtttatggggggaaacaacgttcctacatctgttgcccgtgcttgtgtttccagtttcgtatgctatgttctatctgtgaacggctgtgaacaatcaaagt

SEQ ID NO: 51596 - DNA, 250 bp, Setaria italica
  misc_feature (40)..(40): n is a, c, g, or t
  Peptide Sequence Number=SeqID_117570
gcaacttcttccatttacttgtttttgtctaagttgactntcccttctttctatttctctcttgtcagactgtacatgagggtcgcatctaccagcttaagttgttctgtgacaaggattatcctgagaagccaccatctgtcagattccattcaagaatcaacatgacatgcgtcaatcatgagacaggagtggttgatccgaagaagtttggtttgctggcaaactggcagcactagtgcgactgagt

SEQ ID NO: 51597 - DNA, 215 bp, Setaria italica
  misc_feature (174)..(174): n is a, c, g, or t
  Peptide Sequence Number=SeqID_117571
atgaccgcatgtagatgtcatggactggtacagtattgtgtgggccaatgatggtaccagtccatgacccacacaatactgtacatgagggtcgcatctaccagcttaagttgttctgtgacaaggattatcctgagaagccaccatctgtcagattccattcaagaatcaacntgacatgcgtcaatcatgagacaggagtggttgatccgaag

SEQ ID NO: 51598 - DNA, 235 bp, Setaria italica
  Peptide Sequence Number=SeqID_117572
gtctccgactcagtctagcgactgagacaaaacgaaccccaatacgacctcctctcgctcctcagccttgcgtgtgcgcagccgcaacttttcctcctctccatcctctccgcgagggcgaaaacccccaaacccccacatccgccccacccgccgccggccgatccatccatcggcgatgacgctgggcagctccggcgccggatcgagcgccgtcgttcctaggaacttcagg

SEQ ID NO: 51599 - DNA, 247 bp, Setaria italica
  Peptide Sequence Number=SeqID_117573
cacttggagatgtcattgctgcacttagaagaaagagaagtcatgttccttacaggtaacagctgaattattcagttaactcaccatataaattattaacagtgtgttaggggaaaaaatctaatatttcaattacattacagttactaatcagtgattctgttcatatttgccttttatgacccctgcagaaacagcaagcttacccagattctcagtgattcacttggcgatcgttcaaaagttc

SEQ ID NO: 51600 - DNA, 234 bp, Setaria italica
  Peptide Sequence Number=SeqID_117574
gcagaattgagccgtaggcagaggagaaacagggcagggctgttgactcgcatgcctctgagaattcggggcagagggcatcgcgtagctgctatcggaaaagctcgaggtgaagacatggattggttgcctggagagctgtgcctcaagatcttccagctcctggatcaccagtccctcgcctccgctccccaagtttgcaggaaatggagggcgttgacctccgacgatgag

SEQ ID NO: 51601 - DNA, 366 bp, Setaria italica
  Peptide Sequence Number=SeqID_117575
taaagtattggtaggtactagtcgtaattcggtcttgttcggaaataggaagactaagatggtgacttatagggttgacaagaagaccattgattttttgaagaatcatccccctctcaagcctcctcccatcggcgcctgtgagcctgagctgacgaccaaacgctttaattgatattactgctccctatgttgaggttgaacgtgtgctccttgagtacttgcaatgccattactccatcaaggggtatgctgaggtgcagctggaggtcaccgatgacgaaggcgatgaccacaagttggtgtagcactgttgtcacgtgtggttggtgtgggtaacgagtttaaggctgcctagcataataa

SEQ ID NO: 51602 - DNA, 244 bp, Setaria italica
  Peptide Sequence Number=SeqID_117576
gtaggacgaagagggagatgccggtggtggaagggaggggttagttggaggcaatggtggcagacgccagatcggagcagaagttgaagcgatcgagggaggagggcaagagatctagcagcggattgaaggagaagaagaaggcgaagagcgaggataaggaaggcagcggatcaaagaagaaggctaagagatcgagcgagatggagggcagtggatcgaaggaggcgaaagatgaagggca

SEQ ID NO: 51603 - DNA, 143 bp, Setaria italica
  Peptide Sequence Number=SeqID_117577
ggagaggatgaagattgcgacggaggacgaggcgatggtggcagacgccagatcggagcagaagttgaagcgatcgagggaggagggcaagagatccgctgccttccttatcctcgctcttcgccttcttcttctccttcaat

SEQ ID NO: 51604 - DNA, 209 bp, Setaria italica
  Peptide Sequence Number=SeqID_117578
cggggagaggaagtagagggtggggagcgagatgaggaggaggatgcgcaggcggaggtgcaggcagcggaggaggtggaggcgaagattgagttcatagtcaaaatccgtcggcggagataggaagactaagatggagattaagaggatgctcaagaaggccttcgagattttgaatgagccccctgtcaagtctcaatcggaggagg

SEQ ID NO: 51605 - DNA, 179 bp, Setaria italica
  Peptide Sequence Number=SeqID_117579
atctgacgaaggcgatgaccacaagttggtgtagcactgttgtcacgtgtgctaggcagccttaactcgttaccacaccaaccacacgtgacaacagtgctacaccaacttgtggtcatcgccttcgtcatatgagtacctgggtactgatgttatcatgcatgttattctcacatctg

SEQ ID NO: 51606 - DNA, 414 bp, Setaria italica
  Peptide Sequence Number=SeqID_117580
attaatccaaggttcacgctgcattacattacattcagaacaattggggagaacctcctctaatgcacggtatgaatgtatttgggggcaaaatcacgataatcaatggaacataaacacatacaactgagctcatatagacgtatctggcagcgaacccataaggattacaggactgctattttttggtctccaaagtttatccggccttgctttcgagagaatatcggagaaaaacccagaggatgaagagaatggtggaggttggacagactctgttgatggcatgcccgtgccaccagcttgctcaagtgccaccaccttcctgcctgcgttggatgccttaccacaagggcacacacttaattcttccttaaagtctatttgtctttgttggtaagtatttgttactta

SEQ ID NO: 51607 - DNA, 351 bp, Setaria italica
  misc_feature (331)..(331): n is a, c, g, or t
  Peptide Sequence Number=SeqID_117581
ataccgtgcattagagggcaaaatcacgataatcaatggaacataaacacatacaactgagctcatatagcagtcctgtaatccttatgggttcgctgccagatacgtctatatgagctcagttgtatgtggcagcgaacccataaggattacaggactgctattttttggtctccaaagtttatccggccttgctttcgagagaatatcggagaaaaacccagaggatgaagagaatggtggaggttggacagactctgttgatggcatgcccgtgccaccagcttgctcaagtgccaccaccttcctgcctgcgttggatgccttaccncaagggcacacactaatctt

SEQ ID NO: 51608 - DNA, 431 bp, Setaria italica
  Peptide Sequence Number=SeqID_117582
aaaacttaaaatagattacatgcatatgcatttcctagcttggaccttggagaagaaaaatctccatagccatacaattagagggaggaaggatgaaaaaaggtgaaaaaaggcaaaacacaaacaatcaactcacacattattgttgatccgtccgtggttctacattcagaaccaccgggcagacaaagcaagcagacaaaagaaaattcggcgaaaacaaacgcgatgcatgcagcatgcactcacgaacaaacactgcccgtattcatgcgtgcgtgttgcatgcgagtacgtaaccgcgtagctatcaagcgcatatgaaaccactggggaggttcttgccacagtagttgacaatgaaggctgaagacttagaacaagggaatagtacgaaggactagaatagaccgaagtactaacgtttagta

SEQ ID NO: 51609 - DNA, 234 bp, Setaria italica
  Peptide Sequence Number=SeqID_117583
tggtcggtccttcgtaggttcggtcgtaggtccgtccgtaggtattgtcttgtctagtctattggtcttcggcgggcggctggccgacctcggcgctcacgaggccggccacgttggcgcacgccgcgagcttgagcgcgttcttggggcacttgcctttgctcgacggtgacggtgacggcggcgtcggcgttggtggcgttggcgtcgggcagccgccgccgcaggcgttgg

SEQ ID NO: 51610 - DNA, 359 bp, Setaria italica
  Peptide Sequence Number=SeqID_117584
agaataaagtactaacattcatgataccaaatgagtaccattattctataaatttggtcaaacttgagatgttttgactccaagaaagttggaatagcttataatttggaattggagggagtagtttggtttgatacattgggattgtgtaccggttggttttcatgctgggaactagaacatatcttgctgtaacttgtagggctgtaggtttcatcctgtgcaattgcccatccatgatccatccatccatttgggcctggtgttttgttgctgatgctaaataaagggcatgaatggctagctgttttcaataaaagattgtggaataagctgtctccttgttttcttcaaaaaaa

SEQ ID NO: 51611 - DNA, 187 bp, Setaria italica
  Peptide Sequence Number=SeqID_117585
ttttttttttgtcggtttatgtacaccgctgaatgaacaagcacgctgaaatgttaataaagtcaatacaaaggttgacatgcgattcaatgttgttaacgtccgctggggaatggcaggaaacggagacgttttgtacaagataggttgcatcaatcccagctagttctgttccgcctaaattcct

SEQ ID NO: 51612 - DNA, 382 bp, Setaria italica
  Peptide Sequence Number=SeqID_117586
aatctggataatatagttgtctaccattgtattaagcaaacatgcacgcatcattacacacttcagaacaggcctgaacctgtgtacaagtaggtacaggcgatacatctcttattcatgtactacacattcgttcatcagacacagctgccatactactaaacacagtcttcttcagcttcaccttcacataaggcccaaggtccgcgtcgtgccctggtgagtgccggacccaggtccatggagctggtatgtctggcttggcacaacctgaagaaacgacctggttgacttacttagaagactacctacgaacctagactagggaagttaagaacttaacgaactaagaaagaaaacccgaactaaggaacggaacgta

SEQ ID NO: 51613 - DNA, 363 bp, Setaria italica
  Peptide Sequence Number=SeqID_117587
taaagttaaaccttaagtaaaaccttaagttaagttaactaaagttaaggttaactaaggtacgtaattaacaatctcttattcatgtactacacattcgttcatcagacacagctgccatactactaaacacagtcttcttcagcttcaccttcacataaggcccaaggtccgcgtcgtgccctggtgagtgccggacccaggtccatggagctggtatgtctggcttggcacaacctgaagaacgcctggttgcttcttgagctcctcgacctgctggggattagcttcgctgagaacccgctggcggcgtgcctgtagtggtagagcaccgcgtccttggccttctgctcgctgccaagg

SEQ ID NO: 51614 - DNA, 215 bp, Setaria italica
  Peptide Sequence Number=SeqID_117588
acgaatgtgtagtacatgaataagagatgtatcgcctgtacctactactaaacacagtcttcttcagcttcaccttcacataaggcccaaggtccgcgtcgtgccctggtgagtgccggacccaggtccatggagctggtatgtctggcttggcacaacctgaagaacgcctggttgcttcttgagctcctcgacctgctggggagttagcttcg

SEQ ID NO: 51615 - DNA, 307 bp, Setaria italica
  Peptide Sequence Number=SeqID_117589
aggtggattttgtgcgtacgctgacatctctctgtgcatccagttttgcttttagtccgtctaaatatttcacgtttattgatcatagatctggatgctcaccaaggaaatggacatgaaaaagattttgctaatgatggaagggtttacattttggacatgtacaatgctggaatttatccctttgatttcactgctaagcaatacatcgatcaaaaagttgaattagctgtaagtttcattttgcaaactgctaattatgcacgtgcttcaacttttgtagttaaatttcttctatttattagta

SEQ ID NO: 51616 - DNA, 449 bp, Setaria italica
  Peptide Sequence Number=SeqID_117590
ttttgcaaactgctaattatgcacgtgcttcaacttttgagttaaatttctcattatagagcgggacaaaaacagatgaatacttggagctacttgataaggctctcgaggtctgcaaaagtaggtttcaaccccagttgattgtttacaatgctggaacagacatccttgatggtgatccattgggcagattgaagataagtcctgagggtgtaattaccagagatgagaaggtgtttagatttgcgaaagatcaaaacattccactgctcatgctgacgtcaggaggctacatgaagtcaagtgctcgagtaatcgccgattcgatcatcaatctcgccaataaaaacttgatagaactaggcagccagttggttgagaaagaatatgttaactggtgtttatcctaaagcacacatctcctgtatgtatatgacctctgaatagaa

SEQ ID NO: 51617 - DNA, 228 bp, Setaria italica
  Peptide Sequence Number=SeqID_117591
tggaccgacctcacaatgcaaaagcaagaaacagctgctagatcaatcacatgcttcgacccagagtagttgtagacgagctcagagtgcagagtccttgtggtcagagactcccttgcctttgacagcagcgccttgtgcgccgctgcaagaacagggaacacatccggcaccagtgatgcgttgaggaacgcgacctccggctccagcttccctgactgcatcaag

SEQ ID NO: 51618 - DNA, 258 bp, Setaria italica
  Peptide Sequence Number=SeqID_117592
cagcacaggatcacaagtttatgagccaaacaaatggtcagcgcaatttattacatgtttatttcaggatttgctatggcggggtctaaattctaaatatcatagcagcatgcaattgacgaatttgtaaactagttcagtgacttcagttggactttcatcctaaatcatacctcctcatctgaagcatcaaaacgagctgcaaggatgtacatcgtgttatcagagatcccacatcgtttcaggattccgtaatct

SEQ ID NO: 51619 - DNA, 118 bp, Setaria italica
  Peptide Sequence Number=SeqID_117593
ggcggatggagatcggcgtctctttgcagccggctgacacggacacgatgtccaccttcagtggccggccaaaaccgaagtccagctcgtagacacggaacctcggtgagccagccac

SEQ ID NO: 51620 - DNA, 407 bp, Setaria italica
  Peptide Sequence Number=SeqID_117594
gctggaggtacaggtgcccaggtgggaaggttatgaagcgttcacaatcatcactcaatgccttcaatctccgaagaaaaccaaactgaccctgaaaacatacaacagtatgaattaatgccatgtggcagttatcgagattcaaaaaaaagaaaaattggatgaattgagttgggtgacaacacaacaccgcatattcccgagattgaagaaaagaagaaaatagtaagagtttttttctcgaacacgtaggagatctgctatcattatattaaagaagaaaagagggtataaagaacacttcttcaaatacaagaacatagttcccctaaataacatagctacatagtactttttctgtttttgttattgggcaacagaaaagactttagcagtgataatcccac

SEQ ID NO: 51621 - DNA, 272 bp, Setaria italica
  Peptide Sequence Number=SeqID_117595
ctcggaggagaagagggattgtaaggggttgagggaatgctttctgaaaaaccatggtgggttgaaccatctccttagaccacctgtttttgctggagtacaggtgcccaggtgggaaggttatgaagcgttcacaatcatcactcaatgccttcatctccgaagaaaaccaaactgacccatcaagaccccatcccatgtataatgggcagatgccaattagctattctacgtagtcttgttcgttatttgttaagttctttttttatttt

SEQ ID NO: 51622 - DNA, 192 bp, Setaria italica
  Peptide Sequence Number=SeqID_117596
ccacaaacttcacacccacatcatgtaaccaggaagtacctcgaataaaacatcacactcaaaccaacagcacacacagtctatgtcaagtgtagtgatatgtaaattaagaacttggcactgaaatagacagggcgttccttattggtgaaccacaaacttcacacccacatcatgtaaccaggaagtacc

SEQ ID NO: 51623 - DNA, 285 bp, Setaria italica
  Peptide Sequence Number=SeqID_117597
cggaaatgctgcggagaagaaacgggacgaggcggcggaggaggaagagggggagggtgacctggccgccgtactggaggacgacgtaggggtcgctggtgtgggtgagcgggtcgcagatggccaggttgttgccccgcaccacgcggacgttgagcttcccgatcacctcctccttggacgccgacgccgccatcccgctcggttcggtggtgagtgggggagctgaggaatggggacaagtcaagtcgatgcggggcggagactccgacgctggggaaggga

SEQ ID NO: 51624 - DNA, 447 bp, Setaria italica
  misc_feature (17)..(17): n is a, c, g, or t
  Peptide Sequence Number=SeqID_117598
ggcttcacgattatctnttttaataatgtaacaatttatatgtctattaggtacaatcctgttcttgaatctgttgttacttatactgaagatttagcatacaacaagcaaagaggcagatgacttgctggcacaaggaaaatatcttggtatataactaatcagcctgtgatttcaaaatattatcttcacttttaagtgtatctttggtctatctttttcactttgctttcattggaaatatctcagtacatgttattgcagagtccataatttcacatttactttattctcatgtgactattagcctgactgcctgagaatctgtggagaaaaatgttaacaagtgccttttttcctccaaatggctaactatgcatgtttttctccgtaggtctaattatgattatttcggttatttctaaacttactaagtttatttacttt

SEQ ID NO: 51625 - DNA, 401 bp, Setaria italica
  Peptide Sequence Number=SeqID_117599
tgatccatttctatgtcgaccatcacaaaactcaccgttggctatcttgatgacgctgaaatggagacccaggttgttgatgttctttcctctaaagcgtgaaggacatgacgatgactatgaggcgcaagaccaatggccagtagagcttcgtcgtgcacggttgatcccagcagttgactatatacaggcgcagcgagcacggggcaagctgatccacgaagtcagagatagcttcactgttgacgcgttcatcggcaacgtgaccgactgggagcgcgtctgtctcggaaaccttgttggtatgccggtagtcgtggtgccaacgggcttgaagaccattgaggacccaccgaaaggttggcactaaggtagtaagtaacctaccgttgacgacaggc

SEQ ID NO: 51626 - DNA, 222 bp, Setaria italica
  Peptide Sequence Number=SeqID_117600
ttacctaaagttaacgtaagtacttaccccgtaagatgctgcgcgccatcaacgagtacggggtcacctacctgccgctcgtgccgcccatcctcgtcgccatggtggcgcaccccaagccgctgccgctcggccagttgcgcaaggtgctctccggcggctctcctctgcagagtccgtggacgcgccgatggccgtgctctccgtgagcccgtacccctg

SEQ ID NO: 51627 - DNA, 304 bp, Setaria italica
  Peptide Sequence Number=SeqID_117601
gctgttgttgtgaagagctccctcatggcccaccagagcctgcatctgcctcaaggaggctgcctgggcagtggattggtggcgcttctaggttgccaccacaggaaaatagatcgatagacaactcgccattccgttcaatgcacatccctcggatgtaactcagcgatggcaaggcctaagttaatagtacagacctggaaaccctgttggttgtaagaagcagaaacactgttgtaagaaagtccggtcggatggtaaaccttgagataaaatgttttcaccttgggtcattttcttcagc

SEQ ID NO: 51628 - DNA, 283 bp, Setaria italica
  Peptide Sequence Number=SeqID_117602
ctggaacacctaggatcccaagtgttcctccaatggcaccacaattcgtaagagcacatggcaacataaatgatcaactccagcagagttctagcttatttgctgggtcacagcgatcaggaggcatgcatccattgggagctggcgggtctgctgtggcatgcatccattgggagctggcgggtctgctgtggcacctccggataacacctctttttgcctgttcccaccggcttcatcgggccctagtacaatggtttcctctgccatcctcagtctccat

SEQ ID NO: 51629 - DNA, 359 bp, Setaria italica
  Peptide Sequence Number=SeqID_117603
tcttggtaactaccttaggtattccctaagttgtttccttcctaattggtctacctactaatttcgttaagagcacatggcaacataaatgatcaactccagcagagttctagcttatttgctgggtcacagcgatcaggaggcatgcatccattgggagctggcgggtctgctgtggcacctccggataacacctctttttgcctgttcccaccggcttcatcgggccctagtacaatggagactgaggatggcagaggaaaccagttctacgcctggggagagggaccgcctcgctccttacccgctggtgtccgtgaataatgaaggtacctggtggagctcttcacaacacagca

SEQ ID NO: 51630 - DNA, 239 bp, Setaria italica
  Peptide Sequence Number=SeqID_117604
ttgtgatcatcatctctgcaaatctgtaacgatgacactgtgacagtaatagttgaccaaatttctgttgtccttttctgcagagcggtgaagcgcgtgaactgcttccaccgtgatggcttcggcgccggcgactgcaacccgtcggggagcacctacatggtggtgttcggcctcttccagctccttctctcgcagctccccagcctccacaacatcgcctggctctccgtcgtcgc

SEQ ID NO: 51631 - DNA, 320 bp, Setaria italica
  Peptide Sequence Number=SeqID_117605
ggtattttccccaccctacgcatgtcattatacggcatgttcttaatcaatatgatcttccatataccgatgaaacccatattgtccatcttttggccttcagattctaaagtttgcaatgtcacttcatccaaaaacatagcaaagcaaactgtcttctttgagaggcttgtaatcgttttgccgaatggagtcctcaggcgatcggaatttccaaagatgcaggatgatacagcaatgtggcatttgctcatgtactttcggttctattctattcttgtattattattctaaaacctagtttgtcttttgtttacctt

SEQ ID NO: 51632 - DNA, 141 bp, Setaria italica
  Peptide Sequence Number=SeqID_117606
agaatattgggaaccgagatttgctggccaccaaagtctggaagaaagagaggaatcatacaaagcccgtgaccaacagttgcaatgtggcatttgctcatgtactttcggtcatcatctgatatatcaaaaccagtgctt

SEQ ID NO: 51633 - DNA, 373 bp, Setaria italica
  Peptide Sequence Number=SeqID_117607
actttaaaacggaaagaaaacaaagaagaagaaaccaaaactaactaagaaaactacctaagtaccgacctttgtcaactgcaaaaaatgaaaggcaggaactggcctgcaggattggacagtaacaagggtaggatcacttgcattatgtaaagtataaactcctcgacatggacagccttgtgaatagctgagctatatcaaaagtacagtccctgatctccctttcttccgcccctatcaagtatgtgtcatcttgttagctgtggaccactgtgtctctcttctgatcgatgatggaatagctttgctatcgatcgcctctcacaatccttaaacatattgaggcgaaatggcttgtcaggattcgtcc

SEQ ID NO: 51634 - DNA, 236 bp, Setaria italica
  Peptide Sequence Number=SeqID_117608
acatagctcggaagcagcttgttgggatctgatgggttgaaccttgtcagtccatctgcttggtaaaactcaaattgctgatcaatgattgtatgattgaacttattcagctttttgttctgtgctacttcctcccaaacacaatgccgatcatagtgattggaaatagcatattcataaccaagcctctcaaagaagacagtttgctttgctatgtttttggatgaagtgacatt

SEQ ID NO: 51635 - DNA, 268 bp, Setaria italica
  Peptide Sequence Number=SeqID_117609
cgtggtatgagcctgtcataatcaccattgaaatgaaaaaattctgatcagagttacgaaatgtccagtgaccagtagtttgctagttttgctctgtatcatgtgtagtcacttacttgcctatttcaggtactacaattcactcccacctataagcaaggcatatgggacgttgtgtttctttaccaccgtcctggttcagcttcggatactggacccaaaatttattgccttatattaccctgggtgttcaagaactttgagatat

SEQ ID NO: 51636 - DNA, 329 bp, Setaria italica
  Peptide Sequence Number=SeqID_117610
caatggccatggccaggtacctggtgcccattccgatgggcgtctggccctggggaccttcccagaatggggcttccccatctccaactagacgccagtagcccgttcgcaaagattcagcctgctcctcagtgcaattctgtaggagagcttctaccctgaagttgataccaagagaacccaagaattgagattgagtaattggtccatggactgagatatcatctgaagcttcctgagcagagtgcctgattgaagcaaagtccacatattagatgaccctggctctgctgatcttagtgcctattgttacgtaacttttagtacta

SEQ ID NO: 51637 - DNA, 381 bp, Setaria italica
  misc_feature (363)..(363): n is a, c, g, or t
  Peptide Sequence Number=SeqID_117611
caaagaaaagacaaagaagtaccaagaaggttactaggaagaacgaacagagatcatcgtagggttgttgataagaacaaagaaaccatcaaggaggaggaagtcctaaagaagagaaatggaaaggaaattgagaaagaaactttggtggaaactagggagaagagaagaagtctattcagttctactgggccaaatgtttatatcgcagggggatgtcaaaccatcctcagtcacaaatgaagccttggataactctgctgccaccttagatgatggtgtgaatgcagctaaagttgcagctatgaaagctgccgaattagtgaataggaacattgcagcatttggtgctggaactgggcncctatccactgatcagaa

SEQ ID NO: 51638 - DNA, 258 bp, Setaria italica
  Peptide Sequence Number=SeqID_117612
aggtataaatgaaagaaagcaagatcccctcatgcctatcaaaggaatgatgttggagaatacaacaaatatacagatgcaagaaagcaagagtccagattggagctaccgtcctgctaaacgtcctctttgcagggcctatatcaggagcgtccatgaacccggcgaggaccctgggcccggcgatcgtcgccggccgctacgccggcatctgggtgtacttcgccgggcccatcttggggacggtggccggcgcgt

SEQ ID NO: 51639 - DNA, 291 bp, Setaria italica
  Peptide Sequence Number=SeqID_117613
tttgttaaagttctttttgggtttaaaaagttggtaaggtacttggtagtagtctaccttaaaacatgaacggtatgatgtccatgagacagatgaggaacgtcttgctgatcgagatgctcgtgtcccagaagaacaatggaaatgtcttgtagcatattggggcactgagaaggccaaggctgcaagtgctcgctgtagagctttgcgagcaaggcaacctgttcataaacatagagcagggtcgaagagttatgcgcggatacgcgaggaggagagaacaaaaaaacg

SEQ ID NO: 51640 - DNA, 312 bp, Setaria italica
  Peptide Sequence Number=SeqID_117614
gttcatttaaccccgaagtccttttggataaataggctgaaaaagcaccaatacaaaccaattggacatttattagactacatacacattatacagctgttacacagtaatgccttctctcgaattttgtagggtatacaatctttccttctatggctctaccttactgaaatttgacaatggtgtacggattataatactttagctatagtcccaaaaagattaaatcaaatccacatcgcaaccgaacaagaaaccaataataacaaattaccaagaacaatactagacaaattactttagtaggttaca

SEQ ID NO: 51641 - DNA, 142 bp, Setaria italica
  Peptide Sequence Number=SeqID_117615
agaatttcaattctacacccaagagtccgctgtacaattgaaatctccacaaagtatcactggagcatcattccacatcttagatacagtgtaagctctatcaagaagtgtaatgatgctccagcggactcttgggtgtaga

SEQ ID NO: 51642 - DNA, 389 bp, Setaria italica
  Peptide Sequence Number=SeqID_117616
tttgtttactttactttatttggttcttagttactttgtttattctattgtttggtgttcctttccagtacacactcagcaggatattgcttgctaggttggagtacctaagagaaacttttcagataaaggagggtgacttcctgacatttgatgctttgaggcaagcagcccaatgtgttggccgcgtgattcgctctaaagctgactatggaatgatgatatttgctgacaagaggtacagtcggcatgataaacggtctaagttgcctgggtggatactgtcacacttgcatgatgctcacctaaacctgagcactgatatggctctgcatatagctcgagagttcctccggaggatggcgcagccatacgacaagacagggagc

SEQ ID NO: 51643 - DNA, 239 bp, Setaria italica
  Peptide Sequence Number=SeqID_117617
cacgaaatgggaattctgcaggacatcatgcaatataaattagtattcatcgaaaccccagatgtcgtcgagacaactttggctcttgataactacagaaaggcgtgcgactgtggaagaggtgctgttttcttctctgttgccaggtcggttcacgctatattattttccaatcagaaagttatcttcagaatttgctatgtgttcatgttcaatatcagtatgatgacaatataaga

SEQ ID NO: 51644 - DNA, 446 bp, Setaria italica
  Peptide Sequence Number=SeqID_117618
tgtgtgatgaccaaaagattacatgtatttcttgcttagaaaaatacgaaggttacttgccctgacatactttggttttttgttgtattttaaggactcgatgaagttcgtccagcaagtggttttggaagattttagcaaggtgaagggcattccttccgattgttcagaggtcatggtatggcacgtcgattcgaccgcccttcttcctcttcttagcaaccatctctggagaacaagagaagatagaaagggtgatcatagaagaggtaaatggacgagctagaggacggccccagagtggtgtacattgtacatgcatagctacactatcgaggtgctggttgtcctcaagctgcaaagaaggaaattttgggtttctcaccaggggaatcgatcaacctctgaccccacttctccatcatattgtacaattttcactattt

SEQ ID NO: 51645 - DNA, 367 bp, Setaria italica
  Peptide Sequence Number=SeqID_117619
cgttggatgcaacggccgctgcatgagcgctcctctcgccgccctatcaagaaaaaatctttcttgctcgtgctcgtgtcaatttccagattttctgacacgtttcttttttggaagccgatgtgccgccagctgcaacttgcagaaatggctctgcctgcagcgcgttcggcgcgtggccggtggcgacgatggcgcgggacgcgaggaaggtcgtggtccggggccccgcgtgcagctcgtccgcggtcaccggctggttctccctggacttcagcaacggcacggcggcctccgcgacgacggcgaggccccccgaggtggacgcccacggcttcgccttcaacagctccgtgctctgggcccg

SEQ ID NO: 51646 - DNA, 249 bp, Setaria italica
  Peptide Sequence Number=SeqID_117620
tacataatacccccttgatgtgtctctcaaagctgtaatggattagaaggcaagctaaaaaatccagttaacaatgatgatacacaattacgtacacattgtgctctttcctcttcagaagttactcaaatgcaagaaagtccaattcgcaaaaggaaagacacttgtgctaacaagcatgcttcaggaacacacaaagtatggccctgttgttgctgatccctgaaaccactcattacgaacaagcta

SEQ ID NO: 51647 - DNA, 392 bp, Setaria italica
  Peptide Sequence Number=SeqID_117621
tggggtcgaactggtggcacttgtggctgattgtttgacattgggtacattgactgtgttcgtagatttcttgaggctgcctcatagctcccaaaattgttatattgaaatcctctgttcggcacaacctggctttctggaacaaagtgcgtgcctggtggaaaggactgagatccattgagagcaccattgtgcaatgcccacatttaacggtcacgatgttgtaggagcaattgtttggcacattcacagttgatagttgatgtcacactctcctatctttcagcgcaacatcatcgatagatcgcacgcatacatacacaaaactagctagatcccccacctgcgcaaacatcaagaaagtggatctgctggtcatgcattttcccctt

SEQ ID NO: 51648 - DNA, 297 bp, Setaria italica
  misc_feature (1)..(1): n is a, c, g, or t
  Peptide Sequence Number=SeqID_117622
ncttttttagttttttttttttaacttagccccttggtgcacaaatctttttcatttatttagcaatatacaccatcatctccaatgacatgcatgcaggagatgcacgcgcacacaactagcactactagaaatatgagcatttgtcctcgaccttagtaccggttgaggatgaatactcatatttctagtagtgacgtacactcacttaaacttacagaaacctcggtagatcggatacacatatagcacgcagctctaattttatataattaagctgatgatgaagagttcttc

SEQ ID NO: 51649 - DNA, 384 bp, Setaria italica
  Peptide Sequence Number=SeqID_117623
cgtcaccggcaagggcccgctcgagaacctggccgaccacctcgccgacccagtcaacaacaacgcctgggcctacgccaccaacttcgtccccggcaactaagctcgccattcgcctctgcaactccattgtcttccggccgggaggggcgtacgtggattggttgatgctgcaagcgagctgccgcatgcgtgtcttgtttcacgttgcatttcaggggcaagtcgagatgatgagtcggcgttgtacactaagatgatgtttgtgcaatagtagtggttttgttccctggtggttaacctttgattttgtcttgtatttaagggtctattcttcttttaatttttgttttactttgtttctttacttaactttcttaaaaa

SEQ ID NO: 51650 - DNA, 329 bp, Setaria italica
  Peptide Sequence Number=SeqID_117624
gaacacatcaattccttctcggttgaaccctcgtaatttacatggtacaaactgaaaccagtgcgcgctcacatccggacaccctacagatcgaacggtgtggcaccgacgcctcacttgccgggcacgaagttggtggcgtaggcccaggcaactaagctcgccattcgcctctgcaactccattgtcttccggccgggaggggcgtacgtggattggttgatgctgcaagcgagctgccgcatgcgtgtcttgtttcacgttgcatttcaggggcaagtcgagatgatgagtcggcgttgtacactaagatgatgtttgtgcaatag

SEQ ID NO: 51651 - DNA, 251 bp, Setaria italica
  Peptide Sequence Number=SeqID_117625
ctaagctcgccattcgcctctgcaactccattgtcttccggccgggaggggcgtacgtggattggttgatgctgcaagcgagctgccgcatgcgtgtcttgtttcacgttgcatttcaggggcaagtcgagatgatgagtcggcgttgtacactaagatgatgtttgtgcaatagtagtggttttgttccctggtggttaacctttgatttgtctaattaagagatgcccttaatcagacaaatcaaagga

SEQ ID NO: 51652 - DNA, 147 bp, Setaria italica
  Peptide Sequence Number=SeqID_117626
atgagtcggcgttgtacactaagatgcaacgtgaaacaagacacgcatgctgcaagcgagctgccgcatgcgtgtcttgtttcacgttgcatttcaggggcaagtcgagatgatgagtcggcgttgtacacaaacatcatcttagtg

SEQ ID NO: 51653 - DNA, 488 bp, Setaria italica
  Peptide Sequence Number=SeqID_117627
ctttaggggtgggtccacttgaagcatgtgtgcaagtaccccaagctgtcccttttcagtaaagagcacaattcttttcttcatttgccatatcaacaaatatgtcatgagaaaagccaacctccaaacttgccatggatgccagaaccacctttggattatcccctaaattgtcaagctcttctttgttaattatcaccgtgacctttcttaacaagaaggcctctacactgtcttcaaaagattttgcaacctcaccacccatccattcaaaaagactcctgacatagtcgatagtacttgtagaaacatttgttagaaagtagatagggtacaccaaatccctttcaacccagtactacaacatatcaagtaaaaaagttagcacgttattgaaataataggagtcaatccaactaaaaataggagatttcaccttatccaatatcaaaagaagttccaacactctaccagctgtatcaacagga

SEQ ID NO: 51654 - DNA, 248 bp, Setaria italica
  Peptide Sequence Number=SeqID_117628
taaagtttaaacaaaataacgtaaaataaaataacaaatacaaggaatacgatagacctcaccaaagtcatcccattcggcagtattttcaaagaagggaaacattggagcaacactggttgaaggagggacaaatccatcaatgaaaatatcattgctcccaccaaaatgtgaaccagccttggtggatttacgagatgagcttgaatcaatgagcattgggtctgaagcctttgcatttgatccat

SEQ ID NO: 51655 - DNA, 212 bp, Setaria italica
  Peptide Sequence Number=SeqID_117629
ctttggaacttagtaattccttcttaactgtgttatgacacttgttattgcagtgggttgaagaaccaacacttcttggttcactcgtttttgaatatgcaaaccttttccacacaattacagactggtacagtgcatatgttagttccagagttacagatttaccaaaccgtcctaatgtagttttcgtggatggccattgcaaggtatga

SEQ ID NO: 51656 - DNA, 504 bp, Setaria italica
  misc_feature (227)..(227): n is a, c, g, or t
  Peptide Sequence Number=SeqID_117630
ggatcagcctggccctagaagcaagatctagtctactgggatcacacatgtcaggcgggtttgtccagtccactttcagaaatccagagtaggctaggctaaggccattttaatgcatatttggataactcaggctgttgtgacagcagaaaatctttgcacagtagtcttgatggtagacgattcaacagaagagatagcttaagtaccagccatttatcatttanattttgcttggttgcccacaggtgctgcttacaacaccaaccacgccaacagagaggatgatagaaattgcaaaagcttcagaaggatttctttatcttgtgagtgctgttggagttacaggtgcacgttcaaacgtaaacttacgtgtggaacatcttcttagggagatcaagaaggttacaagacaaaacctagtaagactagttaggttttaggtagtaatacaaaactaaccaaagaaagaacaaataagtaagaaaaaacaaaggtaagaaa

SEQ ID NO: 51657 - DNA, 414 bp, Setaria italica
  Peptide Sequence Number=SeqID_117631
ctcttcacatactacaacccaattctgaagcgtggggtgcgaaacttcatggctactatcagacaagttggtgtaaatggtaaatttgcttacatagcgagtcatgcagactattgttgttttatacattgttactataagatgtttcttattcttgcatcttctgcatatcgtaaacatgatttacacttgattcagacattttgttggttctgtcagtcagattcagatctgttgatttacactatatgttgtaggacttgtagtacctgatcttcctttggaggaggcactgttgctgaggagtgaggccattatgcacaacatagagctggttcatcctcactctcatcttttcatgtactgctcacacaaaatttgttgtattttgcatagttgtgttgttattcttgt

SEQ ID NO: 51658 - DNA, 463 bp, Setaria italica
  Peptide Sequence Number=SeqID_117632
ggggactgcattatcaaacctaatggagtaacctatcaaatttagtttttcacagttagtttagttgaagttgtattcgtggaccataacatgcattgtttatttatgccgcatatgtgctcttgctttatttcttaactaattcaatttatataagacttagcagatccctttttaagcttcttatgagactatatgaaacagaaatagttactcttgtctcactactacacaggtcgctgactaccttgttccaaacatcagagaaatccctagcaaccaatcaatgaagccaacttacattcgctttctcacaggcttgaaagcctactcaagaattttttcaagacttgcttttggtgctcgaagaaacaagtatgttactgaggattagttgtccctgttgccagcttccaagttaaagtgactaggaacaattttttcgtgtctatgttgagtcatt

SEQ ID NO: 51659 - DNA, 377 bp, Setaria italica
  Peptide Sequence Number=SeqID_117633
tcaagtcaatgacttcatggaaaatgtctcgtaacaggccagacactttccatgaagtcattgacttgattaaaaagagaagtgatgaacaccatgcttcaagagagccactccaaatgcggaagaagctgcctgaaccaatcaagcagttgaatccaaaattcgaagagaattacataaagggtcttgattatgatcctgatcgagatagggcacaaaggaagaagatgaacaaacgcctcaagagtgagaagaaggggcagcgcgtgagctgcgcaaagataatcatttcctctatgctgtgaaggagaaagagaggattaagcaagagcaagagaaagctgagcagttgggaaaaaacctagcgttcctccaag

SEQ ID NO: 51660 - DNA, 324 bp, Setaria italica
  Peptide Sequence Number=SeqID_117634
tcctgagagtatggtctctatttcccctgctccgacttccgccacgttgtagcaactccaatgcttctacttatgtgcggaatatctgatgcgatgccctatccaatctggtcgagatgttgctgttggtctttcttgtgttccatggtgctttgtggctactaaagaatcaaagaagttctgtcctgaagctattgcttttctgcaatctcttttggtaacatctcttaaaggaaaagtaggaactcatctgcacaatcagatcaattgtattctaattttattggtaacttcttaagttacttactttaaaccttatttgtt

SEQ ID NO: 51661 - DNA, 257 bp, Setaria italica
  Peptide Sequence Number=SeqID_117635
attctggctgttttcatggacaacctgcatgtttacactgtggaattggtactttttcagttcgctatactaaagtagcatatattttgttatcttattacatgtcaggcaaagtcggacacatatgaaaaactggtgaaagaaatggtgatggatcaacgtgcccgtccatcagacaggactaaaaccccagaggaaatagcaaaagaagagaaagagcgtcttgagaagttggaggaggagcgccaaaaaagatg

SEQ ID NO: 51662 - DNA, 313 bp, Setaria italica
  Peptide Sequence Number=SeqID_117636
tgttcgtaaggtagtagggtaagtaggtattgtagtctattctttgttagtattaagttagacagcaactttgcatcgttggcccagacacaggcgttattgtccttgacagagtcagctaaggttaaggtgaacaaaagcgattcaagtgctggcttgacagggaaggagatttttaccaaggcaaagtcggacacatatgaaaaaactggtgaaagaaatggtgatggatcaacgtgcccgtccatcagacaggactaaaaccccagaggaaatagcaaaagaagagaaagagcgtacttgagaagttgga

SEQ ID NO: 51663 - DNA, 257 bp, Setaria italica
  Peptide Sequence Number=SeqID_117637
agattctcgacggtcccgtagcccaagaaatgcatcacgctctcaaagtaaaggatactataatgaaaggcatctagatggccgattgcatgacagtatgcccaagttttcaaaaggatctccacaaggtagggggctcaggcacattggtctcatcatctattgtatgagcattaggagccagaaaaaacacaatttgagctaaagaaatcctttggtccgtttctgttggttattgccgtgctagtgtatacttg

SEQ ID NO: 51664 - DNA, 320 bp, Setaria italica
  Peptide Sequence Number=SeqID_117638
atgtgagttaaggacttctatgctcaaaagggtcacttgtttcttcggttgttggtggaatgagacatgaccgccgcagaaacaagtgacccttttgagcatgtgagttaaggacttctatttattgttatttttgttagcacaatctctttgaagaccttaaataatccttttcatttcagctggtagcaactatcaccgatcagagtcatctttgtccattgccccttactgttcaacctatcatatggaattatgatcattgccttcggctgtatccaactcctcacgcaatagtattgggtgacaagagcgagcag

SEQ ID NO: 51665 - DNA, 355 bp, Setaria italica
  Peptide Sequence Number=SeqID_117639
ctgcacagctgtatctgttttccccgtaccaggaggaccaacagatacagctgtgcagatattaaatgttctatatcataactgtccttcgcaaaggacactgattataacccattcgaatcaggctttgaatgacttgtttgagaagataatgcagagggatgtgcctgctaggtaccttctccgccttggtcagggcgagcaagagcttgccactgatcttgattttagccgtcaaggtcgtgttaatgctatgcttgtccgacggctagagctgctaggtgaagtttctaaattggcgagatctcttcgccttccagaagatgtgggttacacatgtgaaactgctgcatat

SEQ ID NO: 51666 - DNA, 450 bp, Setaria italica
  Peptide Sequence Number=SeqID_117640
aagggaaataatgaaaagcatattgagaactaaaaataaaacccatgcatcgagcacttaccagctttcgtaggagtcttctgtaaggtttgatagattatttgctaggagaataatattttgaccagccactttaagatttcccataactgtatcaatatcaaaagtgctgattaacataccactatggaaatttataaatatatgcccatcaaaaacaaaatagtatattcagcttaggtaaaatagcagtgctaaaacacacaatgtttactagggcagaaaataaaacaaattgtgtatctgaacagacacatatcaaagatagttgttatttgatgcaagatatagctgtctactggacgtccaagactctgatctgttaagtgtgggcaccagtactatatgaggttaggcatccaatccctgtttagacgtgtgctagcacac

SEQ ID NO: 51667 - DNA, 433 bp, Setaria italica
  Peptide Sequence Number=SeqID_117641
ttatgagcctgagcattggaaatttggggaatcaggaaacaagtatttccgacatgctaccggtcaattatatgctatttcgaaagatctagcaacctacatatctataaataagtgagagaacatgtgatttttcttttctccaagtacagtccagtttcgatccttttcactgacttagttgccactaatcaaactgcaccaggcatatcctgcacaagtatataaatgaggatgtttcactgggttcttggttcatcgggttagatgttgagcatatcgatgacaaaagactttgttgtggtactccacctgattgcgaatggaaagctcaggcggggaacattgcgccgcgtcattcgactggagatgcagcggcatctgcaatccgagggaggatcgtgggaagtggcacaataagtgcgccgagggt

SEQ ID NO: 51668 - DNA, 384 bp, Setaria italica
  misc_feature (44)..(44): n is a, c, g, or t
  Peptide Sequence Number=SeqID_117642
atttctaaaagaacttaggcaacctacatatcaataacaagcangtttttgcacaagtacatcaacgaggatgttctttgggagcttggtttgatagggttaggatgttgagcatattgatgaccgcagactatgctgcggcactccacctgattgcgaatggaaagctcagcggggaacacctgtgcagcctcgttcgattggaagtgcagtggtatctgcaactctgtgcagaacatctggggggtccatacgaggtgttcagaaggtgaaaaggcgctgttgactgctgctttctaatcagagcgagtgatttgagatctacagggttcatcaacaagactggaaggtgctctgttgtgtacttagatcgagcgcattgta

SEQ ID NO: 51669 - DNA, 317 bp, Setaria italica
  Peptide Sequence Number=SeqID_117643
gggagcttggttggataggggttagatgttgagcatattgatgaccgcagactatgctgcggcactccacctgattgcgaatggaaagctcaggcggggaacacctgtgcagcctcgttcgattggaagtgcagtggtatctgcaactctgtgcagaacatctggggggtccatacgaggtgttcagaaggtgaaaaggcgctgttgactgctgctttctaatcagagcgagtgatttgagatctacagggttcattctaactaagtacttggtaaggttgttctttctttgttttgtttgtacttagatcgagcgc

SEQ ID NO: 51670 - DNA, 163 bp, Setaria italica
  Peptide Sequence Number=SeqID_117644
ggattccatgggaggttttgtctagcttcgtgatgatgcagctagacgattgctattaagctgaatgtggacgctacctgaggcgagcgagattgctagaccaaatgcaaaagtagaggaaggcaacatgccagttgctgcagagtgtggttctaaaaaggtc

SEQ ID NO: 51671 - DNA, 386 bp, Setaria italica
  Peptide Sequence Number=SeqID_117645
tggtgatgaaaagtagactcaaaatgttactcttgacagatttgttgttaaacaatgtaaagctaagaagatatcggtaaggaagaatcgccctttagtccttcagtacgaacgcttgtggtagttacaagatgaagtctatatatactttggttatttgcatattataaatataggcctccattttgcgtttcgcaccagggccaccgaaacttaggtacgggcctgctaatagcttattaagagagtgaaggcaagttgccttgtatacctgcatgaaattgtaacgttctcttccaatagattcgttctcagcaatggcaaagtacgccaacattggatagtgcccaatataagaggcatagctgtccctctggatgttcaca

SEQ ID NO: 51672 - DNA, 239 bp, Setaria italica
  Peptide Sequence Number=SeqID_117646
acaaccatggcttggcctcagggttgggtcgcttagggctgaaaaacggagtatctgtgaagaaatacgcaatagatttccacaagcacatggcatttatgtggagatggtgaatattttttacatgcattcgattttttccaatattctccattcttctgttgctaatccattttcttgtgcatttgttttctgctcatatgatgattgctggactgtttctgaggcaggaatgctcc

SEQ ID NO: 51673 - DNA, 245 bp, Setaria italica
  Peptide Sequence Number=SeqID_117647
aaacacaacttgctaccctgaggtatctaacaaaagtaggagggatgagaagcgcagcataagcaaataaatttaaattggagtaatatctaccaagctcagaaatacagagctgtccgcaaaggaactgacctgatatgcaagcatagttcgctgagcatccggtgttgttaggacaatgacagttccagtagtcccatctttgaccggcttagacaagaaatgcacattagcacgacgcaatt

SEQ ID NO: 51674 - DNA, 216 bp, Setaria italica
  Peptide Sequence Number=SeqID_117648
gaagcaatatacatccctccgccaccctgcttgcctgtggacacctgtggcgccggcgatgcatacgcttctgggattctgtatggcatcctccggggtgcttcagacctgaaaggcatcggcctgctggcctcacgcgtgccttgctgcccgacaacaacagcagctacccgtgaggccagcaggccgatgcctttcaaggtaactaaagaaaaa

SEQ ID NO: 51675 - DNA, 378 bp, Setaria italica
  Peptide Sequence Number=SeqID_117649
cattctttggttgttctgtcgtacagtgcttgtctgcagtttgccagtgtcctgttggatacaaaatatatgacctagcctttgcacaaacattctaatcctcaattttgtacaaatggcgtgtcccacgccttccctttcattacttttactactgcctatgataactaatagactataaatcttgaagcaggcaatgatctactgaaatcagttcttactgaagcagcccatcaccttcccaaccaagacgtagcatctgatccactaccttcaagctcaaagctggatcagtgaagactattagctgcttatcagcagtagaaactagaagtatttgtgtttctctttgttcagagcaattgctgtgatgtcctg

SEQ ID NO: 51676 - DNA, 423 bp, Setaria italica
  Peptide Sequence Number=SeqID_117650
agtgtggccagtaaggcgtgcacctaggctcgtagccaatgtggcgaacagcagcacgagcataggtgtccgcagaaggaaccgtgaaggaggatttccggatggatgccatctttgtcgcaacatacaggggcacctggcactgcacatcaatacccttgctcttgtactcaacatagagacatcttgagaattggtcgacatacgctttggtggcggcgtagacggagtacagcggatcagagggcgcgacggaggcggcgccggagccgatgttgacgattgcgccgcgcttcctctcgaccatgccggggagcacggcgtgggtgacccgcgtgacgccctcgacgttgacccggatcaggctgcgcaatacaagactacctacgtaccaacctacgtaggaaagtaagacgggacgta

SEQ ID NO: 51677 - DNA, 340 bp, Setaria italica
  misc_feature (4)..(4): n is a, c, g, or t
  Peptide Sequence Number=SeqID_117651
tggngatcaagaaccacatgacggagtgtggccagtaaggcgtgcacctaggctcgtagccaatgtggcgaacagcagcacgagcataggtgtccgcagaaggaaccatgaaggaggatttccggatggatgccatctttgttgcaacatacaggggcacctggcactgcacatcaatacccttgctcttgtactcaacatagagacatcttgagaattggtcgacatacgctttggtggcggacgtaagaacggaagtaacaaagaacggaaataacaaagaaagggaaacaaaacgaaaacggaaaaggaaacggaaacgaaaccggaaaagaaacaa

SEQ ID NO: 51678 - DNA, 194 bp, Setaria italica
  Peptide Sequence Number=SeqID_117652
ccaacatatcagtggcttactgtgctgtctcagttgatctctcgcatctgtcaccaaaatgatgatgttgtcagaattgtcaaatatatcatcacgtctgttttacgggaataccctcaacaagctctgtggatgatgactcccacgtcgacatcctttctttgctgattgtaatatttctgcagcagcatccc

SEQ ID NO: 51679 - DNA, 420 bp, Setaria italica
  Peptide Sequence Number=SeqID_117653
agaccaaagttaggaaagaaaaccaaagcaacgaactggcaagacaactagaaaagacaacaagggaagaacaaataaagacaaagggaactccgattcttgttcctacagttggaaacaaaaatgcaactgcagagaaggtgagagataaacaaagagaactgcaagatcttgaagctaccccacaaggagttaatggaactgagttcaaagcgtctggaggaaattaggagactgcacaaagagagaattgaaactttgaacaagttagcaacttttcagaatatactgacagatttcaaaagcattcgttcttccaaagcttttcagcttgttaatgatcaacttcagaagtctcaagcagagttggatgatcaccgaacattgttagagaaattacaggttgatatggatagcttt

SEQ ID NO: 51680 - DNA, 435 bp, Setaria italica
  Peptide Sequence Number=SeqID_117654
agattgctgaattagggcagaagctggaaacttctaggagagatctagtgagactatctcatatactgaagtctaaatatgaagaatgcgaagcatatgtggtggagattgaggtgtggacacctttccattccgggttattgattatcaatattatattttcaggtctcaatttttttttattacagagcataggcaatgcatatgaggacataatgtcacaaaaatcaacaattgctacagcagattattgaaagagatgatcataataccaagcttttcatggagggtgttaaagcaaaacagtcccatgatgctttgcatttggaagtgagctccttgaaacgaaatttgcagcatgcaagcatgttgatggatctgtacaacaagaaaattgtccgcctaagaaagaaccaagacttaaaggggtttagt

SEQ ID NO: 51681 - DNA, 329 bp, Setaria italica
  Peptide Sequence Number=SeqID_117655
ctgaatgggctcgagtccacgtgctaaaaatactctcttaatgaaagtaaattagagcaacgtgtaattgcagccaatgaagctgaagcaatgtctcagcagagactagcaactgctgaagctgagattgctgaactaagtcagaagctggaagcttctaggagactgttgaaatagtgcggaaggcatattttcttttataaaattttcaagtaaagtgatatcaagtgctggatttctatggctcagagatctagtgagactatcttgattactacttgtaagttcttaaactattgtaagtaattgtgaagcatatgtggtagaga

SEQ ID NO: 51682 - DNA, 261 bp, Setaria italica
  Peptide Sequence Number=SeqID_117656
tattaaagtgtggtatctgtcatgataggcagaaagaggttgtgattgccaagtgctaccacctcttctgcaatcagtgcatacaggcggcgttctcccgcaccttctcccgcgcgccctcgctccgcgcgacgcccacgttctcgcgcgtcgcgtccacccgggtcggccccgcctcctcccggtccagctccaggcgccccgcgacgtacaacttccgcgatctcgacgaggaacgccacgacgacggtggcggcgacg

SEQ ID NO: 51683 - DNA, 209 bp, Setaria italica
  Peptide Sequence Number=SeqID_117657
ccaatgaagctgaagcaatgtctcagcagagactagcaactgctgaagctgagattgctgaactaagtcagaagctggaagcttctaggagtaaagtgatatcaagtgctggatttctatggctcagagatctagtgagactatctgatacactgaagtctaaacatgaagaatgtgaagcatatgtggtaaagattgagagcattggc

SEQ ID NO: 51684 - DNA, 205 bp, Setaria italica
  Peptide Sequence Number=SeqID_117658
acaaggatgcttccttacagttgcattctttgcgagcagaagttcattcactttctagtatcctaaacagaagggaacaagaaattgaagagatatcatgtaaatctggccatgctgattctgacataacccaacttcaatatctggttcgtgatctaagggaaaatgcagaggagtctttaagtcttattttgttggttaattt

SEQ ID NO: 51685 - DNA, 258 bp, Setaria italica
  Peptide Sequence Number=SeqID_117659
tcggtcggtcgttcttccttccgtacggtcggtcgtacgtccggtacgtcttggtcttccgcattcttccctccgcgccggcggccaccgccgaggctcccaccgcgccgccgccagtttacagcaccacaggagctggatcgaaggcgactccggcgactggagcggtcttgtcgcacgccggcgtagctaaatccgcggcgatctccgtgtctttcgtcgtcgcaatcgcgtccatgatggctttctgagttcagt

SEQ ID NO: 51686 - DNA, 355 bp, Setaria italica
  misc_feature (316)..(316): n is a, c, g, or t
  Peptide Sequence Number=SeqID_117660
tgtttggtctagtttccttagtctaactaggtaagttttgtttctttgtattgtttacttgggtagtagttgtactattttgtagactagttaaggttctattttcttggagttttgtttcttttggaagtcttacaagacggggctaggaagggtggagacactgtggttgataatgggctgcgtgtcgtgaggtatatgagcgataagtcgatggttattgctacaatctgcattacattgtgcttgcatgtgttgaatgggactaggctcttggtaaccgcttgagggtgtgttatgatagcttggggggttnttcaacttgcatgatctagcacattgcttgtataaaact

SEQ ID NO: 51687 - DNA, 269 bp, Setaria italica
  Peptide Sequence Number=SeqID_117661
ggaggcgcaaggcggagcggagggggccgggcggcggacggcacgaaggggggaaggagtggcaacgggttggcagttcctagcaacaggaagtttgttcttgatgttactgggagagtgacatttgagacagtaaggtcatttctggagtttgttctttggaagctacaagacggggctaggaagggtggagacactgtggttgataatgggctgcgtgtcgtgaggtatatgagcgataagtcgatggttattgctacaatctgcta

SEQ ID NO: 51688 - DNA, 384 bp, Setaria italica
  Peptide Sequence Number=SeqID_117662
ccagatcacgagttactaccatcaggattcttcttgcgcctccctgtcaattgacaattcctagattagtagctgtgtcaaaaaacgttaagtttgtgtcaataggagataaatcaaacatctaacatcatattaattgtcttaacctacccatttttcctttttacaataatcatccatcaaaggcacccatagtctctgtcttaccattagagcctctgttccaaaggacctcagagtcaattgtgctgagatggggatcatcaagcctcttccatgtcttgatggacttcactcctcgccattcaccgttgtatgtcttctcaagttgcacagacaccaccctcgctctccttgaccacccagccttcccataggcattgg

SEQ ID NO: 51689 - DNA, 357 bp, Setaria italica
  Peptide Sequence Number=SeqID_117663
acaatgataaaatggcttacggacaatctaagctggcaaacttactgcatgcgaaggagctctctagacggctcaaggaagaaggagcaaacatcacagttaacagtgttcatcctggattgatcatgaccaatttgatgaggcactcctttgttctcatgaaggtgcttcaagttgcaacttacattctgtggaaaaatgtgccccaggtttggaaccagatcttctcaattcatgtttctaaccaactctttttctagcgacgacattaaagaacattgtcactgggtgaaagtatttgaatataatattattttgtaaatactgttctgatttttttaaaaaaattctagggag

SEQ ID NO: 51690 - DNA, 353 bp, Setaria italica
  Peptide Sequence Number=SeqID_117664
taagacccaaccaaccaataaacaataacccaaaagggaaattagaacttacgaacaaaactacaaacgaatgagaaaatatacaatgataaaatggcttacggacaatctaagctggcaaacttactgcatgcgaaggagctctctagacggctcaaggaagaaggagcaaacatcacagttaacagtgttcatcctggattgatcatgaccaatttgatgaggcactcctttgttctcatgaaggtgcttcaagttgcaacttacattctgtggaaaaatgtgccccagggagcagcaactacttgttatgtaggactgaacccacagttgaggggagtgacaggaagtac

SEQ ID NO: 51691 - DNA, 381 bp, Setaria italica
  Peptide Sequence Number=SeqID_117665
caacgatgagaaaatatacaatgataaaatggcttacggacaatctaagctggcaaacttactgcatgcgaaggagctctctagacggctcaaggaagaaggagcaaacatcacagttaacagtgttcatcctggattgatcatgaccaatttgatgaggcactcctttgttctcatgaaggtgcttcaagttgcaacttacatttttcctacagaatgtaagttgcaacttgaagcaccttcatgagaacaaaggagtgcctcatcaaattgcaacttacattctgtggaaaaatgtgcccaggagcagcaactacttgttatgtaggactgaacccacagttggaggggagtgacaggaagtactttgctgactgcaac

SEQ ID NO: 51692 - DNA, 183 bp, Setaria italica
  Peptide Sequence Number=SeqID_117666
tcggtcgttcctacggtcggtagtctaggttctaccgtacggtcgttcgacgccagccgcctcaccgtcgtcatcacaggaggagctagtggcattggtctggagacatcaagagtcttcgcccttagaggagcccatgtcatcattgccgctagaaacactgaggctgcatcagaagcaagg

SEQ ID NO: 51693 - DNA, 348 bp, Setaria italica
  Peptide Sequence Number=SeqID_117667
taattaaaggtaaaaagtaaaagtaagtacttaaattactaactaatttcttgtaattttaatgaggcagagtaacagcttccagacccaaataagagatttcctatctggaaaattatcgttctgggatttcacccaatgtcgcacttgttaatccaggtgaggtcaaaacaaactaattggcatttaacttctctccaaggattttattcaacaaaacagggttggccttacccttcgatgctttcataacctggcctgcaaaaaatccttgcaacttggttttcccagcacggtactgctcaagttgctttggattgtcagcaattactttatctaccattgcct

SEQ ID NO: 51694 - DNA, 266 bp, Setaria italica
  Peptide Sequence Number=SeqID_117668
caggatagtcctttctgcggcagaattggtttgctgacaagacaaaacaaccccccggagtatgaatttgctggtttaggcgaagagccctctgcagacactgttgtttgccctggaggcagcgttatcatttctccatctggagaagtcttggcaggtcccaactatgagggagaggcgctcattacagctgaccttgatctgggagaaattataacgctgcctccagggcaaaacaacagtgtccgcagaaaaggactatcctg

SEQ ID NO: 51695 - DNA, 182 bp, Setaria italica
  Peptide Sequence Number=SeqID_117669
cttcacatagatgattatgttcaccacgtagtaagcgaccctctccttgaaggtaagccatggtatcagcaatgctcatcattcattcgtatatctagagctgctgataaagcacttctgcctcacatgaagaacattgctgataccatgtgaggcagagctgctgataaagcacttctgcc

SEQ ID NO: 51696 - DNA, 215 bp, Setaria italica
  Peptide Sequence Number=SeqID_117670
agaacacacttcgcgagtcaagtcacgtagcaacttctcttccatggaacaacttggaccttccaaccggatggattctttaaagaatctggagtcttttgcttcaagttctctcactggattcttatgcttcatgttggcacagcccttcctgcattgaggatatcagttgaagtgttcagttggacagatagtgatgctgtgactaaagttat

SEQ ID NO: 51697 - DNA, 290 bp, Setaria italica
  Peptide Sequence Number=SeqID_117671
caatttgggacggagggactacaagtttgttcgcatgaagtctaaagtatcgataaaaaaagttaagcatcttggaactcatcaaataacaaatgaagactttttttttttctttcacagatttcttatgcttcatgttggcacagcccttcctgcattgaggatatcagttgaagtgttcagttggacagatagtgatgctgtgactaaagttatccccttttgtggtgcacttattcacctcgctgttgcttcaaaccaggctgagttgaggcagtttgttgcaaagg

SEQ ID NO: 51698 - DNA, 323 bp, Setaria italica
  Peptide Sequence Number=SeqID_117672
acctgtctctcctagaaggctagcctgctccgcaacagtcatgctttttgctgctttgatttcccccgtctgagactgagcaaacggctcagcccaaagggcatgtatgcatcgcagcagccttaagagagggggcagaatccatgctagatgtgaagacattggatgcagatagccaggtgctgctgttgtggtgggtgcttgtggagttgcggtagactttttggttccactcctcttcagggccttttctaaagaatgttaactgttgttgtattaaatttgtacctactattaaattttggtcttattctagtctaaaa

SEQ ID NO: 51699 - DNA, 231 bp, Setaria italica
  Peptide Sequence Number=SeqID_117673
gtttgccactcagagatatccacaaacagtgagtagtcgtggctttatgatctttggacagggagcagttttgcattttcatattctgtctactcatgaatcctcattgtcatcccaaatgcagggaaagttacaagccttgtggctaagaaaaatgtggctttagctacaaagattgaagaggccatgaagaaaaatgagagcttggaaagctctgaacaaactaaacaa

SEQ ID NO: 51700 - DNA, 237 bp, Setaria italica
  Peptide Sequence Number=SeqID_117674
cgcaacactggagggcatagcttaggcggcagcactctgcctccagatacttactcttcatctccagatcttttacatacagcttcttcttctccctagatttcatggcagaatccctattcctcattcgtctattgaaacacaacacaaaaggcactgatattatatgttgccaaaccaagaagcaaacaaatgtatcatacatggttctctagttacccatctttcatgacaacc

SEQ ID NO: 51701 - DNA, 263 bp, Setaria italica
  Peptide Sequence Number=SeqID_117675
catagctgaggcggcggcactctgcttccaaatacttgctcttcgcctccaagtccttcacatacgtcttcttcctctcccttgatttcatggcggaatctctgttcctcatttgcctcctcttcttcttgctgacgggatcatcgccatccacctccaccgtctccgcctccggcgtcacaacccccaccactcctccttattgccgccgctcccctccccccaagaccaccacctcctccagtacctacaccacctagacc

SEQ ID NO: 51702 - DNA, 440 bp, Setaria italica
  Peptide Sequence Number=SeqID_117676
aagagtgtaaccggtgcatcctctgaaggcgcccagaagtacctacctgtatgccttctaacctgtctcatcatctgtgtgctcttgtgaaaatctgttgaatttttggacgacttcaccaagtatcctggttgaattagaggtagtgattagtgaaggaacctggttgaattaggcttaaggcaccttattaaatgcataatgttggagattcatgtatatgaattatttaggcatcctaacagatctgtataactgcattgaacagtgatgggcttggcaacactatgcttggactttgggaagaaccctgagccggaacctgggaggtgccggcgaacagatggtaaaaagtggcgatgctggagaagtactatcccaaacgagaaatactgtgagcgccatatgcatcgtggccgcaaacgtcctgtacagcttgt

SEQ ID NO: 51703 - DNA, 388 bp, Setaria italica
  Peptide Sequence Number=SeqID_117677
gcaaatgctttggcatctcttgtgttcgagatatgtgtacctccacacagctcagttgatatggataaccactctttgttctctggatctgcaagcagatcttccaccttccggccaactgagacaactcttactggatcagggtaaatttcaccgaacacagctcgtagaccatttatgcgctttgcatctgctaattttatttcactagcatatacatccagctcgtcctttatttgttggttcactattggactctaattttttcttctaaattctttctaggtcttgtaaccggtttttcctattgttagttaaaaatttcttaaatttctttcttagttcttttctttctttggttttagtttaactttatttttgtttaact

SEQ ID NO: 51704 - DNA, 351 bp, Setaria italica
  Peptide Sequence Number=SeqID_117678
acccatcagctgagtttcattgcagcaatgttgttcgcgagttccattgcctccttgagttgagaagcatcacttccctggccctgggcgacaccattcttgccaccaccacctcttcccttgagtggtgcaattgaaggtgtcagccaatccaacaccttgaagccattgggagtgttgggtggcacaccagcgtagataacagccttgttcgatgcctcatctttgctgaatagcattataggcaaacccttttggtccatgaccttgataactgcttcccgtacagcagttggtatctaagtaccctactattctaactattgtagttaactacttaaaagggttctt

SEQ ID NO: 51705 - DNA, 295 bp, Setaria italica
  Peptide Sequence Number=SeqID_117679
ttaagttaaaggtttagttactaagtacctaaattcctaactacctttgtaagtccatttgggagttgttgggtggcacaccagcgtagataacagccttgttcgatgcctcatctttgctgaatagcattataggcaaacccttttggtccatgaccttgataactgcttcccgtacagcagtggtatcaagacccacatcaacatgagtaacacaaaagggctctttttgaaagagcagcttcagctgcatccattgcagtcttgacagcctttttggatattatgttcaccc

SEQ ID NO: 51706 - DNA, 245 bp, Setaria italica
  Peptide Sequence Number=SeqID_117680
tgctctgttcacccattttcttcttggccttcctaagttgatcctccaacttggaaaccttgcctcttagatcagcttttctggcagcagggatggcagctgcatcaagcttattcttgatggaagcaattttcttctccaacatggctcccccacctttcgtttgccccccgcttctatcctctcgtcgcctctcccgcgccgaccacctgttcgacccaactccccatcctccacctgtccac

SEQ ID NO: 51707 - DNA, 235 bp, Setaria italica
  Peptide Sequence Number=SeqID_117681
gcgcaccatcaacgcggcggtcatccagggccttgttcttgggtgcagcacgacgcactgccccggacatgtaagtgtgctggctgccacatcatcattgggtcaaagtctcaaagaacacacacgtagtgaggagcacgatgcggaataatgttcctggaaacacgatgagaatgttttgctcgctgcgtgtctgattgaattgaatcgaaccccgttttgatccttttgatga

SEQ ID NO: 51708 - DNA, 235 bp, Setaria italica
  Peptide Sequence Number=SeqID_117682
tagcatgcaagaatgttcatcaaagtactcgacgcatcattgcctgccactcctttagtcttttgcaagttcttcactgatgagctctgtgctcttggccatggcggcgcgtgtttcatggtgcaggtgcgggtgtacttcccgaagcggctgtcgcagcagctggaggcggcgagggaggattacatccgggcgacggtgggggtgtggaaggagcaccgggtgctgctgccca

SEQ ID NO: 51709 - DNA, 213 bp, Setaria italica
  Peptide Sequence Number=SeqID_117683
tgtcgagggcctcaaggagttcagtgggccctacaacaccatggttgaggtgccggcgatctcccgcgaccggcgaaggcttagagaagctgaagatcggttggagactgttgatctgcggcggatgacgaacgaggagaagctcgctttctggatcaacatacacaatgcattgctgatgcatgtaatgtgtttcctcgcattacaattatg

SEQ ID NO: 51710 - DNA, 454 bp, Setaria italica
  Peptide Sequence Number=SeqID_117684
cggcggagggaggtgagcttgacgaggaggttggcgtcgaggcggaggagctcgcggacgaggtcgtagtggccgccggccgccgcccagtcgatggggcgtcgcgtaccaccactggtccccccgtgcctctcccaccgcagcggcaggaacggctccgccgacccctctgccgccggccgcgtctccatatccatgagcacccgcccagctatcgtctacaaactggggaggggattgcaccgtcaataccaaaaaattgctccttgccatggatgaggaccagagccacgccaagaacagaatcgacgcagttccgaggtggctaccgctatggtaacgcctcgatccgcagcctccggtgctcagccaagatagcagcaaggtacgcgtcctacgcctgggacggccccgacgtggtgcggcgttaccaaggcgccggccatggcttggg

SEQ ID NO: 51711 - DNA, 270 bp, Setaria italica
  Peptide Sequence Number=SeqID_117685
ttgttcgtcttattaccctagtaattaagtaagtcctagtagttgtctaaattactaattgtattcccgacaacaacgttagccatctggttcagcttgttcactgcagtttttgtatcattaagtgtaagggcaagagccttgcgctctctaaatgcattcaccacccaattcttgagagacctcttgctgaccctgttgtgctcctgtgctccttcaaaaagatccattgctttgatggcctcttccctcctcatgaatctcattaaa

SEQ ID NO: 51712 - DNA, 245 bp, Setaria italica
  Peptide Sequence Number=SeqID_117686
tcatttcctcaacaaccagctgaaatcaaggtagtgcaacgtcagtgaatgagtgcgataaagtattcagtggacaaagagcaagaagatcacaactacctgaacatcttcaatctcacaacgatcaccaacatcaaacggatgcatcacgaacaagaagacaattgcctcaaaaattgtcttcagtgtattcccaaatacgaaaactgccaagagaagctgtgaactgaggaagacaaagaaag

SEQ ID NO: 51713 - DNA, 238 bp, Setaria italica
  Peptide Sequence Number=SeqID_117687
tgacattacatgattgaggtatcagtacccactacccaattgtatcattgatctctaatcagagggtctttagtcttacctgtgttttcatatccacggagaagtacgattctgaacaagctttgaagaccatatcacagaatgacgcacatacaacaggaggtccaggcctgacacccacgcgtggatcacatattgagcattcaagcaattcccacaaatggatacattcttgacc

SEQ ID NO: 51714 - DNA, 154 bp, Setaria italica
  misc_feature (17)..(17): n is a, c, g, or t
  Peptide Sequence Number=SeqID_117688
tttgtggcaaagcacanaaagtgagtgtcacctaaaccacaaggagataaggcctgtgttttcatatccacggagaagtacgattctgaacacaggccttatctccttgtggtttaggtgacatcctttgtggcaaagcacataaatgggtttc

SEQ ID NO: 51715 - DNA, 373 bp, Setaria italica
  Peptide Sequence Number=SeqID_117689
tagaactcattttatcagtcagaaatctgtaccatttacatgttctacgtttgcttgagattgatattccatctatctgaattattttgattaaaattgtttgttatttgaacattcaatatttatcagtcaaatctttgtattttcactttccacagaataaacaatttcagatatgttgcttgttgcttaaaacatagccgatccttgccttggctaagaattgtttatgctgtacttaccatttctgttgtcatccacttcagcttgaaggaggctttcttgatgccgtttaccactctctcttcgcaaaatacactgtcaaaggattgcttcctctataccctgttacatcatcagataccttgtcttc

SEQ ID NO: 51716 - DNA, 239 bp, Setaria italica
  Peptide Sequence Number=SeqID_117690
ccatatatcccgatatatttgttcatgcctgtgatttttctccacgagctgttgacttggtcaagaagcacaaggacttcagacctgaccggataaatgcatttgtttgcgatattacatcagaacaactaaccgagagtatggaaccctcttccgctgatattgtaacaatgatctttgtgctctctgcagtcgcaccagataaaatgcctttagttctgcataatgttagaagtgta

SEQ ID NO: 51717 - DNA, 256 bp, Setaria italica
  Peptide Sequence Number=SeqID_117691
gagatattgtgcttcagccaaatatcctactatgtgctcattactgtttgattcaactgatgtgctactttcttttgtatttcagttgttgatggtgttgtcactcgttgtgacgacaatggggctggcagtcggttcccgtcaggcagaggtggttacaatggtgacaactacaggggacagggcttccggaacaatggctactacaacggtggtggtaacatgaggaacgacttcaggaaccagaacgagtatt

SEQ ID NO: 51718 - DNA, 326 bp, Setaria italica
  Peptide Sequence Number=SeqID_117692
cacattcttctcgcttggggggtgcagtgttagtagcttgagcgagaagaatgtgtctaaaaccaaatcccctgatgagccagggtattcagtttttgtcaagaatttgccttttgaagcaactgttgaaatggttgggcaagagtttagcaggtttggtgctattaaacctggtggtatacaagtcagaaaataccagcttgatcagttctgttttggcttcattgaatttgagtctcaacattccatgcaagcagcaattgaggaatctagagtttatttcggctcctgggaatcatatgttgaggaaaagaactaaacccgag

SEQ ID NO: 51719 - DNA, 302 bp, Setaria italica
  misc_feature (247)..(247): n is a, c, g, or t
  Peptide Sequence Number=SeqID_117693
aaccaaagaacggaacgaaagaaagaaagacaaccaaccaacctacttacggactagaatggccggccgccggcgatgagcaccacctgcccattacttgcttgtgtgcacgcgtacgtgttaatttgacgagtcactgcagtatgtacaaataagtcctttccggaccttcgcttgcttgtgtgagactgagaggtggggccgtgtgcggcgaggtgctcatcatgtgtacttgcttgatttttcnctgcatgtataattacgttgaataaccaggagcgacgtgtgtggctcccaagtac

SEQ ID NO: 51720 - DNA, 335 bp, Setaria italica
  Peptide Sequence Number=SeqID_117694
cggcgatgagcagcagcagcgggagcacgtcgccgagcgggccgcaccgaggcagaagcacccttcgtccctgacgctgtccaagcctcatcatgcgagcctccagcaggcggcgccggacctggagctgaagatctcgacgaccgccgactaccaggccggttcgtcgccgaggacgccgttctttggccaccaacacacacatacaccactacaccaaaagctcctcctttgatcctttccctctccaccctttcttcatcttctccatccagatgagcaaaagctcttcgagcaacggatcatcgtcgatcgcctttccggttacgtgaccc

SEQ ID NO: 51721 - DNA, 402 bp, Setaria italica
  misc_feature (196)..(196): n is a, c, g, or t
  Peptide Sequence Number=SeqID_117695
ttgtttggtatggatatggatgactatccggaagttgagaatgcagatggtattggaagaaccttagggatcaggttatcgggtcagacatggggtctgttggaatttcatcatctgattcacgtaatatagcattgaacattgctacatccaatctagctatgcattgctccataacctgttgaagggagataangtttggagttactacaagtaaaggattttatacatactccataatatttttcattctcagtgctgcaagcttgaatgaagatgcagttgcattgagcaattctaaaatggacaggcacatcaagatgaatttaaggatcaaaatgccttattctatgtgataacatagatatcatgatgcttacattgaatcacattggactaaaa

SEQ ID NO: 51722 - DNA, 288 bp, Setaria italica
  Peptide Sequence Number=SeqID_117696
agtgccccactgctcattactaccatcttaacagcattttatttgtaatcactttgactgtgtgcctttatgctcacatactatttttttccttgatgctgttcttgaacagggttgatgccaagccaccccgacacaacagcagcaaaaaggggcagttgctgcatgtgccatcgtatgcaagttgactctctactttacaggtaatgatttgcagggatagatcatgtacttggagtcactttaatcaaaagtcatatcttattcttgttatgagtagtaacatgt

SEQ ID NO: 51723 - DNA, 339 bp, Setaria italica
  Peptide Sequence Number=SeqID_117697
cttgttatgagtagtaacatgttcacaatacctcccatctcagttctcatgcatactaaattatataaagtgcacacattgttgtgtgaaaacgcttctaaccgagttccttatgatccacaggtgtgggcatatgtgtacctgtttcaattgcgccgatcagctgaaatcgagcggcaggagttgcccaatctgccaatctcctattgatgatgttgttcgggcgcagctgaatttttgagatttaggatttactaggaaagaagaacaaaaggagccggcactcccagctttagatgtggagtttgtgaagccctggttttgaggaggcttcttacc

SEQ ID NO: 51724 - DNA, 255 bp, Setaria italica
  Peptide Sequence Number=SeqID_117698
acgggtgtcttctggtgtggtgtccctcgccacgcttgcgccttttctttccacccattttctcccctcgcaattttccgaaatccagctcgagaagttggactagacgagatcagtcagtagctgccgctcatcaactccatcgcagttcttgcctgtcctgtcctcccctccccttttcccgtcgggggagagatccgtgctgcgatggactgccctggccgaagctgccggctgttcggcgcccagagatcg

SEQ ID NO: 51725 - DNA, 273 bp, Setaria italica
  Peptide Sequence Number=SeqID_117699
gggggagggagcagcgggaggggggacgtgggggtggcggccacgagggggagtcgtgcgcggcgcacgccgcggggaacctctgccagagcttcctgctctcctacggcgtccgcgtcggcatcggcatcctcctccgcgccttcaagctcgcgcgccgcaggtcctttggctcgctcctcgacctcaagcaactggtttcggagaaagatcttatagtaagagaggaagcttgcagggttgggttacttttggaggattcactggatcgta

SEQ ID NO: 51726 - DNA, 259 bp, Setaria italica
  Peptide Sequence Number=SeqID_117700
tctattgtttctattctaactagtaaattaaaagggtaaactagttcgttgttgttgtttgttacttttgttcgttgttgtagttgtagtattaggtcttggggtcaagttggagaggtgaagtgagcatccggcaccagctggttaccaagggtctggtctctgctaagctagctagtgtaaggagcgatcgagtaggtcagttaaaaaagaggctggtgcgtcgtgagggctcggtcggccggcagcggtcgcgctt

SEQ ID NO: 51727 - DNA, 316 bp, Setaria italica
  Peptide Sequence Number=SeqID_117701
ttagtctatttttccttgttgtaattttttgtcgttgttaattctttgtcaatctgccgagcaagcgagagcctattcattactgcaggcatgtaagcatgatctataggaaattgctggaggttctcctgtcatgttcaatcaatggttatgaaatcgctgagttatcagtgaaaaacaaaatagatgcactgatatggatgagacatgctagaaaaagtgtaatgtgatatgcgactaggagtaaaatagatgtactggtatgaaaccaaaacaatggaaacagcatccaacacaaaaaaagtcatgataatac

SEQ ID NO: 51728 - DNA, 301 bp, Setaria italica
  Peptide Sequence Number=SeqID_117702
ttcgtgcaggctctgaaggaattccacgaatggagcattgggcaaggtaaccttcccgcaaacaggcccatctttcacctgttatttagtccatcgctttagcttttcttttctcctttctcttctgctcccgcgaacgtttcttttcttcatgcttcttttgcttccagttctgagcaagtcttcgcttttctctttgtttgtctaagttgacacagacctcttgtccctagtaatttcttgtaagttgttcttttgtttaagggttttcgtttactttacgtttattttccttttgttt

SEQ ID NO: 51729 - DNA, 253 bp, Setaria italica
  Peptide Sequence Number=SeqID_117703
aggcttgtttttcaaaagccgttcttgcttttcctatggatataccaccaacaataggaatgacgccaattcctaagaacttggctgcttcttttagatgatcgcatacctgttgggtgaggatgatgtttttgcatggcacgaacttaggcttcaccctctgcttgtcaaggcaatgcgcaggcttggattcaaagaaccaactcctatacaaagtcgtcctttcctgctgcagctcaccaaggcaaggatt

SEQ ID NO: 51730 - DNA, 189 bp, Setaria italica
  Peptide Sequence Number=SeqID_117704
tttttttttttttggttgttaaagttatttgtttatttaaatttttgtttagttcttagttctttttgttaattacgtaaattgttgtattattaactattccacatgttacagagatcatctcgcggtgcccgtgctaacttcattatcctgtgccgcaaaacagcatattaacccacctactcaatc

SEQ ID NO: 51731 - DNA, 212 bp, Setaria italica
  misc_feature (161)..(161): n is a, c, g, or t
  Peptide Sequence Number=SeqID_117705
tctgtttacgactagtaccatctcagcttcaaggccaatacaaagtgaaggctatcaaaaaccaataaagttgtatgaagccttaagttgcagtacttggttctcaatctcttagtttctgagcgggcgggtcggtcacaggagcgcgatgaggacgaagngcaggattgcggcgacgaaggagtacttaaccgctgcggcgaagatcgccg

SEQ ID NO: 51732 - DNA, 449 bp, Setaria italica
  Peptide Sequence Number=SeqID_117706
gtgatgctcacacttgcaatcggggcactaaacatttccctaaaggtggcagggtgagcaaatttctatctagaagctgtgtacctatgtttttgatgcttatattatttcaggttattatgctttgcattaacgaatgaagctaaatctgatagatgaccttttaagcggcagatagcatttttagcgagctagcatcgtttggttttttattctggttagttttttgggggataacttacaaactttcatttcagcttcttttctgaactccttatgaatgactccaatatagatttctttttttgtaattcgagcttgcaaactgtcacatagcattaccctcctaataaataaacactatcatttgaactaagcttcttgcatactactactaataatttaagaaataaagggaattaaagaaaaatttaccaatagggaaaata

SEQ ID NO: 51733 - DNA, 175 bp, Setaria italica
  Peptide Sequence Number=SeqID_117707
ggaggaggctggatggatggaggccaaaagagacgcgcagggaaagcaggggagctgatgccctttgttggaaaaagagaaatatgaactccctagcaaatgtagacttcgtcccgataatgacatgttccgggagcaagagcaacataagattcattttgatattaatgagtgg

SEQ ID NO: 51734 - DNA, 169 bp, Setaria italica
  Peptide Sequence Number=SeqID_117708
acaatttcgaaaatcggaaagctttcttgcagaaaccacaacgccactcattaatatcaaaatgaatctgatgcccgtttgtggaaaaagagaaatatgaactccctagcaaatgtagacttcgtcccgataatgacatgttccgggagcaagagcaacatttgctcgg

SEQ ID NO: 51735 - DNA, 413 bp, Setaria italica
  Peptide Sequence Number=SeqID_117709
ttgaatagtatcaaggtcacatcggactattcctcgaatatacaggcattaacaggggcggaccgacagggtatgccgggtgggccacggcataccctgaggcccagcacttacctggtaagtagaggtcaacgggagatgattctgctgctttgacgcttgattgcaacgattcagctaccttcatccccttcttgagccccaattgaagggcaataaaatgctcaaaccgcttgatgctttcaagacgagtttctccatgccatcttggggcgaaatgcagtgattgaccccagcgatattcagcgaagtcggtcacaaggtcatagtacttgtttaccaagtcactatagttcgacttcctgaattgttcatcaccaccatgcaggtctattgtattacttttcgttctt

SEQ ID NO: 51736 - DNA, 385 bp, Setaria italica
  Peptide Sequence Number=SeqID_117710
tactggccaggttttaagcactcggtatatctccttgtaggcacctagtgcatcaggtgcatgaattgtggcctctatcgcataggctgcatcaaaggtgttatcagggaaaggcatgttcatgaagtctccctttatgaagttgcactgctcagtcaaacctgccgacgaaatgatctcctgaaatgcaataaaccattttttaactggtacaccagatgctcaaaagttattttattgtattccaggatgatgtcataataattaaacaaaccttgccccttgaaatctggtaagcgttattgttcagtccagttatctgtgttgagctgaatctggcgatttctgttaaaggtcccccaattccacatccaacatccaagac

SEQ ID NO: 51737 - DNA, 259 bp, Setaria italica
  Peptide Sequence Number=SeqID_117711
cttggggcgaaatggattgattgaccccagcgatattcagcgaagtcggtcacaaggtcatagtacttgtttaccaagtcactatagttcgacttcctgaattgttcatcaccgccatgcaggtcatgatacttcgcatatctttattacttttaaaccactagatctccatccaactatccagatcggccagttcattttaatacctactatctctagaccctcttctctccttgtttttttcatcccaagcgcgagc

SEQ ID NO: 51738 - DNA, 250 bp, Setaria italica
  Peptide Sequence Number=SeqID_117712
cacagttcatctagtgcaaaatactggccaggtttaagcactcggtatatctccttgtaggcacctagctttatgaagttgcactgctcagtcaaacctgccgacgaaatgatctccttgccccttgaaatctggtaagcgttattgttcagtccagttatctgtgttgagctgaatctggcgatttctgttaaaggtcccccaattccacatccaacatccaagaccttcatccccttcttgagcccca

SEQ ID NO: 51739 - DNA, 243 bp, Setaria italica
  Peptide Sequence Number=SeqID_117713
gagggcgtagcggtcggcagaggaggaggagatgggagcgtggtggcggctgaggaggtacggtcatgttcagcagtatccccccggagctgttcctgcagatcttcaagttcctctcctccgaggacctcatctcctgcgcgctagtttgccgcttcatgaacgctgctgcatccgacgagaccctctggcgccgcctgtattgcatgaggtggggactggcctccaatgccaaattcaggg

SEQ ID NO: 51740 - DNA, 154 bp, Setaria italica
  Peptide Sequence Number=SeqID_117714
tgtctccgaccagtgtgagtagtcccagattggtgatgcttacatttgtgagaagactggtcgtgtccatgggcactcttgttctggaaatacatgctcttacacccagattggtgatgcttacatttgtgagaagactgggtcgtgtccattg

SEQ ID NO: 51741 - DNA, 437 bp, Setaria italica
  Peptide Sequence Number=SeqID_117715
ctaagcaacggacatctgaggtagatgcttctagaagtatcaggaacaataaaatctaccaaagcagccttacaaaattggaagaagctcacagcagcatctccactgagtcacctgtttctgagcaatccatgacgccacaaacttcaacacatccttcagcagcagaagaaaagcttgatggctctgctgagtcacccatatctaaggaggaagattttgaagcatcagaaacgtcacaatctctgtcgcatccttcaccaccggaagaaactcatagtggctccatcgaggatataagttcagttatgaatgagaaccaggacaatcaagataggaaacattctggccctagtgatgaagcaactagaccgaaatacaagacttaggaagaagtactagactaggaagaacgtaccctagaataggtaacaaga

SEQ ID NO: 51742 - DNA, 404 bp, Setaria italica
  Peptide Sequence Number=SeqID_117716
ccacaggatggcagcaataaggtagacaaaactactaatcttgaagtcaaagtacgtgatggcagcattaatactgaaaaaaaataaggaagaaagcaataagatagtggcagggacagcatctgttgttggacaggaggagaatgtatcggagcagcccgttgacttcaaatcaaagtccataattgcagagcatgattcacattcgcagaatgagtcggtggtcaattcgacagatatgcctgctggactagtggaagattctcctgcgaatgattttaaaaaagaagaaaagattcaggaatctgttggaagcacaaattctccgactccggaattttgtcttggtttcttgtttgttctttgttagttctttagttagttaaattttaagttacgttctt

SEQ ID NO: 51743 - DNA, 336 bp, Setaria italica
  Peptide Sequence Number=SeqID_117717
taaaaccttaaagaaaaagggaaaaaggaactaagaactaagggacaagaaaattagaagaagacatcttcccgtgaagcacctaaagttccacttcctgatcaaacaagaaatgcccctctcagaaagctctctagttctggaagtataaatgtctggaagaaagccatttccttcaagcatcattggatttatctgacaatgcttcattagaggaggagaatgtccttcagaaagtaatatgtcatattatctgaggaccatgactccaagtgcttttgaatcagcacttcgtcagaggatggagagctggcttcttacatgtcacgcttggcc

SEQ ID NO: 51744 - DNA, 321 bp, Setaria italica
  misc_feature (318)..(318): n is a, c, g, or t
  Peptide Sequence Number=SeqID_117718
taggtttagttaattagtactaacttaaacttaaaagtaaacgggtaattactactaaggagatattcatccttaagcgcatccatttctgcttcagacgacttactcttgagatcatcaattgttgctttgagttgctcattctcattcatcaatcttgcaatttcatcagctttggactgcgattgtcttgcagcaccttgcaatgcagcagcccgttgacttcaaatcaaagtccataattgcagagcatgattcacattcgcagaatgagtcggtggtcaattcgacagatatgcctgctggactagtggaagnttc

SEQ ID NO: 51745 - DNA, 360 bp, Setaria italica
  Peptide Sequence Number=SeqID_117719
ggagttgaggcattctcttaccaggcaagaacaggatgctgcttcagggaagaaaggctaaaaagggactatgacgatcttcaaaagcggtatcaagccagtgaacttcgttataatgaactggtcacacaagttcctgagtctaccagaccactcctgaggcaaattgaagcaatgcaggagactgctgctcgtagggaggaagcatgggctggtgtggagagaaccttaaactctcgccttcaggaagcagaagctaaagctgctgctgcagaagaaaaggagcggtcttgttaaattgtagtcgtatttgttcacaaagttttatcccggattaacttgtttctttgtagtactact

SEQ ID NO: 51746 - DNA, 258 bp, Setaria italica
  Peptide Sequence Number=SeqID_117720
gctaaagggactatgacgatcttcaaagcggtatcaagccagtgaacttcgttataatgaactggtcacacaagttcctgagtctaccagaccactcctgaggcaaattgaagcaatgcaggagactgctgctcgtagggaggaagcatgggctggtgtggagagaaccttaaactttgtgacaatcgctcatttacagaccgctccttttcttctgcagcagcagctttagcttctgcttcctgaaggcgagagttt

SEQ ID NO: 51747 - DNA, 178 bp, Setaria italica
  Peptide Sequence Number=SeqID_117721
tctttaaaacttacttacgtacctttactaaggtaaagtaactaagtaaagtacttaaaagtcttgtcttgtcttgtcagaagaaaaggagcggtctgtaaatgagcgattgtcacaaaagtttatcccggataactgttcttgagacacagattacaattcttaagaacagagcaga

SEQ ID NO: 51748 - DNA, 373 bp, Setaria italica
  Peptide Sequence Number=SeqID_117722
tccgcttcttgtggccgcctgaatccttcattttcgttagagcaattctctttgcatcggaaatgggctctttaagtatcatgatttcatctgggtccaccttacactggtcaattttcttgccaaggagctgctcaatctgcacaaaccactgggcttcatattgatttaccaaagatacagcatatcctgatctccctgcacgggcagtcctacccacccgatgaacataatcctatatgtgatgcagcaaaatatttgtacgatcataacagatccaaaatgtaaaagattataagctgttgaaatatggccaaggtgagtactgaaacaaacagatgagaccttagaattcattggaatatcataattg

SEQ ID NO: 51749 - DNA, 203 bp, Setaria italica
  Peptide Sequence Number=SeqID_117723
tctttggtaaatcaatatgaagcccagtggtttgtgcagattgagcaaagatacagcatatcctgatctccctgcacgggcagtcctacccacccgatgaacataatccttagaattcattggaatatcataattgatgaccatatcgactccttgcattacatcagcataaataatgtaccatttcactttctttttattta

SEQ ID NO: 51750 - DNA, 387 bp, Setaria italica
  Peptide Sequence Number=SeqID_117724
tcttcgtccttcttctatttctagtaactattgtaagtaagtattaactaattcctttgttaattcttgcaggaacaaagtagaactcttgtttaagcgaatccactgtagaatattttgaggccgcttcaaccttaacaggattcctgagacaagcccgctgcagtttatttacctttttggtcattgttgctgaaaaaaggaaagttctcctgtctttagggatctcttgtagaatgtcatcgagggctttctcgaactccacattaagtaatttatcagcttcatccaataccaaatacttgattttcttaaggctaaaaccttttgtatctgtcaaatggtccaaaagcggccaggagttccaaccacaatatgaggacgttt

SEQ ID NO: 51751 - DNA, 267 bp, Setaria italica
  Peptide Sequence Number=SeqID_117725
aaacacctgcttttctttattccagaaatacaacagttctaacaccattttttaaaactacatccagcaaagcagttcaaacgttaatacaacttggcctctttcttctaatattcaaaacttggacagacttgaattacaaagtgagaagagtagtgacttataatctcagaccttgtaacagaggcaccctgtgaaatgatagcatataaaaggggcatcagaacacctcagtgccaaaaatttccactgctactgcataccagg

SEQ ID NO: 51752 - DNA, 241 bp, Setaria italica
  Peptide Sequence Number=SeqID_117726
cttgaattacaaagtgagaagagtagtgacttataatctcagaccttgtaacagaggcacccagtctatgccctttttcctgtggtggcccattcaacaccaatatcaccgctggaatgaaggaggatgccaatccctaaacccttatagctcgaattcatcatccagcttgagtgcctgagctgcagcctcctcttcctcatcatcgatcgcaaagtatgggttatgcacctcaggccgg

SEQ ID NO: 51753 - DNA, 129 bp, Setaria italica
  Peptide Sequence Number=SeqID_117727
ctgggtacaagttccggcctgaggtgcataacccagtgaacacgtagaaggcaagtgtggcaagctcgccagccacgacgctggtccacacttgccttctacgtgttcactgggtacaagttccggcct

SEQ ID NO: 51754 - DNA, 252 bp, Setaria italica
  Peptide Sequence Number=SeqID_117728
taaaccaagaaaccacaatcacactttgcaagttcaccatttcttgtcagagccacgtgaacaggttaatacagtatcatcgggaagttcacccccaccaataatgcaaatagtcttctttatttggatgttacatgcaacatgggtaccaccagccgcaacaagaatggtgtcaccaggcctagcagcagaaacggcagcctcaagatttggataaactccaggctccatcacatctctgattggcctctc

SEQ ID NO: 51755 - DNA, 250 bp, Setaria italica
  Peptide Sequence Number=SeqID_117729
tacataacaaaccattgatcatattaccaaaggatcctcctcaaacttctccatcagtcactcataccaaacgtagagaccatctttcattacaacggggtgtttgaagtgacaccgtgaacataaaaaaaagtatcaggtaccaacgggccaggcattgttttcatgcagctccgagctacttatatccaaacacatctggcttccctgagacacgcaacaggggaaggcaaggcacacaggggatagg

SEQ ID NO: 51756 - DNA, 267 bp, Setaria italica
  Peptide Sequence Number=SeqID_117730
tcatggagatattgatattaagaatctaaagaactctatgttccacataagttgaagcaatttcctatctatctcacacttaataaattggagaatacattgaaacacttcatttgcagataaggatcaattacaaaattgaagacaccattcttgttatttcaggttaggtaccgacccaatacccctttgattctgaaaggaattaatataaggatcagtggtggagaaaagataggagttgtaggaaggactggtagtggcaag

SEQ ID NO: 51757 - DNA, 244 bp, Setaria italica
  Peptide Sequence Number=SeqID_117731
catttgcagcttatgatcaaggttatgatgtttttcttggaaatctacgaggtttagtctcaagagagcatatagataaaaacatttcttcctacaagtaagtattaagcaggccttctgtacgtatctgattttatcacaatcaggaaatctatcctgtgaaaaattattttgttaattctgcttgtgcatcattcttgaacctttgtcagatactggaagtattctgttaatgagcatggaa

SEQ ID NO: 51758 - DNA, 163 bp, Setaria italica
  Peptide Sequence Number=SeqID_117732
tagtgctgtagctgtactgctgtttaaaggataccgagaaagagaacacggctaaggagcagatggttgtacttggcgaatgctctgtagttttgagacacttttttgattgcaacagaacagcactcggaacatcaaaagaagtgtctcaaaactacagagc

SEQ ID NO: 51759 - DNA, 236 bp, Setaria italica
  Peptide Sequence Number=SeqID_117733
aggttcaatatgaatgtgtggattatgaagaagacttcggactactcgcatgagagcaaataaaacaggaagatcacccaaactccgggtaacctgtagttctctagataatacatgcttaacaggaagcttgacatcaactggaagcccatcatccttcccatgctcagaccttttattttcagctggtggtacaattgcatcaataggaggattctctggaattgcaggctgca

SEQ ID NO: 51760 - DNA, 422 bp, Setaria italica
  Peptide Sequence Number=SeqID_117734
tgttcttggttgtcttacttgttaaagtcttcgtcttgtattgtattagaccttgacgttctttagagaaagttgtacaaatatctggtacccctgagcagactgaaaaagctaagagtttgctgcagggattattcttagcatccaagatgacagctgaagacttaagtggactctgctgcatgtcgtaggtgttatatcgtcaaattttccagttaatggcctttaggtagaatacctctgtgtccatgtgattatttgtaatttgtctaatggagggtcatgtttccgtgtgcgaagtgttaggataagttcacatttatcttttccctaggtgtaatgctaagtagccaaaatgtgttttgtttctagtttatcgttgtaagatagtagacgtttttatcgattgattcaatttccat

SEQ ID NO: 51761 - DNA, 260 bp, Setaria italica
  Peptide Sequence Number=SeqID_117735
ctctacgaggcctgcggccggatcgtcaaccccgtctacgggctccgtggggctgctctggtcgggcaactggcacctctgccaggccgccgtcgaggccgtcctcaagggcgcgtccctattcgttcctagtattcttccgtccgtaggttacgccgccgccgccagccccgcgcacctacacaaggccgccgcctgctacgacatccgacacgtcgccgccaaggccaagcccgctcccgctgcttcttctcctgcgg

SEQ ID NO: 51762 - DNA, 453 bp, Setaria italica
  Peptide Sequence Number=SeqID_117736
tgttcctacttctttgtcgtcctttggtagtcttggtagtccttgttgcttggttatcatagccatgtctgctacttacccgatggatatggttaggggtaggatcaccgttcagacagacaagtctccctaccagtaccgtggtatgttccatgcactgggcacagtctaccgtgaggaaggcttccgtgctttatatagagggtggcttccatctgtaatcggagttgttccttacgttggcctcaactttgctgtttatgagtctctcaaggactggctgctccagacaaatccttttgggcttgcaaatggtaacgagctgcatgtagttacaaggcttgggtgtggagctgtggctggaactattggccagactgttgcgtaccctcttgatgtcatcaggagaagaatgcagatggtcggttggagccatgctgattctattgttac

SEQ ID NO: 51763 - DNA, 224 bp, Setaria italica
  Peptide Sequence Number=SeqID_117737
cctcgattgccattgcatttgtcacttacgaggttgtgaaggatgtgctaggagtagagatgaggatatcagactgagggattggagtagtgctggtgggcgttatcgactgctatttttgtaggtgttgggagttctgtttttgtaggcagggcaggtagaaggatatgactgccctgcctacaaaaacagaactcccaacacctacaaaaatagcagtcgat

SEQ ID NO: 51764 - DNA, 248 bp, Setaria italica
  Peptide Sequence Number=SeqID_117738
tcccctgtgtgccttgcctatcccctgctgcgtgtctcagagtctccctaccagtaccgtggtatgttccatgcactgggcacagtctaccgtgaggaaggcttccgtgctttatatagagggtggcttccatctgtaatcggagttgttccttacgttggcctcaactttgctgtttatgagtctctcaaggactggctgctccagacaaatccttttgggcttgcaaatggtaacgagctgcatgt

SEQ ID NO: 51765 - DNA, 230 bp, Setaria italica
  Peptide Sequence Number=SeqID_117739
cttaaggatatattgatgattaatccttttgcatatgttgtgctacattttggatttttcatgaaacagactatttgcctgcttctattgatggcatctatgtgtgctctaagttactttatttacattttacgcaggtcacgtactgctgttgctccgctcgaacgattgaaaatcttgctccaggttcaaaatccacactagttattctaagttactaacggttacta

SEQ ID NO: 51766 - DNA, 176 bp, Setaria italica
  Peptide Sequence Number=SeqID_117740
ggatatgactgcggctctattcagcatcagggcctcttagcccatgttgatatatcctgctactggcttccggtcctattcagcatcagggcctcttagcccatgttgatatatcctgctactggcttccggtcctaaattgttgctggatcgtggaaaattaataagttggctgt

SEQ ID NO: 51767 - DNA, 514 bp, Setaria italica
  misc_feature (493)..(493): n is a, c, g, or t
  Peptide Sequence Number=SeqID_117741
ttctttccttacttatttgttcttacgttccgtttctttcctttcgttcgttcctttctaggtaaattacggttaattcccggtattccgatctgaccttcttgttcccctgatctgaatggtggtgcgttttggttctgcttcgtgtgtgtggtgatccgggtgattcgatccataagggctgaggtacgacgacctgtacgacccgtacttcgacctggacatcaaggaggcgctcgggaggctgcctagggaggtcgtcgacgcccgcatccagcgcctcaagcgctccatggacctctccatgaagcaccagtacctccccgaggacctccaggctgtgcagaccccattccagagcctatttgagtgacatgttggctctggtgaaaaaagggaacgctgagcgtgaagcactgggagcccttccgctttaccagagaaccattccttaaaatgctgcctagacgcgcccacaaggccacaagtttcnctttacgaaacaccaaaatgc

SEQ ID NO: 51768 - DNA, 253 bp, Setaria italica
  Peptide Sequence Number=SeqID_117742
caccaaaatgcatgaaataatatgcagcggatgaaactttttttcctttactatcaagttacattttacttgttgatgcaattatgcattgactgtcgcctgtagttctgtttcccctctctaattaatgggaacaaattatgcgttccaccgttattaacttgttatgaaatcttcagctgctgagtaactgttatagctttatgtcgtttgatcttgcatttctgttaaccaaaaaaaaaaaaaaaaaaaa

SEQ ID NO: 51769 - DNA, 219 bp, Setaria italica
  Peptide Sequence Number=SeqID_117743
aacatgtcactcaaatagcctctgaatggggtctgcacagcctggtgaaaaaggagaacgctgagcgtgaagcactgggagcccttccgctttaccagagaaccattccttaaaatgctgcctagacgcgcccacaaggccacaagttttctctttacgaaacaccaaaatgcatgaaataatatgcagttggtattgtaaacttgttttttcctttta

SEQ ID NO: 51770 - DNA, 168 bp, Setaria italica
  Peptide Sequence Number=SeqID_117744
cctagacgcgcccacaaggccacattttaaggaatggttctctggtgaagcactgggagcccttccgctttaccagagaaccattccttaaaatgctgcctagacgcgcccacaaggccacaagttttctctttacgaaacaccaaaatgcatattatttcatgcatt

SEQ ID NO: 51771 - DNA, 261 bp, Setaria italica
  Peptide Sequence Number=SeqID_117745
aacactactaaacaggcaaacactacctttggtaagaggaagcttccacctggaccctgcataaccaaaatggacaggaaacttggtgagaaattccatttgcataccatggttgcaagttctgggaacagagtagtcagtgatcgttgagaagtttccatgtaattgggaaaaggagagggaacatacatgcctattgctcagcttgttttccagtatcaggttcctgttgcaactaggagctgattctgctttgttgta

SEQ ID NO: 51772 - DNA, 235 bp, Setaria italica
  Peptide Sequence Number=SeqID_117746
taaaaatacaacctgatttttgcttaaatatatgaagtccaacgacttaggtttttttcccaggtaactacaagacaaccaaaaaagaagaagaaatccataggaagacttctgcaatacatgttcagaattagaccatactcaggtccaatatgctgggaagcgacatatttatttattgcttgcctgtatatatatgtgcttcagcatatggacctgagtatggtctaattct

SEQ ID NO: 51773 - DNA, 216 bp, Setaria italica
  Peptide Sequence Number=SeqID_117747
ttaaggtaaaagtaactaaaaaaagaaagaacaaactaaactaagaacaagaattaataaaaataaaaccccaaaagaatagctcaattctgatggttcatccccttcgtatgttagcactgctggaagtcgtagatataacatagagaagtatggagatgggcgttcatacaataagaaatcagaaaggaagcgggaaaacattcttgattttaa

SEQ ID NO: 51774 - DNA, 233 bp, Setaria italica
  Peptide Sequence Number=SeqID_117748
ctgagagttatgtatcctgtgaaacgtacatattggtttgacatatacaagaatattgataaaatccctcaagttacctgtcctgtgctcattatacatggaactgctgatgaagtggtggattggtctcatgaatacctcaggcacctcaagaaatttgtccacacagtagagaagtcaccatcccataggcaagcctggagggaaagtgtggatcggattgaaccatcgcg

SEQ ID NO: 51775 - DNA, 483 bp, Setaria italica
  misc_feature (36)..(36): n is a, c, g, or t
  Peptide Sequence Number=SeqID_117749
agccggggaggatggagtcgctgctgcggcaactcnttaaccgcagtacggcgagacagaaagcatcgatcagtatactacactagtagcagtaactagcgaggagtgggaggtgattgttagtactagtaatttctcgttttgcccttgatgattgccggtcgattatattctacacatcgtcggaagaaatggtcctttcctccttcaaccgtccggatggagatggggaccggtgtccgttcgccgtcgcccgcgtcgcgtctcaatgtctcattgactgcagtccacaggcaggaggctagcgtgctgtgcagttcagtgctggccgctgcctgcgtgtagcggttacttcagttacagtactgccgtataataattcgtaataagaatagacgtacaactactaactaagtaagtaacctaacctaaactaaacgtaacaaactaactaaggtaagaaatttaacctaaacaaaaaaa

SEQ ID NO: 51776 - DNA, 250 bp, Setaria italica
  Peptide Sequence Number=SeqID_117750
gcggagggcctgccttgactgggaggaaaagaaaggaagtgacgaggggttcggcggatgagaatgggactgtaacaaaaagggtgttgaggtccaatgccatgaggctgcgagctgaggctgaaactgacagtttggagaggaaacactctgaggttattgttgaggcttgcaaaagcggggtgctgacagcacatgcttgcaatggtgaggaaggcaatggattggttaaggtgaatgtgagcaatgt

SEQ ID NO: 51777 - DNA, 319 bp, Setaria italica
  Peptide Sequence Number=SeqID_117751
tgtcgtccttacttacgtacgttccttcggggttctagtcgttcgtacgtcgttcccccgtccgtagtattcaagtaaggtcgtactacctcaaggcgaagctggtgcatccggataagaatcctgggaaccccgatgtcgcacagaaatttcaggaacttggggaggcttatcaagtcctaagtgatcctgggaaaaaaggaggcttatgataagtacgggaaggagggtattccccaggataacatgatagatcctgctgctgtctttgggatgctttttgggagcgactactttgaagattatgttggccagcttg

SEQ ID NO: 51778 - DNA, 233 bp, Setaria italica
  Peptide Sequence Number=SeqID_117752
cccttccctcccagggcgacgatctcgaccgcatcccacttggcttcctgttctccacttcacccggaaccttctagaaggcccgaccgaccctgcttcggagctgccgccggcgagatcccgccatggtgaaggaaagcgcctactacgacgtcctcggggtcagcgtcgacgcgtcccccgccgagatcaagaaggcgtactacctcaaggcgaagctggtgcatccggat

SEQ ID NO: 51779 - DNA, 246 bp, Setaria italica
  Peptide Sequence Number=SeqID_117753
cggcaagcagcaagagaacttggaaagagtcgaatttacatgggtgtaccgttcatagctgagtgggttagggacaaaggccaccacattaaatcgcaggttaatgctgcttcaggtgctatctctcatctacatacggttgaagtcggtccttaaggctctgagtgagcttttgttctctttcttttgtaactcctttatcttttcttgaacctttgctcttgcctcttgactgtttgcgttttt

SEQ ID NO: 51780 - DNA, 223 bp, Setaria italica
  Peptide Sequence Number=SeqID_117754
tttaaaccaaagaaagaactttaaccgactagttagtagacctggtactgtgtcgctgttgtgcctggtactgtgtcgcccaggtcgaccttggagatggatggctggagcagcgacggaatggagactgctgcgcacagtgatgaaatgtgtatctgctgggatgcagagaagaaagtggtgaagaagatgtggatgcctgagaaagatcaggtggttacct

SEQ ID NO: 51781 - DNA, 431 bp, Setaria italica
  Peptide Sequence Number=SeqID_117755
tcgaaacaggaatagtctataaacccatcggtgacaaaactaagccctgaaacacattcctcaacttaggtgcgaggagcagcagcaggggcagcagccggagggcaccaccacctgggcggggtgcgccttggcctggcctcgggccgtcatcctgcaaggcaggtaaagcagaaccatcagttaacaaccactggcataagatacatgtcccaaatttgcaagcatacaagattgctcagaagcttagcatactggcaagaattaagcttatcacagtccaatgatcagctaaaaacagaatgttttgacaggctaagtgatattattatcaaactagagcataacacagaagcgaggcatcatctcaccaggaataggcgatcaaagaagaaacataaaaacatgactagtatagaaaaatcaatact

SEQ ID NO: 51782 - DNA, 413 bp, Setaria italica
  Peptide Sequence Number=SeqID_117756
acctcgactcgctcgtgggccaggcgctgttcggcgatggcgcggcggcggtgatcgtcggcgccgaccccgacgagagcgtcgagcggccgctgttccagctcgtgtcggcgtcgcagacgatcctcccggactccgatggcgccatcgacgggcacctccgggaggtggggctcaccttccacgtcctctccgagtacggcaacatgtccagcgcctgcgtgctcttcatcctggacgagatgcgcaagcgctccgccgaggacggccacgccaccaccggcgagggcttcgactggggcgtcctcttcggcttcggccccggcctcaccgtcgagaccgtcgtcctccacagcgttcccatcaccgccggcactgccgcatgatcagttgatcaccgcccccgatcgatg

SEQ ID NO: 51783 - DNA, 367 bp, Setaria italica
  Peptide Sequence Number=SeqID_117757
agaacggacgacgacgggttagactaggtggtgtgctaccgaagaatacaaccgccgtcacgttccgggggccgtccgaatcccacctcgactcgctcgtgggccaggcgctgttcggcgatggcgcggcggcggtgatcgtcggcgccgaccccgacgagagcgtcgagcggccgctgttccagctcgtgtcggcgtcgcagacgatcctcccggactccgagggcgccatcgacgggcacctccgggaggtggggctcaccttccacctgctcaaggacgtgccggggctcatctctaagaacatcgagcgggcgctggaggaggcgttcaagccgctggggatctccgactggaactcggtgtt

SEQ ID NO: 51784 - DNA, 284 bp, Setaria italica
  Peptide Sequence Number=SeqID_117758
aaacctaaagaaacgtaaagaaactaaacttaacaaataacctaaggaacgaagaatgcgcaagcgctccgccgaggacggccacgccaccaccggcgagggcttcgactggggcgtcctcttcggcttcggccccggcctcaccgtcgagaccgtcgtcctccacagcgttcccatcaccgccggcactgccgcatgatcagttgatcaccgcccccgatccgatgatcaccgtagtacacattcattcgcctgcaactccagcaacacttgccgcatccgat

SEQ ID NO: 51785 - DNA, 342 bp, Setaria italica
  Peptide Sequence Number=SeqID_117759
gaaaatatataatactgggttgttcacaaattgcacaggacatagcaaggagctaggaagaaggtaccaaaaccatagcgaggtaaaccaggtccagttaaatgttcgaaatgactaattactgacccctaagttgttcctgcagctacaattaaaactgagaagaataacagagaaaaaagatatcatccttggttggcagcaacgatctttcccaagatggagctttgcattgtatatttgcctaatatactagacaaaaccccatgctgctcaaaacgaatgccaagtttacgaaggaacttcaaaaacattaagaactttctcatcaaaaacattaag

SEQ ID NO: 51786 - DNA, 461 bp, Setaria italica
  misc_feature (175)..(175): n is a, c, g, or t
  Peptide Sequence Number=SeqID_117760
cggttttgcgcaatggttgcttttctatactcccagcaacagaactcgtccctggagatatagttgaagtaggagttggttgcaaagttccggctgacatgagaatggttgaaatgttaagccaccagttgcgtgttgaccaagcaattcttacaggagaaagctgttcagtcgntaaagagcttgaatcaacttcagcaatgaatgctgtctaccaggacaaaacaaacatcttttttcgggcactgttgttgtagctggcagagcaagagcagttgtcattggggttggttctaatactgcaatgggaagtatacgtgatgctatgctgagaacagaagatgaagcaacaccgttgaagaaaaagcttgatgagtttggtactttttggcaaaggtgattagtctagggtattattgttattactttgttttgggtttgttaaattatttggtactatt

SEQ ID NO: 51787 - DNA, 259 bp, Setaria italica
  Peptide Sequence Number=SeqID_117761
aagaaagaaaagaaagaagaaggaaaacaaaaaggaagacgagaagagaaggagcgggcaaccagagcacaaaacattgctgcaagctcaattcgttgggtcatggggcccaccagaaccattgtttcattcccacatgcagtaggtctccccagcatcttcaactccaagcctcacaggtattcctcacatctttcgcattcttgtttcaagaactttgctagacacattgcttctgccatctcatcaccctactctg

SEQ ID NO: 51788 - DNA, 245 bp, Setaria italica
  Peptide Sequence Number=SeqID_117762
tgggaatgggtcaggtgggacatacatcggcaaaggaaaggtgctgtctagacgacctcgcagaattgattcgaagaagaggctgtggacgtaatgttcttcttgctattaatgtcctgtagcatcacaaggaaagcttcttatgtggggagccaagatcaacagtctgattgatagaggacaattttggcgtttaggacaaacaatcatctctccttcacgcaaatgtcactcaccttgctttc

SEQ ID NO: 51789 - DNA, 151 bp, Setaria italica
  Peptide Sequence Number=SeqID_117763
attcaacgcaccaagaagagctaattccttaggaaacatacaaggagcctgttgcccgtgtttctccccaaagacagggctccagtcctccggctaataaaggggtaggcttaggcctcttttacttttctcttccctatgtttctcccca

SEQ ID NO: 51790 - DNA, 222 bp, Setaria italica
  Peptide Sequence Number=SeqID_117764
tgtcttgtcttaattgtcgtcttgtccgtttccgtaccctagttccgtctattggtcttgtcttcttcgccacccgcttctgggggtctccagccgcagccaccgtggagcagatggacaatgaggtggctggtggcgtcaacgatgatgaggaagaagaagaggatgaggaggatgaggctgaggctgctgagcccgaggaatgcagagatgaagcccgtg

SEQ ID NO: 51791 - DNA, 245 bp, Setaria italica
  Peptide Sequence Number=SeqID_117765
tcaaagataatgggccatgttaaatgtgtgattaaattcctgaaagacaagcagcttctccagccaccgattattgcatctgtatgtattgctgttgcactttttagtagtgtttatataaatcattatgcattctgcgtcttgactttatttttaaaaatgcacaggcttttgcaattgtcattggtattgtcccattcctgaagaattttgtactcacagatgaagcgcctctcttcttttca

SEQ ID NO: 51792 - DNA, 221 bp, Setaria italica
  misc_feature (40)..(40): n is a, c, g, or t
  Peptide Sequence Number=SeqID_117766
tattggctctgatgacgatgaacttccagtcaaggcatcngggagaggaatgcggtgcccgaactcagcaaatatccaattccaacaagcactcacactagcactgtaccagaggatgaaccattgttagctgctgagaaagttcaaaaattatagcaaacggttgtacgcacaccaagcctcttacttccttcaccaggacctgatgccataaacatagg

SEQ ID NO: 51793 - DNA, 261 bp, Setaria italica
  Peptide Sequence Number=SeqID_117767
taatgctgccccctattcactcagtcattcggttcttttaactccatagatgttgccacatggtcccccacttacatcctcatcttttggtcgagatctggtgaggtggtagcacataaaatgtatgtgaatttattcactgcaacctttgttttacccaggttttgcgtccatttttgttgaggaggaagaaagatgaagtggaaaaatatcttcctgtgaaaacacaagtaattctcaagtgtgacatgtctgcttggc

SEQ ID NO: 51794 - DNA, 197 bp, Setaria italica
  Peptide Sequence Number=SeqID_117768
agaaaactacaaatctagacttatggacggaaatgaggttccagactgggtctttgccaataatgaaactgtaaccaagaggaccgtggcagacgaattcgagaatatttcagttggttcgaagagacgtaggaaggaggtcgtctattcagactcctcaaatccctcatcggatttcatccactggtcgctgaagg

SEQ ID NO: 51795 - DNA, 311 bp, Setaria italica
  Peptide Sequence Number=SeqID_117769
aattcatcaccaagatgaagctaaagacctctttttttcttttgcggggaacgttgccctttgtctcaggcgactagttgcgtgttgattatggcctaaactaggcagtaagattacaagcattgttcctacaaagtgaatccttggtagctaattccacaactcagtccggatctcgttaacccaggtacacacgcgactccccggtgaggacttgttagcacgctgttgtgcttaaaagtcctcaccggggagtcgcgtgtgtacttttaagcttgaggcaaacttgttagcacgctgttgtgcttaaa

SEQ ID NO: 51796 - DNA, 433 bp, Setaria italica
  Peptide Sequence Number=SeqID_117770
aattagctatgattcgcatactagtaatgtgatggccgtgggtattccattgtgatggcaattggatgcactctggttctgaggatggtactgtgagaatctgggatttacggactttggccaaggacccaaggtaatcgtcaaccggaccaagatcctgtgttgcgggtttatggcaggagattcaaatgattagtagatcctttacttatgtaatctcctcttttgttaagcttgaggcaaacttgttagcacgctgttgtgcttaaaagtcctcaccggggagtcgcgtgtgtacctgggttaacgagatccggactgagttgtggaattagctaccaaggattcactttgtaggaacaatgcttgtaatcttctgcctagtttaggccataatcaacacgcaactgttcgccttgtagtactaaaaaaa

SEQ ID NO: 51797 - DNA, 214 bp, Setaria italica
  Peptide Sequence Number=SeqID_117771
atggcaattggatgtactctggctctgaggatggcactgtgagaatctgggatttacgaactggcacttgtcagcgagaatatgaaagtcgcgcagctgtcaacactgtagtcctacacccaaatcaggtaccagaggttgatactgctgtaagatctctgacagtcatgtgggatgggagtatggtggttgctgcaaataaccgtgggacatg

SEQ ID NO: 51798 - DNA, 322 bp, Setaria italica
  Peptide Sequence Number=SeqID_117772
ttgcaactctcctcccatctggtagtgtcgacttgtagacaagcccaaaaaccgccacatccaactatataggcttgatcaaagttgttggtggatttcaagatgtcctcaattgctgaattctttgttgttttggaaaagcagcacaaggcattgagtttagtaagtacttcttgtagttctttctagtctatttttgtcttactagcctttggattacactcctgcattattgaatgaacaatccttgccacaatcacataagcacagaacaagaaagcggcaaccccaactgcagttcccagtccaaggccgacaagac

SEQ ID NO: 51799 - DNA, 207 bp, Setaria italica
  Peptide Sequence Number=SeqID_117773
ggccccgccttctactggcgctacaagaaggggttctccgcctcgctctcttcccccgcggcggtatcctcctcctcctcccccgcgtgcccgccctgcagctgcgactgcccgccgcccctctccctcaagtccattgccccagggcttgccaacttctccacaacagattgtggaaaaaatgaccctgagcttgccaaagaaatg

SEQ ID NO: 51800 - DNA, 401 bp, Setaria italica
  Peptide Sequence Number=SeqID_117774
tgggggggaacgcagcatacacgcaacaaacaaattgaagcaaatcaaaggcggtagtactgaccggtgcaggtgcggtgcggtgcttggtggtggcgtactcgagcacgacgtaggggtcctggcgggtgaagaactccgtgtcccgcagcttccggcacccggtgactgcaggcacccacaacacaaaaggggggaattcgatcagcgagggtgtcggcgccgtaccgccgcctccgagatggggagacgaggaattgaatccgggcccggattgcagaggggaggaggaaggaaggggggcacctctgacttccaggaccagcccatggattgacatgcggagcggggcgaggtggagccgcgggagaaggggaggagaccagggctgtgccgaactg

SEQ ID NO: 51801 - DNA, 429 bp, Setaria italica
  Peptide Sequence Number=SeqID_117775
cagaagaattacgaacctatcaaagacatagaaaatgaagaagtcaaccttgatgatgttaatgcagcctttgatgatcccgaggaggatactgaggatgcttttgatgaagcagcaggtcctctgacacttaatgcatttgacctaatcattctttcgcaagggttgaatcttgcagccctctttgatcgaagacaggactatgacaagcttcgaaatagattcttgtcttgcaaaccagctaaggttatcttgtcaagtatggaggtcgttgcgcaatcaatggggtttaagacacatattcgcaattacaaggtacattttgttttcccttgacatgcaaatcttctggcattagaccttgacaagcaaagctattgttccattcatctctgtaattgctaacagttgactgccttctagtgttaa

SEQ ID NO: 51802 - DNA, 475 bp, Setaria italica
  misc_feature (320)..(320): n is a, c, g, or t
  Peptide Sequence Number=SeqID_117776
ttgctactttgtaaactgataagaaagcagtgttttgaggtttaactctggtgtactttgtactctttagtaatttatttctttttgccaatttattttctgtgatttcaggaggatactgaggatgcttttgatgaagcagcaggtcctctgacacttaatgcatttgacctaatcattctttcgcaagggttgaatcttgcagccctctttgatcgaagacaggactatgacaagcttcgaaatgattcttgtcttgcaaaccagctaaggttatcttgtcaagtatggaggtcgttgcgcaatcaatggggtttaanacacatattcgcaattacaagatgagggtggaaggtctaaatgcgaacaagactagtcatctctcaattatggttgaagtttttcgaagtggctcatcaatcttcatggtagatctacaaagagcagccggagatactcagagtataacacgttt

SEQ ID NO: 51803 - DNA, 269 bp, Setaria italica
  Peptide Sequence Number=SeqID_117777
ccagatacatttgtttctttggattgctttcctcttccatcatttgtggttcctgatgtatatggtagaggtgctttgttgaagataactggtggtggtggaattgctagttctaagaggtgcgatgcttatcggtacttgtcctgtgggtatgctgtttgttcaattcagaaacgcgcgtctgatcttgcaactgttgccaaccctaatcttcaagtgcgtggtgctagttccttaaagttttggttttacttttaggttttcttttt

SEQ ID NO: 51804 - DNA, 306 bp, Setaria italica
  Peptide Sequence Number=SeqID_117778
tttgttccgttggttgtcttctaagtctacttgtaaactacctagtattgttttgggcttcaggattttcctttacagtttcagtggattggaataacatggaaaaacatggcccgaagtcatctttgtggcatcattttgatctcgaattatgttattttccctccatgatctgttccataggcaaatattaggattgaccttatgttttgattctcagcaccttctgttaataatttctggtgatcgtgacggattgttaagcttgtcagatgtgatggtgattacttagcattcaaaaaaaat

SEQ ID NO: 51805 - DNA, 225 bp, Setaria italica
  Peptide Sequence Number=SeqID_117779
aaatcctgaagcccaaaacatctggtgtttcagtatttcctttacagtttcagtggattggaataacatggaaaaacatggcccgaagtcatctttgtggcatcattttgatctcgaattatgttatttccctccatgatctgttccataggcaaatattaggattgaccttatgtttgaatgctaagtaatcaccatcacatctgacaagcttaacaatccgtc

SEQ ID NO: 51806 - DNA, 438 bp, Setaria italica
  Peptide Sequence Number=SeqID_117780
ttgtattgtattagtcttttacgtttaattggtacggtttttctttgtaaatttggtcaggtattattctatttttcgacatatggagaaggtgtttgaacatactcattgaaatggataagaagaaagcaattgatgaaactgaaccaggagtagctccttctcgtgccgtggacagatttggttttataaagtcagaacaaagtaactctcctgatggtattccaaaaggcaaatccatacatgaacgtgaaagggaggaaaaaaggataagaaaatggaggaagatgataggtgttggtggtagtgactggaagcattatgttagaaggaaccctcatgtggttaaaagacgaataaggaaaggaattcctgattgtctcagaggacttgtttggcagttgatttcaggcagccgagcctcttgctaatgaaccc

SEQ ID NO: 51807 - DNA, 175 bp, Setaria italica
  Peptide Sequence Number=SeqID_117781
aattgcttcttcttatccatttcaatgagtatgttcaaacaccttctccatatgtcgaaaatgatatccgggaggcgctccttctcgtgccgtggacagatttggttttataaagtcagaacaaagtaactctcctgatggtattccaaaaggcaaatccatacatgaacgtgaa

SEQ ID NO: 51808 - DNA, 249 bp, Setaria italica
  Peptide Sequence Number=SeqID_117782
agtattgggcaacatccgtcgctgcaaaggagcttggcggtttattgtcaggggaatggtggtgaagtgtagttgtgacacttgggtggcgtcgaagatctgcttcttggagcttcagctcacgagcttcctcggaaggagagttctatcacctggcatctcgtgagcctgaacgctccaaaaagcatggtaatagacactagtattgggcaacatccgtcgctgcaaaggagcttggcggtttattgt

SEQ ID NO: 51809 - DNA, 243 bp, Setaria italica
  Peptide Sequence Number=SeqID_117783
cctatcccctgtgtgccttgcctatctcctgttgcgtgtctcagtccttcgcaaggtaattgccgttgctccttactgctgctgatctggaccaagactgattcatcgcgttcgcctttgtcactttatggttagcctcctgcggctgatgatccaactccaatttcctttgcacaccagctgctcttactggagcgttattgctcaggtatgagtaattaactgttggccctcccattgggt

SEQ ID NO: 51810 - DNA, 229 bp, Setaria italica
  Peptide Sequence Number=SeqID_117784
tcccattggtacagtacccatggagtatctcctaccattcttctgatccacagctcctttagccccaactgtacagatccattattttaacttgttaaaaaatgcagtaatgaaaaagaacatgaatatgcagatctaaaggatgttgagatacctgatggtggtgttgatgcatatccagttgatttgaagcgaagtgaaggagggacatagaagcatggctgcaaac

SEQ ID NO: 51811 - DNA, 181 bp, Setaria italica
  Peptide Sequence Number=SeqID_117785
tgccagcaatcaacatggcatcatagtatatgatagcaggagaaaagaaacaggccatgcaatgcatgcagccccacaactgaacaaagcaaacacatgtccgtcacaatccatacaagaccccactgaacaagcaaaccaacgtcacaatgtagaataactgaaccagcgtcacactcac

SEQ ID NO: 51812 - DNA, 330 bp, Setaria italica
  Peptide Sequence Number=SeqID_117786
caatgcattgctattgaattggaacgtactcccccttactataatgccatttccccgcccaatgcaggcaatggtgaacttcatatatgctgatgaacttcctagcattcatgaacttgctggatctgtctcgatgtggacatcaacagtagtagtacagcatttattggccgcggctgatagatatggattggaccggctgcgtatcttgtgtgaagcaaagttatgtgatgaactgactcctgaaacagttgcaacaacattagccctagctgaaacaagacaaccaatttagtagacttagtaagtacttaaaagtttacgtaccta

SEQ ID NO: 51813 - DNA, 215 bp, Setaria italica
  Peptide Sequence Number=SeqID_117787
acgaacagtacgaaccgtgtaaagttgtaaactatcagaagtggcatctctacaagaagcgcattcgcacatgccaaactgctaggacacaacggaacatgtgtgaatgcgcttcttgtagagatgccacttctgatagatgacgaacagtacgaaccgtgtaaagttgtaaactacgctgcattcgatctcatagctccggcgatcgttatccg

SEQ ID NO: 51814 - DNA, 394 bp, Setaria italica
  Peptide Sequence Number=SeqID_117788
tcatggcttgttctcttgtcattatcttgtggcattgcattgcatggcatttgaagttatgtcacgaacctagtggttgcgatcgtaccggtaaagcatcatttattgggtataacgatgcagcttcataccttgttgggtatgaaggcaggagttcatatgcatatagcatcgtctaattagtataatgatgcagcttcatatcttgatgggtatgaagggagaagtttatgtgcattgatattcatttcaggatggtttgaatgttggatgtgatgaagttataatatgaatataatatggtaaattatgccacatggttatatgggatttcagatatacgatatgtggacttttaattgcattctactattgtcttttatttttaacctta

SEQ ID NO: 51815 - DNA, 148 bp, Setaria italica
  Peptide Sequence Number=SeqID_117789
acgtctacatggtcggtaaaggtgcaaaggtgactctgaaccagtcagggatggtgttgcacctttaccgaccatgtagacgtacaagcctcatagcaataccaccgatcgaggagatatgctagatcggtggtattgctatgaggct

SEQ ID NO: 51816 - DNA, 281 bp, Setaria italica
  Peptide Sequence Number=SeqID_117790
tatttgtctaagtttctttttctaacttctagtcttgtaggggtttattctagtctttgtctcaacagataatgtgacatttgaattgctgcggttccttttggatgaggcaatagccgttgttgcatttgttgtccattcatttgtcctgttagctcaggcgatcaccctgtcaacatgtattattgcccacaacaatgcattattggctcttctggtatcaaacaattttgctgagatcaaaagcaatgtatttaagcgtgttagcaaagagaaccttc

SEQ ID NO: 51817 - DNA, 379 bp, Setaria italica
  misc_feature (11)..(11): n is a, c, g, or t
  Peptide Sequence Number=SeqID_117791
gttatactgcngtccttcggacattcatggagccaagtttaccgatggcccttgattggtgccgcagtgactgcatttgatgtctgtacttccttgcttcgttcttggcagaatgggtgtcgagatccaccttgttaacgatgtgattcatgagatctatgctcacatcatcttttctctctctttcctttttgcctttcttactttgtgaattgtgactatagcttagagggctcggtgtaggaggtattttcttcttttctttctccaaattactaataccagaaaaaataataacctaggacaacgaagacaattagtagtaaactacaagtaccggactaggaaggacaataaaatttagaagacaaggatgttt

SEQ ID NO: 51818 - DNA, 253 bp, Setaria italica
  Peptide Sequence Number=SeqID_117792
tgcaaaatggcatggaaggttcctagctaactttcgcaagttagtcagctctgcattggtaagtgtcgaacgcattccagttggaagaactctatatggtgttttatactcagggattgtttgaggcataaatttgagcaaggagaaatgaaagaagcatcttccagatcagaaaagcaaaagctttacaggaaactcgaacacaagctttccgttgctcaggcaaaaatcatagagcagaacgcttactata

SEQ ID NO: 51819 - DNA, 227 bp, Setaria italica
  Peptide Sequence Number=SeqID_117793
gtaaacatgtacactgtagcttgactctggcatgattcgcatggtacattcgcggtttaccttgcgtgtaatgatgtctgatgcataacgataccaagtaccaagctacagtgtacatgtttacaacgacagtacgacacaccgattatactctgcagaaacctgagacacatatcaatagctatgttcagaacatataggagcacgggtattcatctgttaaacag

SEQ ID NO: 51820 - DNA, 214 bp, Setaria italica
  Peptide Sequence Number=SeqID_117794
ttctgcaaggtatataaagtacaaccctgaggatttggagaaccaggtctcagatttctttgaagggaaaaagccaaatgcttgatggtcaaggtgagtgctaagtcccagactgtgtttccatatagaagtcatatacattattagaaggctatgtagcctggtcccttttttatgttcgctttgttggatctgtaagagcaagtatgaaaac

SEQ ID NO: 51821 - DNA, 263 bp, Setaria italica
  Peptide Sequence Number=SeqID_117795
tcatgagctgtgtaattccaattcttacattttgccctcttttgttgattgtaacatctcgtgactattgtttgacttcaaagaatgttggtgcttggcatttttatgtacaattatactagcagttatgtccacatttaacttgctgcaaccattcttatgttcagcagtgtctgttgcagccttttgttatattcatttgttcgtgatatacaaaaagttaattaagtttaaccttagttactaaggtactaaaaaaaaaa

SEQ ID NO: 51822 - DNA, 355 bp, Setaria italica
  misc_feature (85)..(85): n is a, c, g, or t
  Peptide Sequence Number=SeqID_117796
ggatcatatacatcagcatcagcaacagctgaagtggtgcttccatttagctttactgcgtcgcttgcaacaccagatttgaccncttttgcaggaacacttttactgaccgaaccagtacctccctcattttggattcccagtccttgagtatttggaacagatactggaagattgaattgcgagagactctgcatatcatcaacaacaattctattaacaccatgctccatggggcacatatcccctctcaggcaaaatccacccacttgggatgcaaggtcctattcagcctgcagtatctcctttgattgatcttggcctgcctcgtcaacgctgtagagacttcgaggaa

SEQ ID NO: 51823 - DNA, 287 bp, Setaria italica
  Peptide Sequence Number=SeqID_117797
gcacaactatgtgccgttcttgttctctgtcttccacttcttcaccttctcttcctccattatgattttctccgtcacagcctcgatctgagcagccacctctgctagagactgctcgacagatggcacatgcctggcagaaggatcgcccatctgctgcaagaggttctccctcttcctctgcaggtctttcagctctgctgtgtacatctccttccggttcactcagaatgagataaggttcagtgtgatggcaatcttgaagaaccggaaggagatgtacacag

SEQ ID NO: 51824 - DNA, 299 bp, Setaria italica
  Peptide Sequence Number=SeqID_117798
ggaaattgaacaagaacggcacatagttgtgcttctcctcatgttctctgtcttccacttcttcaccttctcttcctccattatgattttctccgtcacagcctcgatctgagcagccacctctgctagagactgctcgacagatggcacatgcctggcagaaggatcgcccatctgctgcaagaggttctccctcttcctctgcaggtctttcagctctgctgtgtacatctccttccggttattcaagagcacattgatcggttcactcagaatgagataaggttcagtgtgatgga

SEQ ID NO: 51825 - DNA, 453 bp, Setaria italica
  Peptide Sequence Number=SeqID_117799
gactcatcaattccaagaaagaccgtcatcttcccataggaaggatgatgcggtggcaaataaagagcccacagtggtgagttttaaacttccacggtcgtttaaatagatgttttgtctaaatgcctcataatatactttggtcattgcatatactagtacacagttttcttcccccattcctatattctgttggcactttggtcaatataaatgcttccgtgtaagtgtaaatctatagaatgcaattggaaatggtcgcacatggactgtattccccacatgctaccaaagtatagaaatcagtttgttgctggcatatgatcagagtttttcctccttgtgtaggtaaatggcacaaagaagaacagaatccactattctgggccattgatgcctcctggagtgaacatggatgagatccttagagagcatgagcgacagatccaacaa

SEQ ID NO: 51826 - DNA, 236 bp, Setaria italica
  Peptide Sequence Number=SeqID_117800
aagtttggttcagttcggtctggaccccgatttgagcagcaaccatcaaaagcatagagaatagcgttggatcccttttacttttccgtccctcaagcggagaggtttttgttttgccagaaactcgactccctgatgcggtttggtatacccaggaggcagctacaaaaagaaaacctgttcatgtagagatttcagacagcctatgctaagctcggggcggtaaatctctacat

SEQ ID NO: 51827 - DNA, 238 bp, Setaria italica
  Peptide Sequence Number=SeqID_117801
tacatgcaacatcattggcatggatcaggttgtttgatccagaaatacgagttttgtgacattgctgttaatatgttgttttctttttatagttcttcacaacaaagccttatgcctgcgatccatcaagtctacccaaatatcctccaagcaaggaatacgatgccaagcttcgagatgaagaagctaggaggcaaagagcagctgctaaaggcaggaagtctgaagctggacggag

SEQ ID NO: 51828 - DNA, 216 bp, Setaria italica
  Peptide Sequence Number=SeqID_117802
cggaaaaattgtggctctgaagaaagtcggtttgccaatatggaccctgagagtgtccgatttatggccagggaaattcacatcttaagaaggcttgatcatccaaacgttgtgaagcttgaaggtttggtgacgtcacgcatgtcgagcagcttgtatcttgtatttgtaattactattggtagtctattgtacctttgttcttaggttactttt

SEQ ID NO: 51829 - DNA, 243 bp, Setaria italica
  Peptide Sequence Number=SeqID_117803
aataagcctgattctgtttgcacgatgtatcttttgcattgatgctgtttttactgtgtcttgattcagttatcgaaaaaatgcagatgactttgttgagatgttcaggacgaggactggttataagatcgttgagcctgctcatatggtattgttcattgccccagcaattttatgccttactttttcctgacaaatggaacctgctaatttactaagcagtaagcacttgaaggcaagaca

SEQ ID NO: 51830 - DNA, 372 bp, Setaria italica
  Peptide Sequence Number=SeqID_117804
acagataataaatagagtccctaggatgagaagccccaacacacctccaactgttccaatcacaatgcctattttcgaaccacgggatgaaccttggtaagacacatttgaggcgcatgtatgggggaagtttgctccacaggtcaagttattacctgaaaaaaagtgatcacttattccacagtacttgtaacgtgcaacttgaaagagttgaggaggtatttgaccagtgagtttattgtaagccagccgaatgtctgtcaagcttgagatgcttgctagcgtttcaggaatagatccattgagatagtttttgacttcagtatcagaagctgaagctttgaaagctggccaagagaaaggctgggtatt

SEQ ID NO: 51831 - DNA, 254 bp, Setaria italica
  Peptide Sequence Number=SeqID_117805
atgtatgggggaaggtttgctccacaggtcaagttattacctgaaaattgtaacgtgcaacttgaaagagttgaggaggtatttgaccagtgagtttattgtaagccagccgaatgtctgtcaagcttgagatgcttgctagcgtttcaggaatagatccattgagatagttttgactcagtatcagaagctgaagctttgaaagctggccaagagaagctggtattggcccaaccaacaggttgtcttccaaa

SEQ ID NO: 51832 - DNA, 243 bp, Setaria italica
  Peptide Sequence Number=SeqID_117806
agacaacaagttaaactaagagaagtggagcagggttgggcagctgcacaagcctgcataaggagttatccaaaatgatctgctttgatccctttttatgttgcctcacatcctgggaggctgcgcccgcctgtattgcccatgttttggatgcctccgttgaagatgctgctataccctattcctttccaccatctcgtcaaggtgatgccccatatcatatggcagtgtaggtcctggtta

SEQ ID NO: 51833 - DNA, 253 bp, Setaria italica
  misc_feature (81)..(81): n is a, c, g, or t
  Peptide Sequence Number=SeqID_117807
acaagttaactagagaagtggagcaggttgggcagctgcacaagcctgcataaggagttatccaaaatgatctgctttganccctttttttatgttgcctcacatcctgggaggctgcgcccgcctgagactgccaaggcaatagtagtggttttgttccctggtggttaacctttagaattttaagttaaacttaaaaagtaaaaaaatttaaaaaaaaagggtaaaaaactaaaaaattaaaaataaaaaa

SEQ ID NO: 51834 - DNA, 352 bp, Setaria italica
  Peptide Sequence Number=SeqID_117808
taagttaacttaaataacaaagaactacaatagttagactagacaatacaagcttctattgctgtaaagggaaagtggaatctgtcattcactttgatctggaacactgttgtttggctcatggtcataaacttcattatccagatagttacttcttcagcacagggttatcttagaacacagcagcagctggagatcagtaaaaaagttgtcagagaccaaactttctgcctctgaaccttcttctcgctaatccaaatgattcaacctggatgatcaatctgatttgttcatttgtgtgtatacttatattgagtttagcgaggaaacttgcatgaagaatgtggtaact

SEQ ID NO: 51835 - DNA, 315 bp, Setaria italica
  Peptide Sequence Number=SeqID_117809
ttcagcacagggttatcttagaacacagcagcagctggagatcagtaaaaagttgtcagagaccaaactttctgcctctgaaccttcttctcgctaatcagattgatcatccaggttgaatcatttggattagcgagaagaaggttcaacctggatgatcaatctgatttgttcatttgtgtgtatacttatattgagtttagcgaggaaacttgcatgaagaatgtggtaactgatttgggaaattcaaaggattgtcaccaatagtctgctgctacttcttctggaaagagcattgatacattgtacataacc

SEQ ID NO: 51836 - DNA, 406 bp, Setaria italica
  Peptide Sequence Number=SeqID_117810
ctctatacccacagttctccatatcaactagtggttcaagtctccgtttattggagagcatattcagagaggatgagtatttggtgaatatgcaacatacagttataccttcatggtatcaacgagaaggatatatcaaggctatggcaactttgattgagaatgaactgacaaaattttcagaaccccaaaaggttatgatatttttcagtgcccatggagttcctctggcatatgttgaagaagctggtgatccttataaagcagagatggaagaatgtatcgatctcatcatggaagaacttgaaaaaaagaggaataatgaatccatgtatacttgcttatcagagccttgacggttctgtcccatctccatctggacgttttgatgctgtatatgaatgct

SEQ ID NO: 51837 - DNA, 433 bp, Setaria italica
  misc_feature (404)..(404): n is a, c, g, or t
  misc_feature (421)..(421): n is a, c, g, or t
  Peptide Sequence Number=SeqID_117811
gatcctgcacaatactcaagactaggactagtgccaagaagagctgatctggaagaattggaatcttcttcaaactgccattattttcctctgggaatgctaatcttggagtctttggacaatgtataaacacctcatccctcacatcatcactgactcgctgaagtctccgcgtattttggctcatcatgacccacttgctagtagctctgccaataacttcaccattagccaagtccttgaggatccaatcacgacgagtaccaattcttccatcttcttggcaccacgtttcaatctcaacaacatcaccccaagctggatacttgtagatctcaatgtgcattcggtttgtcacccaaatgagtccaagttttctcattgtagtggtcgtggcaaaaacntcagtggagaacccaanactttgtgcatg

SEQ ID NO: 51838 - DNA, 388 bp, Setaria italica
  Peptide Sequence Number=SeqID_117812
cttggagaaacgctggttattgcatcacaaaacattgtccactggtacaaaacggacagacagttacagctccaacaaatgtcacaaattggcagcgtcagatacgttccaaagggtaacaaacccatcacaaaaattgtggtacaatcggttctcaaaggacgctaggccagccgcgaagcaaaatgtagggcaaaatacacagaaccaaaaccacttttatctagctagcttcctccagacggtgcgcccacggttgatctcatcaccgttcctggcaaatctcaagcagtgcaggaactgctgctgctcttctttgtgttgcgccgcagaagctagtaaccgtttctattgtctttttcttccttcccctttccttcttattgtt

SEQ ID NO: 51839 - DNA, 231 bp, Setaria italica
  Peptide Sequence Number=SeqID_117813
accatgcacaaagtgttgggttctccactgatggttacatcctacctcctggaggaggttggcgatggtctcgacggtggccgtcttgttgatgcccacctcctccaggaggtaggatgtaaccatgcacaaagtgttgggttctccactgatggttttgccacgaccaccccaagctggatacttgtagatctcaatgtgcattcggtttgtcacccaaattgagttcct

SEQ ID NO: 51840 - DNA, 314 bp, Setaria italica
  Peptide Sequence Number=SeqID_117814
tgcctccgaactacctcaaatgggtatgtggcggcttcagcacaacaaccagcaatggccccatagagtaaggttctgacagtacccagctcaagttggtctaatgcatttgcctcttgtttttgttgtttcatcatcgataccctcttctttccttcaggggaatgcagataagccatcttcaatatgtcatacactccataaaatacagcgcctgagggtgccatgctgataagagaaggcactaatcccttgtacagagagaagaattcctttctaagttttggtaattactaattagttaggttacgtta

SEQ ID NO: 51841 - DNA, 429 bp, Setaria italica
  misc_feature (410)..(410): n is a, c, g, or t
  Peptide Sequence Number=SeqID_117815
cagagacggcgagggactgggagaacagaaatgctgaattggaggagaagctgaaggagctggaagctcaggtggaggaagctaacagagccaaggatgaagcaaaagctgaagcactggagtggaaagagaagctattggacaaagagaatgaactgcagaacataaaacaggagaatgatgagctgcaggtcaaagaatcgaccgcctctgttgccttatccatctcaactctcattgcactaatttcttcttcagacttcttgatggagctcataaagctgacctctttggattgccattcctcagatgtgttctttgcttctgcttccattcgctccaccgtcttcttcaagcagactctctcgtagtttgcttcatcaagcataacctcatagttctcctgggtnttcttgagattaatgttga

SEQ ID NO: 51842 - DNA, 396 bp, Setaria italica
  Peptide Sequence Number=SeqID_117816
aattagtgcaatgagagttgagatggataaggcaacagagacggcgagggactgggagaacagaaatgctgaattggaggagaagctgaaggagctggaagctcaggtggaggaagctaacagagccaaggatgaagctccaagcactggaagaagagaagatggatgctatcaacaatgagaacaatgcaagttcacaaatggagtcaatatgtgaagagaaggacaagctggctcaggaactagaagctagcaaagatgaatatgagaaagttagaaggctatggaagatctagcctcagcgttgcatgaaatgtccggtgaagcaagagaggcacgggaaaggtacctcaacaaacaagaagagattgagcgagccaaggcacaaatagagga

SEQ ID NO: 51843 - DNA, 418 bp, Setaria italica
  Peptide Sequence Number=SeqID_117817
tcaaattcgtggatatgccaccttttcgtccagttgattttgagtccaaagcaacatctttaacaggcttggaagcttcggatctttctcgtgactttggcttgtaagaatagcagcattaacttcacttgcagttttcaaacgttgagaaacatccaacagttccccataagggcaaggttttttacatcttcaaaaaaccagtagtgctacggttttctctatttcctcaagaaatgtttgattttcttcaccccttggtgcgagttcttcctgagcaaactccaaagcctcacttatttttcccgcgcgaatcaattctattagtttctgttgctgaagatgaaagtatagctggggatttgtgtccagaatctgcatataatcatccaagtcagtataaggagccatgagttaa

SEQ ID NO: 51844 - DNA, 293 bp, Setaria italica
  Peptide Sequence Number=SeqID_117818
tttttctaaggtccttaaaatttcgtacttgtaactactattttgttgttatttgtctattgttaacttcaagtctttgaaagttatgtccatgaaaaatcaaatccaatgtttttccactgactgaaagggggcgaaaaatgcattctacatcatgtacaggtacagcacgggtgacgttttctgaccaactgcttgcattgagctcacacactgaagaaagagtgcactcaatcgctgcaggcgatgacctattgacagatccagggaagaacgtgtgcaggcaccaggca

SEQ ID NO: 51845 - DNA, 259 bp, Setaria italica
  Peptide Sequence Number=SeqID_117819
cgtacttcaaggtcttcaacagcacagcaaaatacccaaatatgcatctcggtggctattccaaatttccagacaggttcaacataagctggaagtaaagtaatattgataggaacagagtcagaatcaaccgtggggttaagatcgttgattttctcgatggcctcctgaacattgcccgattgtactgctttcttaacctccatccgatccgtgatggtcgccaggtcaatctccggctgggtgccggactcgatgc

SEQ ID NO: 51846 - DNA, 242 bp, Setaria italica
  Peptide Sequence Number=SeqID_117820
aacataccacgaaattaggtgaagaaacaggcatacatacagatatacatcagcttctacggaactgcactgcttggtctaggtcagtaatagaatcaaaggcctgaagcaagacatccaaatattgttctattcatgggtgctgtcactgaaccgccgaacctatcgatagtcacagaatacttgtctaggggtagtttgtataaacttttgcataggagtggtgcaaaggaagttctgga

SEQ ID NO: 51847 - DNA, 494 bp, Setaria italica
  Peptide Sequence Number=SeqID_117821
aatgttctatacagcatacgttgtagagaaaacataaaaattgagcacaagaagacaaaatggacagtagattgtgttttgatttttgtatttacttgaactcaatctccttgcaaatatctaagtaatctcacattcaacaatgcatagatacttcaaattttggtaaggaacagaactcaatgaaaatggcagcatacctggagatatggaaagaagttgctaggtacactttatttgaaagtgtagatgcaggaaaccatattctcagaatgaagtgatgctgacaatggattattcagttatagcaggtcaattcaaaacctccttcgtgttgatcttatcacgacaactcactaaaatacaccttcctgtaactctataaagcaggctacgaatctgaacgaatcagctgcggcactggaaccttaattaatggtctcaaagcttccataatatttgtaaatgagggtcttcgccatggctcacttaca

SEQ ID NO: 51848 - DNA, 269 bp, Setaria italica
  Peptide Sequence Number=SeqID_117822
ccgaaagacattcatgtctgcttgctgatattcagcttcggcgacaacaatacaggtactatcactcacctaatttcgtggtatgttacattacaatttacaagagatgaagaaacaggcatacatacagatatacatcagcttctacggaactgcactgcttggtctaggtcagtaatagaatcaaaggcctgaagcaagtcagccaaaatcttttgttttccagtctatagatttctttgtacagtatgtaactaaaggtagccatg

SEQ ID NO: 51849 - DNA, 466 bp, Setaria italica
  misc_feature (340)..(340): n is a, c, g, or t
  Peptide Sequence Number=SeqID_117823
aaatctttgtttcatggctacctttagttacatactgtacaaagaaatctatagactggaatttacaggaaatggtcaggaaatttgaacccaacgtgcattctctgatgtgagcaagatatcatcacaggataactccgtataagaaacaaactgaaaatccaaattagcaaaggatgtcatcccacatctcatggggaagttagactaacagttccatctgatatccattgaagcaacatgcagacctgcaagtagttattatagcctcgtcagcactggagatatggaaagaagttgctaggtacactttgtttgaaagtgtagatgcaggaaaccntattctcagaatgaagtgatgctgacaatggattattcagttatagcaggtcaattcaaaacctcttcgtgttgatcttatcacgacaactcactaaatacaccttcctagtaactatataaagca

SEQ ID NO: 51850 - DNA, 242 bp, Setaria italica
  Peptide Sequence Number=SeqID_117824
ccgttacaataatcattgcactaattccatgctagggcaattgatgtagccatactatcacgaaaggtatccatagtcacaaagcttgattccgaagttgatccatcggaggcatgttgagacacggcatacttgttgtacctttccggaatagtaggcatgtaggtgggatctctatcaaaattagcaaagtccacatcaacgctagcatgttcacgtatgaaattgtgtagaaccatagg

SEQ ID NO: 51851 - DNA, 441 bp, Setaria italica
  Peptide Sequence Number=SeqID_117825
gatcactgtttgtcagttcccttttcccttgacatggcaccttacctgtcatcatccatcctcagaagtagatatggtaaccgcatatttccagcagaagctagtgacgcagatgcagtttcagaactgtcatcagaattcgagatattcgcagtaatcacacatagtggtaaactagaagctggccattatgtgacatatctgaggttaaacaatcactggtacaaatgtgattgtattgtccttgggttaacgttagagtcgaggagcatactgtcagaacttctcaggcatacatgctcttctatgtgcagaagacactctactacaaagcttgtgaaagagcagctgcagtctgatctgaactctgaagctaaactatttgtattggtctacttacttcctactaactaccaagactaaagtttttctatttaaatt

SEQ ID NO: 51852 - DNA, 325 bp, Setaria italica
  Peptide Sequence Number=SeqID_117826
gattttgaatctaggatcaagaataacaggtaacataaccacaagtacgaattttgccaataccgattgaacatttcctgcatctccgtaaccattgtagcaatttctccatgctcatttgatgcttcctcttgcaaaaactgttctcactttacatatctcattgaagtacatatttgctgttggacaattaggactagaaataacttcaataacacgataaaacgtcctcaaaatcttgacaaaataggaactaacaaagaacaaaactaaccgaaataaataacttaactaaggaaagaaaacgaaaccaaaacttaactta

SEQ ID NO: 51853 - DNA, 272 bp, Setaria italica
  Peptide Sequence Number=SeqID_117827
agcgatagcacgcgcacagaaaggcgaagccgaacaccccttccccctcccggctcccgccgccactgcccgctccaccgtcctacggccatgggcgacaacagcgcggcggacgcgccggcgccgggcaggttcggcaggatctgcgtcttctgcggcagcaaccccggcaaccgcgcggtcttcggggacgccgcgctcgacctcgggaaagagctggtaatgcgccgaccaatggcgaggcagcgtcccaagcccccctcccctccccc

SEQ ID NO: 51854 - DNA, 253 bp, Setaria italica
  Peptide Sequence Number=SeqID_117828
acggttcttgatggcggctgcagtgtcctcggggtgatcccaagagcactcatgccccttgaggtgcgtattaaatttttgctgtcctttttggttcttctttgtgtacgcgtagaactatcgattgctatatcattgtcaattccagtataactctgctcaagcggctaactggttcataagagtcctcaagttaaaaagacagaatatggttcgcgtttgattttgttcttgctgacagatggttcatttg

SEQ ID NO: 51855 - DNA, 243 bp, Setaria italica
  Peptide Sequence Number=SeqID_117829
aactacagacccaacagttgacacatgaccaccggaatagcctttcaggaattggcgtgcttcctctttggtggttggcttttctctaataatcctatgtcagaggtgattagaagtgttggttgattgtcttctttctggtaatcagcaatgttcagtctagacatgatagcatcagccttggcctccgcgagaaccatcaccaggtcgtcaggatcctcccgcctgatgctcttctcgtcg

SEQ ID NO: 51856 - DNA, 275 bp, Setaria italica
  Peptide Sequence Number=SeqID_117830
actactaccagatcctcggcctcgaaaaggactgcactgtcgaggacgtgcgcaaggcctaccgcaagctctcgctcaaggtgcaccctgacaagaacaaggcccctggtgcagaggacgccttcaaggccgtctccaaagccttccagtgcctcagtgatgacgagggtcgcaagcgcttatgtacctttgtttggtcttacggtaattagtaagaccaagtaaacaacaaccaacaaggaaggaccctaccaactagacccgtagaacaataa

SEQ ID NO: 51857 - DNA, 205 bp, Setaria italica
  Peptide Sequence Number=SeqID_117831
agaggcggcagcacagtaaatacattcagtagtccaaggtgcagttcaactttctctgcacatagtctgcagtaataatatgttttgcgccataataaagtttctatggcatgcatcaactttatctgctttgtaccataatttactttgtctttattaatgtcaacctattattgttgttctttaacttatttatttagtttta

SEQ ID NO: 51858 - DNA, 514 bp, Setaria italica
  Peptide Sequence Number=SeqID_117832
ttcttaagttcccggtattctaccaagactaaaggacccctaaaatagaaccgctcagtgataaaggaggtgggggtgcaaagacagccaggaggtttgcctagaagcagccaccctttaaagagtgcgtaatagctcactgatcgagcgcccttgcgctgaagatgaacggggctaagcgatctgccgaagctgtgggatgtcaaaatgcatcggtaggggagcgttccgccttagagggaagcaaacgcgaaagcgggggtcgacgaagcggaagcgagaatgtcggcttgagtaacgaaaacattggtgagaatccaatgccccgaaaaccaggtttcctccgcaaggttcgtccacggagggtgagtcagggcctaagatcaggccgaaaggcgtagtcgatggacaacaggtcaatattcctgtactaccccttgttggtacggagggacggaggaggctaggttagccgaaagatggttataggtttaaggacacaaggtgaccctgc

SEQ ID NO: 51859 - DNA, 294 bp, Setaria italica
  Peptide Sequence Number=SeqID_117833
gtggtggtgttgagagagaggtttctgcatgaagacaaaagcgggggtcggacgaagcggaagcgagaatgtcggcttgagtaacgaaaacattggtgagaatccaatgccccgaaaacccaaggtttcctccgcaaggttcgtccacggagggtgagtcagggcctaagatcaggccgaaaggcgtagtcgatggacaacaggtcaatattcctgtactaccccttgttggtacggagggacggaggaggctaggttagccgaaagatggttataggtttaaggacacaaggt

SEQ ID NO: 51860 - DNA, 322 bp, Setaria italica
  Peptide Sequence Number=SeqID_117834
acacgccatacacacgcacatatgacatgcatggataagcaaggacaaaacctgaaaccacaaacatactgatggaaccatgtggatagcacatgtgcataaaacgcaagtcaacctcttctgctggtcctctttcagcctacccatgttggtggcatcacatcagagatcattgcataaatgatcatttgcccctctatgtcaaccctgctgaatcataggttctcatgatcagacataactttaccaattgcatcaggatatgcaaggcaggcaaaagcctaggagtatctgaagcaaaatcatctttttgttttcttgt

SEQ ID NO: 51861 - DNA, 160 bp, Setaria italica
  misc_feature (135)..(160): n is a, c, g, or t
  Peptide Sequence Number=SeqID_117835
gtttgttgcgttaaggcagtgagtgaacatggatatagtagcttcgataaatcagtttttagttgtagagctatagtgtaataaatttgttcaattgattcagagtcgcagaattgtactgtcagttgcttcggnnnnnnnnnnnnnnnnnnnnnnnnnn

SEQ ID NO: 51862 - DNA, 344 bp, Setaria italica
  Peptide Sequence Number=SeqID_117836
ggaagctcacatcaacacgttcccacggaacttgcgtaaggcctcttatcatctcctcttctgggtcatagaaatcagcatgggcttctgtttcattattgtttgtaacttccttttcaacatagacaatatgtggatacttttcatcacgaacaagaagacgatgttttggcaactcgtgttgacgtcggattgatgatgtcctccacccaaccatatcttttcgtttagttaagtggataccatgtcagaggtaagtgtaactcaatatgaataagtacagaaacaagaaatgaggatcttaaaggattacgtattctaaaatttagtctatttagtctatt

SEQ ID NO: 51863 - DNA, 238 bp, Setaria italica
  Peptide Sequence Number=SeqID_117837
tactttgtttattgattttcagtatctgcatctgaactgggcacagggaccgctgatacagaaacatcatccaattttggcaatgcatcaggtgcatccgtctctaaaagaattctatccaagggtattgacttcagcatttgctttgctttagtggatttcatgcctgtcaagaagccagacaatgaaaagtagcaacctaaatttgcaaggccaggcaccatttctgcagatccca

SEQ ID NO: 51864 - DNA, 235 bp, Setaria italica
  misc_feature (216)..(216): n is a, c, g, or t
  Peptide Sequence Number=SeqID_117838
aggaaaccactgggtgaacaagctgggaagacgagctcagagcttcagggaccatggtgagtgatcaacaacttttatatactaccatgtaacttcacctcagcacaccccagtggctgtggatgatcgaacagtaggtgttcgtgaactgacgtgttgtgtctcgcggtgcgcagtgacactggggccgaagctctcggagacggtgaagggaanctgagcctgggcgcgagga

SEQ ID NO: 51865 - DNA, 448 bp, Setaria italica
  Peptide Sequence Number=SeqID_117839
gtccttgaccgctaccggatgacccattttactttcatccacttgtgctccctcagatggatgcactttccattgcagctcataattggaaaaattgtatgtgcctggtgcaaatatgcatacttttagaggaactctagcacagctatctggttggagctcaatttgagcagaactcaatgaacaccaaacatatggtgaaatgctttttgaagattgcttctcatgttgtgtacccttggcactagggatcgccttgatgtcattttccaatgagacatcataccatccaccctgaacactggaaggatcatgtggatggacagtttggcttttctctggcatgacatcagaagtaaccactcttctaccgtaacttcggtattgttgtcttgtcttgttaattttgtttgtttaatttttacctttaactttttggtttattttt

SEQ ID NO: 51866 - DNA, 174 bp, Setaria italica
  Peptide Sequence Number=SeqID_117840
cttttcgttcagttcagtttctccctgatttcctttagatggtcaaatgtacagattattgatcgtaattcttgcttgcttgttcaatgatcaagattcatcgaggcaattacaatgcattgcctattgctagaccaaaaatttccagtccttacttttacaaaaaaaaatcca

SEQ ID NO: 51867 - DNA, 458 bp, Setaria italica
  Peptide Sequence Number=SeqID_117841
gatattaaacaaatccccaatgaagcaaacatttccggtcagaagcttccaggtcaaacaactcaccttgcctgtaagcatttcaaaaagaaggattcccacactccaccaatcggcagccttatcgtgacctcggccctgaacaatttctggggccatgtactcaacagtaccgcacattgagtttgatctagtgttttcatcaaattcctttgccacaccaaagtcagtcagcatggcctagaaatcagacatgtcaggaaggaacaaaaagaaatcaatattaaaatgtatgaagggggcagaagggggggcagaagatatattaatggttccttacatgaccatcagcatccagtaagatgttctcgggcttcaagtctctatgcataataccattggcatggaggtgggctacagcagatacaatttcagcagtatagatgcgtgcaagctcc

SEQ ID NO: 51868 - DNA, 240 bp, Setaria italica
  Peptide Sequence Number=SeqID_117842
ctgctgtttactgttgaatgagaaatgctggatgccagtgctttccctgaactcatgaagccgaagacgtcaacgctggacacaaaaaatggatatttcatatttggttagcgttatctttcacgcaaagaagaccagaaaggagaaaggaaagttgtacgggaaaaaacagacagggataccctatctctgtgtgctattggctgcaactctaaaggaagcttttatgcagaggaaggt

SEQ ID NO: 51869 - DNA, 275 bp, Setaria italica
  Peptide Sequence Number=SeqID_117843
taaccgacctagtacccgacttacccaagaccgtactagaccaagacttactttagtgcagcaatcctttcaacagagagtgaacttcactagacaaatatgttggaagctttatcttctccttcactatcttctgctgaatcttgtctctgtttccaccaacaaacggtggcttgcctgtaagcatttcaaaaaagaaggattcccacactccaccaatcggcagccttatcgtgacctcggccctgaacaatttctgggggccatgtactcaa

SEQ ID NO: 51870 - DNA, 217 bp, Setaria italica
  Peptide Sequence Number=SeqID_117844
ttcttttgaagacttgagaagttttattctaccaaatggtaaattttgatacatgcataaatgcatggaagcaaggtaaagacaagaagcaacttactcctttcaacagagagtgaacttcactagacaaatatgttggaagctttatcttctccttcactatcttctgctgaatcttgtctctgtttccaccaacaaacggtggcttgcctgtaag

SEQ ID NO: 51871 - DNA, 250 bp, Setaria italica
  Peptide Sequence Number=SeqID_117845
caagcgagtctggctataatatatttgcccatgtgtgtataatcttgggggtgtatttggcaacccaagcagaaaaaaggctgctctagccaatgtttgtttcagtggttttggggtctgttctcaatagacggtttcatttaatgtggctcggtttgctccatccatgctaacctcccacatcaacgtgcattgttgtcacacagtattttttgttgacccatattgtctggagaccaaaaaaaaaaac

SEQ ID NO: 51872 - DNA, 265 bp, Setaria italica
  misc_feature (260)..(260): n is a, c, g, or t
  Peptide Sequence Number=SeqID_117846
ttttttttttttaggttcaacgttcttcttacatgtgtaatataatgtggttaaataaatcaagaacaggaaacaatgcctgtggggctttgttgttgccccaaattctgaagactacgaccataaacggagcaaaatcaagaacaagacgaatccactgcacgatcaagaagaagaagcaccgggttgaagagaagcgctgcctagatacatacatacatggcaacacgacgcaggagtgctgcagctaggcgccccanacggt

SEQ ID NO: 51873 - DNA, 237 bp, Setaria italica
  Peptide Sequence Number=SeqID_117847
tgactcgttatttcagtgtgttctaagttctaactgttgtggttatctcccccaatgatgtaggtactgcacttctgtcgtgcgtccaatgctccagaacatacatggcaacacgacgcaggagtgctgcagctaggcgccccacacggtgatcccctgcatcatgttcttgaactcgctgaagtcgacgcggccgtcgcggtcggcgtcgacgttgcagatcatctcctgcaccgg

SEQ ID NO: 51874 - DNA, 266 bp, Setaria italica
  Peptide Sequence Number=SeqID_117848
cttgaatgcagtatcagtccagcataacagtactgtttaatccaagaccagcagcactcatatcactaactattgcataactatcaaaacaaattattgttattggtttctcatgcaagcaagtaaatgggtaaatcggaaggaggataaactttaataaaaaaaactcttaataatcgcaatgtaatctcttaagcaaaactgtcacatgctttctatttttcactggtgtgtatgtacatctaagaagcacgtgtgtgtgtggg

SEQ ID NO: 51875 - DNA, 247 bp, Setaria italica
  Peptide Sequence Number=SeqID_117849
tcatcataagcatcacgcagaaggtagggcctgcgctgggcgacgagggaccccatgaccgtgttgtactcggaggcgttctcggcgtagttccggcgctggtactcctccgtcgaagtcgccgctccgcgccgcgccgtgaacgccgccgccgccgcatggcgcaaccttcctgcgcagccaatacccagaggtgagtctagagatcatgggacactgggtacaacgagatcaccagacgaaaatg

SEQ ID NO: 51876 - DNA, 142 bp, Setaria italica
  Peptide Sequence Number=SeqID_117850
gccatgcgccttcatttcttctaaaagcatgattgctgcatctgagttcttgcattttccgcaagtggagatcaggaagttataaatgttaacctggaaaacttaagaacatcagactaatgaatactccaaaaaggacaaa

SEQ ID NO: 51877 - DNA, 183 bp, Setaria italica
  Peptide Sequence Number=SeqID_117851
tgtcggtcctaggtcgtacggtccgtcgggtcgttcttaggttgggtcgtcgcgccaatccgagccggccgagttgccaagaccgcaagctctgcaagactgcaataacggagatggtgagcgaagaagatgaagaagagaaggcgtgttggggggattggacggaggagatggatggtaact

SEQ ID NO: 51878 - DNA, 249 bp, Setaria italica
  Peptide Sequence Number=SeqID_117852
acccacccgcgcctccgcgaccgcctaccgcgcgcgccgcgcctgcgcgatcccgtgctcctcctactccagcaccagcagcaccttcagatcctcgccgctccgcgcgattaccggcctctccgggagccgacggtgcgccggccgcggcgcgtccgtattacgcgccgtccagggtcaggacaccaccatcgaagatgtgacaaagtcaacatggcaaacacttgtgatggagagtgagcttcctgt

SEQ ID NO: 51879 - DNA, 261 bp, Setaria italica
  Peptide Sequence Number=SeqID_117853
gacttcaacggcgacgcccccgccgccgacccgcgcaacgccggcgccaagagcaagggcaggcgcggctgacggctccgggcgttggagccatgcgcatggtcgccgtggctcgctatcatcatcagtcctaagttacgtgcagaagagacgtgcgtgtcatgtgtgtgtcgtggtgaaagtgatgtggtgttctgtacggggcagtactgctaaggattaagattttgtctacggaaaagaaaaaaaaaaaaaaaaaaa

SEQ ID NO: 51880 - DNA, 328 bp, Setaria italica
  Peptide Sequence Number=SeqID_117854
ctccattggacctcatatcatctgcgtcgacttccagatgcagttttttatcatcactttcttccgcatcttcattttctgcaacagaacgggtaaattggcagtgtacaagagagcgaaaaggttgtcttcgagaaggaagcacaggctgaaaacagaaagcaagagactgaatcgtcgaacgatgaattggattctaagaaagaggacagcagcactgagaacacaaacggcacgaccgtaccagaagatacggccagtaaagtggcaatgtccccgacgaaaccgcagcagcagcagaaaaagaacaagcctctttttcagtaag

SEQ ID NO: 51881 - DNA, 346 bp, Setaria italica
  Peptide Sequence Number=SeqID_117855
aagaaagaaaaactaaaagaactaaaattaagtagaagactaggaatagaatgctagagatagagaggaagaaaagaagaaaaagaagacaagtaggaaggaatacttaactagctgcattggacaaggcatgttgtgaagcgcaggaagcacatgataggtttcagaagaaagaagatgattacgagcatgctcttgctcagataggtgatctgaagatgtccctaaagagtatggaggagagctatgaggcaatgcttgatgaggcaaaccatgacataactcgcctaagggaaactgtcgagaagctggaggctgaggtgagcaagtacaggagaagaatgtg

SEQ ID NO: 51882 - DNA, 350 bp, Setaria italica
  Peptide Sequence Number=SeqID_117856
gctgaggccagcatggctaacgcaggaagcaaagactgagataggagaggcttcaagagaaactgacgtatacagaatcggcagttgctgaagccgataaggctgtgcaggaggcaaaggcggagagttcgcagctgaaggagaggttacttgacaaagagaatgcgttgcagaacctaacccaggagaatgatgagttcaggatgcgagaagctgatgccatgaagaaaatagaggagctgtctgctcttctcgctgaagcgatgactaagaagcatcctgaaagaaggaaagaagaaagctaagtagaatacgtaggaatagaaggtagacaacaaattactagacga

SEQ ID NO: 51883 - DNA, 203 bp, Setaria italica
  Peptide Sequence Number=SeqID_117857
gcgcgtgaagaatttacccgttctgttgcagaaaatgaagatgcggaagaaagtgatgccatgaagaaaatagaggagctgtctgctcttctcgctgaagcgatgactaagaagcatcctgaagaggaagagaagctagtgatcgtggatgaggtgcacaattctgcgcgtgaagaatttacccgttcttccgcatcttcatt

SEQ ID NO: 51884 - DNA, 263 bp, Setaria italica
  Peptide Sequence Number=SeqID_117858
cggggaagggatgttgaggagccctttgtggccaccgttcctcacaccgcagaggtgaaatcctatcgcgtccggtggctgtgtttgtcgttagatccaaaggtttaattcttactagacaaggttaaccttgttgttctggttgccgaggcgtccggctccccattcctcttcttgcttcaattgcctgaattgagttattggtgataattattgcaactccaaggaaatttcgttcctgatacggataaaaaaaaaaaaaa

SEQ ID NO: 51885 - DNA, 183 bp, Setaria italica
  Peptide Sequence Number=SeqID_117859
tccccattcctcttcttgcttcaattgcctgaattgagttattggtgataattattgcaactccaaggaaatttcgttcctgatacggataaattgacacagtattgtgtatgttagtactaataattaagtaatacaaattaccaataaataggaagacaattagaaaatactacaaaaaaa

SEQ ID NO: 51886 - DNA, 207 bp, Setaria italica
  Peptide Sequence Number=SeqID_117860
ttttttttagtaaatatggtagaattgaatggaattctgatggctctagtttattctccttagctaatcacaaggtacccgcctttgggccccagaggacatgagtggtgtgcaaagattccaatggaaacgaaaaggagaagaaattgttagaaagcatccccttaattacaacaatcttctctccagaggagcactgaaattgca

SEQ ID NO: 51887 - DNA, 202 bp, Setaria italica
  Peptide Sequence Number=SeqID_117861
cagagtttctacgaactggcagagtaattgctgagagtgtgatatatagctatggaactataactttttccatcacggctattcttcatcagtccaaaactagacaagcgaggatcaccttcctcatcaaaaagtactctgtaagcattcaagtcatgatagattttccggttctctgcattgcaatggtcgagtgcttgtg

SEQ ID NO: 51888 - DNA, 214 bp, Setaria italica
  Peptide Sequence Number=SeqID_117862
cctatcccctgtgtgccttgcctatctcctgttgcgtgtctcagtcaagtatctctgtactgtttgtgtacttttgtgtgccagagacaaaagggaaaacactggagcagattgaaatgatgtttgaaagtggggacgaatggagaggaggtgaaattgagcttgaggatacacagcatttaataccgagtgataagaagtctgtacctcttgg

SEQ ID NO: 51889 - DNA, 199 bp, Setaria italica
  Peptide Sequence Number=SeqID_117863
gaccttaacaagccttctggttcaaaaggcgcaaggcaccacgcgtggtgcatcagctcgcaacggacccatgttcggtgagctgaatgtgcagtcctgatcaaggtaattttaagtacagactttgtaattctagccatacaaaatgatcaatgtttagctaatataatatattgcatgttcggtgagctgaatgtgc

SEQ ID NO: 51890 - DNA, 367 bp, Setaria italica
  Peptide Sequence Number=SeqID_117864
taaaaatttcagcaagacagcacgggatttgatgaccagactgcaaaatatcgacaatgataactacccagagacattgtatagaatgttcatcgtcaatgccggtccaggatttaggattctctggagcactgttaagtctttccttgacccaaagacaacttcaaagatacaagtccttggagctaagtttcagaccaagttacttgaaataattaatgcaaatcaactgccagagtttcttggtggctcttgtacctgttcagagcttggaggatgccttaaagatggtcatcagtggcaaagcttgctgtaagaggcaaatagtagcagtttccaatgatgatgagaaaataattgcctacgg

SEQ ID NO: 51891 - DNA, 357 bp, Setaria italica
  Peptide Sequence Number=SeqID_117865
atcaacaagaaatcaagtgctaccgatgtattatgttttactttcttcctatgcagcaggcaaaactgatgaaggctgcaaacgtttctgctggttattctgagtacgatgtatgtgtaccaatgattgacaaagttgtcgatgggacatacttctctgacaacacaaaatgctctgaaagtcgtcatgctcgagtaattgcatggcttgtggcatttgttatgatggtgaccacacttttccgtgcattctttagtcgcattccgaaaaacacactggacaaaagttcggaagtggatgacaacctttcggcttattcactggactactcaacaactaaagaagtaattccgtcct

SEQ ID NO: 51892 - DNA, 367 bp, Setaria italica
  Peptide Sequence Number=SeqID_117866
caacttcaaagatacaagtccttggagctaagtttcagaccaagttacttgaaataattaatgcaaagtaagcactaatgtgtttaatttaatatctccatgaggggcgtcctttttattttgttttttgttgattttctttctttctttttaatttggcaaatctgcagtcaactgccagagtttcttggtggctcttgtacctgttcagagcttggaggatgccttaaaggtgaaaaggggccctggacagacccaaacatattgaagatggtcatcagtggcaaagcttgctgtaagaggcaaatagtagcagtttccaatgatgatgagaaaataattgcctacgggaaactaaaatactctg

SEQ ID NO: 51893 - DNA, 270 bp, Setaria italica
  Peptide Sequence Number=SeqID_117867
aaagaaacgtaaagtaaagtaaaataaacttaaagaaaataaagaaattttaaactaaagaaccgtaacaaccaaaaccaagacctttaccaagacaagactgttctgtatccttccaaagactcaggagtagagaaaagattaagtgcatcgttaagtgtctgaactgcatctgggaatatatcgaggtggagcagtaggtagggctgaacagtagccgatgcttgttacctgcagctttcacaacactctgtaactgccccccaaaat

SEQ ID NO: 51894 - DNA, 239 bp, Setaria italica
  Peptide Sequence Number=SeqID_117868
ttcagtgaaccaaactggatctctggtagttcccatgatctgttcacacttttagtcggacttttgagaggctgaccctggaacaacttcgtctcgtcctccgtgaaggacccaaacagcaacatcttgtcgccgctgccgctgccgccgccactcatctcgactgcggtggggaggccaatctctgtgcgccggctgagacacgcaacagaggataggcaaggcacacaggggatagg

SEQ ID NO: 51895 - DNA, 439 bp, Setaria italica
  Peptide Sequence Number=SeqID_117869
ggtgactactaaagtaaattcatgggaagctgatctaacacgggaacatgaggccttccagtaacacaaatcaaggtcctttctgcttgcttactccaccaaccacatcagagcccagaaacttgtcacagttattcatcagctgcagaggaacaagcagaacttggccagaattcgggatggccacaggcgcgctgtgcttcagggcgtttgccctctcgatggcctgccttctccttgctgttccgctgctagtggctcaagacccttcaaagctgagcctggagtactactccaagacatgcccgaatgtggagcacgtcgtccgtacggagatggagtgcgcagtgcgtgcagatacccgcaatgctgccctgatgcttcgcctacatttccatgactgcttcgtgcagggatgtgatggatcagtgctgcttga

SEQ ID NO: 51896 - DNA, 261 bp, Setaria italica
  Peptide Sequence Number=SeqID_117870
gtggtgacaggtaactaagcaactgcagagtgggtcccgcaactcaggaatacttgcagatggtgactactaaagtaaattcatggggaagctgatctaacacgggaacatgaggccttccagtaacacaaatcaaggtacttgagctacaatctctctggcatgcatgctggcacctgctgttctggattttatttatttttaattttgccacagtcaacacctggaaacatccaaatgatttttattttttaaaaaaga

SEQ ID NO: 51897 - DNA, 239 bp, Setaria italica
  misc_feature (17)..(17): n is a, c, g, or t
  Peptide Sequence Number=SeqID_117871
cctcttgtcaaaaccanctttattccattgcatgagtgcgtgtatgcacagcagttccgtagaggtggtgacaggtaactaagcaactgcagagtgggtcccgcaactcaggaatacttgcagatggtgactactaaagtaaattcatggggaagctgatctaacacgggaacatgaggccttccagtaacacaaatcaaggcccagaaacttgtcacagttattcatcagctgcagag

SEQ ID NO: 51898 - DNA, 240 bp, Setaria italica
  Peptide Sequence Number=SeqID_117872
aaacaaatttcaaatgtggatacactctgaaagtttcataattaggcttgttattcgagcaaaaagaaactttgaaataaaagtcagtatatactatccatgttacagagatgaaaacaatggttgcaggtaggtgggccttactgggacgtcccagtaggaagattggactccaagaaggcaagcctggacctagcaaacagtgacatccccacggctcagcagggccttgtcaccctc

SEQ ID NO: 51899 - DNA, 442 bp, Setaria italica
  Peptide Sequence Number=SeqID_117873
tgtagtcttgtacgtagtattgtattttacggttctaggttgtcctaccttccctttggtaagtaggtattcctagttgttcaaagcaaccttgctatccaaacctctgttccatgtcgacgccttctgccccagtctgccccaaacttcagacataggcatcgccgagttgagttcaggttcagtttcgtcagctaaacctttagagaaaccacagttgaaacctcatatagtacatagtagcagaccgttcctaggaaacctttggcttgagacgaccgagaaaacttgcacatgaacatcggcttggtgcggcagcaacattgttttctatacagagtgtacatagtctagcttataactacagttacagttacagagttgttctgattctgaactagtacagagcagatattattatatatactagtgtgtgtgtagt

SEQ ID NO: 51900 - DNA, 250 bp, Setaria italica
  Peptide Sequence Number=SeqID_117874
cgcgcgcaagatggagaagtacgcgacgaagaagaagcagcagcagcagcagcaggaggccgtccgcgaggtgctcctctccatgctcccgcccggcgcccccgagcagttccggaagctcttcccgccgacgaggtgggcgtgcgagttcaacgccgcgctcaccgtgcccttcttccactggctcgtcggaccctccgaggtcatcgaggtcgaggtcgacggcgtcaagcagaagagcggggtcctc

SEQ ID NO: 51901 - DNA, 431 bp, Setaria italica
  misc_feature (101)..(101): n is a, c, g, or t
  Peptide Sequence Number=SeqID_117875
ctgacatctcaggcatgtgtcctttctccagtccagctatggttgaacttatcattttcatcacatcaggtgacaacttcacttttctattaacaataacnggttcaacaggagcaggcttaaccccagctgattttgcagatttcatagcaagagcttcattctgcaggttgctttttctcctgtggattgacaactgtaaccaaagtatctctatcaacttgctttgtttgtaccttttgctggtttgcggatgaacagatgaatcacagcatcatcccccttgctaatatcagcaatcagctggtggtcctcaagctccttaccgtcatattcaaacttgtgaatacctaccgggttaaccaaataatacctacaatacaaccctacaatacaagacaaagacttaagtactttaagaataatttaca

SEQ ID NO: 51902 - DNA, 234 bp, Setaria italica
  Peptide Sequence Number=SeqID_117876
caagcccgcgagccattcaataatgaaaccattgaatacatcaaatcacttgatgctgagaaagacatcaagcttctcaagttccatggtttcattattgaatggctcgcgggcttggggccagtagagccactcaaacgtacaatcttcaaacttctcaggcaagcagtagccatgatcaattggaatcagcttgtagttgccaccttcttcctccttgtgcactaggatatt

SEQ ID NO: 51903 - DNA, 258 bp, Setaria italica
  Peptide Sequence Number=SeqID_117877
tcttaagaaaccaataatctgaaatcatagaccgtcacctcaacaaggagtttgcttagagtttcagatatggtttctaagaacatgttttcacttgaccctgggagaacagcatcctctgcttcctggatgatgtcctcaatctcagagcctctattcacagtttccctacacagtatgtgccctatgtcatatggtgtaaggccacgagctgcacctttcttcagaagcatggtgctgatgcgcaggacacgagcg

SEQ ID NO: 51904 - DNA, 232 bp, Setaria italica
  Peptide Sequence Number=SeqID_117878
gaagcagaggatgctgttctcccagggtcaagtgaaaacatgttcttagaaaccatatctgaaatcatagaccgtcacctcaacaaggagtttccctacacagtatgtgccctatgtcatatggtgtaaggccacgagctgcacctttcttcagaagcatggtgctgatgcgcaggacacgagcgcatcttggagacagctcccacccatggaacttgagaagcttgatgtt

SEQ ID NO: 51905 - DNA, 241 bp, Setaria italica
  Peptide Sequence Number=SeqID_117879
caggtccagcgaaaatccatgacaagaaacagtcaagacacaaatacacaattcacaccacgctgacatgagcaactacaaccaagtgaaatcatttgaggatacaaacaaatagaaatcattagtctcttgaccagtgcattgtcaacatacttacaacaaactggatacagctggaacaactagatcagttattctgaaactctaagcaaactccttgttgaggtgacggtctatgatt

SEQ ID NO: 51906 - DNA, 419 bp, Setaria italica
  Peptide Sequence Number=SeqID_117880
caattggtacttctttttctcctgttcgagtagacatcagtgctgcttgaatataaccagaagagttctgaatgagcttgtgctggaacctttgaaagaagagcagtactatgaggtgagggagcctttctccgttatgtcacttttgaagagccccatggggttgatggtcggttttatggtcctaatggtcttcgtgatgcccaagatgatggagaacatagatcctgaggaaatgaagcaagctcaagaacaaatgaggaacaaccctgtatcattctctagcttgctatccagagcgcagggctagaagttagaacatggggatactgcaaagatgaaaggtctagtctatagtgtgatgaaaagcagtactaaagtgcttgacacgtcgctcagagtaattcctgggaaagagt

SEQ ID NO: 51907 - DNA, 235 bp, Setaria italica
  misc_feature (205)..(205): n is a, c, g, or t
  Peptide Sequence Number=SeqID_117881
aaaataaatttttaagaattaccaaagaataacacactgtgttggatagagaagagatagaactttgcgttccttcggcaaaagaagtgaacagatactatgagccaagaactgtttctttgaagatttaagtgaagaactaggaattttgtgttccaagtacgatgggctgatagcacaaattgtacagtaggctgaccaaccngtacaaagatgctgatgaaatacaaaggat

SEQ ID NO: 51908 - DNA, 241 bp, Setaria italica
  Peptide Sequence Number=SeqID_117882
tgtttgcattaggccttgagaggtgtggaaagagctgcaggctgaggtggatcaactacctgaggccggacctcaagaggggcgcgttctcgcaggaggaggaggacctcatcatccatctccactccatgctgggcaacaagtacgtgccattttgactcaacatccatgcattctatcagattattaagtccaaagctttgccaatttagctgatcaaattgggaattttgttgcttgg

SEQ ID NO: 51909 - DNA, 399 bp, Setaria italica
  Peptide Sequence Number=SeqID_117883
cctggaacccttcacaatattgatgtcaaaccttctggcatagttatgccctcttaaccatataccgattattcccactttgaaaattactaattgctggtgaaggcattgcatttgagctgcggttcatgagaccaggaagatttgctccatgggtactaatcaaaggctgacttgttgatgcttgattaaccatatcaatcccacccagcagactgtttgacggtgaagatgatgcaagaagaggttcatgtttcatggatggaggaatggatgcaagaaaacttggcgattgagaagctataaccaagggattttgattaggtgagataccctcactagctgggaatgcatttaatgattgagagggcataactatgccagaaggtttgacatcaa

SEQ ID NO: 51910 - DNA, 263 bp, Setaria italica
  Peptide Sequence Number=SeqID_117884
taagtctaagtatttcctactattgtcttgttcactataaattattcctttataaaccaattacagaggaaaagatgaaatgaaaaatacgagcaaccattcatcaaacccctaaatttgtttccagtgctcactgatcaaccaaattcaagaaagtttcacatctgtccactaaatccgaaaatgtcggggttcactatatctctgctgcttccaatgctgtggctcaagttgttagttggagactcaacctcatccactgc

SEQ ID NO: 51911 - DNA, 218 bp, Setaria italica
  Peptide Sequence Number=SeqID_117885
ttatagaaggaatatatatcttctacaaagattcggaaagtgtgctcacctacttacaaattcaagaaagtttcacatctgtccactaaatccgaaaatgtcggggttcactatatctctgctgcttccaatgctgtggctcaagttgttagttggagactcaacctcatccactgcaaagcggcttggaatgcaagttacctttcccggacaaaccc

SEQ ID NO: 51912 - DNA, 245 bp, Setaria italica
  Peptide Sequence Number=SeqID_117886
ggttatttggtcttattcaaagattattagaattttgtactgaaaatcttagtcgtgtctggcttaggttctttgcttgtctatttgcttcatcacaatttttcttatttggtgtgatttcgacatacttaaaagcactgacatacttcaatctgttgtgattcagactttgcagaggatcatgagtcaagttgtttgacatttgtctcagttctaactgcaagagcaagaatcagcagcatgtt

SEQ ID NO: 51913 - DNA, 366 bp, Setaria italica
  Peptide Sequence Number=SeqID_117887
aagtctactgatctcgttgttcctctcttcctccgccttcttgcgcataatatccctcttccgcaagacgagggtatgtctctttagagttgtgctgtagaattccatagatgccttcttctccttggcaaatagtttcctttcctcctcgggatcaacctgtattcagtattttaagccgcggattcagatagaaataaagagcatcagggtaccaggatgtttgatggcacagaggatcagtgtaatgttgtagtgtcacctttgagcgtgagagacgccgtgctcgtagtgtcatttcgcgttgctgctgctcagcccaggcagccacagccatgtcaccacgttggtcgaaagcttttcgca

SEQ ID NO: 51914 - DNA, 235 bp, Setaria italica
  Peptide Sequence Number=SeqID_117888
gccatctcccgtcctgccacagctggtaggcctgcaggagcaattcagataatgaacatttcttcagtgctctgacagcaggttagttgctgaactctgaattctcgttgcaggtgagagctaggcgctgaactgtacttacatatcctgtgagattgaagaatttgccgtactggtagaacccggcagtcctcttcccggtgatgatctcgaggagcaaaacgccgaagctgaa

SEQ ID NO: 51915 - DNA, 313 bp, Setaria italica
  Peptide Sequence Number=SeqID_117889
acgaatcatacaagaaatactgaatcggcacggcatggtcgcggaaatcgcggcaagtgaactcgacggagggatcaattacgctaaggagatggtgaggaacacctttctgctcgtgcagatcatacaagaaatactgaatcgcggtggcctccctgttattgtcggcggcacaaacttctacatccaggcccttgttagcccattcctctttgatgacatggcacaagatatgcaggactgtactttgagtgatcacccagatgacataggccttaacaataacgatgaaggcagtgggtatgaacgcttg

SEQ ID NO: 51916 - DNA, 239 bp, Setaria italica
  Peptide Sequence Number=SeqID_117890
aaggaactgcacctggcaatctcatgcagagccaacccatggcaaccatctgctcttgcccttccttgagcgatagttcccctactaaggctactaccatgtttgtcttctgctgatgcagccatggtagtagccttagtaggggaactatcatggctgcatcagcagaagacaaacatgctcttgtccgaggaaatcaaccttcgtgcagaagatgtcccaacaatccgctctaactt

SEQ ID NO: 51917 - DNA, 435 bp, Setaria italica
  Peptide Sequence Number=SeqID_117891
taagactaataagtagaaagagaagtggcaaagctttttgcggatgctggtatcatttgcattgctagcttgatatctccatacaggagagaccgtgatgcatgccgtgctctacttccggattctaaatttattgaagtatgcttacttatgattctcttaagtcttgttagtgataatcatctatctaactacatgcacgctctgtaggtatttatggatttgcccctaaaaatttgtgaagctcgtgatcctaaaggtctgtacaagcttgcacgcacaggaaagattaaaggtttcactggaattgatgatccatatgaaccaccagtgaacggtgagatagtaattcagatgaaagatggggaatggcccttcacccaaagcaatggccaagcaagttatgtgctatcttgaagagaatggatgttgcaa

SEQ ID NO: 51918 - DNA, 245 bp, Setaria italica
  Peptide Sequence Number=SeqID_117892
gcagaagaccgtgcagaaaatatacgaagagttgctaaatctttcgtgcaggagaagtggcaaagctttttgcggatgctggtatcatttgcattgctagcttgatatctccatacaggagagaccgtgatgcatgccgtgctctacttccggattctaaatttattgaagtatttatggatttgcccctaaaaatttgtgaagctcgtgatcctaaaggtctgtacaagcttgcacgcacaagg

SEQ ID NO: 51919 - DNA, 261 bp, Setaria italica
  Peptide Sequence Number=SeqID_117893
taaccacacagaagtccaaaagttctgttgtttggtctattgggcttcacatgctctgtgctggctcctctgatataccttttctgttggtatactttttccttggttatgttgtataccgcaatcagttgctcaatgtgtatcgaacaaggtacgacacaggtggtttgtattggccaattgcacacaacacagttatattctttaagaccaaatacaccaaggccgatgacctgggtgagcacaagagagtaattatta

SEQ ID NO: 51920 - DNA, 307 bp, Setaria italica
  Peptide Sequence Number=SeqID_117894
ttctttcaaagcttccatctgatgcagaatcatggcttgtttgcaaaatcaacaaggggcttcgggaagctgagagtcaaagggcgaaggcgggttccgaaacccccaacaagaatgagcgccttcatggtgaagcacctgatttccttcctcaatccctaaattgccccatggcggcgtacgggacgcggactcgacttgccgtttgccgcactcgaatccaaatcgctcacgagggagcgcgcgctctgctggattggattttggattcccttcaccccaacattcctaaattctaacttaggta

SEQ ID NO: 51921 - DNA, 238 bp, Setaria italica
  Peptide Sequence Number=SeqID_117895
aaagccttcgattcctgcagccgtgctgtgcctcctagtagtagtgtcagatttggactaaccgcccctctctccgcgcagatgcggcgttctgcgtgtgcaagccgggcatccccgacacaatgatgcagaaggcgattgactacgcctgcagcaagggcgccgactgcaccccgaccgcgatgggcgggccgtgctacggcaacggcaacaaggtggccgtctgctcctacatctg

SEQ ID NO: 51922 - DNA, 257 bp, Setaria italica
  Peptide Sequence Number=SeqID_117896
gcgctgctcattgacatggccggccggcctcgccgtgtcgccgcatttgtgcttggggagcgtgagcgccacggccggcgtctggaaccccatgaactgctgcttgggcgaccgcctggtgccccccggcgccgggctcgggattgggagcctggcgctggtcggggtcgggagccccatgtagtggagccgcggcgacagcctgatcctcgggctggggcgcggcgacgggatcggcagcggcagcctgcccgccg

SEQ ID NO: 51923 - DNA, 455 bp, Setaria italica
  Peptide Sequence Number=SeqID_117897
attcctaattgaacaaacacttaagtgacatgaagcatttgatcttctggttgtgatgagtttaatctctaacacagcactataagcacacgatcaaaacaagagcggtcttggaacagagcatggcttcatttccatgtcagggcagcagaagttcagattgcatcatggaacagagcatcacatattttaccaagctaactagctaagtaggaagtcatagcactcgttgaataccctagccaaggtcagatttaatagctcagccgtgtaagctttaaggaacagctaattaacagccaacattacatgtgaggaactaaatagtgtcacataagtttagaaaagaatgaaaggtaccaagtgcttcacctgaaatcaacggcttctcctcgtaaaaatctttaggtgaaggcgtcgtactcgatggtcgagtgatcgagtgctggtatggg

SEQ ID NO: 51924 - DNA, 300 bp, Setaria italica
  Peptide Sequence Number=SeqID_117898
cttccatcaccttgtattgatccagcaggtagctggatgccttctccttcaccatggagatcagtggccctggtcaccgagatgaatacatttggtttcagacacttgcagcaagcacagtcatcgaggcaggagcgacagacagattccataatcattgacttggacagatgttgcttgcaatggtactgacatcgaaatcatccgacacgcagcaccacctccgaagctcaaagtgcttctcgattgcgggtcattgtaaatgagttgcacaaaggtggtcttgcccatcccacccat

SEQ ID NO: 51925 - DNA, 202 bp, Setaria italica
  Peptide Sequence Number=SeqID_117899
cctcaaggcgttgcgactgcagaacaataatttttcaggctccatcccagaagcactctttcgggagacctctatggtgctgactgaactggaccttagctgcaaccaacttagaggtcagataatttttctactctgagtctcatgcttatattaaatattgcattcatctcgcttttatgcatgcatctttctccacaac

SEQ ID NO: 51926 - DNA, 266 bp, Setaria italica
  Peptide Sequence Number=SeqID_117900
cccttacgagtcctccttgttcatctgaacgccacttggaacaactgaagtctgcaggtcatccagatcacaattcaaaatagtttaattgatgaaagatgtttaatgtatacgcaaaagataaatggagttaacctttgtcaccacattttttgtggaaatcatccaaaaagtcaaaagaaccatctgacaataagaaattgaagaggacctccacaggcacctgaaactttgactccgtgatcagagtataagactcaggtaca

SEQ ID NO: 51927 - DNA, 255 bp, Setaria italica
  Peptide Sequence Number=SeqID_117901
atactcctcaacttttgagaactttctggaaatattgatgttggaatcactaccatcagcactactacttgagacagctgtaccattgacagacctgcagtccaatacatttaaattgagaactataaataattatggagaaaataagtccatttgaagatgtgaaacccaaatgtaaagcattttgtatcagaatgcaaaaaacctgtcctgttgtgatgaatcttcatcttgtttagattcctttgttccttc

SEQ ID NO: 51928 - DNA, 254 bp, Setaria italica
  Peptide Sequence Number=SeqID_117902
cctgtgcggaactagccattggcactgcattttccacagcattttccccattttctgtagcccctaactgaagagcagcattggttgagccagaagcgtctttcggtcgattgttctcctgcttcaaaagatcatgaccctacaaaaaaaatgaaatgggaaaaaagattatatacagctcgaaatggaaaatagcactcagcaatattgtcatggtgtgagaaaaggcatacgagcttaatccagagcccgaa

SEQ ID NO: 51929 - DNA, 318 bp, Setaria italica
  Peptide Sequence Number=SeqID_117903
actagagacaagatgatatcagcctccagcaacatgcttctcaatatcattgctgaagaagagattcctgccacggcactgcttgaccacttcatcaaggcctggttcataaatagggagctgatcgctgttccatgctgcgatgcgtggaacagaaatgtcaacgacacgaaacttcaatagcagggcatttcagtgcaatgacagccatggttgggccgccaacatatccagcaccgaggcaagacaataatacttacaaccaataactttaacttaaaaactaaataactaagaaagtaaaactaacctaagaaa

SEQ ID NO: 51930 - DNA, 178 bp, Setaria italica
  Peptide Sequence Number=SeqID_117904
ccatggttgggccgccaacatatccagcaccgaggcagcatatcttcaccatctttcttaaactatctgagtaactgcacgtggaaaatgagaatactgacattagttaccttagaaagcatgattcattgtggcaagagattttggagctgtaaaagagtatggtgaagacaatgat

SEQ ID NO: 51931 - DNA, 393 bp, Setaria italica
  Peptide Sequence Number=SeqID_117905
ccttagatgccttggagataccctccgcaaacctctccggcttgaactcatcgacatcttctcccccatatatctgggtcgtgatgaatggtcactactggcaacaaaagttttactccaggtgggtacttgatccctcccagttccatctccttgtatgtttcccgttctagcaatgtgatcggtggatatagcctaagaacctcatatagtaccatggtcacctgccacataaagagcaaaagatgagcaattagtggccaatatatacgatcagcagtagtagaaaatacttacaactttcagttgatgtgtgccgtcaagatccggttctctcttcccaaaaacacgcaggacctcctccctcgcgcggtcttgccactcaggatacaa

SEQ ID NO: 51932 - DNA, 452 bp, Setaria italica
  Peptide Sequence Number=SeqID_117906
ggtcaatgcttaaggaagtatcagctcacaacaaacagctatgtgcctatgctttcagcttattctgttaaatagatgctgtcaaacgtcatttctacaaaagaagtgcaaggcgctgcttgtatctttcaatccggcgaagcctttccttctgcaaccttgtgtttctattgtttcttgatatgcttttttgtttacaaaatctgcatttctaccaagacaagaagctatcgaggttgaatatagaaaagcatttagctaaattataacagctcttcagaggcattgacatgtttccagcacgtatcctttttgcacgttttacatgctgcttcaataagtcacttgtgttatattcaccatcagcattcttctgtggctcttcatctgaacctacatctgcagcatcattattttccttatctgatatcctagaatctacaactgaagca

SEQ ID NO: 51933 - DNA, 259 bp, Setaria italica
  Peptide Sequence Number=SeqID_117907
ctgctccaaatttctgttttcaagcctcgtcaacatccatatccacccaagaaaaccctaatatcctttatatgtaccagttctctaacacaattgctctatcccaggccacacctctatggcatcctacaatctgtaatctagcctcctttgatgcccagtataatgcttggttcatgtaacaatgctactacggcggctctccatacttttgggacaattattaattgatgctatatgtttagaattaaaaaaaaaa

SEQ ID NO: 51934 - DNA, 292 bp, Setaria italica
  Peptide Sequence Number=SeqID_117908
agaagatcaagaccgacaagcccttcggattggggtggcctgaccgtcgacgtcgatgcctccgggaggaaggtcaagggcaagggcgtgtaccagttcgttgacaagtacggcgccaacgtcgacggatacagcccaatctacaaggaggaggactggtctcccagcggtgacgtctacgtcggcggaaaaaccgggcttctgatctgggccatcaccctcgccgggctccttggcggcggtgccctccttgtgtaatggatcttcttagccggagagggcgctggtgttg

SEQ ID NO: 51935 - DNA, 246 bp, Setaria italica
  Peptide Sequence Number=SeqID_117909
tgcagggcaagggcgtgtaccagttcgttgacaagtacggcgccaacgtcgacggatacaggtgagctagctcagccagtgaccaagacatgcatgtagctactagctaggcatgaagatccatgtttctttgtttgtttagaaggatcatgtagctgttgtgtgaacattagtggctgattaaggttttgtttgacaatcaatttacagcccaatctacaaggaggaggactggtctcccagcgg

SEQ ID NO: 51936 - DNA, 310 bp, Setaria italica
  Peptide Sequence Number=SeqID_117910
taactaacttagtaactaattactaaagtacttaagttacggggtttagtaacttaattcttaattctatttgcagcatttgattacttgattccagcccatttggtctttttaaatagaccggacatgatcccaatagaaggtctgaaactagatcatgtaaaggctggaatatacatgttgcactgcttacctctcagactgatcggatgtgatggctcaccaatcaggtgcatccttatgaagtgatcacgtggtgctactgctgaaagtgatatggtatcatgccagctgatactgcatcattgcg

SEQ ID NO: 51937 - DNA, 314 bp, Setaria italica
  misc_feature (276)..(314): n is a, c, g, or t
  Peptide Sequence Number=SeqID_117911
ataccttaatagaagtgaatcacgtaaggtaagaactaaactaagaactaagaaaaagtaagaaataaataggtaatacaatagaccaagactagaataactgcatcattgcgcaaataccacctctgtatgaaagaaatgttgagttccgtgatgatatgtttcatgtttgtgcactcaacaaggaaacatcaataatttactactgacaagtccatgttgtatgaaagacttacaatggttcacctgggaagctatggctgtctagaaaacttnnnnnnnnnnnnnnnnnnnnnnnnnnnnnnnnnnnnnnn

SEQ ID NO: 51938 - DNA, 245 bp, Setaria italica
  Peptide Sequence Number=SeqID_117912
aatcatcgtggaacaaactagtagtcctgactcatcagaatgataagttaagtatcaagactattgcatggctgccgatatttcagttctgaacaattcgtgaatgatggacatcttgagaagagttattgaaaccggaccgggccaacggtttagctggaaaaaacagactgatatccagcctgttctggtgtagcttttggatcatttttgtgcatccaaaaaactaattggtgaccacagat

SEQ ID NO: 51939 - DNA, 410 bp, Setaria italica
  Peptide Sequence Number=SeqID_117913
ctcagcatctcaacaatctcaacaactcgtttggagtgaggtcctcataatagttgtatgtgtaaccctcctgaacctttcgagtagtcagccacagcaatcatgggagcattcacacagcaacccatgcactccatttctccaacagaaaataaaccatcgctggtcacctctgcaaaggcaagaaaaatatcaacgatattgcagggatagcacgggaagctcaggcatagaggacaattcttgtggtaaccaatcagaaagtagcatgcttagttaacaggtttaaagtactgtggataaacaaaccatttcgtttaactccaaggtgctccaacaatgtctcttcgatttcacgtgaaccacgaatcatgcaaggtgtagttccacacaccagaaggtggtactta

SEQ ID NO: 51940 - DNA, 249 bp, Setaria italica
  Peptide Sequence Number=SeqID_117914
ccctgtgtgccttcgaggggggaattttctcctcttctcagcatctcaacaatctcaacaactcgttttggagtgaggtcctcataatagttgtatgtgtaaccctctgaacctttcgagtagtcagccacagcaatcatgggagcattcacacagcaacccatgcactccatttctccaacagaaaataaaccaatacgactaggtacaacctacaatttacgttaaactaccaaaggtagactacca

SEQ ID NO: 51941 - DNA, 174 bp, Setaria italica
  Peptide Sequence Number=SeqID_117915
gaaataaccatcgctgggtcacctcatttcgtttaactccaaggtgctccaacaatgtctcttcgatttcaacgtgaaccacgaatcatgcaaggtgtagttccacacaccagaaggttggtaagtaccaccttctggtgtgtggaaccacgaatcatgcaaggtgtagttcca

SEQ ID NO: 51942 - DNA, 402 bp, Setaria italica
  Peptide Sequence Number=SeqID_117916
cgggaacttacctgtccaaaattgatgagaggaacttctctcttgaagattcaacaacaatgttgttggtcgatctcttcacaagcagagggacatgtcaggaacagataaaatatctcccagaaaaagtatcattttcttgcaggagctggttctagttgattgttaaatgtgagctccaaaaaatcctcttgttgtttgtcagacaggaaataaacagtcaatcagttgtgctattttcttaattggcatgatcgaggtgtaatgcgcgggttgcatcttaaggagaattagataaagacttgtgatgggaagataagtgttttcccacaacatgcataaatgaatattttttagaatctgttctagaaagcatttgccacagataggctatatatttta

SEQ ID NO: 51943 - DNA, 327 bp, Setaria italica
  Peptide Sequence Number=SeqID_117917
aagttagtacgacaagactgacttagttttagacttacaatactaatagtacctgccgcttttatgcatgggaacagggaaatccttgaagcgggtgagcgaaactttaataggtttggtgggtggttgggtaagtactcaacaactaacaaaaacagaaggcttctggaagatgctcacagtcatattcttgcgtcccaacaggcaaacttggacagggagacattgaggttggattatcttactcttctcttgagacagctgactgacccactgaaaacaatgccaaaggttgttattcatcttgtgctttgaactccacttttt

SEQ ID NO: 51944 - DNA, 480 bp, Setaria italica
  Peptide Sequence Number=SeqID_117918
ttctgctttcctatcgcccgtggatctgacattgggatcaatcgagagaaatctccaacttgctgcagttctcggagggctttctatatcagctgcattagagatttctcagctccaaatcctgtttcttgtactaggtctattgtctttgtggtccgtggactttctttctaggtatattttggtggaggggtgagaaacttgattcttgacacaattggacactatcttagccagaagtatcacaacagagttattcaggcctatggcatgtaacttttctttcctacatggccaaagtgacataacggtattatggacttagaatttggaggaacattggagggattttggatgagagttgatagcctttatccgccacctttagggcttgctagccatggaccatatcagcatgaagctggtcacttcctgatagcatacttgcttggtgtgcttccaaaaggatatacaattaca

SEQ ID NO: 51945 - DNA, 224 bp, Setaria italica
  Peptide Sequence Number=SeqID_117919
gctattgctgaagaaacaaggtgacctattcacatcaatcgcacccttggatccaattgatccctctttggctccagctttcctcatcaaacccagcgccgccgcgtccgcgtcagcctctctccgcccctgtccctctcctgcccccgctccctgcgcgtgagtccccggggctcagctggaagaatccgaagccctccgccgcatggcttcccgtcctcgct

SEQ ID NO: 51946 - DNA, 333 bp, Setaria italica
  misc_feature (48)..(48): n is a, c, g, or t
  misc_feature (63)..(63): n is a, c, g, or t
  Peptide Sequence Number=SeqID_117920
gttgcttgcactggactcatttggtcaagatacagcttggtgatcacnccgaaaaactggaanctttttcagtgtaacgttgcaatggctggtacgggcctttatcagctttcacggaagataaggcaagattacttatctgatgagaaggatgctgctccacaacccggaagcataatgacaacaacagacaataataaccgattgaagagcctgaagtcttggagttggtctttattttccggggctgcaaggacctttcaatccaggacatgaaatacttacttactaagaatagttttacttagttactaaaagtacaatagaagacaa

SEQ ID NO: 51947 - DNA, 277 bp, Setaria italica
  Peptide Sequence Number=SeqID_117921
tagtaaattttcatcaggttgttataattatcacaccagaattttagtcaaatacatcagggaaacatgatagctaactgaaaaggttcctaagagatgtagcaaagaaaaatattagaagacaaccttcccactggacatgacaacaaggaagtctttttcgctgactttattctcgtccaaagtactctcatctttcaaaatcttcccagtgaaaattagcagttgttgaccccatggataactatcttttcctagtttctcttcaattttctgt

SEQ ID NO: 51948 - DNA, 409 bp, Setaria italica
  Peptide Sequence Number=SeqID_117922
tgtcaaaattccacgccaagcaaatattggagaacgctagttgttgttgaggtggctggagacatcaatgaaaccgagtggaagaggctgtatgctgcttctaaacggtgtatgacaattggcagtaaaatcataatcacaagtcggtctgacaagatcgcaaagcttggaacgaggagggctgtgacactgaaatatctatcagaggaagcatactggtacttcttcaaaacacttgcgtttggaagcacagatcccacgatgcacccaaggatggcatacgtagccatggagatagccaggatgctgaatcgatctctcattagtgcaaacaaagacaactagacctagtttagactagaagggaacaaaatttagaacaatacccttttaggtagacaaaggttta

SEQ ID NO: 51949 - DNA, 187 bp, Setaria italica
  Peptide Sequence Number=SeqID_117923
catagcttccttgtccgagcagattaaccttgacattcgccttctgttcttccccgcagcagctgtcgagcacggagctaagtgaagttgagggtttccgccacaaagctcatcatttccatcaattgacaagtgagttgcatttgcaaaaggacccccttttggcacttcgccttgcagatcattg

SEQ ID NO: 51950 - DNA, 458 bp, Setaria italica
  Peptide Sequence Number=SeqID_117924
attttggtttagtccagagcatttggaattcctgtccgtacatttactcatgaggtacacttcttgtactgctaatttacagaaagagaatttgaagtctcttgataggaaaaaactactcttgtggggggtacaaaagttttgggatccctgctattttacacccatataattgctgttgcgttaactcacaacagatgcctatggaagtatttttcaggtggtgacattatggtacagagccccagaaattcttcttggagcaagacagtattccactccagttgatgtatggtctgtgggttgtatctttgcggaaatggtaaaccaaaagccactattccctggtgattctgagatcgatgagcttgtttaagatattcaggttccttgactttgatggcactaaattactgcatttccttttccatatcttatactgtctgtattttggtttt

SEQ ID NO: 51951 - DNA, 252 bp, Setaria italica
  Peptide Sequence Number=SeqID_117925
ctagtcttgctccaagaagaatttctggggctctgtaccataatgtcaccacctgaaaaatacttccataggcatctgttggtttggaccttctttctaaaatgcttcggtacgagccaagcaaaagaatcacagctaggcaggctcttgagcatgagtacttcaaggaccttgagatggtacagtgacctgctagtgtggtgtgttggcatttgtatgagctgagtcccttgtttcattccttttatgaac

SEQ ID NO: 51952 - DNA, 282 bp, Setaria italica
  Peptide Sequence Number=SeqID_117926
tttaagattttcagaattttaggcactccaaatgaagaaacttggccaggcgttgcttccttacctgactacaagtcaacttttccaaagtggccatccgtggactttgcaacagtggtcccaacacttgaacctgcgggaattgatcttctatcaaaaatgctgcggctagacccgagcaagagaatcaacgcccgttcagccctcgagcacgagtacttcaaggacctcgaaagtagacctaagtaagaatacaagaccaatagacccgactacccgacc

SEQ ID NO: 51953 - DNA, 196 bp, Setaria italica
  Peptide Sequence Number=SeqID_117927
ccgtggactttgcaacagtggtcccaacacttgaacctgcgggaattgatcttctatcaaaaatgctgcggctagacccgagcaagagaatcaacgcccgttcagccctcgagcacgagtacttcaaggacctcgaagttagtccttagttagtattctagttccttatttgttcccgttctttcccgttccctta

SEQ ID NO: 51954 - DNA, 387 bp, Setaria italica
  misc_feature (174)..(174): n is a, c, g, or t
  Peptide Sequence Number=SeqID_117928
catgctgagttgtgacatatgaagattacagaacatttgctcaaaaaggttaccgaacataaaccggactagattatatgccttggtaacatgattttcttttgctaaccttcgttgccttgtcccttatacaattatacattcaagttgctgacttctccttaccaatatgcngaaaatgctgcggctagaccccgagcaagagaatcaacgcccgttcagccctcgagcacgagtacttcaaggacctcgaagtagcctagtagatcagccatgcccgctccgccccctctctgtatattagattgcattgctcggccggccgagccctcctttttggctgctgcattaatcttaagatggtgtgctccttttgactcttggttg

SEQ ID NO: 51955 - DNA, 175 bp, Setaria italica
  Peptide Sequence Number=SeqID_117929
tgcggaaatggtaaaccaaagccactattccctggagtggaatactgtcttgctccaagaagaatttctgggcgtccgtacatttacttcatgaggtggtgacattatggtacagagccccagaaattcttcttggagcaagaccatacatcaactggagtggaatactgtcttg

SEQ ID NO: 51956 - DNA, 431 bp, Setaria italica
  misc_feature (209)..(209): n is a, c, g, or t
  Peptide Sequence Number=SeqID_117930
cagtatattctagttatattaaccaatggttaataatatggattgactggtcatgacaagagaacatccttatgttcaatatgcctctctcattgaccccagatgatttattattgactgtctatttggcacaagagtgtgtcacgtgttcttcatttataacagtcacactgtttgtaactagtaagccatccaatgtccagttttcnccttttataaagggcaaaacaagacatggagactgtaatgcatagcgaaactggctctgaatttcttacctgagcagcaattatgctgagaaagacagtcaacatgctaagaaagaaatgtgtggcagttgctttgaggcctgccatgaagtagacgatcaccatgaatacaacagggaggaaaaggtacaagtaggtaagaatacaactttagttacgtaa

SEQ ID NO: 51957 - DNA, 195 bp, Setaria italica
  Peptide Sequence Number=SeqID_117931
tgcctatcatcatgcccatccatatgcccattgcgccacgttttagcttgaagccaaacaggatacccaacggaatgcccactaagtagtaacaacctacgtttatgaatgccacaggcagatgatcagatggttccagcagaagatgacgaaatgtattctgtgatcagtctgtgcgaacgaattctatgttct

SEQ ID NO: 51958 - DNA, 240 bp, Setaria italica
  Peptide Sequence Number=SeqID_117932
ccctgaaggctttggaggatctaacttttattttctcgtagccactcaacaaaacagaaaaagaaaaggagtcagtacaaacctgaccagcaggaaagcacaacgtggccctactaaagcagtttccaaggaagtagaacggattgatcaatttttctaatacttatgctgatagctcgtctggcatgattgacccagaaggcattgaaacactctgttctcatcttgaagttccccata

SEQ ID NO: 51959 - DNA, 181 bp, Setaria italica
  Peptide Sequence Number=SeqID_117933
aattcgcggttgccgtcccaaataaatgctagtactggaatccctggacatgctaaccaagttcgactcccggtctatgatcgctgggtcatgaaaaacactcatgaccaagctagatacatcatttccagcagtatttcctgatgccgagaatgttgtagcctgattattggggagtcga

SEQ ID NO: 51960 - DNA, 306 bp, Setaria italica
  Peptide Sequence Number=SeqID_117934
aaaaaggttcaggtagccacaccaatggacccaatatgcctaactcctatgaaacttcagcgccttgcttcaccaaatgcctcctgcctccagttgtgagatgaagcaatgcaaagagcctgtcactgaatctgcagagttccatcgagcgtggcagggtcgtcatgccagaaccctcccggggacggatccagatgattcgtgacagggttgaaacagcaatagtgccgaggggcggcatcgcaccagtgtgcacatgagaattatgctgctggatgacggttgaacttgaaccccaagaaccgt

SEQ ID NO: 51961 - DNA, 278 bp, Setaria italica
  Peptide Sequence Number=SeqID_117935
ggctaaagaaaagatttgtctgctggcttgtgtcataaaacattgtcgaaagtcgtgatgaattgaatgaaatcgtatctgtctgaggtttcctccttcgtgcgttatgatgagtaagacgcctacgacagcttcttttgttctggtcaaactctgctaaaccatgaaacctacagacagtgaagggttaaagaaaaaagaggagtcactaaaaggtcaaactgtaaacgtttgttataattgctcatctgaaatttcccttttttttcaagatatta

SEQ ID NO: 51962 - DNA, 238 bp, Setaria italica
  Peptide Sequence Number=SeqID_117936
cgggacagatggtgctagattttcgcaatcccacaccatggaattcttctgatcccagttcatcccaaaagaacccattccagaactgaagatctcaatccttccaagaagaagaattaaaaatcgcaactgctgttaccacctgtgtctgtgaaagctggcagcactgcaaggaagaatagaaagaataaacgtcacagagaaattgcagaactgaaacagatatagatagaggaaa

SEQ ID NO: 51963 - DNA, 253 bp, Setaria italica
  Peptide Sequence Number=SeqID_117937
tgggcggccgaaggtccttcccacgcgttgcgcggcaccggctgtgactgctgccggcggcgccggcaaggtcgaaggcgcagaataggttgctgtcgctgctgccgttcttgaatagcagcaagcggtcgagcttggtgacggcgagctgattcttgtgggtatcctcaattctagctatttgatcctcggtttgggtggctaaaacctcgattcatgttgtagggtctcgatttgggtgatgagtatttcg

SEQ ID NO: 51964 - DNA, 245 bp, Setaria italica
  Peptide Sequence Number=SeqID_117938
ggagcagccccctgggcggccgaaggtccttcccacgcgttgcgcggcaccggctgtgactgctgccggcggcgccggcaaggtcgaaggcgcagaataggttgctgtcgctgctgccgttcttgaatagcagcaagctcgagcttggtgacggcgagctgattcttgatcttgatttaggcaatgaggacttcgattttggagtttctttatcggctgcgtcgaatcgaagtcaccatcatggg

SEQ ID NO: 51965 - DNA, 443 bp, Setaria italica
  Peptide Sequence Number=SeqID_117939
attcatgatgaactggtcatgccatcttattctcatttgtatgtaaatacacaagtgcacatctcctccatgcatgtagatggaactctacatgatcatatcgattttcatggctgcaatgtaagtagccttattgttggcaacaagcagtgcacaattctggtgcatgcattcggggaagcaggtttgtgtggtggatagtattacacgtaggcagtgttcgagtagacggagtcgtcgtggttgggcatgtggtagcggttggtgaaccaggtggtgtccgcggtgaccttgttgccgtcgtggttgcggtaccaggcgtagtgtgcgtgcgtgtggttcttgatgtccagcacggcgtggccgtagctgtactcccggaacgccgagtacagctacggccacgccgtgctggacatcaagaaccacacgcacgcacactt

SEQ ID NO: 51966 - DNA, 262 bp, Setaria italica
  Peptide Sequence Number=SeqID_117940
ccccgagcgtgatgtgcacctgctgcggcgcgttgcggcccggcggcaccgcgaagacgtccgcgtccatcggcatgtcgtcggaggcctggtgctttccggcggtacgtgctcgtcaccccgcgcgggcggtgcgccgcctcgccgacggcgacgagcgcggcggcgagcactactaccagcgccgccgcaacggcggccttcctcctttccatggaggccaagttttgctagctgagcggagactggaggttcaggggtc

SEQ ID NO: 51967 - DNA, 386 bp, Setaria italica
  Peptide Sequence Number=SeqID_117941
ctgggaggaagctaaaccccctgcctaacactgtaaagataacagaaaccggacgtttcctgcattgcaaatacactgaaggtctccactcatacatggaaaggatatcgtccctttccctattaacatttatgaaaggatatcttacattaagaccccgcgtgcaattgcagtatcgtcttcaccagggtaacacttgcccataaagttcaccagcatagaagcgaacttttttggatcatttccgcgcacaaaatgacttgagactttagtcatgtccgtttctggagattcagaatatatgtattctgctaacataacgtgcagctcaggagaaccatttcttgatgtcccaaactcagcagaccaccttattaatagataaa

SEQ ID NO: 51968 - DNA, 458 bp, Setaria italica
  Peptide Sequence Number=SeqID_117942
tctaaaatttctagtttattactattaatttctaggtaactaattcgtagtacttaattcgtacgtatttttactaggttgtagtcagtaggtaatatatatcttcttgcagtaagatgctaaatgcatggccttggatattgatgatcgaggaagcgccttcggtgaaccagagctgccacggcagcaattgtattatttcggccaacagtttaggtgaaggtatcaacataaaagccttcgtcatgaattatatcttgaacatttcgccgaaaagtccttctagagggttctggcgctgtatattgtaaaattttgcagctatttcatccagtaactcctgaaacacagggtcacgatctgtacttgtcctatacttctgtcgaagagtcctaaaaaagtggtaagcatctctttcaagcgttggtaacagatacttgatgaactgaatcaaatct

SEQ ID NO: 51969 - DNA, 390 bp, Setaria italica
  misc_feature (329)..(329): n is a, c, g, or t
  Peptide Sequence Number=SeqID_117943
ttttaaccgtttttaactttaaggttaagttaatttactaagtaaataataatagtattctgctaacataacgtgcagctcaggagaaccatttcttgatgtcccaaactcagcagaccacctgatagcagctttcaggaatgatgaacaactctcagcacgcacttttgcggcagatatagcttcagataattgatgcccctgtcatcatagtcatctccaagaaatgtggaacagatatcctggggaatgcatcatatatctttctgatacgaccaaaagtttctcactatatggaagctctcctgcgacaagggtgtcaacaaagnggacagcaagttcaccaccacaagtaacctgcccgtgcttcaattgaaccaagcgcctgac

SEQ ID NO: 51970 - DNA, 235 bp, Setaria italica
  Peptide Sequence Number=SeqID_117944
attttagacatgatctcttgtgctgtacactgagatgtaaaggatgtttcccgctttgccattcccatcatctccttctcaaaaagatttccaaggttgaagccctgtgatcttgaaataagagcaaatgcattcatggattctggtttctccctttctccgccacaagatgttcctaagacgtcaaaaggaaaaggtaacccattaagcggtgcctatatgtaacaactatata

SEQ ID NO: 51971 - DNA, 179 bp, Setaria italica
  Peptide Sequence Number=SeqID_117945
accatttataacctttatcagcaagcacctcaggtgcaacgtagtttggtgttccacaagtagtatggctgctgatgtatggtcctgtggcataatcctatttgttcttatggccggatatttaccattcgatgattccaatctgatgaggctgtacaaactgatctgccaggcaaaca

SEQ ID NO: 51972 - DNA, 405 bp, Setaria italica
  Peptide Sequence Number=SeqID_117946
taaacccccttaaactaacgaaacgaaacgaaacgaaaccttagtagaccccgactagcggcgaagcacggcggcggccacgccgcctccgcagccggagccgacgatgacgacgtcgcactgcacagtgtggtgcgggcctgacacgtccgctttcaccgccagtcctttgtccatgagtgacctcagcagcgcggcatcgtccagggatctggtctccacgacgccgctgtccagtggtcgcggcgacggcgacggtgctgcttccgataggtcttcctgtggcctgtcgacgtccggcacgctgtatcctatcgctttccaggacgggttgtccgagtgctcgtttatcgttgtgtagaatgagtagtgcgataggatcttgacgaggacgaaggtgacctt

SEQ ID NO: 51973 - DNA, 347 bp, Setaria italica
  Peptide Sequence Number=SeqID_117947
ctgggttctacattgccctgaaaacaacgtaatgcaaatgaatcaggaggtatcctagaggaatataacattgcaccatatcgtgaaactcaatacctcaaacctcctcatagcagtgaggaaaatatcaggagatggcttgccagccttcacctccggatcatcccccatgacaacatgatgcatcagggagaacatttcctggtggttctgtgtcttcagtgcaaaatgacgtttatgggatcctgttgcaacagccattggtattccattcgcatgaagatgatggatcaaacgtagtacccctggcagcttgtgcaggatgggaagagcgcctggagcatgct

SEQ ID NO: 51974 - DNA, 239 bp, Setaria italica
  Peptide Sequence Number=SeqID_117948
atagattatttcctacaataatgttgaacgattatgccaaaacgtagacatgtggggttatcattcgctcacctggcagctttgtgcaggatgggaagagcgcctggagcatgctctcgcgctcctcgaggaactgctcgggtgtcagcagcccgtcgaggccgcactcgtcgacgaagatgcgcgccgactcggcggccttcttgcccatcatcttcgccttgagggaccagtcgaag

SEQ ID NO: 51975 - DNA, 204 bp, Setaria italica
  Peptide Sequence Number=SeqID_117949
tcaggcactggtacaagtacaggtggaccggcccgctccacttcatcgacacccctgacaaggcctgcaccttcgactactcgagggactgccacggccccgatggcgccaaggacatgtgcgtcgccggcgccatcgccaacttcacgtcccagctcctgcactacaagcacggcagcgccgatcgcaagtacaacttgaccg

SEQ ID NO: 51976 - DNA, 451 bp, Setaria italica
  Peptide Sequence Number=SeqID_117950
catgcattgcaggcagcatctttgatggttcctccagctgagtctccatcatcttctgcttcagatattgataacttaaataaccagagcacagttgctaaggctgtttctgcaaggggtgtatattctcctcagattgctagcaatcccatatctcggaacaatcatcacttgatgggattgctttcttatgcagatgacatgaatagtgcatttgagggaaccagaaaatcacaaaattcattttctgcttatctttctggtattggaaagaataaggtgaacggtgctcttgtgaagaaagtacttgatttcagttttcgtgatgtcaagggattgctgcaactaattcgtcattcattggagtctatcaaccatgaatgaaagtgttaaatagtaggacgagcatacttcctgattcacgcttccttctcttgtggggtgaatacaa

SEQ ID NO: 51977 - DNA, 251 bp, Setaria italica
  Peptide Sequence Number=SeqID_117951
atgtaaagcctgtggtggtaaatggagctcctaaacatgcatgtttaggagctccatttaccaccacaggctttacatttccagctgatgccaacatgtaattcaataacaccatgatgacagtggaatgcagcattacacacgatggtctaagatcaaataacttcggagctcatcaggagatacaagtcgtggatcccagtgtattccatttcatcctaggctgattcgattgggaactacacctccag

SEQ ID NO: 51978 - DNA, 259 bp, Setaria italica
  Peptide Sequence Number=SeqID_117952
cggttagaggctttcactatattttggtgaaaatgatcaataatgcacttccaatttctctttccctatgatcgaatccaaactcactctccgatatgcttgcacccagtagtttctaccgtagatatgtcacccaccaatgacacgttgacaaatctctcctcctaggcttcactaagttgctacctttcttacaccaacaatttccacttgactaccacttctagatcactatttgtccctccatgtctttgtctcc

SEQ ID NO: 51979 - DNA, 186 bp, Setaria italica
  Peptide Sequence Number=SeqID_117953
ctttcactatattttggtgaaaatgatcaataatgcacttccaatttctctttccctatgatcgaatccaaactcgggagctctatgtacaagcagagggattcgaatccaacttaatgcactattgtttgttgctccaagcctcctgcacaatgagagtggatagccataactatttctatttat

SEQ ID NO: 51980 - DNA, 521 bp, Setaria italica
  misc_feature (436)..(521): n is a, c, g, or t
  Peptide Sequence Number=SeqID_117954
ggtagattgtattccactagcatcaaaggagagtgccagagcatctcatgctgatcctgatgctgctgctagaagttcaactaatggttcatctgcaaaggaatgttggttctgctgacaatgaaaaatcatacacacatgatgttgttgttccaataatggttgcattagaaagatctgcatttgaagctctaggcaatgattttctgaagtataaccagaaactgagacagctaatgttcaacatcaagaatagctctaaactacgtagccgactgatggacaaggagcttgatcctccagttcttttaaccatgtcccctgatgaattaaaggttggtttgacttcagcagaaaaaacatctgaaccagaagagtcaagacagctgcaggtatggtgcatatattctactaaaactaaaagtaaaaataaacnnnnnnnnnnnnnnnnnnnnnnnnnnnnnnnnnnnnnnnnnnnnnnnnnnnnnnnnnnnnnnnnnnnnnnnnnnnnnnnnnnnnnn

SEQ ID NO: 51981 - DNA, 240 bp, Setaria italica
  Peptide Sequence Number=SeqID_117955
tataatatagttttttgttgcaaattgaaaatagagcacacatagcaggaatcaactgaatagtgtatacttccttacctatcaacaggcagcaaatgggaccaagagggccaagataccaggttatgtactgatgcttcttgtggattatgtgcaatttctgagaaagcacatttaagaatttctcggatctcattaacatcctgagcaaagtcgcacaagctgatacacctcaccaaa

SEQ ID NO: 51982 - DNA, 204 bp, Setaria italica
  misc_feature (165)..(165): n is a, c, g, or t
  Peptide Sequence Number=SeqID_117956
gcatacaagccagagttagcatttgaacttccgagatcaacggatcaacggtacatactatcaacaggcagcaaatgggaccaagagggccaagataccaggttatgtactgatgcttcttgtggattatgtgcaatttctgagaaagcacatttaagaatttcncggatctcattaacatcctgagcaagtcgcacaagctga

SEQ ID NO: 51983 - DNA, 427 bp, Setaria italica
  Peptide Sequence Number=SeqID_117957
agtaatcattgttagatgttaggacttaaattgttaacttaaagcaattacagaagaccgacagctaagttggattttaagaaccatctgagaaccttacagtttcaaatctgttgcaggaaaagtaaaaaattaaaggtctatgtgtagcgctgcagaattagaattgtcaaggtgctacctgacgtgttgccacagactcaataatggcacagccgagatccagattgtcgttgactagcatgtgaataagttgctcaatagtttcactgccactcataaggttctgaatgagatttcgaagatgggaatatagggcgacacgaagaggttcctgcagcagagaaaaaggaaacacaattatatgttgtgttcaacagatccaaaagttaagggcttaattaaaattctaactaagtctagtact

SEQ ID NO: 51984 - DNA, 341 bp, Setaria italica
  Peptide Sequence Number=SeqID_117958
accaagagtgcttgacacagtagcagcaccagatggaccagaacttgtagcaccaacattttgaccatggccatgccacacgtgaacaaagtcctcatacactctctgttgggtagcagatagatgtccaggcttaggacgtagtgcttcagggatccgatcaaatagcccttgagcataagtatcataatatgcaggaccagttgcctctctttgtttcttttgttgagaaaatgactgcgctatttctccatcaatcacttcaacagcctgacgtgttgccacagactcaataattggctactagtccgtagtattccttagttattttgttttcgttt

SEQ ID NO: 51985 - DNA, 423 bp, Setaria italica
  Peptide Sequence Number=SeqID_117959
ccggcgcaggtgctcaagaacttcagcagcatccggaacctccgcatggagctccccgtctccgatgtcggcaccgacgacggcgtcatcctcaagtggaaggccgtgttcggcagcacgctccagagctgcgtcatcctcggcggcaccaaggtggaacgcgctgccgccggcacccacgcccctatggccgccgccgccgccgccaccgattccgatggcgctggcgacgaaagcggcagcatcccggagtccttctacaccaacggcggcctcaagctgcgcgtggtctggaccatcagctccctcatcgccgcggccaccaggcactacctcctccgcgagatcgtcaaggagcacccaccctggagcaggtcgtctacttctacggtacgtcgtctacggtcctagggtctaccttct

SEQ ID NO: 51986 - DNA, 224 bp, Setaria italica
  Peptide Sequence Number=SeqID_117960
taaacgaaacgaaacgaacgaacctaagaacaaacggaccaagaagacaaacaacctaccaatggcaatgggcaatggcaactaggttgctctgctcgcctcagctcggcctagctcagagatcggtggcataccgaggtgttcctcctgtaacaatcaacgctgatgcctcctcgatctctcgttactgccttggtatccttgtcacacaataatcgaatgga

SEQ ID NO: 51987 - DNA, 267 bp, Setaria italica
  misc_feature (231)..(231): n is a, c, g, or t
  Peptide Sequence Number=SeqID_117961
cgccgcggcggccgcggcggcgcagcggccgggatcaggttctcgaccgtcaacaccatgggcgtgatggcgcagtccgacccgccgtccacgggcgcgttccacccggacatcgcgccgcagctgcaggggatcctgggattcctcagcaggaccggcgcgcccttcatgatcaacccctacccctggttcgcctaccagtccgacccgcggccggagacgctggccttntgcctgttccagcccaacgccggccgcgtcgacgcc

SEQ ID NO: 51988 - DNA, 255 bp, Setaria italica
  Peptide Sequence Number=SeqID_117962
cgcggactccgaccccaccgtcaccgcctccacctgcgcgaactggtaagtggggacgctgacgcaccctcccccccacggcctctgcttcgttcccaacgtctccgcttacccgccatagatcaatccttcgtatgcgacgagctcacggtcagcgggaaattccatcttcaaatattgcactgcacagcgtgcattgtgctcggaaccttcagaagtgcgagcattgcggagatatggttccaagaaagctta

SEQ ID NO: 51989 - DNA, 165 bp, Setaria italica
  Peptide Sequence Number=SeqID_117963
tcgttgtgtcatttaaaacctgatccagtgtcgcagactgatcatcttcctcatccatgcctacaggaaaaaactaggtaagggcatctctcacgcacacatactgtgttttattcagatgagcaaacattcagtagcaccaaatacaatgacttgtgcaagcaa

SEQ ID NO: 51990 - DNA, 179 bp, Setaria italica
  Peptide Sequence Number=SeqID_117964
aaaggagaagcatttgaacacagtagttaaatatatgtatttcaatatcataaaggaaccagataagcaacctttgtcctctgtgaagacatcccatatgctgtctcctttgcctccctcccttctcgctccctcaatctggtatgcggaggtggcgacgccgaagacgaagccgtcgg

SEQ ID NO: 51991 - DNA, 252 bp, Setaria italica
  Peptide Sequence Number=SeqID_117965
ccaaccacgcggcgccgcccgagcacgaccatggcgtcgccgtccatcccgccgctctccgccacccgcacctcgccgccggtggcggcctccttgcccactcgtccggggaaccaacttcgcgctccgcgctctcattcaggactgtagacatgccaaggaggaggtggcagacaggtcttggtcccgttttggctgcgaggagtcctggtttgggcaatgttgataatctgcatgagagttcgagcttgt

SEQ ID NO: 51992 - DNA, 216 bp, Setaria italica
  Peptide Sequence Number=SeqID_117966
caccgtcgtcccccaccactttccccgcaccaaccacgcggcgccgcccgagcacgaccatggcgtcgccgtccatccccgccgctctccgccacccgcacctcgccgccggtggcggcctccttgcccactcgtccggggaaccaacttcgcgctccgcgctctcattcaggcaaaaatttctttctcggatacttgttctttccttgccgccgg

SEQ ID NO: 51993 - DNA, 390 bp, Setaria italica
  Peptide Sequence Number=SeqID_117967
aaaagaaaacgaaacgaaataagttaagaaccctacgtagaatgttccggcactcgaacatgctgtcagggatggtgccggagagcgagttgttgtacagcatgaactgctgcagcgaccggagcttgccgaacgtctcggggatcggcccggacagagcattgtcggccaagtcaaggacctgaagctgccggcactcgccgagctccggcgggatcgagccggacagctcgttctgcctgaagtcgatgaaggccagctgcgacaggttccccatggacgccggaatgctcccgttgaaccggttgccgaagatgtcgatcatctgcaagctcgtgcagtccccgatggactccggtatctcgccggcgaactggttctcgtacaggt

SEQ ID NO: 51994 - DNA, 387 bp, Setaria italica
  Peptide Sequence Number=SeqID_117968
tttttaaactttttaagtttttacttttatttttcctttacctttatttgtttgtcttagtgtctggacttactacaatacttcatacttttttgggttctcggcttccactggttcaaggaagctctttgtatatttggctccagccttggtcattgcgaactcggaggagttcagaaatcttagtgacaataaattcaagcatgtaatgagagaattacagggggctatacttattggttcagtattccagatactattaggatatactggtcttatgtcactgtttctgaggttaataaatccagtagtcgtggcaccaactattgctgcagtgggtttggcatttttcagttatggtttcccctcaggctggcagctgcgtag

SEQ ID NO: 51995 - DNA, 351 bp, Setaria italica
  Peptide Sequence Number=SeqID_117969
gcttctataccagtggctttggcagcatctgttctgtgcttcacctgggcgctaattgtcgcacttggcttgtccacattgagatatacccaagcagcaagctccaggaacatgataatagtcggatttaccctgttcatatccttgtccaatcccggcatatttccagcagtatgaacccagctccactctcatcctgccaagctatcttcttccatacgctgcagcatcaagcggaccagtgcgcacagccagcagtgggctgaactatgcggtgaatgcgctcctatccatcaacgttgtggtggactactaccttagttagactagtaactacctacgaacaaacaa

SEQ ID NO: 51996 - DNA, 403 bp, Setaria italica
  Peptide Sequence Number=SeqID_117970
gggaactctgtcaaggacatgatatcagctcctcgtccatgctctcctcctgttagaagagtaacagccactgaagatgagaaggaaaatgccatggaatatgggcttccatcatcgcatgctctcaatactgtttgtttgatgggatatctattacattatgtcctcacatatggagatgctggcaatgttatgattgctgctggtttatctttagctttcttgtttgttatgctaattggcattggtgagttggagttcataaggcaactgtttctcttgacttcccaaagatattgacgatttgatttacctgaaattgacagcaaggatatatttggtatgcacagcttgatcgatgttattgctggaatttgttttggtcattgtcatcctagcattc

SEQ ID NO: 51997 - DNA, 382 bp, Setaria italica
  Peptide Sequence Number=SeqID_117971
catccagcaacctacttccatttccacaccccctcgacgccccccctccatcttcagctcgcgactgccctgcttgcattcgcagggcgtgtcctcgtcgggatcccgaccatcctggttgtgaagttctgcagcaaggcgctgtccaagtggctgctgcctgtcatgtgcagcaccctgggcatccccattgtatcatcttgctatgttcctgccctgaaagtcgacaacagcagcaagaacaagcctgatgcgaagcagggtgccgggtacctccagagggtgttttccctcttccctcagaaggcctacgacgtggacacaggcattcaggtttcgttgtctaattacgtcctagtccttcgtcgttggttccgttgtt

SEQ ID NO: 51998 - DNA, 236 bp, Setaria italica
  Peptide Sequence Number=SeqID_117972
tttgccggaacagtgagctgtccatgtacaaagcgagaaggaggcctccgtggctcagctttgtccggggagctagagctcagctgctccgattctcgaaagagctcagctttgtccggggagctagagctcagctgctccgattctcgaaagagctgagcttattcgctcctgcagaggaaaaggccaaggctttcttgaatacaagcgatagaattagcagccaagaacaatgg

SEQ ID NO: 51999 - DNA, 244 bp, Setaria italica
  Peptide Sequence Number=SeqID_117973
ctgcctagcaatgcagccaagcttcttgagtttcctcctcttcctcttgctcttccacctgcatctgagcctgcacctgctcctctcccttccccttccagttcaccttccccttctagttcttgttgcacttgcacataaagacaccatggaatccattcttcttcatattcttccacaaatgcctcatgtactatctatgttccagtcctaggtatacatcttctacaaccccctctatctc

SEQ ID NO: 52000 - DNA, 192 bp, Setaria italica
  Peptide Sequence Number=SeqID_117974
ctgctcttatccttttttcacgatctcaaaagcatgatcattcaagatagcatgatgggtaaccactgatttgcattggtgtccacatctgggaacaccacattaacatcaatacatggatcatcaacatcatatagaaaatggaggaggatcaatcctcatcaacttatttaaccatcaggatacaaattc

SEQ ID NO: 52001 - DNA, 245 bp, Setaria italica
  Peptide Sequence Number=SeqID_117975
gaacgaagaaattgatgttcagagcaggaagaggcagaagaccgatatctaccctgcttttctactgaatttttgctgttctagatctagctacgatctacattttgagcctacaaaaccattgtggaattcaaggattggcaaactgtcttgcttttctttgaacaaactgtcacaaactactggaagaagcatgcactgcaatcaccaaaagctgacagagtttgcgctggtgatacctgtgt

SEQ ID NO: 52002 - DNA, 231 bp, Setaria italica
  Peptide Sequence Number=SeqID_117976
ctccttcccaagccaaccgcggcaggctcgcctcccccccgcgccgccggcagcagcaccgaccaccgcgatccaccaggtgacttgtggcaagcaaaatggctttctcatcggttttcaggagagtgaatgtcaaagagctggtctcaaatgcttcagtgtatgctagcgcagcagaatcttctggagcaatgagcttggtgtttagacgctgggccaccaagaagactg

SEQ ID NO: 52003 - DNA, 366 bp, Setaria italica
  Peptide Sequence Number=SeqID_117977
gcggccatcacgtacaccagcatcgcgttcatcccgatccaccgcaggggcgcgaacgcgtagccatggttcaggatgtcaaccaggaagtagaatatggagaacacgactccagcagcgccggcagtgacgcagatgtaactgaatgtgtagagttgtttattaagtggaattgcatgtgagaaatgtagaatgattccaagaacaagaagagctatgcccatggtaaaccactgcctcagcctctctgtatgactcttcatatggacaagcacatgcccgtagtgcacaccaatgatcgtactcaataccgcagaaaatgagctgcaaattgatgagatagtagtgttaaccttagtatccctt

SEQ ID NO: 52004 - DNA, 387 bp, Setaria italica
  Peptide Sequence Number=SeqID_117978
gattgatatcaatgcaccagtggatctgggaacagaatcaaatgtgctgcacacatttgagctccctatatcattgtctgctctgcaagaatttggcggagccaagggcctgtttgatggttacatggttagaaagcagaagatagaagctacaatggggtatccgtgcttctgcaggctgctcagcggattcaactgtctgcctggcttcagtgcctctacaattgtccagatcatccgctttcccttattttcttagaaacaacatgcagtctatacagtttcttcataaatattacctactgtatgactgattaatgtttatacatgtggagtgtgttgtcatcttatcgtttgttatttgactaatatgcaagttgatgattt

SEQ ID NO: 52005 - DNA, 268 bp, Setaria italica
  Peptide Sequence Number=SeqID_117979
tttatttcggttttgttaggttaattgttagtttggtagtatagctctgagccggaggaacgaagctgaagcagagaggatccgcgtgaagctgaataatctgcagaacatgccgcagccaatgaaaaaaaatgacaaggctgccaggttggaggctatgaacaggaagaaccgtgctgagaacttcaagaacgcttcggaaatgaaacctattaatacaagtttgaaggctggagaggctgggtatgaccctttttcgaggaggtgg

SEQ ID NO: 52006 - DNA, 349 bp, Setaria italica
  Peptide Sequence Number=SeqID_117980
taacctaaccgtcgtacttggtattccttccgttcgtcttgtcttgcggctccatctgcgcctgcttcctcacgctcgccgccgtcgtcggcttcatcgtcctcgtcatctacctcgcgctccacccttccaagccctccttctacctccaggacgtgcagctccgctccatcgacctcagcgacccggccatctccctcaacctccaggtgacgatcgcgtcgcggaacccgaacgagcgcgtgggcgtgtactacaagaccctggacgcgttcacgacgtaccgggacgagccggtgacggtgcccgtgtcgctgccgtcgatctaccagggccacaaggacgcgtc

SEQ ID NO: 52007 - DNA, 364 bp, Setaria italica
  Peptide Sequence Number=SeqID_117981
tggttgtttggttctgacttttgcattgcttccttttttggtggtattactctattagcaatactgacactatattgcctgtagagccaggctattcaattttcatcaaaaatttgcctttcagtgcaaatattgaaattgtcgaggaggagttcaagagatttggcactataaagccaggaggcgtccaagtccggcacaacaaggatgatcgttttgtctttggctttgtccagtacgagtcccagcagtctatgcaagcagcaattgaggcatctccgattcatatggaggagaaagaagtccatattgaggcgaaaagagccattcacgaggtggtcgtttccaatctggcaggggggtg

SEQ ID NO: 52008 - DNA, 324 bp, Setaria italica
  Peptide Sequence Number=SeqID_117982
actcaagaaaatgaaagtagtcagaatggtagatctgcatctgaatcatgttcagcattaccagaacctactccagctgacaggagtgtgatctcggaccatgtgacaactgagaatattgtcacggagaggcaaattagcaacccccctgttaatggaactgctgttgaaaataatgttcatgccgagccacctgtgcaagtggccaaagaggatcctaaaaaggccccagtcgctgctcctccccctcctgctccaactccgacagattgttacttaagtaaattctttattgtctattcctatttgttgtaaggtactatt

SEQ ID NO: 52009 - DNA, 254 bp, Setaria italica
  Peptide Sequence Number=SeqID_117983
atgttactaagaaatcttatgcatccattgtgaaggacatgaagagggcccaccgactccacaagttgccaaaacaactccatcagttgccaaacaaaagccagctcctaagccagtgtccaaggctgtcgaaggcccggaaaaatcatctgcgaaacctacccaagctaatgaaaccagtgatgggattgttgcccaaaacaactcttctcgcaatgtgcaaatattgaaattgtcgaggaggagttcaagag

SEQ ID NO: 52010 - DNA, 241 bp, Setaria italica
  misc_feature (20)..(20): n is a, c, g, or t
  misc_feature (25)..(25): n is a, c, g, or t
  misc_feature (27)..(27): n is a, c, g, or t
  misc_feature (203)..(203): n is a, c, g, or t
  misc_feature (229)..(229): n is a, c, g, or t
  Peptide Sequence Number=SeqID_117984
ttttttagttttacttttanaatananaaataattagaaaattagtacgaaggaggagttcaagagatttggcactataaagccaggaggcgtccaagtccggcacaacaaggatgatcgttttgtctttggcttttgtccagtacgagtcccagcagtctatgcaagcagcaattgaggcatctccgattcatatggagganaaagagtccatattgaggcgaaaagngccaattcacga

SEQ ID NO: 52011 - DNA, 221 bp, Setaria italica
  Peptide Sequence Number=SeqID_117985
gtgtcaacagtggccctaagcaatcgccagttgctgtgtagaggcatcaggcgtcaaagtaggatgcttaaggctacattcaagtgagtgtaaggattatttctagtaggagcattgctgatcagacagcttccagggggcatactacaaaattacttttagtaactagtaagttaaggggtaacgaactaaacaaaagtttaaagtaaagtaaggaacaa

SEQ ID NO: 52012 - DNA, 313 bp, Setaria italica
  misc_feature (218)..(218): n is a, c, g, or t
  misc_feature (233)..(233): n is a, c, g, or t
  misc_feature (284)..(284): n is a, c, g, or t
  misc_feature (290)..(290): n is a, c, g, or t
  Peptide Sequence Number=SeqID_117986
tgggcacttacggcttagctgaataccaaatagaaggagatgggaactgtcagttccgagctctggcagaccagatattccgcaatcctgactatcacaaacacgtgaggaaggcagtagtgaagcagctaaaggaattcaagaagcactatgaaggctatgtaccgatggaatataaggtttatctgaagaaatgaaaagatctggggaatgggganatcatgtgaccttanaggcggctgcagatagggtaacatagcactttcaagctatgagtaaaaacnttttanctacaggttttgcatttatttat

SEQ ID NO: 52013 - DNA, 206 bp, Setaria italica
  Peptide Sequence Number=SeqID_117987
tggggaatggggagatcatgtgaccttacaggcggctgcagatagggtaacatagcactttcaagctatgagtaaaaacattttatctacagtttgctgctaaaatatgtctgttgacatcgtttagagacacatgcctagtcgagatagtccccagagatgccactcccacaagagagctttggctaagtttcttggttgcgaag

SEQ ID NO: 52014 - DNA, 311 bp, Setaria italica
  Peptide Sequence Number=SeqID_117988
agcccgcttcgtcagtacaactgatgattacgaagagcttctgaaggaggaaccagttattgaattcaccggcgaggaagcttttggccgttacctagatttgcatgagctttataatgagttcataaattccaagttcggagcaccaatggaatactcggcttatgttggcagtttctcccagatggagaagatctcgcagagtcataaagctacaaggcaatacagagaatacttggaacacattctggaatatctgacatcatttctttatcgcacagagccattgcaggacattgagaagatttttt

SEQ ID NO: 52015 - DNA, 264 bp, Setaria italica
  Peptide Sequence Number=SeqID_117989
cgaccgcgaaatcgaaatccccaaaacccctagctacccagcgcggcttcccccttcccgcctccccgcagcgcagcttcccccttcccgcctccccgcagcgcgtcactcgagccgcgctgcggggaggcgggaagggggaagctgccggaggaaggtgtagcctagcgggtggcggatggcgtccacggtgctggaggctacgcgggcgcgcacgaagacctggagaggctggagcggctcgcggtgcgcgagctgcagcgg

SEQ ID NO: 52016 - DNA, 264 bp, Setaria italica
  Peptide Sequence Number=SeqID_117990
taacctggatggggaaataaaagcacggaagagtctgaaatagaccttgattattacagcacagttgaagaactcgttgagcttggtccagaaaagttgaaacatgctttagccgctcgtggtttgaagagcggcggtactgttcaacagcgtgcagaacgtcttttcttgttgaagcatacacctttggagcaactggaccggaagcattttgctaaagttccacgtactaaagatgtctcagacgcatcttccaatggcaac

SEQ ID NO: 52017 - DNA, 257 bp, Setaria italica
  Peptide Sequence Number=SeqID_117991
ttctgaaggaggaaccagttattgaattcaccggcgaggaagcttttggccgttacctagatttgcatgagctttataatgagttcataaattccaagttcggagcaccaatggaatactcggcttatgttggcagtttctcccagatggagaagatctcgcagagtcataaagctacaagagccattgcaggacattgagaagtatttttgcaaagttggaaagtgaatttgaggaacgatgggccaacgaagaag

SEQ ID NO: 52018 - DNA, 514 bp, Setaria italica
  Peptide Sequence Number=SeqID_117992
actttaggaaccgacaatagtaatgggcttgaatttgtttaatgaaccctaagtttgagtgctcataaatttaatagaactatccataatgctaaatataattttagcatagaaatgtatattcccataactttctatccttataaatggtgacacacatcacacatcatgcgtatagaccttaattattatattgtataccaatagtgtaagatatagacgatttagaatcatatattgttgtatatttttaattaaggttatttgattcaaacgtagggttacctcatgttattttaataatagcatgtgtgggtaatatagatgcaaatttaaggggttactttaagtttttttaaagtaatagtggtaggcaattcagttgcaaattagggagttattttaaatatgtttataatggcataagtgggtaattttgatgaagattagggggttactttagtttatttatataatggtcagaggtgggtaatttatatatagatttaggggt

SEQ ID NO: 52019 - DNA, 251 bp, Setaria italica
  Peptide Sequence Number=SeqID_117993
ctaagctaataatcaaaatttttacctactgctctcttattttttcaatacttcaacataatacttatatacctatctttgtccagttgcgattgatttttaattaataattactctatgcactttttcatccacattcatattatcacacctccaatcctccatacattatgtttagcatacaaatcaatgtttttcatcgattccgcacgtatatgcataaatggtctaaatggtggcactcatcatgt

SEQ ID NO: 52020 - DNA, 268 bp, Setaria italica
  Peptide Sequence Number=SeqID_117994
caaggtggtgctcctgcagatctagctggacgtccatggaggcggcgatgacaacaacttcaggtcacctcccctctaccctccctccctctacagagatctgctctctctcctctccccagcaaagggcttcgtgtggggacacggcgacggcgctcctccatgaaggcatgaaaacggccaccacaatggtaccacaaccgaagacgcttcagctctgaaaaaactggaagagtctctggaatcagatgctggaaagaaatataat

SEQ ID NO: 52021 - DNA, 448 bp, Setaria italica
  Peptide Sequence Number=SeqID_117995
taagaacgaaggacgaacgaacgacggaaagacgaaagacggacgaaggaaaggacgccgttgggcgttggccctgccgggtgccggccgtgcgtgtgtcgtcgcccgcacggaagcaaagcaatcccttcccacgaataaacgatttgcttcgctcggcaaaaagtctcgtcttcccctccttcttcctgttcggttccccttggcggcaggcgcccgcgtgaggctcgagtctttccatattccaatccaccgcagcaacaaaagcggcgcatccgataggtggggtgttgtcaggtactacccggtggcgcgcctgtctcccacgggaccggttggattcggttggattttcgaatcaatcaagccggaggagaggttttcttcgcgcggccacggcggcggcggaccgaggcggcggcggagatgcacaagaccaaggggaagc

SEQ ID NO: 52022 - DNA, 242 bp, Setaria italica
  Peptide Sequence Number=SeqID_117996
tttgaaaacgccaatgaggagagtggtttgagctccctgttcttctacaggatttcatttgcagctgccggcaatagaatatgagtctcgaggcctgctaccggtttggaggcagtagtaaattaaaggaaccgtctcgtcaaagcctctgctggttgcgttgctctgatcccctctctcacttctcagagcacgcggcagggaggataagcttggaatgcgctgctagctcgagggtgcaa

SEQ ID NO: 52023 - DNA, 254 bp, Setaria italica
  Peptide Sequence Number=SeqID_117997
acttaaatattatggattcatgtttcatttgcattgcttattttgttaaggaacctcatgctagcagtactgattctggaaaagtgcaccctcagtctatagtgtcattgtttgagtcgcaatggagtaccattcaaatggtcgttctaagagagatattgatgtcatcaatccgtgctgcggatccactctcatcatggagtgctgcagctcgtcttcttagatcattttacccactcatcacaccagctggt

SEQ ID NO: 52024 - DNA, 485 bp, Setaria italica
  Peptide Sequence Number=SeqID_117998
tggtcgggtttgtaactaggttccttgtctttcgggttcctttgggtcttgtctttctagtcgtaccgtctttctttgtaaggtcggtccgtcctagcacctgcacgacgctggtgaaggggctcccctccggcgtcacccggacgtagagcttggtgcccatgaagaagaggacgcaggcgaggaacatgaggcccgtggggatgccgagcccgatgggccagctcaggttgctctgcacgtagatgatgacggtggccgagatcatcatggcggcggtgaaggtgaagtagtaccagttgaagaagctgttgatgccgcgcttgccggactcgggtgttggggtcgaactggtcggcgccgaagggcatgctgcaggggcgatccccgcgagcccagcaccaggaacgcgaaggcaatgaagagcaccgcgaaactggtacgaggtggccttctcgcaggtctcgcccacgccgcactccggc

SEQ ID NO: 52025 - DNA, 405 bp, Setaria italica
  Peptide Sequence Number=SeqID_117999
ttgtcctacgtattggtccgtcctttgttcctaggtctaccggtaacttggttccgttgttgcgcgagctttggtgacgatggcgctggtgtgcggcgggttgaacaggtcctgcttcgggtccttgggctgcttcagcgaccgcttcttgaaggcggccgccagcacctgcacgacgctggtgaaggggctcccctccggcgtcacccggacgtagagcttggtgcccatgaagaagaggacgcaggcgaggaacatgaggcccgtggggatgccgagcccgatgggccagctcaggttgctctgcacgtagatgatgacggtggccgagatcatcatggcggcggtgaaggtgaagtagtaccagttgaagaagctgttgatgccgcgcttgccggactcggt

SEQ ID NO: 52026 - DNA, 270 bp, Setaria italica
  Peptide Sequence Number=SeqID_118000
catggcttccagccgtagtacttgacggcgggccgcgggctgtcctcgccgtcgccgtcccccatcttgtccacctccatgctcttgagcttccgcgacacctcgtcgtcctcccgtccgccgccgccgccgcgcattctacgactacgaccggactagaactaactaacccctaagaacttaacctaacttaacttaacttaaccccggggggaaagaactaagaaataaacgaaagaacgaacgtaaccccttaactaaggtaactaa

SEQ ID NO: 52027 - DNA, 231 bp, Setaria italica
  Peptide Sequence Number=SeqID_118001
gtaaggtacggtagttacttacctaatttgtaggagggtcgagggcaggagcagggcacttacgatgagggaggcgatggaggcgatggcgagcgcgaggtagcggccgaggtaggcgtcggagaggaaggcgccgatgatgggggccaggctggtggtgccgttgagcccgttgaggagggtggcggcgtccacgctccgcatgtggaacacctgcgtcaggtacaccag

SEQ ID NO: 52028 - DNA, 365 bp, Setaria italica
  Peptide Sequence Number=SeqID_118002
tactaagtacctaagtaattacgaagttctactacaaggagatcccgagcacatgcggagcgtggcgggggcgctggccttctgcaacctggcgctcggacaactacctcagcgggttcctggtgaccatcgtgcaccggacgacggggtccggccgcaactggctggcgcaggacctcaacaagggccgcctcgatctcttctactggaccatcgccggcatcggcgtcttcaacctcatctacttcctcatctgcgccaggtggtacaggttcaagggggccagcaactgagcgcccggccgaggtggtcatcatctcacgagtgcaggcatgaagaatgagctctgaactatgtggggatgg

SEQ ID NO: 52029 - DNA, 352 bp, Setaria italica
  Peptide Sequence Number=SeqID_118003
ctactacaaggagatccccgagcacatgcggagcgtggcgggggcgctggccttctgcaacctggcgctcggcaactacctcagcgggttcctggtgaccatcgtgcaccggacgacggggtccggccgcaactggctggcgcaggacctcaacaagggccgcctcgatctcttctactggaccatcgccggcatcggcgtcttcaacctcatctacttcctcatctgcgccaggtggtacaggttcaaggggccagcaactgagcgcccggccgaggtggtcatcatctcacgagtgcaggcatgaagaatgagctctgaactatgtggggatggaaatctgtctggttgc

SEQ ID NO: 52030 - DNA, 411 bp, Setaria italica
  Peptide Sequence Number=SeqID_118004
caacaagggccgcctcgatctcttctactggaccatcgccggcatcggcgtcttcaacctcatctacttcctcatctgcgccaggtggtacaggttcaagggggccagcaactgagcgcccggccgaggtggtcatcatctcacgagtgcaggcatgaagaatgagctctgaactatgtggggatggaaatctgtctggttgcttggttgggtaattatgtcatggccttgggggagcatgaggaaaaaaagggggggttagtataaggtcacgataattaatttgtgtttaccatagtagttgtttgataatgcctctttttttgtttattgtattttaatttgttactcgtgcttccatttggatccataggatgatgaaagagaagaaagaaacaaagagttggtttc

SEQ ID NO: 52031 - DNA, 346 bp, Setaria italica
  Peptide Sequence Number=SeqID_118005
ggccgaggtggtcatcatctcacgagtgcaggcatgaagaatgagctctgaactatgtggggatggaaatctgtctggttgcttggttgggtaattatgtcatggccttggggggagcatgaggaaaaaaaagggggggttagtataaggtcacgataattaatttgtgtttaccatagtagttgtttgataatgcctctttttttgtttattgtattttaattttgttactcgtgcttccatttggatccataggatgatgaaagagaagaaagaaacaaaagagttggtttcttgtaagtggttaaactgaaatatgaatggatgttaagatgaaatgaaaaaa

SEQ ID NO: 52032 - DNA, 386 bp, Setaria italica
  Peptide Sequence Number=SeqID_118006
ccgccgcgtccttcaccgtcttcgccatgctcgcgcagacgctctggatcccgctgtacgaccgcatcctgctgcctaagctccggaagatgaccggcacggcaactacctcagcgggttcctggtgaccatcgtgcaccggacgacggggtccgccgcaactggctggcgcaggacctcaacaagggccgcctcgatctcttctactggaccatcgccggcatcggcgtcttcaacctcatctacttcctcatctgcgccaggtggtacaggttcaagggggccagcaactgagcgcccggccgaggtggtcatcatctcacgagtgcaggcatgaagaatgagctctgaactatgtggggatggaaatctgtctggttgcttgg

SEQ ID NO: 52033 - DNA, 405 bp, Setaria italica
  Peptide Sequence Number=SeqID_118007
aacaagggccgcctcgatctcttctactggaccatcgccggcatcggcgtcttcaacctcatctacttcctcatctgcgccaggtggtacaggttcaagggggccagcaactgagcgcccggccgaggtggtcatcatctcacgagtgcaggcatgaagaatgagctctgaactatgtggggatggaaatctgtctggttgcttggttgggtaattatgtcatggccttgggggagcatgaggaaaaaaagggggggttagtataaggtcacgataattaatttgtgtttaccatagtagttgtttgataatgcctcttttttttgtttattgtatttttaattttgttactcgtgtcttccatttggatccataggatgatgaaagagaagaaagaaacaaaag

SEQ ID NO: 52034 - DNA, 423 bp, Setaria italica
  Peptide Sequence Number=SeqID_118008
cgtgcaccggacgacggggtccggccgcaactggctggcgcaggacctcaacaagggccgcctcgatctcttctactggaccatcgccggcatcggcgtcttcaacctcatctacttcctcatctgcgccaggtggtacaggttcaagggggccagcaactgagcgcccggccgaggtggtcatcatctcacgagtgcaggcatgaagaatgagctctgaactatgtggggatggaaatctgtctggttgcttggttgggtaattatgtcatggccgttgggggagcatgaagggaaaaaaaggggggttagtataaggtcacgataattaattgtgttaccatagtagttgttgataatgccttcttttttttgtttattgttattttaattttgttactcgtgtcttcctatttggtatcc

SEQ ID NO: 52035 - DNA, 243 bp, Setaria italica
  Peptide Sequence Number=SeqID_118009
gggccagcaactgagcgcccggccgaggtggtcatcatctcacgagtgcaggcatgaagaatgagctctgaactatgtggggatggagacgccgatgccggcgatggtccagtagaagagatcgaggcggcccttgttgaggtcctgcgccagccagttgcggccggaccccgtcgtccggtgcacgatggtcaccaggaacccgctgaggtagttgccgagcgccaggttgcagaaggccag

SEQ ID NO: 52036 - DNA, 298 bp, Setaria italica
  Peptide Sequence Number=SeqID_118010
tcttccgaactcagtgtgagtagtcgacggggtccggccgcaactggctggcgcaggacctcaacaagggccgcctcgatctcttctactggaccatcgccggcatcggcgtcttcaacctcatctacttcctcatctgcgccaggtggtacaggttcaagggggccagcaactgagcgcccggccgaggtggtcatcatctcacgagtgcaggcatgaagaatgagctctgaactatgtggggatggaaatctgtctggttgcttggttgggtaattatgtcatggccttgggggga

SEQ ID NO: 52037 - DNA, 337 bp, Setaria italica
  Peptide Sequence Number=SeqID_118011
caactgagcgcccggccgaggtggtcatcatctcacgagtgcaggcatgaagaatgagctctgaactatgtggggatggaaatctgtctggttgcttggttgggtaattatgtcatggccttgggggagcatgaggaaaaaaggggggttagtataaggtcacgataattaatttgtgtttaccatagtagttgtttgataatgcctctttttttgtttattgtattttaattttgttactcgtgcttccatttggatccataggatgatgaaagagaagaaagaaacaaaagagttggtttcttgtaagtggttaaactgaaatatgaatggatgt

SEQ ID NO: 52038 - DNA, 332 bp, Setaria italica
  misc_feature (332)..(332): n is a, c, g, or t
  Peptide Sequence Number=SeqID_118012
agggggaccaagcaaactagagcgcccggccgaggtggtcatcatctcacgagtgcaggcatgaagaatgagctctgaactatgtggggatggaaatctgtctggttgcttggttgggtaattatgtcatggccttgggggagcatgaggaaaaaaaaggggggggttagtataaggtcacgataattaatttgtgtttaccatagtagttgtttgataatgcctcttttttttgtttattgtattttaattttgttactcgtgcttccatttggatccataggatgatgaaagagaagaaagaaaacaaaaaaaaaaaaaaaaaaacaaan

SEQ ID NO: 52039 - DNA, 241 bp, Setaria italica
  Peptide Sequence Number=SeqID_118013
tccggccgcaactggctggcgcaggacctcaacaaggccgcctcgatctcttctactggaccatcgccggcatcggcgtcttcaacctcatctacttcctcatctgcgccaggtggtacaggttcaagggggccagcaactgagcgcccggccgaggtggtcatcatctcacgagtgcaggcatgaagaatgagctctgaactatgtggggatggaaatctgtctggttgcttggttaggg

SEQ ID NO: 52040 - DNA, 260 bp, Setaria italica
  Peptide Sequence Number=SeqID_118014
taggactaggacgacaaggaacctcaacaagggccgcctcgatctcttctactggaccatcgccggcatcggcgtcttcaacctcatctacttcctcatctgcgccaggtggtacaggttcaagggggccagcaactgagcgcccggccgaggtggtcatcatctcacgagtgcaggcatgaagaatgagctctgaactatgtggggatggaaatctgtctggttgcttggttgggtaattatgtcatggccttggggga

SEQ ID NO: 52041 - DNA, 286 bp, Setaria italica
  misc_feature (7)..(7): n is a, c, g, or t
  Peptide Sequence Number=SeqID_118015
aactatntggggatggaaatctgtctggttgcttggttgggtaattatgtcatggccttgggggagcatgaggaaaaaaagggggggttagtataaggtcacgataattaatttgtgtttaccatagtagttgtttgataatgcctcttttttttgtttattgtattttaattttgttactcgtgcttccatttggatccataggatgatgaaagagaagaaagaaacaaaagagttggtttcttgtaagtggttaaactgaaatatgaatggatgttaagatgaa

SEQ ID NO: 52042 - DNA, 273 bp, Setaria italica
  Peptide Sequence Number=SeqID_118016
agggggaccaagacaaactgagcgcccggccgaggtggtcatcatctcacgagtgcaggcatgaagaatgagctctgaactatgtggggatggaaatctgtctggttgcttggttgggtaattatgtcatggccttgggggagcatgaggaaaaaaaagggggggttagtataaggtcacgataattaatttgtgtttaccatagtagttgtttgataatgcctcttttttttgtttattgtattttaattttgttactcgtgcttccatttt

SEQ ID NO: 52043 - DNA, 226 bp, Setaria italica
  Peptide Sequence Number=SeqID_118017
accatcgccggcatcggcgtcttcaacctcatctacttcctcatctgcgccaggtggtacaggttcaaggggggccagcaactgagcgcccggccgaggtggtcatcatctcacgagtgcaggcatgaagaatgagctctgaactatgtggggatggaaatctgtctggttgcttggttgggtaattatgtcatggccttgggggagcatgaggaaaaaaaggggg

SEQ ID NO: 52044 - DNA, 257 bp, Setaria italica
  misc_feature (194)..(194): n is a, c, g, or t
  misc_feature (225)..(225): n is a, c, g, or t
  misc_feature (241)..(241): n is a, c, g, or t
  Peptide Sequence Number=SeqID_118018
tggttgggtaattatgtcatggccttggggagcatgaggaaaaaaggggggttagtataaggtcacgataattaatttgtgtttaccatagtagttgtttgataatgcctctttttttgttattgtattttaattttgttactcgtgcttccatttggatccataggatgatgaaagagaagaaagaacaaagngttggtttctgtaagtggttaaactgaaatntgaatggatgttaagntgaaatgaaagttaaa

SEQ ID NO: 52045 - DNA, 269 bp, Setaria italica
  misc_feature (173)..(173): n is a, c, g, or t
  Peptide Sequence Number=SeqID_118019
tacttcctcatctgcgccaggtggtacaggttcaagggggccagcaactgagcgcccggccgaggtggtcatcatctcacgagtgcaggcatgaagaatgagctctgaactatgtggggatggaaatctgtctggttgcttggttgggtaattatgtcatggccttgggggancatgaagggaaaaaaagggggggttagtataaggtcacgataattaatttgtgtttaccatagtagttgtttgataatgccttctttttttgttta

SEQ ID NO: 52046 - DNA, 254 bp, Setaria italica
  misc_feature (217)..(217): n is a, c, g, or t
  Peptide Sequence Number=SeqID_118020
catcggcgtcttcaacctcatctacttcctcatctgcgccaggtggtacaggttcaagggggccagcaactgagcgcccggccgaggtggtcatcatctcacgagtgcaggcatgaagaatgagctctgaactatgtggggatggaaatctgtctggttgcttggttgggtaattatgtcatggccttgggggagcatgaggaaaaaaggggggttntataaggtcacgataattaatttgtgtttaccattag

SEQ ID NO: 52047 - DNA, 268 bp, Setaria italica
  Peptide Sequence Number=SeqID_118021
actgagcgcccggcccgaggtggtcatcatctcacgagtgcaggcatgaagaatgagctctgaactatgtggggatggaaatctgtctggttgcttggttgggtaattatgtcatggccttgggggagcatgagaaaaaaaagggggggttagtataaggtcacgataattaatttgtgtttaccatagtagttgtttgataatgccttcttttttttgtttattgtattttaattttgttactcgtgcttccatttggatccatagg

SEQ ID NO: 52048 - DNA, 266 bp, Setaria italica
  Peptide Sequence Number=SeqID_118022
tgcaggcatgaagaatgagctctgaactatgtggggatggaaatctgtctggttgcttggttgggtaattatgtcatggccttgggggagcatgaggaaaaaaaagggggggttagtataaggtcacgataattaatttgtgtttaccatagtagttgtttgataatgcctctttttttgttattgtattttaattttgttactcgtgcttccatttggatccataggatgatgaaagagaagaaagaaacaaaagagttaaaagg

SEQ ID NO: 52049 - DNA, 252 bp, Setaria italica
  Peptide Sequence Number=SeqID_118023
taggaccgaaggtggtcatcatctcacgagtgcaggcatgaagaatgagctctgaactatgtggggatggaaatctgtctggttgcttggttgggtaattatgtcatggccttgggggagcatgaggaaaaaaggggggttgtataaggtcacgataattaatttgtgtttaccatagtagttgtttgataatgcctcttttttttgttattgtattttaattttgttactcgtgcttccatttggatccat

SEQ ID NO: 52050 - DNA, 270 bp, Setaria italica
  Peptide Sequence Number=SeqID_118024
gggggggttaggtataaggtcacgataattaatttgtgtttaccatagtagttgtttgataatgcctcttttttttgttttatttgtatttttaattttgttactcgtgcttccatttggatccataggatgatgaaagagaagaaaagaaacaaaaagagttggtttcttgtaagtggttaaactgaaatatgaatggatgttaagatgaaatgaaagttaagctcgattcccagcttatgaatttaacaaaaaaaaaaaaaaaactaa

SEQ ID NO: 52051 - DNA, 204 bp, Setaria italica
  Peptide Sequence Number=SeqID_118025
cgggggggttagtataaggtcacgataattaatttgtgtttaccatagtagttgtttgataatgcctcttttttttgtttattgtattttaattttgttactcgtgcttccatttggatccataggatgatgaaagagaagaaagaaacaaaagagttggtttcttgtaagtggttaaactgaaatatgaatggatgttaagaa

SEQ ID NO: 52052 - DNA, 165 bp, Setaria italica
  Peptide Sequence Number=SeqID_118026
ttttaattttgttactcgtgcttccatttggatccataggatgatgaaagagaagaaagaaacaaaagagttggtttcttgtaagtggttaaactgaaatatgaatggatgttaagatgaaatgaaagttaagctcgattcccagcttatgatttcaaaaaaaaa

SEQ ID NO: 52053 - DNA, 253 bp, Setaria italica
  Peptide Sequence Number=SeqID_118027
gtcaggtacaccagcaggttcgccgacgtgcccagcgtccccagcttctcgaacgtctcgttgcctgcacagccgcaatccgacctcaccagtcaccgccgccattaccacacgagcaagagagagaggcgagaggaaatcgcggacggcgaacgcaccgatgatgaagggcatggccttccagccgtagtacttgacggcgggccgcgggctgtcctcgccgtcgccgtcccccatcttgtccacctccatg

SEQ ID NO: 52054 - DNA, 263 bp, Setaria italica
  Peptide Sequence Number=SeqID_118028
tggttgggtaattatgtcatggccttgggggagcatgaggaaaaaaggggggttagtataaggtcacgataattaatttgtgtttaccatagtagttgtttgataatgcctctttttttgtttattgtattttaattttgttactcgtgcttccatttggatccataggatgatgaaagagaagaaagaaacaaaagagttggtttcttgtaagtggttaaactgaaatatgaatggatgttaagatgaaatgaaagttaaaa

SEQ ID NO: 52055 - DNA, 157 bp, Setaria italica
  Peptide Sequence Number=SeqID_118029
caagggggccagcaactgagcgcccggccgaggtggtcatcatctcacgagtgcaggcatgaagaatgagctctgaactatgtggggatggaaatctgtctggttgcttggttgggtaattatgtcatggccttgggggagcatgaggaaaaaaagg

SEQ ID NO: 52056 - DNA, 189 bp, Setaria italica
  Peptide Sequence Number=SeqID_118030
acaatacaatactcacgagtgcaggcatgaagaatgagctctgaactatgtggggatggaaatctgtctggttgcttggttgggtaattatgtcatggccttgggggagcatgaggaaaaaaaagggggggttagtataaggtcacgataattaatttgtgtttaccatagtagttgtttgataatgcc

SEQ ID NO: 52057 - DNA, 174 bp, Setaria italica
  Peptide Sequence Number=SeqID_118031
aggcatgaagaatgagctctgaactatgtggggatggaaatctgtctggttgcttggttgggtaattatgtcatggccttgggggagcatgaggaaaaaaggggggttagtataaggtcacgataattaatttgtgtttaccatagtagttgtttgataatgccttcttttttt

SEQ ID NO: 52058 - DNA, 322 bp, Setaria italica
  Peptide Sequence Number=SeqID_118032
ccttgacggtgtcagatatcctggagagaggtttcggcgatactcttggatcaccatctccattgccagcctccctgggatcagctagcacagagacaacaactgatgatgctggcttgctatcaggtaccttgctgctttcagaagtactgttaaaaagtccgaggctctgtgctgttcaccgtttttccagtgagtggaatcgcctcattaataacaatagaatacctacctagtttttacaaacttagaccaaccaagaattttaggaaattttactagggtaagacaattagaacgactacgaaggtaagttacaaca

SEQ ID NO: 52059 - DNA, 211 bp, Setaria italica
  Peptide Sequence Number=SeqID_118033
cacagttggagaagcaggtataataccaccagatttggcagaagctgcagaaatgtcgaactggaatacctcactgcacattcccgagttcaaaattggtcctgaaaatagttatatacaaatcacagagtaagacactatagagaaacactcaaggagtatcaaaactcaaagacgggaagatactgacaagaaatgtcagaccaaaaaa

SEQ ID NO: 52060 - DNA, 421 bp, Setaria italica
  Peptide Sequence Number=SeqID_118034
aatcaacatctcagaaaaatggctacaacttttcaaaattagcaagcctgaactgtagctaggatgatttaaaagataacataccatactgtgttatacaataccaaagaaattacacgcattgaaccagatagacattctaatatacttggtagttgcaaaaaagagtgattaatgacaaattagcagttctaattgtattcacaggataacagtgcttatcattcaaaagcattacatggcaatgatgctacagatatcattttaaggaagcaaagaaagatagtttggaacagggatgcacactaaccccaatagttgctgttggcttaaaagccactttgaagtaaataatttcaccatttgatatccctccctgcatgcacacacaaattgcaaatacagagtcaacaattcatac

SEQ ID NO: 52061 - DNA, 397 bp, Setaria italica
  misc_feature (324)..(324): n is a, c, g, or t
  Peptide Sequence Number=SeqID_118035
tagagatattggcatttgtttccaaagtgcatcaggttgtacttccagaagatgcagttgattatgaaactgtaaccatggaacagatagagagcaacatcgttagatgtcctgatccagaatatgcagagaagatgattgctgccatcgacaaagtacgagttagaggggattcaattggtggggttgtcacatgcattgcaagaatgccaatatctctactccagatttgagcttaagaactttctttgcaagagctccagcagccacctgccaatggtttctctggctgatgatcttccacctccctgcacagctctaacnccatacttgaagtcataggttgcgtctgcatgggaaggtctgtatgccttagcctatttcactgtaatctccg

SEQ ID NO: 52062 - DNA, 228 bp, Setaria italica
  Peptide Sequence Number=SeqID_118036
tttgggcaaaaacgtggattggtgtaccggtggtcaacccttcatgtgtccctgatagaattttgcatgtatcagtctcctttctcggggtagttattctactctgaccaggacgtcttctgtcgagctctacttgcatgtctgcctcagtgagaggaattctgggtgggcaaccactgataacacaaccaacaccccctccatgagactcaccataggttgcaacct

SEQ ID NO: 52063 - DNA, 165 bp, Setaria italica
  Peptide Sequence Number=SeqID_118037
tggttacagtttcataatcaactgcatcttctggaagtacaacctgatgcactttggaaacaaatgccaatatctctactccagatttgagcttaagaactttctttgcaagaccacgtggaacatttcttgcaatgcatgtgacaaccccaccaattgaatccc

SEQ ID NO: 52064 - DNA, 445 bp, Setaria italica
  Peptide Sequence Number=SeqID_118038
gtacccttgtttgttgatattgaatctgcactaccaggccaagatgtgaatggagccattggagatgcagaaggggtactagccgctctgtgggttgatctctcggataaaacaggggatccaacattattcatagaaacagagttgggtgaatcagttacttggtgggattcagcaatgccatttgcactgggtgctgtgatccgtccttgatcatgagcattattaaactatttggtttgcttgaccatttaaaaccttagtactgagctcctgctcccgattcgaagaatcatctgtttatcctcgagtaccagaggtccgaatgcttgatttccatgctctcatgcctagcgatggaaactatggagaattgaagtttgtggatctattggacactataattgcaatggcaaaagctacatttgattcctttgatttatga

SEQ ID NO: 52065 - DNA, 320 bp, Setaria italica
  Peptide Sequence Number=SeqID_118039
cagtccttacactattatacgcttagttgtttgttcctcacgatctttaactcaaaaggacttgctttattttctgtactgacagtgtccacttttgcagctgtggctcgtcgatgtttcaggacttttggtggttcttctgaggctgtagatcatgaagccttttggagtagatgttagactgcgccgtagaatatggacaagggagacctgcaagctgggtcatttttttgctgtacatacatacatactcctaggtgggagttctctgttatcctggtccacctgaactctctgaagatggtatattggtattgtta

SEQ ID NO: 52066 - DNA, 402 bp, Setaria italica
  Peptide Sequence Number=SeqID_118040
gaaaaaagtacatgaaatgtattcatttaatattagagcaatagagtcagcaacaaaattaatcatccccatacatctagatattacatatcccttaaaacttacactctgcgttctaattctgttaaaaaactttgcgcaagcagacagacacttctcttcaattctcaatctttgctcttcgcctatgtttattgacatgtttctatgatcctcatcgaatagcttttcaaactgtagattgacactttcagcatgtgcacacacatcagtacatcacaggaacctggttaagttttcgacattcctatagtggttagcttgctagatgaaacatccaaaacacgaaggttctgacaaggtaagaaaatcttccatctttggcattccattccattatgg

SEQ ID NO: 52067 - DNA, 182 bp, Setaria italica
  Peptide Sequence Number=SeqID_118041
agctgagtgctgaactctggtgcctctgaacatgctgcagctcgtagcgaggacgggctcaggtcggagctcctcagcacgcgcagacgggctcaggtcggagctcctcagcacgcgcagacgcctcgcggtgccgatgaacatctcccacggcacgtctccgactagcatctggtcgccct

SEQ ID NO: 52068 - DNA, 201 bp, Setaria italica
  Peptide Sequence Number=SeqID_118042
ttttacttaactttaacttatttgttcggtttgtctatttgtactattcctttctaccgtttttccaagtatttatatatgagcgaggaatccagaaagtttccaaagtttgcatatcaattactgctattgtctggactgctgctattgtttgcctcattattgcttggccaaaaagtgactggctttggcttattgacg

SEQ ID NO: 52069 - DNA, 246 bp, Setaria italica
  Peptide Sequence Number=SeqID_118043
agcctagctggtttggttgtatctgtacctgcctgatcctatcctaagtctgtgttctttcttttcaggctgtggtgctatttgcaatgggtggctacgggacatacctcggcttcaggatcaaactatcagatgatccagaagagaaggccaaggccaaagatctccatccgaagctcctggccggcatgttcttcttcttcgccctcggcgctacaggcggtgtcaccgctcttcttacctcag

SEQ ID NO: 52070 - DNA, 212 bp, Setaria italica
  Peptide Sequence Number=SeqID_118044
ttttgcagcacacgcacaccgcacacatacacccgtgcagcaaaattgcaatgtgtacgtagagagagtgcccggagcttggattgcgatgtgatgctactgtcggtgtggcgtttactgatcaatccaagctccgggcactctctctagtgtaagctaggagatggatgctgcacgggtgtatgtgtgcggtgtgcgtgtgctgcaaattg

SEQ ID NO: 52071 - DNA, 249 bp, Setaria italica
  Peptide Sequence Number=SeqID_118045
tgtacgccttgtccgccgccggcagctggaagaactcctcgcacacgtcctccatgtcccgggtcacctcctcagggataccgtggttcaccaccatgaagaagccgaactccatgccggcatcgaggatggcgcggcggacctcgctgcggccacgggacatgtcgatgacgggcagggacgcggtggcggagatggcctgcggcagctgaagctccacctcgcgccgtcccaggcgttgcccttgga

SEQ ID NO: 52072 - DNA, 209 bp, Setaria italica
  Peptide Sequence Number=SeqID_118046
gatgaactcctttgcagggccgatgaggcagtccggtgtgggcatgatgaaagttgccaccgccgtccgcggcagcgtggagctggtcaccacgcggtgctcgatgctcttgagcaatccattggtcaccacctgcgccgagagggaccaacgtgcttaataatcggatgatagatctttgatgatgcaaccgagagagagagagagag

SEQ ID NO: 52073 - DNA, 228 bp, Setaria italica
  Peptide Sequence Number=SeqID_118047
gtccggtgtgggcgatgatgaaagttgccaccgccgtccgcggcagcgtggagctggtcaccaacgcggtgctcgatgctcttgagcaatccattggtcaccacctcgagttgctggccgaagttgacgatgaaggcgccaggcacgggctcaacctttatccagtctctcatccacggtctcgccgctgccacacatgttcgtcgtcaaggatctcgtcgtcgacat

SEQ ID NO: 52074 - DNA, 207 bp, Setaria italica
  Peptide Sequence Number=SeqID_118048
caccgcttagtaaacataaaaagggaatagaccatgaaagtcaatagatctgaacatacctttagaacaacatctccactgagagttgggacttgaactgtccctcccaatattgcctatgtagtatataagagtaatcaaaatcaatatgctattaaaatatactaagagaacagttgtgcaagaatatttatgtatataggcatt

SEQ ID NO: 52075 - DNA, 410 bp, Setaria italica
  Peptide Sequence Number=SeqID_118049
ttaaaaaccagctaacatattgctgggtaagaacatgctgcctaaaattgcagatttcggcttatcaaggttctttggggaagaacaaacacacatcacaaaaaagttctataggaacacggtaagtttgtacggtttcttgtgaactgaaattttctgtaagcagaatattgtgtttgcagtaatagatagtttaattttaatgcagtggatacttacctcctgaatacatagagagaaacatagtctcaagcaagtttgatatatttagcttgggtgttgttatcataaaaataatgacaggacctacaggctacagagaaagtgctgaaatgtctcccaagagtttattgatcttgtaagagaaagcaatatgtatcaattgcaacaattttcgtgtagttgtcttg

SEQ ID NO: 52076 - DNA, 370 bp, Setaria italica
  misc_feature (261)..(261): n is a, c, g, or t
  Peptide Sequence Number=SeqID_118050
ttgtttggttttcttaaagttagggttctttacttaggttcgttccttaggttagtttttgtactaaaaaattttgtactattctacctttatttggtattgtattgttggtattgtcttgttctttccaagattcagaagagcacctcgtgacagaaaaagaaagatgaaccagtatctctgaatgcattcgatctgatttcatcatcaaaaggctttaaccttgaaaacttacttgactcagagcaggggttcaaaagngaagaaaggtttacatcaacttgtccacccagagaaattatccacaggattgaggaagctgcaacaaccctaggatttagcgttcagaagaaaaattacaaagttgagg

SEQ ID NO: 52077 - DNA, 263 bp, Setaria italica
  Peptide Sequence Number=SeqID_118051
ttatcctgtttgttctgctagcagggtatttgcctttttgaggactctaatcttatgacattgtataagaaaagtgagcattgcacggcttttagattactgctgcagtctttcttattcatgcttatttgactttaccttatattcctggcagatatcgaatgcagaatttacatttccaccgtggacatcttttcctgccaagaggttgttaacaagaatccttgatccaaatccaatgacggttattgtcctagtagtct

SEQ ID NO: 52078 - DNA, 256 bp, Setaria italica
  misc_feature (243)..(243): n is a, c, g, or t
  Peptide Sequence Number=SeqID_118052
tttttttttttttttagtttgcaagaccctacttggcctcatttcgcagattctgcacatagtggttcaacatgattcataggcaaggaggtacttccaacaattaatcaatgcggttgattattgtcatagtaggggtgtgtaccaccgagatttaaaacctgaaaatttactgctcgattcacatggaaacctgaaggtctctgactttgggctgagcgcgctatctcagcaaatcaaggntgatggattgctg

SEQ ID NO: 52079 - DNA, 259 bp, Setaria italica
  Peptide Sequence Number=SeqID_118053
aacaaaaataacaaaaaggaaataagaaataaggaaattagactagacaacaacaacttgtggaactccaaactatgttgcaccagaggtccttgaagatcaaggctacgatggtgcaatggctgatttgtggtcatgtggagttatcctgtttgttctgctagcagggtatttgccttttgaggactctaatcttatgacattgtataagaaaatatcgaatgcagaatttacatttccaccgtggacatcttttcct

SEQ ID NO: 52080 - DNA, 280 bp, Setaria italica
  Peptide Sequence Number=SeqID_118054
ttagtctagttattttaagtcggggtaatttttggtctaattgtaagtttgtatttgtagtcatcctaatgttgttcgcatatacgaggtgatgggaagtaaaacaaagatctacattgtgttagaatgtgttccctatggtgatctcttagacaccattgttaatagcggtcgaatgagggaatgtgaggcaaggaggtacttccaacaattgatcaatgcggttgattattgtcatagcagagatgtgtatcacctgaatttaaaacctgaaaaaatt

SEQ ID NO: 52081 - DNA, 262 bp, Setaria italica
  Peptide Sequence Number=SeqID_118055
gaagaacacggagactggtgaaccggtggccatcaagatcctagataaggagaaggtcctcaagcacaaaatggttgagcagattaagcgggaaatttcgacgatgaagttgattaagcatcccaacgttgttcgcatatatgaggtgatgggaagtaaagcaaagatctacattgtgttagaatatgctaccggtggttaaccatggtagaatgagggaagatgaggcaaggaggtacttccaacaattaatcaatgtcgg

SEQ ID NO: 52082 - DNA, 206 bp, Setaria italica
  Peptide Sequence Number=SeqID_118056
gatcctagataaggagaaggtcctcaagcacaaaatggttgagcagattaagcgggaaatttcgacgatgaagttgattaagcatcccaacgttgttcgcatatatgaggtgatgggaagtaaagcaaagatctacattgtgttagaatatgctaccggtggtgagctctttgacaaaattgttaaccatggtagaatgagggaag

SEQ ID NO: 52083 - DNA, 258 bp, Setaria italica
  Peptide Sequence Number=SeqID_118057
tcttcggtctaagggatcctcaaagaccgtgtaccgggccttcgacgagcaccgtggcatggaggtggcgtggaaccgggtgccggtgcacgacttcctgcggagccccggcgagctggagcgcctctacggtgagatccatctgctccggtcgctccgccaccgcgccgtgatgcgcctccacgcctcctgggccggcggcaggtcgggactccgaggacgacgacgatgatgacgggagcatgttccatggcatcg

SEQ ID NO: 52084 - DNA, 324 bp, Setaria italica
  Peptide Sequence Number=SeqID_118058
ttttttagttttttactttttaagtttaattttctaagtaaccagcacctcttcatcaacattctcatctgcaaccaccaccctttcataatggtcctcaaatcccccaggctccaatagaccttgtctagcctttttcttttatttgaatctagaggactttgttgctggcgacgtggctccacatttttatttttcttagcagttactctgcgaggttcactgttgctgacctcactctgaagcaaatgtggctgatgtccttttaggatagtgtttaaggaagatttatcatgcaaccttgcttgcaaaagtcctcacttg

SEQ ID NO: 52085 - DNA, 216 bp, Setaria italica
  misc_feature (6)..(6): n is a, c, g, or t
  misc_feature (43)..(43): n is a, c, g, or t
  Peptide Sequence Number=SeqID_118059
agctancttagcttgacggagttcatatatctcaagaacagcngtttggaaagctcttcaagtgcctggacttctgcttctaagttctttatatctacaagattgatctgggaattaatgcttatcaccagcaataaacacataaagcaaacagaagaaggaaacaaggatacaaataccctgctcagtttgatcttcctgcacagatcgtaacta

SEQ ID NO: 52086 - DNA, 168 bp, Setaria italica
  Peptide Sequence Number=SeqID_118060
gtacatgaaatacgatgatttgatgactgcaaatcaaaataatacatgcaagattatgtatattgcaattttcagaaataccttaagcatcttataaacacaatacactgacaaagcatatccaagtagattctgaagatgccctctccatgttcgggaatatgcagc

SEQ ID NO: 52087 - DNA, 232 bp, Setaria italica
  Peptide Sequence Number=SeqID_118061
ttatggagaggaggtattgacacggaagaagacatcgtcagtgcaatggattttcttacagattacttcaagtaccatacaaggattcagctggagacatcgtcctgaagaaaaccacttgaataatagatctcggataaatagtggttaaaagactatgcacagaagggggacagatgcatcaatcgattggatgcttgtctgtttgcctggtggtgtattgggctgaaat

SEQ ID NO: 52088 - DNA, 273 bp, Setaria italica
  Peptide Sequence Number=SeqID_118062
ttttttttttaagtaaataagaaaagaaccctttaattaattacaaagtagaataataattttagaagaagctctggctgtacaattctaaaatttctgacaagccaaaacacactctaacttcatccttgatctgctgccagaaacagagatcaaggtcccctgtatgtacctaccaagtgcccttacgaattcgacatatacatctatatttacatttcatggccaaatgcatatacgtgaggccaagattacggtgtttatgcacacagt

SEQ ID NO: 52089 - DNA, 379 bp, Setaria italica
  Peptide Sequence Number=SeqID_118063
catacccagcagcagttggttcaagaggcaacctaactgagtttgcatatctcaacgagtgctaaaatcttttttaggattacaaatcgatgctgacaaaatccccaaggttagaaacttggcaggggcaacaaaccagcacgtttagtcaggtgtggccacaccctggttaagctcagcaaatctcatgccaaccctcatggagtgcttcaggaacttctcggcacagcggcggacgcacgactcctcttgtttgtccagggtcttgcggcggaacgtgtccacgcagtccgtgaagcatctctccaccagggaattgtacattctcagactgaaaagtgatagagcaaagatgtgagggttctacatgtgcagtttc

SEQ ID NO: 52090 - DNA, 367 bp, Setaria italica
  Peptide Sequence Number=SeqID_118064
ggatgcttcaactcacaaggtaaattcttttctctggacagagcacatgctgtcatctgcccttttattatacatcattttggaatacaaacacacctgtaaaaatggaggtgttaaacatgtttcttttgtgcctatttggttgttcctaagttgataaatctaaatgtttaaattaccaaccagggttgccaaataaggagggaaagtgctcatggtgagagtgtgtgctgctacaatgtgagagctttgttcgatgagcttcccactcctcacctggttctggagattacgcctttccccgctggacatcttactgataatgactaccgcaaggctgagaggctcgagatggtgctgaggctga

SEQ ID NO: 52091 - DNA, 272 bp, Setaria italica
  Peptide Sequence Number=SeqID_118065
agttttgcaaagatttcctctctcttcccgcggagattcccaatgaaaagaactccttcaccaagatcaccaaaaggttcttcttttgtcaaccagaatgttgtgtagccaaagaggttttccttaattgccttgacatcagctagatcaaccttttcagggcctagaagttccaacagtttaactgtatcgatattatcaacactgaaactcaacagtgaacttactggtgacaaatacaattctttttatggtggaggaaccaaattcag

SEQ ID NO: 52092 - DNA, 266 bp, Setaria italica
  Peptide Sequence Number=SeqID_118066
gcggtggtggtggacatagtcgtgcaagggggtatcacgatgaagtcgagtttgtgtggcggagggcagattcggtgataggatctacctaccaaagacgagaggaagagtgggatcagggcgagatatggtgctccgaaaatggatggcaaagggtaatggcaaaagggattcaaactcaccaaagatggttacttggtagcagagtttgcgtggcggagtacagatccggtgacaggacctggtactagaatttgcacgacggg

SEQ ID NO: 52093 - DNA, 406 bp, Setaria italica
  Peptide Sequence Number=SeqID_118067
aaggttcaagaagttccaatgagcagtgcctcatgcaaattgcaagagggaccttcactgagaaaatcagcaagtgtcggtgattggtcagttaatgccaagacaatgtctactagtcatcaacggaaggaactctgcaatagctctgtatcttcatcagttctgattccccatcttcaaaaccttgtaaagcagaccgtatttcagcaagatctgattacaaacctactaagtagtttgcagcaaaatgagagagttgatgaccagtcaagagttcagagtattggaagtgatacggtggtaagaagctcagcttcatatcgtaaatttgtctcatggaaagattttgatggtcagctcataaatctgttcacaatattttggcaggttgaagcatctacggctg

SEQ ID NO: 52094 - DNA, 339 bp, Setaria italica
  Peptide Sequence Number=SeqID_118068
aaacggaaaaggaaaactaactaagaacaaataaagactactagtaatacttcatcagttctgattccccatcttcaaaaccttgtaaagcagaccgtatttcagcaagatctgattacaaacctactaagtagtttgcagcaaaatgagagagttgatgaccagtcaagagttcagagtattggaagtgatacggtggttgaagcatctacggctgagggagaacgctccatacttgttaaaatttttgaattacaatctagaatgatttctttaactgatgaattgattgcggcaaagctgaaacatgttcagctgcaaggagagctaaatgcgctg

SEQ ID NO: 52095 - DNA, 309 bp, Setaria italica
  Peptide Sequence Number=SeqID_118069
gtttgcacctcatgaaggttgcatatcctgatggttttgatgagcctattatcgcctctattcttaaggaaacactcaaagccctagaatacctccataggcaaggacatattcatcgtgatgtgaaggcaggtaatatccttattgatagtcctggtgtagtcaagcttggggacttcggcgtctctgcttgcatgtttgatagaggtgataggcaaagggctagaaataacaatttagtgggaaacgaccaatagactaggaataggactaccaagaaagttactaccaagacctaggaaaccggaa

SEQ ID NO: 52096 - DNA, 437 bp, Setaria italica
  Peptide Sequence Number=SeqID_118070
ttggtcaatgctaagctgatgtgtaatcctaatcagctgaaggaactctgcaatagttcagtttcatcgtcaatattaattcctcaccttaataaccttgtgcaacagaccatgtttcagcaggatctgatcatgaacctactaagtagtttgcaacaaaatgagaaagctgatggtaagtgccatttccgttttgggctctgaagttcaatttatttctatgatagcaagttaaaaactctctcttcaggatcagagcctggaatatcttctcaagtccgaactatggagagtgataaagagcaggctgagacagctaactctgagaaggaacggtcattacttgttaaaatttcaagaattacagtctaggatgataacactgactgacgaactaattgccgctaaagctaaaaacatgcgacagttgcagcagg

SEQ ID NO: 52097 - DNA, 367 bp, Setaria italica
  Peptide Sequence Number=SeqID_118071
agcactttccatgagtgagtaccaacgaggtgttagtgcatggaactttgatatcgaggatctaaaggctcaagcatcactgatttgtgatgacgatccacttgaattaaaagaagacgatgacagtgctagaataacagacattgataaggatacatcttctgacggtcattttggaaagccgacacagttgaatggaaataactgcagaagaacatgccaaagaagcggttcgctgagccagctcgggtttgagtcacggcacaatcttcttaagacaaaaatcagggggacgtgtctccccctggtcgagttttgttttgttttcattgttaatgttatattccaatctttctctgtttttttc

SEQ ID NO: 52098 - DNA, 397 bp, Setaria italica
  Peptide Sequence Number=SeqID_118072
ttggtcaatgctaagctgatgtgtaatcctaatcagctgaaggaactctgcaatagttcagtttcatcgtcaatattaattcctcaccttaataaccttgtgcaacagaccatgtttcagcaggatctgatcatgaacctactaagtagtttgcaacaaaatgagaaagctgatggtaagtgccatttccgtttgggctctgaagttcaatttatttctatgatagcaagttaaaaactctctcttcaggatcagagcctggaatatcttctcaagtccgaactatggagagtgataaagagcaggctgagacagctaactctgagaaggaacggtcattacttgttaaaatttcagtaattacagtctaggatgataacactgactgacgaactaa

SEQ ID NO: 52099 - DNA, 403 bp, Setaria italica
  Peptide Sequence Number=SeqID_118073
taaaagaaaaaaactgcctactctgttgagttatagctgggttattatatgcatcagcaatgtgtacactacatggttgatgtaagtcacttctaaatgctctattgccaggatacatcttctgacggtcattttggaaagccgacacagttgaatggaaataactgcaggtgggtaaaatctaaacatttttgcatcctttagttttcattgttaatgccaacactcacacggtgcaactggtcagaagaacatgccaaagaagcggttcgctgagccagctcgggtttgagtcacggcacaatcttcttaagcaaaatcagggggacgtgtctccccctggtcgagttttgttttgttttcattgttaatgttatattccaatctttctctgttttttcat

SEQ ID NO: 52100 - DNA, 428 bp, Setaria italica
  Peptide Sequence Number=SeqID_118074
agccttctgtgcagcttttttctctttccgttcctcttcagcacgtgtgcgaacatagtggtcaaatatagcccgccttgttgagtgactaggaatagccttaaagcgtggatcaaacactattttttggaagttccttctcagagaaagctgatggatcagagcctggaatatcttctcaagtccgaactatggagagtgataaagagcaggctgagacagctaactctgagaaggaacggtcattacttgttaaaatttcagaattacagtctaggatgataacactgactgacgaactaattgccgctaagctaaaacatgcgcagttgcagcaggagctgaatgcattgtactgccgggaagaaatcgaagacattagggatgaggacaatgaagaaacaattaaactaattactaaaggtaaa

SEQ ID NO: 52101 - DNA, 191 bp, Setaria italica
  Peptide Sequence Number=SeqID_118075
ttggccggctgccatcgttgtgtatatccatctttctttcagttaccttatttccgttggttcaacgggttttggtggtcacaagattgcggttgcggcatggtgcattccgctatttctgctaactacataatcacagctactccaatgatatgtatagccgaaatagcggaatgcaccatgccgctatt

SEQ ID NO: 52102 - DNA, 329 bp, Setaria italica
  Peptide Sequence Number=SeqID_118076
cttcagaacaggaagcactttccatgagtgagtaccaacgaggtgttagtgcatggaactttgatatcgaggatctaaaggctcaagcatcactgatttgtgatgacgatccacttgaattaaaagaagacgatgacagtgctagaataacagacattgataaggatacatcttctgacggtcattttggaaagccgacacagttgaatggaataactgcagaagaacatgccaaagaagcggttcgctgagccagctcgggtttgagtcacggcacaatcttcttaagacaaaatcagggggacgtgtctccccctggtcgagtttta

SEQ ID NO: 52103 - DNA, 223 bp, Setaria italica
  Peptide Sequence Number=SeqID_118077
catgcatattacagttgctgtatatgtttcatgcctcagtatgggtagttcgttcatagtcttctgttatatttcagtgaaagaacttctgctgagcaaggtcaaaatggccccgaaagaagtgaagcattgtcttccaataatggtagtgcccatagtgaaaggaaggctgatggacctaaaaatccaggatcagaaattgatttgttgccctctacatcac

SEQ ID NO: 52104 - DNA, 149 bp, Setaria italica
  Peptide Sequence Number=SeqID_118078
gaatcaaagtttgtttgtacagatggatcggtgaacctccatgcatattacagttgctgtatatgtttcatgcctcagtatgggtagttcgttcatagtcttctgttatatttcagtgaaagaacttctgctgagcaaggtcaaaatgg

SEQ ID NO: 52105 - DNA, 422 bp, Setaria italica
  Peptide Sequence Number=SeqID_118079
cctttgccagggtggtgactttcccagtggggatgctcttgatattcttctgtctggatcaaccagcaagtaacgatatccagcaacatgataagcattttctcctccccatcctcgtgtcaatttattttcaagcatctgcttcttcacatgagcaatgccctcttctccgtttattagtgaggaagcaggaatcagcaaaaggatagtgagactcttgtgctggtaaatgcataggtacatgcgctcctctgcctgctggaaccagagtattggagtcaagggtacagcaccacgaacttctgtagttgcaaaatcagcagcaacaaaaccgtcctttcccttttgacaatttctcacgcaggagaggccttttcttccttgctagtttgtttcctattttgtattgtaactttgtaagt

SEQ ID NO: 52106 - DNA, 360 bp, Setaria italica
  misc_feature (121)..(121): n is a, c, g, or t
  Peptide Sequence Number=SeqID_118080
attagctgagctagtgtttcaatctatctggtaaagattactgcttccatctaacaccaatgcatcaatagttgctggagcttcaattgaagaaccaatctcattcctgaactgcaaatanattttctcatatgacctcaagtttaatccaagtttcagctgatcctttagctccgtaagattacccaggatctgataaatggagttgttcaacacaaagttgaatagggggtatgtatccgcccatggagaaccaggctgtgaaggtatgacagtaattcctccagggaaccccatcacttttgggcatccatcttcctttgaactgatgaggttccctggaggaattactgtcatacc

SEQ ID NO: 52107 - DNA, 420 bp, Setaria italica
  Peptide Sequence Number=SeqID_118081
aagcttacaattggtactctagttctgcttcaaatagcagtagttcaattgtcaataagatcacaacatttttcaggcttccactatcttagttgctaatttcttctatatggcagtcagtatggttgattgtatttgtcatgaattttgcacaactttggttcttagttgatctttggacaactattattgggccctttttttcattccaattgagatttgcttgtacttgtagagtgatgaacttgctactgcatggctggatgatgaagatgtcagagcagcaattcatgccaaaccggtacgatggtgtgtaaggaattagaagttccatttgaaagtaacccttaaagtcagtactaacctgctcttctttggggaattgtgtcaacaaattcgacacattagtaaaagtcttta

SEQ ID NO: 52108 - DNA, 308 bp, Setaria italica
  Peptide Sequence Number=SeqID_118082
tgaaatgagctcacgctgacaagcttatgttagaagtttgaaaaaaagaacagggaaaatgatgacaaaaatgttaagagaaatggtggaagaaagcaatacccagcaggccagccgcttcgcagctgctgcacaattggcattgttgaagaagttaaggaaggtccgtccacttggcatcaacctattgtaatttggcaccagaactacagcttcaagctgttgtagtatgctgagttcacttggtgcacaatgctgccatccgaatctctaacagtacatcatgacacattgacaggctgggcagt

SEQ ID NO: 52109 - DNA, 188 bp, Setaria italica
  misc_feature (38)..(38): n is a, c, g, or t
  Peptide Sequence Number=SeqID_118083
tgtatatatgtagttgtagcagtgttctgcaaatgcanaaacgggagctaggccaatcctgtgaagagagtgagccatatgtgttgttaacctaacattccatcttgttcgtaagttcttgttattttcgtttccttgtttaacccttagttttgtttcctttattttctttaaccttttttctttta

SEQ ID NO: 52110 - DNA, 206 bp, Setaria italica
  misc_feature (172)..(172): n is a, c, g, or t
  Peptide Sequence Number=SeqID_118084
gtcattattctgcatcatcacatattcacaatatgttgggagagccagtgagccactgtttttgttctttgcgcacttcaagctgaatgttagtcaccattttgaaatcaggttggaggcggcatggaaggcgtgattatgatagataccactgatgactggtatttgaacngaggtgttcttacatgttacctttacaactgtag

SEQ ID NO: 52111 - DNA, 406 bp, Setaria italica
  Peptide Sequence Number=SeqID_118085
aacaaaggaaagtatatctcgtgcaacacgtcttgcactggactgtgccaagcatggcatcgctggtgaggtggacctggtgatgcctatccttctcttatccaggcagttttaccacgaattatatatgcttccgcaccacctggaaattctgcttgggagaatcggaggcaatgtcttaaggttttgaggctctggcttgagagaaaaaccctttcagaatacatcattcgccaccatattaaagagcttgaagctcttaatgaggcatcatttggaagctctcaccgtccttcaggtaccgagagagctctgaatgaccctttgcgggataatgaggcatttctcgttgatgagtatggaaggaggcgtcccaatttcctgtgacaaagcatcaactcatctt

SEQ ID NO: 52112 - DNA, 274 bp, Setaria italica
  Peptide Sequence Number=SeqID_118086
tttagaacaacctggaaaaggaaactaatttatataaaagggttgatttgttcttccttgttgattcaataatccggtactgtcgcaatcagaaaggtacatgcatattcttatatttttctagtttggaatgggtagatttgaagctactaaactactgccatgaaccatgtaggtggacctggtgatgcctatccttctcttatccaggcagttttaccacgaattatatatgcttccgcaccacctggaaattctgcttgggagaatcgga

SEQ ID NO: 52113 - DNA, 236 bp, Setaria italica
  Peptide Sequence Number=SeqID_118087
ccctcccccactcctgagagttgtcagtatggtggacatgacagaggacaacatggattaataggagacctcatttcaatgacagagggcatcactttgatgataggggccattgctttgatggtggagggcattactttgatgatgggatgcatcacttcgatgacagatggcacctacttttctattgtagttaggggggtactaaattgtctaccatgaagttatggatggtg

SEQ ID NO: 52114 - DNA, 215 bp, Setaria italica
  Peptide Sequence Number=SeqID_118088
atttgtttctctacaagtacaccttggtcccaggactgattgctggcggagcgtccgcacctgccttctacgctatccccaccaacccaggacagtataggcctcttggagcttacaaccaacatactattccaacaatgcctcatcaaagccaatcacctttagttcctggcagagtgtccccactccaatttgatgccttctacgctatcccc

SEQ ID NO: 52115 - DNA, 369 bp, Setaria italica
  Peptide Sequence Number=SeqID_118089
cttcgatgttttgtatatcattccatttcaacatgttgattagctgaattgcaggtataatgcaacagttgaagctttgacaccaaatggatattacgtagcctacgatggctggggaaacaggggaagaggtatgttcccttttcagaaagtaacatttttttctcttaaatagaggaggtatatacatacatgagtatagagcagaaagcaactcatttagtagcagaaaactgaatggtttctcatattattattcatgtgatggtcttgcaaattagctgacagaagattatagctaatatgtaagtgaggctagttgttcctgtgaacatgtgccaaagctaatttccatctgtagacatttta

SEQ ID NO: 52116 - DNA, 494 bp, Setaria italica
  misc_feature (14)..(14): n is a, c, g, or t
  misc_feature (109)..(109): n is a, c, g, or t
  Peptide Sequence Number=SeqID_118090
gtacatgcatagcntaaaactcagccaagtcttgcttctcggtgcaaaacctcctcagcaaacttgatcaagattgtcgtccttggcctttgctggccttcaattggcncaaaagtgtgcagtgactactgcaggaaagccagcattatctaatacaccctttacaattcctgcaacaaaggctccgcagttgaatgctcccatatcttttggcaccgaaatgaacctgccaaaacagggggaaatttaaaacatcacattttagaactgtagaaaaaagaaaatattatgaagtcctcataggtcatcaaaccggttaacaagaagctccttttcactaatcatgtattcatcctcatgttcagttcccttctcaagtgagtcagccacctttccaaataggaccttccatacagtgctgtgaatgaattgtattaaaattcccctagtaagttcgttgttttcttcgtccttatttcccctttcttcttctt

SEQ ID NO: 52117 - DNA, 360 bp, Setaria italica
  Peptide Sequence Number=SeqID_118091
tttaggttaacttttcttcttaaactaaaatttcttgtaagtcttaatttacttctttcattcagagaaaaatgatgggagatccacagttttttccttgactttccacaatatacagggacctatacttgatataagggacaacaacagcagccagcactgagttgatcggctggaacacgtcccttggcctcttcgtggtattcttctgtttggccatgctttgcatgggataaggagcactgggaatcacagggcacccaagatcatgaggggctagaaaacaatggaagatcattccactagagtgacaaacagtacacccttcaggaagacttcccaggaactgacaaaagacat

SEQ ID NO: 52118 - DNA, 184 bp, Setaria italica
  Peptide Sequence Number=SeqID_118092
cgtgtttgttcagacgggttattttcatcgtccacgggagaggaagagttaaatgatgatgatgccgccatgctgcatgcatcccttagtgtcgacattgatagagtgtatgtcgcactttcgaaagcggattcagcaacttctccctgctataccatcagccattctcagagcactaagtctt

SEQ ID NO: 52119 - DNA, 252 bp, Setaria italica
  Peptide Sequence Number=SeqID_118093
tggtatcttgcgaggtctggctgtcgccgcagccgctgataggaagaataggacgaaggaccgaccgactacgtagcaacttactgctcgctggagaagcgggtctgttggttctcccattgccagtatccggtcctggagaggcggcagaggtaggggaggtcgaggatggtgccgctgtggcaggtgtccacgatggcgtggagcttcacgcccctgcccagcggccggacgatggtggcgttgatctcg

SEQ ID NO: 52120 - DNA, 303 bp, Setaria italica
  Peptide Sequence Number=SeqID_118094
ttcacgagatccaataatgatggatccttgtcaccaatttcaacaagaacttgttgaatctccctgtgcgaagggacatctattgatgaatactgttgcaatctgtaccaagaaacaattgtttgtaaagaccgatatgcacatccccatccctgcatggaggaaaaatctaagatttgcgaaccaatagagcacacaacagttaaatttctcggaaacagtagttcataaagctcagtgatgggcttaacaggataattttaaaaggagtattcgaatgcaacattgcaatttgtaacgcaa

SEQ ID NO: 52121 - DNA, 114 bp, Setaria italica
  Peptide Sequence Number=SeqID_118095
cttttctcatccttgatccacactacactggtgctgacgatctcaagaagaagcttcgtcctttgttgtcgacagacttcttccacccgcaccatccaccattcacaatcttct

SEQ ID NO: 52122 - DNA, 225 bp, Setaria italica
  Peptide Sequence Number=SeqID_118096
cgaagaagtacaataaactgtaatgcagcgtcctcaatccgcaggtaccaagcagagcctaccatccaccagccatagtatgtttgcatcagaaccgcaactgaagtcagacatgcggcatgtggcaggaggcaatgtctgacttcagttgcggtactgtaacaggcaaaggagatgatgccacgtaaggaactgatggaaccgaggcgtcttaatgccagctcg

SEQ ID NO: 52123 - DNA, 173 bp, Setaria italica
  Peptide Sequence Number=SeqID_118097
tggcagcaatctctataggattggaggtacatcatcttcccgttctgtggcgtccaccctctaaatgccccgagtgatgacgccacagaacgggaagatgatgtacctccagaactccaggtgccaccccaaccattggcagcaatctctataggattggagacaaaactttg

SEQ ID NO: 52124 - DNA, 229 bp, Setaria italica
  misc_feature (7)..(7): n is a, c, g, or t
  Peptide Sequence Number=SeqID_118098
cgcatgntcgccggtgctgctgctgcgccggcgaggaattcagctggcttgttcttgttcctgcgtgcgcgaagaagatccccccacacaattccttgcccttccggaggattcaatcgccggggaatcgagcagcctcagctcagctcgcggccattggtttcgggtgttggattcggcgaagcagctgacgccgtcgttccaaccaccgccaccagcccagcgagcg

SEQ ID NO: 52125 - DNA, 356 bp, Setaria italica
  Peptide Sequence Number=SeqID_118099
taagttactaagtactaaggttgtaaattaaattcttcctattagcaatagacttcacaatgcgaacagccatgaccttcttgccgttgttgcggccgtgcatcatcagagagtttgtcagcctctcaacaattgggcactgagacttgcggaacctcttagcagaataccttccagcagtgtgaggaagatatatggcatgctttgtaggattgacggcaaggtagtcagccagggaaatgtcattgacctggacgtcctcgaaggaccagcggccgaagagcttgacctcctgggtgggcgcctcaacttccgccattttcgccgcaggcgagatcaaggagtgcgagaggaag

SEQ ID NO: 52126 - DNA, 323 bp, Setaria italica
  Peptide Sequence Number=SeqID_118100
catgctgccagctccatctctatgcggtgtctgagacttgtgattataatggcagtaaacgggtccactatcttatcttcagtgtccaaaacttcaatacatactgcggctaacacaaccaggaagaagggaaaggtacttttgacttttagggaacatagagctacagagctccaacaccaagctaagtacgcaaataaacagggcagatagataagtaggcatccttcaccccaaaacttcacttttcctgctttgcatgagaatgctcaacggttggccttggcgacacgctctacctcgtccttcttcttgattcgtct

SEQ ID NO: 52127 - DNA, 387 bp, Setaria italica
  Peptide Sequence Number=SeqID_118101
tttaacagcttgattgttcatcccaagagttgaacagaaacgcctcaggaaatctccagcatgaatggttcccatctccatagattgccccatctcaacttcaagttgttaaagcagcccaggaggctgttcagcgctcggaggagcttgatataaggaggagccctatctcaattgcagcagcagtcatctatatgataacccaactctcagaggacaagaagccacttaaagacatttccttggctactggtgtggcagaaggcaccatcaggaattcatacaaggatctgtatccctatgcttcaaggctcatccctaacacctacgccaaggaggaagacctaaagaacctctgcacaccttaggaagcttagggatacagat

SEQ ID NO: 52128 - DNA, 378 bp, Setaria italica
  misc_feature (378)..(378): n is a, c, g, or t
  Peptide Sequence Number=SeqID_118102
tgatggcatggagtacctatacctgaggcatgtgattggcctagtgaaggatcattctagagtggggcatttaatacaagtaaacaaatatcacaacatgttcctgatttgggtgaatagatgcacaaggctcaaagctatgttcgtcaataatttgatttactaccaaacctgtgtggacctttaccgtcatagcatctggatttccacaacatgctgacagcgaatgatatgtcttctgcaggttgggccttgtggctactattaaggatcgagccaatgaaatctacaagaaggttgaagatctcaagtctattaggggaagaatcaagatgccatattagctgcttgtctgtatattgcttgtaggcaagaagn

SEQ ID NO: 52129 - DNA, 321 bp, Setaria italica
  Peptide Sequence Number=SeqID_118103
gggggtggatagtttttgagaaggggagagagaggtaggtggggggtgaagtgcggtgcacgaaacagcgggtgcggaggggaggtgaggtgggctatcaattggtggggcagaggaaaaaggagaggagaggaggggaggggaagcgaggtgagcgactccttctgcccggactgcaagaagcagacggaggtggcgttcgaccactcggcgggggacacggtgtgcaccgagtgcggcctcgtcctcgaggcgcactccgtcgacgagacctccgagtggcgcaccttcgccaacgagtccaacgacaacgacccccgt

SEQ ID NO: 52130 - DNA, 256 bp, Setaria italica
  Peptide Sequence Number=SeqID_118104
tacttaagtaaggtttgtaagtattcttctaagttcttatttaggggtaagtaaattctaagtattgtcctattatttagtctgcttgtctgtatattgcttgtaggcaagaagataggcctagaactgtgaaagaaatatgttcagttgctaatggagccacgaagaaagaaattggcagagcaaaagaatttatagtgaaacaacttgaagttgagatggggcaatctatggagatgggaaccattcatgctgg

SEQ ID NO: 52131 - DNA, 239 bp, Setaria italica
  Peptide Sequence Number=SeqID_118105
ttgcagcagcagtcatctatatgataacccaactctcagaggacaagaagccacttaaaggtttggattggtgccctgttatctcttcttcgtatgactgatgaatcggtgataacactgacattttgttgcagacatttccttggctactggtgtggcagaaggcaccatcaggaattcatacaaggatctgtatccctatgcttcaaggctcatccctaacacctacgccaaggagg

SEQ ID NO: 52132 - DNA, 378 bp, Setaria italica
  Peptide Sequence Number=SeqID_118106
acatagtacttcaataagtgtttccctctcccagtatataacagtgggccacctgttgactaaagtaaatctacaactgtatttctgtttgcaatgtcttccctaaaaacttttatgtaattggaggtattatccattcaatgatttgaatcttttcttacagggtgtcctggttttccttgttgcaaaatctcgacttatcaagaatgctgataaggccgctgatctccagaactttgtattgtgtgttgagatgctcatagcagccatcgggcacttatttgccttcccctacaaggaataatagacaaggtaccctaaattagtacccgtacccttagtacttaggttaggtttttacttaagttaagtttaaaa

SEQ ID NO: 52133 - DNA, 249 bp, Setaria italica
  Peptide Sequence Number=SeqID_118107
tgtaattggaggtattatccattcaatgatttgaatcttttcttacagggtgtcctggttttccttgttgcaaaatctcgacttatcaagaatgctgataaggccgctgatctccagaactttgtattgtgtgttgagatgctcatagcagccatcgggcacttatttgccttcccctacaaggaatatgcaggtcccaatgcccgccctgctggtggtttcagagaaagccttcttcatgctttgaag

SEQ ID NO: 52134 - DNA, 232 bp, Setaria italica
  Peptide Sequence Number=SeqID_118108
cgatatatttcaattctattcgagagatgtgcagtctgatcccataggagtaggcatcataaattcataagcgatggagattactcgtgcttctgtctactcttagtatcttcctagttcctattaacagcatcgacataaatgaaaacaagctatgatgcttgggtcatctacaatttcctctcactctgcttggcatgggtgggaggtcctggtgctgtggttgtaagtt

SEQ ID NO: 52135 - DNA, 321 bp, Setaria italica
  Peptide Sequence Number=SeqID_118109
ctccatacttgcacaagatcatcttcaccacctgataacaaatatttgccatccgcactgtaacagggcagcataataaaactagttagtcccatccagattccaattcagggaagaagtgtatgcaagaataacaagaaatcaattaaaatgattgtatgcataaattagtccgttcactagaaagctaagatgttaggagaagtttgagggtgtaactcgctgaacaataggcatgctgtagtacaatatgcagcaaatgttgagaactgagcgagcagtaactaggttgtttaatgcctccagttgggatggcagcca

SEQ ID NO: 52136 - DNA, 240 bp, Setaria italica
  Peptide Sequence Number=SeqID_118110
aaagatccaagtcaaggtggcgctgccagcagccggtgcacttgtgttgcatctttgtctttgtctttgtctttattaataaaatgctgatatgaaacaggcttctttccaggatcttgcaactgctgcctcaatgacattgaataaacatctcctgagaacaccccaacaagcagatcgtgcccatccttggcttctgggtcaaatgcatggcaaagcgggttcgaactactgaagtgg

SEQ ID NO: 52137 - DNA, 342 bp, Setaria italica
  Peptide Sequence Number=SeqID_118111
ctttttgagaaattttgcatccattgtccagagccacatgggaaagcagaacggcaggttgggggcagaaatgtcagcatccggagggacatcacctaatgacacgaaaatgaagcgtgaggacagccatggatctgaaaggatgaaaaaacataagttgcttccacctaccatgacaacaaagaaacagcatgagtgtacaaaggctaacacgccaaattgccatgataattccatgacttcatctgctgctccaaaccaatctagagagggagataacaaaaagagtggtgctcgtcgtaaggagaggttaagagaagaggcagaagcaaagaaaatggg

SEQ ID NO: 52138 - DNA, 391 bp, Setaria italica
  Peptide Sequence Number=SeqID_118112
gcggtccatttcctcaccttctgggatggagtgccctaggtttccatttatcagcatctgatagggcacgctgtgagttcacagcagagagtgattccagtattacgtctctcatatgagcagcagcggtttctccacgccgtgttgccaactccagatacgtgagagacttgaccttgtctcctgccgcacagagtttaataccacactcataaagagctttcttgtgaccacaatcagcagctagttgcagccacctcttagcgcgcactggatcctgtgcaagcccttcaccgtaactataacacagggaaatgttgtacatggctcgtacattccctccctctgcagctcgcaagtaccactttgcagcttccttctgattacgctt

SEQ ID NO: 52139 - DNA, 159 bp, Setaria italica
  Peptide Sequence Number=SeqID_118113
cgcactggatcctgtgcaagcccttcaccgtaactataacacagggaaatgttgctggtttcatcagtttatagctgacgcctggaggctggacgtttgtgtgtttgttgtacagaaattttgtccaataaaaaaagacggaatctttggacataggcc

SEQ ID NO: 52140 - DNA, 423 bp, Setaria italica
  Peptide Sequence Number=SeqID_118114
aattaattagacttaatagaaagaaatacctaggtacgggttaccaaaggaacgaacaataaacaatacaatgaggatgtcacaatagatgacacgatgaatgatcaatctatgccagattctggacggaaggtacacttaatattatactataaattaatcaggagaattcttctaatcattattcagtgctatttatgcaagttcagtagatggtactgatgatttctgacttaattgctgaaatggtcctttctaattgaaaagcatgtaaacagaagttgcattgcatgttgaacctgctgagatgagaagaatgtctcattcaaacttctatatattttcattttgtttcactcctagtgctaactaaatgatagacctttctgatctacatatatcaattttctgtattaaaagcta

SEQ ID NO: 52141 - DNA, 235 bp, Setaria italica
  Peptide Sequence Number=SeqID_118115
actgaagcaattgagtgctactccagaagtattgggttatctcctacagcagttgcttttgcaaatagagctatggcatatcttaaattaagaaggcaagttattctgagacttgatgcactcacttcagcttatgctatttactcattttgcactttaccgcaagtagttcacctcagttgaatctgaaaccttatttggttggcatcagcaatttgagaccgttgagtatgac

SEQ ID NO: 52142 - DNA, 440 bp, Setaria italica
  Peptide Sequence Number=SeqID_118116
taactaagaaacaatagactagaagtactttagttagacttacaaataagaaagctctgtatggttctgcctgtatgtctgaagctactgaagggatgatgcagcgttagctgttagcattttggagaatctggcaaaagttccacgcattgacttgataataatgtgcctttcatccatgcacaaatctgaactgaggaagatatgggatcaagtactccttgctggaaaagcatcagctgatcaggtggaagctctcaggcagctgcgaagcaaatatattcagggaggatgtcaggataacgcgttcagttcaagctaatgagacgatgtaaagacgaaacgttagaaaccttctgtacccttctctggggtgtctgtcaaatgttagcatgtgtgcccactttcctggttgcactgaatggttgaagcatgtgttt

SEQ ID NO: 52143 - DNA, 323 bp, Setaria italica
  misc_feature (16)..(16): n is a, c, g, or t
  Peptide Sequence Number=SeqID_118117
aattcacagagtctcngggggtttgtcattcagaaaattgaagatggttctataagcaaatacagcatcacaaaagatgaagatccatccgaaacattctatgtgacttatagtgcttcgaataagatggcaaactgtagttgcaaatactttgagttctcaggtattttgtgccgtcatattcttggagtatacataatagtcgatccgcgtacactacctcctgattactttttgaaaagatggacaaggaaagccagagattgattaattgtcttgttgtttagtaagtaaaactaactaatttattctattgtattgta

SEQ ID NO: 52144 - DNA, 293 bp, Setaria italica
  Peptide Sequence Number=SeqID_118118
tgcgcctaggtaaaactggacgtatgtcttgggatgttaggatcaacgatccatattatggttcactctggaaagtccatgaatcctctttaagaaacggtaaccgcaaccaaagattagaggatggtgtccccagctctgcttcttctgcatatgggatgccaagagaatccatctgggtagttagttgagcatacttgatacaaactgaacagtgctttatgacatgacgaagtacggaagcataaatagctgatgtaacacaatgattttcttctgtaaatatatttcca

SEQ ID NO: 52145 - DNA, 313 bp, Setaria italica
  Peptide Sequence Number=SeqID_118119
tgaatgtaaagcatgaagacaaccgtgcaatgtgtgatccaacatgcacacccacctccattgctgtgtgggataagaaatgttcaggttcgtgtaacatcactgacaaaatacagcagcttcacaacaccactttgtgctcaaaaagcccaacattgccgcctgaggtcgaggaggaagagtagaactgcatggatttccggcccttaaaacttggaaaggactgatgcttatatgtggtgctgaaagcttgctaaattggaaacaaatacggaattactagactagtttaccgtttaagttaggtacttta

SEQ ID NO: 52146 - DNA, 240 bp, Setaria italica
  Peptide Sequence Number=SeqID_118120
catggatcagataaacgccactcgtggtcatgcgaatggactgaagtatcaaaatgaaatccaaaggaaactgcacacacagattgacccactatattttccttcgacatgcagttgcagaacaagctgcgaatgagaattgaggtgcagggctgatatctgcaaacaatagtagagaaaacccagaataacctttcataaaatgcaactgaggctgtaaacctagaagcaaccaggtcg

SEQ ID NO: 52147 - DNA, 483 bp, Setaria italica
  Peptide Sequence Number=SeqID_118121
cgtttaaactgcatggtgaaatgacttaaatttgatatatatgcaaagggtgcacaaaatctgtttcttagatagcttgatatgatcatcttgtagaaaatgatacggaacaactgcagcatatgcataagtcattgatcctcctattcttgcatccaggaaaggggtgagaacattccacctgaagaatcttttgatgtagcaaggaggcttaaagaaatgtactgctatacttcttcagacattgtgaaggaattcaataagcacgacagagagccctcaaagtacattaaacattggactggcatcaaaccaaaaactggagcaaaatacacatgcgacattggatatgaacgattcctggggcctgagatattcttcaacccggagatttacaacaatgacttcaccactcctttacaagttgttattgacaagtgcattcaatcatcccaatcgacacaaggagagctctgtacaaag

SEQ ID NO: 52148 - DNA, 247 bp, Setaria italica
  Peptide Sequence Number=SeqID_118122
tgtgtattttgctccagtttttggtttgatgccagtccaatgtttaatgtactttgagggctctctgtcgtgcattcaatcatccccaatcgacacaaggagagctctgtacaagaatattgtcttgtctggaggatcaactatgtttaaggatttccataggagattacaacgggacctgaaaaagatagtggatgcacgggtccgtgcatctaacactcggcttattagtggggatccaaaggcc

SEQ ID NO: 52149 - DNA, 371 bp, Setaria italica
  Peptide Sequence Number=SeqID_118123
tatattccactggtgattgttttccttaaatatgtctcagtgccatccacttccctccatggagtttttaatgggagagatggcccaaaggagaatattcataatctaccttgttatttcaggaattcaataagcacgacagagagccctcaaagtacattaaacattggactggcatcaaaccaaaaactggagcaaaatacacatgcgacattggatatgaacgattcctggggcctgagatattcttcaacccggagatttacaacaatgacttcaccactcctttacaagttgttattgacaagtgcattcaatcatccccaatcgacacaaggagagctctgtacaagaatattgtcttgtctgga

SEQ ID NO: 52150 - DNA, 353 bp, Setaria italica
  Peptide Sequence Number=SeqID_118124
tagcaggcattcctcccatgtggggctgaaatagaatttcagcagtcttgaatctctatgtatggatcactgctataattcagaagtggttggtgatgacagctggtacaagacggttgttttagctggtggatcgtcatgcttacctggtttaccagagaggctggagaaagagcttcaacagcttcttccacattacatttcagaaggaataagagtacttcctcctccgtttggcactgattctgcctggtttggtgcaaagatgattagcaatgtaaggacatggaaccttgaattttgtgtggcgcgcatgatgggtgagtactttcactgaggcatggtgtgtaaag

SEQ ID NO: 52151 - DNA, 250 bp, Setaria italica
  Peptide Sequence Number=SeqID_118125
ctggtaaaccagtaagcatgacgatccaccagctaaaacaaccgtcttgtaccagctgtcatcaccaaccacttctgaattatagcagtgatccatacatagagataattcctcccatgtggggctgaaatagaatttcagcagtcttgaatctctcttccgacagagtgaaccacccttcaccatcaacctcacaagaagcttgtgtacctttacgtagttcagcttcgtaatcagccgctacgtagac

SEQ ID NO: 52152 - DNA, 240 bp, Setaria italica
  Peptide Sequence Number=SeqID_118126
aacaggtgagattataggaagaatgtcctgacaccaaataatcttcaactattgctgcataaataaacttttacctccttgatggtccggacagtatacagtgactcgcaagatatatttctctggtgcattaactccttaagaaatccagtgagtttaagggcaccttgccccacagtttcaacacctatctcatacattaccctgccttcaaagatgggaacaacagaagtggtattg

SEQ ID NO: 52153 - DNA, 392 bp, Setaria italica
  Peptide Sequence Number=SeqID_118127
tttagtttacggtttaattttttaggtttaagggttttaagtttcggtttcttttcgtttaggttaaagttagttatttcgtaggtcgtaaccgtcgtagtcagcagccatgagcgaggtgttcgagggctacgagcggcagtactgcgaggcctcggcctccctctcccgcaagtgcaccgccgcctccgccctcgatggagagaagaagaagcagaagctgtccgagatccagtcctgcgtggaggaagctgaatcgctgattcggaagatggacctggaggcgaggagcctgcagccgagcgtgaaaggctggttgcttgcgaagctgagggagtataaatctgacctcaatatgtcaagagcgagctcaagaggatatcagcgcccaa

SEQ ID NO: 52154 - DNA, 235 bp, Setaria italica
  misc_feature (221)..(221): n is a, c, g, or t
  Peptide Sequence Number=SeqID_118128
agcggcggagggtggggaggtggagaggggatgagaaggctttgaggcaaatcatggttgggttggtgtgacaaggggagggagtataaatctgacctcaataatgtcaagagcgagctcaagaggatatcagcgcccaacgccaggcaggctacccgggaggagctccttgaggctggcatggcagacactcttgcggtgtctactgatcagaggggaanattgatgatgacaa

SEQ ID NO: 52155 - DNA, 153 bp, Setaria italica
  Peptide Sequence Number=SeqID_118129
tgccatgaataaaatgttcagatccaggttgctgtatccaaaccatacaaacggactgggctcaagcagatccgaggaaacgacccatccaagcggaagaagggaatgggtctgactgatgagaaccaggaagaccgtacgaacctaggacca

SEQ ID NO: 52156 - DNA, 168 bp, Setaria italica
  misc_feature (31)..(31): n is a, c, g, or t
  Peptide Sequence Number=SeqID_118130
tgggttgtacggcgctctggatttggttgtnttctgcagtttatggttgaactgtggtgtcattttgtgatttctgtggatggatgcatattgtgcaatatttggaatacgttcgtgggctccagcagcgattaaggcaactttactgctgagctcgaaagtaaaaaa

SEQ ID NO: 52157 - DNA, 193 bp, Setaria italica
  Peptide Sequence Number=SeqID_118131
caattgatcagtttgttccggaatatacattctacttctctagctggaaaggaaaagggttgtacaaaagaaagggaagatcacacgttgacgttgaggatattctggtaataactgtatcaacagacactaactcaacaagatacaacacatgatcttccctttcttttatacattctacttctctagctgg

SEQ ID NO: 52158 - DNA, 508 bp, Setaria italica
  Peptide Sequence Number=SeqID_118132
tcattaaacattggacatggacgcatggtacaggagattctatactacaaaaacaacaaagcgattcccaggaacaagtcaagatgatcaacaatcaccatccttaaggtgcgatggggaacatacaacacaaggaagaaatgttggtcttcaaactattttccggtgtccactgaaggcccaaatcttcaaattttttgtcccaacttcctgtacacaatgcactcccatcagatgacattccaaggcaacttatacgaccatcatgggagttttggaggtttcccaaattaagtaccacctgagaatttttacaaatattaacaatagaatattgtaagcaataatgagaggtggatataaaatagtgggaggcagcccacgatagcttgaactcagatatgcttttacatgcgggtgttcagttacccatcaagttgcacaatccaaaacctatgtttttaacctcttggcctaatgcaggaattaggaatcttctgacacaaaa

SEQ ID NO: 52159 - DNA, 403 bp, Setaria italica
  misc_feature (185)..(185): n is a, c, g, or t
  Peptide Sequence Number=SeqID_118133
acccttagtaaaaattgatgaaactgcgtgattaaagggagacctgctgaacttcttggacttcaaacacatcttctggaacagctgtggctatagtcatccaagaaccgaagacttcaaaggaacaggttcaggataattctgagcagactcaatgcatattttgcattgtctgatagagcaanctttgacatggtgaacgaaacccacacaggaggtacatattctgaagatcttctcataatgaacataaataatagcagagctatcttctccaagtttgagtctgattttgtcaactgctctatggttgatatttatcttagctctaccagccacacatctttcatcactaagcataaaactagcagtcataggttcaagatctgaaggaaaaccaaca

SEQ ID NO: 52160 - DNA, 243 bp, Setaria italica
  Peptide Sequence Number=SeqID_118134
cttcttggacttcaaacacatcttctggaacagctgtggctctagtcatccaagaaccgaagactgagagatctgatgagggttgcgtgaccaagcattggccatgtcttcttgaataggttgcagacaaacttccttagctaaaccatccggatcagccacctgctgaggagtatctggcggcggatgtggaggaacaggtggtggatcaggaggcgagtcgtcggagtaaccgaggagggg

SEQ ID NO: 52161 - DNA, 125 bp, Setaria italica
  Peptide Sequence Number=SeqID_118135
ttggttagtctttaacttcgggtttctagtagttgtactttgttctagtcttgtaggtcttgttagacgacattacattgtggttaccttttactggctaaatcgcacttgtgatggtgtttctg

SEQ ID NO: 52162 - DNA, 424 bp, Setaria italica
  Peptide Sequence Number=SeqID_118136
taatctggcgccgcggcgacaaggagagtccagcccgtgcttcctgcttcctccactagaggttccgtcatcttcctacagtccatgaactaagtaagtatttggatgctgaatcaatgggacaacatgattatgatggaaccagctcaaaatcgtggaggagatgctcctgtgcgttcttcctttttgcttgttacattgttgattttccatctgattagctttgatgccatcttcttactggctggcgagaggaactccattgctttggcaaaattgaagctaggattcaagctcactgattggtgtcaagaggactgcgactcaattgatttttagggacgagattttgatttccagagggggttgattgtgtattcccgccgatattatcaacttcaatgtgtgccactggagtgctgtg

SEQ ID NO: 52163 - DNA, 477 bp, Setaria italica
  Peptide Sequence Number=SeqID_118137
aaagtaaccaagggaagaatagaacaaaaacaacatgatttcatataattcatgttcttttcctggagcagaagtaagtatttggatgctgaatcaatgggacaacatgattatgatggaaccagctcaaaatcgtggaggagatgctcctgtgcgttcttcctttttgcttgttacattgttgattttccatctgattagctttgatgccatcttcttactggctggcgagaggaactccattgctttggcaaaattgaagctaggattcaagctcactgattggtgtcaagaggactgcgactcaattgatttttagggacgagatttttgatttccagagggggttgattgtgtattcccgccgatattatcaacttcaatgtgtgccactggagtgctgtgagagcaggctggacattttccctgtattgcgctcagggattttcgtgatgcagctcgccatcacaagctaaa

SEQ ID NO: 52164 - DNA, 170 bp, Setaria italica
  Peptide Sequence Number=SeqID_118138
ccaggaggctgtagcggggcatgcccgggtctggacgatcgaagaagtgttcgacgggcatctggcgccgcggcgacaaggagagtccagcccgtgcttcctgcttcctccactagaggttccgtcatcttcctacagtccatgaactgtgagagaatttgcatctatct

SEQ ID NO: 52165 - DNA, 220 bp, Setaria italica
  Peptide Sequence Number=SeqID_118139
acaaaaaccgctcggccctcatactctgaagattgtctcaaagagcccttcaccatgtttgttggatctgtggtgtttgatgggaatacctatactggtgaatctgcatccaacaagaaggatgcacagcagaatgcagctcgtgctgtgatcaagtcaatattagctacaggcggaccagatcatgtagcacctgcgtcacaagatgaatcttcctcat

SEQ ID NO: 52166 - DNA, 241 bp, Setaria italica
  Peptide Sequence Number=SeqID_118140
tagtaatttgtctttctaggtagtcttctactaaccttatttggttggttggtattgttttggtcttgtaagtctattttacagatacaagagaactcaaagcacttgttcgtctttttggtggctatggaatagataaaatggacaagatgctaagggaacatacttctgcactgttaaattgtatcgattcagcattgaggtcaaatcgtgatgccttagagggcctagctggaagtgt

SEQ ID NO: 52167 - DNA, 229 bp, Setaria italica
  Peptide Sequence Number=SeqID_118141
tagtctaaattatttaaattcttgtcttattgtctagtattcttattgttcaaattgtctgcagggatagtcctggattcatggaatgacactagcaggccacacattgttcctaagctaatattcctggatcaactctgcgagctgtcccccgtacctccccaggagcaccttagaagttcacataccttacacaatcctccgctcaatctaccaccagctatatggt

SEQ ID NO: 52168 - DNA, 178 bp, Setaria italica
  Peptide Sequence Number=SeqID_118142
ccattctctttgattctagaacttttggaaggacataaagttgatagttttcatgtaagtaagatgtactcatctctgaacagagggagtattaaattctcttctaggatatcttgtttgtcctgatgaactacttcgggtgaccagtattagatgttgccatggttgttctaaaaga

SEQ ID NO: 52169 - DNA, 428 bp, Setaria italica
  Peptide Sequence Number=SeqID_118143
aaaacttgctaaaaggtgggctggacaacctatacccctcatttattgcttgtctccccctcctgcacacctttaataagggtagataggtctttttacagcttattaaatgtcttttagcaagagtatccaaacagcttttgctaaagtttagcaactaaagtttagcaaattttagctgctaaactttagcaagagtaaccaaacccctcagtacagaagagaaaaaggtagggtaaaagaggatgaccttatctcaacctacgtctaggaattattctctgtactctacatacacatcttatgaccgagtctatccaatcaagtcaaaaacccaccgtgatcatcatatcacagagctaatgtcactcaacactgttgtaagctttgctcatgtggagctttaaggctgcatagcctgtggaact

SEQ ID NO: 52170 - DNA, 319 bp, Setaria italica
  Peptide Sequence Number=SeqID_118144
gaccaatgtgtctggttgctcttttgaagctctcctcacggtttccatcgacatcagagagggtgagacaaatagttggccagaataaagagaatgttgtgcttgaactacagcaaagatcaatcgaattcagttccattatacaaaaacatcagtctatcagatcatctttgcttgaacgtatgcctgttttggatgaagctagctatctggtgaagcgggctactgctacaaaggcaactatttcagatcatctttggcttgaacgtatgcctgttttggatgaagctagctatctggtgtagcagtagcccgcttc

SEQ ID NO: 52171 - DNA, 270 bp, Setaria italica
  Peptide Sequence Number=SeqID_118145
cgtggacggaggaagacatgcggcgcctcgctggggcggcgcgcgccgccagcgaccggaggccggatctcgccgccgccagagccatgggtggtgtggtggtcgccgccgctggtttttggggaacgggtggagaatggtcgcgtcgtcccgctgagcgtgacctgcaccctcctggcggcgtacaacctctccaagggccacccccacttcgacgagccgccggcatacccctatctgcacatccgcaacaaggagttcccctgggga

SEQ ID NO: 52172 - DNA, 194 bp, Setaria italica
  Peptide Sequence Number=SeqID_118146
gagttatctggttgttccagaaggtgtgctattcagtgctcaatggtggtccttcgtctcaaacaggccatcaggtccccaggggaactcctatctgcacatccgcaacaaggagttcccctggggacctgatggcctgtttgagacgaaggaccaccattgagcacggactccagaaggtgtgctattcagtg

SEQ ID NO: 52173 - DNA, 425 bp, Setaria italica
  Peptide Sequence Number=SeqID_118147
attgcttgcggaatgggaagaggcatccagttctggtgcgcttggcgtccgtacttgtaatccccaacaattggtgttccaagaacctctgcacaatggactcggagctgatgcttccttccagtacgaggaaatagttctaaccaagtatagcctttgcaagtggagctgacaacaagcccttgggatgcctaggtcttccaataacaagtgcaacatattttctttgcagtacttgttgagtaccatcagctaaagcatcagcagttttctcacgaaatatagcatgcataatggaaagcactaagttgggttcttcccagaacaaggacgccactgcaatccctatcaagcctgtggaccagtcgaggtgcttcagaagaaccatcctcgaacagtggcgccagtatatcaatactattttt

SEQ ID NO: 52174 - DNA, 263 bp, Setaria italica
  Peptide Sequence Number=SeqID_118148
gctgcgtagaaaatcaatctcattcttgctaccaaatttctttgtcttctcagaaacagaagattcttgaatgttaaatgggagaaaaagaatatcaccaggcacaagttcatcttttgctgaaacctttcaaacaattaaaacaaggtcacatactgcaagagaggactcagttactagtcaaaacattatgatctataaccttattaggctacaactaaacatggtctcccttaataatatcattggatgttcttcgtcca

SEQ ID NO: 52175 - DNA, 320 bp, Setaria italica
  Peptide Sequence Number=SeqID_118149
tacaagtacgtcaacctgtcttgcgcgtaggagtgcctctgtgctctctggttgggggaagatggttgtccaggagttcactgttgatctgaacaagcctcttgttttccaggttggccatcttgaggaacgttaccaggaatgggttcaccaacctatcgtcagcaaggagggtccacgtttttttcggaaatgatgtcctggagttcttgacacgcacaaagtggtgggctgtgccaaccatatggctgcctgttgtttgcttacttcttcgtgaagtctattctgatgggtcataccattcaggaagtagttctgat

SEQ ID NO: 52176 - DNA, 213 bp, Setaria italica
  Peptide Sequence Number=SeqID_118150
tattccacattgagaccaaaacctactggtaacaatgcttcatccttgaaggatccgacatcgcactatgtcttccttctgctaatcaaattgttgttgatgcactgttgtaggtcaaacaccgcacattaccttcttcatgggtgccaccataagcaccctatggactctctcagttctggaacctggttgctttctttgcaactccatcta

SEQ ID NO: 52177 - DNA, 146 bp, Setaria italica
  Peptide Sequence Number=SeqID_118151
atcgcactatgtcttcctactggtaacaatgcttcatccttgaaggatccaatatcgcactatgtcttccttctgctaatcaaattgttgttgatgcactgttgcagtaggaggaaatacaagcctgagagagtccatagggtgct

SEQ ID NO: 52178 - DNA, 196 bp, Setaria italica
  Peptide Sequence Number=SeqID_118152
aaaagagaacacatcaacaaagaacaatcagcacaagaacccagaccttcctcctactgcaacagcaattttgtgtttcccattctggaacctggttgctttctttgcaactccatctaccactcctgcattgtttggaggtggtctattgggatatgtgatgtatgattgcacccactactatctgcaccatgga

SEQ ID NO: 52179 - DNA, 185 bp, Setaria italica
  Peptide Sequence Number=SeqID_118153
tcatcgttcccatgtgttaaatttcgtactgcaggaggcctgatctgttctatatctatgttttacatccaccaacgcgttcaacaaggtcgccaaggctgccacagatgttgggacaatgaccaaggagaagatggccgccgaggagcagcacaagggctctggcgcttcttctgggggccact

SEQ ID NO: 52180 - DNA, 249 bp, Setaria italica
  Peptide Sequence Number=SeqID_118154
gcgcctaggagtacaaccctctcgacgagtccctctgattcattccatcaaatgtatgagcaaagtcataatgaactttaggtggaggtaattatagaacagataccattgtcgcttgacaaagctagctcttgtaaacacttgaatataactcgtgctcctaacgagaacccaatgagagtcacaggcctgtttccctgtagtccctttagaagcacttcagcgagcatttttcctgccttgtctgat

SEQ ID NO: 52181 - DNA, 166 bp, Setaria italica
  Peptide Sequence Number=SeqID_118155
ccactagctcctatgaatgggacaagtgtaccgagtgttggcgcaagagcaccgaatccagcagcaatggctggtgcagctaaacctgtcgggcagaagagattgagaggagcatatcaatctcctggggtagtgtgtccaagtgaactgtcaacgtgtttctact

SEQ ID NO: 52182 - DNA, 392 bp, Setaria italica
  Peptide Sequence Number=SeqID_118156
caatgaacaaataactcaacgatgctctaggttgtggtacactacggggtacaagtacacaaaaggatcggcgttctacaaggtctgtatcctttggacctgcgactcggcttgcgagtcaccagctgcatcgtcagcggtgtgctcgatgacgaagctctcgatcttatgaagtgactcaatagcgatatcagttggtgacagcttagagacatcatcatgaccctgtttagatgcaatctcttctagagaaacccttacatccgcatttgcataagcatcacccctttgctccgcaagcatgctgagcttagagaaggccattgtgtatggaatacaaccaagaataggttagaataccaagaaagaaggaacgaagaaggacaagttta

SEQ ID NO: 52183 - DNA, 176 bp, Setaria italica
  Peptide Sequence Number=SeqID_118157
cacgccgatcagaccacacataaagggaaaaaaaacaaagagaggcgaagaccgtgtacccccggacgacttcttcgcgcggagcggggcgacgggcttggacccgcgagcccgcacggcgaccgctgctcccgccgggtcagcgaccctcaagctgccgatcggcgactgcagcc

SEQ ID NO: 52184 - DNA, 307 bp, Setaria italica
  Peptide Sequence Number=SeqID_118158
ctctaggttgtggtacactacggggtacaagtacaacaaaaaggatcggcgttctacaaggtctgtatccttttggacctgcgactcggcttgcgagtcaccagctgcatcgtcagcggtgtgctcgatgacgaagctctcgatcttatgaagtgactgcaaggtgaccaggagtgatatgttaggagagttgtaacaatgatatgtgggaggagcaaaatgaaaattcaacattgtgccaaagtggtggcctgaataaggcaattaaagaaattttaatagacaataacctacaataagaacgaaa

SEQ ID NO: 52185 - DNA, 225 bp, Setaria italica
  Peptide Sequence Number=SeqID_118159
tggatctatgtagcaccttttgtccatgacaaattgaagaagttgaaggaacaagtagctaccattgtgtatggatcaccagatggttgatccagaagaggacgagaggcagttcccactttagcaatacgcctagcaagagcatccaagggaacatctaaccaaacagataggcccttcttcatatatttcctggtaatgaaataacagatcacaacatgatca

SEQ ID NO: 52186 - DNA, 253 bp, Setaria italica
  Peptide Sequence Number=SeqID_118160
cccctcgtgtagctgcagcactgtgactgcaactagcaatagtaccgcagttcgacggcactgcaagagagaggtgctagagtagactgtgttgggtatgtgccggaacatctggccatctgcagaccggcgctggggtgcactcttatcaatttgttcaagcagtctgtattggtatgtttctcccaacacctctatcttgtcagctgtatttggatcaattaaacctctcaaagcaccccacaataatctg

SEQ ID NO: 52187 - DNA, 324 bp, Setaria italica
  Peptide Sequence Number=SeqID_118161
cgttgcagtaactgaaccgacatgagtttgttaacattggattcttccaatttccactctctgttccagcttttgttgcttcaacgatgtcctgttcaatgcgcgttgagtcttctttatatcacactcaatggatctaatccgcctcattgactcctctatcaggtcttccttttctggaggaattcttggagatcgctggttcagctccattaccatgttttctagcctttttagtctctctaaagcaatggggccgtgcaaatactttagtacaagtagggtaccaacctagaacttacaataacctaggacaataataga

SEQ ID NO: 52188 - DNA, 356 bp, Setaria italica
  Peptide Sequence Number=SeqID_118162
tgttgagccaactgtagttagcttgggactgaccatatcttccttcctagtgacaggggtattaggggaagatagcatcttgagtggaatgctggatgaaccagatgagtgggaattctccaacttcatttgcacatctggctccatgtcctgcagacacaaaacataatgataattagtagttatgatttagcatcattgcaataacatgcagaagctacataacctgacaagccaaattctcattggagagatgcccagtttccattagtgttgattctgaaagatcatctgaagtcatcatctgattccagggtcctttgtttgacctaagacagcctccctcacccgagcaa

SEQ ID NO: 52189 - DNA, 428 bp, Setaria italica
  Peptide Sequence Number=SeqID_118163
ttctattccgttgtcctatttgtaaagtattgtaattcttcttgtaccggtctaactttccttctaggtctttcttgtaggtccttgcaattggagcaactgaagcaagtgaaaccccaggcttcttggtggttcttgcaggcttcataaccacaattggaggctggaagtctctgggctcggtggcttgatcataccctgtcctctgaacagccactgatccagcattgctgtcattctggctcttagaatcttttgcattcaatgcccccaatattctgagagccctgaagtccttgttattacactctaagaagtcgaggcccccgagccttctttctatgtcagcatagacagatgcagtccttggcctcccttcagcttctcgacattgttgtgctttttatgttgtttggcacttctctcct

SEQ ID NO: 52190 - DNA, 220 bp, Setaria italica
  Peptide Sequence Number=SeqID_118164
aagaatgtgtctcaccatctttgaatgaatctgaaatccttttatgatagaaggatgtgtcgaggacagagacagggctcgggatgttgtccagtgaatgaatattttgggtctgaacccagaattgaaggacccttgtgacttgatgttgttcaaccatgcaaagttgccacaacatcaagtcacaagggtccttcaattttggtctgaacccagaatt

SEQ ID NO: 52191 - DNA, 324 bp, Setaria italica
  Peptide Sequence Number=SeqID_118165
caacaacacgcttgtgcagctcttcctccagatacagcaacttctctctgtcggaagagctgcacaagcgtgttgttggtcaagatcctgcagtaaaagcagtctcagaggctattcagagatccagagctggtctgtctgacccaaaccgtcctattgccagtttcatgttcatgggacctacaggagttggcaaaactgagctagcgaaagcccttgctgcttttatgttcaacactgaggaagctgttgtaaggatcgacatgagtgagtacatggagaagcattcagtctcaagattgattggtgctccgccaggttacg

SEQ ID NO: 52192 - DNA, 302 bp, Setaria italica
  misc_feature (283)..(283): n is a, c, g, or t
  Peptide Sequence Number=SeqID_118166
aaaaattacaaatactaatacaaaagaaagaagaattagaacaagggtaaaatgtggagatacagcaggcagaacgtgagtatgatctcaatcgcgctgctgaactgaagtatggaagtctgaatgccttgcagcgccagcttcagacaacagagaaggagctagatgaatatcagagttctgggaaatccatgctaaggggaagaggtgactcaagatgatatagcagagatagtgagcaggtggacaggcattccagtctctaaaactaaagcaatccganagagagaagttgctgtatc

SEQ ID NO: 52193 - DNA, 234 bp, Setaria italica
  Peptide Sequence Number=SeqID_118167
acctgaggtggccaaggagagtaaacaccagattgtggagactgagcatctgatgaaatccttgctggagcaaaggaatgggcttgcccggaggatcttttctaaggcgggagtcgataacacaaagcttcttgatgctacggagaagttcatccagaggcagcctaaggtactaggtgaagatcctggttcaatgttggggcgtgacttggaagctctgatacaaagagcaag

SEQ ID NO: 52194 - DNA, 173 bp, Setaria italica
  misc_feature (139)..(139): n is a, c, g, or t
  Peptide Sequence Number=SeqID_118168
attacatgcaagaggaaagcctacatctgaacaaaatcaaacgaggaaacatgaggggagtgataatttgacctaatttttcatcacagagaaattgctttggtccaactgtgttatatggtctttgtgtttcaaaatnttggtccaaggtgcatgctgtcaaaaaaaaaaaa

SEQ ID NO: 52195 - DNA, 424 bp, Setaria italica
  Peptide Sequence Number=SeqID_118169
cggtgctgtgacgttgtacttggggtcctgcagctgctccagtttctccaggacctcagacatcgctggccgcgccttagcatcgctgccgatgcactgcagggcgatgcttgcgactgcgtgtgcacctttcttcgggtactgtccgcccagcttcgagtccatgatgcggtacagacggcgcttgtcacgcaggtagggttttgcccagtcgacaaggttctgctcagataccggtttcgatttgtctagcgctcgacgtcctgtcagcaactccagcagcaccacgccgtagctgtagacatctgcctttactgagaggcgacctgtacattgagagaaagattgtatcaaaatatactcagcagttcgcgtcgttggatttgatacttttatccattcactggttttgtgcccactgctc

SEQ ID NO: 52196 - DNA, 364 bp, Setaria italica
  Peptide Sequence Number=SeqID_118170
actcaagagtatacattggagagtgaatggagaggaaagtaactgaatagaatgctgtcgaggctcctgttcttgatgtattcatatacgagcagtgtatcattctgatgcaagcaataacccagtaatctaacaaggttcttgtgctgaagctttgccagtacctggatctcattgtgtagctgatgcaatgcatgccgggttcttcctaaaagtgtcttgactgctatatcttcaccatcagagagtatcccctaccatcgaaacaaattatccttcagaaggcacgatgcaccgtatctgttttcccgttgagtcctctctcaattcttaccttgtatacagtaccgaaaccaccttctcc

SEQ ID NO: 52197 - DNA, 160 bp, Setaria italica
  Peptide Sequence Number=SeqID_118171
caaagaccgtgcattgcgggttccctattttcttcggtgcgagactccagctgtaatctctttcctccctgctccagattctggagtagcaggtgaagatatagcagtcaagacacttttacgaagtacctggatctcattgtgtagctgatgcaatgca

SEQ ID NO: 52198 - DNA, 302 bp, Setaria italica
  Peptide Sequence Number=SeqID_118172
ctcttcttccaccgcaagttgcaacgaagggcctaacagcctgctcaacagctcttggttcaatccaattccttgaccattaattacaagtgcccgccacatactctcttcaaagcccttccaattgattcgccctccgctgtcttccgatggttcatgatctggatagtacttaaggactggaccattctggcatggagctgccccaaattctcgtggcaacggagttcccaacacttggacatgggacacgctgcagaaaaggcaccaaccatcagttataatgaaaagatgcatgcgat

SEQ ID NO: 52199 - DNA, 195 bp, Setaria italica
  Peptide Sequence Number=SeqID_118173
cccgccacatactctcttcaaagcccttccaattgattcgccctccgctgtcttccgatggttcatgatctggatagtacttgaggactggaccattctggcatggagactagaccccaaaattaactaacgtaaggaacaaaacggaaagttaaacccaaaacaaaacttaaaaggaaaacaaaataaaggaaa

SEQ ID NO: 52200 - DNA, 186 bp, Setaria italica
  misc_feature (177)..(177): n is a, c, g, or t
  Peptide Sequence Number=SeqID_118174
ctcggtatgatccctcaccgcgctgccatcgcccaggaaaggtgccagttttttccgcgatcgcgtcgtcagcaggcgtgccaggatttcagctaagctcggtatgatccctcaatcctcccttgctcttttatttttgttgaggctctgtgaaacaaagcaggtggagatgggganctgaagcct

SEQ ID NO: 52201 - DNA, 234 bp, Setaria italica
  Peptide Sequence Number=SeqID_118175
tgcacgccggcacggcgtcgacggcggccttggccttgatgaccgtgtcgaagccgtcgccggcgagggagaggttgctggggtggtccttctccgccgtgttgttccccgtcgacaccatgatcacggacgcgtcgcatccctggggatcacagtcagggtcacatgccgagcaattaagcgcacatgcggatgcggcgccgtccgcttccctctgtctctgtcttaggaacc

SEQ ID NO: 52202 - DNA, 357 bp, Setaria italica
  Peptide Sequence Number=SeqID_118176
tatccaccgcttggtcttctgtggttggggttccaccaaagatctagcataagcacgtggcaggcagcaaccatgttcagaccaagacttgcagctttgagtgacatgatcatcacagtaacctctggaaccgtattgaagtctttcacagcttttatcccgtgcagcaacagacattgttccatcaagccttcgatatgtcacatgagaagctttcaaatgaacttcaagcaaatctagcattctagtccattgagaagaaaaacaaattagactttactaccgttaaacttaggtagtttagtttagttaccaaaaggaaccctttaccaatacaaaacttttacaagaaggaca

SEQ ID NO: 52203 - DNA, 405 bp, Setaria italica
  Peptide Sequence Number=SeqID_118177
caggcaggaatcctttatgtagatgcctaagcaagttggagcttctagttccacaccagagaagaattttgtttggtagattctttattttctcataagaaggaaatgaactggactctacagcatatatcctctcaacagacacaccataaacctgcacggaagttttatcattggacatatttggaggaagagggatctacaggtaggagtatgatatcttaccacatcatccaccttgacaggctcatatgttgtttccagatacctcagaatcatcttgtaatcctctgaatcctcagctacaggattgatagaacaacccagcttcttgtagcattcagacagtggatcatccaaagtcgaaccaaacacatccccaatgagacgagaagcatcgttaat

SEQ ID NO: 52204 - DNA, 267 bp, Setaria italica
  Peptide Sequence Number=SeqID_118178
ggaaccggttccacccacaggaattattccactcggtacaggaaatgatcttgctagatcatttggatggggtggctcttttccctttggttggcgctcagctgtaaagcgttatctcagcaaggctgccacgggtcccatttgccgtcttgacaggtgcttttgtttttaatatcttgacatcactgttaattgcttttgacatcctaattcatttgtacagtcattcaagttcattctgttattagttgcttatctaggaaaagg

SEQ ID NO: 52205 - DNA, 197 bp, Setaria italica
  Peptide Sequence Number=SeqID_118179
tactaacttacctttagtctatttgggtattggtattgtcttctaggttcgcatatggcttccaccatcttcgtgatgaaaagccgtatcttgcacaaggaccagttgcaaataagttgatttatgctggatatagctgcactcaggggtggttctgtacaccttgtactgcaagtcctcagctaagggggcttaag

SEQ ID NO: 52206 - DNA, 412 bp, Setaria italica
  Peptide Sequence Number=SeqID_118180
ggcgggccaaactccaacgactacggcaccaaccgcgtcctgcaccacaccatcggcctcccggacttctcccaggagctccgttgcttccaggccatcacctgccaccaggccgtcgtgaacaacctggacgacgcgcacgagcagatcgacacggccatcgccacggcgctgagggagagcaagccggtgtacatcagcgtcagctgcaacctcgccggcctctctcatccgacgttcagccgagagccagtgcccctgttcatctcaccaagattgagcaacaaggcgaacctagagtacgccgtggaggccgcggcggagttcctgaacaaggccgtgaagccggtgatggtgggcgggcccaaggatccgggcagccaaggccagagcgtcgccgccatcgccgacg

SEQ ID NO: 52207 - DNA, 402 bp, Setaria italica
  misc_feature (366)..(402): n is a, c, g, or t
  Peptide Sequence Number=SeqID_118181
ggtgcattgcttggttacgctcagggggcgaatgacaagcgtgtgattgcctgcattggtgatgggagtttccaggtcacagcacaggatgtgtcaactatgctgcggtgcaagcagaacagcataatcttcctgatcaacaatggcgggtacaccatcgaggtggagatccacgacggaccttacaacgtcatcaagaactggaactacaccggccttgtggatgccatccacaatggagagggcaagtgctggacctccaaggtgaagtgtgaggtaggtagtttgtacggtcggtcgtattcgtagttacggttcgttctttggggttagtttaagtttaaggtttacttttgtttcttttgnnnnnnnnnnnnnnnnnnnnnnnnnnnnnnnnnnnnn

SEQ ID NO: 52208 - DNA, 186 bp, Setaria italica
  Peptide Sequence Number=SeqID_118182
cttcctgatcaacaatggcgggtacaccatcgaggtggagatccagaccggaccttacaacgtcatcaagaactggaactacaccggccttgtggatgccatccacaatggagagggcaagtgctggacctcctcactacttctaccttggaggtccagcacttgccctctccaattagttaggta

SEQ ID NO: 52209 - DNA, 407 bp, Setaria italica
  Peptide Sequence Number=SeqID_118183
acattcaaccttgtcaaaggatggggtactcggccttgaagcgtgtgcaggcaaactggacaatctcctcattggtgccaggctcctgcccgccaaactggttgcatggaaaagccaggatctcaaagccttggtccttgtacttctcatagagctgggccagctcagtgtagttggagttagttaatccacactgggatgcgacgttgacaatgaggagaaccttccccttgtaggtgctgaggtcaacatccttcccgcttgcatccttgacggtgaagtcgtggacggaggtggtggacgacgcggcggccatgctggggcgaacggcgagcggcggcggcggcgaagaattgagcgaagaagaccggggaagacggactagacgaaggacggtaagacgtaga

SEQ ID NO: 52210 - DNA, 451 bp, Setaria italica
  Peptide Sequence Number=SeqID_118184
ggcacctcatctccaattcaaacgaaatatacaagtacagagttcatgcaagggaaatagagcatgtactgcaacccctggatatatggagcactacttttattaacaccgcattattgtaaatttttagcgctcagagcaatgcaggagtacaggttttttctacaggttccagcccgatggttttaagagctcccaagcagtttcttgatatccttctcgatgctcagaggggaagtggtcggggcgtagcgatccacaacacgcccctccttgtcaaccaagaacttggagaagttccacttgatgctgtcaccgaagaggccacccttgctagactttcaggaatttgtagatgggtgcggcattgttaccgttgacatcaaccttgtcaaagatggggttacttcggtcctttgtaagtcgttgtttgttcttaggttctaaactt

SEQ ID NO: 52211 - DNA, 272 bp, Setaria italica
  Peptide Sequence Number=SeqID_118185
tttcttgatatccttctgcacagaatgggggaaaaatgttaaagttgcctcaagatagcatactggttaagcttgtacaacaaacgcaaaactcggtgttggaagtttacctcgatgctcagaggggaagtggtcggggcgtagcgatccacaacacgcccctccttgtcaaccaagaacttggagaagttccacttgatgctgtcaccgaagaggccacccttgctagacttcaggaatttgtagatgggtgcggcattgttaccgttgac

SEQ ID NO: 52212 - DNA, 460 bp, Setaria italica
  Peptide Sequence Number=SeqID_118186
cgccaagtacagctcccggatcgccgtgcagttcgacagcccgtgaccaatgcgggagatccggttgtagctgaggttcagcacgcgcagcttcgtcagctcccggagcccctcgatgtttgcaatcttgttcctcgacagatcgagggagtgcaggcccttcggcagcgatcctggggagatatgaacgatgaggttgctggagaggttgacggctcggaggctcgagaacggcgcgatcatcggcatgaccttgaggcccatcccggatatatgcgccaccgacgagaaggcgttcagggactgcacgatggtgttggcctggacgacctcgtcggcagccgcgcaaacgcttgggcttagaccgtggttacttccccgaaagaacgaactaccccgaagtttacgtaaggggtaacgtacgggtacgtacgtacttagttacgttacttaaccctta

SEQ ID NO: 52213 - DNA, 457 bp, Setaria italica
  Peptide Sequence Number=SeqID_118187
tccgccaatggacgtggtcgtggcggccttcaccacggccaggagcctttcatctgactgcttcattttattctggtactgttcattctcgtacttatctgtgtccctcagctctcttgcaagcttcctcattgatttcgatagcctcttaagctctccaagctcaactagacttgcacagactgaagaagccatccaacagtatagggatatcctgccaacccggtccgtagcctccttgttctaccaacagtagcaaaacaaatctgtcaataaatcatacgctatgtagttgatcatcataagacaaggcaagtaagcctttaaatcccgacaaaccttgattatccctgttcgtcctaaccacacaaattggtccaggaacaagaacgtcgaaagcagagcgttttggactgacattgtacaaagtacaggttaattcgatcacatcattctg

SEQ ID NO: 52214 - DNA, 145 bp, Setaria italica
  Peptide Sequence Number=SeqID_118188
aagtacagaacaacgaggccgagctcagctcgtgtggcatctaacgagcccatcttcctggtgttagccgaggccttccaaggaaaggaagtcctgctggagtagcttgctcagctacttcactggattgagatgagatgacaaa

SEQ ID NO: 52215 - DNA, 264 bp, Setaria italica
  Peptide Sequence Number=SeqID_118189
actaataaagactagaataagactagaataagacaatagacttaccttttttttaaattatcaaacagaagattacaagcagttcataaccatggtgcttctaactcaggaacctaggatggtatcagaaaagagtgcactggccaacatcttccagccactgttatatgcttgtatatttgagcgaatctttccccaggattgacatgtattatgcattgttgcctaggattttgttaggcctctggtgcagattatttgtac

SEQ ID NO: 52216 - DNA, 435 bp, Setaria italica
  Peptide Sequence Number=SeqID_118190
cctcatttgagcacttcatcaacttgaacaacagatcccctgagttcatatcactgttaaatgacacgttgatgatattgtcatacttatccttctcatttagaagcctctggacaaaatcaacagggtcctttagtctctctggatctgttaccagactctttccagtatccttaatgtgagacatcatcacagatctaatcgttgtgagcccatcaggtacatgattaaataaagtgtacatccttgtcaggtcttcatacctgtcttcaacaagcatattcacaagccctgagttctccataagaatcaacctctgcatgtgatttgctagcatctctttcaccacaacagcagtaatttttcatttgttttcacatccatatattgtgaaacacgctctgattcttcactgaggcgcctctcggcaagctt

SEQ ID NO: 52217 - DNA, 393 bp, Setaria italica
  Peptide Sequence Number=SeqID_118191
ctaaatagagaaggataagtatgacaatatcatcaacgtgtcatttaacagtgacaagagtttcatgaatgctctgaattcctcatttgagcacttcatcaacttgaacaacagatcccctgagttcatatcactgtttgttgatgacaaactgcggaaaggggtgaaagaggccaatgaggaggatcttgagactgtcctggacaaggtgatgatgctgtttaggtacttgcaagaaaaggatctctttgagaagtattacaagcaacacttggcaaagcgtcttctttctggtaaggctacttctgatgattctgagaggagcatgcttgtgaagctgaagacagaatgtggaataaccaagtttaacctacgaaagttaggaagggacaa

SEQ ID NO: 52218 - DNA, 319 bp, Setaria italica
  Peptide Sequence Number=SeqID_118192
gatctggcagattaccccaccaatatctgtccagatactcaccactggttcatggccaacacagccctgcaacacctgcaacctgccccctcgagatagttgctgtctctgagaggtttcgggcttattaccttggcacccacaatggcaggaggctcacatggcaaacaaacatggggaatgctgacatcaaagcaacatttggaaatggcagcaagcatgaattgaatgtctcaacttaccagatgtgcgttctacaatagactagttacaaactaacaataacaaagaaataagtaacctaagaaacttaaaacaa

SEQ ID NO: 52219 - DNA, 459 bp, Setaria italica
  Peptide Sequence Number=SeqID_118193
tgtcctagtcgggttcgtaggtaggtaccggtaagtccgtctagtatttgaggcggccattgtgcggatcatgaagtcgaggcgggtcctggaccacaacagcatcatgacggaggtgacgaagcagctgcagccccgtttcctgcccaaccctgtggtgatcaagaagcggatcgagtccctcattgagcgtgagttcctggagcgggacaagacggacaggaagatgtaccgctatcttgcctagaaccacctcccttgcgccgcgcatatttcaattttatgctacccaccaatatcatataaacagaccttgatccatgtacttatgcaagaaggaattgggtctcttcccccccctgcaccccgtgacggttctagtttaaactggttttttgcggcgttcgtccaggtggtagctagttagcttctctatgtgacatgttgcgctggtttaca

SEQ ID NO: 52220 - DNA, 458 bp, Setaria italica
  Peptide Sequence Number=SeqID_118194
agcagtactggttacatgttgtttcttgttgagattctcttagctgtgcatggaagagttacctaattccttgtttactggctgaaagaattaagttatttggctttagaggatgagatcaggaggaggaaagaggagacctcgcagcttgagagtatcgtcagggagaggacggcacagatggcagcactggtaggcgaactagaacttctgcaggtgagaggataagactttctcttctttatcttcaggattagtgatgcctaatcttgtagtcgctgttgcctaatcagtgtgacatccatatggcctaatggtagagcataaagtcgttgcatagaggttgtgctacttatgattatggtgtaatctgaattgtcctttttagcctcaattatgcatcgttcctcccatttattctcgtttgtgtgaactgtgcaattctgtggccttaatct

SEQ ID NO: 52221 - DNA, 429 bp, Setaria italica
  Peptide Sequence Number=SeqID_118195
agacaaattatttctaaatgcaccagttgactctatttgtcaattggacaggttgctgagaaatcgacatatgctcagcaattagtggagccacatcttcagaagacacaaaatgtgaggtcttttccggtgtcttatactaggctacactagtgttggaaaaggagcatccgacggctcagattacttgtatatactactaaaatgttaacctggtatagatgagtagtataggtggtataagtgtattatgggaaagaattttgaatggtttttgtaattagggcttggtcttgtttgtaaattagaatcacaatcatttcattagaatattagaatcatcacacgaagttcatttagaaattagaaattggaatcactctttttccaatcacctcttttcctctcacgcgagccctggcggctcaa

SEQ ID NO: 52222 - DNA, 238 bp, Setaria italica
  Peptide Sequence Number=SeqID_118196
tatgctgtatgcaggcgcttaactgccaataacgaatgcttgtatcgcgtaccatataaaccagtcccccataaacctgtgccactcggtcctgaagtccagcaacaattccaagctctttctcagcatcgagaatcagattaggtctcaattctaacttttattaaatgcctgacatcatagaagtcaagaaggcagcttagagcagcaacaaacaatcgcgcttgaaccagatagc

SEQ ID NO: 52223 - DNA, 356 bp, Setaria italica
  Peptide Sequence Number=SeqID_118197
gtcgctatacagatactgttctgcgggatatgccactctgacctgcacactgtcaagaatgagtggaggaccgccatcttcccagttgtccctgggcatgagatcgccggactggtcaccgaggtcggcaagaacgtgcagaggttcaacgtcggcgacaaggtcggcgtcgggtgcatggccaacacctgccagtcctgcgagagctgcgaggaagggctcgagaacttcttctccaagatcgtcttcacctacaactgccaagacagggacggcaccgtcacctacggcggctactccgacatggtcgtcgtgaaccagcgcttcgtcatccggttccccgacggcatgcccct

SEQ ID NO: 52224 - DNA, 240 bp, Setaria italica
  Peptide Sequence Number=SeqID_118198
ggcaattggtaccaacctggcatgagtccatctaaaattgactgctctcattttcaacaggcgattctgattagttgctccgagcacgtcaagtaatgcgtgttcatggatgcaggcatgagatcgccggactggtcaccgaggtcggcaagaacgtgcagaggttcaacgtcggcgacaaggtcggcgtcgggtgcatggccaacacctgccagtcctgcgagagctgcgaggaacggg

SEQ ID NO: 52225 - DNA, 248 bp, Setaria italica
  Peptide Sequence Number=SeqID_118199
taagtggtctccaacttgtttatcttcctcttcctcgtcatcatcctcaccattttccgccaatatattatcctgctcctccaatgcccgtgcaagaagtaatgctttctccttttcagcttgccttttctcatcaagtttacgactctttcccacccatgacagtatctcagcagcccctccatcaccatcagcattcatctttctttcccaggcttcagcagcatcctcacctcgcaacccaaccc

SEQ ID NO: 52226 - DNA, 242 bp, Setaria italica
  Peptide Sequence Number=SeqID_118200
ctatcatcgacaacaatgacgtactgcgacataaaactcagttagaaattcataaatactaccaaacacaattttggcacaaagggagtacttttccttgacgaatgtcctcaatagcttcaggtatagatgagaaaccctctgtagggaagtcaaggtcaagctcatcatcatcagcagaaaatccatcaacaacaggagccatatcagctgcaatggtcccaagtgcaacagcaatacta

SEQ ID NO: 52227 - DNA, 414 bp, Setaria italica
  Peptide Sequence Number=SeqID_118201
tcgagcgcgccggaggtgtcgagagtggggccctcaccgtcgatggcgtccccgtcgacacctacctcaccaggttcgtgtgggatgagggcaggtaccccacaatgtcgccgctcaaggagatcgtcggcagcatccagtcgcaggtcgccaagattgaggacgacatgaaggttcgagcagcggaatataacaatgtaaggagccagcttagtgcaatcaacaggaagcaaagtgggaggtaaactgtgttgccatacttttgtgactagagttttataggaaatgcttgatgcttactcctatgttatgtcgctgtgatcccaaccatcattcaattcctttgttgtttaaagtaaagtaagtaggaaagaagaatgatgtcatctgttgcttgttatgcactgattaatt

SEQ ID NO: 52228 - DNA, 427 bp, Setaria italica
  Peptide Sequence Number=SeqID_118202
tccccgtcgacaccttaccttctacctaggtttcgttgttgggtattgtagggtctaggttacccccacaattgttcgccgcttcaaggagatcgtcggcagcatccagtcgcaggtcgccaagattgaggacgacatgaaggttcgagcagcggaatataacaatgtaaggagccagcttagtgcaatcaacaggaagcaaagtgggagcttggcagttcgtgatctttccaatctggtaaaaccggaggatatgatcacctcagaacatctagtaacacttcttgctattgttcccaagtactcccaaaaagactggatgtcaagctacgagtcactcgacacatttgtggtaccaaggtcatctaaaaagctctatgaagataatgagtatgcactctactctgtaacactttttgctaaggtt

SEQ ID NO: 52229 - DNA, 256 bp, Setaria italica
  Peptide Sequence Number=SeqID_118203
agtacttgggaacaatagcaagaagtgttactagatgttctgaggtgatcatatcctcccaaaaagactggatgtcaagctacgagtcactcgacacatttgtggtaccaaggtcatctaaaaagctctatgaagataatgagtatgcactctactctgtaacactttttgctaaggttgttgacaactttaaggtccgtgctcgtgagaagggtttccaggttcgtgattttgagtatagccctgaagcacaaga

SEQ ID NO: 52230 - DNA, 331 bp, Setaria italica
  Peptide Sequence Number=SeqID_118204
gggcaggtacccccacaatgtccgccgctcaaggagatcgtcggcagcatccagtcgcaggtcgccaagattgaggacgacatgaaggttcgagcagcggaatataacaatgtaaggagccagcttagtgcaatcaacaggaagcaaagtgggagcttggcagttcgtgatctttccaatctggtaaaaccggaggatatgatcacctcagaacatctagtaacacttcttgctattgttcccaaagtaactacccaaaaaagaactggaatagtcaaagactaacgaagtacaactacgaacaacaatttagtaggtaaccaaaggtaca

SEQ ID NO: 52231 - DNA, 271 bp, Setaria italica
  Peptide Sequence Number=SeqID_118205
tgtattctaaggtcgtccctactacgtacttcgtcgtaccttgtcttcgtacggtcggttgttcggtcgtattggcaacccgttactggatcgtctccctccccgtgcagtcccccggcgccaccgcgagctcgatctggtcgcgcctgcaggacaatatctcccgccactccttcgacaccccgctataccggttcaacgtcccggatctccgcgtcggcaccctcgactcccttctcgccctcagcgacgaccttgtcaagtccaacat

SEQ ID NO: 52232 - DNA, 310 bp, Setaria italica
  Peptide Sequence Number=SeqID_118206
gaagcgacgtaggggaactcatcgcaggcgttcgcggcagccgataggttcatcatcttcttcgtcccccgggctctcgctagctttatgatcgatttgctgtgcagggaggggggctaggagctgggctacaacctcgaggccaactccctggcgctcctccccccgtccaactccgccgccgcccaccaccaccactccaccatcgccggcggccacagcgcccacgacatcctccaattctacccttcctcccactacctcgcctccgccggcaacccctacagccatttctccgggagcaccgccg

SEQ ID NO: 52233 - DNA, 487 bp, Setaria italica
  Peptide Sequence Number=SeqID_118207
ttttgcagtatcacatgacatatctgattaatcagtgttcctacatccaacaacaatgtcatcttggattcaccctgctgttccaccagggaatgaccacaaagtttatcatgcacgaaaaaaatctgtcaatgtatttcttgaggaaaacaagatgcttttactatccagtaacaagagtttttctggagtaacagcttgaggtcctcgagcctgcaatagcagctatagttttttatctggcatggaaagaacctcagttgccaaattgatcagaacctacctcacatcactaaggtcaggataggtagcaattgcatccgtgaaatcttggctagcagttgaaggtgtatatgttattatacatgacatccccgctccttttgccgcctatcaaaagataaacaactttcatagtcaaaaggattagttttattaatcaaatatgtgcttggaaggcttactagtaatccaataacactgtcct

SEQ ID NO: 52234 - DNA, 353 bp, Setaria italica
  Peptide Sequence Number=SeqID_118208
tggtccaagactacttcgtccatgatcacccgttctgcgtacagaaatgtcaataacattgaagagcatcaggatttcactgacaaactgtgggtagatggtgatgggtgagattcagcaactgctgaggccgacttgacctaccaggcggttgccttgatgtcttaacgcctagcctcacagcctgtgacctaatcatggtgatttcccactggtgcctaaatgtttgcttctgtcatggtttttcaaagatccttttgtagcaatgggaagcgtatgcttctgtactgaagagcactatgctatctctgcgggaaaacgaaggatgcatcgcactggcaataggagtcttt

SEQ ID NO: 52235 - DNA, 365 bp, Setaria italica
  Peptide Sequence Number=SeqID_118209
accaacaataagaactaagaattagggtacaaagaataatagactagtgcagcgaagtggaaatgtactgatgtcctttaacaacaaggaggcaagctctgcgatcccactattttcacctgtaattgttcccatggcacagagttttggcccaatattatcccagctgacatcatatccaacaatccgttttggggcagaaacggccattaagcagcttgagaatctaagccctcctgttgttaagcaacttctgcctttacttcaacaacttcctccgttgtatatggacttaataaaagggcgagaggacttcattccaaaaccagaagagacacgtcgcctggttcttcctgatgttccac

SEQ ID NO: 52236 - DNA, 323 bp, Setaria italica
  Peptide Sequence Number=SeqID_118210
attccaaaccagaagagacacgtcgcctgataaaatcctattacggaatttctcggaacctcttaataaagttcaaagatgatcaaattgatgaaacctctatccttgcacaagtactaagctctgaagcagccattagctcgttgcttgatatgtcgattcgatcacttcccggggatcatagcctgccattacagcagtgaaccgcggaggtgaacttctggcaaatctgactgcaggcacaccatgggaggctgttgctaaggaggttggtaccactttgggactggactcaggcattctacgagcacagatctcaaagg

SEQ ID NO: 52237 - DNA, 409 bp, Setaria italica
  misc_feature (359)..(359): n is a, c, g, or t
  Peptide Sequence Number=SeqID_118211
tattccgtaggtcgtattgtattgtcctactagtattttgttgtcgtagtctttctaggttctacctattagttccttggcatggcgagcagtgttcccatgtgagatgaaggtcgcacgctcttggaaggaggtgtagatgaagccaagataagggttgttctcagtcctaggatccattccagagccaataagatactgaattgtcttctcaatttgcctcatatccaccctcccagtgaggtacagatatttgttaggagatcaccatgccggttctcctcagcagtccatgcccttgtccaaactgcccaggcagtgggcttgcacctgtctcatccctgacaccatcaagggtntaagcatagtctggtatgttggaagcgcctcctcagtaatcatcgtcccc

SEQ ID NO: 52238 - DNA, 247 bp, Setaria italica
  Peptide Sequence Number=SeqID_118212
gtcctgcgccttgttaccctcaccggacaggccactaaggtctgccaccttccacctgttgacaaggaactcaaggatgtcggcatagtccctggcggtgtacacgccaagcctctgtgcgaccatggagaagtgctcaaacagcttgtcgtcctccccgtcgaacatcaggtgggcaggcattgagatcttcttcttcatcatgttctagtcctagtagtctaacctacggttacctaaattaaaa

SEQ ID NO: 52239 - DNA, 233 bp, Setaria italica
  Peptide Sequence Number=SeqID_118213
ggtgtggcgcacaacatcgttcttgaggttgaccaaatggtctgggagcatctgttggttggtgacacaccagaggtcatcttcgagttgcgtggaactcatgcagtcgcaatgacctctgttgtgcgccacaccagaggtcatcttcgagttgcgtggaactcatgcagtcgcaatgacactccccgctttcagcttgggttgttattggttagggtaagttcctaacttgt

SEQ ID NO: 52240 - DNA, 338 bp, Setaria italica
  Peptide Sequence Number=SeqID_118214
ggtgtgcagaggggtggtatgttgtcagagggtcttcctgccatgtcatttgtagatcataatcaacagacattcaagctagatgcagatgcacaagatgactcatgcacatcctcagaatcttcatagaactccccctctgtaggaactcgattgcatgcgacatcatcttgatcggtaagggactcagttggcaagtattcatcagttcttcctgtgactgcgaactcaccatcacaacttgcttgccattcatcatcatcactgtcaacattcatcggatcaaacctgttctgctcagccctcttcctcaacatgaagacattgaagtagtagct

SEQ ID NO: 52241 - DNA, 437 bp, Setaria italica
  misc_feature (378)..(378): n is a, c, g, or t
  Peptide Sequence Number=SeqID_118215
tgttcttattttttccttacttttgttctttcttatttacttatttatttgtttcgttaagttatttgttattattattggtccttgtccagctttcatcaatctgtgggtccttgccccacaaggaaacctgttcctattgggccaaatcatcaggctgaattacctgagtgtaggccatttggtggaagaacagaagacgatgagagtaacaagtggatcagaaacagtgtcatgccaatgcctgattctgatttattgtctttaatgctgaaacctgttcactgcaaggcaggctgtgattgtcttgatgaagattcaatcaattgtgtgaggaagcatgtgagggaagcaaaggaggggaagctgaaggtttcngttggtacagacacctttagggagttggggttctttgactatgggagaggaggttgcct

SEQ ID NO: 52242 - DNA, 250 bp, Setaria italica
  Peptide Sequence Number=SeqID_118216
ttttagttttaatttttagttttacttttaacttttaaagttttaattttagtttaacttttctttatttgttcttacttatttccttttgttaggttctttcttattctagggcggtgttgaaggtgggacacctactgatattgctgaagaccaccactacaggagtggttttgatggtgttgcagaacatggggttctttgggtgaccattgcgacacaaaaggttgggagtttgggtttcactacc

SEQ ID NO: 52243 - DNA, 138 bp, Setaria italica
  Peptide Sequence Number=SeqID_118217
ctagataatgtgtgtggatccttgtctttgttctaatgatcagttggttttggtagcacgcaattcagctaatgatttaaaccaacttgctagataatgtgtgtggatccttgtctaagctcttattataccatatgt

SEQ ID NO: 52244 - DNA, 342 bp, Setaria italica
  Peptide Sequence Number=SeqID_118218
cgggtctagatactcttccacgtcttttttgttggagaccagatccatctttgaaaggatgttgatatgaggaagttcaagctgaatcatagcagaaagagaagccatgcaaccactaatgtattttgttacatcactgacaaactagaccaagaaaaacaataaaagtcaggcatgggtttggttcagtatcttcaatgccaataaaattactattagtggtccgaacctgcgaatcaagaaggtacacagcacagacattgaaattcttccgtttcaaatgttcaacaaagttgcgcagaactggaacatgagtgaagagttcaatctggcctgtgaaaa

SEQ ID NO: 52245 - DNA, 174 bp, Setaria italica
  Peptide Sequence Number=SeqID_118219
ttgtttcctttcctttccggttaagttattctaaagttcccttaacctttctacgttctagtctattcttccccatactggatacaggagtcgatgtacgatagcacatattgtatgctgctctcctttctcaagtcaagtggtatgaaattaaccatgctgtaatcatcaacc

SEQ ID NO: 52246 - DNA, 350 bp, Setaria italica
  Peptide Sequence Number=SeqID_118220
atcaacgcaaaatatgcaggctaagaaaaaaaacatccatgtgtcattacagaagaaaaatggaaacaggtagaatagaaatcaaggtgataactagcaaccgaaacttagactagtaaacaagtagaatgaaaacgtcaagaggatctatgaggtaagaaatgtttagactgatcaaagttccgggcttccaagcaagcccagtgtgcatgtcctcagttaaactgaatagtatcagtgccgacaagaaacccttcctctactgattgaagtaagcttggaacatcaaggcaccaaaacgagccctacaagtacgagagagaattcggtgttatctgagacaatacaag

SEQ ID NO: 52247 - DNA, 370 bp, Setaria italica
  Peptide Sequence Number=SeqID_118221
tcgaccagaacgaccaaccctgtgcaagtatgtctcggaggtcttggggaagtcaaaattaaatgaccacattaacagcttggatgtcaatgcctctggtaaacagatctgtacacacaaggtttctgcaagcaccattgcgaaaatcatgaaacactcggtttctgtggtcttgcaacatcttagcatgaatgtagaagcatgaataaccaagttcagttattttcttagccagtagctcaactctattaacagagttgcagaatataatggattgattaatttgaagcttagagaaagtccattgcctgaatacgcttttcttcaacaaaagcatagtatgaactgaccttgaaaggaatcactcaat

SEQ ID NO: 52248 - DNA, 286 bp, Setaria italica
  Peptide Sequence Number=SeqID_118222
gtcattacagaagaaaatggaaacaggtgatgaatcaaggtgataactagcaaccgaaacttagactagtaaacaagtagaatgaaaacgtcaagaggatctatgaggtaagaaatgtttagactgatcaaagttccgggcttccaagcaagcccagtgtgcatgtcctcagttaaactgaatagtatcagtgccgacaagaaacccttcctctactgattgaaagtaaagacttaggaaaacaatacaaaggacaaccaaaaactaagtagacgaactagaagta

SEQ ID NO: 52249 - DNA, 157 bp, Setaria italica
  Peptide Sequence Number=SeqID_118223
cagtgtctatatgaggagaaacggtcggagcacacctcaactctgcctggtgctgaaaagagggggataacaactacccaaatgaactgcaatcaaatgaaggaaccaccctacgagaccaaattgctcttcagatgtgggctacccgtaataaata

SEQ ID NO: 52250 - DNA, 467 bp, Setaria italica
  Peptide Sequence Number=SeqID_118224
ggatcaagaagcactactgccgcaagcacggggagaagaagtggaagtgcgagcggtgcgggaagcgctacgccgtgcactccgactggaaggcgcacgccgaaggtctgcggcacccgcgagtacaagtgcgactgcggcaccgtcttctccagcttcgtgacgcacagggcattctgcgacgccctggcccaggagaacaacaagctggcgcagcccatgaacatggccacggtggcctcggcgctccagggccacgcccaccacctcgccttgccgccgtcccacgccgacgacctcgatgctgccgccgaggacgacgccgacgccgacttcaacctcgacaccaagagcccgcagctcaggttgcaacccaccaccatgtccgacgccgccaacacgccgttcctgccgccgccgctcagcatggccggtgcatgctctccagcctcgctgccgcgaggcct

SEQ ID NO: 52251 - DNA, 351 bp, Setaria italica
  misc_feature (37)..(37): n is a, c, g, or t
  misc_feature (45)..(45): n is a, c, g, or t
  Peptide Sequence Number=SeqID_118225
ggaagagtcttgcagcatcagcagcagcagttccacnccaagccncttgccttggtagcccgccggagatgggcaacgacgacggtgatctccagcgcgtcaccggcccatcggagctgccgccgccgccccgccgacggtgaagaagaagagaagccttccggggacaccagaccccgagcgcggaggtgatggcgctgtcgccgcggacgctgatggcgacgaaccgtttcgtgtgcgagatctgccacaagggtttccagcgcgaccagaacctgcagcttcaccggcgcgggcacaacctgccgtggaagctgcggtctagtcgtcggtcggtcggggtacggtcta

SEQ ID NO: 52252 - DNA, 366 bp, Setaria italica
  Peptide Sequence Number=SeqID_118226
aaccaaccaactaagactacaagacgaagtcaatgcatggatatcagtgtgtagttgctgggccctcctcctgacaaccgatttgaccactcgtgcagttcggtcccaaaagcccacgttccacagtgtcgccatgcatacgagcacggtactcgcaactgcatcctgcaagtctgttgttactgcagcaggagtactttgtttccgatgcatctcaccacttaactgctcgtgttccactgttcatgttggtacaccacctgaccaccgcacaggcgggacagcttcgtgacgcacagggcattctgcgacgccctggcccaggagaacaacaagctggcgcaggcccatgaacatggccacggt

SEQ ID NO: 52253 - DNA, 227 bp, Setaria italica
  Peptide Sequence Number=SeqID_118227
aagcaacggcagccatcatctcaaccccttcgatggctcctcttcctctgtctcatcaacaagcagagcagcagcagcagcctctccctcctccggccaagaagaagcgcagcctcccgggcacaccagaccctgatgcggaggtgatcgctctgtcgccgcggacgctgatggcgacgaaccggttcgtgtgcgagatctgcggcaagggcttccagcgcgaccag

SEQ ID NO: 52254 - DNA, 227 bp, Setaria italica
  Peptide Sequence Number=SeqID_118228
tttcgcgtgcatgggaggtaagttagcttgtgaggaaccggagagatcaagtgaacttaatctagatatgtttccatttaatttctgtgtcgttgatggtgccatgacatggctagggcgctgcatgcaacttcattttgttatttcggtacaatttcgtttcgttgagtttaagtgcttaactgagacacgcgaagggggataggcaaggcacacgaggggatagg

SEQ ID NO: 52255 - DNA, 417 bp, Setaria italica
  Peptide Sequence Number=SeqID_118229
agatagttgatttcaatgaaaatcaaattgaaggtgcgctacctagatcactagcaaattgccaagacttagaggttcttgatgttggcagtaatcatattgtagattcatttccatcatggatgggtactcttccaaagcttcgaattcttgtgttgagatctaaccaactgtttggcactataagggatcttcgcagtggctaccaacacttcacaagtttgcaaatagttgatttggcctccaactatttctctggtgacttacattctgaatggtttgagaattttatttcaatgatgaataacagcaatgatgaggggcagatattagagcacgaaacaactggatcaataggaacaatacaattaagtaagtaacaaaagaaataaactaagtaacaaactaaataacaaa

SEQ ID NO: 52256 - DNA, 217 bp, Setaria italica
  Peptide Sequence Number=SeqID_118230
ctggagactagcaggatcaggctccagcaggtcgagcatgagctccagagagcacggtcacaggtttgttgcagtcccaaactccgcaacacgtctgatgggtctctgatcacgcatcggatgcgagttcgtatcattcagagcttgacgtgtcatggcgtgttaccgtggtccagggcctgttcgttggagggtgcagcgccgccgggacatgagc

SEQ ID NO: 52257 - DNA, 301 bp, Setaria italica
  Peptide Sequence Number=SeqID_118231
ttaaaaacttaaaaggaagaataaaagtacaaactttagaactaaccaatagaatacaaatagaatagaggctgaaatttctgaagtcattgagactgtcaagcaacaagttaaagatgccaaatttcctgatatagaggttatccgaatgctgtgggatgtgcttatggaggctgttcagtggtctggaaagaaccagcaacaaaattctaattcagcacttcggcaggtgaaagcttgggctgagcttttgaatgcttttgtcacgagtggcagattagaactggaactgatatacaaa

SEQ ID NO: 52258 - DNA, 409 bp, Setaria italica
  Peptide Sequence Number=SeqID_118232
acactatatgaccaagatgtcctagctgaagatactatccttctttggttccgtaaaggttctaacccaaagggcaggcaatcttttgttaaagctctggaaccatttgtcaaatggctagaggaggcagaggaagaagaataagtttgtcctcctggaggctggtcagatcttcctgaagtatttcccaatatttctatggtttgaagtttgtggaggaagttatgtatctttgctgcttgttacaggcgtaagattcatctgagtaatgatagaaaccgtttaaacaattcacttgggtaatgatagcaaccgtttcaccaaaccctcgcaaagtcaacagcgactgtatttgcttcacattatagcatccagcagaagagaaagagagccaggcagcacaaatgag

SEQ ID NO: 52259 - DNA, 213 bp, Setaria italica
  Peptide Sequence Number=SeqID_118233
aacttcaaacattttcttttcattatattcaacaaggctagtcaaaccttccttggtgaaatgcacagcgtgaagcaattttgccttttgtactctatcttcagaaaacattacgcaggaggcctttcttaattaagaatcttgaaaatgttatgcgaaaattcctccaatccctggagttctttgaggaaaatgagaggaagaaacttgcca

SEQ ID NO: 52260 - DNA, 266 bp, Setaria italica
  Peptide Sequence Number=SeqID_118234
ggatgtgcttatggaggctgttcagtggtctggaaagaaccagcaacaaaattctaattcagcacttcggcaggtatccatatcgaaccttttgtttctttagaagaattgtctcttgaaactgtagatttaagtacctaattgtgtacaagtaaaattattctgaacccaatatataatttaagtcccagatggcttaactgttatttcagcccccagattggctgcaaattgtgtagttcagggacccaaggcatgcatgctaa

SEQ ID NO: 52261 - DNA, 379 bp, Setaria italica
  Peptide Sequence Number=SeqID_118235
ctaacccaaagggcaggcaatactttgtttaaagctctggaaccatttgtcaaatggctagaggaggcagaggaagaagaataagtttgtcctcctggaggctggtcagatcttcctgaagtatttcccaatatttctatggtttgaagtttgtggaggaagttatgtatctttgctgcttgttacaggcgtaagatttattttctcattttgtgctgcctggctctctttctcttctgctggatgctataatgtgaagcaaatacagtcgctgttgactttgcgagggtttggtgaaacggttgctaatcaattaacccaaagtagaaattagtttaaaacggtttactaatacaattaactaacaaaaaaaaaaaaa

SEQ ID NO: 52262 - DNA, 337 bp, Setaria italica
  Peptide Sequence Number=SeqID_118236
tagttttagtaaagtttagtaggaaggaagttatgtatctttgctgcttgttacaggcgtaagatttattttctcattttgtgctgcctggctctctttctcttctgctggatgctataatgtgaagcaaatacagtcgctgttgactttgcgagggtttggtgaaacggttgctatcattacccaagtgaattgtttaaacggtttctatcattactcagatgaatcttttaagtcgctacagtatgttgttatttaaacggtttctatcattactcagatgaatcttttaagtcgctacagtatgttgttattttcccttttttatcaaaaaagg

SEQ ID NO: 52263 - DNA, 189 bp, Setaria italica
  Peptide Sequence Number=SeqID_118237
atttctatggtttgaagtttgtggaggaagttatgtatctttgctgcttgttacaggcagcaaagatacataacttcctccacaaacttcaaaccatagaaatattgggaaatacttcaggaagatctgaccagcctccaggagggacaaaccttattcttcttcctctgcctcctctagccatttgac

SEQ ID NO: 52264 - DNA, 407 bp, Setaria italica
  Peptide Sequence Number=SeqID_118238
ttaataaaaactaggaaaggaatagggtagaaagaaattagacaaaataggaaggtaggaaaaagttaataagaagggatggggaatctgccacagttaacatggacagagaaattagtaatgctctcagcaatataacatctgatgtcaataaaaatgtattcccttatggtctacaaaagccttttcctggaaattgtctcactcttatgactgcaactggagctaaaggtggcgatgtcaacatgtatcaaatatcatcattgctagggcagcaagagttagaaggaaaacgtgttccgcggatggtttctgggaagactttaccgtgctttctgccatgggatacttcttcaagggctggtggtttcattagtgatcgatttttaactggtctgcgcctcaag

SEQ ID NO: 52265 - DNA, 404 bp, Setaria italica
  Peptide Sequence Number=SeqID_118239
cattgccataatctcttggtctcactgttgaggatgatattgtgatgcaaatctgtttttgagtttgaatgcatctctgctgatacagcacttcaatatcagataagatgatcgaaattttatcatacttgtatcatcctttatctaaggagttttgtggtttagcacatatggttcctttttgctctgggcctatgactgatgctaatttttcattcaagtacagaagttattattggttttgatattgtaattgatgaagacattataatttcttctttcagtttcatggttttacttgtggggtggatgacctgctactatgccaaaaagccgatgaagcgagaaggtcaattatcagtgaaagtgacaagttactagttgtaaaaagtccctacggtact

SEQ ID NO: 52266 - DNA, 387 bp, Setaria italica
  Peptide Sequence Number=SeqID_118240
aaaggccataagcagaatcagctgttatcaaaacctaatggctacattactacactgcctaagaagttggttgctgaagcaaaagagttccttaagctcttaaaggaaaagaaaagcagtgacattaagaagggactaatgtgtgacattaagaagaagggactaatgaagttactgaaagtcaaatacctatatagtcttgtagatcctggcgaggctgttggtgtggttgctgctcagtcaataggagaaccttcaacaccaaatacctatatagtcttgtagtatcctggcgaggctggttggtgtggttgctgctcagtcaataggagaaccttcaacacagatgacgctcaacacttttcatcttgctggaagggtgagatg

SEQ ID NO: 52267 - DNA, 263 bp, Setaria italica
  Peptide Sequence Number=SeqID_118241
ggtgctgtcatgtctttctccactgggcttgccaatatcagcttaaagcataatagtgtaggtttctatcagatggctaagatagctgtaactccaacaatagttgtagcagaattcattcttttccagaaaaaggtttctgttcgaaaggtaaatatcttaggaactttatggttctaaactgttccatgcttcagttgatctgcttgttaacacagaattttaaatcgattgaaatgttaaacaattcaagaaagatatta

SEQ ID NO: 52268 - DNA, 251 bp, Setaria italica
  Peptide Sequence Number=SeqID_118242
cagattcgctattgcgagttccatggaaggtcaatcgtcttcctcggtggctagtaggcggaagaggctagagctcccgctcatacatgtactttttgcaagcggcgcacaatccttgagttggaggttcagaccgacgaaaaaggcaaccgtgggcacatcttttacaaatgtcgtaatcacaaggtgtctctgatctcgttttgtactatggttggcatcgagatgatactgggaggaggattatgtcg

SEQ ID NO: 52269 - DNA, 226 bp, Setaria italica
  Peptide Sequence Number=SeqID_118243
actacattactcctgatctggttgtagatttctgtcatgtgcagtttcaccaaatatcaaaagacaaggtccactgtgaaggagcaaaaccatctgatgcttgtcgccctgagaaactcctccagctatctcctactgaaggtggatggaagggctggggagaaatatcctatgggggccatcagtgcttaaagcgagctctagcatccattacttgcttggacga

SEQ ID NO: 52270 - DNA, 237 bp, Setaria italica
  Peptide Sequence Number=SeqID_118244
cagaaatggattcaataatttctgaagtagaatgaagggccctcggttccatacaagtgactttcaccaccaccaagaacgttatatttcagaagattgaacaccgagaatgtcaatcgaccatagcagtgataatcagcaataaatgaaagaacaagaaggctcagtgagaatctttcttggtcttatttcaactataaccggaaactgttctggtgattgctttttccatatctt

SEQ ID NO: 52271 - DNA, 227 bp, Setaria italica
  Peptide Sequence Number=SeqID_118245
tctatccacctaacttcactgatatagagggtatgaagaacgatgatggatagcgatgccactcactcccaacacaaagaacagaaccaggcccagaatcttcatgatattctaaatgctgatagatctgcaggggagcaccatatgcgaatcaagaggagagacatcacacatctttcattctctctgaggactagtttatagccagcaaccagactcccaccccc

SEQ ID NO: 52272 - DNA, 247 bp, Setaria italica
  Peptide Sequence Number=SeqID_118246
actcactcacttgtcaaagaactctagtcagagaaagtaatattttgttaatgatattgcattttttgttttttggttccatcttttattaggttgaatggaatggaggttcagatactatggatgaaatacttgctaggatacaacaaagggaagaagcagcagtgaagcgtgagcgagccatggcctatgcgttcaaccatcagtggagagcaaggtctgccacaagtctaggaaacttcagcta

SEQ ID NO: 52273 - DNA, 227 bp, Setaria italica
  Peptide Sequence Number=SeqID_118247
gttctacccccccctcccgaaagctggagaggaaggagatccattgcttccgatggctgctcccgtccctgacctccgacctctgccatctccccccaccctgacagcaactcctgatcggattcaggctaggccaccgccctcctctgaacctcagcaagcggacctgaacacaaattgatccctgcggtgcacccctgttgaagccatggggtccgggactggtt

SEQ ID NO: 52274 - DNA, 149 bp, Setaria italica
  Peptide Sequence Number=SeqID_118248
tgaaaaagaagagcgtagcagccctctctcaaaatatgttgctactctacaccagagagcacaggacaggatggatgctctggacgagaccaggttggtttcatccgtgtttagctaagttcacgtgttagttccttcatattatctgg

SEQ ID NO: 52275 - DNA, 395 bp, Setaria italica
  Peptide Sequence Number=SeqID_118249
tcgccagccgcctccgccacagtgagtgactgacgagagagttggttggcccgttgaatgctcgcattcatggacgccacctgccgctgctcccggagctgacgcagctctctcctcatcaacccatccatgatccatcaccaccataacagctctcctcctcctttagattcggtgtcgtttccttttgcttaaatctgcaggattcgtcgagttttcttctttttcctttttttcttccttagaaacattcgttcgtgagccaaacagatcgaaggctttcaggctgagggagtcaagaacgctaccattgtcttaccgtgtcccattcctctcgctgcagccaatttttactacccaacaaccaaccaaccaacaagacccttaccggacca

SEQ ID NO: 52276 - DNA, 190 bp, Setaria italica
  Peptide Sequence Number=SeqID_118250
ctacaagttcaacaagaaatataaaatgtacagatgaagattcattggtaattcttgtgattgcagtcgtacatggactcggagatcatgtccatcatgtcccagtacatgccgctcgacagccagaacaacgagaaccagccgctgcggcagcacgactcagaagctctcaggtaaatttcactccccg

SEQ ID NO: 52277 - DNA, 271 bp, Setaria italica
  Peptide Sequence Number=SeqID_118251
gaactgcttagtataattgaccagacaaagttaactgtatcaatattttataaagacagtggcacatttatcgttacaaaacaagagccataggatacaagcctgtttcagtggcttactacctacaagtgaacttacttgctgactaagattccaacactcattattgtatcaaagaaataagaattcaattagtcactgattactctttaagtcttaaaagatacccttggtccataaaggctccaccaaatcaagtactggaaatata

SEQ ID NO: 52278 - DNA, 256 bp, Setaria italica
  Peptide Sequence Number=SeqID_118252
ttgtcggaagcggatctgtccctctccctggattgtttcaccccaccagagacaacttcaaaaacagtcggcagatcgttcatcatgctaaacaaacgcttccgttcgttgcggttgagccgcgcggcgtagtagaatgcgacggagacgagccacgagtcggagtggacggcgacgagcgcgagccagtcgcggcggttcatcccgtcgctccgctcccgaccgcatcgcgatcagtcacctcctctccgcctcg

SEQ ID NO: 52279 - DNA, 172 bp, Setaria italica
  Peptide Sequence Number=SeqID_118253
gtcatgtgtttgctttactgagggcttggccctcccaccattgtccatactggacctctccttagattgtctcgcaccagagacaacggtcattccgattgagccgggcggcgtagtagaaggcaacggagaggagccaggagtcggagtggaccgcgacaagcgcgagcca

SEQ ID NO: 52280 - DNA, 328 bp, Setaria italica
  Peptide Sequence Number=SeqID_118254
tagtactaaagttattaacctgccaagaagattgatcttgactatgctagttggcttggtcaaaagaaggtaagcatacttctcaaacaactgaaccacaattatgaagtaattataccatcattcttatccatatgcattggtagggctctttgatattgttacaagataatctagttaatctcagcaatagaaaataaggctgctgcagtttgtcaagttgaaagtgcatgcatgattctagctgaaccagatttggtgacaatctttttagctttatgcttgcaatgtgtatggatgctatctgtttgtcttgttcttgttactc

SEQ ID NO: 52281 - DNA, 251 bp, Setaria italica
  Peptide Sequence Number=SeqID_118255
accggagggaggctagaccggccgacggagagatcgatcgatgagaggagagggcgtgatatgcggcggatcggcgcgtaccttcttgccgcggatgacggcgccgggctcgccttggatgaccatgtacttggtggggccgaggaagaggccggtcggggccaggaacccgggctcgtcgaagtccttcatgatgttggccatctcctctggcttgaactgggtggagggcacgccgatcacacacacag

SEQ ID NO: 52282 - DNA, 228 bp, Setaria italica
  Peptide Sequence Number=SeqID_118256
gggttctatagtcctccaaggatgatttaacatttgctggatcaattttagttgtactccttccatctttccatgcatatacgctacctgtgccttgcattcagtatctgtggtacaaggagcaggagaagctctcccacagatactgaatgcaagatcctacaagttgactgccacagcagttggaattttcgtgatgggttaaatcatccttggaggactatagaa

SEQ ID NO: 52283 - DNA, 488 bp, Setaria italica
  Peptide Sequence Number=SeqID_118257
caaaccctgttcgttatattcatatcctttccgaccagatgtgtaaaatcaataaggcggcttttcattatcaaaggtataacaattagaattttggggaccacgatgatagcagtggctggcacatgcacgtagatagctgccagtgccaacaaaactgtgatcaatagatgaatggtatgcgtaggacaggaagccacaggactcatggcagaaccgtcgtttgggtgtaatcggcgattcccgctgcggggtcgggcggccgaatctccgagggcgggcgggcgtcggcgtgggagagcaatggggagcgggagagcgcgtttatcctggaccggctccgctcgtcggttcgaattttcccttttcagaaggtgagaagggggccgtcgccgcgtcggccggcgaacggggccggtgcgacttagaccgacttagacgaccggggaacgtagtagggaccccgaacgaacggaattaggaataga

SEQ ID NO: 52284 - DNA, 408 bp, Setaria italica
  Peptide Sequence Number=SeqID_118258
aatcttatcccaataccggtgaaacttcactgtgctcaattgcagctaagctgaagtcactaattaggatcttttttacctgtcatgtagttatcccatattctatatgattaagctaaaattcataagagcgacttagtggatagattatttgcgtgaacacggttaaattccacatttcgcattagcatgggcttatatagataacctaaagcttaatgctgaccaaacatttgcatctcattaaatttgaacattttgacaaaatcatacctaaaaccatgatggagttgctcaaatcccagctgagtcaatccattataaacaatttctgatgaccggggatggaatcccacagtgaaacccttgaatactcttggaccactttagaacaaggaatagcaagtt

SEQ ID NO: 52285 - DNA, 201 bp, Setaria italica
  Peptide Sequence Number=SeqID_118259
cctatcccctgtgtgccttgcctatcccctttgcgtgtctcaggcactgactttttccaacacgatcagatgcaaagattgcaccaaagaacactgcctgaagcatagattcgggcctgatcacaagtgcccaggaccaagaaaagtggattcgggcttcccctttgtaaatatgctaaggagaagtcagaaagtggagac

SEQ ID NO: 52286 - DNA, 429 bp, Setaria italica
  Peptide Sequence Number=SeqID_118260
cacatgctccaggaccggtaccagattggtcctgatcagattgaggctttgtatcagtatgctaaatttcagtttgagtgtggtaactactcgggggctgctgactacctgtaccagtatcgtgctctgtgcaccaacagtgagaggagtgtgagtgccctttggggaaagcttgcagcagaaattctgatgcagaactgggatgtagctttggaagaactcaaccgcttgaaggaaataattgattcgaagaacttctcatcacctcttaatcagctccagaacaggatatggctgatgcattgggctcttttcatcttcttcaaccattgagaatggtagaaatgggatcattgatctgttcttccaggacaggagcagcatagctacaaggatcccataactgaatttctggaatgcttatatgtc

SEQ ID NO: 52287 - DNA, 348 bp, Setaria italica
  misc_feature (295)..(295): n is a, c, g, or t
  Peptide Sequence Number=SeqID_118261
aaagaaaggaaaatttacgtacaactagtaccctttgaagaagaatagaagttccttagaaaatgctcgtctgtttattttcgagacttactgccgtattcatcggtgcattgatatcagcatgctttcgcagaagctgaacatgagctacgatgaggcagagttgtggataatgaacttggttaggagctcaaaactggatgcaaggatcgattcagtgtcaggaacccttatcatgacgaccaatcacgtcaatgtgcatgagcagattatcgagagcttgaagggccttaanatgcggacctacatgctagcaaagacatcgtggagccagctcaagcaacacag

SEQ ID NO: 52288 - DNA, 280 bp, Setaria italica
  Peptide Sequence Number=SeqID_118262
ttgggttaggttagttagttctttcgttcggttcttacctagtcctattggtcggtagtctacgtaccttcaccgcgctgctggcggcgcagatggaccgccacctggtgttcccgctcctggagttcctgcaggagcggcagttctactcggagccggagatcctggaggccaagatccgcctcctcagcggcaccaacatggtcgactacgccatggacatccacaagtccctccacggcaccgacgacgtccccgaggcatggtcaggcgccgcacc

SEQ ID NO: 52289 - DNA, 210 bp, Setaria italica
  misc_feature (25)..(25): n is a, c, g, or t
  Peptide Sequence Number=SeqID_118263
cctatcccctgtgtgccttgcctanccccttttgcgtatctcagtgcttaaagagctgattaaagtaattcagcaggagcagcatagctacaaggatcccataactgaatttctggaatgcttatatgtcaactatgattttgatggtgctcagctgaaactcatggagtgcgagcaggttatattgaatgatcctttcctgggaaagcg

SEQ ID NO: 52290 - DNA, 322 bp, Setaria italica
  Peptide Sequence Number=SeqID_118264
taaaaaaacctttaaaaaaaacctaaaaaagggaaaaaaagaaacgaacaaattaagaaagaaaggaaaatttacgtacaactagtccctttgagagatgagttccttgaaaatgctcgtctgtttattttcgagacttactgccgtattcatcggtgcattgatatcagcatgctttcgcagaagctgaacatgagctacgatgaggcagagttgtggataatgaacttggttaggagctcaaaactggatgcaaggatcgattcagtgtcaggaacccttatcatgacgaccaatcacgtcaatgtgcatgagcagatta

SEQ ID NO: 52291 - DNA, 188 bp, Setaria italica
  Peptide Sequence Number=SeqID_118265
caactcggtgaagcttgcagagtctacagttttgaggtgccaaggattagttccttgaaaatgctcgtctgtttatttcgagacttactgccgtattcatcggtgcattgatatcagcatgctttcgcagaagctgaacatgagctacgatgaggcagagttgtggataatgaacttggttaggagct

SEQ ID NO: 52292 - DNA, 270 bp, Setaria italica
  Peptide Sequence Number=SeqID_118266
gcaagcattacatttttcttacaaaaagttaaagaaacaagtgagccctattacttgccctaagctccagtttggtctcttctgcacttactggccatacattttgaatgagtttgattctaaagcgtgtggtcaaaagtactcgaaatataccagcattgcatttgattaaagaatataattacacatgcctttagggtcacggatctgtttagctaatcagaagtcacagttttcttgttacctaaccgagccctgcacctttacgta

SEQ ID NO: 52293 - DNA, 168 bp, Setaria italica
  Peptide Sequence Number=SeqID_118267
aaactcattcaaatgtatggtcaaagtactcgaaatataccagcattgcatttgattaaagaatataattacacatgcctttagggtcacggatctgattagctaaacagatccgtgattctaaagcgtgtggtcaaaagtactcgaaatataccagcattgcatttg

SEQ ID NO: 52294 - DNA, 469 bp, Setaria italica
  Peptide Sequence Number=SeqID_118268
gaccagatgccaatctggcacctcaaaatgctcttttcctcatccataagaagcgcagccactggcatccgcaacacctgaatcacaaaatatgatttctaagaattggcacaagttacttataaggaagaagaataaagtgcaggatgccattccagcagagagttgccaagcccaaggtctagcacatcaatattcctaaatgttttgggaagcaataagcaatcagattgcaagttaccaattatagatcatagggacaaaagatggtacagtcacatgactaaagaaacaatagccaaagctagagtgtaaaaatcattgctacatacattgtgaagatcatcttacatatagggcacccttaaccgcagcacagcgacagaaagcttgaggcagctcaccatgcccatacataggataaatgaaagcaccctctgcattagcaaatctggtaataggttagaaa

SEQ ID NO: 52295 - DNA, 227 bp, Setaria italica
  misc_feature (219)..(219): n is a, c, g, or t
  Peptide Sequence Number=SeqID_118269
cggaatcagagtcatcatcgccatgtacaggagctgaacttctaggcaagaattcttcatcaggatagatatctccgaataacttttctgtcgctgtgctgcggttaagggtgccctatatgtgttgcggatgccagtggctgcacttcttatggatgaggaaaagaagcattttgtaggtgccagattggcatctggtcaggatatttcttgcaaacngttgataa

SEQ ID NO: 52296 - DNA, 331 bp, Setaria italica
  Peptide Sequence Number=SeqID_118270
tcttcttaagtaaagtattggtttttacttccgtcggtaattctagtagttctattctattcgtcctattgttacaggagctgaatttctaggcaagaattcttcatcaggatagatatctgcgaataacttttttgtcgattcaagtatgttcctgtaatccaggttttcatcaggcatggggcatgaccatgaagaaccagatgttgatgttccctgtgtgatctcttgaacatacaccacagctccagattagtgttggcttcatatcatcggtgctttcactggttgactcaaggtggccttcgaagccatctgaatcctgtggctg

SEQ ID NO: 52297 - DNA, 386 bp, Setaria italica
  Peptide Sequence Number=SeqID_118271
aagggatggattgagccaaacagcactgctcctgcaaaacccggcacaggtgttactgtggcagttaaaagtttaaagcaagatgcccttcaaggtcatagagaatgggtgttgcatcataaacaccttgttaagctgattggatactgtattgaggatgatcaaaggttacctggtatatgaattcatggcacgaggaagccttgaaaatcatctattcagaagggctcttcccctaccttggccaaacagaatgaagattgctctaggtgctgcaaaaggcctagccttcctccacggaggtcccaaaccagttatttacagggattttaagacatcgaacattcttcttgatgcggagtacaatgcaaactgtctgattcggt

SEQ ID NO: 52298 - DNA, 264 bp, Setaria italica
  Peptide Sequence Number=SeqID_118272
ttggcttcttgttcttctccatttttttttcatttttggctaatataatgcgttttgggacatcaaactagttctaaatctggacacggacgcagcacacgtcgtgtttcgggatgaatcgaggacgccattgactcattaaatctgctgtatcggattaaagaggaggagcgagggggttaatttaccttgttgggattggacgccgatgcggccgcctccgagagcagggaggcgtgcctggcggcgggcgggatgagggag

SEQ ID NO: 52299 - DNA, 460 bp, Setaria italica
  Peptide Sequence Number=SeqID_118273
ttgttgttagtacctaattgggtcggagatttgcaagcagagcagctgggtcgcgggacacggggatgcccctcttgtttgctcccttgaactggaacttgggtgctaccagagagaatatcggtgccacagccccaacaataggatgggcaggtttcacacgcagagccggtgatgtgaggatgatcccctccagtttctctctgatatgagggtacaaagatgccatttttcaaccaggctactttgttaaggttttgcaccatttctctgcccgtcagggtatccattgttcacaggcccagagaagtagggtcagtgtctaaaccttgcctaaatacggtagataaatactgttcaatttcataactgcgtaccttcaagactacagctccaccggtagagtgacccagaagaaaacaagggacccctggattctccatcataattttgtcaagaa

SEQ ID NO: 52300 - DNA, 362 bp, Setaria italica
  Peptide Sequence Number=SeqID_118274
aacgggatggtgaccttcttcaggttgtgcagaaggtaggaggagatgcgcaggatctcatggccgtccgaaccctgatcgggcctgtgtagaccaatgggtcggagtattttgcaagcagagcagctgggtcgcgggacacggggatgcccctcttgtttgctcccttgaactggaacttgggtgctaccagagagaatatcggtgccacagccccaacaataggatgggcaggtttcacacgcagagccggtgatgtgaggatgatcccctccagtttctctctgatatgagggtacaaagatgcctgccaagttgtaagctagtgatgagcacaatgaaagaagaaacggacatcaaac

SEQ ID NO: 52301 - DNA, 246 bp, Setaria italica
  Peptide Sequence Number=SeqID_118275
atcgtgtgatatcgatgagcagttcaatccattatgtgtattaaggaatgtgtagaagctaacagagggcaatgccatactattcaattgtgcacggttcctcaggtcctcaagaattgattgttcaacttcaataggcctgaaacaaatacataaagattttccatacgcgcatatctcaaggttgattactttgacagataaaggtatgaacacaaagtaaaccagcaacaacctccaaactat

SEQ ID NO: 52302 - DNA, 407 bp, Setaria italica
  Peptide Sequence Number=SeqID_118276
aaatcgcggacttcttcctcgtcgacacgtcgccgttctacctcagtactggaacagcagcaagtacgactggagaaatgtttctcctcgcgacacctacatcgaaacctcctcaaggtatacactgcacactgccttctgttatatgatatacgctttctgaatcttgatctcatgtatataaaacttctgtcattgacaggatctggacgatgcgctgacgctatcggaggcgccctggaagattgtcgtcggccacaccccatcagcagcggctgcgagcatgggaacaccacagagctccagcagctgctccgaccaatcctcgaggcacgcggagttgacatgtacgtgaacggccatgaccactgcctgcagcacatcagcagcaggagcagccctgtgca

SEQ ID NO: 52303 - DNA, 277 bp, Setaria italica
  Peptide Sequence Number=SeqID_118277
ggtagccaggaaaggaagtataccaaataagatctctgctagtaataaagctcatattcgaagttgagttcacatctgatttagtttccgagtgactttgtgaacttctagacgtggaagtatcactcgcacgaatcttcgaaacatcaacctgtgtaatattctgcatatctatatctgtttcatgtattatttgctggttcacaatcctcttcttatctcttgtaacatgaattatattctgtaaggaagtagacctgtcatcaatatctgcctg

SEQ ID NO: 52304 - DNA, 205 bp, Setaria italica
  Peptide Sequence Number=SeqID_118278
gcgccgaggttggtagggagggcggtgcggcaggaggtgtgggagtacgaggggggtgagtggccgcgcaggaggtgtttgacggaatgccacgatgattgggaggacgaagatgactgtgatcatgatcagttggaggttgtgagtttagttaggaggagctgagacacgcaacggggataggcaaggcacacgaggggatagg

SEQ ID NO: 52305 - DNA, 249 bp, Setaria italica
  Peptide Sequence Number=SeqID_118279
acaaaatgtcgatgcaattacagtcataggataaagcagggcctctcactcccagagaaattatgatgaacccctaaccatggcactattactagcagagatcttattttggtatacttccttttcctggctccttgtgctattaatgaagctcatattcgaagttgagttcacatctgatttagtttccgagtgactttgtgaacttctagacgtggaagtatcactcgcacgaatcttcgaaacatc

SEQ ID NO: 52306 - DNA, 437 bp, Setaria italica
  misc_feature (79)..(79): n is a, c, g, or t
  Peptide Sequence Number=SeqID_118280
gtgacatctaccaaattgggtcatgctatcatctctggtattcttttgggtgattgcccacatcagatgttttattctntcccttgatatatgtagatcatccttagaacttctagccaacaagtctccctcagatctacctaattgaggttcaataacagtttctgatatttgcaaaccctgtgtactagagttaaaatatccctcctctgacgttgaagccactccaggttctgattctccactgtgcgactttatcaactgctgatcttttgttttaattttcttccttgtgccatcattatcacgttcctgactagaaagccaaccctctgtactctgagaattactggatgaacttttcttaactgtatttgttctacttagtaattacttaaggttaagttaagtttacttaacctttaacgttttagtta

SEQ ID NO: 52307 - DNA, 207 bp, Setaria italica
  Peptide Sequence Number=SeqID_118281
agtatcatcctcagttataaccttgacatcttgcatacttgtcctagcatctgttatcctgacaaaccgtgcatcatcatcatcaagggtgaggtggcatgacaatgtagaccaacgaactgagcagacatctgaagagagaaagcgacgtcattcagtgggttggtcaaatgatgagagagatacgcatgattatgatgatgcacg

SEQ ID NO: 52308 - DNA, 329 bp, Setaria italica
  Peptide Sequence Number=SeqID_118282
ttaaaagattatagtggtgacatatcaaaacttgatccagcagagagctttctgaaagacgtacttgatgttccttttgccttcaaaagagtagatgcattgctgtacagagcaaactttgatactgaagtgaattatttaaagaattcttttggtaccatggaggtaaacagctatgatgattcaacctttacattttaatattataacacctcctctaatactaactagtatgcttcgttttttttattaaataaatgtatgtccattcttcagaaaataagtgccatattcttggttcctaccacaagtgtgttacttagtttgtt

SEQ ID NO: 52309 - DNA, 344 bp, Setaria italica
  Peptide Sequence Number=SeqID_118283
tactagacgaaaaggaagtttttacaactgaacagaagctttctcttcatacatgtcatccccgtgcttatgggtaacttctgtggtaactaaaatattgcatgcatatgttacttagtattgcttaggtccttgaggatgaacctcttttctactactttagaaaattgcatagctacttctctgtgattaatctgtcatgtgtgcctttcctgaagaaagttcacaagcctctgaagtctataagccactacaagacccattaatttcccgctgtgttgaaattattggcatgaatgaagagaaagcttctgtcagtgaaaaactagcatttgctgcgaagg

SEQ ID NO: 52310 - DNA, 200 bp, Setaria italica
  Peptide Sequence Number=SeqID_118284
tcgctattttagttatagtagtattgaagggtcacctccttttcccttgtagaacatacatgtcatccccgtgcttatgggtaacttctgtggtaactaaaatattgcatgcatatgttacttagtattgcttaggtccttgaggatgaaccttcttttctactactttaagaaaattgcatagctacttctctgtgatt

SEQ ID NO: 52311 - DNA, 223 bp, Setaria italica
  Peptide Sequence Number=SeqID_118285
gtccaaaccagtcatttccaagtctatccacaccaatggcatcctgtaatcacttgatgatggtcggtacagaaagtttggatttgttcgctgcgatgtccattggagaaagagcttgtcttgctagatagcacaatttactgaacttagtctaaatttgattaccatttggttgacacccaaatgatcaaaagttacacattggcagctaaaaaaaaaaaaa

SEQ ID NO: 52312 - DNA, 250 bp, Setaria italica
  Peptide Sequence Number=SeqID_118286
agtctgagacgcctactgccggcgaagcacatgccggacttggagaagggcatggatactcacgcaggtcaagttcaagcgatggccgaagatgaagaacaagaacatctgattcttaaggatctgagatatcaccaggtaatttcctctttagttcatgcgttcacaaggcctcactcctccccctccttttcctttcctggttctccctgtgtgatttcacaatttgattcgacgtattctttgtttt

SEQ ID NO: 52313 - DNA, 277 bp, Setaria italica
  misc_feature (265)..(265): n is a, c, g, or t
  Peptide Sequence Number=SeqID_118287
tcgatgtcatcgatcaggggctaaaatttaagggaggaaccaaacacccctaagtttttctcctttctcaattattgggtttaattgctaagttggttaagtgcattctatctttttcagattgtggtagacgcaatcaccggcatggacttgctgatttctgatacgtcactcggtattaagaccccacgaaatggacggaccgatcatcttaagtctgctgcccgttggcttcttgctgagccattacattcaagtgttttcngttctctttcgc

SEQ ID NO: 52314 - DNA, 322 bp, Setaria italica
  Peptide Sequence Number=SeqID_118288
agggaagaatacgaagggacgaacctgtccgggttcaagtgcgggctcgctcatttcttcctgcagcacacaagcgcttccctgaccatcaatgagaactatgactctgacgtgcaggctgacactgaaactttccttaacagaattgtcccagagggccacaatgctccttggaagcacactatggaaggacctgatgacatgccagcacatattaaatcgtcaatgtttggttgtgccctgacgattcctataactgatggacgtctcaatatgggcacttggcagggtatatggctgtgcgaacaccgtgatcatgcca

SEQ ID NO: 52315 - DNA, 202 bp, Setaria italica
  Peptide Sequence Number=SeqID_118289
taaaaaccaacgggggtcaacaatagtacgcagcatgaatcgactaaaagtaagcgatcgagcataagtgaacctgtatattgaagtttcaattcaattgattgatcattcattagattcaaccaaaatctagaaggttagatgacgcatgtcatgctgcctgcgtagtttacctttgatctgtttatgattaccttatcag

SEQ ID NO: 52316 - DNA, 303 bp, Setaria italica
  Peptide Sequence Number=SeqID_118290
acagcagagaagggaatcgacgactcgtaaaatttgacagcgatgactgcaagaataaagcccaatggttgaaaacataagagttcttacatggcttgcattcttcctctgctcggccgcgccgccgggcacggcgagccggtactcgtgcatgacccaaccggtccgcgacgacgacggctcgctgcgatggaaggcgagcgccgtcttgacgcccacgagcagctgccgcttgccgccgcactgcaggaacacaggcttctccttccccgtggccttccagtacccgctgcctagtcttct

SEQ ID NO: 52317 - DNA, 399 bp, Setaria italica
  Peptide Sequence Number=SeqID_118291
gtctgttgtcactccattgtttattattaagtcattgcagaagttacaatgtaaatgcacacaccgaagggagtagctgatgttatttactcttttcaggttgcaaagagaagagagaagctgcttaattacatgcttttcctgagactcactccaacactgcccaatactttcatcaattttgcttcacctatagtggatgtgccctaccatatcttcttcttagcgacagccactggcctcatcccagctgcctatgtgactgtcaaggctggaattgctttgagcgacctgagatcgttgaacgacctatacgatccgaagtcgattgcggtgctgttcctgatcgggcttgtttcggtgacgccaacattgctgggcaagaacgagacgcgaggc

SEQ ID NO: 52318 - DNA, 460 bp, Setaria italica
  Peptide Sequence Number=SeqID_118292
acggaatgttttccattgcgctcttgttttcttgttttagcatctgcatacaacgaactcatatgagaaatccttattaccaccactatagaacaaggtccatatcattgtctatgcataccatttcaaactctgagttagacttccaaggatctacgtacaagtattgacatgtgccataaagccgaactaggcaatcatacttgtctttcttcttaggtcttgctaccaacacatgattcatcaatgacctgggctggccaccatgaagatccatcaagcttaacccatgttacatctcccaaacaaaaattgtgccgtaacttaatttctggaacccgagaagttggtgggcttccatcaacatcacgatctttctgtacactttcattcaccataacgatcagtgcaaacccctgtcggacgatgttcgtcgccggcgaagcgcccgtcgctcgac

SEQ ID NO: 52319 - DNA, 485 bp, Setaria italica
  Peptide Sequence Number=SeqID_118293
attgtggcttcaaaccttgttttctgacttttctagacgagttcttctttgaggtccctttggtggaaccaccttttgagttgacagcttcctcatcataaacactgggcgagttatcacaagacagctccttctcaatcacctcacggaatgtttccattgcgctcttgttttcttgttttagcatctgcatacaacgaactcatatgagaaatccttattaccaccactatagaacaaggtccatatcattgtctatgcataccatttcaaactctgagttagacttccaaggatctacgtacaagctgaaagttaataacagaaacaaacaataaaagaatgtcacaaagagtatcattacagaaaagaaaagaaaggactaatgtgtcataggatcccttactattgacatgtgccataaagccgaactaggcaatcatacttgtctttcttcttaggcttgctaccaacacatgattcat

SEQ ID NO: 52320 - DNA, 388 bp, Setaria italica
  Peptide Sequence Number=SeqID_118294
caaaagcttgacacgctcgattggagcagcagctgtcttggagacagcagcagaaactccacccatcagaaagtcgatcataaatccagaaaaacctttctcttttggggcagaagcgaagacaggggatggtgccatgatggaggacagtccaacagttgcattcatcccatggtatgacctcaggggcacattgtaagcagaatacgcattgttgaatacagggttattcatggcagaataagaagcgattctgctcaacaatacagactgcccatggaccttctggaccacagatgaagaacgtagttcatccgccattttcacaagtcagaagcgatctgtcaatcatgcatataaacatgcataacataccataagtaaatac

SEQ ID NO: 52321 - DNA, 356 bp, Setaria italica
  misc_feature (214)..(214): n is a, c, g, or t
  Peptide Sequence Number=SeqID_118295
tactaaagtaagtaatttactaagtaaatttgtttgtatttggtggttgcaactgctctgtccctgccgaatggagatccggatggagcaatcaggccgagactttgcatgatcctgatctggcgcgcgctaagttgccccggtgtcttcaccactgcttccctgctctggtgaaatctcgtcaaattagcgtgtaaaatttgagatcgtaacnggagttgggaattgtggagggtgggcaacagggtctgacttacatgggtcgtatcggtattccctttcttggtttctggacttgttgcttgcaaggagtcctcagttgcttcatctctacgcctttgcctgacattgcttga

SEQ ID NO: 52322 - DNA, 450 bp, Setaria italica
  Peptide Sequence Number=SeqID_118296
gcgtggtaagatgtgcttcattctattattcctgtagtttttccagaagaaatattgctgcctgtgagcaagctccttgcttgctggatgtgccattgcattgcggaaattggcattttggaggagctcaagaaagaaaaggcagtgtggatacattatgtatttgatatactccggacgctgccaatattttaggtacttgaggtatccgataaatgcctcatcctcaaaatatctattctgtgctagatctgctcgagaaaaaaagaaggggttacaaatctttatgtggtacaaagcacaatactcatggaacaagtaaattcaagtgaaaaaggacaacaatgaaacgtgaagcacacaaaatgattagattcaagcaataccaactaaaaataccaacagccttaacaattaacatagcagtcgtgcttcttggtgagatccgct

SEQ ID NO: 52323 - DNA, 219 bp, Setaria italica
  Peptide Sequence Number=SeqID_118297
ttaagtaacctttaagaaataaacaataacaatacggaccacggacactatttttagccgccgccagacccgtacttcttgccaaagacgatcacctggagcttgtcgtatccagcaaggcaccagcaccagcaacagcacggaggatgtttgcaccagcacccttgaagagggacttggtaccttcctttgcgacaatctgcttgaaagcatccaagg

SEQ ID NO: 52324 - DNA, 186 bp, Setaria italica
  Peptide Sequence Number=SeqID_118298
ccggcaccatggccagatcgatcgatcttgcaccacgaagaaattaaccgagccctgtcggatgtccgtcgccgctaggaaaggaagaccgaggccgagagagggaagcaggatgggaaggggagggagggtgctgccgcaccagccggactcgagctgcagctgggcaggggagcgtggagggcg

SEQ ID NO: 52325 - DNA, 178 bp, Setaria italica
  Peptide Sequence Number=SeqID_118299
atatgtcaatagcatagcatagcattacatattgcgtctgaatgtgctgggaaataccatggtagcacctagcagtgtttggaatgtagattagctatctgaaaagaaaccaaacactgctaggtgctaccatggtatttcccagcagtgtttggtttcttttcagatagctaatcta

SEQ ID NO: 52326 - DNA, 264 bp, Setaria italica
  Peptide Sequence Number=SeqID_118300
ttcagttcaaataggtcaaatcgtatgggaggagctaagcgccgccgacttgtagaggaggtttgtctgaaaaattatagttcaacatgtatttaagcattgctactttggcttagtagcagtagatttgtactcaaatattgtgcttttggtaagagcaagtaacctgaatgcataagtcataatagttaaaaaactttatttaactgcagattaatctcatttactatggtaacatatggtgaagcacaccttttattaggc

SEQ ID NO: 52327 - DNA, 240 bp, Setaria italica
  Peptide Sequence Number=SeqID_118301
taaattttgtgctctcagctttaggacatgcatgaaacaactaattcatttctgttccccagatacatgctacatcgccaagcctcctgattactcaaactgcaaagtagcactgccaaagatacagcaataacattaatgtatatctgttgttgtctgatatcatgtgataatgtcattcttctaaactcttaagttggaaaaatattcagctgaacatcaaaagtttactgagaaggg

SEQ ID NO: 52328 - DNA, 302 bp, Setaria italica
  Peptide Sequence Number=SeqID_118302
gcccgtatgagaggttgtttcttataaattagctcaacaccatacttctgcttgtagtaatcagcgtacgagctgtactccagtggacccaggtagccctctttcctggggaatgaattttctgcgttcatgttgtagcaaatactgtccacgtagaacctctttcctgagtgggctgccgttacaaccattccagcaagatctttagcatcccaaaatgaatctgccatgaacaacttgccttggttttgacaaccattccagcaagatctttagcatccactagtgcgacttgtagttct

SEQ ID NO: 52329 - DNA, 405 bp, Setaria italica
  misc_feature (72)..(72): n is a, c, g, or t
  Peptide Sequence Number=SeqID_118303
gcatagagacccatcttaactgaaggttttccacttcttttacctttttatggcaagcctgaaacagttatntggggatgatgcaaagagtgatcgcaagatgatatagagtggggacgagtgttcacagtaccaaatcttctgtatttttctgtaatttgtgttttactgtcacaagatgaagtcatgcatgtctgctgttgcatcagtgctacattttatcagatagaatgagtcctgctgtagtaattctccctcgcatcattttaatcttatgaacttttgatttacctgtctggtatcaggatgcacttatttactggtcatcttcaaggtgccttcctcacagagacaagcttgcaaaagatttcctcacattggtgccacaccattcctttggcagat

SEQ ID NO: 52330 - DNA, 233 bp, Setaria italica
  Peptide Sequence Number=SeqID_118304
aagtagtactccgaactcaagtctagcgacttgtggtgttctgggtaactttggcagggcccgtgaaatgagccttgacacgctgccttgccgactctgtgaactagttagcaagagaggtggtaagagtgcggatgcattgtgattggcggtaggtgtcctgacttagatactccctctccatctactttaacgctagctctgtctgatataacctttttcttcgtttacac

SEQ ID NO: 52331 - DNA, 182 bp, Setaria italica
  Peptide Sequence Number=SeqID_118305
agtggctgtcataagaacttaaaataatttcatcatttgtatccagcagttttcgtgcaattgccaggcactaccaataaaaaacatggttatatattgcaaactataccatccaaggcattcccagtaaagtaagaattacgttctcttttcaaactaagaattgcaggacatatttgtgt

SEQ ID NO: 52332 - DNA, 411 bp, Setaria italica
  Peptide Sequence Number=SeqID_118306
aaatgatgattctggtcccatactagctttgacaggagcaatcaagggatcctttttagtaggagtatgatatagcacattttcttcttgcggtcgtgaactcgacgcatgaatatatgaaatgggagaacctgaatcaagtgggagatagcagcttttatagtggtaatgcaaatacctccaggagccacaacaagaaaagacaatatgtttcagatcatactcaggtgagtgcacaaagagtttagagttcaatgtactgtaacttgcagcctggtttacttttttgtgcaatttctcgttgcttataccacagcaaattgtcatatttctcatgtctagatgtttcagagagagagagagagatttaaattgtttagtcccaagcaatttgcatcctaccctaacttg

SEQ ID NO: 52333 - DNA, 366 bp, Setaria italica
  Peptide Sequence Number=SeqID_118307
acggacgggaaataagaaacccccgtacttagaaaccaacggacaagacgaccgtctccggcgggatgaggcccagcttgccgaagacctccggagcgatggcgcccgcagcgcccagcatggcgaagcgcccgttgatcacctccccgtaggccagccacttgggctcgatgaagccgccggtgccctccgggtcggagaggcccagcgggtcgaaaccgtagtcgccgggcagcgtgccatcgaggtaggagagggattggcttggacgcgaaccacagctgcctgtcagcgccttgcttggccggagggctggagctggccctgacgacgaagggcgccttcctcgccggacgaccgggagac

SEQ ID NO: 52334 - DNA, 261 bp, Setaria italica
  Peptide Sequence Number=SeqID_118308
gcggcgcggcgcgtcgtccgaccggcgggacgcgcgtaacgggaggcctcctcgggctcgaaccgatagatgcaactgcaagcacgcggacgacgtacctgggcctcccctggaagcggcggcgggctcctccgctcgaggccggcgtccatgccggcaggcggcagcgtccgcttccgctggcctctcctttgagggtcacgacacggcagatttgggtgggcggagaggacgggagattgggagagcgagcgagagcga

SEQ ID NO: 52335 - DNA, 196 bp, Setaria italica
  Peptide Sequence Number=SeqID_118309
ttggaagcactgtccccatggagaacgtcctggaggtacacgaccaggttcaggtagaccccgtagaaagctacgacttcgaagaacaccaggcacaacactatattggacgccctggagtagagattactactatccttgcccagttcctgttcctgagctcccagcagtggcactaggctctgacctgaactag

SEQ ID NO: 52336 - DNA, 360 bp, Setaria italica
  Peptide Sequence Number=SeqID_118310
atgtcgggggtccacagtctccatgacctcattgctcgccgtcttcgataggatcaagtgatggagattgcactcgttgtccactggcttcttgccagtcagcagctccagcagaacaattgtccattagctgtagacatcagacttttcgtaagggctttcccatcgacatgaaacgcgtgctcgcgctccccggcgcctgcggctcgtccaacaccgtcttcagcaagtgccacatttccgcgggtcctcctgccgaagcacctggagcgtctaccggggggatcaccgagcggcggagcgaccgcgtccccgccgaaagccgcggcgagctctcggatgacggcaaccgccctcgta

SEQ ID NO: 52337 - DNA, 351 bp, Setaria italica
  Peptide Sequence Number=SeqID_118311
tactacaactacaaagttttacaagtcatcctcattatatcctcgtacgcatgaagggccatgttcatatgaagaattaccagcttggggggaccattgctcactggtttgcttacagtgacatctttgaaaacaggtggacggtgtggcctgcaaacagctactaagatcatcaggaggataacaagtccacccacagcaatgccaagtatcgcagcccttgagattggtgctgcatacaaaaatccagtggaagaaaagaaggaaatttattatgtgaataaagtttacttcgaaacaattcatcaatgcaaaactgttcttacgtttctcttggtggttggtggaacg

SEQ ID NO: 52338 - DNA, 398 bp, Setaria italica
  Peptide Sequence Number=SeqID_118312
ataagtccaaggtgtccaaattgttgatccttgatagctcaataggaatagggccactagaaaatttgatgacagatttaagtatgtcatgcttcaagtttccgcaacgaaagaggaatggtcccatttaacttgttgccataagcattgaagctattgagattcacgcatgaacttagattgtcagggatcggtccctcaaggttgttatttgcgaggttcaagtcaaataagcctgtaagcttcccgagctccggaggaatagacccagtaagttgattatcattcaattctaagtaatgaagcgttgacatatttcctagctcaggcaataggttaacagggtcaataccgcctgagctaggaaatatgtcaacgcttcattacttagaattgaa

SEQ ID NO: 52339 - DNA, 225 bp, Setaria italica
  Peptide Sequence Number=SeqID_118313
atcttccacaaaatgttcttttagtcagctactacttcactatctgcaccctccaccgccgccgcccgaactcttcagacctcttccctactccgtgttctgcgagatggcctcgccgaacttgaggaacagctcggcgtccgaggtgctggtcgagttggcaccggcgcgctctcctgcgccaactcgaccagcacctcgaacttgaggaacagctcggcgtcc

SEQ ID NO: 52340 - DNA, 253 bp, Setaria italica
  Peptide Sequence Number=SeqID_118314
cataatcggcttactacaaaggcattgtagtggaaaaagtgtgtcatgccttccataagaaggaaacttaagatccacctcagaccataccaagatatttgtgcaaatgaataatttttctgaggtacttctaactgcaagatcgctacatcaaaaacagtttagtacatgtaactactgagacatttgcatagatacacagccaaaattcctctccaaaacactgcagacattttctaaagtcgccaagtga

SEQ ID NO: 52341 - DNA, 239 bp, Setaria italica
  Peptide Sequence Number=SeqID_118315
tttgtcaaacaattgtgcagattgcagagacaaagttaacaagtttcagtgtcttcgctgctgctttaccggttcagttgcctgtggtagcattttcctgagctgggacataacaaagttcacagattcttcatctgatagcttctcgatttcgtatgcaaaacttccagctaccatgcataccaggactggatttcctgtggctttgtgaaggttgagaaagtaaccacatgcatttg

SEQ ID NO: 52342 - DNA, 326 bp, Setaria italica
  misc_feature (36)..(36): n is a, c, g, or t
  misc_feature (50)..(50): n is a, c, g, or t
  Peptide Sequence Number=SeqID_118316
tcaaacaatcaaactagcgatagtacaacagttttnaaggcgcaatacanactgcgaagcagctaacattgttaagtgttaaccttctctgctgcttcaggataacacggtgttcaaatagcaacttcctttcctcacagcctggatatctggaagggaaccatgacttcattcatctcctcccctcacaacaatcttcccgacctggaacaggtcagagatgcctagctgcgtcgagagacgccttcggcagtcctctgcggcggcaaatgacctgaaagaaataaagactaccaatagacaactagaacccaagaagttagtaa

SEQ ID NO: 52343 - DNA, 231 bp, Setaria italica
  Peptide Sequence Number=SeqID_118317
atctggaatatatgatgaaagaataaagcatattctgacacggcatacctgatcccagtttttcagagatatattgtccgtgtctgtggcaaaccatgcctccagtctacatatacaccactgcagcacttcatattccaggccctccagcctgcaagtgtaagtgcacaacatcaaagacctgaactcatcaccgtaacatatttaggtgaatcataaatcccacttact

SEQ ID NO: 52344 - DNA, 254 bp, Setaria italica
  Peptide Sequence Number=SeqID_118318
ttacacatattaaagccaataaagacattaaaactgtaactagtatcacatgtttctcacccatctacctgaataagtatatagcaaacgctccattcaggacaattatctgtaatgttttcatctgtcaattaatagttaatttatgagctagaaaagtttgttatcttaacaaccagtgtctagctgaaggggattgcctagtttggctgtcttagcatgcagtggctggctgaaggggactgtcttgtctt

SEQ ID NO: 52345 - DNA, 240 bp, Setaria italica
  Peptide Sequence Number=SeqID_118319
ttttactcaatatttccccaactttcataactatctcctggggaacttgctgaccatttttatcaaatagggcatagctctctaaatcatggtcatacaatacagagttatcaccacttgtgcgatataatctaagcccaagcatcctaatcaatggcgccaaaagaattctcattgcatacaccatgcaaccttaaatgaagcatttgacaaagcacgagcggctgcaatgcctgaaat

SEQ ID NO: 52346 - DNA, 221 bp, Setaria italica
  Peptide Sequence Number=SeqID_118320
aatagatattataagctaattaattggggttcggatctgacaaatcagagtatcacatggttcttctgcacacctgtggttgaggtgaacatcaagatctcgagcgagagctttgatgacaggatcatagccattcaccatgagaccatgtccaccagtaagcacatgttcctgatcccagtttttcagagatatattgtccgtgtctgtggcaaaccatg

SEQ ID NO: 52347 - DNA, 173 bp, Setaria italica
  Peptide Sequence Number=SeqID_118321
caacacataaaatagatattataagctaattaattggggttcgatctgacaatcagagtatcacatggttcttctgcacacctgtggttgaggtgaacatcaagatctcgagcgagagctttgatgacaggatcatagccattcaccatgagaccatgtccaccagtaagcac

SEQ ID NO: 52348 - DNA, 470 bp, Setaria italica
  misc_feature (415)..(415): n is a, c, g, or t
  Peptide Sequence Number=SeqID_118322
ctcagtgtgagtagttatgtttttgagcgaatggctatttaaattgagcactgttgcacaatcaaattttcaggtcaatattgccatggttggaaaatatactggcctatcagattcctacctgtctgttctaaaggctcttctgcatgcatcagttgctatggaaagaaagcttgtagtcgactgggttccttcatgtgatctggaagattcttcagctagagagacccctgaagcccacaaaaaagcatggaaactgctgaagggtgcggatggtatactcgttcctggaggcttcggagatagggggagttcagggcaaaattcttgctgcaaaatatgcacgtgaaaacaacgttccttatctcggcatttgcttaggaatgcaaattgcagtgattgagtttgcccgttnagtcatgaaattacgtggtgcaaatagcacagaatttgacccagctgcaacatcg

SEQ ID NO: 52349 - DNA, 434 bp, Setaria italica
  Peptide Sequence Number=SeqID_118323
tccttaaattgtaattggttgtcttcttgtttggttattgtctagatcattgaactgccctctcacaagttcttcatcggcgcacaattccatcctgaatttaagtcgagaccaggaaaaccatctccacttttcttagggctgatagcagcggcatctgggcaactagaacctttgcttcaacgcagctgcaacaatacgacaaagccaccgactaaagtcccgaaacggaaactgtacccaactgtgcctgtgaagaatccactaaacagcttggtaaatgggtactacccaaatggcactggcattcacacctagaagcacaatactaagcgagggcttgattgatatttgctcctacggttttgcttgtactcttttttcattcttcttttttggtttgctattttatctctgatcaactgagaaggcta

SEQ ID NO: 52350 - DNA, 331 bp, Setaria italica
  Peptide Sequence Number=SeqID_118324
tttcttattagtaaattcgtaggtctaacttgttctaaacttattcctaaactactattgagtacgtcttgcgctccttgcctggctaggcgaggcaaggtctgtcaaaagatccaaatgtgcccttaaagattcagcaagcccggccccagctccagcgacacacggttccgacatttttaacgaggaacgtcctccggtccgttgaagcaggactagctatagggttgggagttctagtgtgtgtgtgtgtgtgtgtgatgtttccttttttttggcctagattatggctggaagtgtcttcgtagctttactagagcccggaatctct

SEQ ID NO: 52351 - DNA, 249 bp, Setaria italica
  Peptide Sequence Number=SeqID_118325
cttgatgaggcgaaatataactgttcttcatgtgtcttaggtatggcaatgccacctctgtagacgaaaggcatcgccacagatacgaggtgaaccctgatatggtcccagactttgagagggccgggcttcaattcgtgggcaaggatgaaagtggaacacggatggagatcattgaactgccctctcacaagttcttcatcggcgcacaattccatcctgaatttaagtcgagaccaggaaaaccat

SEQ ID NO: 52352 - DNA, 220 bp, Setaria italica
  Peptide Sequence Number=SeqID_118326
gaaaaaatcttgctttcatagaaatcgaggcaactgtcaaactatccaaacacatgagacgctgcgctccttgcctggctaggcgaggcaaggtctgtcaaaagatccaaatgtgcccttaaagattcagcaagacccggaccccaagactaccaaagaacgaaacaaacaaacggtttaaccgaaaacaaaattttttaaaaacgaaaaggaaaacaaa

SEQ ID NO: 52353 - DNA, 216 bp, Setaria italica
  misc_feature (19)..(19): n is a, c, g, or t
  Peptide Sequence Number=SeqID_118327
atgtccaacatggagtcanacgggcaaaccatctccacttttcttagggctgatagcagcggcatctgggcaactagaacctttgcttcaacgcagctgcaacaatacgacaaagccaccgactaaagtcccgaaacggaaactgtacccaactgtgcctgtgaagaatccactaaacagcttagtattgtgcttctaggtgtgaatgccagtgcc

SEQ ID NO: 52354 - DNA, 214 bp, Setaria italica
  Peptide Sequence Number=SeqID_118328
atgcgagtagttcaagcaattcaagcagctccagcagtgattcaggagaaacttgatgctgttgtacaagtcattaagaacaagaatctatcagttaggcatcatgaggatgagattgaggttgaaattgatagcatggatgctgagacactttgggagcttgacaggtttgtagctaactacaagaagaacctgagcaagcaaaagagaaagg

SEQ ID NO: 52355 - DNA, 203 bp, Setaria italica
  misc_feature (15)..(15): n is a, c, g, or t
  Peptide Sequence Number=SeqID_118329
tgctgtatagagtgntgtgtacgcaactctgcatcttgtctggcaagcattgcacgctcagcctttctcttttgcttacacagcactctatacagcaaccgcaacaactgcaacaaccgcaaccaacccaagtcacccaagaacccaatgttggtgaaaaatctccgaagcaaatggagaaagattcgacggcaggcgagcaa

SEQ ID NO: 52356 - DNA, 256 bp, Setaria italica
  Peptide Sequence Number=SeqID_118330
actcagtcgcactagtattgaggttgcacctcctccaattgaggttgcacccactgatcccacggatgaggttcctgcaccggtagctcctccacaagctgcagctgaaaatcccactccaattcttcctgaaggtgggtatggcggaacgtcatttgctggagggggcaatgcagggggtggatgaggtgggactgacccaaccggcctatttggttgattgttcacagatggaggtggcacgactggtggaata

SEQ ID NO: 52357 - DNA, 390 bp, Setaria italica
  Peptide Sequence Number=SeqID_118331
gagttgctgctctggtttcatctattttgttgcttcagaagctcttgaacttgttgaaaatctgggaaatatcaatgacttctctggaaagacaaggttattcctagtgttgcctgttgcaatacttgatgctacctttatcatctggatattttcatccctctctagaacgttagagaagctacagctgcggagaagcatggcgaaacttgaattgtatcgaaagtttacaaattctctggctgtgtcagtgcttatctcgatcgcttggattggctatgagctatatttcaacgcaactgatccattgaagtgaaactttaggacaaacgggacttaggaatacaataccctagaccttttaggaaatagtacctttacttaatagac

SEQ ID NO: 52358 - DNA, 393 bp, Setaria italica
  misc_feature (333)..(333): n is a, c, g, or t
  misc_feature (344)..(344): n is a, c, g, or t
  Peptide Sequence Number=SeqID_118332
tgtctattctttgtaggtagtaagttttgttattcttgtaattgttaagtaaattattgacgaggcagaacaaagatacaagtctgcagaaagggatgcaaagaaagctaccgagttggctgatgttgctcgagcagaggctattgcatcccagaaagagaaggatgaggcacaacggttatcgatggaaaaggtagcagttattgagagaattcagagacaggttgacagactagagcaggaaaaaagttaatctactaggtgaagttcagaggatgcgtaattctgaatctgatgcctggtccaaggttactttgcttgagagtagggttnctgagaggganaaagaatggatgatttactgagccgtagcaatgaacaaaggtccagtac

SEQ ID NO: 52359 - DNA, 113 bp, Setaria italica
  Peptide Sequence Number=SeqID_118333
ttgtttggacaagaaatcagtagctctgtgaatcagtaccacagagctactgaaaatgactccttatgatcacaactgttaacccgcacatgtcccgcgaagcaataacgtaa

SEQ ID NO: 52360 - DNA, 248 bp, Setaria italica
  Peptide Sequence Number=SeqID_118334
tccggttccagctcctcgtggaccctccgctgcacgtcctggtgcagcaccagccgggccagcacccactccatcagaactgccaccgtgtccgtgcctcgaaagatcatctcctgcaaagtcatcgatcgatcccttgtgagcgaccagaatcggacacgttttacgatgtttcgagagaaaccccgacgagggtgcaacgcagtacccagaggacggcgatcatgtcggcgtcggagagcttgtcg

SEQ ID NO: 52361 - DNA, 252 bp, Setaria italica
  Peptide Sequence Number=SeqID_118335
atacatccacttcaggcgtgacacgacgatcatcttgtctggcattcccatgtcgagctttgccagatcaaaaatgtcttctctcaagcttaaccattcccctgtttcttttgcgtgtgactcaacagctttgcacagcctatcaagggtgtaaagtactaatccaaacttgtacctgtggaatacttcttctcagggaacaaattctcagaaagtgtactttatgatctttgagagaggtccgagggcctt

SEQ ID NO: 52362 - DNA, 225 bp, Setaria italica
  Peptide Sequence Number=SeqID_118336
atacttgtaggcagatgaaacaaaacaaacactgaaacacagcccaaaaaacaaactcatgtggaaaggtacataaatgcatagcataaacaggagtcacaaagacatacttggcaggaagtccagtcaccacacagacagatttttctggataaggagctgatgtcgtacacagttcggacccaatgatgcccatttatgaattccagtacgttgtattttcct

SEQ ID NO: 52363 - DNA, 354 bp, Setaria italica
  Peptide Sequence Number=SeqID_118337
taacctaagtcttaatttgtatttctaaaaagtcttcttccctattatttcgtactattgtttcggtccttctttccttattctagtccttccttcttttctaggtaaacttcttcccggtatttatttttaaattgttttcctattagttgcataaggcaaccccgtcttcggatcacggtatttggcaggaagtccagtcaccacacagacagatttttctggataaggagctgatgtcgtacacagttcggacccaaatgatgccccatttatgaattccagacgtgattccccatctcttgagaaaaaatcgaattgtaggaccatcataagtgtccttatgaacaacag

SEQ ID NO: 52364 - DNA, 248 bp, Setaria italica
  Peptide Sequence Number=SeqID_118338
ttttaggtcaggaagtccagtcaccacacagacagatttttcttggatctgtaataaacagaagtattataaaacagcaatgctcagtacagcaatttgaactgaaactgctatggacacattttaaagtgactgctagagagaacgaacaaataatacagcagcaacaaaactgtgacacttacaaggagctgatgtcgtacacagttcggacccaaatgatgccccatttatgaattccagacgtg

SEQ ID NO: 52365 - DNA, 446 bp, Setaria italica
  Peptide Sequence Number=SeqID_118339
accttactaagttcaggaagatgagcaaaggcccagttccgttcggcaacatcgggaagagagcaaaagatctcttgtacaaggactacaactttgaccaaaagttttctttgtcgacgtctagcagctccggtttgaatctcacggccactggtgtgaggatcaatgaagacttcattggtgatatacggacacagcataaaagtggtagaaccactgttgatgtcataattgatagtgattctaaagtacggtccttgtaaactttgtttgtttttctgcatttgaattccttttgcggagcttggtagcataggttctctgttttctggatcagggctgctaatagtggcattgttgtcactaaatatcttttcatgagacaaacatatcttggcatcagaaatattagatcacttgcttcatatatgctatagggatacatg

SEQ ID NO: 52366 - DNA, 255 bp, Setaria italica
  Peptide Sequence Number=SeqID_118340
gcggtcgacctcggcggcgcgggcgtaggcgaaggactggacgcggcgcatgctgaggagctcgaggatgaagagcttacgcatctcccgccagtagtcgctgtaggggctgaaggccacgtccaggaagtcgtagctcagcaccctgggacctggcgagttggggcggctgcagcagtgctggtcgttggtccggaggaggtccttggcggcctccggcgacgagacgaccacggtgcgcacgcggccgagccg

SEQ ID NO: 52367 - DNA, 496 bp, Setaria italica
  misc_feature (1)..(115): n is a, c, g, or t
  Peptide Sequence Number=SeqID_118341
nnnnnnnnnnnnnnnnnnnnnnnnnnnnnnnnnnnnnnnnnnnnnnnnnnnnnnnnnnnnnnnnnnnnnnnnnnnnnnnnnnnnnnnnnnnnnnnnnnnnnnnnnnnnnnnnnnnattttattaatgtccatgcaatactattactcaaattgtagcttgcattcaggaactgattatcaaacattcataccgtaaaatggtctccatgttttgttcagatccctgttcaaaatgatactaaagtagttgcagttgcataacagtagtacaaatttaaccagactgtggacacatcagcccatgatgcttgagtaaggctactccatgcatagttagcaaaataagtagcactctagacaagctagtaaggttgcttatcagttcctagtcaccggcaaggttacacccgaagcagatcttggacaagtaagcacgagagcaggaacctcttccactcacgcatttctgagcaccttcagcagtggcaatgcagca

SEQ ID NO: 52368 - DNA, 403 bp, Setaria italica
  Peptide Sequence Number=SeqID_118342
actacctaggctaattctctgcatttatacggaagataccttctgcccgaaggccaccctgttcataaaggcgtctctgcatcatcaagaggattgtcgggacactgtttcctctagaatcataagaacactgcatggattctgttgaaactccgaagacacttgcacttgcgctgggagcgcggcgaggcaacctcgggttacaaaactcaacggggagccccaggaatccatggaacctatcgaacgtgacgtgcgccacgtgctgcacgtccgtgggcaacccaatctccatcccacagccgccgcgttcgccttcgccgccgccgcccaccgtcctgcacccgagccagccgacttccggagcagctcaaacagcagcgccaagacgaccaccgctcct

SEQ ID NO: 52369 - DNA, 150 bp, Setaria italica
  Peptide Sequence Number=SeqID_118343
tccttgagggtcttttgtaccagcatcttgagaaaattcatcacttggactgcatacatcagtgcagtcaaaggatctgccatctgcatggtaaatgtgctacagtagcatgagtaaccatcaggtatatattgccttcgtttgctatga

SEQ ID NO: 52370 - DNA, 393 bp, Setaria italica
  Peptide Sequence Number=SeqID_118344
tttcgcgatacttttgcctccagatcctctaagccgctgagtcgctgtactgaagtacttttcctggtgacacatcgtacagaacagatagcctaggccagctcagcctgtaaggacgagtgtccattccatctgtctaatatcttccgaattgctaatcaaattctgttaatttgtcatcaatatatctggttgtcagcctataatggtcttggcaaggcactgcgatgcgaagctagataaccgatatcatgatgtgctacatcatgtgaaagaagaactgcagcatatggatcgatgaaaaagaggatctgagcggcgagattcctcgtcccggatgcgagccgcgcggagggcggcgaggaggagcaggtcgagttcctcgggctccgg

SEQ ID NO: 52371 - DNA, 259 bp, Setaria italica
  Peptide Sequence Number=SeqID_118345
ggagatcggaatctgcttcctaccgtcagtatccggttatggcgtgacacggctgggctgaaatctccaaaccctcggcgggctgtggatgtgggagagtcggtgatgtgatcccggtgggcagattcagcgaggtatcgtggtagccggcggctggagtcaaatggcggacgaagacgtggtagtcagggacggcggcggaagtgggcggcggaaggtgggcggcggaggaagccgtgggcggcgggacagcacccgg

SEQ ID NO: 52372 - DNA, 403 bp, Setaria italica
  misc_feature (1)..(93): n is a, c, g, or t
  Peptide Sequence Number=SeqID_118346
nnnnnnnnnnnnnnnnnnnnnnnnnnnnnnnnnnnnnnnnnnnnnnnnnnnnnnnnnnnnnnnnnnnnnnnnnnnnnnnnnnnnnnnnnnnnngtttcattgacagtaccaactcaatgcagactttaaaagtcaccaaatatacatacataaactcaagaggtgagtacaaacacaacagaaattatccaaaattactcccaacaggaggttcacgacacaggttatatgagcttgctttctacttgtgcttctgttgttctcatagggacgatctttcgagcaactgtatacatgcttcatcctactggattcattttggcctgcactcgctcccttttcatgaaatttgaaaacatacaggggtaagggacagtcatagcataatttactaacaatttta

SEQ ID NO: 52373 - DNA, 424 bp, Setaria italica
  Peptide Sequence Number=SeqID_118347
agcttgctttctacttgtgctttctgttgttctcatagggacgatctttcgagcaactgtatacatgcttcatcctactggattcattttggcctgcactcgctcctgatttttagtacaattcaccaatgttgggatcgcttggagttttcactttgtgaagctcatattgaagtactggaagtgcattcggccaccttacttgcgcgatgagctctgtcccctgtgctgaaaatggttgaaattttccatacttgtccatcctgtgtgcgacccgattcctcagataatctgaaaaaaagggtcccctctaaaacttccagagtcaaagggtccaaaggaaactgtggagtagaataagtggcacttgggtgacgtgaaataatttacaattacaagacaaaagggtttagaattaggaaca

SEQ ID NO: 52374 - DNA, 242 bp, Setaria italica
  Peptide Sequence Number=SeqID_118348
aaaaacgggaaaaaattaaaaggaaaacccaaaaaaacaaaagaaaaaggaaaataagacaatacttacaaataaattttctttgcagacttgtagttgagcataagctgtcccggttgcaatttttggcgcttgacattgcgcagtacagccttacgccctctgacatagatgtttgaagcattgaagtcctcaaaaacattcacctagctgctccacttcccatagagcatccagtaggg

SEQ ID NO: 52375 - DNA, 114 bp, Setaria italica
  Peptide Sequence Number=SeqID_118349
ctggggctggcggtggctacggcggaggagccggtggaggcactggcggtggatacggtggaggtgccggcgccacctccagcaccggcacctccaccgtatccaccgccagtg

SEQ ID NO: 52376 - DNA, 247 bp, Setaria italica
  Peptide Sequence Number=SeqID_118350
atagaagactgcagtcaattgcagatgaggtttctttcgttgtggaattgtggggagcaggttagcagctgtgagagtcagagatgacccttcatcacaatcgtgattcgtgaggtactatttcccccttataacaaactatggtggtataaaaggcaatgattagaaatttttgaacaattctgctactgtcagtaccagtactacttttctggattaacctcgccattacaagattatgatctgt

SEQ ID NO: 52377 - DNA, 280 bp, Setaria italica
  Peptide Sequence Number=SeqID_118351
aaggccaatcccatgccgagcttctaccacgaggcggcgccgtcccccagggccgaagtcaagaagctgccgacgacccgccccaagtcgccgaagctgggccggaggaagacgacctccatggagacgtcgaactcctcgtcggagagcgagggcacgaggccctgctgccgggccaaccgcgacggcctcgacagcaactgcaagtgcagcggcggcgccggtctagtctagtaagttcttagttcttaaggttcgttctttggttcttaacgttaaa

SEQ ID NO: 52378 - DNA, 384 bp, Setaria italica
  Peptide Sequence Number=SeqID_118352
tgccaaagtttttgcaccacagttgcgatgggattggtcggactgggtgatgcgggcgcaactgtggtgcaaaaactttggcaagaaggagtactgaaggaccttctccaactagcatggaatgagggtacctttgcttttgccttctttttgtcaaaacttgtgctcagcgataacgctggatgaagtgttatgggcatattctggaatgcttcatgtaatgtcttttgacacttttttttctctcaatcatgttatatgagtgcctgttgaactcaaataaactggtgattcataagcctctgatgaatttacttgaggggttttatgctgtgatgtagacatggcattttaccttgccccacatatacaagaaggaacctt

SEQ ID NO: 52379 - DNA, 384 bp, Setaria italica
  misc_feature (141)..(141): n is a, c, g, or t
  Peptide Sequence Number=SeqID_118353
ggagatggtttgaagaatcctagctacagtgaccttgttcagaaggtttctgaaaatgtgagtaggttccccacatccttttcaattctgaaatttatcataggtgccttcatatttcattatacaggtgttcttaattcngttttttctgcccatttagtactttgacgctgcaataggggacattgctatagtgacgaatcgaacaagacttgttgattttacccagccgtatatcgaatcgggtctcattattgtagctccagcaagggagattgaatcaaatgcttgggctttctgaaaccatttaccttccagatgtggtgtgtcctaggtgtcatcttcctctttgtgggtgcagttgtttgggtacttgaacaccgc

SEQ ID NO: 52380 - DNA, 350 bp, Setaria italica
  Peptide Sequence Number=SeqID_118354
tgacaaaataagtatgaccttggatgcatttagttaaactattttaacttcaatcataaatatctttattagactatatgaaagtgacagtacattttgtctataaatactttatgatattattgccttcctagacttgtgacacctgtacttaacggggtacgtaacaggctataaccattgttgatagacacttaggctattaggagtaaataggcacagcagcataactgtagaataaatcaaacataccatgtttttaggttgcatccaatagtgagctctccatatgaactttccaatcttgagagatagcaataaggaacatcactatcaaaggacacatttgg

SEQ ID NO: 52381 - DNA, 265 bp, Setaria italica
  Peptide Sequence Number=SeqID_118355
ttgggtactatgacaggggagcgtttttctggattgatcaatgaagttgaagtgagtcctatttcaaccaccctgccttctattggccctgcctttatgtagtcgttaactgaaaatggcttagaaaattgcaaggagaacccactgagaatgttgccaaggacatctctagcagcaaaagcagtagcaacacctcccacaccaccgacagttaaataatacgaattagaaacaagactaacaaccaacaaagacttacaagaca

SEQ ID NO: 52382 - DNA, 482 bp, Setaria italica
  Peptide Sequence Number=SeqID_118356
actgaagaagttaaaggtgacgtctcaccctcaactgtatatggagctgagcatctattgcgtctttttgctgaaggtgaagggatttgggagagggagatagatacagttggtttaaaaacttggttaattcttcagtatactgatctcgctctttcttatacaaaagcattgcgggcaatgctttatcaaagtagcagcgtaatcctttcaaaacctcagcataggagtcatttatcttgttatccttctttgcccggtgctccaaatatctctttagaatatcatcaacagtaggtgaccgtggtagttttacaagccaactgggtgacattctcccaatcatccacaagttgcttcttcagtgtcaaaggaactgtgacactaggagactctctgatgatcttctttccttttcctcagtcccaggctgactcttgtgtttcttcccccttttacgacgtactcttagtgtcgtcttt

SEQ ID NO: 52383 - DNA, 204 bp, Setaria italica
  misc_feature (58)..(58): n is a, c, g, or t
  Peptide Sequence Number=SeqID_118357
tagtgtcacagttcctttgacactgaagaagcaacttgtggatgattgggagaatgtnacccagttgggtaagcttgtaaaactaaccacggtcacctactgttgatgatattctaaagagatatttggagcaccgggcaaagacgcaatagatgctcagctccatatacagttgagggtgagacgtctaccttttaactttct

SEQ ID NO: 52384 - DNA, 270 bp, Setaria italica
  Peptide Sequence Number=SeqID_118358
cgccgccgtttccgatgtggacgaagaagctcaccccgaacggcagcgccgctgggacgccgtacaccggctcgccccgcccgagctcgacgcgttggaacccggcgtgccggttgtccgacacgaaggaaacaaggttacgaccatggccacatacggccgcccgcgcagcaccagcagtccagcaggtcgatcgtggaccgcacgtactcggcggtcactgcaccgccgccttcgtctcccgcaccagcgccaccgcgtcgcccagcg

SEQ ID NO: 52385 - DNA, 473 bp, Setaria italica
  misc_feature (91)..(91): n is a, c, g, or t
  Peptide Sequence Number=SeqID_118359
ctgttagaattagaaaaagtgaaccgtctaaagattccaatcaaaatttaatctcgtgctagaaaatactagaaagttcggtacagattanacctttttgcatgaacccaacattagaggttcaacactctcaagtttcattccaagctcttcagttatgacttctcctccggtaaggacagcaaggtcttgtaagtttgccttccctgttttccccaaaaccaggagctttaacagcacagaccttgatgcctgcacgaagcttgttaagaatcagagtgcccaatgcttcactttccacatcttctgcaacaatcagtagaggcttttgcttctttagagccatctccaaaactttaaccaccgcgtgcatgttcgagaccttcttgtcatgaatcaagatcaaagggtcttccagttcacatttatgggtttttgagttggtaatgaagtacggggagatgtaacctctg

SEQ ID NO: 52386 - DNA, 463 bp, Setaria italica
  Peptide Sequence Number=SeqID_118360
gtagctctgactgtctgtgtgttatcgagggtgtgatgcctctagtactccattccacccatgccacccattgccggtgcgggtgcctcttccttggggatctctacaatgattggtatttccgtttgttggtcatcagggatgacacgctgcgacaacagggcaaacaaaacaactcgttaacacacaccaaatatgaaaaagcaacagcatctcctaacagtactagatgagcagttgtgctcacaagaacagttttcaacagcaaagggcagttcggaataccatgaccacatcattattgactgatagttgattgtggaaagtttgaacttgttattgcacagttgaaaggtcatagatagtttacatagcagcatccaccaaggcagttctgatgacttttagtggatcgatgataccggccttcaccatgtcaacatattcacctagacaattcatg

SEQ ID NO: 52387 - DNA, 422 bp, Setaria italica
  misc_feature (387)..(387): n is a, c, g, or t
  Peptide Sequence Number=SeqID_118361
cgtttcagtgcattcttgttcacttcttattcctttctttcttcaccaactttctgctttcgctggctcctccaatcttttagaacagcaacacctccagagagcttttgccaacctctcctgtagctttttccttgtcataatcagatgtgctattctcaattgcagatctaatctgctctgccctctcttcaatggccttcttgtctccagctccatcaagaataacagtgtcatccttagagacagtcaccttttttgcatgaacccaacattagaggttcaacactctcaagttttcatttccaagctcttcagttatgactttctcctccggtaaggacagcaaggtcttgtaagtttgccttcctgttttccccaaaaccnggagctttaacagcacagaccttgatgcctgcacg

SEQ ID NO: 52388 - DNA, 443 bp, Setaria italica
  misc_feature (417)..(417): n is a, c, g, or t
  Peptide Sequence Number=SeqID_118362
tatttcctacctattgtcctaccctattgccggtgcgggtgcctcttccttggggatctctacaatgatggattccgttgtggtcatcagggatgacacgctgcgacaacagggcaaacaaaacaactcgttaacacacaccaaatatgaaaagcaacagcatctcctaacagtactagatgagcagttgtgctcacaagaaacagttttcaacagcaaagggcagttcggaataccatgaccacatcattattgactgatagttgattgtggaaagtttgaacttgttattgcacagttgaaaggtcatagatagtttacctagcagcatccaccaaggcagttctgatgacttttagtggatcgatgataccggccttcaccatgtcaacatattcacctagacaattcatgaanaatcagcaagcatacttagaatcagc

SEQ ID NO: 52389 - DNA, 221 bp, Setaria italica
  Peptide Sequence Number=SeqID_118363
tccacaccagcattggaagcaatggtgtgcacaggtgtcttcagggcgttctgaatgatctggacaccaatcttctgatcaaagttcgcggtctgcaatttgtcaagctccttttgccgcatagagaagagcaacaccaccacctggtacaatgccctcttccacagcagcttttagttagtcgtttctagttgtctattctagttcgtcttagtacttgt

SEQ ID NO: 52390 - DNA, 201 bp, Setaria italica
  Peptide Sequence Number=SeqID_118364
ctcaattgcagatctaatctgctctgccctctcttcaatggccttcttgtctccagctccatcaagaataacagtgtcaatccttagaagaacaagtacaacctttttagacaatagaaacccaaacaattaagaaggttaacaaaacaaactaactaacaaaagttttaaactaaaaatttaaaacctaaaaaagtaaaa

SEQ ID NO: 52391 - DNA, 376 bp, Setaria italica
  Peptide Sequence Number=SeqID_118365
gtttccctatcgacaatgtagcaaggtcttcactaccaggtgctggcctgtatgctcaagctcagcatggtacgtttaatgattcacattaggtacagccttacaggaaatatccaaagagtgtatttgcttagtaccgggtcactcagtctagcatcatttattgatgcagtcctacaaatcactgtgatgggaactcttcgctgcatacaacgcacctacaggaaatgctcttgctatccggatgatcacctgacgctctggtaggcagagccgcgcgaccttcagaggatgcgcagacgcatctcaccttaccaattacccttagaacctagacgactagtacaatttaactaaaaggtaactaaattaacta

SEQ ID NO: 52392 - DNA, 224 bp, Setaria italica
  Peptide Sequence Number=SeqID_118366
ttaggtgcgatcggacgtcggagaacaatctgctactgtcataggtgctacttttcagtggtttctgagggatttgacaggaatgcttggagggatattgttcaccttttatcaggaatgttgatgggacctcttaagccctttgtttccttcatcattgatagttataatgtgcttaggccagcctatctaggtcattcactggtgttgctagtggagcaaac

SEQ ID NO: 52393 - DNA, 454 bp, Setaria italica
  Peptide Sequence Number=SeqID_118367
tctttagctgatgctgactctatggtacgccgtcagtccgatacgccttccaacaatgagaatgactaggacaatacaaagaacggtaatactaaagacggccccgctctgaaataaccgaagtttcttctcatgctggcaaagatgttagtgaaaacgtacaaggtgcaaatggtcaagtcggacgcccttggggctgggatgatgagggtgttgtgatggacatcaatatactgctctcagaatttggagattttagtgacttctttcaagaagaggagttagattttggtgaggtaggcattatatattcttcttgtagtatgttatcgagtccattttaattctggtaaatatgttattaatcgcaatctgctaactgcaataaactgcattggctcctggatttgcattttatgctgccatattggttcacaaatttttataaagggag

SEQ ID NO: 52394 - DNA, 336 bp, Setaria italica
  Peptide Sequence Number=SeqID_118368
agttgccttgatgaagtcgcatgattctgaaagctttgtattctgctacatgccttctgtgttcttcgatagccttggcttttccttcttatgtagttccacaagatagccctcaataaatcttcacgctcccttggacgttcaacagctttgaacctttcatcatcatcaaacataagaattgctttgctccatcttgttgatgacgtaagctccttgcaatgctggaagagtgcaaggaaatcatcacgtgctttcctctgtttgatacgtttttcttcagcttcaaacttttttcgctggttcaagtactcattgaaagcttgctttctctct

SEQ ID NO: 52395 - DNA, 462 bp, Setaria italica
  misc_feature (356)..(356): n is a, c, g, or t
  Peptide Sequence Number=SeqID_118369
aagtagtacaattaggaaatactttaccaagaacttacaaccaacttactttagatgcaggtcttgtcatctagatactgtttatcaagttcctcgatcacatcatcaaatagctcttttggcgtggagccagacgtgtttgacgccactgccaggtaagcctgtgactcctttatctgtgagcagtaatcacgccaccgagtttttgcagtaagtgtgccatcattgacatgttcttccagcattttacgaaatccatcacggttttttctctcttgccttcttacgtgttccttttgtatccgcttctgctcttcctcctctttctccagataccgtatgtagtcttgaaaacnttcaagcgatcgatcttttcaagtcgagaacagcgttcatcatcttccagccgttcttgaacttttctccactgagtagttgccttgatgaagtcgcatgattcta

SEQ ID NO: 52396 - DNA, 216 bp, Setaria italica
  Peptide Sequence Number=SeqID_118370
ctatcgaagaacacagaaggcatgtagcagaatacaaagctttgaacctttcatcatcatcaaacataagaattgctttgctccatcttgttgatgacgtaagctccttgcactcttccagcattgcaaggaaatcatcacgtgctttcctctgtttgatacgtttttcttcagcttctaaacttttttcgctggttcaagtactcattgaaagct

SEQ ID NO: 52397 - DNA, 396 bp, Setaria italica
  Peptide Sequence Number=SeqID_118371
gcgtcaaaagaaagatattgatatttagatcttatggaccatttgtcctgttgcacagctgtataagaaatcgattctgcgagtatgataggaatttattgggaagaattatctgtggatgtattatgtgaacaagtgggctggtgtacaagtatttgttctcatttatccccttttgttttaatgcaggaaacccgaatacaataatggctcttgccgggaacaaggctgatttgttagatgagaggcaggtgccagcagaagaagcaaaggcgtatgctcaggagaatggcctcttcttcatggaaacgtctgcaaaaacggcaatcaattgttgtaacgtattgttgttttacgtagtatttgtcgtaagtaaatttgtctttcttaaggtaa

SEQ ID NO: 52398 - DNA, 428 bp, Setaria italica
  Peptide Sequence Number=SeqID_118372
aggacaaatcaatgtgaacgatgtgttttacgagattgcgaagaaattgcttcaaggacaacaggttcagaacccacagggtggaatggtcctcaaccagagaccacctgagaggacggtgagctcttcctcgtgctgcgcgtgaagcacaaggtagagtgtagtttcaaggggagtacgtatgcaactacggagaatgccaccaaatcttgtgaaatagctgtcgatcccagctgctacattcctgtgccctttctgcttgttcattgccatgttccctgtaaatgtgaatactagatttttactgcagagattcacctgtgtctacagcacatgatcatgcttatgtatttctgggactagtgaaaacaaggtctagacagattcgtttgattcacttattctggttgcacaatgtcaaatttacg

SEQ ID NO: 52399 - DNA, 374 bp, Setaria italica
  Peptide Sequence Number=SeqID_118373
cttttactcgtgcaaagaaatgggttcaagaacttcaagcacaaggaaacccgaatacaataatggctcttgccgggaacaaggctgatttgttagatgagaggcaggtgccagcagaagaagcaaaggcgtatgctcaggagaatggcctcttcttcatggaaacgtctgcaaaaacggcaatcaatgtgaacgatgtgttttacgagattgcgaagaaattgcttcaaggacaacaggttcagaacccacagggtggaatgggtcctcaaccagagaccacctgagaggacggtgagctcttcctcgtgctgcgcgtgaagcacaaggtagagtgtagtttcaagggggagtacgtatgcaactacggagaa

SEQ ID NO: 52400 - DNA, 332 bp, Setaria italica
  misc_feature (74)..(74): n is a, c, g, or t
  Peptide Sequence Number=SeqID_118374
tctcactgtccaaggcctgaactcttggctgtcctcaaatagctgtttgaatcatcccacgttgaagcagctgntatttccgtgattgagtacagaagatctgaaaaaatttttcacccaatcgctggcgcttcttagcatccttttgctctttttccctgagcctttcaatctgatcatcataaataagcttgatgttgatggttgatattcgtttaagagcatcatcctaccaagaaatacgacaagttttagaaaattacctaccaaatagtaccaatagaaggttaagtaacaaattaaggaaaataactttaaccaaagaaacttaa

SEQ ID NO: 52401 - DNA, 245 bp, Setaria italica
  misc_feature (45)..(45): n is a, c, g, or t
  Peptide Sequence Number=SeqID_118375
taatgaatagcggcactcatttctattttgctgcattataggccnctttactcgtgcaaagaaatgggttcaagaacttcaagcacaaggaaacccgaatacaataatggctcttgccgggaacaaggctgatttgttagatgagaggcaggtgccagcagaagaagcaaaggcgtatgctcaggagaatggcctcttcttcatggaaacgtctgacaaaaacggcaatcaatgtgaacgatgtg

SEQ ID NO: 52402 - DNA, 239 bp, Setaria italica
  Peptide Sequence Number=SeqID_118376
tgcgaagaaattgcttcaaggacaacaggttcagaacccacagggtggaatggtcctcaaccagagaccacctgagaggacggtgagctcttcctcgtgctgcgcgtgaagcacaaggtagagtgtagtttcaaggggagtacgtatgcaactacggagaatgccaccaaatcttgtgaaatagctgtcgatcccagctgctacattcctgtgccctttctgcttgttcattgccatgt

SEQ ID NO: 52403 - DNA, 234 bp, Setaria italica
  misc_feature (20)..(20): n is a, c, g, or t
  Peptide Sequence Number=SeqID_118377
cttcttagcatccttttgcnctttttccctgagcctttcaatctgatcatcataaataagcttgatgttgatggttgatattcctttaagagcatcatcctccagaatcgcagtttgaaattcctccaatgtccatgaggttgtcattggaatctttccagactccaccaaatcttgtgaaatagctgtcgatcccagctgctacattcctgtgccctttctgcttgttcattg

SEQ ID NO: 52404 - DNA, 250 bp, Setaria italica
  Peptide Sequence Number=SeqID_118378
acgtatgcaactacggagaatgccaccaaatcttgtgaaatagctgtcgatcccagctgctacattcctgtgccctttctgcttgttcattgccatgttccctgtaaatgtgaatactagtatttttactgcagagattcacctgtgtctacagcacatgatcatgcttatgtatttctgggactagtagaaaaacaggtctagacagatttcgtttagaaattaaaacaaaaaaaaaaaaaaaaaacta

SEQ ID NO: 52405 - DNA, 202 bp, Setaria italica
  Peptide Sequence Number=SeqID_118379
gctgctacattcctgtgccctttcctgcttgttcattgccactgttccctgtaaatgtgaatactagatttttactgcagagattcacctgtgtctacagcacatgatcatgcttatgtatttctgggactagtgaaaaacaaggtctagacagattcgtttgaattcacttattctggttgcacaatgtacaaaaaaaaaa

SEQ ID NO: 52406 - DNA, 245 bp, Setaria italica
  Peptide Sequence Number=SeqID_118380
aactgaactgagcaggtgtccgtggtggtggtgtggagtggagtggataaaatatgttgcttcatttggctgtttgaatatgttgcttcatttggctgcaggaatcgaccattggtgcggctttcttctcgcagaccttggcggtcaacgacgaaacagtgaagtttgagatatgggacacggcagggcaggagaggtaccacagcttggctcccatgtattaccgggggcgctgctgctgctaa

SEQ ID NO: 52407 - DNA, 206 bp, Setaria italica
  Peptide Sequence Number=SeqID_118381
gcctggtcctccggtttgtgaaaggccagttcgtcgaattccaggaatcgaccattggtgcggctttcttctcgcagaccttggcggtcaacgacgaaacagtgaagtttgagatatgggacacggcagggcaggagaggtaccacagcttggctcccatgtattaccggggcgctgctgctgctatagttgtctacgacatcacc

SEQ ID NO: 52408 - DNA, 173 bp, Setaria italica
  misc_feature (11)..(11): n is a, c, g, or t
  misc_feature (13)..(13): n is a, c, g, or t
  misc_feature (15)..(15): n is a, c, g, or t
  misc_feature (17)..(17): n is a, c, g, or t
  Peptide Sequence Number=SeqID_118382
gaatacaatangntntncgggaacaaggctgatttgttagatgagaggcaggtgccagcagaagtatgttactgtgcttcctaagttacatgtttaacaaatattcatgtgctgctgcatttgttttagtagttgccatcatctttattcttcagagatttctcatgctttgc

SEQ ID NO: 52409 - DNA, 210 bp, Setaria italica
  misc_feature (127)..(127): n is a, c, g, or t
  Peptide Sequence Number=SeqID_118383
cttgtgaaatagctgtcgatcccagctgctacattcctgtgccctttctgcttgttcattgccatgttcagaacccacagggtggaatggtcctcaacccagaggacccacccttgagaggcggtgngctcttcctcgtgctgcgcgtgaagcacaaggtagagtgttagttttcgaagggggagtacgtatgcaactacggagaatgcc

SEQ ID NO: 52410 - DNA, 162 bp, Setaria italica
  Peptide Sequence Number=SeqID_118384
tccggtttgtgaaaggccagttcgtcgaattccaggaatcgaccattggtgcggctttcttctcgcagaccttggcggtcaacgacgaaacagtgaagtttgagatatgggacacggcagggcaggagaggtaccacagcttggctcccatgtattaccggg

SEQ ID NO: 52411 - DNA, 225 bp, Setaria italica
  Peptide Sequence Number=SeqID_118385
cgtattttgatccccacccacccaagtccatctccgccccctcactccggtggttcgttgttcctccgatcccaaatcgtgatccactcgatggcggccaccgccggcggcaacaagatccgcaacgccaagctggtgagcgatccaacatcccgagccctcgaattccgtcgtgcctcgaaattctttgatcccacccgccgccgcaggtagcgcggtgggtct

SEQ ID NO: 52412 - DNA, 422 bp, Setaria italica
  misc_feature (19)..(19): n is a, c, g, or t
  Peptide Sequence Number=SeqID_118386
atgcatgccttaaccggangttcagcctcgacaccgagaaggcgatcattgagcagaagatcaaggccaaggtggagaagacccaaaactgaggccaggaagcaattttttctacaccgtgtatacatactctgattcccattttctttttaatccttcgcttagctccttccctatcgctgagatcgccaactgtgtcgtgaattagcgccatggcagcagctcaatctgttgagaggcagtggcaaattgtccactccagctgcatatctttgtacattattgctcgagctgctgtggcaagagccccattcttcttaaagttaataataacgactaatttaggaacgaaataaaacaaggaaatacgaatacaaagtagtacaagttagaacgaccctttttagtactaatttagttaa

SEQ ID NO: 52413 - DNA, 431 bp, Setaria italica
  Peptide Sequence Number=SeqID_118387
cagaagttgaggtcatatgctggacaggatccgggcctcagagctcgagaagtgccttcagaagatcggtgaagacaatcttaacaagaagatgcggagagccatcgaggagctgagcactggcatcgtgaacaagctcctccatggcccgctgcagcacttgaggtgcgatggcagcgatagccgcaccctcgatgagacgcttgagaacatgcatgcccttaaccggatgttcagcctcgacaccgagaaggcgatcattgagcagaagatcaaggccaaggtggagaagacccaaaactgaggccaggaagcaatttttctacaccgtgtatacatactctgattcccattttctttttaattcctttcgtctttagtcttcctttcccttattcgtcttggagatacgccaacttgttgttcgtgaa

SEQ ID NO: 52414 - DNA, 271 bp, Setaria italica
  Peptide Sequence Number=SeqID_118388
tatgttggtctcacatcggacacgcttcccagctgtgattgcatccttgaacatcctatcatctggtgcggtttctgtcagttcagctgctgttgaattggccctgatgaagcttccaaagactgaagccctgtcaggtagaatgctgctgattggtgctggtaagatgggcaaattagtgatcaagcatctcattgccaaaggatgcaagaaggttgttgtggtgaaccgctcggtggaaaggtggatgccattcgcgaggagatgaaag

SEQ ID NO: 52415 - DNA, 162 bp, Setaria italica
  Peptide Sequence Number=SeqID_118389
cctgcaatagaatggaaatttatgtggtggctctgtcatggaaccgtggtatcagagaagtagtagactggatgtcaaaggtgagagtctgatcaactatatttgttccatccagtctttcttttttttccagctttcccttttggttgctcaaggactcca

SEQ ID NO: 52416 - DNA, 160 bp, Setaria italica
  Peptide Sequence Number=SeqID_118390
gaccatcaagaagttgaggtcatatgctgacaggatccgggcctcagagctcgagaagtgccttcagaagatcggtgaagacaatcttaacaagaagatgcggagagccatggaggagcttgttcacgatgccagtgctcagctcctcgatggctctccg

SEQ ID NO: 52417 - DNA, 264 bp, Setaria italica
  Peptide Sequence Number=SeqID_118391
tggattacaaggactccattggattcatcgttcatgacgatgcaaagaagatggacaaaggtccgaagaaccgttacacggtatgatgctggtgctggaattcccagagagtagcaatgcagtgcagagtttctcgcggtacttgttcgctatcggtctctcgcctgtatttagccttggacggagtttaccgcccgatttgggctgcattcccaaacaacccgactcgttgacggcgcctcgtggtgagacagggtcccgggg

SEQ ID NO: 52418 - DNA, 235 bp, Setaria italica
  Peptide Sequence Number=SeqID_118392
agcggacttccattgttcaagacaagattgaaccaaaatgggaagaccctatttgtgccaatggtggtaaatggaccatcagctgtggcagaggaaaatctgacacaatgtggctgcacactctattggcaatgattggcgaacaattcgactatggtgatgaaattttggtccagatagctattctttcctgcttaccacgtacactaacgacacatacgtcactgagtcggag

SEQ ID NO: 52419 - DNA, 248 bp, Setaria italica
  Peptide Sequence Number=SeqID_118393
gtaaatggaccatcagctgtggcagaggaaaatctgacacaatgtggctgcacactgtaagtttttgtttttcgttagagaagataaatttgctttgcatatttatcttcactataacctccatgctatatcctcttttgtttagctattggcaatgattggcgaacaattcgactatggtgatgaaatttgtggagcagtcgttagtgtacgtggtaagcaggaagaatagctatctggaccaaaaa

SEQ ID NO: 52420 - DNA, 404 bp, Setaria italica
  Peptide Sequence Number=SeqID_118394
aggaaatctttgtttttcatttatccccagtttacagagatagtccatgggctgaatgacccatttacaaatgtaactccatgcacacatcataacgagataagttgtttttcaacaaatgcatagcattgtttacaaatacacaaaagatggaagcgtaaatcaaatcaagagtaagtagtatttttatcatgccatggaaggggaaagtcctcctttgttggcataagccacttcatatttccaccagctggttgccttggaactaaaacacatgacatatatgtggtgtatcattttccttacaacctgcagcactgtagtggcaagaatcagtacaaggtagaacaaaccaaacaaaagaaaacaaaaaggaaaaaagaaaaaccaaaagtaaaagaaaa

SEQ ID NO: 52421 - DNA, 400 bp, Setaria italica
  Peptide Sequence Number=SeqID_118395
ttgttaagttgtttgtaattgtctattccttactattttctaaaattaagtttagcgatagtaggtcataattaaacataaatcaatgagccaaccaatagatgcacatgcacctgtactgtatacaaaataaggcctccattcttccaagttccaaagcctaaagtgggtgattgacactttactttgaaaaccttcctattagtttttctttgaatgaggcactgaagctctcacagatcatgtgagccaccaaaaaaccccccttgaattgacccaaaaaacatgccatggacttccagtggtagttaccttatatgagctactgataatatccactgactaggggaggcggagcaactgattgacagccaaatctaatgaatcaacatttttttcg

SEQ ID NO: 52422 - DNA, 257 bp, Setaria italica
  Peptide Sequence Number=SeqID_118396
agggagggaggaagtttggcaggaaggtggaggatacaaggatttcgcgtcgtctgggtgggcattgagctagaggacccgttcttacaatcgagcacggcgaggttctgagaagcatggttgaggtcttgaggatgacctgggactgccgcctgccatcgtaatttgattttgggcttgtgggttcagactctgactggaccgggtgtaagtctgaatatctgcttggtcaaggagacttgtgttttatgccaatt

SEQ ID NO: 52423 - DNA, 252 bp, Setaria italica
  Peptide Sequence Number=SeqID_118397
ggaagtttggcaggaaggtggaggatacaaggatttcgcgtcgtctgggtgggcattgagctagaggacccgttcttacaatcgagcacggcgaggtgggcgactcatggctcggcccttgtactcgtgcatacagcatacattcctcattcgtgcgttctataaattgcgttatgcgttttgtttgacaggttctgagaagcatggttgaggtcttgaggatgacctgggactgccgcctgccatcgttaa

SEQ ID NO: 52424 - DNA, 431 bp, Setaria italica
  Peptide Sequence Number=SeqID_118398
gcaaactttattctgtcagacagtaacccattacttatgcactttgtagtagttgtcattttgtcatcttcaacatgtacatggactattgtcttcatcagccatatcttcagtactatacagtttagatgccttaatacttgttgattggctgattttatcacttattaccttgatcagcttatttggctcactgtgttatctcactagtgttaggaattattccagcccccttagttaattagccatgtaagccactgtttccgtagagtaatgggaagaaagttgttatctaactgtatcaactaattggtctgagctctactctgcctcaaatttactttgaaactaattgtaggccattgatgaaggaaaagcagactgggatgcattgttcgagccatttccatttttgaatcatataaaaatta

SEQ ID NO: 52425 - DNA, 483 bp, Setaria italica
  Peptide Sequence Number=SeqID_118399
gcttgaaggagaagaagtcgtaccttgtctggaacgctgttggctgccttggtgtcactgctgtcagtgatcttgtcagagagttcctggatttgtatgttttgtgtacttgagaggtttggagttgttcagaagaatctctgaaaaatattaccatctacatacttgatttgatgacaaatcaattgcagtggaggctattgagaagtgtggtggccagactattgctgatggaagccgtttccgcactggtggtggaaattctctggaacatcttaaagtcgcgggaacccaaggcttataaagaaataatggcaaaggggaaggaacttgagaagcagtttaggtatacgaaacgaccacagatgagcagaaacgaagatgcaagttcacagggcagtgcgttaattgatgatgatatcgaagcgcaagagcaaaatgaagtgttggatgatcctgagcagttggatgatgcggagaagg

SEQ ID NO: 52426 - DNA, 214 bp, Setaria italica
  Peptide Sequence Number=SeqID_118400
tccgggactcagatgctgcccgagcgcgtgcatccaagatcctcgcggggctggggtttgatcagtctatgcaggcaagatccacaaagtccttcagcggtggctggagaatgcgcatatcacttgcccgtgcactcttcatccaggagcagcagagttggctgcatgaagagtgcacgggcaagtgatatgcgcattctccagccaccgctga

SEQ ID NO: 52427 - DNA, 242 bp, Setaria italica
  Peptide Sequence Number=SeqID_118401
acatcagcttcccttggttggagcatgtccctaacagaatactgatatccagcgccagaagttctctacttcagctcggaaaaacattccagaataattattgactgagtggtctgcatcaccactgtaataccccaatgtcctcctatgaatcaagcacttgcatacctgaaacagcatccagagcatgtgcaatgtggttggacaaactaaccgaaacagctcctaaaatgtgttccggg

SEQ ID NO: 52428 - DNA, 425 bp, Setaria italica
  Peptide Sequence Number=SeqID_118402
tgattgcgagctggtttagtatggtatcaagttatcaacaatatgatgagaagatgcaaatttggaggcaaacacaggttcagggatgactgaacctgaagatctcaggaactgaatagtagataccctctctgactctgtaccgctaagcttcaaaactgtagatacctttactctctacttcgactccgtttgtaggcacctgaagttctcaggatctctacatgaataactgaactaaatagcatgtattctcactgcagatgacttttctctctacttcaactccaaacattgcacctgaatacaccgcgaaaaaatgtagtgcgcctgaattgccgaatggcatatgagttcctgcagaaggcttccccgtcggcgtcggcgcgacgcaaccggaggcaccatcttgtccgcgctgacca

SEQ ID NO: 52429 - DNA, 419 bp, Setaria italica
  Peptide Sequence Number=SeqID_118403
tcaccggcgcgtcggggtacatcgcgtcctggatcgtcaagttgctcctcgcccgtggatacaccgtccgcgccaccgtgcgggacaccggagcagtggaggaactctttgcaatcctatggaacccttagggacaaacgttggcaggaatactaggggattttgactgatccaaagaaaacattgcacctgagtgtgttggatggagctaaggataggctgcacttctttaaagcaagtctgctagaagagggctcttttgatgctgcagttgatggctgtgaaactgtgttccatactgcttctcccttttatcacaatgtcaaggatcctaaggctgagttacttgacccagcagttaagggaacactcaatgttcttggttcatgcaagaaagcttctatctaaaaaggttggtt

SEQ ID NO: 52430 - DNA, 261 bp, Setaria italica
  Peptide Sequence Number=SeqID_118404
acatggtatgcctttttcttgtttcacagattgctagtcaaaacgaacaaatccttctctttaaagcaagtctgctagaagagggctcttttgatgctgcagttgatggctgtgaaactgtagttaccaataactagacttactcccttttatcacaatgtcaaggatcctaaggctgagttacttgacccagcagttaagggaacactcaatgttcttggttcatgcaagaaagcttctatcaaaaaggtggttgtaaca

SEQ ID NO: 52431 - DNA, 394 bp, Setaria italica
  Peptide Sequence Number=SeqID_118405
tacttgtaattggcgtacttcaacttacttgcaagcaagaacaatgattaagctagctgtttcatgtctggaggaagatagaggcagaagaccaactatggaaaatgtggtgcagacgcttgtttcagttgacgctgtcagcagtgcaactaaaatgggaggagttgcttattaaaagcctgcgtccaaatggttctttgtactaagggccatgcaaacaatacattgatagaaaatggtagttctatcagatatgcagtatccatgctatattgtgttgtaagtatgtgtgctatagcaccgtaaaatttgctccagtgtgctttacagatatctgattgtatcaccttgtacttctaccggtattttttataagcaataattctgtctgaag

SEQ ID NO: 52432 - DNA, 252 bp, Setaria italica
  Peptide Sequence Number=SeqID_118406
ctgttctgatggtccacacaggatattggttacagaatattttgagaatggttcattggataaagtcttatttggtactgagggttcagaaattttacttggatggaagcaaagatttaacattgccctaggggtggctagaggactggcatatcttcaccacgagtgttcagagtgggtcatccactgtgatgtgaagcccgaaaatatactgctggatgagaacttggtgccaaagattgctgactttgg

SEQ ID NO: 52433 - DNA, 447 bp, Setaria italica
  Peptide Sequence Number=SeqID_118407
catatccatatggctgaaatacagtctaatgagcaataaagattaaataaaaagtcaattgaccagtacatttcccatctatctaaaacaacctgtaacttaaggtttgattatctctggcaggatggggacacgtagagactattgacacgctgatgaagaaggcgggttaccatggtaccatcactgagtccttgaggaagaagatccgtgtcacccgctaccagagcaccattgcctgtgtgtagcatggcaatgtcctcctattcctttccacttgaagcaactggaagcaggcacatcgcacaaagaacagtagcacttgccgcaaaggctctcatgaggagtcttgtcgaaggggaaattaccacacaagtgccttggatgaggatagtctctcagtgccacctagttaattcgccatcaccagtagatgttaagatttaa

SEQ ID NO: 52434 - DNA, 275 bp, Setaria italica
  Peptide Sequence Number=SeqID_118408
gccgcccccgccgtgccccccaccctcgcgggagacgacgtagcccgccgcggcaggctcccccggcgatcggcaggatggtggtggccacggaggaaatggcggtctactgcttcgacaccctcgtctcccacttcaccggcgaccagccgccggcccccgccttcgaggacggcaaccaatttgggcaaaaggcggcgccttggtagatttggttcggctcggctcttcgcttggcgattgcatcatctgatcatatcgcgtgccgctagttt

SEQ ID NO: 52435 - DNA, 244 bp, Setaria italica
  Peptide Sequence Number=SeqID_118409
atgttccttcctttctgcatgttctgatcgtgaaatgttctcactcaccattaggtattattgtttcaccaacgtttacatcaaagtcaatttcttgttgtgaatgcaggttggaaagcatggtttaattattgaatttacagatccagactataacataagacgcagtgcaacctatttacctgaggttgctagccatgaaggatggggacacgtagagactattgacacgctgatgaagaag

SEQ ID NO: 52436 - DNA, 324 bp, Setaria italica
  Peptide Sequence Number=SeqID_118410
aagcacggttgccgaattgtagcctcgaataactctttgcttttgtgacaccccatttgttctggttctgaacaagtatgaccttttcgaggagaagatcaaccgtgcccccctctcaagctgtgagtggttcaatgacttctgcccagttcggacgcaccacaacaaccagtcgctggctcaccaggcatactactacatcgctatgaagttcaaggacatgtagtagtatgcctgggtgagccaatgacttctgcccagttcggacgcaccacaacaaccagtcgctggctcaccaggcatactacttcatagcgatgtagt

SEQ ID NO: 52437 - DNA, 145 bp, Setaria italica
  Peptide Sequence Number=SeqID_118411
tcttgatggatagactaagaaccattccaaccaggcaatctctggagctgccttgtatatggaacctataagagattggatctgcttcccagtagatctcaaatcagtttgtccacgttgcagatcactttcaccaatagctact

SEQ ID NO: 52438 - DNA, 264 bp, Setaria italica
  Peptide Sequence Number=SeqID_118412
tctcatatcctggtggcggaaacgggaagcagcgagacatggcacggccgcctcgggccccggatcacccaccgccaccccctcctggacggccgctactctccggcctcaaacacaggctgtcccgccgccgccgctggtggtgccgctgccgctgctcatcacccgggagctgttcccggccgtcgccggcccgccgccgcagcattgggccgacctcggcttcttccgcgccgccgagccgccgcgcccgcagccggacat

SEQ ID NO: 52439 - DNA, 429 bp, Setaria italica
  Peptide Sequence Number=SeqID_118413
ttgggtaagtgcatgtagctgtaaagtggctgtacgaagggatgactgtcaatgttcgtaagcttgtgttgccattcttctcttcactgcctcttggctaacgtctttttaaggcctctcaagatcttggcaaaccacattgtgttcatgacaagcagtattgtgggcacagcaaatatcagaatgcagctaaaggtgtgcatctgcttgacctgatcatagtggaagtagatgtggtaaaacaagtaaacgaacagaattatccgcgccacctgcatgaagcgattagttctccacaattagagaaaaacataggaagttcctaagcagtactagaatgtctgtctaactccatcaggacaaaaactcatcaaacacaactactgacttgtagcattcatatttccacttgaatattataactctcct

SEQ ID NO: 52440 - DNA, 237 bp, Setaria italica
  Peptide Sequence Number=SeqID_118414
accaggtacaccgacatgactgtgatgaatatcgcatggacagtggacatgcccctgttgttccactcaagcttttggatttttgtaagtgaaccataacccttgtagtacaatgagctgattaagcttgtgatgtcataggccatcttgcacatcaggatcccaccaagtacagcagtgtatgaaacatacgaatctgcaagaaggtactccttaacaagtgattctgctttgtac

SEQ ID NO: 52441 - DNA, 175 bp, Setaria italica
  Peptide Sequence Number=SeqID_118415
ctccaatttcttttttccttgcacagaccatgtataactgtggcaaatgtcttgcctgcatgcttaagtgactccccttggtactcttccagcagctccagagcagttcctacggtctcatcattccttgccaaagcactaacaaggaaatccaaggctgattttgggatctgaa

SEQ ID NO: 52442 - DNA, 241 bp, Setaria italica
  Peptide Sequence Number=SeqID_118416
ttgctgttccttcagtggctccatagtctggagcaccttttgttttgccctacagctggtgccgactttgtattatcattatcattcgttgacagatcacttggcttgattacagcagcgaatgtttgcacttccttttgaagtcgaggccatgttttcggctacgctaaaagcagtggttgatgtcagagtcaagagagtcggcaggctcttgactacatgaatatcgataaggaactaa

SEQ ID NO: 52443 - DNA, 248 bp, Setaria italica
  Peptide Sequence Number=SeqID_118417
acggccgcggcggacggctgccagagttgggcatcaggtcctgtgccacgcccacgctctccggagcgaatgtttgcacttccttttgaagtcgaggccatgttttcggctacgctaaaagcagtggttgatgtcagagtcaagagagtcggcaggctcttgactacatgaatatcgataaggaacaattgtcccgataaactcgcgtcttttctcttagcaactggctacaaatatctctggataca

SEQ ID NO: 52444 - DNA, 439 bp, Setaria italica
  Peptide Sequence Number=SeqID_118418
ccacacaaccataatggcatcatatcaaacataaagcataacaggtataatccttctatgcatacagcactgctctgcacaataaacataccatgaactagcacactgaacaaggcctttgaataggtaaagcccttttcaaaatgccacagaacagtgactgaaattaattctagaacgctaccaaacctaattctagcacactgaaaagctggagatggaactggtagcaagacctggtggaaaacataccgaagttgagtggaaagaatttgatatgttaatagtaagagcagactgcgccataaggatgttaagaaacatagtaggatgtgtcttcggaccataaaattctaaagccttcagccagttcttctccgctcgggaaccataccacttacttttcttgtacgtattattttattccttcttatttttt

SEQ ID NO: 52445 - DNA, 269 bp, Setaria italica
  Peptide Sequence Number=SeqID_118419
ttcaaccgaattagacaaccaaaacagccaccctaactaaactttcctaaacatatcaacatagaagagatctgttcaccacatgcttgcaatgccttatataatgacctgactgaatatccttgaagttcagatgcattacttattagaactataagagcatgccatacatcatcctttacatgatttccagccagtgataaaactctgaacatctggtctaagtaccatagcttgtcctgggaaaacttttcaactattgagcatat

SEQ ID NO: 52446 - DNA, 211 bp, Setaria italica
  Peptide Sequence Number=SeqID_118420
ttgtccatggtgtctggtgacttatctgctttcttatttgacagatttgagaaagtagataagtcaccagacaccatggacaaggatgatacaaactcagaccacgtggaggatgagaagaaacaagctgagaaggatagtgctgacatttctacggttaccatgtctcgcaagggaagaggcctgtataaggcaatgaagattggcaagg

SEQ ID NO: 52447 - DNA, 414 bp, Setaria italica
  Peptide Sequence Number=SeqID_118421
aaatggagctccttctccttcccacgaaacagttcctccaaatgccgggataataaataacagggactccctaggcacctcccgactcaagtagaactttaagttcttaaataaacttttacattctttggtctcatcatcatctgtgtcaacagcagggtatattgttggaagagtacctccaccacatttgtctccttttgtggacaacgatgcagagggttacattcctgagtatgcagaaacaataaagaggctgcaagctgctgctcgcaatgaggtcttgcctctgccaggtgatgaagatctggacaattcgttggtagcagcaatgatggatcgaacagagtcgaacgaagctgctgaaaagagaggaagctggagatgctagagaagcaaataccatgatgagct

SEQ ID NO: 52448 - DNA, 236 bp, Setaria italica
  Peptide Sequence Number=SeqID_118422
tgtaagcaataccatgatgagctgaagatggaaattgatggcgttacttttccatcttcagctcatcatggtattgcttctctagcatctccagcttcctcttcttttcagcagcttcgttcgactctgttcgatccatcattgctgctaccaacgaattgtccagatcttcatcacctggcagaggcaagacctcattgcgagcagcagcttgcagcctctttatgtttctgcat

SEQ ID NO: 52449 - DNA, 170 bp, Setaria italica
  Peptide Sequence Number=SeqID_118423
tgagaagaaacaagctgagaaggatagtgacttatctgctttcttatttgacagatttgagaaagtaacgccatcaatttccatcttcagctcatcatggtattgcttctctagtatgtccaaccacagtggatatttgattgtgtaaatgctcgcatcatatacccttc

SEQ ID NO: 52450 - DNA, 122 bp, Setaria italica
  Peptide Sequence Number=SeqID_118424
ctgaagagcatgaggagttagccaagtgatcttttgtccttgaacttcagcctggaaatatatgcccttcacattgaagtcaacatcatcagttaatacttgctgaagagcatgaggagtta

SEQ ID NO: 52451 - DNA, 203 bp, Setaria italica
  misc_feature (15)..(15): n is a, c, g, or t
  misc_feature (20)..(20): n is a, c, g, or t
  Peptide Sequence Number=SeqID_118425
tgcaccaccaccacngtttncccgggcgccagcaaccttccttgaggactggggccgcgctgggctcggcttcgaaccaaacagcttctcctgttccgcggctagctgatcatttatctttttctggtcctgaaaggttatgagggggtgcagaatatggattagatagttgttcaggaaccatttctattactaagtctaac

SEQ ID NO: 52452 - DNA, 337 bp, Setaria italica
  Peptide Sequence Number=SeqID_118426
aaaattcaggactttcatggaaccacttcagcaggttgcatttaacctggaggcaactcctgatgctgctttctggaatgatgttgctaagcgtgcatttattggttggatgagagatttacgaggcattgcgatggccaccaacagccgcaagacctatggcctcctatttgactggttgtatccatcacgcatgccacttctattgagagcaattgcactgtggacggatgaaccagaggtcaccacccccttgctcaagttcatgtgtgaattttgtttttgtaactaaagtcttctaaagtagttgtactattttgtatttctagcgtacaca

SEQ ID NO: 52453 - DNA, 372 bp, Setaria italica
  Peptide Sequence Number=SeqID_118427
taagtcttgtttgttggggtctaagtctatttgtcttgtaagtttctattgtaggttctactactagggttgtaagtattcaatctaagagtgtttgcttcgaaaaagctgctgccggctgctgttgtgctgtatgccgtggtggctgtaacaaggaatgcttcaggttgatggtcatccaatggaaattttgataccaacaggttatgctgtagaggcggcattattcatgaaggaaaagtgtagctgttcatcgtgttgttggtgtgctgtacaggacgttgctgctctattgccatgagtgtaaaagagagacgctgatgctgcgtgtaattaaccagcactgcgctgtactgtatgatatggtaccta

SEQ ID NO: 52454 - DNA, 412 bp, Setaria italica
  Peptide Sequence Number=SeqID_118428
taacctaaaccttaagtaacaaataacggaacgaagacgtagtacaagacgaccgtcgtcatcctctgcctcgacttcgcgcgccgcaactccgacggcgccgtcgcctggactctggccggacacttcgagggaggctgcctctggggacgccagggcgtcatgctgcttcgatcgcagggtaaggccgaggtcgtcatgtgggaccccagtgccgagatggtcgtcgccatggacctcgaagggcgcaccacgcgcaccatcacgttcatcccccaggcaccggatactgcgcagatttcatcccctacgtcagcacattggccgccgtctctgcatccggtaatgggtcgcgtgctgagcctaggactaaatctactaatgaggctggagcagcgtatacgctaaatct

SEQ ID NO: 52455 - DNA, 456 bp, Setaria italica
  Peptide Sequence Number=SeqID_118429
aacaaggacaaatagctgcacgaagcgcgtcccaacaggtaaggtcatcacgtaactccccagtaacctacataagttcagaaataggcccacatattgtaaggaattattgatgatacaatatagcaaaggaagttaagagagatactcgtaagaaaaccagatttttcatcattcttgtttcattggacctacacctacctacttattaccccagaaacaatcatatatataagcagtcagtgctgaatgcttgtattccatgataagatggtaactgctataaatattaaaatataatgatacatccacgaaatttgtgagatcgctgaagttgccttatcataaatgcagacttactgttgagctaaatgtgcatgacatgtgaatatcgttcaatattcatcagtttctccaccttcactgaacctggtttggacacctgtaaagatggag

SEQ ID NO: 52456 - DNA, 275 bp, Setaria italica
  Peptide Sequence Number=SeqID_118430
attctacaatatgtttcttgtcttttgaggccaagaactccttcaaaatatcagatccgaaagcccactatgatattttgaaggagttcttggcctcaaaagagacagtgccatgtcttcatgctgcattgcttgggtaggtattctacaatatgtttcttgtcttttgcacagtttcgaatgtgattgttgttgtttccccagattcaagcatccgacaactacaaggaaaagaaataaaccttaaagaaaaattaaaacttaaaaactaaaaa

SEQ ID NO: 52457 - DNA, 272 bp, Setaria italica
  misc_feature (70)..(70): n is a, c, g, or t
  misc_feature (265)..(265): n is a, c, g, or t
  Peptide Sequence Number=SeqID_118431
gttattggacacatcatcaccattttgtccatcagctgatgtaacacgtcgcaattcatcaagtacctcngtaaaatcatctgcggggggcatgagaattccaaggatctttcctgagtgcggatgcttgaatctggggaaacaacaacaatcacattcgaaactgtgcaaaagacaagaaacatattgtagaatacctacccaagcaatgcagcatgaagacatggcctgtctactttagatatcagatccgaaagccactatnatattta

SEQ ID NO: 52458 - DNA, 221 bp, Setaria italica
  Peptide Sequence Number=SeqID_118432
ttttggttatttgttaggtttacccctactaagttaagtactgatgtatactctacgaattgtgtgcagcttgaactgttcagctaattgagcatgggaatgctcatccttggcaacaacaagaagtccacttgtccccttatcaagtctgtgcacaatccagggcgcacaagagcattccgcacttccgaactaacgtcttcagtagtaaattgatcaac

SEQ ID NO: 52459 - DNA, 243 bp, Setaria italica
  Peptide Sequence Number=SeqID_118433
ggtctatgggctgtactccagattctgtgacgtacactgtcttgattgattctttggggaagatggataggattgctgaggcaggtaaggtcctagaggagatggcagctgcaggattgaagccaactttagtaactttcagtgctttgatttgtgcatatgccaaaggggggagggtgggctgaatcggagaagacgtttgattgcatggtcgcatcaggtgtcaaacctgatcgtttagca

SEQ ID NO: 52460 - DNA, 327 bp, Setaria italica
  Peptide Sequence Number=SeqID_118434
tcgagtcgctccggcaggagaaggtcgcgctcgccacccaggtacttttactcccatccattattccgacgatccctcgcgcggccgcgcgctccaattggttctgactgaccgattaattgctgacggtgtctgctggattgatgatgatgcgcgcagttggatgagctgaagggaggctgaacgggcggcaagaccagcagcagcagagcggcagctgcgaggtcaacggggcggaggcggccgacgacaggaggaacactaatagcgccagctgcgtggtggaggacgacggcgccgtgacgcccgcggtggacgtctcggagg

SEQ ID NO: 52461 - DNA, 206 bp, Setaria italica
  Peptide Sequence Number=SeqID_118435
ggccatttggttccagaacaagcgcgcccggtggcgctccaagcagctcgagcacgactacgccgcgctccgcgcgcagtacgacgcgctccacgcccgcgtcgagtcgctccggcaggagaaggtcgcgctcgccacccagttggatgagctgaaggggaggctgaacgggcggcaagaccagcagcagcagagcggcagctgca

SEQ ID NO: 52462 - DNA, 179 bp, Setaria italica
  Peptide Sequence Number=SeqID_118436
gcaagggtcctgcgtctctcatcccggccggcaacgtcgagctcctggggtgagttcctggcggaatggaggtcttcggccccgtcacgccaggccaggtgtcattcttgctcggtgtgttccctgttctcattgcatggatttattcagaaatcttggaataaccgaaatcgtcatcc

SEQ ID NO: 52463 - DNA, 200 bp, Setaria italica
  Peptide Sequence Number=SeqID_118437
cagaggttaagcgcctcaaagagctggttgattccaaggtggatggcaaggcgaggaagaccaccgagaggattcagaagccctaatggcaccatctacctggctgagcgcttcgttcttggcatcgattgcatcagccagctcataccttgccttctcaagctgctccacagtcgaccgcaacacggcagcgtcaacct

SEQ ID NO: 52464 - DNA, 252 bp, Setaria italica
  Peptide Sequence Number=SeqID_118438
aacagaggggcaaacctgtacggcggtcggcactttgaagaacactatatccccaatagatggcctccggaataagtatgtaacctggaggatgtcatagagatgttgtatttattaagagggtactggcaacacctggagatttcattgaggttcggcagggccaacttattgtaaatggtgttgcacaaaaggagcattacacagcatcccatgcattgtacacaatggaagcaatggtttgtgcataca

SEQ ID NO: 52465 - DNA, 361 bp, Setaria italica
  Peptide Sequence Number=SeqID_118439
ttgccgatctctgttgtcgtcccaacagttccggcattgttgaccttttctattcagtttgcactacaacaggagacatatttccaagtaagtttattgtctgttcttcactttgcaggatacgagacctgatgttttcaagatgaaacatgtttagtcagcaaaagttcactggaaatgatcggtcattctatgataaccctctctacagatttcgcatttgcaaaagttgagctagaaatatgaacaaacactgcaaacaaagggagtacaggctaaatgaagtattatgattggactgacaaaaaaatgtcttacaaaactctcacatctgtcagttgttggccacctagtcatgctt

SEQ ID NO: 52466 - DNA, 342 bp, Setaria italica
  Peptide Sequence Number=SeqID_118440
ctagtagaatcaaagatggttctgttttagctgaagctggagcttattctatatataagagagcattttttgaaggtcttattgtctcttggccattgttcaaatcaatcatgttgctattgtcactgtcgacagtagacctttcgtgctttcattcagtggatggttgccactgaccaatatcttccttcagttcccattggtaaagttctcccaggaccagagccatggtggcacacgtaaaatggctctgtcggggaacattatcaaaggattatagttagcttaaacagatcagtaaactttttaataatctataaagatcagtaagaataattattt

SEQ ID NO: 52467 - DNA, 432 bp, Setaria italica
  Peptide Sequence Number=SeqID_118441
tccttgtattcctaaaagtactaaaaagtccttgtaattctattgggtattgacgacgacaatggtatatggaagcccagaatgatacctaatccagaatacaagggaccatggaagcggaagaaaattaagaatcctaactacaaaggaaagtggaagaccccatggattgacaatccagagtttgaggatgacccagacctatacgttctgaaacctttgcagtatgtggggattgaagtctggcaggtcaaagctggttctgttttttgacaacatttttgatttgcgatgatcccgactatgcaagacatgttgtagacgaaacttttgctgcaaataaggaggctgaaaaggaggcctttgaaggagctgaaaagagagaaggctagagaagaagaggaagcaacgggcgggcgcggaggaggaagg

SEQ ID NO: 52468 - DNA, 248 bp, Setaria italica
  Peptide Sequence Number=SeqID_118442
tttctttattctggaacgcccaaagttaatacaagaaagaggtatctgacgttataaattgtttgtttcatgcttaggacgagctgtagatcttgcactctttcaaaatctgctggacatcagttgccgaccatggaagtggaccttgatgattgtgtcaataagaagtatcactttggggcaaaggtgtttgaagtccttagccaatattgttagtcttggagattaccacgtgaagaacttgtttg

SEQ ID NO: 52469 - DNA, 180 bp, Setaria italica
  Peptide Sequence Number=SeqID_118443
tctttgttttttaggtttaaagttagtctagtcttcttggttgtttagttgttggtgataatgggaactgaagctagtttgctcattgtgctagaatgttcatctgctcagtagcatgtagattcacagcttaacttgctcgttgaacttgcgatggtcatatgtgcccaataatgctat

SEQ ID NO: 52470 - DNA, 424 bp, Setaria italica
  Peptide Sequence Number=SeqID_118444
gaataaaccgagcccatccccagcctctgctgttccccaaggataggatatcttcccagttaggagtagcatcccaaccttctctttctagaagatacaccaagcgtaacattctctagaatcatcttcaggtgatcatccaacatcttggaagctgcagacttgtcacttgtttcgtgtgaaagcatcttcaactctgcctcctcccgtgagagagggtatatgatctgatccctcaaggttccaagacaagtatatggacgttgagggacattaaaaattccttcggatggcttggtaagtctaccagaagcaatgggccacaaacctcggagcaccctaaaaataggaactactttccaactaaccaatttaggaaccggtacaacaaagaaaggacttttttaccttagaagaataacaa

SEQ ID NO: 52471 - DNA, 244 bp, Setaria italica
  Peptide Sequence Number=SeqID_118445
gagaatgttcaggtgatcatccaacatcttggaagctgcagacttgtcacttgtttcgtgtgaaagcatcttcaactctgcctcctcccgtgagagagggtatatgatctgatccctcaaggttccaagacaagtatatggacgttgagggacattaaaaattccttcggatggcttggtaagtctaccagaagcaatgggcctcaatcccgcaccacctcctccctcttccagtcttcctcct

SEQ ID NO: 52472 - DNA, 281 bp, Setaria italica
  Peptide Sequence Number=SeqID_118446
tatcaatggaaaagggtgactgctatattcggaagtagtcacttatggttgttcttaagaagtaaggatactctaatgtagttgctgtgatcgggccacaatcctcagggataggccatgtcatctctcatgttgctaatgagctacaagttcctcttctgtcatttgcggccacagatccaagtctttctgcattagagtatccttacttcttaagaacaaccataagtgactacttccaaatgaatgccattgatagtagtcaacaatgctagcaacgg

SEQ ID NO: 52473 - DNA, 307 bp, Setaria italica
  Peptide Sequence Number=SeqID_118447
aataaccccaggtcagtgaacttacacctctcttgctgatcagcaaaagcacagtccatgaactgaggcaatctgatatgtataacacgtaccttcaactacaggacataggttattcgaagcttgctaacctgccacctcatgtcggactatgtaagtgcacccatacacattcatctcttcgttctagttgagatcactaccagcaactgagttgatcagagaagtgtggtcaccaattttacagacagcagctttgtcccgcctctgatatatgcggcgatgggcagctccagggatatagcca

SEQ ID NO: 52474 - DNA, 191 bp, Setaria italica
  Peptide Sequence Number=SeqID_118448
gctgctatcagcaccgttgcgtaggcgtatactcctgaaacaccagtaatgccacgagcggtgtctgatggaggggaaggcttcgaagacatcgccagccggacgtcatcacaccgccgcatggacagcatccaacatgggcacggcctgagacacgcaacaggagataggcaaggcacacaggggatagg

SEQ ID NO: 52475 - DNA, 238 bp, Setaria italica
  Peptide Sequence Number=SeqID_118449
tattaattgatgtaagtgttaaggttccaatgtctcagaaatattgatctaagaaaaactcatagtaagaacaaaaataatctcttgagagggacggcttactatgagttttcttagatcaatatttctgagacattggaatattaattgatgtaagtgttaaggttcttatttcacttgtattatttaggtttttctttcttcgtatcattcactgtcttagtttccataacatttg

SEQ ID NO: 52476 - DNA, 240 bp, Setaria italica
  Peptide Sequence Number=SeqID_118450
gtattgtttgggggttcgttcctagtaaggtttgttcgtattctttgttgttacttccttgtcacccagcatgtcccttcggtgcgcccaaggatgtcacatgttgtgcatcaactccagcagcttgagctgaagtctgcagcatctgagcagcagctcaggagcgggacgagcaccagcgcgacatccccaatgttaccgttggaggtccggactcctcgctgaaatccactgccagaa

SEQ ID NO: 52477 - DNA, 439 bp, Setaria italica
  misc_feature (6)..(6): n is a, c, g, or t
  misc_feature (13)..(13): n is a, c, g, or t
  misc_feature (26)..(26): n is a, c, g, or t
  misc_feature (29)..(29): n is a, c, g, or t
  misc_feature (32)..(33): n is a, c, g, or t
  Peptide Sequence Number=SeqID_118451
aactanaataganaagacatgccatntgntannaatcgaggcgcggtgatgagagccactcggggtcgttccgctacatggacaaggatgcaggattccaatcagctgaggaagggggctcagggacgtttcgtcaggcttcagctcatgcaataaccgctccttcacctctggttggtctgccggagttctcataccttggttggggtcactggttcacactaagggatctggaacttgctaccaatcgcttttcaaaggacaacattatcggtgagggtggatatggtatagtttaccgtggtcagctcatcaatggttctcctgttgctgtcaaaaagcttctcaataacctgtaagccttgcttatctaatctaagttgtcagttcaattgctctgtttatgctccccacatcttgtcttccttagctatcattc

SEQ ID NO: 52478 - DNA, 260 bp, Setaria italica
  Peptide Sequence Number=SeqID_118452
cgggtcggttccgctacatggcaaggatgcaggattccaatcagctgagaagggggctcagggacgtttcgtcaggcttcagctcatgcaataaccgctccttcacctctggttggtctgccggagttctcataccttggttggggtcactggttcacactaagggatctggaacttgctaccaatcgctttttgacagcaacaggagaaccattgatgagctgaccacggtaaactataccatatccaccctcaaccga

SEQ ID NO: 52479 - DNA, 253 bp, Setaria italica
  Peptide Sequence Number=SeqID_118453
ttatcggtgagggtggatatggtatagtttaccgtggtcagctcatcaatggttctcctgttgctgtcaaaaagcttctcaataacctaggtcaagctgagaaggaattcagagtagaagttgaggctattggtcatgttcgccacaagaacttggtccggcttctgggttactgtgtggagggtactcaaaggcttgcttacttgcatgaggcgattgaacctaaagttgtgcaccgtgatatcaaatccag

SEQ ID NO: 52480 - DNA, 244 bp, Setaria italica
  Peptide Sequence Number=SeqID_118454
gcaggaatttaccagaagcaccactgtgtcagtgatcaagtaaaagatttatttgcttctgtatctctttttgggtattggtggtcctgctatcgacaaattcacggatagattccacctgagaaaatacatacaatatcctcggcagaacaggcgagcctgcaagacgctccctaccaactgaagacgccgatagatccattatagaattacaggcagcctcagtcactcgctggcttctact

SEQ ID NO: 52481 - DNA, 122 bp, Setaria italica
  Peptide Sequence Number=SeqID_118455
cttcttgtatctctttttgggtatttggtggtcctgctatcgcaaattcacggatagattccacaatatcctcggcagaacaggcgagcctgcaagacgctccctaccaactgaagacgccg

SEQ ID NO: 52482 - DNA, 181 bp, Setaria italica
  Peptide Sequence Number=SeqID_118456
ggggaagggacaagggaggaccggagaggaggggatcttcgcttgtggcggtggtgaaattttggggagcggacgggatgggagtggcgtcctcatcgacgtcgtcgacgagcagtggatgcgcgacaccctccccgccgacgaaatccccgtgccgccggccatggccgtcaagaccgag

SEQ ID NO: 52483 - DNA, 312 bp, Setaria italica
  Peptide Sequence Number=SeqID_118457
aggaagcggaagcacctgataatataatcaaacaatagtgcaaacaatgatgcagtaaatggaattacaaatattcagtcctcaggaacatcagttcagtatcaaaatacaaatttgcacttgtatgaagagggatgtgattccagagcaacagtatctccaatgaaaccagtagagaatatgagtattgctatgactcaggctagtattgaaacagatatgacccatcttgcagatctgggagagtcactaactgcatatgatcagtggtcagcatatcttgatttggatgatgatccaactgcgccaggt

SEQ ID NO: 52484 - DNA, 472 bp, Setaria italica
  misc_feature (247)..(247): n is a, c, g, or t
  Peptide Sequence Number=SeqID_118458
cttcctcatcttgtgattgtgctttgtatgacacagtatcatcatcgcttttgataggaaccactgtattgcaaagagccatcaccatcagaaatttgatgacatcaggatcattacttgagactgcatttttgaagtcgtgcatctaagtagagagaattgtcagtgaccaaaataatggtatgcttttgtaactttgggtgcacatttagagctcgagttatttaccaataacaatataaaaaangtttacttgaaatccatgaatagaatttatggtacagttcgaagaacatcacgatgttgtgaagtgcactagaagtctagtggcaccactagaaaaacagataccatgaagattaaagagtcatcctcaggttccgaactcactgatcctctatatatgaacaacttaatttttttgcatacataaagctttgcatagtatgaatttcacataccatgttccatc

SEQ ID NO: 52485 - DNA, 228 bp, Setaria italica
  Peptide Sequence Number=SeqID_118459
aaagacttacctacaatacttagtagaattagtagctttgtatgacacagtatcatcatcgcttttgataggaaccactgtattgcaaagagccatcaccatcagaaattttgatgacatcaggatcattacttgagactgcattttgaagtcgtgcatcttgtaaagcatctccattgtcatttccatacatagtattacttatgcagcatcgtttgaagatcattt

SEQ ID NO: 52486 - DNA, 378 bp, Setaria italica
  Peptide Sequence Number=SeqID_118460
gtgcaggccatcatcagttaaggtgtggtgccaatgcaggctagctgaaagctgaaggcccattttatatatgctactgccgccaccaggggggcaaccgatctaccaactttgtgcaccggctttactactcgcactcaacgtctcctcagacgagaactggacaacatgttcttgggagtggtccagtgcatcatgcggtcccaagctacgaatgcaaagctttctagggaggtttgctgttggactgtcacttaccttccttttcaggaccctgttggcatcttgtagcatttgttcctttctcttcaagtcgcagagttcatcaagtagcacctgagtctgccaaatgcagataaagacatgaatagaagagtt

SEQ ID NO: 52487 - DNA, 411 bp, Setaria italica
  Peptide Sequence Number=SeqID_118461
ttcattcaataatgcgtagaagagggccggaaatgcgtcctgctaggccggccatgcatcagcttatttcagtcgtctgagcacttcaaatccatccggatccaccgtgctcgtttgggtcccccatgtcttcgttgttcagctggtccatgtaggcttgttggtggtacccaatctgtagggaaggatcattgtctgggtgctgaaggaatccctgataaggttcaatggcattcccactagtgccactgtgcccaccttcttcccaggaaacatgtagcacactctctgcattggtttcttgcaactttttcctgaggtccttgttaaggtcctgtagttcttgctccttacttttcagattctaaagtagtcttgtattctaagtctaactattttgtatttctttct

SEQ ID NO: 52488 - DNA, 348 bp, Setaria italica
  Peptide Sequence Number=SeqID_118462
ctctcgtgttgaaagttacaacagcaaggaccaggacttgtatttggcacatttaatttactagatgtggaagagacgtgcttaaaaaaacttctaacatataaagccttattattctctgcattgcagatcgtcaaagccattgatgccgtttcaaggagcaattaatacagattgctgcatctttcgggataggaaacgcgacccctgtttttagcatggttcctgttagggccagagcattgcttccaacaatcacagaggaagacagagtcatcttgaacaatgtcgagaaggttgtgaagttcctaacatctgggactgcaactccaaaccgtgaagtaggga

SEQ ID NO: 52489 - DNA, 288 bp, Setaria italica
  Peptide Sequence Number=SeqID_118463
tttgcctccagaatttcgagcctggctacaccgttcctcccaagaaacctgctgatgtcgcggtcaccatcagagagagcctggaggtgcccaggctgaactacgagccggaggagcaggaggtcgaggacgcggcggtggtcggcgccggcgacccggagtacgccgagtgcgcccgcgcagccggcaggagcgcgtcctggtgccgctcggtggccgtcacgttacaacggtaacgtaagaactaaagaaactaaaagaaaactaaaagaaaaaggaaaacaaaaa

SEQ ID NO: 52490 - DNA, 244 bp, Setaria italica
  Peptide Sequence Number=SeqID_118464
cgaccatcagagagagcctggaggtgcccaggctgaactacgagccgagtgcgcccgcgcagccggcaggagcgcgtcctggtgccgctcggtggccgtcacgttcacggtcgtgctgctgctgaggcacctggtcaccgtggcgacggtcggagcggcgaaccagttcgcctttagcctcctgacggtgtacttgctgcgggcgagtgggatcttgctgccgttctacgtcgtcatgaggctc

SEQ ID NO: 52491 - DNA, 250 bp, Setaria italica
  Peptide Sequence Number=SeqID_118465
ctgctgctgaggcacctggtcaccgtggcgacggtcggagcggcgaaccagttcgcctttagcctcctgacggtgagcactcctgctcgaactgtcaaaaaaagggaaaatctgaacatcacgcagagaagttttctgcgatcgactgttaacatttttcccttccttgcttggcttcgaaggtgtacttgctgcgggcgagtgggatcttgctgccgttctacgtcgtcatgaggctcatctccgtgat

SEQ ID NO: 52492 - DNA, 440 bp, Setaria italica
  Peptide Sequence Number=SeqID_118466
attattcgacgactggctgccctggaaggctatgagatggtctctaatgatgagaaggatgagccatttgtacttgagaaagatcaatgctgggtcctggcagacaaccaagccctaaagcccaaggtaagtaattagatgcttgtagtagtaacatacacaattctgttagttgttgttgtactaagatatgctcaattttattatgtcttgactatagatgctcaaagtgtggttttggtgaataattgtctttgcatttcaacaaaggcattttcgttaaagtttttcatgaccgttttggtaacaggaagctagagatagccgattgtttggacctgtccctatgaccgacatccttggcagagtgatatactctttaagaacagccgtcgatcatggcccagttgagaacagtggcatggccatgaaccaggatg

SEQ ID NO: 52493 - DNA, 442 bp, Setaria italica
  Peptide Sequence Number=SeqID_118467
aacaatgaatcttgcgtgcagttggtagttggtatgcgtcgcgttaatgatatatactatagttgaaaaaaggggacttcatgtaattgttgccagaacccaaaaccctgaaccaccacccattggatttgcagcaggtgcttgttcgggcacctggatgtcaaccacaacagcatcggaagtgatgaaagtttttgcaaccgaggcagcatgctccaagcaacacctcacaaccttggtgggatcaataataccagcagccatcaaatcctcgtagttccctgtagctgcattataaccatacctaaagttcttattggcaagtaccttctcgataaccacactgccattaacacccgcattcttcgcaatcaatttaagtggatagctcaaggacttccttacaatttcagctccaaccttctgttcatcattgtcaaag

SEQ ID NO: 52494 - DNA, 254 bp, Setaria italica
  Peptide Sequence Number=SeqID_118468
tccaatattctcaacagggtcttccagctcaacctcctttgcgacagtgacaccatcattgacgattttaggtgagccatacttgctctccaggactacatttcgtccttttggtccaagagtaaccccgacgagatctgcaagcttattgacgccattctgagaaagaaaaccgtgtcagctgaagtttcctgatggcggagccgtccttgttgaagtggatctcctttgctgcattcaccgtgaaacggcta

SEQ ID NO: 52495 - DNA, 221 bp, Setaria italica
  Peptide Sequence Number=SeqID_118469
catcactggcttacttgggagactgcatatatgaactttatgctcggaggcacttcttctttccacccccagaggtcgaagaaaccccgatcgctctacagcgcggcatcactggcttacttgggagactgcatatatgaactttatgctcggaggcacttcttctttccacctctgagcatcaatgagtacaacaaacgcgtgatggatgttgtgaagtg

SEQ ID NO: 52496 - DNA, 235 bp, Setaria italica
  Peptide Sequence Number=SeqID_118470
ctggttgagactgctcttgaaccagcctccaaaaaggcgctagaatccacctcatattccatctcctcgttgtagccttctcggtcctccagagacttgctctctcagatgcatatgtggatatatgcagtcaaatagaggaatactggaagcatttacttggtatagctcagagcgagagatcaaaaataggtaaagaagttggtgtgagccatactccacaatccggtatgtt

SEQ ID NO: 52497 - DNA, 281 bp, Setaria italica
  Peptide Sequence Number=SeqID_118471
agcaagattccaatagcgttggatatggcggcagacagtggtggaaaggaccgtgatttgacaaagagaatgggatccgatccatactttcctatgctatcagagaatgctatgcttccttcaaaaacatcatcaatactttagtgtttggacagcgtgagaaacttgtcataaaagagatttttgatgttgtggataagcacatagcagtaggaaacccttgtattaagggtattcttaacttatttgttaggttagttccttttcctttgttcttactt

SEQ ID NO: 52498 - DNA, 255 bp, Setaria italica
  Peptide Sequence Number=SeqID_118472
ctccctgtcatttcttgactgagctgtgcggaggcgaaacgggcggagacggtgaggcctgggattcggcggcttgtctgcctcgataacgacggtaggtttccggcgaggtcttctcgagtcaactgggagatgtgttggggacttggggtcttcaggtgtgccagatccgcaccagagctttggtgttctagaaaatagggcagagaggaagggatgggctgtggcagatggcaattgtggagctgctggaaa

SEQ ID NO: 52499 - DNA, 246 bp, Setaria italica
  Peptide Sequence Number=SeqID_118473
aatccatcagatgaagcgtgtagcaggctagcagctattgaaggttggaggcttacgctgatggcagcctggccgctgccgcagccagcgtcccaggcgcggtggtgcccggcggtgaggccggccagcatggagaaccactccttggggtaccgcggccgcttcttggcgtacgtctccgacggcttctcgtatagtcccgccattcttgctcagcttcaactgtgtctccccttcttatcaaac

SEQ ID NO: 52500 - DNA, 260 bp, Setaria italica
  Peptide Sequence Number=SeqID_118474
agattgtggatagaacagatacatcgtgtcatacaacagtaactgccaagaaataagtcacttgcagttcaactgcttacataaatgagaaaaagaattcaacaacattacagtaagtttgccataacataactgtcctgaaacgaagaaacactctggaacagagctggaaaactgcggcagggaaccattatctcccaaatccccacagcttccccttctgcaaaaacccaaggacttgtctgtccttaagcagcaaa

SEQ ID NO: 52501 - DNA, 310 bp, Setaria italica
  Peptide Sequence Number=SeqID_118475
ttatctcccacatccacaccagctctctcccaaatctcttctacttctcatctacctcaccagacgtttaaaatgggacaacatatggcaactggtagatatggaggtctggcaaaagagttgccctgggttgcaacgaaggctgctgctccatcgattggaacggtactgaacaatcacttgctctgcaggtcatgctggcatcagtcgaagctggacgatcggctccaccgttcccgcaggtactcctccaacgggctgaggccgctgctgtgctccgtgctaagaagaaataaggaaactaaccaaa

SEQ ID NO: 52502 - DNA, 331 bp, Setaria italica
  Peptide Sequence Number=SeqID_118476
tgcagctgcagatctcccatttactttattgtgatgctggattgaattttgcttgctcaacagggaacttgatctcatttgttggaccaatggtggctcaggaacccttggtttctccaatacagctgcttgagaatcttgattactttttaatcttgatgcgcacaacgttaccattcttagcttggctaggactgggcagcacaacctttcttctcttgctgctgtcctgcgagctctcaggaagagtcaacgacaactagtttagtaataaaaacaaaggaagacaaccaaagactacctactagaagaagtacctaacttactaact

SEQ ID NO: 52503 - DNA, 133 bp, Setaria italica
  Peptide Sequence Number=SeqID_118477
atcaagattaaaagtaatcaagatgcgcacaacgttaccattcttagcttggctaggactgggcagcacaacctttcttctcttgctgcccagtcctagccaagctaagaatggtaacgttgtgcgcatcaag

SEQ ID NO: 52504 - DNA, 259 bp, Setaria italica
  Peptide Sequence Number=SeqID_118478
ttaacttagttcttaaggtccttgtccctactattgtctactaaggccaaccccaggagcaactcaatcatcacatccatgggtggccgagtgaactcttcctccgtgatcttcagcaccgtgcgatactggatggtggcgtaggcggcgtgggcgaggatggcgccgccgaggacgcccaccacgtagccgatccccatggcggaggcgaggctggctgtggcttccccctgctcctgctcgccgcgccgcggggaat

SEQ ID NO: 52505 - DNA, 240 bp, Setaria italica
  Peptide Sequence Number=SeqID_118479
ttacaaggcaagtaaaagaacaaaatctgaagagatgtgtgtctatgtcttcagctttaggtctgggtcggacggcagcgctctcccgcggtggttgaagactttgatccccgtggatctaatggcaaagctactgctaaatcaagcgaggtggatctgtttgggccaaacttgatggacgatttcattgatgcatctccagcaacagatcggcctgtggttctacggcactgtctgttg

SEQ ID NO: 52506 - DNA, 211 bp, Setaria italica
  Peptide Sequence Number=SeqID_118480
acgatttcattgatgcatctccagcaacagacagtgccgtagaaccacaggccgatctgtttgctgatgcagatttccaaacagcaactgcaagcgcagagacagctgcaaatacggatgtccaggtttgtttctccatatgttaaggcttatgtatatacggaaaatcatctaatgcttgcatacattcctataatcaagtggattactt

SEQ ID NO: 52507 - DNA, 227 bp, Setaria italica
  Peptide Sequence Number=SeqID_118481
gagcttgacttatatgttatccctgtggacgatagtccaacgtacttgtcacgattgctggccgctttgtctctcacagcctttattctctccttgacaattattgagtacttgatagcaaacggttctgagagggcagttgatgacattcttgaccattattctaagatctcggttctttcaagtttgagtatgtggagcctaatggaaagatgctggaataaatg

SEQ ID NO: 52508 - DNA, 177 bp, Setaria italica
  Peptide Sequence Number=SeqID_118482
cctatcccctgtgtgccttgcctatcccatgttgcgtgtctcagttgagcagaaggcacttgatgccacaagtgatgaaccatggggccctcatggtagtgcgctttcagagcttgcacaggctactaagaagtttgctgaatgccagatggtaatgaatgtcctatggagtaggct

SEQ ID NO: 52509 - DNA, 157 bp, Setaria italica
  Peptide Sequence Number=SeqID_118483
cctatcccctgtgtgccttgcctatctcctgttgcgtgtctcagtcatgaaggttttcgatcagactgtgcgtgagatcaagagggaggtcaatctgaaggtgctaaaggtccccgagattgagcagaaggcacttgatgccacaagtgatgaacca

SEQ ID NO: 52510 - DNA, 271 bp, Setaria italica
  Peptide Sequence Number=SeqID_118484
tacaaaacaatagacaataacaacagattcgcatgagttgagtattacaagaacaatgtcatttccaaatgctatataagcagagtttcatgagcggttgacaagtgggcatgtctccctgattacaaactacatgatggtcatgcctgaccttatgagctcagactggtaaaagaaaaacactggtgcttggtaaagtttgctccagctactttacctgcaatacacaatatcaccaattaatcatccgaatatttaagaactggaactc

SEQ ID NO: 52511 - DNA, 248 bp, Setaria italica
  Peptide Sequence Number=SeqID_118485
aacaaagaacctaaggggaaattacaaaccgaaactacggtagactaggtagttacgaagaattgaagtcatcagtgcccagtaattcgcagtgcaattctggatggagctatggagcattggccatgccttaagtactgaaataattccgttgtcacctcatgctacacagcagactggtgtccttagtgaatcctgtgaaacttttaacacttcgtggccgtgatatattgagtttatggtgtttc

SEQ ID NO: 52512 - DNA, 324 bp, Setaria italica
  misc_feature (19)..(19): n is a, c, g, or t
  Peptide Sequence Number=SeqID_118486
aagccggtagccatgctgngaaaagcagtgactcatagactgtcacctgtggcgagtggatatcattttgttcacagtatcctgatatgcgcgcgaaggtctcttgtttcttcgggtatcctgaaatgctgatgtctccttcaatgtatccacctgtctttctcccagccagcacatccatcaaagtagtttttcctgcaccactgacgcccattagtgccgtcagcacaccaggcctaaagacccactgacacctttgtaggtagtcttcctagtacgttattctttctttgtttactttaccttttgttttgttttctttta

SEQ ID NO: 52513 - DNA, 468 bp, Setaria italica
  Peptide Sequence Number=SeqID_118487
ccgacgctaaggacacggatgagggagcttctgccaaggagaacgatgatcccaactccaatcctcaggtgaccggctttcccccgctgcatcctcggtttcgatacgcccagatgctaaaacctagggtttctgatcgtgctggatttgttgcaggtagaggtagaggtagagtacgtgccggagaaggccgagctggacgaccccctcctcgatgacttcaaggccatcttcgaaaagttcaccttcaaggacgctgccgcagcagccgccgaggtacatcactctctcctttacttccaccacaaaaatctcggaacagatctcgagatgatgggatgcttccgagccctaataatttggggtgtttcactcacaggatgacaagggagatgagggtgctgcggatgccgcaaacaagtcgtcactggatgacgacgacgacgatgacgacgatgaccaggaggc

SEQ ID NO: 52514 - DNA, 230 bp, Setaria italica
  Peptide Sequence Number=SeqID_118488
gatgagcattacataccaacttatctgggtaacaggatggcctgcaatgctttctgaagattgagtagtacttgtagtctgctactatctggacagccagttcccggataagttggtatgtaatgctcatctgggtaacaggatggcctgcaatgctttctgaagattgagtagtacttgtagtctgctactatctggacagccagttcccggttaagttcaaaccactt

SEQ ID NO: 52515 - DNA, 202 bp, Setaria italica
  Peptide Sequence Number=SeqID_118489
aacggccgttgtaccaggttctcgagcagaaggaagaaaggatcgcccctgggacactatatgggtcaagtcatacgtatgtgctgggaacacaagataaatcatcagctccgaaaagggtggatctgcttaagaatcagaagtcggacaaagtggatgtctacgtattcctaaccttgtaggtaacttggtaagttcattg

SEQ ID NO: 52516 - DNA, 201 bp, Setaria italica
  Peptide Sequence Number=SeqID_118490
ggcggagcagggacttggcgagctcgcaggtgccgaagtagatggcggaggaggaggcggaggaagaggaagaggaagaagaagaaccaatggaagacgaggaaatggaagatggaactgagtctgtcgataccatctcaagtactccaaccggtgttgaaacacctgatgtgattgacctcgtaagctgcagaggaagga

SEQ ID NO: 52517 - DNA, 443 bp, Setaria italica
  Peptide Sequence Number=SeqID_118491
tttcttttttttggttttcttagtctagtcttgtcttaaagtcttgattaggtaaagcacaagctttcttcgaaagacagcaaaggagagttgctttcaacggagaaagcatctgcgagtagtgcggcatcccagcccattaaagagcaagtaattcccgctgtcccaccacctgatctgctggatctgggtgatgaaccagtctcatcaagtcctccaatagccgaccctttctcacagctagaggggcttcttggaccagcatcagccactccggtggtttctggaactccagctgccagcacttccaacgcaccagatcttatgtcgatcttctcagatgatgtaccaactggagcaaccagtggatctgctgatcctgctgtaggtgatgctaatttgatgagctcccacaaaggagcaacagcagcggctgcaaagaa

SEQ ID NO: 52518 - DNA, 186 bp, Setaria italica
  Peptide Sequence Number=SeqID_118492
cctatcccctgtgtgccttgcctaccctgttgcgtgtctcaggaagccaagaacaacaggaaacatctgcccacactcttaggtttgaggcctatgagatgcctaaaccttcgatggcactagcaacatcacaagccagcatgtccgcaccacctactgacttggttccagttccagaaccaggtt

SEQ ID NO: 52519 - DNA, 268 bp, Setaria italica
  Peptide Sequence Number=SeqID_118493
cccctttgaactctttgaagcataagactaagcttattgtcatgattttctatcgtgcagctgttttataagatggtgacttcacgctctactgtgggcctgtctacttatacggttctgttgagaaacctcttagttgttgggaaatggagaaagtatattgaggtatacagcacatattactgggcagctatattgtcacatttgaataagagttgaggggtccttacaaaaaaagattcccttaaaagataagagaactacatta

SEQ ID NO: 52520 - DNA, 252 bp, Setaria italica
  Peptide Sequence Number=SeqID_118494
gttagccatccaatccaatagccggccagagcaagaacgggacagacctcgacgccgtacttgatggcgactccggcgagggtgtcgaacctgcagactcggtgcaggacgtagcggccgcaggaggacatgggcggcggcgacggcgactggtccagcacgacctcctcgcgagcgccgctgccggtgctgctgccgcggtcgtcgtcgtcgtagcgacggcggtagccgcaggggcggacgaggacctgc

SEQ ID NO: 52521 - DNA, 380 bp, Setaria italica
  Peptide Sequence Number=SeqID_118495
gagccggcttcggcgacgccgacggcgcccatgaggcagagacagaccacgaggacgagagcgcggcggtcacggcgttgaagaaggagatgctgcggaggtggttccaccaccgccacggcatgcgcctccaccaccgccaccacgacgagccggaggaggaagccgcggcggagggcctgaagcggttccaccaccaccttcacaaggaagaggaggagaaagacatgacgagaaagcggttccgtcacgccgagcacgatgacagcgacagcgacgacgaggatgaggaggtggaggagatggtccggcggttgatgaggcccttgatccacgccaccacgccgccctcatcctgtgcattccgtcctttcttcggt

SEQ ID NO: 52522 - DNA, 261 bp, Setaria italica
  Peptide Sequence Number=SeqID_118496
cgtgagttatagaaagtgggtttatttgcctgcgcaatcacaacatcaaaaagttcccgccaggaatttccatcaaaatgctggtcctgctcaaccaaattgtgaaaaagtcaagtggagaatatgtgcgtgagcaaaattaactggccataatatactgacatgataattttctattcagaatacagtactagtcaagaacattaccaaaaatacacaaaaattgataataaaaagaatgttgcttgcacggtacaaatg

SEQ ID NO: 52523 - DNA, 369 bp, Setaria italica
  Peptide Sequence Number=SeqID_118497
tagactaattaatcattcataggaatgaagactatacaacttctcatattaacagagaactccataggtggtaggaagcgttctacagtgaaaaattgaggatcttcgaccttttctctatttctgtcagtattcctcccattttcagcaaaatcaacacgtaactgacgaccattaatctcataaccctggaggttccggcgtgcacttagagcagtctcctcatccttgtactcgcaaaagccataacccttaggcttcccagtttcttgtcaataaccaatctgaaggagacgaccggggccgacctcctcgcaaatctgcacgagctgctcctccgtcgcatcgtacggtatgttaccaacgaag

SEQ ID NO: 52524 - DNA, 457 bp, Setaria italica
  Peptide Sequence Number=SeqID_118498
aaacagtcctagttagcttgcaaaacactctgcccccaagctattagctaggatgtcgatcatgttactgtaatcactgctacggctcctctgcttctcgtggaaaagattcttcagttgcctttctttaatctttttactactacatttgtatgagattgagatcccaaaatttgcattcagatgtcgacggttgtcatgagagtggatctcgagtgtgagaaatgctacaagaagattaggaaggtcctctgcaaggtccaaggtttgccttcctcccaaattctctatcacaaatctctgctctcctccaagaaaattgcctaaattacaacaaaagaaaggggtggtctaactcaatccatgatgaactgatgatcctctgtttcctcactctgctcatggacagacaaggtgagcatcaggaccatcacctacgacgagaagagcaacacgg

SEQ ID NO: 52525 - DNA, 282 bp, Setaria italica
  misc_feature (6)..(6): n is a, c, g, or t
  Peptide Sequence Number=SeqID_118499
cacccncaacgccggcaagatcatcaccgacatacacgtcgccggggtcggtgcctggggcggaggcggagggaagcagaagcacggtgcccccgcagccgccgccgccaaggcgcccaagcccgggaagggtaacgaccacggtcatggccatggccacgggcacgggaacgcccagggcaagggccacggcgggcatggcggtggaggccacggcggcggcaaggcgaagccggagaagaagcacgtcaagttcgacgacgacgacgacctggacgacga

SEQ ID NO: 52526 - DNA, 242 bp, Setaria italica
  Peptide Sequence Number=SeqID_118500
cgatcatgttactgtaatcactgctacggctcctctgcttctcgtggaaaagattcttcagttgcctttctttaatctttttactactacatttgtatgagattgagatcccaaaatttgcattcagatgtcgacggttgtcatgagagtggatctcgagtgtgagaaatgctacaagaagattaggaaggtcctctgcaaggtccaagacaaggtgagcatcaggaccatcacctacgacg

SEQ ID NO: 52527 - DNA, 222 bp, Setaria italica
  Peptide Sequence Number=SeqID_118501
aacaaatagttgaggtatggaaacagcttctgtaggtgttgtctgggcatgattttcatgcccataaaagagttgtatgttttcagcatagcagcctccctcttgagcctcgccgcctcaacctttgcatcagaaacccgcagctgaacctttacgaactcttcatggtcgttttttagatgcagcctgaatatccatcgtaccttctttatatcttcacta

SEQ ID NO: 52528 - DNA, 346 bp, Setaria italica
  misc_feature (24)..(24): n is a, c, g, or t
  Peptide Sequence Number=SeqID_118502
tttttttaatttttttttaataanaataaacaatagaagacaacatcacaacaagctgctcatcgcattgctttctcttcaaaatgtggctttggataaccaaagagcatcattgcgccgcactgcatgcctgactaacccacctgtaagctttcttgcaattatccagaaaggtttcagaaaccccattagccatcccagcttgcgccaagggaatacaacacattgtgttagcaactgtacatatcttttctacaattctacattttacctcttcaaaccaaagcatttagctgcctatggaagctccctcaactccatccaagtcaccaatatcctcattaac

SEQ ID NO: 52529 - DNA, 153 bp, Setaria italica
  Peptide Sequence Number=SeqID_118503
gtgggtaagtttggggcactggaggcaatttaaattgagtgcaacaagtggtggttttgttagtctgttctgtgatgaagatgctgttgtcaagactagttacattgtaaaatgtcctttccaaatactatggcagatctcatcttacacccc

SEQ ID NO: 52530 - DNA, 316 bp, Setaria italica
  misc_feature (1)..(51): n is a, c, g, or t
  Peptide Sequence Number=SeqID_118504
nnnnnnnnnnnnnnnnnnnnnnnnnnnnnnnnnnnnnnnnnnnnnnnnnnngggtttttccagaaacccccattagccatccccagcttgcgccaagggaatacaacacattgtgttagcaactgtacatatctttttctacaattctacatttttaccttctttctaaacctaaagtctattttagtcttgtcctatggaagctcccctcaactccatccaagtcaccaatatcctcattaacaaatcaaaacttgtcttcatttgagtaacattcttcagacactaagcgagattagtctgctcgatgctgttg

SEQ ID NO: 52531 - DNA, 388 bp, Setaria italica
  Peptide Sequence Number=SeqID_118505
ttaacggttaaccttaaaactaaataagaacaaaattaaggacttagttaccaagaagttagacgggaagttacttacatgtttgcagatagattgctgtaccaatcaaaaggatccataaagtaatgaccacccatgcgctcttcttccattcacttggccgtcgcaagaaggagaagtctccaaagatgtttggagaaggttgaacttggttgctagcagcactcatcattctttcttgtcctcttgttccttgattttgcgctccatgttccggcataccaatcccagctgctcccaatttgtggtattgtgaccacctcgtcatttgatatcttcaacttgggtgcctctaaaatgtatctgagttcagcggcctgccgcctga

SEQ ID NO: 52532 - DNA, 377 bp, Setaria italica
  Peptide Sequence Number=SeqID_118506
ggagtgttcttgtgcaggagtgcctccccttcgtgcatccccttctcacacagagagatcgttctagtaatagacccgacaactaacaaatgagtccattcagatttgatgacaccatggactgtttgatagctgttcacattaggcattttagagctggttttcctgttgtttgattgcaccctgaacatcttcaggggacatcgaatccataccatttatcgaagcttgggttcaattctcctattgtgttggactgcaaaagcttgatatccagcaaggcctggcaattggagaatgcccatgcattaacttcttccctggcacagataggttagaaatctttggatctttcagaacagggctctatctaccaa

SEQ ID NO: 52533 - DNA, 186 bp, Setaria italica
  misc_feature (26)..(26): n is a, c, g, or t
  Peptide Sequence Number=SeqID_118507
gttgataatacaacgacagaagacancagtgaaacctggcctgaaacccttatatacattagcaagtgaacttttagccttgtatgccttgcgctccgacaacgcaactttctgtaaagcaatgataacagatgggtgcaatcccttcctgggaggatccacaataacgacacttgacccttcaag

SEQ ID NO: 52534 - DNA, 402 bp, Setaria italica
  Peptide Sequence Number=SeqID_118508
ctgttttgtcatctagtctttcattctcaaaagacaggaatagtttttgctgaacaggacagtggtttggtaaagtcagctaattttctaccgagtttagaatccaatcatgaggtgtgtttgaatggagagaactctatacatcagcctgtgaatggaagagctctagatgatcatctagattcaacaaatagcaagggtgctatgggtccctctgccatggctacagaattaaaacacaagaaatctgatgttaaaacattggacacttttggtggcaatgttagtgaaagagattttgatgtgaacacggaggctgttgcttgttctgtctcctcaacccatcaggaaggtaactaacactgttcctcataataggagtagaagttagttatttatcag

SEQ ID NO: 52535 - DNA, 372 bp, Setaria italica
  Peptide Sequence Number=SeqID_118509
agctgaacaggacagtggtttggtaaagtcagctaatttcttaccgagtttagaatccaatcatgaggtgtgtttgaatggagagaactctatacatcagcctgtgaatggaagagctctagatgatcatctagattcaacaaatagcaagggtgctatgggtccctctgccatggctacagaattaaaacacaagaaatctgatgttaaaacattggacacttttggtggcaatgttagtgaaagagattttgatgtgaacacggaggctgttgcttgttctgtctcctcaacccaatacaaggaaagaaatactaggacaaaggaagaagacaacaaatacaatacaaaccttaaacgaatagacaagaa

SEQ ID NO: 52536 - DNA, 237 bp, Setaria italica
  Peptide Sequence Number=SeqID_118510
gtttcagaaatagtgtcccgaattgtggatgtaatcgcagcatcatcttccatcctttttttgaccatatcattccccttcttctctggctctttgttgcaatgagctccaatgctctgactgtgggtcgattcagtgcagaaagagtgagctggtctttcagaatttagattggattggagcatcaaatgagaagtgtcatgttttagaagatttacaatgcatatcttctaaaac

SEQ ID NO: 52537 - DNA, 183 bp, Setaria italica
  Peptide Sequence Number=SeqID_118511
gtaaagtagattttgatgtgaacacggaggctgttgcttgttctgtctcctcaacccatcaggaaggtaactaacactgttcctcataataggagtagaagttagttatttatcagccacatttttgtaattttttactttatctattaaagatctggcaaggagagcacaatcatcaacctt

SEQ ID NO: 52538 - DNA, 120 bp, Setaria italica
  Peptide Sequence Number=SeqID_118512
ctcgagcataagaaaatcaaattggatactgtagtgtctacaaactctgagttaagtgagaataccggtgagattagcacagaagcactagatccacgtgcaccacctgatgcatgtgga

SEQ ID NO: 52539 - DNA, 387 bp, Setaria italica
  Peptide Sequence Number=SeqID_118513
tggtcttacctaggtttccttcctagtctagtaacttagtaaagtccttgtctttctagtactactaccctaaattatttgtattgtaagtcttgtctagtttgttgccataccctgatgatcaggctgggggagttgccggtagcattcatcgttagaagctcaggaagtaacttatatgaagcacaaatcaaagaatttgtcgccaaaacagggtttgtgcactataagcaaatcaccatgtcttctttgtgaatacaataccaaaaaatgcagcgggtaagattttaaggaaggacttggcaaagttagcattgcagcatattaggtctaggctatagtatgcatctgtatgtgtacgacctaagtaattgctgtttgataaat

SEQ ID NO: 52540 - DNA, 323 bp, Setaria italica
  Peptide Sequence Number=SeqID_118514
cagaaataatcaagtcctgatgcttcaacagctgttgggcaacacagagtttttgattttttgctcagcataaggcttttcttgacattattgagaagggacctgtttcaatctcatatgagaagtgtcacatatttacggttggatggctctgttgaaccagagaagagatttgaaattgttaaagcattcaattcagatccaaccattgatgtacttctgttaacaacacatgttggtgggcttggcttgaatttgacatctgcggactacctttggttctttctattggtaactattgtatttggtaattcctaattgta

SEQ ID NO: 52541 - DNA, 438 bp, Setaria italica
  Peptide Sequence Number=SeqID_118515
ttctccaatggatttaaatctgccagcactaattgaaaaagacaaagttgtagaagctgaaatggattgccataattctgtaccgaatgatggaggggagcgagttggagcctaaaacttcttgatggtctgatgaggatataaaaatgtaggttagccattgatatgccatgatgctatgacgatgcaaacagtgcctgctttactgttttgttggtctgatacaacagaggtgcatttaaaactgcaatcatctaatacttaaataagatatatatttacagtaattgcttggtgttgcctagaatgcctagcttcagaattgagaattttgtcacatggcaggaaaagtgttaattctattagatttaatgctttttgttctgtaaccattcgtatttatcaatttaaattagacgtttaggaaggaaaaaaaaa

SEQ ID NO: 52542 - DNA, 380 bp, Setaria italica
  Peptide Sequence Number=SeqID_118516
caagaggctcaaagtgtgatagtatctccttacaatgagcaatatcagaagtacacccatatcccagttcagtgataatatcgggcaggcttatctgttttccaatttcagatagaagggaatcaaaatcatcatctaagctaccaatgcacagctccgtatgtcttgaagaatttgcttgattgcaattggcttcctgaagtgagataggaacatagaatggcctctctttcacatttagtagggagattatgttagtaaaagagtccatatgctttgagaggccttcagtctggagaagaaacaccacaatctcctgtaattccgattctattttgtattactagtaatttgttagttcttatttgttatttttgtta

SEQ ID NO: 52543 - DNA, 381 bp, Setaria italica
  Peptide Sequence Number=SeqID_118517
ggcgggtaatggtgcggcgccatagcttcctccattgtgcgggcctggagctgcgccgcctggaggagatccgtatgatgctccgccgtatggtgggtaagagctgtagcccgtgtcaactggttgagcaggtggagcaggagctggcgggccttggggagaagcttcagccatgaaattctgcaagagaagagtatcaatgtatcattgttcagttacacagaaaaaagaagtttgtgtggtgcacagagaacatgtcaaccaaatgatatggtcatatatatgctacatggttcttgtagattgtagattactaaaggttaacctaggaaaatgacaaaatctacactgatcaaagtatcaagacgtgcattgtatgta

SEQ ID NO: 52544 - DNA, 223 bp, Setaria italica
  Peptide Sequence Number=SeqID_118518
atggctgtggaggtggcataggttgctctctgtgcacattgtgcgctttcatctgtgattcaaacaaagggagaacactgcggtcaacaagaaattttcttaaatggcttgcaatcagttccacctgtggcattaaatgatgatagagttgttgagatacagggtgaacctcttgatgctcacaaagcagtggagctgattgcaagaaattttcttaaatggc

SEQ ID NO: 52545 - DNA, 212 bp, Setaria italica
  Peptide Sequence Number=SeqID_118519
ctttgatcgacatacttgaaatgggtgctgtcgatcaaagaacttctcaattgccactgagaaagcagcaaaaccagcacatccaatgcatgtagctttagggccaccttttactgcaagatctctcaagatatgtcaatggctggatgttgcaaataatcaggttcttctgctaatcctgctcatactctgctacaaaaaaggcttcattt

SEQ ID NO: 52546 - DNA, 203 bp, Setaria italica
  Peptide Sequence Number=SeqID_118520
ccccagtcggttcaacgattccatatgaagcgagcagtgggtcctgatctactaaagcgaaagttccctcactagatagcattgttgactgcgatgatgtagcaactgtttgttcactacattctggttcaggctttatataatcatctgaatgagggttgattatttgacatacagtgtaaactccgcagcagtcattgcta

SEQ ID NO: 52547 - DNA, 257 bp, Setaria italica
  Peptide Sequence Number=SeqID_118521
atacaacatttcagtactcatgcaggacgatgttatatcattataatccaaggcagccctcagtccctcagggctattggcgtagcgttcgtatcctggctcattgaagtatggcatctcattcagtacgagagcttgaatggagattagcacctgaagcatggttgattgagctgagttccatttctcacaagaagaaccctgccaggtgcctaggaggctaagacagtacttttccacaagcatattaaatttgg

SEQ ID NO: 52548 - DNA, 364 bp, Setaria italica
  Peptide Sequence Number=SeqID_118522
tagtcaagttccgtcagccagtactgttgtaattgataaatcagatgttccagaacatgtttgtactaacttacaaaacggtgttgctttcggctatttggaagagcggttcgagaatggaccaactgtagttccgcttgatgaacttgaagcaccctctacttctaagtctccagtttcccttgagaaagcactgccatttgagatccgcaattcccacttcgatcagccaagccctacatcagttcttgatgcacaatttgatgatgtcaatgagaaatctcccatttcatcagagagagcaaattaactagttaaagacaaagaaacctactaatactaaggtacgacttaccaaattagg

SEQ ID NO: 52549 - DNA, 356 bp, Setaria italica
  Peptide Sequence Number=SeqID_118523
aataatgtgcttaattattgttggctaggtcaataagtgcaattatcttgcttgcagaacctctatctaggtcgcttccaattggatcaattgcaaggaccttatcatgggatgatgcttctcaagaggcttcattgtgctgtaccaaaggtgatagccatgagcaagaacagtatgagtttgttgagaagattctaacgtctgttggcttctgtaatgagaaggcccaagacatctttgtccggtggcattcacttgactgccctttggacccagttgtgcttgaccaactgctggagcgcaaagtggaagatgccaagtgcagagagagacggtcaaaccagaggctcctcatt

SEQ ID NO: 52550 - DNA, 339 bp, Setaria italica
  misc_feature (327)..(327): n is a, c, g, or t
  Peptide Sequence Number=SeqID_118524
ggaattgcagagagggtactaggcctatgcaaggacaagctcaaaccagtgcttcttgagttacttaagggcactcccttagatgattacagcaatgttgttacgttgttgttccaagatgctggagaaaacaatgttgatgcatcaggaaaggacatggcagctgaaggtaaactttctgagaagtctgtttctgatgagtccccgcaggaaacttcaaagttagagcaagatgtcaattgtgtaggacaagatggtactagtccaatcagtactcccgcaaccaccattagcaatgttggcgctccagttgacaatgtcaagtcnccaggtggacca

SEQ ID NO: 52551 - DNA, 476 bp, Setaria italica
  Peptide Sequence Number=SeqID_118525
ctgtcagtgattcgtggagggagagctacaaggcggctagaataaagatgatgccaagtctttatcaactaaggctgctgaaggagaatctggggaaagaagcaacataaagccagtatgaagttgcagaaagaagatgctgcctctgataaagacactgatgaggatatcagtttgaaggtaaatttcttgttctcaatggactatagtacttgcatttaagtagtttctttgcacttcagtcatgcctgtatatcatttggtaaaggttagattttatagtgtctatttatagactatagtttcattacatgctttactgttctaaggtagttggcaggtaaagcattactaaaggtggacctgtaactcagtttatctttccagacgttttatttctatcgtccttggttgctgttcatcatgttttgaacttctctgtatacaccttttctaatgtggtttcccacaataac

SEQ ID NO: 52552 - DNA, 283 bp, Setaria italica
  Peptide Sequence Number=SeqID_118526
ccagattgacaaaatgttctatgagggtgttgttgaatcatttgatgcctcttcaaaaaagcacaaggttgcgtatgatgatggtgatgttgaggtactaatgctcaggaaggaaaaatgggaatgcattgttgaggagcaagatgatcctgatgcagcatcaaatatgccacgtggcagaagagccaaagggagctcagggcagctaaattgtaaggtaagttaaagtactaggtaacttacctttcttaaagttctttgtttagtttacttttgtttcttt

SEQ ID NO: 52553 - DNA, 242 bp, Setaria italica
  Peptide Sequence Number=SeqID_118527
ctcaaggtcgccgccttcgccgccgtgtccgccgcggtcggcggcacgggctacgccagctacgcttattctctagaggaattggatcagatgacgcgggagttccggaagaaatcgaagcatcccattcctgaagacgcatccggctttgagaagtttcaggctatggcttatgcagcagctatgaaagagttgtatgcattgttcttgtagttcctgttgccgctattgagggatacctg

SEQ ID NO: 52554 - DNA, 230 bp, Setaria italica
  Peptide Sequence Number=SeqID_118528
tttgtcttatggcaagaccttctgacatcagggctgttcttgcatcctatcaaggtagtgacattgctgccgagtttattgagcgctctaaggaacaccaaaggcgcatgcaagaacaaaagcaatcaggacgcatatggcggcgatgatgaccaaaatatgttggaacgaaaacatatctaattcttacttacttacttttctttatttagtagttacttatttgttaa

SEQ ID NO: 52555 - DNA, 411 bp, Setaria italica
  Peptide Sequence Number=SeqID_118529
tacttttagtaactaaaagtcgtacgtagttttagtaaagtcttcctttgtcctagtacattcaaatagctagcatggctctctagaatgttcataacagaggcaatatgtggactaagttctttcattgagttacttttcaaatcagaagattgccgcttatatggtgaacggaatagaaagtagccaagaaatcttggagagagcttctcggagtctgaggttgcattttcaaagtctcttccagatcttagcaagaagcgaaccaactccccagcaagctcatacaaagattcatcaagtgtagcttgtagcaaacgaagtgcacagtactgactgactgcaggcctcagcttagcaatgaccagtatgtagcaagcagcagtcctgtaccatcctccgttggaagca

SEQ ID NO: 52556 - DNA, 384 bp, Setaria italica
  Peptide Sequence Number=SeqID_118530
tgtttgggcttgaggtgaaggctcaaagcatggaaactcagcagttgagaaggacattctctgagaaacaccaacgaccacaccaacatttggaagaagaccaagaggatacacctcacgatcaaattcaagctcaggatccaactgcaagaaatcttcttgcttaaaaggatctgctccatgtgatggataccatacctgcataccccgatgaccatagtcaagccatgaaacctctttaataaggctacccttctcttcgaattgtgaacaggtgacccaaaagagttcaactgaatttgtgagtgcatgttcgtgtccaatacaataccaatagtaccaagacaacaaagaaaaagttaacaaaccaattaaggtaaccaa

SEQ ID NO: 52557 - DNA, 332 bp, Setaria italica
  Peptide Sequence Number=SeqID_118531
tattaatttcttattttactattctagtattttccgtcgtcttgtttcttctattcttaacttgttattgtgttaaattagcacaaggctaaatgccacattcaatgggttttttcaaacagtctcattcagcattcatgacaatggtccattttgcaatgtaagaccagatacggacgaaagctgctcctccaacatattaagaagatcaagatattctctgaatcatcatgtgactgtagagtaatgctatatgctttccacaatcgcaatcatgccgaaagagatccaccaaaacctctgcacgtcgcaataaagtagccagcaccacg

SEQ ID NO: 52558 - DNA, 322 bp, Setaria italica
  Peptide Sequence Number=SeqID_118532
gccgcttatatggtgaacggaatagaaagtagccaagaaatcttggagagagcttctcggagtctgaggttgcattttcaaagtctcttccagatcttagcaagaagcgaaccaactcccagcaagctcatacaaagattcatcaagtgtagcctggaaaacaacaaccatacagaagtaggagatggaacatcaaactaacgtccagactaaaccacctcatggtgaaggtaagagaattactgtagcaaacgaagtgcacagtactgactgactgcagggccctccagcttagcaatgaccagtatgtagcaagcagcag

SEQ ID NO: 52559 - DNA, 166 bp, Setaria italica
  Peptide Sequence Number=SeqID_118533
gatgcaaggcctgctccttgctgcacaggcaattcttctattgtccatgttgagctgtcggtgaagctaaggttgcttgttgctttgtactcaggctgtcacattgccctctgtactgttggtaagaagggattaaagcagcctggcagcatcagagtggagagat

SEQ ID NO: 52560 - DNA, 392 bp, Setaria italica
  Peptide Sequence Number=SeqID_118534
gagaagagcctctcgacttcatacacggcatctcttgagataacatctattactcttttcatgttcccaacaaataggttgctgtcgctccagctccagattgccctgcaaagcacgaattgagtttcaccacgaaaacagtgacatgatattcactaaagattgcgaaactaaggtgacaagagctcgcatacttgaatgtggacagccatctgcctgtcctgttgttatggtcgagaacacacgagtcatcaaagttgtccacatttaaaaaatccggacagtgccgtcaaggctacagatagtaagaaactaagaataagatcatttgtaacatttaaatgtgtgatccgtatcaatataaacctagtgaatggtagaacataagtatc

SEQ ID NO: 52561 - DNA, 380 bp, Setaria italica
  Peptide Sequence Number=SeqID_118535
agttaaacatcctaagtaacattttaccagctctacatgttgggcaaggcattccaacgtataagaatcaatcaagggaattccgttgaatagatgcagaacaagaaatatcggataaagtgagaatcacaattgttttacgaaccattgacacattgtggtaaatccacaccactcaattgtctcacccatctaggagcagttgagtaaaagactgatccagcagaatccagttgaagcacccaccatgaaataatagcatgagcatgtccatcagcagtagcttttatctcgatctttgtttcacgatgactatcaattcgtatttcatctgccagtgcatcacattgcatcgcatgttgttgtggctttacagaaag

SEQ ID NO: 52562 - DNA, 358 bp, Setaria italica
  Peptide Sequence Number=SeqID_118536
taacctaaccaaacaaaagtaaccggaaaagtaagaaacaataggacaacaataaatacttaaataattcctttacaaaggcatgatgaatgcatcctcagatagcaatggatcaagcagagttctttcattccgagtctcaaacttttgtcctttcttctcccaaaacagttaacccagctggtatgggtggttctccaaggtctgtacatgcaacagaaacgcatattttgccatggcagcatcccttcacttccaaggtagaaaggttcccccactactagattaaccttttcatgctttaagtcattcgttgtaagggatgaggcttttttaccaatgactttaatccggtcca

SEQ ID NO: 52563 - DNA, 235 bp, Setaria italica
  Peptide Sequence Number=SeqID_118537
ggggcttctactgcttacttcatcattcatattcaagtgatatgagacactagtttcgtcatggctagctctcaaagaaagagtttgatctttcatagcaggagcccctgtcccttgtataaaccagacacactgcttccaatgatcacaccaatccttcatgcccatctaggagcagttgagtaaaagactgatccagcagaatccagttgaagcacccaccatgaaataatag

SEQ ID NO: 52564 - DNA, 234 bp, Setaria italica
  misc_feature (215)..(234): n is a, c, g, or t
  Peptide Sequence Number=SeqID_118538
tgaagctcagagcaatatgatcacatcatgatgttcatcttcaataaaatcaaatgggcccttccgtgttaaaatgtataatatccttttcaatgggattttgtgcttttatgtatgctgtgtgctttaaaagtttattatatttctttactcactaaacacatggattatgtatctttttgtaaggcattattggattgtacattggtaaagtnnnnnnnnnnnnnnnnnnnn

SEQ ID NO: 52565 - DNA, 342 bp, Setaria italica
  Peptide Sequence Number=SeqID_118539
gttctgccaaagcagctcttgagagtgatacacgggtgcttgcttttgaagctggacggaaaggcaaaatcagaatcacgccgcaaagaagcaggaaagcccgtctatctacctcggccatgcctatgatgttattgtagggctgtcaactgcaagccccatcgtattgagtccgttgtcgacatacacggtcgagcctgtgatggcagaagccaatggagacaccaggaatgcagctgtgttccccactcatctgccaacagttcccttctgcaggtggtgcattgacatatgagtactctatcatcttctacaataaatccaattgccttagcagctcta

SEQ ID NO: 52566 - DNA, 448 bp, Setaria italica
  Peptide Sequence Number=SeqID_118540
ttctattctaaacttggtacttgtttaaggtaagtttgtccgtaattctagttgtattaattgtatttttggttagcattgacatacttgtgcattctcttgctaatggtcctgaggtaacaaagcctttattggagacatcaaggagaggctatcttgctgcgatttcagcatccagttactcctatgtttcattgcttcagcacttccttcctataatgaatccaggtggtgctagcatctcattaacatacattgcatctgaaagggcaattcctggatatggtggtggcatgagttctgccaaagcagctcttgagagtgatacacgggtgcttgcttttgaagctggacggaaaggcaaaatcagagtcaacaccatatctgcaggtcctcttgggagtagagctgctaaggcaattggatttattgagagatgatagagtac

SEQ ID NO: 52567 - DNA, 366 bp, Setaria italica
  Peptide Sequence Number=SeqID_118541
cctgaagatgtcaaatcgaacaaagatatgctggatcatcaaactggactgttaaggaagttgccgaatcagtgaagaatgattttggtagcattgacatacttgtgcattctcttgctaatggtcctgaggtaacaaagcctttattggagacatcaaggagaggctatcttgctgcgatttcagcatccagttactcctatgtttcattgcttcagcacttccttcctataatgaatccaggtggtgctagcaatactacaattaaacaataacaattagacaatactagaaaagggacaaattacctaggaataataggtaggtaggacaatagaagttactagaccaaaagacaagactaca

SEQ ID NO: 52568 - DNA, 389 bp, Setaria italica
  Peptide Sequence Number=SeqID_118542
gtcaaatcgaacaaaaagataatgctggatcatcaaactggactgttaaggaagttgccgaatcagtgaagaatgattttggtagcattgacatacttgtgcattctcttgctaatggtcctgaggtaacaaagcctttattggagacatcaaggagaggctatcttgctgcgatttcagcatccagttactcctatgtttcattgcttcagcacttccttcctataatgaatccaggtggtgctagcatctcattaacatacattgcatctgaaagggcaattcctgggtaattattcttgagatttatatgaactaattgttgagctaaaattacttttttagtggtctatatttattattacttttcttttccttgatagatatgg

SEQ ID NO: 52569 - DNA, 353 bp, Setaria italica
  misc_feature (344)..(344): n is a, c, g, or t
  misc_feature (351)..(351): n is a, c, g, or t
  Peptide Sequence Number=SeqID_118543
aactaaggaaataaataaggtaaggtaaggacaatagaagttactgccaaagcagctcttgagagtgatacacgggtgcttgcttttgaagctggacggaaaggcaaaatcagagtcaacaccatatctgcaggtcctcttgggagtagagctgctaaggcaattggatttattgagaagatgatagagtactcatatgtcaatgcaccactgcagaaggaactgttggcagatgaggtggggaacacagctgcattcctggtgtctccattggcttctgccatcacaggctcgaccgtgtactgtcgacaacggactcaatacgatggggcttgcagttgacngccctanat

SEQ ID NO: 52570 - DNA, 197 bp, Setaria italica
  Peptide Sequence Number=SeqID_118544
gcagcacgcgcatcgcgctcccagatcccccctccccgccattccccgaggccaggcttagctggcagtgaagaagatgagtacttcagcagctgctggtgtgaagatggtggctgcacgcccctgcatctcggcctcacaaggaatgctcgcctcgagggcagcagtttccaggattgaaaccactgctagatttg

SEQ ID NO: 52571 - DNA, 256 bp, Setaria italica
  Peptide Sequence Number=SeqID_118545
aacagaatcatctaaagagctcaatgctagaaacaattattacttaaggcaagtaaaaacaatacaagactgcatgttattcactttcgagttacaatgaaagataaatgaccttacccctggcaatgtagcacaaaccaatcagctttcttcatcgtcagtttgatttgcacctttcctcgattccttctttgaatgttgagatttgccatcgacgaagtaggatgccgatggccacccccgcgcggtggagaag

SEQ ID NO: 52572 - DNA, 252 bp, Setaria italica
  Peptide Sequence Number=SeqID_118546
ctactacaccgatcccaactctaaggaacccgggaccctcccgcccagcgtgtcggccgccgtgaacggcgtcgcgctctgcggcacgctcgctggccagctcttcttcgggtggctcggcgacaagctcggccgcaagagcgtctacggcttcacgctcatcctcatggtgctctgctccgtcgcgtccgccctctcgttcggccacacggccaagggcgtcatcggcacgctctgcttcttccgcttctg

SEQ ID NO: 52573 - DNA, 239 bp, Setaria italica
  Peptide Sequence Number=SeqID_118547
ccgccgcgcactggcaagagggccgccggatcgatccggctctgctgtgtttgggaggtgtgccttgcgctgccttggtggtcagttctcggcgggcgccatggcgcgtgggggcgacaacctgcaggtgctgagcgcgctggacgcggccaagacgcagtggtaccacttcacggccatcatcgtcgccggcatgggcttcttcaccgacgcctacgacctcttctgcatctccctgt

SEQ ID NO: 52574 - DNA, 230 bp, Setaria italica
  misc_feature (193)..(193): n is a, c, g, or t
  Peptide Sequence Number=SeqID_118548
tcctacgtctattcttccgtccgtccgtcggggtaaggtccggtcgtccatcatcgggcgttcgggttcctgtacgcggcgcagaaccaggacaagagcaaggtggaccacgggtaccccgcgggcatcggcgtccgcaactcgctcttcgtgctcgcagggtcaacatgctcggcttcatactcacgttccncgtgcccggagtccaaggggaatcgctcgaggacgat

SEQ ID NO: 52575 - DNA, 253 bp, Setaria italica
  Peptide Sequence Number=SeqID_118549
acgacgcggaccgcgccgggcgcgaggccgccggcgccggcagcaacaagtgggggctcttctcggcgcagttcgtgcgccggcacgggctccacctcgtggccaccaccagcacgtggttcctgctcgacatcgccttctacagccagaacctgttccagaaggacatcttctccaaggtggggtggatcccgccggcgaggaccatgaacgccgtcgaggaggtgttccgcatcgcgcgcgcgcacggccc

SEQ ID NO: 52576 - DNA, 462 bp, Setaria italica
  Peptide Sequence Number=SeqID_118550
attgtggcaagcataggagtcagtggctgtccaaacaaaataagagagaagaagccaacaccagtcagcaacagaactgtgggggtgatcattgcagccacaccccatccgaattttcggagtataattcggcctaacagcatcattgtgaaagttgcaattccagttgcagttgagaaatcgcccatgaaagatgagtattcatttggactcgggaactgtgccttgagttttgatttccaggtgacttccacaagattgatactaatgccataagcaaccactaaggtagctaggtccctcacatacctcgaggaaagcagaaccttcagactctctttcatgccaagcttaggttttcctttttcttcttacgatcagacttgggtaagttgtaaggtattctatttctaaaactaaactttgtttctacttccctaattagtattggtaagtttatta

SEQ ID NO: 52577 - DNA, 437 bp, Setaria italica
  Peptide Sequence Number=SeqID_118551
caggagtattccaccaaggtagggcgttgaattcgcaagagatccaaacgacaggatcatgaactgctgaatcaaagcacctccagatttccccaagggattgcagaccacatcaatagctgctttacctttaaccttcatatcctcatccaaaggaatgtacgccatttctttgcaaggatcaaataaactgtattttgcactcttactgaaaatgttctgcattgctccaacatagactgccgcaagcaaaggcgtcattccaaactgggtcatgagaggagtcagtggctcaccaaacaaaatcagagagaagaatccaactcctgtgagaagcaacactgcaggtgtgatcgtagctgcaactcccaccgactttctaagattactctccctaacacatcattgtaaatgtagctatgccagtagcagttgag

SEQ ID NO: 52578 - DNA, 418 bp, Setaria italica
  Peptide Sequence Number=SeqID_118552
tatttgacccgtgcaaggaaatggcatatattcctttggatgaagatatgaaggtaaaaggaaaggcggccattgatgttgtttgcaacccactgggcaagtctggtggtgcgcttatccaacaattcatgatcctggcattcggttccttggcaaactcgactccatacctcggcggcatactgctggtcattgttctcgcgtggctaggcgcggcaagctcattggacaagcaattctcgagcttggccaaggaagaccttaaggagaaggccgcccaagagaaagtggaaccctcattgctcacgttacaaagataacttactgctgccagctcgaagctgctgactggtacaaacttgagaaccatggattatttgatacccattatttcagctcgctgagatcaatcctacct

SEQ ID NO: 52579 - DNA, 474 bp, Setaria italica
  Peptide Sequence Number=SeqID_118553
gacagtctttgctttcagcatcttttctctctcgagatcttgctttgccaggggagagaactgtgagtcaagggaacttacagcacccaaccatgcaagaacaatcaccaggagtattccaccaaggtagggcgttgaattcgcaagagatccaaacgacaggatcatgaactgctgaatcaaagcacctccagatttccccaagggattgcagaccacatcaatagctgctttacctttaaccttcatatcctcatccaaaggaatgtacgccatctctttgcaaggatcaaataaactgtattttgcactcttactgaaaatgttctgcattgctccaacatagactgccgcaagcaaaggcgtcattccaaactgggtcatgagaggagtcagtggctcaccaaacaaaatcagagagaagaatccaaactcctgtgagaagcaacactgcaggtgtgatcgtagctgcaa

SEQ ID NO: 52580 - DNA, 380 bp, Setaria italica
  Peptide Sequence Number=SeqID_118554
ggcgttgaattcgcaagagatccaaacgacaggatcatgaactgctgaatcaaagcacctccagatttccccaagggattgcagaccacatcaatagctgctttacctttaaccttcatatcctcatccaaaggaatgtacgccatctctttgcaaggatcaaataaactgtattttgcactcttactgaaaatgttctgcattgctccaacatagactgccgcaagcaaaggcgtcattccaaactgggtcatgagaggagtcagtggctcaccaaacaaaatcagagagaagaatccaaactcctgtgagaagcaacactgcaggtgtgatcgtagctgcaactccccaccgaacttctaagaattactctccctaac

SEQ ID NO: 52581 - DNA, 447 bp, Setaria italica
  Peptide Sequence Number=SeqID_118555
ccaggggagagaactgtgagtcaagggaccttacagcacccaaccatgcaagaacaatcaccaggagtattccaccaaggtagggcgttgaattcgcaagagatccaaacgacaggatcatgaactgctgaatcaaagcacctccagatttccccaagggattgcagaccacatcaatagctgctttacctttaaccttcatatcctcatccaaaggaatgtacgccatctctttgcaaggatcaaataaactgtattttgcactcttactgaaaatgttctgcattgctccaacatagactgccgcaagcaaaggcgtcattccaaactagggtacaatagaagaggagtcagtggctcaccaaacaaatcagagagaagaatccaaactcctgtgagaagcaacactgcaggtgtgatcgtagctgcaactccccaccgaacttc

SEQ ID NO: 52582 - DNA, 351 bp, Setaria italica
  Peptide Sequence Number=SeqID_118556
tccccaagggattgcagaccacatcaatagctgctttacctttaaccttcatatcctcatccaaaggaatgtacgccatctctttgcaaggatcaaataaactgtattttgcactcttactgaaaatgttctgcattgctccaacatagactgccgcaagcaaaggcgtcattccaaactgggtcatgagaggagtcagtggctcaccaaacaaaatcagagagaagaatccaactcctgtgagaagcaacactgcaggtgtgatcgtagctgcaactccccaccgaactttctaagattactctccctaacaacatcattgtaaatgtagctatgccagtagcagttgag

SEQ ID NO: 52583 - DNA, 377 bp, Setaria italica
  Peptide Sequence Number=SeqID_118557
ggacagccactgactcctatgcttgccaacaaaataagagagaagaagccaacaccagtcagcaacagaactgtgggggtgatcattgcagcaacagaactgtggggtgatcattgcagccacaccccatccgaattttcggagtataattcggcctaacagcatcattgtgaaagttgcaattccagttgcagttgagaaatcgcccatgaaagatgagtattcatttcggactcgggaactgtgccttgagttttgatttccaggtgacttccacaagattgatactaatgccataagcaaccactaaggtagctaggtccctcacatacctcgaggaaagcagaaccttcagactctctttcatgccaagctta

SEQ ID NO: 52584 - DNA, 350 bp, Setaria italica
  Peptide Sequence Number=SeqID_118558
atcttgctttgccaggggagagaactgtgagtcaagggaccttacagcacccaaccatgcaagaacaatcagcaggagtattccaccaaggtagggcgttgaattcgcaagagatccaaacgacaggatcatgaactgctgaatcaaagcacctccagatttccccaagggattgcagaccacatcaatagctgctttacctttaaccttcatatcctcatccaaaggaatgtacgccatctctttgcaaggatcaaataaactgtattttgcactcttactgaaaatgttctgcattgctccaacatagactgccgcaagcaaaggcgtcattccaaactgggtcatga

SEQ ID NO: 52585 - DNA, 241 bp, Setaria italica
  Peptide Sequence Number=SeqID_118559
atctctttgcaaggatcaaataaactgtattttgcactcttactgaaaatgttctgcattgctccaacatagactgccgcaagcaaaggcgtcattccaaactgggtcatgagaggagtcagtggctcaccaaacaaaatcagagagaagaatccaactcctgtgagaagcaacactgcaggtgtgatcgtagctgcaactccccaccgaactttctaagaattactctccctaacaaatc

SEQ ID NO: 52586 - DNA, 250 bp, Setaria italica
  Peptide Sequence Number=SeqID_118560
agaactgtgagtcaagggaccttacagcacccaaccatgcaagaacaatcaccaggagtattccaccaaggtagggcgttgaattcgcaagagatccaaacgacaggatcatgaactgctgaatcaaagcacctccagatttccccaagggattgcagaccacatcaatagctgctttacctttaaccttcatatcctcatccaaaggaatgtacgccatctctttgcaaggatcaaataaactgtattt

SEQ ID NO: 52587 - DNA, 263 bp, Setaria italica
  Peptide Sequence Number=SeqID_118561
ggggaagaagaaactagtagaagtacaagggaaccttaacagcacccaaccatgcaagaacaatcaccaggagtattccaccaaggtagggcgttgaattcgcaagagatccaaacgacaggatcatgaactgctgaatcaaagcacctccagatttccccaagggattgcagaccacatcaatagctgctttacctttaaccttcatatcctcatccaaaggaatgtacgccatctctttgcaaggatcaaataaactgtta

SEQ ID NO: 52588 - DNA, 242 bp, Setaria italica
  Peptide Sequence Number=SeqID_118562
aaggtagggcgttgaattcgcaagagatccaaacgacaggatcatgaactgctgaatcaaagcacctccagatttccccaagggattgcagaccacatcaatagctgctttacctttaaccttcatatcctcatccaaaggaatgtacgccatctctttgcaaggatcaaataaactgtattttgcactcttactgaaaatgttctgcattgctccaacatagactgccgcaagcaaaggcg

SEQ ID NO: 52589 - DNA, 234 bp, Setaria italica
  Peptide Sequence Number=SeqID_118563
atcatgaactgctgaatcaaagcacctccagatttccccaagggattgcagaccacatcaatagctgctttacctttaaccttcatatcctcatccaaaggaatgtacgccatctctttgcaaggatcaaataaactgtattttgcactcttactgaaaatgttctgcattgctccaacatagactgccgcaagcaaaggcgtcattccaaactgggtcatgagaggagtcagt

SEQ ID NO: 52590 - DNA, 242 bp, Setaria italica
  Peptide Sequence Number=SeqID_118564
caagaacaatcaccaggagtattccaccaaggtagggcgttgaattcgcaagagatccaaacgacaggatcatgaactgctgaatcaaagcacctccagatttccccaagggattgcagaccacatcaatagctgctttacctttaaccttcatatcctcatccaaaggaatgtacgccatctctttgcaaggatcaaataaactgtattttgcactcttactgaaaatgttctgcattgct

SEQ ID NO: 52591 - DNA, 223 bp, Setaria italica
  Peptide Sequence Number=SeqID_118565
acagcacccaacccatgcaagaacaatcaccaggagtattccaccaaggtagggcgttgaattcgcaagagatccaaacgacaggatcatgaactgctgaatcaaagcacctccagatttccccaagggattgcagaccacatcaatagctgctttacctttaaccttcatatcctcatccaaaggaatgtacgccatctctttgcaaggatcaaataaactg

SEQ ID NO: 52592 - DNA, 219 bp, Setaria italica
  Peptide Sequence Number=SeqID_118566
tattctaaagacacctccagatttccccaagggattgcagaccacatcaatagctgctttaccttttaaccttcatatcctcatccaaaggaatgtacgccatctctttgcaaggatcaaataaactgtattttgcactcttactgaaaatgttctgcattgcctccaacatagactgccgcaagcaaaggcgtcattccaaactgggtcatgagagga

SEQ ID NO: 52593 - DNA, 171 bp, Setaria italica
  Peptide Sequence Number=SeqID_118567
tggacctaggaagcagactccggtgaacttccaatctgggtctatgaagttgggtgatgtggttacagcaaaggtctatcagattcgagcctttggactagtacttgagctgagcgagccggtaaagagaagaaagaatacaagatatctctaattttctcgtaggatgta

SEQ ID NO: 52594 - DNA, 364 bp, Setaria italica
  Peptide Sequence Number=SeqID_118568
tttttagctgttataacataatccttcagctatctagttcatggtttatcaacctatcggttccatatccagcgtgcatttcatcacaacattcatggatggagctttagaagaaatgacgattacaaactatcagaactatttgcccagtaccgcaatctcaacatacgatttcaaacaccatggagccatgtggattaaccactgctgaaatcacttccttcgtgagactgaaattcttcccgctccaaacttcagtgcatctacataggtcttttctcaagaatgctcttctgagaacctttccaaggtctgatattcgtagcaagaccaatacttacctagactacgtaggaagtaacaa

SEQ ID NO: 52595 - DNA, 262 bp, Setaria italica
  Peptide Sequence Number=SeqID_118569
agtaggattggtaattatgcttaatgtaccatcatcaagatgtgtcaaatctcctccgtacataagaggcgatttagccattgaccaaagtgccatctgtgttttctgttcatcaagagtaaggttacatttcctgtgagggccctgatttacacctgcactaacagaagaaaagggtctgtttctgatacaactgcatatctattatatcattcaaaataatacctaaaaaaagggaaagaaaagaaaaaacgacatatag

SEQ ID NO: 52596 - DNA, 281 bp, Setaria italica
  Peptide Sequence Number=SeqID_118570
gtcggggtagtcttctttcgtcccggtattcgttgtcgggtccgggtcgggttgtagggtaggtacgtttgtcgtcggcgatacttcaggcagctcgtctccgccgtcgacttctgccacgcgcgcggcgtgttccaccgcgacctcaagccggagaacctcctcatcgacgaggcggggaacctcaaggttgtcgacttcggactcagcgcgctcgccgaccacacccgcagcgacggcctgctgcacacgctctgcggcacgccggggtacgtcgcgcc

SEQ ID NO: 52597 - DNA, 286 bp, Setaria italica
  Peptide Sequence Number=SeqID_118571
cgttcgggtccgcggagtactgctgcagcggcgaccacgggaaccccagcacgtgcaagccgtcggcgtactcgcagttcttcaagaacgcgtgcccgcgggcctacagctacgcgtacgacgacgccacctccaccttcacctgcgccggcggcgataccacctacgccatcaccttctgccccagcaccaccagcgtgaaggcggacggggctagtccgcaggcggacggggaacctagaaccgaactaaagaaataaagaaaaacgaaaacaaaaccaaaata

SEQ ID NO: 52598 - DNA, 194 bp, Setaria italica
  Peptide Sequence Number=SeqID_118572
cctgcctgccgggtgagggggtagacacggactacgcgggcctcaccaacagccagattcgcccgtgccgaaagagacgcggctgaaattgcacagcgaattggttgagacgttaagtagtccgtgtctaccccctcacccggcaggcaggtgacacgtccacttcgcctgtgctcagcatttttcagcgtgca

SEQ ID NO: 52599 - DNA, 250 bp, Setaria italica
  Peptide Sequence Number=SeqID_118573
actacgcgtgccggagcgtccacagcgactgcgtcgactccatcggcaacggcgacggctaccgctgcaactgctccaaggggtacgagggaaacccctacctcgacggtggatgcagaggtacacatctcatctcaacgcgatatgctcattacagatttcccctgttttgcctgtttgtcttacccaatgatgaaattgcttctgcaaacggaagacatcgacgagtgcaaccgcaaacacgaatact

SEQ ID NO: 52600 - DNA, 320 bp, Setaria italica
  Peptide Sequence Number=SeqID_118574
tatagttaaatttgtttttacctaagttaactaaacaatttagtaaatttaggacaacaatagacgaatatgatccctagtgtattttacagctctacgtacgtacggtacatttttggagcataaacatactgttgtgatccctacacgggtgaacgcatttgccatgaggctttagccagcgcgcttctcccagatccatcggcttggcctgaaaatctgccgcaggagcgccatcttgggaacgttccagttctcgacatgcctgcacactttccctgattcagcatcgaagtagtattccgtgtatccggttgctg

SEQ ID NO: 52601 - DNA, 450 bp, Setaria italica
  misc_feature (78)..(78): n is a, c, g, or t
  misc_feature (157)..(157): n is a, c, g, or t
  Peptide Sequence Number=SeqID_118575
attagtaaaaaaattaaaatgttggacttgaaacatagatgtagctatattataagatagagggagcagtaaacatcntaaaactagttattaagctagttattacgtctagattattttttccaaaatatataggaccatcttcataaaaaaaacnccaatacatatccaacaaaagctgcgcctggcccacgcctaaagggtcgatcaatgggcagcaacgaaagccaccactcgatccatcagcgcaacagcctcgtggctgccgtgatcggagacgaagaaggcgtgtcccttgcctttagactcgaaccactccaccttccccatccacccgctggtcctcacggcctcgcagtaagctcggccccttggcgccctcggatcctccgacgccgtggccggcaagaggttgtttgtagccacggcctcggatcctccgaacgacca

SEQ ID NO: 52602 - DNA, 238 bp, Setaria italica
  Peptide Sequence Number=SeqID_118576
tgagaagatttggcctggctatgccaaattacctggtgtgaaagtcaattttgtcaaacaaccgtataacaggctaagggataagttcccaaccacattccactcacacgggcctctcggctcgcctccggcgtcgcccccgagttccccacgtggcggcgggaccgccagaccgacgagcggcggcctccgcgccgcatggacgctgccgaccccctccgtgccatctcctctccgg

SEQ ID NO: 52603 - DNA, 271 bp, Setaria italica
  Peptide Sequence Number=SeqID_118577
gttatgcttcaccctgaatcagcaagatcagatatcttctgaggcttggtgccggttaagtggatgaggtttctccttatggtccatcatagaaattttcttgcaggaattaacactccatccacattgatcctaaaaagcaaatataatctgcctgcatcgtaagagacgaaagaagcgcaggggaaggatgcattttgcttttcaccaggaaatcaatggacattaataacaaacttaggaaaggtaataataatagtactaaaaagta

SEQ ID NO: 52604 - DNA, 370 bp, Setaria italica
  Peptide Sequence Number=SeqID_118578
cagcaagatcagatatcttctgaggcttggtgccggttaagtggatgaggtttctccttatggtccatcatagaaattttcttgcaggaattaacactccatccacattgatcctaaaagcaaatataatctgcctgcatcgtaaggtgtggcatgttggcttttattggttacaccagtttcacctttggaacttctgtatgtaaaatattccagattggtacgttgtaaacaatgttcagtgtgttggattaaaataaaacatcatcattatcgttattactttaaaaaaaaaaaaaacaaaaaaaaacaaaaaaaaaaacaaaaaaaaaacaaaaaaaaaacaaaaaaaacaaaaaaaacaaaaaac

SEQ ID NO: 52605 - DNA, 420 bp, Setaria italica
  misc_feature (420)..(420): n is a, c, g, or t
  Peptide Sequence Number=SeqID_118579
aacggtacctgaagagccctgaccctctagaagagcaacgtttgaaagaactgcaagggaacataggcaaccgtgggctttttggctgaactaggaccacttgcttgggttcctatccgtactaactgttatgcttcaccctgaatcagcaagatcagatatcttctgaggcttggtgccggttaagtggatgaggtttctccttatggtccatcatagaaattttcttgcaggaattaacactccatccacattgatcctaaaagcaaatataatctgcctgcatcgtaaggtgtggcatgttggcttttattggttacaccagtttcacctttggaacttctgtatgtaaaatattccagattggtacgttgtaaacaatgttcagtgtgttggattaaaataaaacatcatcattan

SEQ ID NO: 52606 - DNA, 445 bp, Setaria italica
  Peptide Sequence Number=SeqID_118580
gcacaaatggttctctgaagttcctcttcctaagtccaaggacttcatgcctacattccctgcgcttaatgaactggacaggcgtaccaaacggtacctgaagagccctgaccctctagaagagcaacgtttgaaagaactgcaagggaaccataggcaaccgtgggctttttggctgaactaggaccacttgcttgggttcctatccgtactaactgttatgcttcaccctgaatcagcaagatcagatatcttctgaggcttggtgccggttaagtggatgaggtttctccttatggtccatcatagaaattttcttgcaggaattaacactccatccacattgatcctaaaagcaaaatataatctgcctgcatcgtaaggtgtggcatgttggcttttattggttacaccagtttcacctttggaacttctgtatgtaaaa

SEQ ID NO: 52607 - DNA, 355 bp, Setaria italica
  Peptide Sequence Number=SeqID_118581
tagaatagactactagaaagcacaaatggttctctgaagttcctcttcctaagtccaaggacttcatgcctacattccctgcgcttaatgaactggacaggcgtaccaaacggtacctgaagagccctgaccctctagaagagcaacgtttgaaagaactgcaagggaacataggcaaccgtgggctttttggctgaactaggaccacttgcttgggttcctatccgtactaactgttatgcttcaccctgaatcagcaagatcagatatcttctgaggcttggtgccggttaagtggatgaggtttctccttatggtccatcatagaaattttctgcaggaattaacactccat

SEQ ID NO: 52608 - DNA, 393 bp, Setaria italica
  Peptide Sequence Number=SeqID_118582
ttcatgcctacattccctgcgcttaatgaactggacaggcgtaccaaacggtacctgaagagccctgaccctctagaagagcaacgtttgaaagaactgcaagggaacataggcaaccgtgggctttttggctgaactaggaccacttgcttgggttcctatccgtactaactgttatgcttcaccctgaatcagcaagatcagatatcttctgaggcttggtgccggttaagtggatgaggtttctccttatggtccatcatagaaattttcttgcaggaattaacactccatccacattgatcctaaaagcaaatataatctgcctgcatcgtaaggtgtggcatgttggcttttattggttacaccagtttcacctttggaacttctgta

SEQ ID NO: 52609 - DNA, 407 bp, Setaria italica
  Peptide Sequence Number=SeqID_118583
taagaagaagcaaacgtttgaaagaactgcaagggaacataggcaaccgtgggctttttggctgaactaggaccacttgcttgggttcctatccgtactaactgttatgcttcaccctgaatcagcaagatcagatatcttctgaggcttggtgccggttaagtggatgaggtttctccttatggtccatcatagaaattttcttgcaggaattaacactccatccacattgatcctaaaagcaaatataatctgcctgcatcgtaaggtgtggcatgttggcttttattggttacaccagtttcacctttggaacttctgtatgtaaaatattccagattggtacgttgtaaacatgttcagtgtgttggattaaaataaaacatcatcattatcgttattcttta

SEQ ID NO: 52610 - DNA, 289 bp, Setaria italica
  Peptide Sequence Number=SeqID_118584
agaagagcaacgtttgaaagaactgcaagggaacataggcaaccgtgggcttttggctgaactaggaccacttgcttgggttcctatccgtactaactgttatgcttcaccctgaatcagcaagatcagatatcttctgaggcttggtgccggttaagtggatgaggtttctccttatggtccatcatagaaattttcttgcaggaattaacactccatccacattgatcctaaaagcaaatataatctgcctgcatcgtaaggtgtggcatgttggcttttattggtt

SEQ ID NO: 52611 - DNA, 228 bp, Setaria italica
  Peptide Sequence Number=SeqID_118585
atcacatcttcttggtgtctaccagcgactgatagtgttctttagcaggcttggtgccggttaagtggatgaggtttctccttatggtccatcatagaaattttcttgcaggaattaacactccatccacattgatcctaaaagcaaatataatctgcctgcatcgtaaggtgtggcatgttggcttttattgtttacaacgtaccaatctggaatattttactatta

SEQ ID NO: 52612 - DNA, 321 bp, Setaria italica
  Peptide Sequence Number=SeqID_118586
ttcctatccgtactaactgttatgcttcaccctgaatcagcaagatcagatatcttctgaggcttggtgccggttaagtggatgaggtttctccttatggtccatcatgaaattttcttgcaggaattaacactccatccacattgatcctaaaagcaaatataatctgcctgcatcgtaaggtgtggcatgttggcttttattggttacaccagtttcacctttggaacttctgtatgtaaaatattccagattggtacgttgtaaacaatgttcagtgtgttggattaaaataaacatcatctatttattcgtttaaaa

SEQ ID NO: 52613 - DNA, 148 bp, Setaria italica
  Peptide Sequence Number=SeqID_118587
gtgggctttttggctgaactaggaccacttgcttgggttcctatccgtactaactgttatgcttcaccctgaatcagcaagatcagatatcttctgaggcttggtgccggttaagtggatgaggtttctccttatggtccatcataga

SEQ ID NO: 52614 - DNA, 283 bp, Setaria italica
  Peptide Sequence Number=SeqID_118588
ttaggtttagtaactaaaaacggttggtttgtctacttgttattatttttttattgttgctgactttctcctggtcctcagaaaactgcaagtgttgtatcctgtatggttacaaatcatggaagagacgcctaatttgttcaacagtggcaggcatcagcgtgacaggacaccttttatgctgagagacggacttgaatatgcaactgtagcaaaaaaacaaaccagaaacagagagaacagaggggttgcgcgcttctggcagcacagggggcacagtgtc

SEQ ID NO: 52615 - DNA, 332 bp, Setaria italica
  Peptide Sequence Number=SeqID_118589
aaagaaaaataaaataaagaaacaaaaagtaaaacttaagaaaagttaaattaagaaagaattagtaagacaacaaaactaatagtagaatgactaatcgcctcaagattacttgaaccggtcttctggtatgcgctctgagtcaagagataacaatttcagcccagctagagttgcaatatctgtggctgttggtagttgcactcagtacagtataggagtgtctctttttgagcttgagaacaaggagcatgttgatctcaaagcatttgcttccgatggatcatattactggttctcagctcaaattgaagatgacttcggatagaact

SEQ ID NO: 52616 - DNA, 363 bp, Setaria italica
  Peptide Sequence Number=SeqID_118590
ttcctttgttaccttattctagtctaagttcttgttgtctactattccttcgtaacttcaactccaaagcggaaaggaggaaaatggctaagcggtgttttcatgtctaatgatatagttgcatcctctgcagtttcccaatccgacccaagttcatgctcctttgactcctgcatctggacagaagaaccaccgtggagtagaaacagatgcaacactgcgatatctcgtctgcacgctggtctcaaatatgctttcagcctgctgatgaacaacattgctttcttggctaagattaaccaatgcagttaggccatccgctgaaatatctccattgcggtcaattctaggttctgattcatc

SEQ ID NO: 52617 - DNA, 256 bp, Setaria italica
  Peptide Sequence Number=SeqID_118591
ggatggggaacggattgttctacaggaggaccatctggagaaagtacttcatatcagtttaatgaaatagcaataatgttatgggcaatttcattccccaagttatcatgcaactttaagttctgcaattcagactcaattagctgttcctcgccaggttcatccattggagtcttccccttcctcatggaatgatcagcatttgatgagcttgtttcattcccactaacttgtaactcaaacatggtaaccgttt

SEQ ID NO: 52618 - DNA, 334 bp, Setaria italica
  Peptide Sequence Number=SeqID_118592
tgtaccctatttccatgaacattctgttaacatgcagctaagagaatgaccctgatttgtaaattggtgtgcagttctgcaaggcttctgtggagcctatgggtgaggaaagtgatcatgtgcacataattgccctatcagatgcattaggtgtaccgatccgtgttatgtacctagaccgaagctcttgtgatactggcaatctgagcgtgaatcaccatgacttcatcccttcgaccaatgctgagggccccgatgctgcaacgacatccactccttgtcctacttgtagtaaacccttactattcttactttttgttcttctttatttctt

SEQ ID NO: 52619 - DNA, 291 bp, Setaria italica
  misc_feature (90)..(90): n is a, c, g, or t
  misc_feature (165)..(165): n is a, c, g, or t
  misc_feature (230)..(230): n is a, c, g, or t
  Peptide Sequence Number=SeqID_118593
gcaggaagccaaagctcactcgtgagattgaactgactggacatattagtcccaataatattgacccaggtcccaggttcgaatccagcngagggaagtgaagaagaccccttgagatcatggcagcaacgcaagacagaatcgcggattggtagagcatcaacncttttgcatctcatctcattccatctcatatcctgatcccagtcgcactgcccatccaaatgccncaaaggtcgagaggatgaggagcggaagggctaggaacattcagagcaaagcagagcagcc

SEQ ID NO: 52620 - DNA, 346 bp, Setaria italica
  Peptide Sequence Number=SeqID_118594
cgtttaaagttggttgtttttctttttgtaagtaagttattcgttcccttcttaagttctttactaaaggtccttttatttttgttttcctattggactgaatgaattattgcattttgaactgccattttctgatggttgctacttgtttctccttttcattgcattaggttgcctatattataaataacaaatttacatcctgtgcagaggtcagtgaaatgtcaagaagattgacatctgacacgatagtatacgcaaataaggcaaaggacctcaatcggcaggtattccatatttacaattgcataatacaattcatggcttatacacttgcctgctgagc

SEQ ID NO: 52621 - DNA, 452 bp, Setaria italica
  Peptide Sequence Number=SeqID_118595
atttcctctttagtaacttgttgtagcttttactttcattaattgttgtttgtgaagctattaggaaagaccccaatcagcaccatggtaatcatttttgtttgtttctctcctgttatgctttgtgaaaatcttggttccccttaatccgaatgtatagctacatcattgaaggccgagtatgttatttgattatgtgtgaccgctcttatccaaaaaaacttgcattccagtacctagaagatctgaaaaatgaatttgagagggtcaacggaaatcaaatagaaactgccgccaggccgtatgcttttatcaagtttgatacattcatccagaagactaagaaactgtatttggatacaagaactcaaaggaacattgcaaaattgaatgatgagctctaatagaaggtagacaatacaaaattaatagaacccgacaaatagttacaa

SEQ ID NO: 52622 - DNA, 197 bp, Setaria italica
  Peptide Sequence Number=SeqID_118596
cacgagtgcgagcgccgcctgtctcaccgtcaacaacgcagcagtcgcaagggctcgaatctacggcctcctgcccctccgcgcatcctccgccatcaaactcagaacgggttcggcaacgagattcatctgtgacgccaagtgtgcagctttcctgcagccaagatgattgaggaaattgtaactacaaggaaagg

SEQ ID NO: 52623 - DNA, 436 bp, Setaria italica
  Peptide Sequence Number=SeqID_118597
tttggaacagaaagtaggctttcatagagatacatcgccaactctttctcatattcatggatctgatccatgccaatgcatgataaatagtcaattgctgctccaaatcctatagcttctccaattgcaggagttccagcctcgaatctagagggaggctcagcatatgtggatttctcatagaacacatctgcaatcatttcgccaccacctaagaaaggctccatagatgacaacatttcaaatgtgccgtgcataaatccaacgccttatgtgatgatgctacaagaaagtcagcgccaagtttctgaacatcaactggcatatgggacactttgacaagcatccacgagaaccttagctccaactcttttgaccatgttacaatctcctcaataggaagcattgaaccgagtacatttgagacatgatggac

SEQ ID NO: 52624 - DNA, 356 bp, Setaria italica
  Peptide Sequence Number=SeqID_118598
gaagacttgcacgagcacttgcatcgataccaagggtcctatgcaaaatctgtgcacaatggtgccccgatcgaattgctacgttatgctgaagatcaagaattccagcaatatctgtaggatgaacattctcaacattgaaagagcataaaggagcacggtgatctgtttgggaaggtgccggaccgtatatccggacatttggaacagaaagtaggctttcatagagatacatcgccaactctttctcatattcatggatctgatccatgccaatgcatgataaatagtcaattgctgctccaaattccttattagtctttcttcctaatttgtctaggttagtttcctagtct

SEQ ID NO: 52625 - DNA, 210 bp, Setaria italica
  Peptide Sequence Number=SeqID_118599
tttagaaagataaagatcagcattacaaaatgggaacacagagttatgaagttattagtaaaagttctatttacgcaatctgaataactgttgaattaaaaaacaaaattatgtttacataataaaacaaatggttgatgcttcagcatacctgaagatcaagaattccagcaatatctgtaggatgaacattctcaacattgaaagagc

SEQ ID NO: 52626 - DNA, 258 bp, Setaria italica
  Peptide Sequence Number=SeqID_118600
gtaagtgttaagtaactgaagtttaatcctctgacacagactgaacaaactccttacaccctgcagtacaatacctaagaaaggctccatagatgacaacatttcaaatgtgccgtgcataaatccaacgcctgtagggccacacatctgagaagtttagcccatagtttgtgaaggtcgattaatgctctattccaacatgactataaatttaatttagtttcagattgttaataataaaaccttatgtgatgatgc

SEQ ID NO: 52627 - DNA, 358 bp, Setaria italica
  Peptide Sequence Number=SeqID_118601
gcatcagaagacagttaagtatgcttatgttattgtaactcagactcgatacagcaggcattgaatatgacgcactgcagcagcatctttctttcgcctgtattgccttgccttggaataattgcccagaagaggcccattctggaccgagtgtcatcagaatgctgccttttgagctgcctgcatgtttgacctttttcgtttatcaattcccgccgcagaagatttgtaggatttaggattgggttccctctttttgatctgtaaccttttcaggcggcaactcagcgtgtcgaaaacaagcagcaaaggaagctgaggcaacggctagtactagatgcatcttgacggtggtcgg

SEQ ID NO: 52628 - DNA, 263 bp, Setaria italica
  Peptide Sequence Number=SeqID_118602
aaaggctccatagatgtacaacatttcaaatgtgccgtgcataaatccaacgcctgtagggccacacatcttatgtgatgatgctacaagaaagtcagcgccaagtttctgaacatcaactggcatatggggaacactttgacaagcatccacgagaaccttagctccaactctttttgaccatgttacaatctcctcaataggaagcaattgaaaccgaagtaacaatttagaagaacaatagaataggaacaaacaaacca

SEQ ID NO: 52629 - DNA, 241 bp, Setaria italica
  Peptide Sequence Number=SeqID_118603
cttgcatcgataccaagggtcctatgcaaaatctgtgcacaatggtgccccgatcgaattgctacgttatgctgaagatcaagaattccagcaatatctgtaggatgaacattctcaacattgaaagagcataaaggagcacggtgatctggtttgggaaggtgttgataaatgatatgtggttaattacttctgcagtaacgtgtttatgtgtataattacctgcaatttggaccagagt

SEQ ID NO: 52630 - DNA, 205 bp, Setaria italica
  Peptide Sequence Number=SeqID_118604
ccccaaaatgaaatctgtaactctggcaaatccatctggagagcgtggccgcctccggactagccgtcgctggtgacgaccgactcgcagctcgtgtccgtcgtcgccaagcccgcgctctgcgtctgctggcggtagtagccgttctcgtagacgagctgcgagacctgcttctgcaggcggtcgttctcctccatgagcagct

SEQ ID NO: 52631 - DNA, 204 bp, Setaria italica
  Peptide Sequence Number=SeqID_118605
cagcagtggggaggtcatcgctgaatgatgcgtctatgggtgcaaagatgagctctgaacatgtgcctacggtgttctcgtctacaccattgtacatctgccaatccggtatagaacacattttacaaagaagcgcgagtgttgcaaagttcaatcgaggggagatcaagctttatgactcaggatatcttgttcaaggtcaaa

SEQ ID NO: 52632 - DNA, 285 bp, Setaria italica
  Peptide Sequence Number=SeqID_118606
taattaaattagttaacttaagttagttaattaataacaaaatggtgttatacaaatgaccttttattgttgcaggttaagagagaagaaattgtcatgggttgatatttttgaggagataccgattaaagtttccaactcagcacttgtcagtgccttcatgaaggagctggaacctgagtcgcctgttactcaggttcataattttcttacaaaaactcttgtgtgtcattgtccctcttattctcttaaaagctatttgaatcatattactgttttttttaa

SEQ ID NO: 52633 - DNA, 488 bp, Setaria italica
  Peptide Sequence Number=SeqID_118607
aagcagatgctgatggtagcaaattaccagcttgagatgatgaggtgcttgagggaagtttaatgttgacaataatactattggatggtatcagtcttgcttgcttggatcttttcaaactgtggaactgattgaaacatttatgaactaccaggagagtatcaggagatgtgtgtgcattgtctatgacccatctaggtctagtcaaggagtgctagctctcaaagccctgaaacttacagactcatccatgcacccaattagaaattccaagttcctttccataaagggagcagttgacaatttaagtctgtcgaagtcacactgagtaacaggcgactcaggttccagctccttcatgaaggcactgacaagtgctgagttggaaactttaatcggtatctcctcaaaaatatcaacccatgacaatttcttctctcttaacttctctccagttaaaccattgttacggtaaagatccataaatg

SEQ ID NO: 52634 - DNA, 233 bp, Setaria italica
  Peptide Sequence Number=SeqID_118608
gtccattgagatgttgtctctatccctaaaacagatggtaaaattttcttgtgcttcattgtgcactcattggttgtaacttgctgtcacaatggcagggttgctggcagaatttcaacaggctatacctgatgaaggccctgcatgaggactagaagactgggctatgagtggaagctgttgttagatttaactcgtgctactgcttaaaatcacaattttgcgatgcatct

SEQ ID NO: 52635 - DNA, 209 bp, Setaria italica
  Peptide Sequence Number=SeqID_118609
agccattgcctgaagaagatccatccaatcctatcttcaagcccgttcctgagccatcacgattggagggctatcttgttaccaatcagaatctctagctactgcaaccatatcaacggggttgctggtcagaattttcaacaggcttattaccttgtattgtaaggtcccttgtctatttgttaggttactttagttaagttacttta

SEQ ID NO: 52636 - DNA, 330 bp, Setaria italica
  Peptide Sequence Number=SeqID_118610
tattttacttgtctattctttgttttggtctattcgttagtcttgtcttgttggggtagttcttctatttcatgcagtttgccaacaagaactcgatgaggaacatctacatcattggactctcgttgttccttggcatctcagtccctcagtacttcaatgaatatacttcttctgctggcctggacctgcccgaacaaatgctggatggttcaacgatattttaaacaccgtgtttgcttctggcccctaacggtggcgctgattgttgcatctgttctggacaacacattggaggctaggggcttcgacggcgaccggggtctccca

SEQ ID NO: 52637 - DNA, 252 bp, Setaria italica
  Peptide Sequence Number=SeqID_118611
tagattatttttaaaagagatgcttaaacgttactgcttgtgctaaaaaaatgtaggggaaacattggtctccttgggctgacgaaagttggaagtaggagagtgatccagatatcaactggatttatgatatttttctccatatttgggaagtttggggccttctttgcatcaattccactgccaatctttgcagcaatttactgcatcttgtttggcatcgtagctgctgtgggagtctcattcatgcag

SEQ ID NO: 52638 - DNA, 228 bp, Setaria italica
  misc_feature (70)..(70): n is a, c, g, or t
  Peptide Sequence Number=SeqID_118612
cagtcatatccatgagcggatcaccttcttgtttgagaggtattctttgcttctttgtattggcattgtntgggcctttgcagctatccttactgctgcgggtgcctacaaccatgtttcacttaagacgcagctgcactgccgcactgataagtctttcctgatgtcatctgcaccagcggtgaagattggcgtaccccattggaaagggtatggaatttaatccat

SEQ ID NO: 52639 - DNA, 249 bp, Setaria italica
  Peptide Sequence Number=SeqID_118613
gtaatgatatatgattggaactgaccctggtagcttgtcaggaaaggctcatgtaccttagactgatgggttcggcctgacggcaaaactgatctgttgggggcgcgatgctagtgcccattttagatagaatgtattgttgacttttagatctagggaaggaaggcactgtcgccatatatgattactagattattgtgagattaggaaaggacacgctcgaagcatatatatgaaatttaatttatt

SEQ ID NO: 52640 - DNA, 395 bp, Setaria italica
  Peptide Sequence Number=SeqID_118614
ctaagagtatggctcagagacctggaagtagagttagcagaaaagttgctggtgttgtgactagcagttccagtccttctaaaaggtcttctgagaagcgcaggtcctccgcgtatgttgtacgtgacagtgctaaggagaaaccaacttatatcatggtgccgaagagagaggagcatacacagagggaaaaggctgttgctggaagttcaggtggtaaacttgtagcaaatcaagaagttgttaatcgtaatccttctgtttttaactgtttaaacaacagtatttttaatgttagtgcgtattactgagggatttttctgttattacctacacccttgtctatgtgctgttaaaatgatgtatctactatttgtgttgattattggaaccct

SEQ ID NO: 52641 - DNA, 245 bp, Setaria italica
  Peptide Sequence Number=SeqID_118615
taaaccctaagtactaattagttaaggttaagtacttacttacgtattctactttgggttgtagtatttgtatttgggtccctaaggttgtctatttgtggagcaatgcatggagattaggttggcatcagtacctcactacctcgtgatagtggtcacatatttccaagacccctggaggctacacacaccctcatcaattcgtcagagatggatgtaaatatctctagagaaagaagaggtct

SEQ ID NO: 52642 - DNA, 234 bp, Setaria italica
  Peptide Sequence Number=SeqID_118616
tcgacctttaagaaggtactcacatgacttgcgagcacctgggtttgagccattgctcaccaacatagctattacttggttctcatttttggcatgcactacaagtacagcataattgaagatctatttattatttcagggtgttggagatagattggggtcatcaatgagttgttcaaacaatgatgcaaggttggatattcgcaatgatttatctgtttgatacattaatta

SEQ ID NO: 52643 - DNA, 239 bp, Setaria italica
  misc_feature (226)..(226): n is a, c, g, or t
  Peptide Sequence Number=SeqID_118617
ctttgcaaaaatgaacatctgtcatgctcccaggctcagggtgttggagatagattggggtcatcaatgagttgttcaaacaatgatgcaaggacaggacgggatggaagtggcttacaacatactgaatcacaaacggtccaatcagcagctgaacattatcaaagtgatgagcaccaacagggaggtcaccaggaacttaatgaaattggatcaacaagaaagngtagatttacatt

SEQ ID NO: 52644 - DNA, 192 bp, Setaria italica
  Peptide Sequence Number=SeqID_118618
ccttacttctagcagccttgtccgtttctactgtctggctcaaaataccacatcatcaggatcatcttcatctgcgccatcgtcatcagcattatcatcattatactcatcgtcatcatcatcgtcagcataagcatcgtggcgggatgaagcagtcaagctgctccacttctggtggagcaacaaagtctg

SEQ ID NO: 52645 - DNA, 235 bp, Setaria italica
  Peptide Sequence Number=SeqID_118619
agaacagagttacaaataaagagcaagaatggaccgtttccaatcccaggattgtcggaaattctaccttggcaatttcatgattgtcggaaattctaccttggcaatttcatggaacacggggtgagtttcagcctttcagggagaagtccatcggatcaccaccagagccccttgccaaagtgccaatagactacgaaaagataaagaaatgctatgcacaaacttctgcaag

SEQ ID NO: 52646 - DNA, 315 bp, Setaria italica
  Peptide Sequence Number=SeqID_118620
tagtaagtttaccaaggaagcacatcatcaactattgcacgccgcaacagcacaggagggtgtggatatagccgcatagactcatttatacagcgcatcaagtacttcagctcctttacatcctcatatctggggagtctaccctgtagaacacgatcaacctcatcttagagctctccttagtgcagtcagatccttcagtagtgtaacacttacttagaagatagattgtccatgtcagtacggagcctgttgtttcatgaccagcaactaacatcgataagagatcgtcacgtaactgcacactgcttacct

SEQ ID NO: 52647 - DNA, 243 bp, Setaria italica
  Peptide Sequence Number=SeqID_118621
gcacagaaaatcaatcttccagtatggcaaaagatctgtagaacgaagctctgcttctttgagcgcagtataaacagcatcgatgacaggactatcttttccaccatgatggacaaaatcttttgtgcagggatggcacaacagctctgcgtctcacggtccatagcgcgccctccgcggtggcgaacccggacccaaagaggaattcggagacctcggcgacgagccccttctcgtagcgcg

SEQ ID NO: 52648 - DNA, 187 bp, Setaria italica
  Peptide Sequence Number=SeqID_118622
cggaatctaatcaggatttgattccggtaaaagttgggccagtgccctgcaagcgccaactttaactgggggtggcacatctgaggcaattcgcagttaaagttgggccagtgccctgcaagcgccaactttaactgggggtggcacatctgaggcaatcgcacgagcagcatagcatagatattgt

SEQ ID NO: 52649 - DNA, 274 bp, Setaria italica
  Peptide Sequence Number=SeqID_118623
ttttgtttgttgttttggtatttaattttatactgttcttaatgaattcatgagcagcttgagtttttttttttaaactgaagtcattaatttgataataagcttgagttgatcgggaaagatattaaaatcatatattgacattttgttttacatgtaagcttggtagaacaaaggtattccttagggctggtcaaattgccatattagatatgcgtcgtgctgaggttttggacaacgctgcgcggcacattcaaggccgcttcagaacgtt

SEQ ID NO: 52650 - DNA, 470 bp, Setaria italica
  Peptide Sequence Number=SeqID_118624
atattgttgcagagcactgcaatcttctatcatcttcaaggtgccaatttgtttctggactttttacttcgttgccggaagaatctataagatcctcgtacaagttttcgtcagttgcttccagatttaagctacaactgcaggccctcatggaaaccctaaactcgacggaacctcactatgtacgctgtgtgaagcctaactctgccaatcgacctcagctttttgaaaatcaaagcgttttgcatcaactgcgttgtggaggtgtcttagaagctgtccgtattagtcttgctggctatcctaccagaaggacttatgccgaatttgttgatcggtttgctgtcctagttccagaattgatgattggaagttacgatgaaagaacgctgacaaagggaattctcgaaaaagaatagaaagactttagaattaaatttttacaaactttaggttaagaaacaaaagga

SEQ ID NO: 52651 - DNA, 216 bp, Setaria italica
  Peptide Sequence Number=SeqID_118625
gaagctgtccgtattagtcttgctggctatcctaccagaaggacttatgccgaatttgttgatcggtttgctgtcctagttccagaattgatgattggaagttacgatgaaagaacgctgacaaagggaattctcgaaaagatgaagcttgataattttcaagtaatctgctcagctgagattctattgtttcaatgttaacaaagtttttagtta

SEQ ID NO: 52652 - DNA, 204 bp, Setaria italica
  Peptide Sequence Number=SeqID_118626
atgagtttcagcatggaaaggagaaactgatgtatccttgaagtgtctgccatcaaaggattcttctcaaacatgttttgaggatccactgagcttcgaatatcttgttgcaactctaatggaggagaggcaaccttgcattcaccttcattgaatcttgaagtgtcgggcatcagtttctcctttccatgctgaaactcatgt

SEQ ID NO: 52653 - DNA, 280 bp, Setaria italica
  Peptide Sequence Number=SeqID_118627
agcaaagaaaaccttcatacattgcaagaactacagcccatatgatcgccagtaaaaattattcttacaaggagcatgcataagtacactgggaaacacccgtgggaacgctggcacgatcgggtcggctccgtcgtcgccctacttaccggagaagaagctcgccgtcgagttgtaatgcagatcacgagaaggcagcccacacgcccgccagcgcggcaagcgtctaccgtacttaccgtcgtagttgggttacggtcgtcggtcttcggtcgtcggt

SEQ ID NO: 52654 - DNA, 413 bp, Setaria italica
  Peptide Sequence Number=SeqID_118628
tggaagcctctcgatccctagttttgctgtgaagggtgagcacgggtaatgtgcttgtgggcctgtttggaactttggatctcctgaattgggccctcccgactcgcgctgcactcgcctctcacttcccaccggatttgctcggctcgtcctcactcctcaggccggcgacctccgctcccgcaatcgcatcatcgtcacaccggcgtcgcggggctgcagctttggttgctggacggcaacaagaggccaagagcggcagcaccttcggctacctcagcactcgcgatctgatcattaaccttccagctgctgccacctccttgtcgccggccatgattcaggcggtgatggtgatcagtaaccaggcgaagccccgcctcctcaagttctacaatttccagcccccggag

SEQ ID NO: 52655 - DNA, 290 bp, Setaria italica
  Peptide Sequence Number=SeqID_118629
ttttagttttaacttttaaagtttttacttttaaagtttactttaaagttactttaatttaaactaactaatagagcatgtgaacaaataatatggtaaatgcatcagtataagtcatacaaaaccatggtcgcaaatgtctgcgtagaggtaaagtttcctgatgtcagcagaagagaacatgatttcatgtatctctgaaaagttgggtgacaattggttttacctgagtttttgaagcattgcttgatttcttttggaaccccattacccatcccatactcctgaag

SEQ ID NO: 52656 - DNA, 228 bp, Setaria italica
  Peptide Sequence Number=SeqID_118630
agcatgcacagtgtatgcaaccttgcaatatgaatgagtagcaggtcaatggacataaaatgtctaggtgccggggagcaaataggaagcatgacaagcaagctaagctattaaacacaatagagcatgtgaacaaaataatatggtaaatgcatcagtataagtcatacaaaaccatggtcgcaaatgtctgcgtagaggtaaagtttcctgatgtcagcagaagag

SEQ ID NO: 52657 - DNA, 386 bp, Setaria italica
  Peptide Sequence Number=SeqID_118631
taaattaacttacctagactaagcttctcgttcccccctccgcccgccggaccggagcacgcccgccacccgacggaatcgcctctcgtcgtcgacgccgaccaccccctcctaccccatatcggtattggattggagcggagtgggtgtctaccttcagtaaattgaattcttctgttggtgatgaaccctagctttgctttccgagtttttccttggttgaaattcgactgaaccccctatgctccgcgttataggtccgccctgttacgaggtggacgccggagcatcggatcatgggggcctctgcccaggaatcgggtttgtggaagcaaatcgacgacgcagaggactatctactaagcggattgttcgagcaggctgta

SEQ ID NO: 52658 - DNA, 268 bp, Setaria italica
  Peptide Sequence Number=SeqID_118632
ccggaccggagcacgcccgccacccgacggaatcgcctctcgtcgtcgacgccgaccaccccctcctaccccatatcggtattggattggagcggagtgggtgtctaccttcagtaaattgaattcttctgttggtccgcccctgttacgaggtggacgccggagcatcggatcatgggggcctctgcccaggaatcgggtttgtggaagcaaatcgacgacgcagaggactatctactaagcggattgttcgagcaggctgtatcta

SEQ ID NO: 52659 - DNA, 423 bp, Setaria italica
  Peptide Sequence Number=SeqID_118633
taatgcagtcagatagggaaaattatagtaacctcactatttatgtgtttgttttattgtgttgaatccggatggatcatgttcagcaaccagaaatagttaaccttgtgttgcatttctgtgtatgaaactggccattgaagtgtcatatgctgaaatgtatagtcttagtcagcaatctatagaaagcaacatatgcaaagaatgtccttttgaaagtcaaaacacttgagtggtatatcaaattgtagattgaaattgcgaaatgtactaacatctcccatctgcgatcaagcacatcaagctgctgctgcaacctctcttctgtccaaagtaagtgcaaggtgtcatgatcaagcttggatacagcaggaacttgagcagagttgagtgcaaacttgacacctgcaggcatgaatccaa

SEQ ID NO: 52660 - DNA, 411 bp, Setaria italica
  Peptide Sequence Number=SeqID_118634
gggcagcatcaacttctctttgtgcagcaacaagctcatcaacctccttcagatggacattaacctcctctatgctgacattgttctccttcattgcctggataccaatttgtattgcctcatagaccttcttagttgattcagcactagcaatcaggctgatgacttcttcaaccctttctaacaactgcatgcatctgctccggctttgtgagaatactttagactgcctcgcataacgataagcagcctgtttgtccctggacttgaagaatgccaatgcccttctccttgaactatcataagataattttttacaaagcagaacaattttagcaccagcagttaccaaagtccactctaatcatactaagtttatgaaattcagcatcaatccatagtgcacagtct

SEQ ID NO: 52661 - DNA, 210 bp, Setaria italica
  Peptide Sequence Number=SeqID_118635
cctttgtaaggcgtgccttcttttgttcatctgcaatattcatgagcatgattgtagggttaccataagaatggacaacagccttctcctcgccagacattttgttctcaaaatgaactcccaggctaggagcacgattctcttttggttcgttgtagatatacagattttcttatttacctagttgcaaaatgtaaagtagtcccaaaa

SEQ ID NO: 52662 - DNA, 261 bp, Setaria italica
  Peptide Sequence Number=SeqID_118636
tgtgtttttttatgacttccaataaggagcagcttgcctccaataagtgcgctagttataaccacctgcaagatgatagcaaccaaacacatgcatacacactacttcattaccgaccctttgaaagggtgaaaaatagaacaaaagaagggaaccatagaggtcatcctatgtagcgcattaaagacatttcatggtttgtttatctattagataagaggcacaccttccgtggtccagcactatggagggtattgcaag

SEQ ID NO: 52663 - DNA, 269 bp, Setaria italica
  Peptide Sequence Number=SeqID_118637
aacaaactaagggaacaaacaaataactagaaagaccggtagaataaggtaatacatgatactgctagagcacagctaacatattaattcctcggcttggattacagctatctgtggcgacgcaagattattgttagcttggcatatatgattaatgcaagcgattggagagcagtcaggcagcatggaaggatcaggacgccatcagccccatgatgtatacttattcgtttgggagatgtccaatcaccatggcatgtttgcaaggg

SEQ ID NO: 52664 - DNA, 250 bp, Setaria italica
  Peptide Sequence Number=SeqID_118638
cctttcccgaggtacgtgacacacaagagcaaatcaaccatttgcttgctttcttcttgtgcgttcttcgagttctcttgtgcgtgcagcatgttttgatctggattctgggggcgcagggcttactacaggtgcagcagcaacaaggggtgcccggcgaggaagcaggtggagcgagaccgggccaagccggacacagtgatcgtcacctactccttcgagcacaaccactccgacgcggtgccgaggg

SEQ ID NO: 52665 - DNA, 243 bp, Setaria italica
  Peptide Sequence Number=SeqID_118639
gggaaagatacagtgatgaagaacatcaatgggagtattgatgaccaatgtagatagtatcatatggaacgcaatatagtcggtgctccatcctgcatatctttctgtgtgatggatacgacccagcatcttcagcaagctccaagtattttgaaattagttgattcttctttcatggaaagaaaaaccaaaccacaactttgtaaccaaaagaaaagggaagagttgaaatcatcagattac

SEQ ID NO: 52666 - DNA, 294 bp, Setaria italica
  Peptide Sequence Number=SeqID_118640
aaataatttacctttctcttgccttggcatttatcgaaaaatcaatcaatttacagtgttttttgtgtgtgtaaattaaccttagaaaacacctctcgtctacgacacgaccttgctttgtttcctctcctccacttgcatactcgcagtcgccggctgcagcagctcccaacccaatctgaaggttgaagaaggaggcacatccatcaggtcaggggtcatggcgttggcaagagctctcgcgcctgctccagcgtcttgacgaacctggtgaggttgagcctgacgttctgc

SEQ ID NO: 52667 - DNA, 337 bp, Setaria italica
  Peptide Sequence Number=SeqID_118641
cacctctcgtctacgacacgaccttgctttgtttcctctcctcctttgccaaaagaaaaaaaaacaatgaaagaaatgaatctttgccacaagagggagaagaagaagaagagagaacaagtaaacaaaaaaaaccaaaaaaagagtttcaagacatggtgtgagcctatctaccacttgcatactcgcagtcgccggctgcagcagctcccaacccaatctggtgaggttgagcctgacgttctgcttgtcgaggtagaccgtcttgatggcgtcccaccccttcttgtgcacgtcgtatgggtgcttcaggtagaaatggtcctccgggtacagg

SEQ ID NO: 52668 - DNA, 254 bp, Setaria italica
  Peptide Sequence Number=SeqID_118642
ccaccgcgccatgggcatcgacccctcgcgctccccggggggcgtcaccgtcgctgacttcaagcgcctcctccgccgcgcgttccggctggagcgcgctgtggcgtcgcggtcgggggcgccgcggaggacccgaccgcggctcctcatcatctcccgcaagagctcgcggcggttcctgaacgagcgcgccatggcgcacgcggcggcggcggcgaggttcgacgtgcgcatcgccgagccggacaaccaca

SEQ ID NO: 52669 - DNA, 263 bp, Setaria italica
  Peptide Sequence Number=SeqID_118643
ggggcgtcaccgtcgctgacttcaagcgcctcctccgccgcgcgttccggctggagcgcgctgtggcgtcgcggtcggggcgccgcggaggacccgaggggtcgatgcccatggcgcggtggaacgtggcgccgatgacgatccgcgggaagcagtggacctccctgtcgttgtcgacgtcgatgacctcgtacttggagaagctgccggaacagcggcgtgaacttgtcgttccaccagtccttcatcccgctgagcaggaa

SEQ ID NO: 52670 - DNA, 441 bp, Setaria italica
  Peptide Sequence Number=SeqID_118644
tttcttcctagtttgtaaaagtactttttaacccttgttgtcatgatgaaacattttatctaacaaacaaacacaagaggaagctcaaagaggagtatggaatcgaaccatggacgtttgtacaaagacttggagaggcggtttttatacctgccgggtgtcctcatcaagtacggaatctcaagtcttgcaccaagattgctctggactttgtatctccagagaacattcagcaatgtcttagcttaactgaggatttccgcaggcttccaaagaaccacagggcgaaagaagataaactagagcttgtgtgtaaaaaaattacgtatatgatacgaaggaacaaatctagcctgtgttacatgtttcgacacttaggacacatcctaagtgctgggggaataggtcacagacatgaaaaatgtcaggttgagaaggaaa

SEQ ID NO: 52671 - DNA, 346 bp, Setaria italica
  Peptide Sequence Number=SeqID_118645
tattatgaaggtcggatgtatcgcaatctttggcctgaaaatgcttaaattaaaggactggccaacttcaaaccactttgaaaatattttgccttcccatggaaggaaatacatcaattccttgccatttcaaccatacacaaatttgaaatctggcttgctaaatatctctgcattgcttcctggtgacatcttaaagcttgacatgggcccaaaatcatatatagcttatggctgtgcacaggaactcagcagaggagattctgttacaaagcttcattgtgacttgttcttgattgtcggttctaattgttttttgttatttgttcttatttactttttttaa

SEQ ID NO: 52672 - DNA, 405 bp, Setaria italica
  misc_feature (2)..(2): n is a, c, g, or t
  Peptide Sequence Number=SeqID_118646
cncctaaaaaacaccacaataccacatccacatgtcacttctgaaccatgaaaatcaactgaaggacaaaaaggcatattattgccaaataattctgggcactaaggcatgtattgcatgaaagttcctaaaaaaatcttaagtgcaaacatgctcacttctagaacagtcctactctccttctgattgtactggtaaaggtcatctcttccctcaggtgaagcaaattcctgaagcctctttttttcatgttcagctgttgcgaaaaagctcatgacctcaaagaaataccgccgaggggaagctgatgcaatatccattgtcaaagcaacaaatgtcttcaatttgatgcgatccatcaggctactcacaactgaacccttggaaattttatcccactttttg

SEQ ID NO: 52673 - DNA, 310 bp, Setaria italica
  Peptide Sequence Number=SeqID_118647
tacaattttaattcagtttattattgcacaaccataggggtggaagtatttagtttcagcagctcagaaaaactatatgctttgttgcaagaactaaataaacgtcgcaagacctatagttaccatgtgagtgagttactaacaattcttcctgttcataccttggcaaatttccactgaagacagataaggctaacttctgtacttatccagcatgttccagctttctggagattagctttatctgtcttcagtggaaaatttgccaaggtatgaacaggaagaattgttgagtgagttacttaacaat

SEQ ID NO: 52674 - DNA, 241 bp, Setaria italica
  Peptide Sequence Number=SeqID_118648
ccaggagctggaagcgcgtcgacgaggcagagcttgctcgcaaggttcgagaaatgcgtgaagcaaaagtagcgcctagcattcaagcacttgatcagaaagcagcagcagctgcagcaacccggaaggccctcacaactgtacagactctaccgaaaggagtagaggttttggatccattgggccttgggtaactatctatatcatcaaacctttgatcatttcatgtgttccataacgg

SEQ ID NO: 52675 - DNA, 266 bp, Setaria italica
  misc_feature (258)..(258): n is a, c, g, or t
  Peptide Sequence Number=SeqID_118649
ctgcacgcgcgcacccacagcctccctccggcgcggccgagctcgacgccggtgtggcctccctccggcgccgctcctgagtccgcagacgccgcggccgcagcgtactcctccggtattctagtggtgtggagttgagacccatccgggcgtggatcgtgttcttcttccgtgggttgtaggaaatcctactgtagcaaatcaaatatggaagttgacgatgacgtggaggaggatgatgtggattttaaccctttntagggaag

SEQ ID NO: 52676 - DNA, 253 bp, Setaria italica
  Peptide Sequence Number=SeqID_118650
ctcctccctccgacttctgcacgcgcgcacccacagcctccctccggcgcggccgagctcgacgccggtgtggcctccctccggcgccgctcctgagtccgcagacgccgcggccgcagcgtactcctccggtattctagtggtgtggagttgagacccatccgggcgtggatcgtgttcttcttccgtggacattgtggatggcaggttgtaggaaatcctactgtagcaaatcaaatatggaagttgacga

SEQ ID NO: 52677 - DNA, 475 bp, Setaria italica
  misc_feature (475)..(475): n is a, c, g, or t
  Peptide Sequence Number=SeqID_118651
tgggagccccaacatgaatagagctgttagctttgagtacatgaatcggcagctggtttggaatgagttttcggaaatgttgcttttgcttcttccgctcttaaactcatcctctgtaaagaagttccttcttcccttctccaaagataagtcggcaggttcttttggtgatgaagcagattgtcctatatgtcggtccagtcctagcattccttttatagctcttccatgtcaacacaggtactgctattattgcctacacacacgatgttcggctacgagttcttacagatgtccacgttgtaacgaggttgttgttgcaattcaaagacaaggatcagtttagtttacttagtcgggttcaacaattcttgcccatgtacacagactagctctttgatcttgatacttataagtttggatgcccccattgaggattcgcatcatgacagtgtacatgtaatggcccaagcan

SEQ ID NO: 52678 - DNA, 253 bp, Setaria italica
  Peptide Sequence Number=SeqID_118652
tatctatttcatgttgtagagaccactagcacgccgtgcctggggcttagtgcagaatgctgaaggattgtaccaagctgcttcattcttcaacctattattgttcctttatggtggaaggtatcttgtgcctgcttaattatgggaatgtcttcatgcatgcagaaattattcatgcttaacagggtccgaacctgggatcggacctagttctgtgattcgttcctttctttctttttcttctcctttcttc

SEQ ID NO: 52679 - DNA, 235 bp, Setaria italica
  Peptide Sequence Number=SeqID_118653
tactgctattattgcctacacacacgatgttcggctacgagttcttacagatgtccacgttgtaacgaggttgttgttgcaattcaaagacaaggatcagtttagtttacttagtcgggttcaacaattcttgcccatgtacacagactagctctttgatcttgatacttataagtttggatgcccccatgcttggggccattacatgtacactgtcatgatgcgaatcctcaat

SEQ ID NO: 52680 - DNA, 404 bp, Setaria italica
  Peptide Sequence Number=SeqID_118654
tgtacaaattgtcctatatgtcggtccagtcctagcattccttttatagctcttccatgtcaacacagacaggttctttgtttgtttccaggtactgctattattgccttacgcacgcggtgttcggctacgagttcttacagatgtccacgttgtaacgaggtggttgttgcaattcaaagacaaggatcagtttagtttacttagtcgggttcaacaatgatgaggacatcaacccctacacaggacctactactccaacggaaccagcaccaacgtcacttcccactacaccaagtccagaaaccgtttcaaggtccaataacgcgagcccgtgcacgtgacctaaattatgtgatccttttaaggaatgaagaagaagattctgtccaggaatgacaacc

SEQ ID NO: 52681 - DNA, 215 bp, Setaria italica
  Peptide Sequence Number=SeqID_118655
cctcattctacatgtgctacagtcgtatacatcatttcctgcgattctgctaaagaaggctttgttgcatcctaagaatacctccatgaaagtatggtagttaatcattatccagcctttatgaatttatgtctgtttttatgtgttacaatcatattcatttgttggtgtcttttctgtttactcaatctagattggagccactatatttttct

SEQ ID NO: 52682 - DNA, 271 bp, Setaria italica
  misc_feature (30)..(30): n is a, c, g, or t
  misc_feature (41)..(41): n is a, c, g, or t
  Peptide Sequence Number=SeqID_118656
cctcgtcgtcgctgctgctgtccattgaanagggcttgganagggcggcgggccaccaaacggctacctgtccgatggaaatgccagagttgtggcggagaggaagaaaggtacgtcaagacacagagcaaatttgcaggttgccttttaatttggtctgaactctgaacaaatgcataatttagatgcctgttttttctatgaaaaagggagaggagatttgttgtctttgaaattcagaaaccttttgtgtacctaattcattctctta

SEQ ID NO: 52683 - DNA, 272 bp, Setaria italica
  Peptide Sequence Number=SeqID_118657
gatccgatggccttcatgcgctcccactcaaatgcatcttccggcatgggagttgctcctaacatcagggagacatttgttgagcttcagatgaagaaggcattccgatatgttatcttcaaaattgaggaaaagcaaaagcaggtggttgtggagaagacgggcgctactactgaaagctatgatgattttttggcctctctcccagaaaaatagaactgacaagaattaattagtacttacttagttaattagtaattttacgtaactta

SEQ ID NO: 52684 - DNA, 266 bp, Setaria italica
  Peptide Sequence Number=SeqID_118658
ttctctcgggcaataattgttaattttttatgtgagttctgacattaacttttttgatgttactatgtgtaccatgtgatgtcttctctaatggtttatgttcaatgcatcaactctggcctttctgttgattccacttctccagactccaatggatattgctcacataagcaggaaacgtaggaataattagactacaacaataagacaaaatagaaatagtttaataataactagtattaactaatgcactaaaacctcaagga

SEQ ID NO: 52685 - DNA, 157 bp, Setaria italica
  Peptide Sequence Number=SeqID_118659
taatgatactggattgatggttgtggattgttcggaaatgcccttgttggtctgaacttgttaccgacttgtgctgatcacacctggttctgggtttctgacccttcagggcaaattgttagtaaatgccattgtgataaggaaaaaaaaaaaaaaa

SEQ ID NO: 52686 - DNA, 406 bp, Setaria italica
  Peptide Sequence Number=SeqID_118660
aaaagaaaagaaaaaggttaaacaaagaaacaaagaaagaacaaaccaatagaaagactagacaaatctaacaaggcgtggttctggaaattctctgttgcttgtcggtgtgtatgtggatgatttgatcatcacaggggccaaggagcaggatgttgaaggcttcaaggctgaaatgaaagcaacatttgagatgagtgatcttggccttctaagcttctatctgggtattgaagtacagcagagcgccaatggcatcactcttcgacagacccactatgctaagagaattctggagctgggaggaatggtggactgcaatcctgcagccactcctatggaggaaaggctaagattgagcaagaaaagtacagccaaggaagttgatcaacacagtacaggcagc

SEQ ID NO: 52687 - DNA, 384 bp, Setaria italica
  misc_feature (23)..(23): n is a, c, g, or t
  Peptide Sequence Number=SeqID_118661
ttcaatgacatcatcatctgttntagttagttccctttacggctgcaagatactcccattaaagccaggttcttcaagaattcgcatccaagagcaccagatcccacaacaaagacattggcatctcgcagctttttttgaagcctagagccaaaaacagaaatctgagcatcatagcggctattcaatggcttcaagtctttagggtccaattgatgggttggcagagattccaccgaatccaagtagaagaactgacaaagataactttcttgtcagataacaacagaatagagaagcatagaatatcttgtaatccataacagttacctggtacagtggctgaaattttccagaacatgccttcacaacttcttgaccaac

SEQ ID NO: 52688 - DNA, 234 bp, Setaria italica
  misc_feature (2)..(2): n is a, c, g, or t
  Peptide Sequence Number=SeqID_118662
cntatagcatggaagcacatctatggtataagcaaaccctacacagacttgcaattggcaaagagataaaatacagatttgcactgattcaatttaactccaggtttcagtaattttcatttcaagcaaataaattcacctaggccccacaaaaggaaatcttttgtatccaagtgtcatcgtgctcatagtaccaaatgatttccttttgtggggcctaggtgaatttatttg

SEQ ID NO: 52689 - DNA, 201 bp, Setaria italica
  misc_feature (6)..(6): n is a, c, g, or t
  Peptide Sequence Number=SeqID_118663
cagttntcccctaacgacctgcttcccccactccttgatcttcatgatcccaatcttgcttctcatgtcttcaaacttggccttgcctaaggccttagtcagaatgttgccatgactactgctgcaacacaggctctgtggctgtccaggttacttgctgaattgttgggaaagaaagtggaagtagtagagctgcgagtg

SEQ ID NO: 52690 - DNA, 156 bp, Setaria italica
  Peptide Sequence Number=SeqID_118664
gtctccagcacccaccccggccgccgccgtcgtctccggcacctacctcgtcatccatgccgtcatcaatgccgtcgctgtgtgagggtgccatcttgatccattctggtatagtggctgaaattttccagaacatgccttcacaacttcttgatc

SEQ ID NO: 52691 - DNA, 440 bp, Setaria italica
  Peptide Sequence Number=SeqID_118665
aaggttaacgggaactaacggaacaaataacttaccaactacggggaatacgaaagtagacaatggcatggagtatggctttggagctcacgaatacccaaccagcggagtcttccaagtagaacccaaaagctgtcctggctttatcttcagacgctcagtgtgcgtcggcacaactgatttgtcccgttcgcaagtccgcacctgcatagaggatctcgcagaggattaccatggagacacttatcatttgattgtcaagaactgcaatcattttacggctgatgcctgccagcgtctgactgggaagccagtgcctggatgggtcaatcgactcgccagatttagggtttccttcttcaattgcgtattgcccgagagcatcaaggtttcagcagtcacaaatgcaaatggcatcctgtattttctgatgatggctt

SEQ ID NO: 52692 - DNA, 307 bp, Setaria italica
  Peptide Sequence Number=SeqID_118666
aattagaattagaattaggttagaatagttagactagttaatcaagttcatgtagtagatatagtagggtataatgtgatgatattgtgtttgtgatatcttgtggcgaaggccaagttaaccagcatatcatgtgttgtgcgcgtgtggggtatatgctgtagtaacttagtgagaatggtgtggcatactgtcttgagtagtgaggtcatcccttttctttgactttgtacggtgatggtgtgtgtgagtgatttcttgtgtacaaaaattagttgatggaggttgaaatggttttccagatgtg

SEQ ID NO: 52693 - DNA, 324 bp, Setaria italica
  Peptide Sequence Number=SeqID_118667
gggtcaaccgcggtaacgcactgcatgtactccttggtggtcaggacaagctcgtggtagacgacgtagtctggagtgtagccgaggccgtagagtgcactgctggggtgcagatggcaaggcatcccgttccggcagttgacatactccccgacacccttcaatcgggcagagttgtggaagtaagcagagcagatagctttcctcaccacgtcccattccatatggcatgatgtaagggggatcttcaagggttttcaagtaatagtaccaagacaagactagaagaatactacaacttacccgtaagtacctttaacggta

SEQ ID NO: 52694 - DNA, 257 bp, Setaria italica
  Peptide Sequence Number=SeqID_118668
tgcagatactgagttagttgagtagtcttcccagaaccagtttcaccaacaaccacaactacttgattttcacgcacaacctgcccaataacatgaataagactaggttattaacaaactgggctactacatttcaaagaaactaaatataaaaattgaagtattcgcctcaagcatggcatatgcacaaggaatccaaaaggatgtttaatataaaattatcagagttgtcatttctccttatgcattggtgtttc

SEQ ID NO: 52695 - DNA, 292 bp, Setaria italica
  Peptide Sequence Number=SeqID_118669
attgtaggattactgtatttgctctctttacccctgtcgctcatcctatttttgtaccttttgttaggcactttttgctggcatattacaaaatgggcaactgtcctcagttctggcgttattcagccatctataggcaaaataaccaccattggcaacaacaagcacatctatcaggcagcagcaggtttgcgaagctcactttcgccatgagcaaagtggcacctatcaccaaacgtgcaggagcctttattgaaattctcgcacagtttggtcttgaagttgcttccag

SEQ ID NO: 52696 - DNA, 258 bp, Setaria italica
  Peptide Sequence Number=SeqID_118670
ctttaacaagatatgagaagtcaccgatatgccgttgaggtatgtaaaatatatctccctgctgcaatgaatcatcttattttcacctacacttcttctgtaattgctttgataatgaggtgggaaattgttgactgcctttttaaccatatctccttggttcacaaaccactcaattttgttaccttgtagaggcacatccgaccatgattccttctcctagggagagactaatttgatcagatcaaaaacttcaag

SEQ ID NO: 52697 - DNA, 386 bp, Setaria italica
  Peptide Sequence Number=SeqID_118671
caagtgctcgtatataattttagagaagacgatcatgcaaggtcacgccttgaaagctaaaggcgtgctgtttggtcatgactcgtcctgcaatgtgcagtaatacatccaaacacgtcgttgctgttaatttttctccatcgcccttatattttttcaaaaagaagaaagatttgatagtagattcttgaaaccaatggtcgttcagtgtctcaaggaatacgaagcagaccatcctacttagccaagcatatgcttccatagactgaatattggggcgtaattcttgaggttactgacgaaggaaaacagagccaaaggggggaaaggcgaggagagaacacacagaaaaccaactttcagtctttgtaaggacgaagaagaac

SEQ ID NO: 52698 - DNA, 242 bp, Setaria italica
  Peptide Sequence Number=SeqID_118672
accatcctacttagccaagcatatgcttccatagactgaatattggggcgtaattcttgaggttacatggcgagcagcaggttcctggggctgtggtactgctcccagtccctctccttggcgaagtcgttgagcttcttggacagctccttcaggctcacgtcaccatcagccgccaccttcttccccgccacctcctcctccgccatggcagccgccttcttctcgatctcactctccat

SEQ ID NO: 52699 - DNA, 299 bp, Setaria italica
  Peptide Sequence Number=SeqID_118673
atccttctcatgtaggcatgagccgaaaggctataaaagctcctgaataagtaatagtgtcctagttcacatcagaatgggtgtcggtcacagttgcaacaagtcagctagcgaacaaaatcttgttacactacaaacctttggtcagttcagcacaactggctgaattaatagaggacggaaaaaatgtcagccacaaacaattactatattagcattcaatccgaaccgaaccacagtgcttggagcaggtgattaggaagcccaagttcatctcgacgcagagtggttcggttcga

SEQ ID NO: 52700 - DNA, 264 bp, Setaria italica
  Peptide Sequence Number=SeqID_118674
gacttgctgcgccctttcagctcgaatatgttcagaatctcagcctcccccgaaacctgggtttcagctgtccctggtgccttctctacaatggtccttcccatttcctcgaggagatgatagataactttgtgcagcaaaacctaaatattaaacattaacaagcccgctaaattcaccccctcagatgtatataaactataaagactaaagataaactgagaacatacaaacataacaaatgagttgatggaactacatcag

SEQ ID NO: 52701 - DNA, 241 bp, Setaria italica
  Peptide Sequence Number=SeqID_118675
cagcagatgatggtgttatgcctcagacacttgaagctatgtcgcatgcaaaatcagcaaatgtccctgttgtagttgccataaacaaggactacaatatctgtaacagcagcacctctagcccgcatcgcactaaaggcagcatgtcctggagtatcaagaaatgtgatagatgctcctgatggcatctcaacaacaaaggcacctatatgctgagtgataccaccagctcctgatggca

SEQ ID NO: 52702 - DNA, 205 bp, Setaria italica
  Peptide Sequence Number=SeqID_118676
atgctacgcctcttgtaccccaaaggcgtagcatgcagaaacacaagcaggtacttggtaagttgtagagaaacaatattcttggtccttagttgcacttgtttgaacaaatgaatcgagttgttaaccactgtaatccgccagctgcatgtagttaacaactcgattcatttgttcaaacaagtgcaactaaggaccaagaata

SEQ ID NO: 52703 - DNA, 175 bp, Setaria italica
  Peptide Sequence Number=SeqID_118677
gatggatgagcagcgtgaaatgcgaggtctttccgtgggagtagggcagcccaacttcgattgtggtggttcttgacctactcccacggaagacctcgcatttcaccctgattacttgcagaagtactatgaaaactctcggatggtagttcatcaatctttgcacgctgctcat

SEQ ID NO: 52704 - DNA, 282 bp, Setaria italica
  Peptide Sequence Number=SeqID_118678
gttcgccaacagcagtaatggtcagcatagactgtggacaaggaggagagggcacaacgcacgaagagtgatggtgattcggtatggacgaacttgtggtagttcatctaatctttgtgcgttgtgcctgttcgccaacagcaagtaatggtcagcatagactgtggacaaggaggagagggcaccttggaagagattgtgcgtggacaattggcgatggttgctaaggaggttcttcaattttggcttgattgctgtgctgattccaccacaaaaatggat

SEQ ID NO: 52705 - DNA, 278 bp, Setaria italica
  misc_feature (53)..(53): n is a, c, g, or t
  Peptide Sequence Number=SeqID_118679
agcattagactgtgactgagcatgcatatatgcttctgctgcacgttcataancccttgctacgccccgaccatagtagtaggcatcaccaatcaataaagcagcatgctcattaccctgctcagatgcttgccaccacaaagcatgtgaacgaagatgtctttccatgtctgtgcagaaaccagattctcccatgcaaatactttgatcaccatacctatccagaaatccaaggcaagacaatttaacttacttagttagtactaaaccttacgtta

SEQ ID NO: 52706 - DNA, 238 bp, Setaria italica
  Peptide Sequence Number=SeqID_118680
ctttggcagtaaggctgaaacagggaatagcgcaagttagatcatcctccaaagacttgaggaatctgaacagcagttgttccatcttagcagcaagagaaacctaccggtcctttcgcttctcaaggaaccggcgaagagacgccttcggagcctgaggtatatctgctgcattcttctgggcactgaccacaggaattggtgcagctggcacagctgcgaccttagtgctgtcagt

SEQ ID NO: 52707 - DNA, 209 bp, Setaria italica
  Peptide Sequence Number=SeqID_118681
ggaagcatatgcccacccggtgacttggatattcaagaaatggttgggatacagatgagccagctgatatttatgttctaggatttcaagagattattccactagaagtcgggtatatgattggcactgaagatactcgtccagttgcagcatgggagcatatcatccatgaaactttgaataagaagtgtccagatgaatcgaagttt

SEQ ID NO: 52708 - DNA, 370 bp, Setaria italica
  misc_feature (370)..(370): n is a, c, g, or t
  Peptide Sequence Number=SeqID_118682
ttgcaagggcttcgagaacagaaaccagcttcttagtgttggggcgatccctaggttcatactgtaagcactgagaagcaagatcgaccaatgtggtcgcttcttccgttgagtagtttccctccaaatgtgaatccatcagtacttggatattgttgccttttatcatatcaagagcctgagtgaaataaagctaattttcaatgataacctaacgactttgttaccaagttatgtctgaaaggaaaatatgttctcccacagatgctcagtatcgcacacttggtggcagttgcaaaaaggagatatgcacagaatagtattgaatacagaggtattttcagaaagggggtcactaaggatcaaatgn

SEQ ID NO: 52709 - DNA, 341 bp, Setaria italica
  Peptide Sequence Number=SeqID_118683
ttcgttccctactattctaactaaacttgttgttattagtctaattcttattggtcttgtccttgaaatctttatcacggaagcaaagtccccacgcttcctagcttccaacatgtccctcatctgctgtgtccattcctggaatgatagctcattagtcccttcatcatccctgtaatgtgtattcactagaatctggtggatagccgtcaaatccatcctagaacaggcttcacccatgggagaaagagggtgctgtggctgcggagcaggagttggaggcacttcttcttcatactttggaatgccaagcatctcataggatggtacctctgatttta

SEQ ID NO: 52710 - DNA, 430 bp, Setaria italica
  Peptide Sequence Number=SeqID_118684
ctggaaaccagaatgtatatgtggcacagatgttgcttctgcgaaggacttaagcttagcggctgaatggaacttgcaaagctccctctgcccatgtacagagcctgaaaatccggtgcctgcggtcctggcaagctgggaagactattatcagtggagatcccttcccctgcattcacctgtttcagttttacttcattggatatgacggccaggacaccctgtgcattcactatttagggcctgagaaggagctactacagcttgcagcatttggggaactacgtgcattatttccaggtgtccagattcacattgaacttgtgggaccagaagttccagaatctagggatggtgaggttgtaaacatttccagatatgcatgttgttctgatgagagctgctgttgtaaatcttctattggttctga

SEQ ID NO: 52711 - DNA, 238 bp, Setaria italica
  Peptide Sequence Number=SeqID_118685
aacttcattttgtcagttggcctgcagagttagtatctgtatctccttccatgaactctgggggcttcactatatcaattgaaataggtcagtaatgtctgtagctctgatacgagaagtcatacggcttgaaagctccccagcaagatgtggccatcttgagatgctttgagtttagcacagagttgatcaatgctcttggagtggcctctatgggtaagggagaaatagccggtta

SEQ ID NO: 52712 - DNA, 226 bp, Setaria italica
  Peptide Sequence Number=SeqID_118686
tttctctgtggtgttgtgagttatgatgttggatttcatgtgcggggtggtgcaggataacctggacgtgatcgataggctcatcgatgatgcagaggctcagcacaggaatttccagcaccctgatccctacattgttccatgggcacctggcggcactaaattcacaagaaaccctcctccacctcaagggattgagatcatctacaattatggcaaggaggac

SEQ ID NO: 52713 - DNA, 393 bp, Setaria italica
  Peptide Sequence Number=SeqID_118687
gtgcactactagaaccaacatctgacttattctggacatcaaaattttcctgtgactctagtatttcattcagcttgcgcttcattccaggtttcactgatgcatcctcggcggcactgtcaacatcatctgcactggatgaagacggaaccaatcttttgtcaccattactggtaatttgcttatccactggaccagtccagccagcgagaaccattccatcaggctctttctccttatcaaactcatccctttgtttgatgttgatgctgcattttagctcctgctggaaatcctcgaccgtaagctttgtatcatttacaacttggtagtcttggtaagtttccgtcctaaaacctttgtttcttaagttatttttaaagttcttattta

SEQ ID NO: 52714 - DNA, 465 bp, Setaria italica
  Peptide Sequence Number=SeqID_118688
atcgatgtcaacaagttgctggatccacagtcatccaaagaggagtgtgcaaagcttggatctgcctgtaagcagtggggcttctttcaggtcattaaccatggtctaccaaatgaagtgatcagcaacttcaggaacgatatgactgaattcttcaaacaaccgctagaagcaaagaaggtgtactcgatgataccaggcaatcttcaaggatatggccagcactttgttgtttccgagaaccaaaaactagactgggcagacttgttctgtctcgtgctccgtccagtagattcaagggacatgaaattctggccaagtcaccctccatctttaggttgcatgaactcacaaaactctattttactcatgaggcttttttaaatactacacgtcattatgtctttttaactgtacatccttgcatgataattcatgacaggaactccatagataggtactctt

SEQ ID NO: 52715 - DNA, 261 bp, Setaria italica
  Peptide Sequence Number=SeqID_118689
cgggtttaatctcacaaaatatcaatactgataactataagttagtggtgaatagctagttttcatctcaacatttttgtgcaaacacgcaaaaacttgcacatggaaagaaggtaaaaaagacttttggtctgcacatgttgaaaccacaggtcattaaccatggtctaccaaatgaagtgatcagcaacttcaggaacgatatgactgaattcttcaaacaaccgctagaagcaaagaaggtgtactcgatgataccag

SEQ ID NO: 52716 - DNA, 440 bp, Setaria italica
  Peptide Sequence Number=SeqID_118690
cgaggggttcaggcgaccgacggcgagcatggcggcggacgacggccgggcgacggcggcgctggacgagaccctcaagcccttccaggaaagagcttccgaggctgagttacgcatagcaaagctggaagccttgctgtacaaccaagctggtccgaacagtggatctgaggcaagttcttctgcaatgaaacatcttcagtcaaaactagacgcggttagtgcagagtgcctgactgaaaaagagaaggtaatcaatcactttgctcgaacctgtcgccgtcatacaactgttgacatttaactatatatccacaccttgtctcatgaactttgtagaacaagaagctaatcattgagaacgagaagctccagtaccgcatcacccatcttatccgtgcaataaaagaggcagaatctagatagaagaagcccgaagg

SEQ ID NO: 52717 - DNA, 368 bp, Setaria italica
  Peptide Sequence Number=SeqID_118691
gcatccgcaaatgattatgagataatgataatttacagttgcttggcaaatgaagaattagaaatttgcatggattgtgtaaatttgaatgattgttctgttgtacatttgtcaaatgaatgcgttcttttagtttagagaaatgataacaaaaagaaaggaaggtaatataattcgtttttgaataaatatcttgagcctttgtcactatgttttttaatatcatggtaatattttcataaacatatatggtgcaggatgtaatcacattctattttgctttaatgaattcgtattcgtatctgttcacagttgagcggaaagaccagaagacccttgaaaagttgagggctgagaggaaagccaaa

SEQ ID NO: 52718 - DNA, 136 bp, Setaria italica
  Peptide Sequence Number=SeqID_118692
agtggctagaagcaacgatgttgagatattacgctcagatggtttgagaaacaggaagcaacccaatgcaagtggattcagttccatgtgctggggtatgagcacctgaggggctcccggtcctgcttccacttgc

SEQ ID NO: 52719 - DNA, 465 bp, Setaria italica
  misc_feature (189)..(189): n is a, c, g, or t
  Peptide Sequence Number=SeqID_118693
cgcccgcttcctgaacgaggcgatgccgctccggcagagcgggcacgggatgctgccggcgatccccggcacgtcgtaggacttgatcaccgagcacaggtccagcgcgcacttcacgcacagctcgtgcccacacactgtcgagcatgaagaggattagcatctgcaagaactgatttttttcccccngcgacagattcatatgtttgtagctatgaactggcaaaccttcggctgcaacgttgcagggtcgttctaggcagacagcgcaggcgtcgctttcgtcgacgccgccgtctgagaactctgacgacgtgttcagaaccaggccacaatcccttgcgagggttagaacgctggggagcggcgaggagaggtagccggacggcgggaacttggggagtcggcaggtgcgacttcggcgacagcacgtgctccaaccagtggcagccccatgtcctcgcc

SEQ ID NO: 52720 - DNA, 367 bp, Setaria italica
  Peptide Sequence Number=SeqID_118694
atgatgccctgatcagaatccgtgctccgtttcttctccgggctggacgacgccgtgtgctcgccggcgctcttgtagtggctgccgccggagcaggcggagttgaggtcaggctcgagctcctcgtcctccgcttccgaggccgcccgcttcctgaacgaggcgatgccgctccggcagagcgggcacgggatgctgccggcgatccccggcacgtcgtaggacttgatcaccgagcacaggtccagcgcgcacttcacgcacagctcgtgcccacacacttcggctgcaacgttgcagggtcgttctaggcagactagtcgtctaggtcgttcgttctttttcgtttcgttacgttccgttcctt

SEQ ID NO: 52721 - DNA, 124 bp, Setaria italica
  Peptide Sequence Number=SeqID_118695
gtgggcacgagctgtgcgtgaagtgcgcgctggacctgtgcagggtcgttctaggcagacagcgcaggcgtcgctttcgtcgacgccgccgtctgagaactctgacgacgtgttcagaaccagg

SEQ ID NO: 52722 - DNA, 294 bp, Setaria italica
  Peptide Sequence Number=SeqID_118696
gccagcttcaggaagtgacacaaaaggggaggtttcttctatagaggttaaagaatcaccaaaagaagaatagaatgagttagactagagaggacgcctccctatgaagatttttcagttagtctgtaactgagttagagcatacaaacagaaagcaagagagagggaggcgtctaaactgccctccattccagtggagaagtttttctgatttctgaatgttgtatacaaattgcataagtaactaagaaaactaaagaaacaaaataaaaagggtttaaaaaaacttaaaaa

SEQ ID NO: 52723 - DNA, 209 bp, Setaria italica
  Peptide Sequence Number=SeqID_118697
ccagtgataatcgcatatttcagaccgagattcatgagcaagttcaccagcaggcctgctaggatgactcccataaaattagctgagaaacctgaccagaacggcatgcctaagacagatgcaatgatcgcccctgtccatgcccctgttccaggaaacggaacctgagacacgcaacgggggataggcaaggcacacgaggggatagg

SEQ ID NO: 52724 - DNA, 212 bp, Setaria italica
  Peptide Sequence Number=SeqID_118698
gtgagtagtccgactcagtgtgagtagtaggaattgaaacttgtgcaacatctagttcatggcctagcatgcaaattataggtgcattgtggtcccagaaagtacagcattggcatcactgaacgtggttgagaagagatgttgatattaacaccagcagatgcaagaacttcatttatctcaaattcaactactggaagtgttgcagctgg

SEQ ID NO: 52725 - DNA, 135 bp, Setaria italica
  Peptide Sequence Number=SeqID_118699
agcgatatttgcagcataggcatgtgctgtaaatatcgctcatctgatctggaatccaaagggaggaatgtcgataacaacttaagcaccaggccatacattgagagaatatgaacagcatcaacagaagaaatt

SEQ ID NO: 52726 - DNA, 462 bp, Setaria italica
  Peptide Sequence Number=SeqID_118700
agacaaagaatactacttaagacctgtaaccaaatcacgggatgaaagcctcccatgagcgcatgcagttaatacagcctcaagcacaaaagggacagcttccagaacttcccatgcaggaacagttggccactggcactcatcttcctgtacccctggaagtggactactcatactggaatttgatgttgactgaggatttacagacaggacgccaccttttgaaattttacggcatataattttcagtataatgtttgccacttggaggacatttgtcctgttgtaagcactagaaagagtagaggctatgcaagcctggttctgggaggtaccatgcccttagcttggaatgagtcgatatatactggctttgcacgatggatctaattgaaatatgcttgacttactaacattagatagtattttcaaagtcaagaacgactattacgtaataataag

SEQ ID NO: 52727 - DNA, 243 bp, Setaria italica
  Peptide Sequence Number=SeqID_118701
tctcaatagggggtctatgaaatttccacaagcgaagcagggaaaggaaagcacatgagaatactgagtacacagaagcctcttcaaaattacaactcctatgaccagatgcaggtaaggatccaaaaatctcacagagaggcattaacatggctgctacttctggcaccattcagaagaaggaaattttcaggccatacattgagagaatatgaacagcatcaacagaagaaattcctaata

SEQ ID NO: 52728 - DNA, 145 bp, Setaria italica
  misc_feature (133)..(133): n is a, c, g, or t
  Peptide Sequence Number=SeqID_118702
catggaatcattagccaaggaggtgattaaatttctccatcttaactgttatcgataaactgattagggctgctataggcaatggcagcattggcacgattttataatcctgacatgttcccagtcccccttnactcgagataat

SEQ ID NO: 52729 - DNA, 143 bp, Setaria italica
  Peptide Sequence Number=SeqID_118703
gtaatttctgctgaaaagtagctgacaatagcagcaagtgaagcaggcaggaaatctgcaagatctcttagacctgcaatcaagtatgatggtaaatgctgccattgcctatagcagccctaatcagtttatcgataacagtt

SEQ ID NO: 52730 - DNA, 226 bp, Setaria italica
  Peptide Sequence Number=SeqID_118704
gaagcaggtgtaaccataagtgcatccttgagttccatgagtggagacccttctattaaagatgaccatggagattcctgggcttgagaggattcttcaagtgcaaccacgtagccaggccagaaataagcagatgattgtatttctgaaagacctgctcatttgagatcagactgcatgccactctcagtttcctcatccttggtagagcagatgtcatcacttg

SEQ ID NO: 52731 - DNA, 243 bp, Setaria italica
  Peptide Sequence Number=SeqID_118705
aagtaagaactaaacaaaagaaactacccaaataagacctaactacctagtactaaattgaatatccagtgcttataacattctgtatattcatagtcaagctatctagcagaatgtatgcaggtaaaacattctttgatttaagggcgccaagtagttgaagtttccggagtagataattgaaattctccggtctatcctagcatatccaaaaaggacgtaagtgtcatcagtttaacaaac

SEQ ID NO: 52732 - DNA, 200 bp, Setaria italica
  Peptide Sequence Number=SeqID_118706
cgggttgctggttgactttgtgccagcatggattctcgaagtgaagctggagacactacagaaattggcttctgggcttcggaggaaatggcacaaggtagaatactacgaaccctaacgaacttaagaaacttaaagaaaagaaaacgaaaaggggaaaaaagtaaaaaagaaaaactaaaaagtaaaagaaaacaaaa

SEQ ID NO: 52733 - DNA, 181 bp, Setaria italica
  Peptide Sequence Number=SeqID_118707
ttatggtcttttattttaactgttggatgttgaaaatgccttctatgcagggtcaagccggagatactgaaacgtgtaggacaagcaattactacactgcctgaaaacttcaggccacacagagcagtgaagaagatttttgagctgcgtgcagctatgattgagagtggtgaaggaattg

SEQ ID NO: 52734 - DNA, 318 bp, Setaria italica
  Peptide Sequence Number=SeqID_118708
tgaagatcatgttagattttcaaagccggttccatgtgttcaccatcactgatatttgacttccaagataagctcactgcataccttgcgctgtacagtcacaacttcagctctccatgtgcatagagcttatcttggaagtcaaatatcagtgatggtgaacacatggaaccggctttgaagatcatgttagattttcttgtagggcaagtccgaaatgtgttatagtcaatgaaattgaaggtgtaacttagaataaataacagggtaggagcctgaccatccatggcgccaaaaccagtagagaaactgatttgc

SEQ ID NO: 52735 - DNA, 224 bp, Setaria italica
  Peptide Sequence Number=SeqID_118709
gttcccagtgatgatatggcactgtcagaggatcaatgtggcaggctgcataggtgtagcctttttaatgagaaggtaggggcatctgatatgagtgtgcaaagtggctcgaatcctcatcttgcaaatatatgtggcgataactacctgaagcctgcggggtcccctgtgtatgcattgcctggtattggtttgcatctgaatgctgttgcctcgaattcata

SEQ ID NO: 52736 - DNA, 397 bp, Setaria italica
  Peptide Sequence Number=SeqID_118710
acaagttactacgcttaaaaccttgaaataaagcataaatcatgttagagcttaataaagcagagaacctttaaaaaccagaaacgaagaaatccacaaaacctttcagaattcatttgctttgttgtgattgtacgtgtttcaaaacacaaaaacagggactggaagcgcaagcggcaaaagactatacagatgtacttactgcatgtacagggccttgtgcaccatgatgagtcacacgatgcagtatgcgaccggtgactgcatcaataagatatgcaacaagcgaagcttcttctggtagcgcagatccaatatcaccagcagctttaggagacacagtagcaacaaaaactaattcttgataatattgtacatcacatcatgatcaccaatt

SEQ ID NO: 52737 - DNA, 288 bp, Setaria italica
  Peptide Sequence Number=SeqID_118711
tcccttattgtattgtattcttattatttgtacctttttcttcttaattatttttctatttgtctttactattctactttcttaaattttctacgataaattcaatttgggaccccacatgttggacgacggcaaaagcttcatctttttctgctattgttagtgcatcactcactgcagctggttggtcaaatctctgaactacttccaacccattagtatctttaagttttaggaggaaaacagtagaagatgtttgcaagttatgacaccattggacaaagattg

SEQ ID NO: 52738 - DNA, 411 bp, Setaria italica
  Peptide Sequence Number=SeqID_118712
cggtgagggaatcataggttcttgacggagcaagctgggtgtagaagagatcaacgccgtatgtgaaaacaagagtagtggactccaactttgcaggaatcgaaacgattcctcgcagggcttccacttgatgagagtgagtcacaaaagactggggaattattggcaaagaatctgttaatggtataatgccctcttctttctcttgttgtgtgggattcgctgaacggcgtggatcaagatagcgcttatcaagtgccaaaacctggtcgccaattgtgccaatcaaaagctgcttggaagtaatccccttagctgtttgtgtaactgccattgcttttactgaatgggtgaaaaagtatgattgggattttaccaatcacatcttatgctcgcactagtgcgactgag

SEQ ID NO: 52739 - DNA, 212 bp, Setaria italica
  Peptide Sequence Number=SeqID_118713
ataaaataattccatgaataaaaagacaacagaggaaatgagcagacctcattcatctttcgtgtttcagagatagcaatcctttcggaatcagatggaaaaatgattgaccatatctccttcgtactgaagcagtactcatcacctttgatatcacatgacttctgtaatgaatatcctctaataacattcaaacttcaatctttgtccaa

SEQ ID NO: 52740 - DNA, 205 bp, Setaria italica
  misc_feature (42)..(42): n is a, c, g, or t
  Peptide Sequence Number=SeqID_118714
attggagaacctgcttgatttctaagccatcaagagaaaacnccttttcccatgaaatcgccccatcaatgcttgatacagcataaatccatcgtccagccgaaactaaaaccaaattatcctttgccactttattgtttgactgcaaagagtaaaggttcatcactcaagataagtgctacaggaaaactaattgtattatcaa

SEQ ID NO: 52741 - DNA, 182 bp, Setaria italica
  Peptide Sequence Number=SeqID_118715
taactttaaattaagtaaccgactactaggaattagaatacaataataatctcaatcacctccatttcaaatctgtgagctcgaagattaaaataatgatagacaacccagttctcgcttaaaactgcatgtacagggccttgtgcaccatgatgagtcacacgatgcagtatgcgaccggt

SEQ ID NO: 52742 - DNA, 145 bp, Setaria italica
  Peptide Sequence Number=SeqID_118716
atgacattcttttatttgttccgctctggattgatcatatatctcaatcacctccatttcaaatctgtgagctcgaagattaaaataatgatagacaacccagttctcgcttaaaactgcatgtacagggccttgtgcaccatga

SEQ ID NO: 52743 - DNA, 149 bp, Setaria italica
  Peptide Sequence Number=SeqID_118717
cactggcgccaactgcagccttcaatttcccatccttgaggactatggtcggctgcagttggcgccagtggcggtgccatgatccctgctggaacgatcgaagtgttcctcaaccatttcgtcaggaacatggatccactggcttctgt

SEQ ID NO: 52744 - DNA, 245 bp, Setaria italica
  Peptide Sequence Number=SeqID_118718
aactcaacagtgtggtaccccttctcatgaacactgcacaactacctcagagtctgcacttgaactccgttgagtcataaaattcattcgtactttcatcggtgaagtgaagctacaaagatatcctcctacttttctggaacgatcccagatctggtgtttatcttgcaagctcttgcagtggtggagatgctctgtccgcttttgggtattcattcaatccacaactatccctcggcaataga

SEQ ID NO: 52745 - DNA, 277 bp, Setaria italica
  Peptide Sequence Number=SeqID_118719
tgtcgttcggtagttgggggtttggttgtctaggttgtttgacttatctagagattaatgatctcttccctcttggggaaactgcctccttcgagctgccggcaccagaaagtcagtttccccagtatcctttggagcaatgcccgtgcaatgagttgaatcatccccaatatcacgatgagggtgctcttgcagcttctttagcagcaggcgacttccttccacctacttcctgctctatgcctgatatttcagttgatgatgttacttgcagcac

SEQ ID NO: 52746 - DNA, 218 bp, Setaria italica
  misc_feature (12)..(12): n is a, c, g, or t
  Peptide Sequence Number=SeqID_118720
ggagaaggcgancttagtccaagcacggaaagagatgtatcagcgcttagacataatggaagtgaaatggttactgtgaactgttcttctgatgctttagatgcatgtgatcccactgaatttggtggaatcacatcggaggagactgataagtggttaggtttctgaatgattccacggaacgtgatggaggcgctcgtagaaaagcttgctggcct

SEQ ID NO: 52747 - DNA, 133 bp, Setaria italica
  Peptide Sequence Number=SeqID_118721
ccgtgctgacgtgggaggaggtcctgctgcacggcaccaagcactacagcgaggggcccagccgaggttggacaccacctcgctcatcttggcgtcacagaaccggctgagcccctcgctgtagtgcttggtg

SEQ ID NO: 52748 - DNA, 330 bp, Setaria italica
  Peptide Sequence Number=SeqID_118722
ctacataaattgtagtcatattccagtttggttctgcattagtttgaagactgtacctcttgacaactgcattgttctttatattttcaattgcaaatgtttagttagcaaatgcaattcttgaagaaaggctgaaagatgaagcaggttcttccagtgatggattctatgagtccagaaaagaatggatggggagaaggcactttctgctagcttttgagggctcaactgaaggaatgtacagagtaattcgtcctgctgttggggaggcttcaagggagtattgtccttttggtttgtaactttaaaagtctaagttattaggtaagt

SEQ ID NO: 52749 - DNA, 408 bp, Setaria italica
  Peptide Sequence Number=SeqID_118723
cttttaacatcattagaaaggatggtcaatgggagcaagctcgcacatgggcaaggcaactggagtcgagtgacatagcttgggagtctactcttgaccatgtcactgaatcacaggcagaagccatggttgctgaatggaaggagttctttgggatatcccacaagaacgtgcagccttgtggggtcactgccaatctctcttcatgagatactctttacctcctttaaaggctggattattttccttaagcatgctgaagcagtaggtaaagagataccagcaagagagcttcatgaaatactactgctatctctcaatatctcgtagaagatgaagaggatagactggagaggatttagtcatagttccacttagccattgtagagatagcagtagtatttcatt

SEQ ID NO: 52750 - DNA, 359 bp, Setaria italica
  misc_feature (313)..(359): n is a, c, g, or t
  Peptide Sequence Number=SeqID_118724
atcctcttcatcttctacgagatattgagaccagggtttggctcctggctgttgagtccgagagccagtccaaggctgatggtgaatttgccactcccgctgttgctcacaacatagctgttggaaacggtaccagtattatagaacagactgctgatgtcatcacaaaaatagacagcaatatgggttcgccgcacatgaaagctacagaaaggaatggcataagggacaatttattctattgtcctagtctattgtcgttcttaacttttttcgtttagttttcttttaactttagtttttgtttttaagnnnnnnnnnnnnnnnnnnnnnnnnnnnnnnnnnnnnnnnnnnnnnnn

SEQ ID NO: 52751 - DNA, 329 bp, Setaria italica
  misc_feature (21)..(21): n is a, c, g, or t
  Peptide Sequence Number=SeqID_118725
gaagcatgaggctgcttctcnccttgaattgcgtgcagagcaatacatgaacagctggttatcgcgatacgacaaggagcggagaaatgatgaactccttgaggctatgcatcacctcgtagagacagctgaggttctttcaacaattgatgccggccaaagaacacatcgtgcttgtgcccgtgcttctcttctgtcacttcagattcggatacctgatcttctgtggattggtctttctgaaaccaatgcccggcggattatttgttggtaactaattcttagtatttccttaggttaagttcccttttatttttgttttgttcttt

SEQ ID NO: 52752 - DNA, 214 bp, Setaria italica
  misc_feature (1)..(45): n is a, c, g, or t
  Peptide Sequence Number=SeqID_118726
nnnnnnnnnnnnnnnnnnnnnnnnnnnnnnnnnnnnnnnnnnnnnagaggaaatcaagctctcattacggtatagatatgccgaacatgggaatgccacgttaacaaaacaagcgcttgtcagccacttgcaggtcgaacggaaaatgaaagaacatttgtgaatactagttacaaacgagccatgcttcccccaaccagaactccagtgaata

SEQ ID NO: 52753 - DNA, 204 bp, Setaria italica
  Peptide Sequence Number=SeqID_118727
gtcgagcaagaggaggccaaggagatgctcaatgtgcgacgctagaaaagatggtccgttcttgatttccatatccccattgaaaatttttacctgctgtagtgatcttgactttaagtactgtaggcatgtgttcagtatgctttagaattaagaggatgagtgttcttgtttttgctacccattaaattatttgtgccaatt

SEQ ID NO: 52754 - DNA, 259 bp, Setaria italica
  Peptide Sequence Number=SeqID_118728
taccttaggtaacaagtgccaggtaggacggtatagctgcttctctactgaccaggagtgttatgccgttgtcatgggaacgcaatgccttcaggcaatatttgccatgggcatgccgcatgcgtgaaggaagcaatgtgccttcactagccgagtctggtatcagttagttttcgccttcagacaggggaaactgttgggatggtgagagtagtcgcggatccttggttggatctggcttggttgttgtatggtctag

SEQ ID NO: 52755 - DNA, 357 bp, Setaria italica
  Peptide Sequence Number=SeqID_118729
acaatcgaagccgaaaatcaataaatctgacataccacatataaaagatgctgtggataatctgcataagatttctgaggatgtccacaacgctctactgctagagaaacttgatggaatcaaccgatcgactcaaaacacaagcacagacacacgtgaggcggtagagaacttcactgaagctaaggtgttctcaagagaagagaagaatgagattgtggacctaatttgtcaccatgcatcaagtgatcaagagctttttgttcttcccatagttggtgatggaggtattgggaagacaacacttgctcggttagttgttacctattgtacccttctaggttaaaaggttaaatt

SEQ ID NO: 52756 - DNA, 245 bp, Setaria italica
  Peptide Sequence Number=SeqID_118730
tttttttaaggtttacgttccgggtagactgatgtgtagtattttcatatcaatgggttttacagccagacaagtgaagtggcaatatagaataacatttgcaagatacccgcataaggtgattctcacttacaattcttactataaacaatctgttcctcactgagtcactgtgtacattaaccctctcttcttcaataatctatgaacagccccatataatagcaactacatagaaaatcttt

SEQ ID NO: 52757 - DNA, 254 bp, Setaria italica
  Peptide Sequence Number=SeqID_118731
cttgtagcttgggttgacaaggttgtccaagcctgaaatgacttggattgattcgatgacatccccaactttgacatccgccaagtaatcctcattttcagttacaatcccaacatagaagattgtgtatttcggatagttctggatggatacaatgctcctgtgactgcggggaacttcatagatctggtggaacgtaagttctatgatggcatggaaatccaaagagctgacggctttgttgttcaaaccgg

SEQ ID NO: 52758 - DNA, 462 bp, Setaria italica
  Peptide Sequence Number=SeqID_118732
ggagtagatgtccattccatccaatgtacaaggtgacagtcgatgcgctaactcaaagtaatggtcggcttctaaataatcaaccaattcaaaatatgccttaccaacctggcatagaacccatccagtgttaaattgtggttcagggagttttctgtagacttccaatgcttcctggcacttaaacaagcaagaaagcctaaaaaccttccccaagtgttcgcaaaagtcccagtagctccctgattccaactgccactttggagtcttgggacataattcgttcagttttatcttgctcaaagaatcttccatcagttgtacttacagaagatgaggttgctggcatattatcagtccacatctcatcaataacttcgtatctgcttcctgacgagtgatctggtccattcccaccaaactgagagatatttgaatttgaatttattgttgcatctcgag

SEQ ID NO: 52759 - DNA, 339 bp, Setaria italica
  Peptide Sequence Number=SeqID_118733
gacataattcgttcagttttatcttgctcaaagaatcttccatcagttgtacttacagaagatgaggttgctggcatattatcagtccacatctcatcaataacttcgtatctgcttccttcatcaaaattttctgtagcccgtggtttccctttcctaacttgcacggaacgtacggctgttgaacacaattttgatggtgtggacgagtttactcggcaattttacctgacgagtgatctggtccattcccaccaaactgagagatatttgaatttgaatttattgttgcatctcgagaaagtcttgcacttcttcgaggcagtgaatcactactct

SEQ ID NO: 52760 - DNA, 404 bp, Setaria italica
  Peptide Sequence Number=SeqID_118734
attcttcttatcagcagctatagctttctccatcatttccaatgcctcctcattcctctgacaagattgcatccagaataaaaggtttcatttaaccattgcccacagatgatattcagcaggggaaaatgcaaaccaaaaacaattccatccgattccaaatgtaagtcattttagcctctaccatttcccagaaggcctacaacaacctatatttggaatcagagggagtagtttactgttgtcaatcaatgatatcaacctttagagaatgcaaggccatcccaagatagcacataagaacagaagagcgaggatttatctgaaatgccctcctgaaatgatgctcagcaaactcaaacttctcctgtcgaagattagtacctacccctaaggtcctatta

SEQ ID NO: 52761 - DNA, 195 bp, Setaria italica
  Peptide Sequence Number=SeqID_118735
atacttgggcagtggattcttcttatcagcagctatagctttctccatcatttccaatgcctcctcattcctctttagagaatgcaaggccatcccaagatagcacataagaacagaagagcgaggatttatctgaaatgccctcctgaagtgcacatcggtagaatttgatgcttatttcataatcctcaatgc

SEQ ID NO: 52762 - DNA, 477 bp, Setaria italica
  Peptide Sequence Number=SeqID_118736
tttccatacattttgaacaacgatttctaaatactctagataacagcctgaatagttctcagctagtcacatggattgatgatattgtatgttacttggggtgaaaaaatttcaatgcgcttgccaatctcataaaaaatagtcccatttatgtctgggtcataactcaaccagtgatacgatggtatgctgaaaagagtttaatagaccacgacctgcagcaaattatcacgtgcatatcttagtgatttgggcacaaagccttgtctatgtccagatcataactcaaccaatgatggggtgggatggtggaaggaggagcatttcagtgccgcagatatggacgatgatggctttctcaatctgactgagttcaatgagtattacttcctctctgccacctttttcaaaaaccttattttacctagtcattcagtatttactttgaatttctgtgtccagtctttctacatccag

SEQ ID NO: 52763 - DNA, 469 bp, Setaria italica
  misc_feature (354)..(354): n is a, c, g, or t
  Peptide Sequence Number=SeqID_118737
ttttagaaacaaacgaatttctaaatactctagataacagcctgaatagttctcagctagtcacatggattgatgatattgtatgttacttggggtgaaaaaatttcaatgcgcttgccaatctcataaaaaaatagtcccatttatgtctgggtcataactcaaccagtgatacgatggtatgctgaaaagagtttaatagaccacgacctgcagcaaattatcacgtgcatatcttagtgatttgggcacaaagccttgtctatgtccagatcataactcaaccaatgatggggtgggatggtggaaggaggagcatttcagtgccgcagatatggacgatgatggctttcncaatctgactgagttcaatgactttctacatccagctgatactgccaacccaagctaatacattggttgtgcaaagagaagtcaagggaaagagataaagacaatgatggaaagc

SEQ ID NO: 52764 - DNA, 325 bp, Setaria italica
  Peptide Sequence Number=SeqID_118738
tggtcttttagtttctattcttgtcttgtattaactagtccctattcattatccagatcacttctatgccaagcaacaagctgactacgtgatatcgcaggctgacacggacaaagatggacagttgagcatgaaagagatgattgagaacccctatgtcttctacaatgctttattcacagaaaatgattatgggtttcacgatgagctccgttagttccttaggcaacagcacaaagctttgcggaatcaccacctctggaagttagaacactttgtatgcactgctgtgaatagatcattttcatgatctgtctgatttgtg

SEQ ID NO: 52765 - DNA, 364 bp, Setaria italica
  Peptide Sequence Number=SeqID_118739
tcagcagatgaactaaagcctataattgataatctccatccatcagaacacttctatgccaagcaacaagctgactacgtgatatcgcaggctgacacggacaaagatggacagttgagcatgaaagagatgattgagaacccctatgtcttctacaatgctttattcacagaaatgattatgggtttcacgatgagctccgttagttccttaggcaagtaaggcaccagcttgtagccttgtactctgttctgctccctgcattggccagctttcatttgttcacaactttgtgtattgcagcagcacaagctttgcgaatcaccactctggaagttagaacactttgttatgcactgctgtg

SEQ ID NO: 52766 - DNA, 444 bp, Setaria italica
  Peptide Sequence Number=SeqID_118740
atgtatttatcagtgtaaaaaatttccgattgacgtatgaggctttcctcattttgaaggctgttatcagcagatgaactaaagcctataattgataatctccatccatcagaacacttctatgccaagcaacaagctgactacgtgatatcgcaggtaagagaaggctgcatcttgctttactttcaggataaattgggtttcttccatctctagtgccagcagaagtatgtactacaggttatgggcttaaatttgtcaggtgttttggaacagcttgcccttatctattgcaataagcttcaattatgctgaaagagacatcatctagcacagaatgtttctctaggtagacctggtgactttgctatctagtaatcctattctccaatgtaggctgacacggacaaagatggacagttgagcatgaaagagatgattgag

SEQ ID NO: 52767 - DNA, 259 bp, Setaria italica
  Peptide Sequence Number=SeqID_118741
cgggcgactactgggtgagcggcggcgctattcggtcttcgcagggcccttttccggcgacgagcacccaccagttattggatcctgcattgtgaaatgcttgccaaagggaggaaggttgctggaaggggtgaagaaatgtctgcgcattatgcatttggaccacaggaggacgatgcgatcattaagcacaggcttctgactaggacgactactaccaggggtgaaccaccactaaagaagcttcagaagaagttca

SEQ ID NO: 52768 - DNA, 211 bp, Setaria italica
  Peptide Sequence Number=SeqID_118742
agcagaagatgagcatagaagaaggcagcggcggtgcttcagatgccatggctgtagactgatcaagatacattcacatatgttgcaacccttgcttgcaaaaatgcacattgtttttgggacacattaaatcctaacaagttggtagatgtcttttgtcatggattcatacctcatgtaaattgaaccgcatgcggcttgtaaggccagt

SEQ ID NO: 52769 - DNA, 233 bp, Setaria italica
  Peptide Sequence Number=SeqID_118743
taaaagcaccgacagtgaattcttagaatctgacagtagtcaaaatcagtgtggatcgactgcatcaactgctgtccttgttggtgatcgcctctttgtcgcaaatgttggtgactctagggccatcatatgcaggggaggaaatgctgttgctgtttcaaaagatcacaaagacctagaatacaagaactagaatagaagacggacaaacgacaattagaaagaatagacta

SEQ ID NO: 52770 - DNA, 174 bp, Setaria italica
  Peptide Sequence Number=SeqID_118744
ttatttccggtttagttttattttccgtttagtttaggttaagtttgttcgatgatacactcgagtttctcatccttgcaagtgatgggctgtgggatgtggtctccaacgaggaagctgtcgccatgaccagatccattcaggacccggaagaggctgcaaagaagctcttgc

SEQ ID NO: 52771 - DNA, 500 bp, Setaria italica
  Peptide Sequence Number=SeqID_118745
aggagctctacgtgtacgagctcaacgagcgggaccgggagagccccgcctacctccgcctcagcgccaagcagacggagaacgcgctgggcgacctcgtccccttcaccaacaaggtctgtctgtcctcttttttttgtcttgctgctcgatccgctctgttccttgcaccctgcttgatcggcgacggcctcgatctcttctttgttcgcaggtgtacagcgggagcctcgacaagcggctgggcatcacggcgggcatctgcatcctgatccagcacgtcccggagcgcaacggcgaccggtacgaggccatctacagcttctacttcggcgactacgggcacatctcggtgcagggcccttacctgacgtacgaggagtcgtacctggccgtcaccggcggctccggcgtcttcgagggcgcctacggccaggtcaagctcaaccagatcgtcttccccttcaagatcttctacaccttctacctcaagggcatcc

SEQ ID NO: 52772 - DNA, 244 bp, Setaria italica
  Peptide Sequence Number=SeqID_118746
acagcgggagcctcgacaagcggctgggcatcacggcgggcatctgcatcctgatccagcacgtcccggagcgcaacggcgaccggtacgaggccatctacagcttctacttcggcgactacgggcacatctcggtgcagggcccttacctgacgtacgaggagtcgtacctggccgtcaccggcggctccggcgtcctctcagcaagcctatcatgcaaccattcaaaatcactatagcgtcg

SEQ ID NO: 52773 - DNA, 216 bp, Setaria italica
  Peptide Sequence Number=SeqID_118747
atcctgtccaagaactgaatgaactgacggtcctcatgagcaacctggggatctgaaaacctgtcgagatgtggctcatggttcgtgatcctggtgtctgtcttgatttgcccgtaggcactgctgcagactgatggctcgcccgccgggggaagaggacggcagagcccctcgccgcccctgaagctgagcagccggccatggccgccggataga

SEQ ID NO: 52774 - DNA, 263 bp, Setaria italica
  Peptide Sequence Number=SeqID_118748
caaccaactttagttaggcatacttcagaagaaaggttgttcatagtacctttgcaacagctttaggaggatagtcacctccaagtcttgagtcaacacattgtctaaccttgtcttcactaagtcttggggtagcccaggtcacaaggctctgctgtccccttggcaaagtatggtcgacaggtttccttccagtcaacagctcgagaagaacaactccaaaactatacacatcactcttagagctgagttgtccagtcatt

SEQ ID NO: 52775 - DNA, 252 bp, Setaria italica
  Peptide Sequence Number=SeqID_118749
agggttgttggatgctcgcgcatttagcagggggctggagcgccttcaccacaatactcatgtttggtcgaaaatcagcctcatattgaacgcacaatgcggcaactgctgcaaactttgcaacagatttaggaggatattccccctccaagtcttgagtcaacacactgcctgactttgtcttcacttaagtccgttggtagtttgtccctattgttcttacgttagttactttcttgttcttgttccctt

SEQ ID NO: 52776 - DNA, 166 bp, Setaria italica
  Peptide Sequence Number=SeqID_118750
cctttcacacctttccgtccatgaagaatatcgtgaagagaacccatagtagcaaattcataagcaaggatacgagtgtttccatcaacacagtaaccaagcaactccacggcttagtgaagacaaagtcaggcagtgtgttgactcaagacttggaggggaatat

SEQ ID NO: 52777 - DNA, 247 bp, Setaria italica
  Peptide Sequence Number=SeqID_118751
gttgatcagcaggcggtatgcatcattccttgctggatggtgtcctgggtactgattcctggagtctggcactccttgtgtatcttcatcaccacagcatccaaagcacgacatattctatccaaaaaacaagatctttgcgtggcccgtcgcaaggagagtactagctgccttcctactcgcttcccttcccgtcctcctccgcgtacctccgctgcctcccctcgtcctcgtgccgccgccgcct

SEQ ID NO: 52778 - DNA, 162 bp, Setaria italica
  Peptide Sequence Number=SeqID_118752
ggcaaacgttcgcaagaacgacattgtcgactcatatatcttacttatctatcatacaagaaggggaggtgaagtgaagcttatgagtcgacaatgtcgttcttgcgaacgtttgcctggcagcatgtaacatttgtgattattcttcccccgagttgtaaa

SEQ ID NO: 52779 - DNA, 404 bp, Setaria italica
  misc_feature (380)..(380): n is a, c, g, or t
  Peptide Sequence Number=SeqID_118753
tagtactaattcctttgttagtaattgttactatttattccccttagaagttctcaaccgagagacctcaccgcaaagtccttcaaagaaattctttacatctaattgagtaaccatcttatctatgtttgtacaatagacggttcgcataaccatttccttctcatcttccgtcctgggaagaaactttggattaacaggtaagatagctgtctttgaaggcaagactctaacagggtagaaaccaaaaactgtgcctccaaggttaagtgcagttcttgcgccctcctcatcagagaactcaataaatgcaaacctaagaacagagtgaggatcaccacaaattcggcaatcaacaacttgcccgcaggttgcaaagntatcagcaagtctctcctctgtca

SEQ ID NO: 52780 - DNA, 401 bp, Setaria italica
  misc_feature (15)..(15): n is a, c, g, or t
  misc_feature (29)..(29): n is a, c, g, or t
  Peptide Sequence Number=SeqID_118754
gtcttagaagggctnaccctgacaggtanagttcccaaaaatcatcccactgcaattcagagccaagatggcacctcagcatggacaaactcaacaaaagcaatccttgtagaatgtacattatcccctagaagtctcaaccgagagacctcaccgcaaagtccttcaaagaaattctttacatctaattgagtaaccatcttatctatgtttgtacaatagacggttcgcataaccatttccttctcatcttccgtcctgggaagaaactttggattaacaggtaagatagctgtctttgaaggcaagactctaacagggtagaaaccaaaaaactgtgcctaccaaaggttaaagtagacaagttacttagacgaccctaccttacaatacaagaagaa

SEQ ID NO: 52781 - DNA, 210 bp, Setaria italica
  Peptide Sequence Number=SeqID_118755
ctctgttcttaggttcgcataaccatttccttctcatcttccgtcctgggaagaaactttggattaacaggtaagatagctgtctttgaaggcaagactctaacagggtagaaaccaaaaactgtgcctccaaggttaagtgcagttcttgcgccctctacagagtaaagacaatagaactcaaaattcacaaaagaagagtgattacag

SEQ ID NO: 52782 - DNA, 305 bp, Setaria italica
  Peptide Sequence Number=SeqID_118756
ctttttgtagcaggtggaagcacttctttctctatatttggtcatctctttcagtacaggaacttcaaaagctggctcagtgccatgaactccattaattggttcctcttcaagagaatgggatgcactaacgaggacaactctcaattttgctttcctcgatgtacctgccagcttctttggagaactaataggaaaagggtaagtgagattttcagttagaacaagtaacatgaaaagaacactatgcaattaagggttacagctatgtgcttacaaaggcaggaacaaggtcctcatcagat

SEQ ID NO: 52783 - DNA, 254 bp, Setaria italica
  Peptide Sequence Number=SeqID_118757
aaaagctggcttgtgactagcactacattgtatcaaaaaaacaatgtttgacaggcctactgatctttctcctagattaagctaaacttaggaaaatgggcatgtggtgcactagataatggaagcttacatgagataattgatgattctgcacattgaaaagtcctctgtcatttagcataacagcttctttaggaggagtttcctccagtggaggagattccttaaaaactgcaatgctttgtttcaaaggg

SEQ ID NO: 52784 - DNA, 253 bp, Setaria italica
  Peptide Sequence Number=SeqID_118758
cgctttcctttaagcaagtctatacaggtcttctctattttccagatatctatatattgatgaagttcaagacataccatttcttgctgtaacttatcccgctcctgggtggtacttctgctctcttctcttagccttattatcatcttttcagcctcttccaattttgattcaagattgttgagctttgacttcagattctgaacatcttctgttacctggtacatatgtacaaggagaaagtcaacaaatt

SEQ ID NO: 52785 - DNA, 265 bp, Setaria italica
  Peptide Sequence Number=SeqID_118759
gatcctgaaacctccctcgttctgttggtagcatcaacctcaattagattaattccatgctattggtcaaagaggagtaaacaaaagggatctgaaaggagttgttctccttcactttctgatacccttagaagaaaagggagcagccttttatgcggtagtcagacaatgcatcgaaggaagaaatcatcaggctccaataaatatggatatcttaataaatcttcccaaggtgtgccactgttgggtgatagtagtcactttg

SEQ ID NO: 52786 - DNA, 309 bp, Setaria italica
  Peptide Sequence Number=SeqID_118760
tattgtatttgtattctaaagttgtctactattgttggtattaattggacaacaacaggttgaacagggtagccaggtatgaatgcgccatgttggaaagaaatcaggaatctcccattcgttgtagtgccttcagggaataacaggacccgcgggaagctattgcaagcggcctttctctttatttcatttacagcagccttcctagaagctggtgagaatctatcaacatatataacctgcattgctcgaataatcgttccaacaaacggcagggcatcatgagattcggacgcaacaattgttggg

SEQ ID NO: 52787 - DNA, 406 bp, Setaria italica
  Peptide Sequence Number=SeqID_118761
aaattagggactttaggaaaaattaaataacaataaataaataaggacaaataactaattacttacaatagaaataagaagaatagacaacaaatccgcgttcaagaaattttttttaaaaaaatagacttacccatcatcttgaacctcctcgacctcctcaatggagctaatgttctccttagaagcttcatcaggtgcatcctgtggacctggtaatgcaggctgttccacgtgttcttctgtggcaccatgggttccatttctgatacaatcaacaagcataagaaccagcatttagtagcatgtactgaacagagcatagatagaatttgcatttttatgcccatgcttcatgatacccactaaagcagatcatcaagcccagcaatgtacctacttggta

SEQ ID NO: 52788 - DNA, 250 bp, Setaria italica
  misc_feature (196)..(196): n is a, c, g, or t
  misc_feature (243)..(243): n is a, c, g, or t
  Peptide Sequence Number=SeqID_118762
gaatttgagaacaccaagatagtacctccacttgctttggttctgcagcttcagcactgattggatcttcaaacttaggaagagaaactggagctagcttactacctcggagttgttcatcatgaggaaggtagtttctgaacttcatggcaggaagctcactgcatcaaaaagacgcacactcaataaaaaaatntctcactcagcactaaacagaactcaaatctaccaagaccattaaancaaagag

SEQ ID NO: 52789 - DNA, 336 bp, Setaria italica
  Peptide Sequence Number=SeqID_118763
atgaagcatgcttcataatcaccccactagttttgatctggtctacattaaaacaggacacaactactacagttcaggtttttcatgtagcactggacaaatttcactctagttttatatattagctatcctacctcaaaaacaagtcctatccaggcaccatctctcatactcatcaaggttgcttcacttcagttcatccccaccggtagatacactaagcgccccaagtaccttacatattacgagttctgtcactgaactacaaggttaggtacaaatacttaagaaagaacttaaacctaaaaccaaaaagggaaaacttaaaacttaaaa

SEQ ID NO: 52790 - DNA, 257 bp, Setaria italica
  Peptide Sequence Number=SeqID_118764
atccaggcaccatctctcatactcatcaaggttgcttcacttcagttcatccccaccggtagatacactaagcgccccaagtaccttacatattacgagttctgtcactgactcaggttggtcaatcttgagcttcctccagggcttctttctccctctgttgctccactgcaagcggcggagtaattaaatatcaatgtgtaagtgcccaaccaagaaaacaaacaaaaaaatcacacgaggaactcaatggaaaa

SEQ ID NO: 52791 - DNA, 324 bp, Setaria italica
  Peptide Sequence Number=SeqID_118765
tttttggggtttcttttattgttttcctaaaagggttcttccaacttagacttaggttactagacaagacttacaagacaactgattggatcttcaaacttaggaagagaaactggagctagcttactacctcggagttgttcatcatgaggaaggtagtttctgaacttcatggcaggaagctcaccatcatcttgaacctcctcgacctcctcaatggagctaatgttctccttagaagcttcatcaggtgcatcctgtggacctggtaatgcaggctggttccacgtgttcttctgtggcaccatgggttccattttgctg

SEQ ID NO: 52792 - DNA, 150 bp, Setaria italica
  Peptide Sequence Number=SeqID_118766
ggatcaaagccaatttgcaaagccgggtgcggaaagggaaaatgaccgatgagagatatgagaaggctatgtctcttgtcacaggtgtccttgattatgaacattctcaataacggcctcaataactaggtccacatctttgaaatgttc

SEQ ID NO: 52793 - DNA, 459 bp, Setaria italica
  Peptide Sequence Number=SeqID_118767
atatggttacaattatccaagatcttgctgcttcattgttgatggagtttgagaagtgggtcttgcgtgcagaatctacaggaactattctaaagacacctttggattcacaatccagccttggctcagaggaggtaattaaggctaaaaagagaaggctgggtcgcgcacaaaagataataggagattattgccttttggctggatcacctgttgatgctaatgcacattacaccaccgcaatagagcttgcaagattgactggggatgtttactggcatcaatcagagccttggcaccatctgcagctcccattaacaaatctgacacctccttggcaagttcccgcctgcacaagtatcttgccaacttcaaggcagcttcaagctcaaagctcaccaggtgaaactctttgagcattatcttgtaaagtggctcttctgtatagctggataatgg

SEQ ID NO: 52794 - DNA, 422 bp, Setaria italica
  misc_feature (373)..(373): n is a, c, g, or t
  Peptide Sequence Number=SeqID_118768
atatggttacaattatccaagatcttagactaagacttacaattagttagaataggaagtttgagaagtgggtcttgcgtgcagaatctacaggaactattctaaagacacctttggattcacaatccagccttggctcagaggaggtaattaaggctaaaaagagaaggctgggtcgcgcacaaaagataataggagattattgccttttggctggatcacctgttgatgctaatgcacattacaccaccgcaatagagcttgcaagattgactggggatgtttactggcatcaatcagagccttggcaccatctgcagctcccattaacaaatctgacacctccttggcaagttcccgcctgcacaagtancttgccaacttcaaggcagcttcaagctcaaagctcacaggtgaaactc

SEQ ID NO: 52795 - DNA, 336 bp, Setaria italica
  Peptide Sequence Number=SeqID_118769
gattattgccttttggctggatcacctgttgatgctaatgcacattacaccaccgcaatagagcttgtctaagattgactggggatgttttctggcatgctggagcccttgagggtagtgtctgcgcattagtggtagataggatgggccaaagtgatcccgttttggaggatgaagtgaaatatcgttattacaccattatccagctatacagaagagccttggcaccatctgcagctcccattaacaaatctgacacctccttggcaagttcccgcctgcacaagtatcttgccaacttcaaggcagcttcaagcttctaaagtctcacaggtt

SEQ ID NO: 52796 - DNA, 238 bp, Setaria italica
  Peptide Sequence Number=SeqID_118770
acatttctttggctaatcagcatgcgggttgttttctggtttctagctgattggtatgaacccagtagtccaagccggtactgatgtgtaatggacactgaagttgaactgttgatattaatttagattttagaactatgttcatttgataagtttgtaccttccaatcccgagcaagcccatgggcttgtttttccgtatgcaatggagaaatttagcattttagctttcctcctct

SEQ ID NO: 52797 - DNA, 131 bp, Setaria italica
  Peptide Sequence Number=SeqID_118771
cttcgttacgtactacaactgcaactatgctttggtcaaggctcaagagaatgcagttgtagtacgtaacgaagtgtttaacatcagcagaataggtcagctaacctaacacaccagcacgctaaacaaat

SEQ ID NO: 52798 - DNA, 252 bp, Setaria italica
  Peptide Sequence Number=SeqID_118772
gtctatacctgcaggttttcatagccatttctatcatacttggagatggtctctataacttggttaagatatttgtcattattgctaaggaattctgtaatgtacgatccaaacaacatgatcttcctgttgaagctctggaaggtaacatcttacttcttagctgacatgcaatgttttcaccgcatgctgtgagatgaatttgggccatttcctattacgttttacaaaagattacctctttgttacttt

SEQ ID NO: 52799 - DNA, 237 bp, Setaria italica
  Peptide Sequence Number=SeqID_118773
cctatcccctgtgtgccttgctttcccctgttgcgtgtctcagcagagtggagagtgaagctctggctttttgttgcatacgtcgtttcttttgtctgtctagctggatctgttggtttattggtgcaagatgcgctgacagacaagggcccgtctgtctggactggtgttgctggtgttctgcaatgcgttctcgtgttgataagtgggttgacatattggacatgccactctgaa

SEQ ID NO: 52800 - DNA, 419 bp, Setaria italica
  Peptide Sequence Number=SeqID_118774
ttctattcgtcctaatttctaggtaattgttatttaaaggttggttaagtctaggtctactaagtattgaagacagtaacctgaactgcaatcctctatgcaaaatgtagaaggtatcaagcaagcaaaggctattaatcaattcccatcagcggaattatgcactcctccctcaaaagaactttgcaacaatgaaaaaatgaaggaacataaaaagtgaaaggcttgcatataatgggaattccagaagaacgctacaggaaaagttggacaagtgcatgccagagcagccagacaaggaatcactcgagaaaaagccagagaaggaatcgaaaaccgatgcaatcatacaacctgaaatcaggctccaggatgaagaacactatatagataagtcgacaaagttctttcgagctctt

SEQ ID NO: 52801 - DNA, 329 bp, Setaria italica
  misc_feature (268)..(329): n is a, c, g, or t
  Peptide Sequence Number=SeqID_118775
acctgaaactgcaatcctctatgcaaaatgtagaaggtatcaagcaagcaaaggctattaatcaattcccatcagcggaattatgcactcctccctcaaaagaacttttcaacaatgaaaaatgaaggaacataaaagtgaaaggcttgcatataatgggaattccagaagaacgctacaggaaaagttggatcgtgcattgtgtaacaaccagctaaaatggaaatttgaaggatgacaagaagattttcttgtcgtccagtaaatnnnnnnnnnnnnnnnnnnnnnnnnnnnnnnnnnnnnnnnnnnnnnnnnnnnnnnnnnnnnnn

SEQ ID NO: 52802 - DNA, 360 bp, Setaria italica
  misc_feature (337)..(337): n is a, c, g, or t
  misc_feature (345)..(345): n is a, c, g, or t
  misc_feature (350)..(350): n is a, c, g, or t
  Peptide Sequence Number=SeqID_118776
tgagcaaagagaaggaccagttgatgaaggaaagagatgctgcatttcaagaggcttatatgtggcgcaccgaactaggaaaagctagagagcaagcagtgattcaggaagcaactattgcccgagcggaggagaaggcaagggtttctgaagcagatgctgcagctcggataaaggaggctgctgaaaaactgcatgctgttgagaaagaaaaggaagagcttctagctctggttggtgttctccaatcacaaagtaccaagaagaagaaacaagaagacaagacaacaaaagacaaagtaatagtagaaagaagaaggtactagaaatacaatanatacgtanacaanaaattaccca

SEQ ID NO: 52803 - DNA, 350 bp, Setaria italica
  misc_feature (335)..(335): n is a, c, g, or t
  Peptide Sequence Number=SeqID_118777
tacaccaaacctactgtatctgcattgttgcccaccagtgcatgtgaaggcgtgataggcgattggggacctacagggaatgaatagacggaatgcgatttcttctgcctcttcagaggtccaagactgtgagcaactacactgtcatgatgcaagctagattgcattccacctccctgccttgactgcctacagaagtttgtgaaatacaaagcacaatttaatgatcgggatgtaatcaatattgaagctattggtttgttcatttcagcaaatgcaagtgctttagtctttgcacagggtaccttattctatggacagcttcctcttcattnacttgttaatagcac

SEQ ID NO: 52804 - DNA, 468 bp, Setaria italica
  Peptide Sequence Number=SeqID_118778
catatacacaagcagcaattagaccgaatctgctaattaagtttcgaattcttctttcggagtcgtggagtgaccgatgctctgtcaggctgtcaccgtggaccggacagctccacggcgcgcaggttgtatgttgaatcgacgatccagtcgttgcgaagcggcgccgactcagcctcctgcctcaccacctccaccttctgccactcgtcccatcgctccgccagcccatcgccttcgagcatcctcaccacctccgacatcttgggacggtccaacggggagccctgtgtgcagaggagcgccacctggatcaggttctccacctcagtctcctggtaggcattctgcaggtctgggtccaccaacatctcgaccttccgatccttgagcagtcctttcacctgcaagatgccaattggaattattcattttcgccagcgtgttcttgccctgagcagtccattc

SEQ ID NO: 52805 - DNA, 380 bp, Setaria italica
  Peptide Sequence Number=SeqID_118779
cccctctgtccagtaataagctccagaagcatgatgaccgtagccaaaaacatcagtcttctcagatgatttcccagtggaaaggtactcgggagcaatatgtccaattgtccacgaacagcagtagttacatgggtgtccttgtagtccataagcttcgcaagcccgaaatcacctacaacggcctcaaagtcctcgtccaaaagaatatttgcagctttgacatcacgatggatgattttcggatcacagtggtcgtgcaagtaagagagtcctcttgcagatcccagtgcaatccgtctccttggtctcccagtcaagaggcggttcagatggctggacgctactacgtaaaacgtagaatagaccaacaactacca

SEQ ID NO: 52806 - DNA, 273 bp, Setaria italica
  Peptide Sequence Number=SeqID_118780
tcaccacctccgacatcttgggacggtccaacggggagccctgtgtgcagaggagcgccacctggatcaggttctccacctcagtctcctggtggacccagacctgcagaatgcctaccaggagactgaggtggagaacctgatccaggtaggcattctgcaggtctgggtccaccaacatctcgaccttccgatccttgagcagtcctttcacccagtcaagcagcataacatcatcatcatttgcaagccgagcaaggtcgaatgcccttc

SEQ ID NO: 52807 - DNA, 252 bp, Setaria italica
  Peptide Sequence Number=SeqID_118781
cgactgtgacaccaacggacctgatagttgtgcatttccaagatcaagtctgataacactgttatcagtgttacaagtaacatggaaccatgtacatggattaaccagagtgggatcccaactctgcagcacattgttagtatctttcaggctttggcggagactgtatagagcatcaccctccgagttggcgacgacccggctaacgccgaccgccaccgccaagagcgccgccgcccaccaccacccgag

SEQ ID NO: 52808 - DNA, 160 bp, Setaria italica
  Peptide Sequence Number=SeqID_118782
atccaaactgaccaggttagttaggttgcccagttcagggggtattgtcccacttatgttgttgctgtaaagctccctattacaaaataaagttacataaatcagttatcggacgtaaaggaagacaattacaaaatgtgaggatgtatgctacaactaa

SEQ ID NO: 52809 - DNA, 347 bp, Setaria italica
  Peptide Sequence Number=SeqID_118783
aacacttccttctcctatagataaggctggttttcgtatcttgatagttaacaatctcaggctcagatctagatatgccatctgcattttggccattgtttgcattggaacgatgagatgcttcattatcaacatgtcttccaggtcttggactccgtgaacgtctagaagcagttgtatgtactgaacacttgaaatggatcaagagcggtgatgatattggaacaatttaatccggggggtttgacgagacgatgagccggatcgtacggggctctccccccaactttagcagcagctgccttcccttagggtaatttacccttttaccgtaattttacttttta

SEQ ID NO: 52810 - DNA, 440 bp, Setaria italica
  Peptide Sequence Number=SeqID_118784
tttttggaaattcgtgtgccatcttgctgaatctctgtaatttctgaatctgttatgaacgacctgcatacactaatagagggatcatataaaccgtgctacgtaacatgtctcttttaatggacttatattttcgcatttgaattgaactcttgttggattttgacagcttattatggtattgagaattcattcttgggattatttccacatgttgcacaggtataatagtggaacacaatgaatcaatcttttttattgctctactgtatctggttttttactctggtcaattttgcagtggctgcttgctgtacataacacacagatacttctgagtgtatttttggctatactagcattgctacttggtggtttctgcgcctaccatgcacacctttgtttaacaaatacaacaaaccaattgagttctattctaa

SEQ ID NO: 52811 - DNA, 270 bp, Setaria italica
  Peptide Sequence Number=SeqID_118785
acctttggcgcttaccactacctcttgtacgttctcgcgcctccttcctccccttcccttcgctcccgccccggcttagcgagtgaagggtttgttcgcgcaggcggttcgtgcaggcggtatgcggcaccggggccagggatctcgtcctcggcgtcgagcagtactgctgcgaccggcccaacccgatcctgcaggtgttttatgttgccataattggggtgacatattttatgatagtgcagacatctttcgagtacattcctgggt

SEQ ID NO: 52812 - DNA, 494 bp, Setaria italica
  Peptide Sequence Number=SeqID_118786
agcgagatgcccatatgatctcacttgcctcaaaggtaacatcataagagaatactacatatgcatcaggagccacctcttgaggagtgtgactaccaggtgtaatcttaatgttagcattgcaagtttgcgctgtgggattattgtcatcccaggtaccgtattcatgcttgatgctgctaggaatcacatggaagccaacaatgcgagcgtctggagaagtttggtcttcatggtacaaaactttaaaactcaagtggttgttgatataatacttgtcatccttgagcttataaccaactcgataaccatgctcaaagcttggtgtttggcttccttcccgtgtctgtctaggtaccacaactgggagattatctagaatcatgttcactcggtaattcaatacaatacgaattttttactttagaaaattacttacgacaagacttacttagaagaaaagacttacctttacgtaactaaaactaaaccta

SEQ ID NO: 52813 - DNA, 352 bp, Setaria italica
  Peptide Sequence Number=SeqID_118787
gtcatgagtcctccgcggtttgctggtgataagaatccaagtagcgcaaacatcatggttactagtgtcatcccaaagaactgcacgccagtaccaacgtaaacacaaaggaggcctgagtggacaggaggccggaatacatcaccatgcactaacttccatccagtttcttcctgggcctcatcctgattgtcaagctgattatagtttgctatgtccttgtaaagagttctcatcatgatcatggccaccataccagaaaggataggacaatcatccattggttttcaattgttaactcattgatgattgtcctattcctttctggtatggtggctatgtccttgtaaag

SEQ ID NO: 52814 - DNA, 342 bp, Setaria italica
  Peptide Sequence Number=SeqID_118788
ttaactaagtaagaaagaaattaaagaaactaagaaattaagaaactaactagtactaagaagaaaacttaagaagacaaggacaataagaagccaatggtaccagtcagcacaaagaaggcataagagatgatcagcatgtaaccaaagtacaggatgcctgagacaagcttcgtgatctccaacttgttgaagaagtagaagatagcataagcaaacagatagagtgctgatgagcctgcagtcaggtatgccctccaccaccagtggtaatcctcactgcatagctggaagtagcatagcacaatcgtgatctcagcacaggtcacaatgaggatgatg

SEQ ID NO: 52815 - DNA, 344 bp, Setaria italica
  Peptide Sequence Number=SeqID_118789
tattacaagacagcactcaatatctttaaaggtcaaaatccatgctgatcatcacgtatcaagatctcactttaacttccagcagtttcttactcctaatggactacacatactctaccaaaaccatggaatcccatctcaaatcccagttttcctctatatgtcaatcgagcagcaccattgcgtcgtacctttgttaaatttaaaacctttggaaacaaggtgctctaagtttctctagacagtagttcaatcagtcaatcttcacagaagcatatatcttcctcacgaaccagaagcaggcattagaagtcctaattggttacctagttctagtctactaa

SEQ ID NO: 52816 - DNA, 407 bp, Setaria italica
  Peptide Sequence Number=SeqID_118790
agatagaaagaaagaagactacaaataaaagaacaagaccccaaaataggacaaataatagccaccagcaagtatagcaaaagctggctgcaggtaccatgcttgctcgggaatttgcctgggaatcttgtttgtcttcactgggtcctcaatggctggctgcttgaatcccaagaacttccaacaaagaccagcggcacagagatgccaaaccataggaggaacaaagcaaacattgttccaaaaggactgcgccagatgatttctcacccccagatgagggcattcaaaaaagaagaagagcgcaaagataattccaggaaacatgaaggcagtttgaggtgatcttcttccactcagtgcctttgaacatcttgtacaggcgagacgaggtgtatcctgccagt

SEQ ID NO: 52817 - DNA, 243 bp, Setaria italica
  Peptide Sequence Number=SeqID_118791
aacacaaaggttgagctaacgctgccccaaactttctggtgccataaacaggcctcgcttgctgcaattgctgtgctgcttggtgccacgaaaggagctgatgtgtggtgagaacgccttcggtggtcagcggtctgcctcagtaaatgttcattgttcgcctactttgttgagttgagttgtctgggttgtacatgtatacatagcaagaatagggcgaacgagttgacttcatctcccatt

SEQ ID NO: 52818 - DNA, 487 bp, Setaria italica
  Peptide Sequence Number=SeqID_118792
ctcagaggtgggttggctactcctccccctcttaccaagtcttcggctttagggtttttcagtgggagaagaagggagatggcggcggcggacgtggagtaccgttgcttcgtcggcggcctcgcatgggccaccgacagcgagtccctccagcttgccttcgcctcctacggcgacgttgtcgactccaaggtcatcaccgaccgggagactgggaggtcccgcgggttcggcttcgtcaccttctccactgagcagtcgatgctcgaagccatcgagaacatgaacggcaaggagctcgacggccgcaacatcaccgtcaaccaggcccagtcccgcgctcccgtgcgaccaccttctcgacggcaaggccgcagatctgcgggaagcgccaccggcaagcagcctgggagcaacggcaacggcgacgccccagccacgactctatggagttacttcgataaattgctgcgtccagctatgggct

SEQ ID NO: 52819 - DNA, 411 bp, Setaria italica
  Peptide Sequence Number=SeqID_118793
tccaaatgcatttatttgctgcctaaagaatgtagatatctggctcaaatattacctacacaattggtgaaaaagaatgttgagtgtgaattacttgaacttactgtgcagtccagttctcactatcactactagtagcgcttgctccctaatcactactagttagttgcatcagattctcactgtcaaattggtttgcactatcgattgctactagttaatttgtttctactttatactttgtgctgttcatacctgtttgtatcttcttattatgatattgctattgattatcatttatacctttttgtaaacagatgtcttctcatcggttagagacctctagtactagtgagagatcaacaactatagccttgaagggctatggtgtgtgatgtctgtgggcatggg

SEQ ID NO: 52820 - DNA, 275 bp, Setaria italica
  Peptide Sequence Number=SeqID_118794
tctacggggggcgtcaggtctcttggtggtcacgcagatctcacggggggcggggctccaccaaggaaggcggcactgccgccggccaccgccgctcccgtgcgaccaccttctcgacggcaaggccgcagatctgcggggaaggcgccaccggcaagcagcctgggagcaacggcaacggcgacgccccagccacgactctatggagttacttcgataaattgctgcgtccagctatggggctgctggtaagtcgtcttggtcgatttcctttt

SEQ ID NO: 52821 - DNA, 345 bp, Setaria italica
  Peptide Sequence Number=SeqID_118795
gaaccagctttgtaataaatcctgccaaggtcatatgcaaccataatatctagtataacaggatcttcgattgattgaactccatcgatctgtgtgtatttcaagccatgattactgaaattcctcacaaatctgaggagatcccagtaatgatctttgtatgtttctatactactagaagcttcgtcatagtggaacaccttgttatatggcatgatagcacctattttttgtccacccaacgcgatctaagcgccgaagggacgatattcaaaatctgcattctgtctacgggcgtcaatcaacaacaaatactagaaagaagacctttacaaagacaaaata

SEQ ID NO: 52822 - DNA, 253 bp, Setaria italica
  Peptide Sequence Number=SeqID_118796
tcttagtgatatcaaagtactctacaacgattcgctgactctcaggcgttggcagtacattgttcttatgccagttcaaaatttgaggattcaagagaatatgatttatttcgcattttgggagttccactactccatgcacctgcattcaatgagcaggtttttccctctttacaagagcaacttgagcctggacaaattggtattttgtatttgaacggggaattcaataccatttgtaagcacaatggta

SEQ ID NO: 52823 - DNA, 331 bp, Setaria italica
  Peptide Sequence Number=SeqID_118797
taaatctgccaaggtcatatgcaaaccataatatctagtataacaggatcttcgattgattgaactccatcgatctgtgtgatttcaagccatgattactgaaatttcacaaatctgaggagatcccagtaatgatctttgtatgtttctatactactagaagcttcgtcatagtggaacaccttgttatatggcatgatagcacctattttttgtccacccaacgcgatctaagcgccgaaggggacgatattcaaaatctgcattctgtctacgggcgttctattctactactaattcttgtaagtagtccttttaaagtctaaattta

SEQ ID NO: 52824 - DNA, 411 bp, Setaria italica
  Peptide Sequence Number=SeqID_118798
gggggggggcatctcaggagctccgggaacaggcagcaactgtagatccctcaaattccttcattttcctcagtcccatcttcatcgatttcctcagttgcatcatcggatgttttgtatgcattccaagtgctgacaagcctttctggtttttcaaacacatataacacatgcagaaccagctttgtaataaatctgccaaggtcatatgcaaccataatatctagtataacaggatcttcgattgattgaactccatcgatctgtgtgtatttcaagccatgattactgaaattcctcacaaatctgaggtgttcccacttatgacgaagcttctagtagtatagaaacatacaaagatcattactgggatctttgtatgcttctagtagtatagaaacatacaaagat

SEQ ID NO: 52825 - DNA, 375 bp, Setaria italica
  Peptide Sequence Number=SeqID_118799
acgaactacagtcgcactagtgtgccctcacttccgacttttaagatacctagaagcacatcagacgatggcttctcccttttcatttccatcaaatgctatagagaaacaggggtgggtggatacaaattatacatgttgatgttgatgaatatgaacagtttgagtcaacaatctttaccttcagttgtttcagctgtttcagagcatccctcacctcaggtggtgttacaagaaattctggtcctagtatccatttcttgaaaattgggtcgacaggcaatccatgtgatttctctacagtttgatcaccatcagacaggatgctataagcatcttcatccgaaatctgatcccagtatttcgcaaatgcgt

SEQ ID NO: 52826 - DNA, 432 bp, Setaria italica
  Peptide Sequence Number=SeqID_118800
ctctacagtttgatcaccatcagacaggatgctataagcatcttcatccgaaatctgatcccagtatttcgcaaatgcgtccagagcagctttggaagttggcacatgagcttcaagatgtctttcataattaatttctgtgcagaattcctccaaacatttcgaacacttgtacactttctggttgatgtgtgccctggtgtatgaaaagtcaccagctacaaatatttctttttcatcgaccatagttttccaagaagcagaagggttcttcttgtgaagggcttcatcttctactaacatgtatacagtaccattgtgcttacaaatggtattgaattccccgttcaaatacaaaataccaatttgtccaggctcaagttgctcttgtaaagaagggaaaaaacctagacttactaatttagtaaatta

SEQ ID NO: 52827 - DNA, 258 bp, Setaria italica
  Peptide Sequence Number=SeqID_118801
ttccaacgtgctgacaagcctaagaagaaaaaagatttatgttagaacatattccaacaaaatgtatagataaagacagacagagatattaatagacacacctttttggtttttcaaacacatataacacatgcagaaccagctttgtaataaatttgccaaggtcatatgcaaccataatatctagtataacaggatcttctattgattgaactccatcgatcttcatccgaaaataatatggagtttagtttttat

SEQ ID NO: 52828 - DNA, 290 bp, Setaria italica
  Peptide Sequence Number=SeqID_118802
ttaggggtttagggtttagttttaagtttttaccttaattttactttacttaaaaagttctttgtacgggttggggttggggttggggtcctattctcaggagctccgggagcaggaagcaaactgcagatgcctcaaattccttcattttcctcagtcccatcttcatcgatttcctcagttgcatcactgcatccataaccataaaataaactcagactgtatgaagtcttcccaaacagaacagggaattaagtttttcccaacagaacgacacatcctgaatgcca

SEQ ID NO: 52829 - DNA, 198 bp, Setaria italica
  Peptide Sequence Number=SeqID_118803
ttccttcattttcctcagtcccatcttcatcgatttcctcagttgcatcatcggatgttttgtatgcattccaagtgctgacaagcctaagaagaaaaaagatttatgttagaacatattccaacaaaatgtatagataaagacagacagagatattaatagacacaccttttggttttcaaacacatataacacatg

SEQ ID NO: 52830 - DNA, 231 bp, Setaria italica
  Peptide Sequence Number=SeqID_118804
tcccatcttcatcgatttcctcagttgcatcatcggatgttttgtatgcattccaagtgctgacaagcctgtgtgaattgcaagccatgattactgaaattcctcacaaatctgaggagatcccagtaattatctttgtatggttctacaatagttttgtcatagtggaacaccttgtgatatggcatgatatcacctatttttgtccacccaaggcaatctaagcgctga

SEQ ID NO: 52831 - DNA, 128 bp, Setaria italica
  Peptide Sequence Number=SeqID_118805
atgtggtccatacatgagaacttgttgaagtttccgacacaatggaagcaatatccttgccttcgggttcgtggggatggtgcaacattaatcattgacaagatgccagtaaatgcaactaaagatgg

SEQ ID NO: 52832 - DNA, 147 bp, Setaria italica
  Peptide Sequence Number=SeqID_118806
gaagaaaaaaaaaagtcaaattctacatggacttcatgtaaacatcagttaaatataacaaccattggcttctgagtcacaggttcttttacctgagatattgcacctatggttgttatatttaactgatgtttacatggacttcat

SEQ ID NO: 52833 - DNA, 136 bp, Setaria italica
  Peptide Sequence Number=SeqID_118807
ttaggttaaaagtaaccttgttgtacttctagaagccaatgaatcaggttcttttacctgagatattgcacctatggttgttatatttaactgatgtttacatgaagtccatgtagaatttgactttttttttttc

SEQ ID NO: 52834 - DNA, 305 bp, Setaria italica
  Peptide Sequence Number=SeqID_118808
aaggattgaagctggagaatggaagttgattccccatgtgggaggatgtgaattgtacattgagaagttggcgaacctaaggataaatttggtcccaaatacacatttatcagcatgatggctgctgttgtgtaaataataaatattggattgatgcaaacataaagcggggatgaacacatttctgatgtaagtaggtagagtgtcaaacagcacacatacaaagatgaccaagagttaggatcaaaggtctacttttacaactttttttgacactctacctacttacatcagaaatgtgttca

SEQ ID NO: 52835 - DNA, 322 bp, Setaria italica
  misc_feature (1)..(46): n is a, c, g, or t
  misc_feature (320)..(320): n is a, c, g, or t
  Peptide Sequence Number=SeqID_118809
nnnnnnnnnnnnnnnnnnnnnnnnnnnnnnnnnnnnnnnnnnnnnngtaatccatcacaagttcaagatatcaactaagtgtggaggccaagtatcgtacatttgaaagatcagttatccatgattttttcccctctaaactcaaacagcacacatacaaagatgaccaagagttaggatcaaaggtctacttttacaacttttttttgacactctacctacttacatcagaaatgtgttcatccccgctttatgtttgcattctaattcctaattatttatttatttactactaactagtctagtcctattctattgtntt

SEQ ID NO: 52836 - DNA, 321 bp, Setaria italica
  Peptide Sequence Number=SeqID_118810
aaaaagaataagactagacaaggaaatagtttagttcttactttctgcttgcattgatgaaaaaggcatttggaagatcaaatgaagcattcagaccagttattgttgaagagataccgttttcagaagaagttgcttgtggaggttaccatacttgtgttgtagcagatagtggtgatctgtattcttggggttcaaatgaaaatggatgccttggtctgggaggtacagacatggttcgctctccagaaattttgaaaagctcactatttaagcttcctgtgtctaaggtgtcttgtggttggaagcacactgctgtaa

SEQ ID NO: 52837 - DNA, 365 bp, Setaria italica
  Peptide Sequence Number=SeqID_118811
gcaggtcataccagattcatgttgcttcatgactcacgtagtgaagacagatctctttttcctgcatgctgcgttagatgttgttcaggacctagcatggaccacaaatgcaatgttcctgaagtcagttgatagattcaatgaccttgtggtgtctgtttatgtaactgcaggtcataccagattcatgttgcttcatgactcacgtagtgaagatggaataaaaagctttttccaagaggtccatgaactttacatcaagatattcctcaacccactttacctgcctggctctcgcatcacatcctctcattttgataccaaggtcagggccctcgcaaggaagtacctgtagtatgcgtgca

SEQ ID NO: 52838 - DNA, 245 bp, Setaria italica
  Peptide Sequence Number=SeqID_118812
tgactcacgtagtgaagatggataaaaagctttttccaagaggtccatgaactttacatcaaggtaagacagttattggtcatctacagtcaggagaatttcccccactgcattctagattgctaagtgctggaccaagtaagcattcatgtctgtctctggacatggtattcaattgtgatgcctctatttatcttgttctttgtggctggtaactgtagctggtatcttttgcgattcttatt

SEQ ID NO: 52839 - DNA, 259 bp, Setaria italica
  Peptide Sequence Number=SeqID_118813
cgccgaggggggcagcactcctctgggccatccgcaccctcaccaccaccaccacccgcccctccaattcctcctccaattccagcgacgacacatctccggctccgcctcctcctcctctcggggacctcaagcgacagagcaagaaaagatgcccgccaaagccagccaccacccatcaaatgatgcccaaagccacggggggatcaaagacaagaagaccgtcgtggaggttttccctgtgaagatgttggctaaa

SEQ ID NO: 52840 - DNA, 250 bp, Setaria italica
  Peptide Sequence Number=SeqID_118814
agctggttgttgaattcgtaggcgccgttgttgagggtcttgaggcagccgctgtagtcgaggtcgctgtcgtccgccctcggcgcggcgagcttctggggcaggcagcccagagggccggtgccgtggacccagaagttcttggcgccgttgtagtacagagtctgaagcgaaattaggtgccactacggttcagacaaagctagacagaacaaagctgaacatgaggcatacagtctctgaactctgc

SEQ ID NO: 52841 - DNA, 420 bp, Setaria italica
  Peptide Sequence Number=SeqID_118815
ccttcaaatggacatggcttcccatacctatgaagaaattatgaggttaactgagaatttttagcgagaaatacatcattggttatggcgcatcaagtactgtgtacaaatgtgatctcaagagcggcaaggccattgctgtcaaacggctttacagtcagtataaccacagcctccgtgagtttgagacagaactggagacgattggtagcattcgacacaggaatctcgtcagccttcatggcttctcactctctcctcatggaaacctgctcttctacgattacatggaaaatggttccctgtgggaccttcttcatggtaccaatacaaaagaaaggtagaaagacttagaatttaaggggtaaactaaactaaaaggtaacttaagtaaaagtaaattaacgtaacggttagtaa

SEQ ID NO: 52842 - DNA, 295 bp, Setaria italica
  Peptide Sequence Number=SeqID_118816
ttgaggaggtcaagatcgcggagaccatcgaatcggagctccacaagttgaggggaggcaacggcctcactcactctttcaacagaatcaagatcgaaggtccatgaggcgcggtgattgagaagcgtgcgccggagacacagcggtccaacggtccacagaggtgatcttggaccgcggtgattgagaagcgtgcgccggagacacagcggtccacggtccacagaggtgatcttggtatctgaaccccagtagcctatggtggtggggtggtagtagggcctcttgcttgcaa

SEQ ID NO: 52843 - DNA, 348 bp, Setaria italica
  Peptide Sequence Number=SeqID_118817
ccgttaattattccggagaggccaatccctgttgttggtcttgcgtgcagctggagaagtatgtccttgtcggtgcactctgcacacatccccagctgcacgcaagaccaacaatggagcaggcactgaagatacttgaggctgattctgcaccaagtccgttaattattccggagaggccaatccctgttgttgcaaacctggctgagattgagaggtcagccagcagcagtggctcaggtcagctgttcagcccctctggtttccgatcttttattcatgcaaatgaggacgctgctctggcgtctccaaatgaaacatgactgtagcccattagtgaaaggtatt

SEQ ID NO: 52844 - DNA, 218 bp, Setaria italica
  Peptide Sequence Number=SeqID_118818
atgggaagttttttgctatgtctggcttctttgttgtttttaaatttttagggaatgctcctaagaagaaatctggtaaattaactcgactataccagcgaatggagactgaacctggattgagcaagcttgttcacaatgaagctggattgaagaaggcactagagcccctccttcaaatggctgagaagcagatccctagaagagcacaccagctg

SEQ ID NO: 52845 - DNA, 374 bp, Setaria italica
  Peptide Sequence Number=SeqID_118819
gccgatgccactctgggttgatgttctaaaaagaggtcaggaattttgtgaaaaaccatggaaagttgcaaagagtagtgttcctccacagccatttatagaccagtactgcttcagggctccttatattgcatcactactgagagagggattgcagattaaagataatcaggtgataatcggctctggcagtattacttggactcttggggttgctttgtgggaggcaggtcaagcattgtctacacgaatcgatattcaaggataccgaatactgcaaccgggaagaataaacccgaaataattactacaataagtaagttaagtttaactaaggtttaacaaaattaagtaagttggtcatatgtgccata

SEQ ID NO: 52846 - DNA, 241 bp, Setaria italica
  Peptide Sequence Number=SeqID_118820
tattagtaaactactttcttgtctagttattctaacctaggggtacgtattcttggagagtacagctgcactaagacttcaccactcgagaggagactttgtaatttagtgcctgcatcttttggcagaagaaccgcaggtataccgatatctagatctgtttcattgcgctcacataccatcttgtataactcatgcttatcgttgatgattataatggcagaagcaccagcagattcag

SEQ ID NO: 52847 - DNA, 242 bp, Setaria italica
  Peptide Sequence Number=SeqID_118821
cagcaactcctgctcggcgccggcgggccagtcgtgcggccactacacgcaggtggtctggcgtgactccaccgccatcggatgcgcccgcaccgtctgcaacaacggtggcgtcttcatcacctgcaactacaacccgccgggcaacttcgtcggacagagcccgtactagaatctggatcgtcggagtcgcgcactgcatgcctagttccaaatttcaattcatcgtacgcgtacatgca

SEQ ID NO: 52848 - DNA, 258 bp, Setaria italica
  Peptide Sequence Number=SeqID_118822
tctgcctcagggtctgtggggtgattggcagcctcaatgatgtacttcgctttaatgtcgttagcattgtccctgcaaatcgatgatagaaagcaacatattattcaggtttgaagttacaggaacaaaaggtatatatataactgaaaggcattacagtactgatgaaatagaagtgtattttttcaggtagggtaaaatgtacagcaatgagaagacttttacttgtttatgacctcccccaagtgctgacgggac

SEQ ID NO: 52849 - DNA, 227 bp, Setaria italica
  Peptide Sequence Number=SeqID_118823
tcttttgggattgtacattcaaccttgatctccctgaatggaatgagcaagctcttctccagcttggagtcgaggcccagcagcttagctgcctgcttgaagttcctgctggttgctgccaatgcattcatcctgctcgatgaaatctcacaacaacttgcctatactttcttgaccaaactgaaatacaccaacccaccaagcagctatatatagtatacctgcta

SEQ ID NO: 52850 - DNA, 238 bp, Setaria italica
  misc_feature (7)..(7): n is a, c, g, or t
  Peptide Sequence Number=SeqID_118824
ttttttntttttttttttttttttgtcaaaagaacccaaatggcattgctgcttgcaaaacaagaagcatctcatctgtgaattacagatttattactgatgttttttcgcctcaattgatctccaacaagagatacgcacttcgtgtaattattgactgaacttgtttttctcaaaaccccgttgatcggtaacctaaagaaaaattaggctcgagaaaaacgcgcgaggacacaga

SEQ ID NO: 52851 - DNA, 173 bp, Setaria italica
  Peptide Sequence Number=SeqID_118825
tgcaatgccttgccatgctctgcaagcaaagcttcagtagcaaacagaactccccttccagtagctgcatctcttcccagtgatcctccaaggtcctgtattgagcaggaaaattcacaaaatatgcaagacgctgagaagataaaccagcttcccctgaagaatcaaatcct

SEQ ID NO: 52852 - DNA, 127 bp, Setaria italica
  Peptide Sequence Number=SeqID_118826
gaaaacaagttcagcaataattacacgaagtgcgtatctcttgttggagatcaattgctgcttgcaaaacaagaagcatctcatctgtgaattacagatttattactgatgtttttcgcctcaattg

SEQ ID NO: 52853 - DNA, 241 bp, Setaria italica
  Peptide Sequence Number=SeqID_118827
gcgacgagggtggcggcgacgcgggcggccattcttggttacgcagcaaagctccttttgctggagcttcaacgatataaaatcaggcgagggtggcggtgcgatgtggtgggctgctgatgtgattatggggaatttgacatctcaagcgatgatgctgttgatgaacttactgtggagaagcgagcaaaaaggagacgcttgcacaggaaccacactgcagaccccaaggaattactgt

SEQ ID NO: 52854 - DNA, 163 bp, Setaria italica
  Peptide Sequence Number=SeqID_118828
atcctcttctaatgaaggcagtgcttcagcaagcaaaggagatgagcagaatgggaaaaatagcaatcctaaaaagaaacaaaaagaacaagaaaggtgcttttgagacctccttttgcttcttccccttactcttctgttcagcctttgatgtactcttctg

SEQ ID NO: 52855 - DNA, 152 bp, Setaria italica
  Peptide Sequence Number=SeqID_118829
atccatttgcatattatctgaaacatctagaggtgggaagacaaactccaggagatgaatctatggctgatgcaactaccgagcactctacaatcatggttgaggaaactgtggaggcaaaagcagtaccattcaaggaagatatagaagat

SEQ ID NO: 52856 - DNA, 329 bp, Setaria italica
  misc_feature (288)..(288): n is a, c, g, or t
  Peptide Sequence Number=SeqID_118830
ttcttaaatttggttatttgttttgttcttagttcttgtaagtcccctaaagtctagtagttctactattcttcttggtagtattaattacttgttattcttgaagcaatcactgaagcaccaggtactgcacaagtttgtactgaggtggatactgccaatgaagttccagaagagctcatggtatctcctgcgttacaaagtcaaaccgcaggtgaaaaactggtggaacaagatgcaactgagcaacatgtgggatctgaaggttcaaagctcgaagctgaaacntttgctggagaacctgctgtacaaggtgtagtcaagcaagt

SEQ ID NO: 52857 - DNA, 304 bp, Setaria italica
  Peptide Sequence Number=SeqID_118831
tgtaagctgcaaatgctgcatttgccaatcaagttgacatggttgagaaaactggaaagattgatgccgagctaattggtcattttaatcaaattggaacaactgcacaagctgcatctgtagctgaaggttcatctgagcaagttggcaatgttgagcaagcttacacgcagaaggaagcgtcaattggtggtctacctgacattactcagtctggagctgtgactggtgcatcaattggaggtctattggtttgtattgttaaatttacttagtttttgtttctttattttgttagttattt

SEQ ID NO: 52858 - DNA, 235 bp, Setaria italica
  Peptide Sequence Number=SeqID_118832
ctggatgttctgcagcgccgggaaggtgatgttgatgaacgtgccgttgtatgactgcaggaacggctcgttgccgacggccacgtacctgcaagagaggatcacagcaagctcttagatctcacttctctgatactcagtgaccatggcaactggtaagcttgtagtgtaaaagatgaaatctcttgcttttcatttgtcaaagaagtggaccagaagcatctttcaatgattc

SEQ ID NO: 52859 - DNA, 237 bp, Setaria italica
  Peptide Sequence Number=SeqID_118833
acccgacgacccaaagtaggaaaatccctcaagaaccggaggctgcagaactggggaggagtggtacatgagaaggggctcctgccgcaggcttgtgagtgctcataaaagcttgcaatttttagctctgttttgtgaatcaaactgaagatcaggcatagtgttgacccttagccttaatgtaacctggttccaatgtgcttggtttgaaatgtcctatcttgttgaaatttcaaa

SEQ ID NO: 52860 - DNA, 447 bp, Setaria italica
  Peptide Sequence Number=SeqID_118834
aagagatgccgaaacgaccaatttcagtcatgagactctggccaaacgtggagctgcaggatcaaaaacagagatgtgtttagatagatcattataaggtccagaaaagtctagtcttaaattatacttggtcactgctctgaattttaaatagaaggaaattcaaaataagctaacatccttagcaaaacacctgccttactacttaaattacttgtcttatgaattgtttgagatgcttatgaatgccaagctagtcttaaattatttatcttacgaactatttgagatggttataaaagccaagctagttcaattcatcataaaattagatctgcagctcagaattgtttgttttacaaagatgaacagaagcacaagaagatcagaatccagaagaatttcagcatataaagaacaactgctccaatgggactattcttctat

SEQ ID NO: 52861 - DNA, 355 bp, Setaria italica
  Peptide Sequence Number=SeqID_118835
taaatgcattgagctgagaccagagcttagaagtactgagatgtgaagtaacgtatttcacacagaatccaatataccaaattttcagcaattatttgcactacatgggccaatctcatatacatgatggatctatattttaatcacgtagaaggaaaatggcaagtttgctgaggcagtctgttttgactgactagaatacaacaccaacaacaataacggacaagtacctgaagaagcccaacaagaggtgaagaaggcacatcaccaaatatatggattgaaacagtggatacagccattgccaatggccgcaaatgtggcttcacagtatgaaggcatacaaaatttactg

SEQ ID NO: 52862 - DNA, 371 bp, Setaria italica
  Peptide Sequence Number=SeqID_118836
aaaaaagaaaaagggttaatagaacccgacaacttagcacggattttagtcagatgtccgtgccccctcgttgtcatcaagcagtggcctgagatttgacctctcggcggcaggaacagcatcctcgctctcttccttgaaccgatccacgctggggacgaatatgcctgcaacgagaagatcatctcaacttcagttgaattatcacaaaatccaaatccagacatcagtgtactactgactactgagcattgtggacgatgatgttaaactgagggggatcatctgctggagctgcaaagtcactggttattattatattaaaaaggctaaaaaaatcaagaagaaaggggcaactaaaaggtgcatca

SEQ ID NO: 52863 - DNA, 379 bp, Setaria italica
  Peptide Sequence Number=SeqID_118837
aaatagatgtacaaaaagtgtggaacacacaagacattgagaggataatctgacctaagacaacgatgaaaaaaggcatctcttgtagtagttctttcatatctttgccgaaacgaccaatttcagtcatgagactctggccaaacctggagaaggataacttttgtgggacctttcctgcaagatcatcgattccaccaggcataacacgctttgtcccattattatttatctgatcttgaacctcaggattaagcatctggccgtattcttttgttctgttctgagaaaatcctttcagctctagtggctttatcacaaagcctagaataacaaaaggaatcatcaaaattgactctccccagaaagcagcacgcct

SEQ ID NO: 52864 - DNA, 190 bp, Setaria italica
  misc_feature (28)..(28): n is a, c, g, or t
  Peptide Sequence Number=SeqID_118838
tttttttttttttaatttttggacagangtttacagtaaagcaatctcaaaggcagtacaataacagaacctgagctactggtgcattgtcatctatgaatggagctgccagacttataaatgaagcttcaccaacaccaactaacatgcggcatatagtaattgaccagaaatcaaaagagaccccaca

SEQ ID NO: 52865 - DNA, 388 bp, Setaria italica
  Peptide Sequence Number=SeqID_118839
tgcgaggagttcaagccggagcggtggctcggcgaggacggcgcgttccggccggagagcccgttcaagtacccggtcttccacgctgggccgaggatgtgcctcggcaaggagatggcctacatccagatgaagtctgtcatcgcttgtgttcttgaaaggttcagcttccggtacttcggcggcgagcgccggccggggctcgtgctctcgctgacgctgcggatggaaggcggcttgccgacgcaagtgaacaagcggagctagacaatcaaaggctacagcgagtcagctacatgtccttttcgttaccattattgaggtggaatgttgttgtcactcgctacttctacttctcggcaatcacaatgtgcaccaaaaacagttt

SEQ ID NO: 52866 - DNA, 204 bp, Setaria italica
  Peptide Sequence Number=SeqID_118840
gtacaaagcagagattctgattatttagggacagaggcacagaggcacttgaaccgtgtacaaagcagagattctgatctttcggatgacgaaactgaggcagataaatttgaaagtgcatcatcaccaggagcaaataagaatcagtccttgccttttgccattcggacttcagcaacttctaatgataaggatggtgatctt

SEQ ID NO: 52867 - DNA, 436 bp, Setaria italica
  Peptide Sequence Number=SeqID_118841
ccgatggtggctagagggaagtcgcaagaagctgagatgagtagaacctctgttccaggaaatgtgggagacacagaaacctcagcaggaactctgaaagaaagcaccatcggagattcgacattctcatctttaggtgaagagcgttgtactgcaaccctagggtacacaggtgcaaccctcctttgttcagtacttgagttgttcaattgaggagcttttgtgtcctttggcaagctcacggtttcatcagcatatcgtgctccagttcggacatgaccatctctctttgtgtctgatgttacatcccgtgttctgcgtgattgtatctgcactccagactgctttggctgagtagtctgctgttgctccagttcatcttcactgtcatctgtatcaaagtaatttctagccatccttgatctcatttcccggc

SEQ ID NO: 52868 - DNA, 250 bp, Setaria italica
  Peptide Sequence Number=SeqID_118842
tgctttctttcagagttcctgctgaggtttctgtgtctcccacatttcctggaacagaggttctactcatctcagcttcttgcgacttccctctagccaccatcggagattcgacattctcatctttaggtgaagagagttgtactgcaaccctagggtacacaggtgcaaccctcctttgttcagcacttgaaccgtgtacaaagcagagattctgatctttcggatgacgaaactgaggcagattaaa

SEQ ID NO: 52869 - DNA, 362 bp, Setaria italica
  misc_feature (332)..(332): n is a, c, g, or t
  Peptide Sequence Number=SeqID_118843
taaaaaagtcaaccttctttaaaactatgatcatgtactcttctagaaaaattgattagctacctgttttagtaataactacacactagatggtgacatctacatccacgcgtaatgtttagctccgtgcagtgtctgatcataatatgtaggtttcaacttaaatgtagattgtcgaagatatcccaaatcccttgctggagaatttaccactggttcttataaagccacctgaagcatgctcaactgctgaagtttacaagagattcaggttggaacaagctagcaaagctgatcctttgaccttgctcaaagaataactcaaaacgggntatcacaagatgtctgtgttaatgacctag

SEQ ID NO: 52870 - DNA, 245 bp, Setaria italica
  Peptide Sequence Number=SeqID_118844
gggcggtcacggcggcagaggagagggaggccatgctggtagctagtggtaggtgggtggtgattatggaggagcaagagagaggtcgagcagcaagcaagctttagcccgatagcggatcaaattgacaaggatgcagggatgacacgtctcaacctattctcaccttgcaaaattaatgtgttcttgaggataacggggaagagaccagatgggtttcatgacctggcttctctgtttcatgt

SEQ ID NO: 52871 - DNA, 268 bp, Setaria italica
  Peptide Sequence Number=SeqID_118845
agagacgcacgggcgtagataggtaggtagggagcacaccagaacaccacggcggatcggcgacgcatccggcggtcaggcgacgtagacgtagtcgtcggggtcgtcgtggcggtgggggtcgacggagcagatgacgtagatggcgtagaggacgccggggaggtaaccgaggatggtgagcaggacgctgatccagaactccaactgcgccacagaaagggaaacgagccaacggtgagagcggatcgagcaaggacagggaacg

SEQ ID NO: 52872 - DNA, 192 bp, Setaria italica
  Peptide Sequence Number=SeqID_118846
taaagtttaaagaaaaagaaataagaactaagaaaaaagacggttagacaattacaagtagactagaagggaaagtggaagagatggtggcattagagttcgctcgctgcttgcttgtctgaagcacggattgggtcagggaaggaagggtggagatgagtatgctgtggatgaagatggccctgacacaac

SEQ ID NO: 52873 - DNA, 434 bp, Setaria italica
  Peptide Sequence Number=SeqID_118847
tgagtactcaaccttctcttcttgatcatggtcgcccttgaacatttttgatgagacagtgccccgagaaacatcgcgtttgagaagttctgagagtggtaagtgtcacagaatcgaatgaatctggacgctctaactgtgaccacttcttcaggactgcacgctttgctacatcatgaggctcccggtcttggatcttggagttggtgcgagatattgatatggatacatctctgctaggtagctccctcaggccaacgttctctttagcttgggacttgcggtcctgatcagcctcaccaggaaattggcctcttgaactagatctggtccgtgatctagcaaaagagcgatcctcctgtggtcttttggcccattgtctaaaaccgtcctagtattgtaagtaaactacttctaattggttccttgtagta

SEQ ID NO: 52874 - DNA, 391 bp, Setaria italica
  Peptide Sequence Number=SeqID_118848
taggaataagaacttaactaagtaacccgtaagaaccctaactaagactaactaggacttttactagctgagcgcatcttctcgtaactttgcgtccatctctttgttgggtgcatatttaggcaagctcgaaggatcacatgcataaggttttgtcctgaaaaaacctcagatgaaagagcacctgctgcagtaccacgcttgtaggctcaaccgacagaagagtttctagtaaactcaatgcatttcctggtacctctttaaaaacatctcgaagagtactaggatatggatgatgcggtttaaatattgttgcatgaggcaacttcgacttcttccaataatcatctgcaggggaaccacatagcttaaaaaatcttgtgcagttgtt

SEQ ID NO: 52875 - DNA, 255 bp, Setaria italica
  Peptide Sequence Number=SeqID_118849
tgcttctgtaacagttcatcgaccttgtgtgactgggataacaaggggcctgagtactcaaccttctcttcttgatcatggtcgccctggagtttcaaatggcacgtagttaccacttagttggtataaaagtgaagctcgtataaagaaaattattgactcaactcaccttgaaactattttttgatgagacagtgcccccgagaaacatcgcgtttgagaagttctgagagtggtaagtgtcacaagaatcga

SEQ ID NO: 52876 - DNA, 245 bp, Setaria italica
  misc_feature (12)..(12): n is a, c, g, or t
  Peptide Sequence Number=SeqID_118850
ctggtagggagngaaaaaaggggcacgctctaccgcctcaaggtctgcataatgtactgtccgtacagatccctgcacaaaacaccaaatcatcagaacatttgggatctgatgaacagcaaagtcacatgagttgccgcatgcttgctgatcatattctcccagagatattagtctgtatcttcctctttattagttttttgaaatttgtccacagtgtggtttcatctatgtactccttctac

SEQ ID NO: 52877 - DNA, 410 bp, Setaria italica
  Peptide Sequence Number=SeqID_118851
ttctttgtcctaactagttggtaaattagttcctttccttgtacctaatttactattgtacccccttgtctttctacggtcccttgtaactaattgtatttcctattcttacaccagcttctttagctttccctgcctcctcaaggctgccgacctgatgcaagaccttgacgcctgcacggtgcgcctcttcgacccgctccctcgggaactcaccccagtacacctgcagcacggcgagcttctcctccagcacgaccctcaggttctcatcgtacgggaacggcagcacaatggccgccccaaacggcctcgacgtcaggctcctcgccttccgtatcagctccctcacgtactcgggcgcaggctgccgtcagcaacatagctcagccggaagaacacagaaaaag

SEQ ID NO: 52878 - DNA, 351 bp, Setaria italica
  Peptide Sequence Number=SeqID_118852
ctattgacgctggatggtgagaaataatcatacgctccactttcgtctgtgcatctatcccttgaaataggaacctgagctccacatcattgggaaggcacaggctccccgagtgttgccaccacatcaatgttagattttccctatctttccctgtccaaaagtgctttgcttgcatctgtacaagccacctgtgtgattggtgatatttcaccattttcacattctgcaaaaataaatagtttgtcatgcaatgcaaggttttggctgaaaaaatagagatccaattattaattattgttaattcgtctattctaattgtcttttcttttgttttactttcttttctta

SEQ ID NO: 52879 - DNA, 281 bp, Setaria italica
  Peptide Sequence Number=SeqID_118853
ttcatcgcggagtcatgaagatgtttctttgtttgctattcctctaagtgatactggtgaaactgagtcttttctctgatcatgtcatgatctaccttgaattatccaggttcctcttgttgcttctaaccggataggcagagaaactgttgagactgagcatggcaagagcaccataaccttctatgggaattccttcattgcaggaccaactggagaaattgtgaagcttgctaacgacaaagatgaggaagtgctggtggcggaatttgacttagatg

SEQ ID NO: 52880 - DNA, 227 bp, Setaria italica
  Peptide Sequence Number=SeqID_118854
ctgtgctagcacaagaaatggtggcacaaatgtttccaccagaataatatagcacaatcaggacaataccacaaagtaagattcgccctgagaatcgattgactctatgtatggtgccatctcccacccagacatttcatcgcttcgactccttcggctcacgtgcaagcattgtgcaagtacagcagcctgctggatagccgatagtgatatatttgcacgtcggg

SEQ ID NO: 52881 - DNA, 247 bp, Setaria italica
  Peptide Sequence Number=SeqID_118855
tcccctcgtgtgccttcctatcccctcgttgcgtgtctcaggcggtattggagaatcctgatgatgctgcagcggacgatgacgacgacgagaagagcggcaatggcagggtgggaggaggggctgtcattttccatgcccagctgggaacaccacttcctgtgcccccctctggcctcctgttaatatcccttgatgcaccctcattatttgtaaagaaggggtgagattgagcaggccagattgg

SEQ ID NO: 52882 - DNA, 245 bp, Setaria italica
  Peptide Sequence Number=SeqID_118856
tcactgagattgaagtttatgtccgcgtcgacgccgcggaacttgatcgccgctcgatcgtacgcccttgcagcagcatgggcagtgtcaaatccacctgtgttagtcagaccactcgatcagttagaccacggatgatttatgataagaaaaaggagaagaattttaacggattagttggcaatctgctcacctaagtacacttgcttgccgcaatccctgcatttccgagcaacaagaagacg

SEQ ID NO: 52883 - DNA, 229 bp, Setaria italica
  Peptide Sequence Number=SeqID_118857
atccatggtggagttgcagaccgagggaggttcttatctcttttcgggctctgagatgacggttgagatatgctcaagttcagatctacatcagcgccttcagttgcaacttcggtcagcagctccccatcatatgtgcttggctcgaagttcgtcacggcctctctaccattgcatttgatcgcggccttgtcataagccttcttgccgaggaactgccccatgcgcg

SEQ ID NO: 52884 - DNA, 209 bp, Setaria italica
  Peptide Sequence Number=SeqID_118858
tctctaccattgcatttgatcgcggccttgtcataagccttcttgccgaggaactgccccatgcgcgcctcccagcggccgcacttgtgcagggtgacgcctctgtacttggagctggccccgcgagaacccggtgctctgccgtcgcaggacgtgcacgaactcctccttggacaggctcttcatctgcttcatgtcgtcttcgtagt

SEQ ID NO: 52885 - DNA, 174 bp, Setaria italica
  Peptide Sequence Number=SeqID_118859
agctgccccgccgagaacccggtcggctctgccgtcgcaggacgtgcacgaactcctccttggacaggctcttcatctgcttcatgtcgtcttcgtagtcactgagattgaagtttatgtccgcgtcgacgccgcggaacttgatcgccgctcgatcgtacgcccttgcagcag

SEQ ID NO: 52886 - DNA, 189 bp, Setaria italica
  Peptide Sequence Number=SeqID_118860
ctcttttcgggtcgtctgagatgacggttgagatatgctcaagttctagatctacatcagcgccttcagttgcaacttcggtcagcagctccccatcatatgtgcttggctcgaagttcgtcacggcctctctaccattgcatttgatcgcggccttgtcataagccttcttgccgaggaactgcccca

SEQ ID NO: 52887 - DNA, 161 bp, Setaria italica
  Peptide Sequence Number=SeqID_118861
gtagatatgctcaagttacagatctacatcagcgccttcagttgcaacttcggtcagcagctccccatcatatgtgcttggctcgaagttcgtcacggcctctctaccattgcatttgatcgcggccttgtcataagccttcttgccgaggaactgcccca

SEQ ID NO: 52888 - DNA, 340 bp, Setaria italica
  Peptide Sequence Number=SeqID_118862
aaagaccacgtccaggcagaaaagatgctggagctcctacagtcaattttggatgttgaggcagagatgtttgtcctcaagatgtggaggatgcttatatttgagataaagaaagtcgaatcaggactatcaggaagagcaaaggcatgaagctaagtctgtcaccttgtatgatcttttctgatttacgtcactcatcaactatgatctcacttgtaagctcatactgtactacaagcaaaaaaccatttttagtgagactgaattgatggtttctattattttcctcttctgatgtagaaaagtatctcatcagtgctcggcttctcgtatacatttc

SEQ ID NO: 52889 - DNA, 251 bp, Setaria italica
  Peptide Sequence Number=SeqID_118863
gccaccgggcgtccccgccgttatgccgccgggcgccgtgcgcccgccgcccatgtacgcgccgccccagccgggcgcctacatgccgcagccaggcgctgctgtcccccatcccggtgggtccccgatctccttctccgttaacctcctcagagatgctcgactgtccgtgtaattaattaacgatgattaatctatgcctcgcctgctatttgtatctggtgttacctctgaactctcgaggcgttcca

SEQ ID NO: 52890 - DNA, 381 bp, Setaria italica
  Peptide Sequence Number=SeqID_118864
cttaagtaaattttggtaatttgtttacttgtattgtaagtacttccgtaggctgataaggacgttgcagaaaaaataagcagtatgatagaagagtggttaaagactagacccccgccccccccaccaccaccaccagttcaaccatcagcagatagttctggtgtagatatcacgaaaactgattctgatgataagaatgatgctgacactgataaaagggcagctaatgaaactgaaagatcagaaactggctctcctgataggaggaaggataaagaacgtgataaggacaaacgggacaaagatcttgaaaggtatgaacgtgaccgtgagcgtgaaagagttaggagggacagagaaagggatagagagaagata

SEQ ID NO: 52891 - DNA, 218 bp, Setaria italica
  Peptide Sequence Number=SeqID_118865
ctgtcaccttgtatgatcttttctgatttacgtcactcatcaactatgatctcacttgtaagctcatactgtactacaagcaaaaaaaccatttttagtgagactgaattgatggtttctattattttcctcttctgatgtagaaatgtatacgagaagccgaagacaactagaatagaagaataactttaagacgtaaattaataattttttaagaa

SEQ ID NO: 52892 - DNA, 161 bp, Setaria italica
  Peptide Sequence Number=SeqID_118866
gtacatgcatttctgttcatctgttgtcattgtattcaacattaggatttgttatttgcttggtgcagcatgagttgcacgagagaatgaggccttggatttcaaaaaagatcatcgaatttcttggtgaggaggaatcaactttggtggattacattgta

SEQ ID NO: 52893 - DNA, 356 bp, Setaria italica
  Peptide Sequence Number=SeqID_118867
cagatgaagcagctgcagcagcggccgcagctgctgaagagtctgctacacttatggaggttgatggtgatgatgaaaaggaacaattgcacaaaacaagccagctgttgtggaagttgataacattgcaagctttgctaatggtgctggtgttggtgagtgtgaaccatcttttttaccagtttatctcatttgccttgttgctgtttcaatttttttttagaatatcatgttcctgtttcatcccttcttttccttgcattccccaggtgatggacttcgcaaagaaagtatcagtgatgaaacaagcatggcaccaggtcaaatcccagataccaagcaaaacagcaacgccc

SEQ ID NO: 52894 - DNA, 324 bp, Setaria italica
  Peptide Sequence Number=SeqID_118868
ctgctgtcccccatcccgcggtggtcgtgccagcctttactccccacagcgagaagtgccggctcacgtttcattctgctgctctaactgaagctctaaatcatttgctccctcactgagtgtggtatgccaaatgtttgaatttgaattggttatgtttacattgtctaattgatttacatgctttagctcgtctcactgcttaattaggctcagtttctttatgtacttagatgcttcagctgtgggttgttccaaaaacttgctaaggtatcatgattttctgctgtctaaattccgtatgccggttataccttatttgtg

SEQ ID NO: 52895 - DNA, 249 bp, Setaria italica
  Peptide Sequence Number=SeqID_118869
gactccgaggctgataaggacgttgcagaaaaaataaagcagtatgatagaagagtggttaaagactagacccccgccccccccacccaccaccaccagttcaaccatcagcagatagttctggtgtagatatcacgaaaactggtagagttctgctaattgtgtttcctttttttgcctaataattgcattgccttaaacattgatttgttgctgatgcagattctgatgataagaatgatgctgaca

SEQ ID NO: 52896 - DNA, 212 bp, Setaria italica
  Peptide Sequence Number=SeqID_118870
taaaattaaagacaagtaatagaataagaaagaagtaggttaaaagaactaagaaccccccgacccccccccaaccaaccaaccaccagtcaaccatcagcagatagttctggtgtagatatcacgaaaactgattctgatgataagaatgatgctgacactgataaaagggcagctaatgaaactgaaagatcagaaactggctctcctga

SEQ ID NO: 52897 - DNA, 462 bp, Setaria italica
  Peptide Sequence Number=SeqID_118871
agattacagtaatcacactcactcagcacaggcgggtacttaagtctgcttaagatgtgtctagttacaggcaataatggcatcattcgtttttggtggtttcggggggggggggattggagttcgattttgtttcctgtttgctcattatgtcttaactgttgcagtctaggttgcaagcaaaacaagaaattggcaggaatgtgatgtccagatacacaggtacaatagatgcaataataaagatggtccgttacgaaggattgcatgggttttacaaaggaatgggtaccaagattgtacaaagtgtctttgccgcctcagttctctttatggtaaaagaggagttggtgaagttagcagcgcttttagttgccaggagtaggactatgcttattactaagcccaagaagcgataggtgttgccatgaccattttttttgcctcaacttgtaatgtata

SEQ ID NO: 52898 - DNA, 412 bp, Setaria italica
  Peptide Sequence Number=SeqID_118872
caacatccagttttcttgcagtcagagaatacatgatgcagaagtagttaagtggcaaacaaatattgcttgtatgttagttgacctccatgtggcttgcttttaccaagacaatacagaaaatgcaatggctaaactaaactggaatatccatgtggcttctataactgctgataataaaaattgcatcaaactagcgattaacattggcctcctttcagacacatacgcaagcagaaaggaagatcttggagtctaagaaggaccttttactgaaagaaatatctagggctaattccttggaggtttcaattctgaaggataggttggttaaactggagtctgaaaaacctcatccatatggtacatttcaagcgatccgggaggtttattgcgagtctggcataagggg

SEQ ID NO: 52899 - DNA, 242 bp, Setaria italica
  Peptide Sequence Number=SeqID_118873
taccgaaagcccaaaagacttgtatgaaatgaactgcatcaatttgcctgtgcctgttaaccaactcttcaatgatacctttttgtctttgcttccattggcatcaagtatatcagcaagctccaccttatatttttggcgcacctctgctacagaagagacagcagcgtccttaagctcctgaagctggttcaaggaagcacgctcttttgcagaaacattagcctctttctctgcaatca

SEQ ID NO: 52900 - DNA, 350 bp, Setaria italica
  Peptide Sequence Number=SeqID_118874
acaccccattcgggagcttttcaactatcaccagacaggcatcatagccattaaggaaattaaccaataagcatcttgacaggcactaaatttcacagaatagactaaatgacggtgagaaccttcaccaaccagttgccgctgcagttctgagagtgtaggcacttcaacatcatcagtaagtccttcgcacaattcatcagagtcagacatttcagctaagccacgatggtgagcgtggtcagtcaaggtgtggagatatgcatcgccaatgtacgtcctagagcagggcatacaattgatggatttctggcttctacctgcctgtccagtacaataattaaacttgc

SEQ ID NO: 52901 - DNA, 447 bp, Setaria italica
  Peptide Sequence Number=SeqID_118875
ttgttgtcccggttgtcggtcttggtcgtcttaccggttgtccgtccgtaagtctaggtcgtaagtacgtacgatccggaacgtggccatcatcacggcgctgttcgcggtggagctcctggccggggtgctgtcgttctgggcgttcctgcgcaagtactcgcagtaccgggagatggcgcggacgctggggctggagtacctccccgccggcgggccccggcggttctcgcacgcggagctgaaggcggcgacgaaggacttctccgacgtggtggggcgcgggggcgtacgggacggtgtaccgcggcgagctccccgaccggcgcgccgtggcggtgaagcagctgcacagcgtgggcggcggcgaggcggagttctgggcggaggtgaccatcatcgcccggatgcaccacctcaacctggtccgcatgtgggggttctgcg

SEQ ID NO: 52902 - DNA, 152 bp, Setaria italica
  Peptide Sequence Number=SeqID_118876
tgggtgctccactgcgacatcaagccggagaacatcctgctggaggacgacttctgccccaaggtgtccgacttcgggctgtccaagctgacgagcaagcgcgacaaggtgaccatgccccggatccgggcatggtcaccttgtcgcgcttg

SEQ ID NO: 52903 - DNA, 348 bp, Setaria italica
  Peptide Sequence Number=SeqID_118877
gtttattcattacacggttatttgttcagtttatgcttgaatccaatctaccagaatgattatcagcagaatttcgacaagggagccacatgctcagatggtgaagttaaagattctgctcaggcagctcacaggcaaaagttgcagatcatgactgaaccacagggaagcaaattacagaatcctaaagaatggaaacactcctaaaatgctggcgtgcacacagaagaacatacaccgaacaaatgctgacaaacaagcgacaagatcaactgacaagaagcaaacttccctaagagaacctattggttctttagtttgttcgtacctacgttagttcttttcctt

SEQ ID NO: 52904 - DNA, 238 bp, Setaria italica
  Peptide Sequence Number=SeqID_118878
tgggcgggaggcgcttaccccgggagcgggcacccagcaggagcttgacgaaggcgatggtggccagcagcagcgccgcgccggcgatgagccgctgctggctgtccgcgagatccatcatcttcctcctggatcgtgaaaattgggattcccagtggattagatcacagctcaatgacatgggacatggaagacagagtgagcttcgtttgtatcgacggcattaaaaaaatggtag

SEQ ID NO: 52905 - DNA, 386 bp, Setaria italica
  Peptide Sequence Number=SeqID_118879
gtccataattccagacattgggtccttctccttgtccatgcttggcttgaacttgtcttccttgaaatacaggtctaaccaagcatggacaaggagaaggacccaatgtctggaattatggacttaatgaagaacatgtatgaggaaggcgacgaggatatgaagcgcacaatagccaaggcttggaccgacgccagatctgggaaaacgactgattcattaagtggattacattgagctggtataatgggtcgatggacttctgtctgctgcgctagccctgcagtgttttgggatggttgaaacagagcgttaacagtgtgttgtaggtgtgctagtgctggattgtcttatttctcagagcttcacacaatcttttctccgtt

SEQ ID NO: 52906 - DNA, 410 bp, Setaria italica
  Peptide Sequence Number=SeqID_118880
taagacaatccagcactagcacacctacaacacactgttaacgctctgtttcaaccatcccaaacactgcagggctagcgcagcagacagaagtccatcgacccattataccagctcaatgttaatccacttaatgaatcagtcgttttcccagatctggcgtcggtccaagccttggctattgtgcgcttcatatcctcgtcgccttcctcatacatgttcttcattaagtccataattccagacattgggtccttctccttgtccatgcttggcttgaactgtcaacaaaaacagaagtttagtcagtaaactaactcaagtgtcatgtgaccagcctagcagtattcagacaggtgctatgacaaactaatctgtctatgttttaggatttgcacatgttgttaccc

SEQ ID NO: 52907 - DNA, 465 bp, Setaria italica
  Peptide Sequence Number=SeqID_118881
cactgcagggctagcgcagcagacagaagtccatcgacccattataccagctcaatgtaatccacttaatgaatcagtcgttttcccagatctggcgtcggtccaagccttggctattgtgcgcttcatatcctcgtcgccttcctcatacatgttcttcattaagtccataattccagacattgggtccttctccttgtccatgcttggcttgaacttgtcttccttgaaatacaggtctaaccagttgcctttagaagctttgcaaagggtaacaacaacctttgtaggcttcaccacaaccttacatttctcaggaacaatttccttgttcagctttggtatggcacaccgataatttttgcctttaacatcatgaaactttatatccactgacattggcttaaaaaacaagtactaccaaccttactacttagactacgaactaccctaccaaggaaataa

SEQ ID NO: 52908 - DNA, 243 bp, Setaria italica
  Peptide Sequence Number=SeqID_118882
gccttcctcatacatgttctgcacatgagaatgcatataacaagtcacagaatgatcacaaaaacttcttgatctaagccatgagaggggggaaacacttaccttcattaagtccataattccagacattgggtccttctccttgtccatgcttggcttgaactgtcaacaaaaacagaagtttagtcagtaaactaactcaagtgtcatgtgaccagcctagcagtattcagacaggtgcta

SEQ ID NO: 52909 - DNA, 195 bp, Setaria italica
  Peptide Sequence Number=SeqID_118883
tcatgcgcacgacaagcctcagatcgacgaagaaacagccgccgtcttgcgcctaacgctcaccaccgcgtgggaaggaagctcttgatggatgatagattgggagatgtagccaaaggaggacaaaaaggactactactgctagctgaacttgcacagcatgctggtgctattggagaaatgggcaacttgtat

SEQ ID NO: 52910 - DNA, 257 bp, Setaria italica
  misc_feature (231)..(231): n is a, c, g, or t
  Peptide Sequence Number=SeqID_118884
cctcgccgctccctgcgacgtcgtcgtcatgcgcacgacaagcctcagatcgacgaagaaacagccgccgtcttgcgcctaacgctcaccaccgcgtgggaaggaagctcttggtacgccgctgtcatctcactactcctgattatttgcctacaggggataattttacacctttctgatgataatatctttgtttttcagaatgtactgttactgtattctatcaaaatntgagtattcctttagttataacaaag

SEQ ID NO: 52911 - DNA, 286 bp, Setaria italica
  Peptide Sequence Number=SeqID_118885
tttcagctccaccgccgcaaatgtcgatcgcggtggcgccggaggtcgcagccgccctcgcgcgcggcggcgctgtagtcgccctcgagtccaccatcatctgccacggtatgccgtaccccaagaatctccagaccgccttcgaggtggaggccgtcgtcagggacgccggtgctatccctgccaccatagccatcctagatggagtcccacatgttgctatggacatctcctcagacttgactgaacttggaaagactcctgtggctgttatatcagcggcgtg

SEQ ID NO: 52912 - DNA, 241 bp, Setaria italica
  Peptide Sequence Number=SeqID_118886
cctatcccctgtgtgccttggagtctcagactcagtgtgagtagtccttctggttttttttcttttggtttcagaaagatggtgtctccaccacccaccagggctgttcccgtataaatgtacattcaacatttgttgttttaatttggacatttggaaaatgtggctccaaatgagttattcggaacatggaactgagctaccctgtatagttaatgtttttgttaagcttgcagggttt

SEQ ID NO: 52913 - DNA, 385 bp, Setaria italica
  Peptide Sequence Number=SeqID_118887
ttcgaaatttacaagcctttcatgggctggaaatatagttggatttcaagatggtgagattgaagtcatttgggtgatggatcgacttcaaaggtttggacctcatgaaatatatgttgttggtcgtgaagatgatggtgcctcgctagatgatggaactgcctctgacggtgctagctgggagactgtcgatgacaatgaaatggatttacttgataattctgcaaaggatgattcacaaaatgtacctgagaatagcattgaaagggaaaacggttcattcagttcccaggatggtagttctgttgcaactggtcccctttctgttgactttttaggacttttaaattaagtaaacccgtaaacttaaggtaacgtaaagtaa

SEQ ID NO: 52914 - DNA, 444 bp, Setaria italica
  Peptide Sequence Number=SeqID_118888
aatttttagtaactttaattaatttaaggtttcctgagtagttgattactttttttactgtttagaatctaaaagtatcattcagatagcagactagggattctacctgtattgacagtgagtttggtgtcagttctattaatacaataatacgcagttctcctgcgtgtttgagaaaaaaagtttgttgtcagttgccctatcaggtttcttgagtcatctaatttgtgttgcacttgctttctggttactcagagtgctgatgatgaaatcttggtgagagatgccatttatgatgctctgatcttggtggattattctttcattaacaatgtttctggagttgatcaagctgacctcttgcctatatatttgtcaagattgattatcactcttgatgcggttaatgatgccaggaggaaaggtgagtcaagggagagcaat

SEQ ID NO: 52915 - DNA, 402 bp, Setaria italica
  Peptide Sequence Number=SeqID_118889
gctcatgaaggaaggctgcagcgtttgagtacctttgctggggtggtggtggctgaggcgttcctgctcaggctctgcctcaaggtgcagaatggaacaggggtacctcgtgctgagctgcagaaggagctcaagatgtgggcagtcagctccatcccggtcttccagaaccagcatttcttcggggtcctgctgaacatgctcttgaactctccgctgcctgtttactcactactggggtctttcttaatttgtggaaactaaagaggagagcagaacagtatatgagtattatgtttcacaaaagctggtgttagtataacattttgctctcaacatcgcatggagcgtgacttgggatggagttgtatctcatctttgtgatctgcacagagtgctgaa

SEQ ID NO: 52916 - DNA, 217 bp, Setaria italica
  Peptide Sequence Number=SeqID_118890
gcattgaatgcttgttgcctctacttagaactactccacaatgatggtcaacctgaattcatggatgaatggtctgctgctctcacgtgtcttaccaatgcccagagcagttggctgggtgatatgctgcaggttcacaatagaataaatctgtctttatgaatatatctctgcaaattgtttgttttagtttctatgctttattgtaaagtttcac

SEQ ID NO: 52917 - DNA, 223 bp, Setaria italica
  Peptide Sequence Number=SeqID_118891
gttgacgtggcaaaaaagattatcatcagagcaagattgtgcgcgactggttgtggttcggtgcatgagctgggtaatataaagacgatgatattgtgtgcaagagctgatggtgtctggtggagtgtccttgttgagattgctgcagctataaactctgttgaaaacagttattaaaaaggtctagttggtctttcttggtattgtctatttagtagtattt

SEQ ID NO: 52918 - DNA, 201 bp, Setaria italica
  Peptide Sequence Number=SeqID_118892
agaaatcaaagcatttctgacaaggattgcatatacgaggttttggaacttgatcagcaaataggaaaaattaagatgaaccttaaaatgttacaaagtctacaaaggtaatgtaacttttttttattctttttttatactgaacataaagaactaaaggtctaattaaagtagtttaacccatcccatgttaacaatgac

SEQ ID NO: 52919 - DNA, 283 bp, Setaria italica
  misc_feature (274)..(274): n is a, c, g, or t
  Peptide Sequence Number=SeqID_118893
gcttcgaatttcgcagaagcaggtgaatcaggtgagctcacaccattggccattactgggggctgcttatctccctctacggttgcatttgctttctgtgctttcagatctgcgagcttctcggcagtcttgtccgagtcttgcttattggcaacaggatgttcctgtaacaattctaagcgcctgagagatggcacatctccatcacaataccttgttgtcctactattggtttccttgttattgtctagtctttccttaggtccgttcgttnttgtaattt

SEQ ID NO: 52920 - DNA, 342 bp, Setaria italica
  Peptide Sequence Number=SeqID_118894
gcttgggcatcagaattgttgacatcagatagctgtgagagcttatccgagttcaactctactgaggcagcagtttggtcataaccaagacctggtgcagtaaccacaggtaatacttcttcctcagctgagcatatatcaattccaaacaatctgcaaccaccagaacttggttcttgcttcttttcaactatgactgtgttggtgctagcagcacaagagtcagctcttgtatcccttgcagaccagtagaactgactgcttagcatggatggctatttccttcaattcctccatcagccttctcatcgtcatcaaacgtcagtttcaattcaaagaatg

SEQ ID NO: 52921 - DNA, 260 bp, Setaria italica
  Peptide Sequence Number=SeqID_118895
cccacaccacctacaccctcaggtttcttgctgctaacgataacaattaccaaactgcaatcaatgcatacaaatgcccgaacctcaataccagggcatattgggcagggcagcctaacgacactatatacattcattacatacatagtcctagttaggagccatcagccatggcatactcgccaggtgtcgggtttgaagaaaggacccgtcaactgcaaggtggacaatgccttgcctctccttccactgcttagcta

SEQ ID NO: 52922 - DNA, 198 bp, Setaria italica
  Peptide Sequence Number=SeqID_118896
tgacatcagatagctgtgagagcttatccgagttcaactctactgaggcagcagtttggtcataaccaagacctggtgcagtaaccacaggtaatacttcttcctcagctggacatgtctcagaatccaccttgccaagaactggttgccaaagatcttcatggcaccgaatggcatttccggcacatttttcgagga

SEQ ID NO: 52923 - DNA, 295 bp, Setaria italica
  Peptide Sequence Number=SeqID_118897
tgtctaattagctttgagcctttgactttgcactgatgtttctatgtgaagttactatgcaatatttatactacagagagaaacatcagtgcaaagtcaaaggctcaaagctattgcaactgcagataagagaggtcacacaatgatattatatgctttatagttttttcatttcttctcttctttcttctcctctttcttctcttctttcttttcctctttttctcctctttcttttcttccttcttttcttccttctttttcttccttcttttcttctgttggacctgcaaag

SEQ ID NO: 52924 - DNA, 272 bp, Setaria italica
  Peptide Sequence Number=SeqID_118898
ctacatcaatgttatccccatacagagacccggattgatcacactggaatgaatgttaatggaaaattaaacattttagtgtgtttgcttatgtgctgtggcatatttggtctgatgtatgatttgttgaatttttaaacaccctttatttggaaaattaaacaccctttattttaggtgaaaactgttgcttcaattcatcccggattgactattattcggagtatgaaccccatccatcgtcaacaaaaaatctgcgtcatcttttccag

SEQ ID NO: 52925 - DNA, 420 bp, Setaria italica
  Peptide Sequence Number=SeqID_118899
caacaagggaactattatgggtactaggactagacaatttaacaaaagcctgaaataagtaaaaatgattagctctgctgcacttctttgccccatttcttaccttgatcacgtcagtgctagttttgttcttagagcagttgccatgcatcttgaccagatgcttattactatgggtatccatcagttgaacttccgcagcgaaatgggtgtacaaatattagattctttgtgcgatgctgaaagtttggactgcaacagtatgttatcttcaataacaggtgaaaactgttgcttcaattcatcccggattgactattatttggagtatgaaccccatccatcgtcaacaaaaaatctgcgtcatcttttccagatgattaggaaaggcacatttgcacaatacgactacggatgggt

SEQ ID NO: 52926 - DNA, 255 bp, Setaria italica
  Peptide Sequence Number=SeqID_118900
taattttgataagattatatggaacgccagtctagtgcctatggtgctttaagcaacaaccatgaagcatgaagtgctttccaactgtgatcaaatatatggtttgttgtatgatcttactgaattatctggcaatttttgcagcttttctgggattggagttggcaagaccttgctgaatatgaccttgtggcaatgctaagctatgtttatacagttacacagtactaaaaattttttaaataagtaagggac

SEQ ID NO: 52927 - DNA, 261 bp, Setaria italica
  Peptide Sequence Number=SeqID_118901
agtcacattgtccttgtccttgatcatgtaaattccaaagatcgttccgatggatacgccacagtcgatgttggaggagccatcgagtggatcaaagcaaacacagtactttccacgcagcttagggtccacgaacgttgcttcctcgtcctcctcggacacaaggacgcaggtgcggccgctgctgacgagggccttgacgaacacctcgttcgacagacaacgtaccaagacttaacttaactaagaactaaacctaaa

SEQ ID NO: 52928 - DNA, 219 bp, Setaria italica
  Peptide Sequence Number=SeqID_118902
aaggccaggaagtcgatttactacctttgaactttgtatgctgccatgatcaagccgagcttgactttgcctgttcggcgtacagtgctttgatctcctccacgtcgtcgtagctgccgaggaatactggggatctctcgtggatcttggtcgggaccagatcaagagcctgcagtgccagtgtatcagcattttttgccgcatcaagatactgttact

SEQ ID NO: 52929 - DNA, 385 bp, Setaria italica
  Peptide Sequence Number=SeqID_118903
gtagctgtgtcaaggtcagatggcgcatcaacatcaaatacacgtagagcacggagaagaagtataagtattacccctgaaatcagtgatgatattgtgagagctgttcgagcaatgagtgaaagcatgagacaaaatcgcctttcaagggggcagaatgatggtagtcttggaccttcaaatgattcacataaacatgagactgctggtgactccaatagatgatgaagtgtctataagacgaccaagcgcactggagggtttgagaagacaaattaatagtcagaaagcagtgtcactaccttcatcaccccataggtcaagtatccttgcctctgaccccagaggccacggaagacttctccgaagaaccctactcccacac

SEQ ID NO: 52930 - DNA, 413 bp, Setaria italica
  Peptide Sequence Number=SeqID_118904
tcagagcagttcaatcacacgaacaatctcaaacttgtagctcgggctcatcaattagttatggagggatataactgggctcatgaacaaaaggttgtcaccatattcagtgctccaaactattgctaccgatgtggcaatatggcatccattttggaagttgacgactgcaacagtcacacctttatccaggtatatttaccatataattgttccttgctactttccattttcttgggcttatttatgtggtatcaccctgatatgaatgtactattgtctattgtgtgtatagtttttttaatatgaaatggttgaaacttgaagtggaaatttaagttggcacatagtgtgtttctagaaaagacatcatccattaccttatctttgtcgtctctccctaaattattagt

SEQ ID NO: 52931 - DNA, 223 bp, Setaria italica
  Peptide Sequence Number=SeqID_118905
tccctaaatatagtatgtttctaaaaagacatctccgttaccgtatctttgttgtctctccctaaatagaacagctttgatgccagtttgtttttcctgtcacgcagtttgaaccagccccaaggagaggtgagccagatgtgacgcgaagaacaccggattatttcctttaagttatcgatgttacctattcccagcctatgctgtgacgatcgacgccagc

SEQ ID NO: 52932 - DNA, 284 bp, Setaria italica
  misc_feature (239)..(239): n is a, c, g, or t
  misc_feature (241)..(241): n is a, c, g, or t
  misc_feature (245)..(284): n is a, c, g, or t
  Peptide Sequence Number=SeqID_118906
aacgagatctcaatacttagccgagttcgacatcccaatgtcatactcttccttggtgcatgcatgaagcctcctcacttatccctagtcactgagtacatggaattggcaaaagactgaacatcaatttgtacgtttgtagcgtaagcgtgtaccgataggcctgtactgatttgtatcatcattcatcaatggcaaggcacagttaaacccttttcagtaatctaatttgtaagatntntctnnnnnnnnnnnnnnnnnnnnnnnnnnnnnnnnnnnnnnnn

SEQ ID NO: 52933 - DNA, 377 bp, Setaria italica
  Peptide Sequence Number=SeqID_118907
gtggtgctggctacacttttggacaggatatatcagagcagttcaatcacacgaacaatctcaaacttgtagctcgggctcatcaattagttatggagggatataactgggctcatgaacaaaaggttgtcaccatattcagtgctccaaactattgctaccgatgtggcaatatggcatccattttggaagttgacgactgcaacagtcacacctttatccagtttgaaccagccccaaggagaggtgagccagatgtgacgcgaagaacaccggattatttcctttaagttatcgatgttacctattcccagcctatgctgtgacgattcgtacgtcctagtctattcttgtcttggtattctaagggtcctagt

SEQ ID NO: 52934 - DNA, 203 bp, Setaria italica
  misc_feature (1)..(1): n is a, c, g, or t
  misc_feature (25)..(25): n is a, c, g, or t
  Peptide Sequence Number=SeqID_118908
ntccattcgcaatgaaccattcacngaaaaaatgtgacatcttcagctttggggttatcatgtgggagctttgcactcttagtagaccttgggaaggaataccacctgttcagatcgtttactctgttgcgaatgaataggggacgaagaactaggaaaataaccaagaataggaacctaacttaggaaaagaacttaagaaa

SEQ ID NO: 52935 - DNA, 372 bp, Setaria italica
  Peptide Sequence Number=SeqID_118909
ctataatggacacctgtctctgtggttgtttagttcacatttcttaatctgacaatgttatatttcggttaggctggaattgcaaagaaagagaccatcaagattcacggattttaggcagcaacatagaaatgcttgtgtggtatcatatgataccaagtgttgaaggtttctgaagcttggaagtcaccataatatcagtagtcgctatctttgtctaaacctttgtgtcactattggattgagaagtctattattgatgcaagttgtccttgcagtatggtttgtaagcgttacctgcatgaaagtattgtttgtctgaggaactgcctactcgtattgaataacaagagatattgctgtttgcgttcg

SEQ ID NO: 52936 - DNA, 400 bp, Setaria italica
  Peptide Sequence Number=SeqID_118910
taatgtaagagccatatagtttgcttgttaaaaccatgtcgagcctctatgacaaaagttgaataaagagagaacggcaagtccgtaatctgcgtttcatgaagtatgcattaaagtttgacatcaagtagtagatttgacaaccactgtgctctaaacaggaattgtttctccataaaagaacaacatggcacagttctagtagggctgattgtggacactggacacagctatgatcctccaggttcaaaattaatggttagtcactgaagcaaccaacagaaaaggccgactactgaatccaaaagaattcaaaatcttgatccatgcaaattcaaagtagacaaatgcactttgcaccttcttttttgaacaaaacctaagcatttagcgaaatgtt

SEQ ID NO: 52937 - DNA, 198 bp, Setaria italica
  misc_feature (169)..(169): n is a, c, g, or t
  Peptide Sequence Number=SeqID_118911
cgatgacggcagccagcgtgccctcttcgattacttcagcatcagtgaaagcaaaatcaatttgggttccttcctgatagctgctagcccgtattccggccttgtctgcctcgctcgcactgagcacggacgaggttactgcgacgatgtcggtgagagatccccgggnggaggcgcgtgccgaggtactggaccgcc

SEQ ID NO: 52938 - DNA, 321 bp, Setaria italica
  Peptide Sequence Number=SeqID_118912
tttctttttgttttcttttacgttttgtttcttttacttttgtttatttcttaacggttagttctttactaaccttaattaaggtcgcgcgtaagccatggcatccaaggccgtcctcttcttggccctcaacctcctcctattcacggtggccaacgcctgcggcagctgcccgaccccgacgcccccggtcgtgccgccgccgccgcccccttcttccccacccccatccagcggcaagtgcccggtgaacgcgctcaagttcggcgtgtgcgccaacgtggacggcctcgtcaaaggcgaggtcggtaaggtgccccg

SEQ ID NO: 52939 - DNA, 256 bp, Setaria italica
  Peptide Sequence Number=SeqID_118913
ctagcactagcagtcgcttgctgctgcccagttcttgtctacgtgctactgatcaacggagcttacaacctaattaaggcgcgcgtaagccatggcatccaaggccgtcctcttcttggccctcaacctcctcctattcacggtggccaacgcctgcggcagcttccccacccccatccagcggcaagtgcccggtgaacgcgctcaagttcggcgtgtgcgccaacgtggacggcctcgtcaaaggcgaggtcgg

SEQ ID NO: 52940 - DNA, 399 bp, Setaria italica
  Peptide Sequence Number=SeqID_118914
tccacgtttcagcgaggctacctcgaaccatctaccagagtagcgaactggatcaagtcttggcagtcatacccctcatcatccatccctgcgccaccgtcatctgaagggttatcaaacttcagaggaactgaagcactgtcgatggctgccagtgttgcaatctggcataagcccggctgggcaaaggtttctgcaggaatagcctggtcaacaagaagagttcatcgatatcgtggcatactattttaactggtaatcttacacctattatttccttatgactgaaattaaccatttttgccgacttgaaagaatcatgtggcagtgctgtagaatttttttctcaaaattaatctttatgtgatctccaagctcttaatcttctgtggtatgtac

SEQ ID NO: 52941 - DNA, 244 bp, Setaria italica
  misc_feature (146)..(146): n is a, c, g, or t
  Peptide Sequence Number=SeqID_118915
ttggatactactccatatttgttcagtggcgtttcctcattcagagagcatctgacgattttctgcctggtggtgctacattttctcctgccaagccgaaatcaacagagacttagattggaaaggcattcagtgaaaaaaaaacnttaagttttacaactgcaaattcccatgctctttttggtaatcttaatcaactcatcagcatcggcattcaggctagcaatgtcaaggatagtcacag

SEQ ID NO: 52942 - DNA, 348 bp, Setaria italica
  Peptide Sequence Number=SeqID_118916
tacctacttttttgttatttgtatttattgtattatttctagtaaccttgtaagtaactttctaccaagggcaagattcttcaggcatgttttcttcaacatagcagcagcttgatacctagactgagaattctttatcgcagagtagccatgggcagaagatatgaaagtatgaacagaatctagagtttcttttgggtattttgcattatcatccattatattgacacattttccaggagatttttcattcttcccaagaaagaatgacattttcctaactttttcgtgacaacaacttgatgctgcatggcaacctgaagagccttcttgacatcaaaatttggt

SEQ ID NO: 52943 - DNA, 276 bp, Setaria italica
  Peptide Sequence Number=SeqID_118917
agcttcttcgtggattctggtcccggcgcttcgccgtgctcccgtggctggttcttgctggttggggagctcaagaacgcccccatttgaactcttgttggcaacttttatctacagacaaatcaaatagagaaaaggcacaaattgagcaggaaaatggagaaaatacggcaattacatacctaaaacctatgagaaatcatacagcatgagaaaacaaaatctaaggttccaaattgccaaatcccaaggcacggtcaccaaactctaaattcg

SEQ ID NO: 52944 - DNA, 397 bp, Setaria italica
  Peptide Sequence Number=SeqID_118918
aaattgatcgccacacccttgcgcccgaaacgaccagagcgaccaatgcgatggatgacatccgtatcctgaggtatatagagcagtactacagcacacaaattgatgagatgccaaatgaatgttgctgatcttatttgagcagaggactgggagagagcgctgttgtgttttatcatgccctcagaaggtttggctgagctttggtttttggtgaaacgtttggtgtggctgtgaactgggcgaggggctttgtaagcggagtggagtagagcagagatttgtttcccatttggtcatcatggcatgaactgtatatattctagcttgctccagctctcatgtaacttggttactgaatttgtggtttgggacacggagacttgtgtcgatcagg

SEQ ID NO: 52945 - DNA, 296 bp, Setaria italica
  Peptide Sequence Number=SeqID_118919
aaaaagtatcggcgaggatatcaggaggcttgagaacggagtgcacgttgtctcaggaactccaggcagagtatgtgatatgatcaagagaaggaccctgcgaacaagagccatcaagcttctagttctggatgaagctgatgagatgttgagcagaggctttaaggatcagatttacgatgtctacagatacctcccaccggaacttcaggtgggtttgatgccctccagggtcaactcatcacgcttcacaaggatcctaactggttcggtcatgaacttgctataatctctag

SEQ ID NO: 52946 - DNA, 216 bp, Setaria italica
  Peptide Sequence Number=SeqID_118920
tgaagatttgtttatcttatcagcaatgaacctagcaaatttcttgttctcttccacggtcgtccgcatcaatgaaacctgctaggttcattgctgataagataaacaaatcttcatcccaagttactgtttgccttccccagaagggcatatctgcaatagatgctccaggaatgccattctatgatccagaagctacgtcaacactattgggcg

SEQ ID NO: 52947 - DNA, 334 bp, Setaria italica
  Peptide Sequence Number=SeqID_118921
tagacctagaaacaacgtaacaagtactgtcatctaaagtgacagctgtctttgcccccaatagaacctgcagttgtcaaacccatatgtgccactatgatatgagctcctacttttgccatggcagcagcttcttctggattgaaagcatatggagtagtaaggaaacccatgttatgagcccttgaaatcatctccacttccaagctaacagggataagatcaaagttaatacaacctaaaaataatacgtgtccttttccttatggaaaaattcaaagcagtactcatacaatgactcatgataataatagtaaggcatggagaggattgc

SEQ ID NO: 52948 - DNA, 258 bp, Setaria italica
  misc_feature (232)..(232): n is a, c, g, or t
  misc_feature (256)..(256): n is a, c, g, or t
  Peptide Sequence Number=SeqID_118922
actggccgcaggcaattttaaacctctcatactcttaaattctactgggggaccggaggaggaaaagaccaagcaaagactctgcacgggtataccttggggtcagagccagaggcggcaagggcggagcggagtctggcggcaaggaacacgagctcctccagcttggtgtccgccgtcccgatgcagagcacctccatttcttctcagccgaagcggagcggagcgggtnagatctgccgcgacgatctcccgntg

SEQ ID NO: 52949 - DNA, 242 bp, Setaria italica
  Peptide Sequence Number=SeqID_118923
tcccttggcgctcgccgccgcgcacctcgccgcggcgtaccggaccagctgccgcgagcgccggcgcatgctcgtctacaggatcgacgtcgaaggcgcggtgaggttaaaaggaggccatcagacacccaaagggctgaagcagtttagcgtctgacactctgttcgatctccattagcatccgccacatcaaaatacacgtacgtagacacccggaagatgactggtttcctttaggccc

SEQ ID NO: 52950 - DNA, 259 bp, Setaria italica
  Peptide Sequence Number=SeqID_118924
ctccagttagattattatgtgataaatccaaggattccaagcttgacatatctgataggtcaacaggaatgacaccagaaatatggttgttgctaaggtccagtacatgtaagttctttaggcctccaaagcccggcaatatgggacctgtgagcttgttatggctgagaactagagagggtgggaagctgctaacctgattgtactgcaaccctttgcctgtcttgttccttttaatgaagaaaggaaaataatcggt

SEQ ID NO: 52951 - DNA, 261 bp, Setaria italica
  Peptide Sequence Number=SeqID_118925
gggagagagaggaggggtgaagcggcggtggagaggaggcgagagtgtgagcttgttatggctgagaactagagagggtgggaagctgctaacctgattgtactgcaaccctttgcctgtcttgttccttttaatgaagaaaggaaaataatcggtctctgtggattgctgtgagatgtttcttgttacaaggcccttcatgcttgacaagctttccggaattcctccagtaagtgaattgttggatagatccaaatagaa

SEQ ID NO: 52952 - DNA, 245 bp, Setaria italica
  Peptide Sequence Number=SeqID_118926
agtcggttgagaatcttgtgagatcatcagcaccctcttgcttggcagcatctttccagaacggaggtcgccggaccgccgctgaatcgccgccggcgctcgtgcgtgctgcgtcgcgctttcgcgggcgtggtagagtgggggtggatcgtcgccagcggtccgcggctccggcgggcggcggcgcgatgcgtgcgctgtgcaggtcagctgcggggcgtcgggttgggacaggcggctagggc

SEQ ID NO: 52953 - DNA, 365 bp, Setaria italica
  Peptide Sequence Number=SeqID_118927
agtggttttacacgtagtgtaccaagatcataattcgcatcgtctggcactttgtgggttggtatgaatttcccacttgcagccattaataaacctgattcaaagcaacggccacagctaccaccgtttgattatatcgtaccacctcaggcatcggcagcttcccacgaccatcaacattgtaattcttgaccctgactagagcaacattgtattggaaattataatgctccaatttccctgcagtccgtttgttgtttggaagcaacacctcaatccttaagctgctcacgatctcattagcgccattctaggtattcccttaacctaagtcttcgtcttgtaggtttagtaattaattcgta

SEQ ID NO: 52954 - DNA, 244 bp, Setaria italica
  Peptide Sequence Number=SeqID_118928
cacaaactttgtgaagttagactggcattctatagctatgccagaggatgcaaatagcacatattctccatgggacaaagcaattgagacgacacttctagacaactttgatgcaatttcatcactcagctcattccagaaacctggaatcgatgagtcggttgagaatcttgtgagatcatcaagacaacccctacttgacttaggacaagacaatactttaccaagaaacggaaggtacgaa

SEQ ID NO: 52955 - DNA, 347 bp, Setaria italica
  misc_feature (22)..(22): n is a, c, g, or t
  misc_feature (41)..(41): n is a, c, g, or t
  misc_feature (104)..(104): n is a, c, g, or t
  Peptide Sequence Number=SeqID_118929
aatgtcccttgggcccctatcntactgtgattactttttgnacccagtgctttagtttattctctccgcttagctgaaagtacaataacatgaatacagtgacncttttaatcaagagtgcaacttatggaatttaatttgcaggcagcaaggatgaagtgttcttcgagtctcgagcttggttagattcggactgtgaggatgacttttacagtgtgaatggaggtaatcaaactgttgacatgtttaattggtaactgcctaaagaagcttcaatgtagttttagataggcatagacattagtttcttctatacttgtgttgtgtgcaatttgttccttggtcct

SEQ ID NO: 52956 - DNA, 387 bp, Setaria italica
  Peptide Sequence Number=SeqID_118930
caaagtaaagaaataataaattcagtacaaaatattcataattataataagaatgtgcatgatagtcactaaagactttcataccttctggatagccacctttacgaccttgtacttgatcaacattgccttcctttgcttcttaccagcatggtcgtggtgttggctactaggtgcatgattattacccaagacatatctggagaaaagaccaacatgcttcgatggactctggcctgaagttttatccaatctttacccacagggaacccataagatttcatcggactcttactttcaggtactggactctcatcctgtccacttgactcatcatccaaagggaaaggcatacaatcttcttgagaactttggcttgaaggcaaa

SEQ ID NO: 52957 - DNA, 392 bp, Setaria italica
  Peptide Sequence Number=SeqID_118931
taagaactaactaagaacctaaattaccaacaatttacctagacaatcttacatgccctagtttgggcaaacaaatatatttacaaatgaaagaatattgtacaagtccactgtcgcttgacctgaacaagatctcgagggtgcacggcagtggttagtgcctctggctccgcatctggccaagcctggtgttgagagcttcaatgtatgttcgcagccgatgccgatcggatcttgtcagagtcaaagggggattgagggcaagtgatggtgcctcgatcaggagaaaccgcagcatggatacagccctcgtatacccggtcatggcatctgctgctttcccgaacatctcatcaacaccaccacgccttcctatatgcaggcagactgaa

SEQ ID NO: 52958 - DNA, 414 bp, Setaria italica
  Peptide Sequence Number=SeqID_118932
actagaaacaaagaatctcgaagggtagacaacggacaagtaggttaagtgcctctggctccgcatctggccaagcctggtgttgagagcttcaatgtatgttcgcagccgatgccgatcggatcttgtcagagtcaaagggggattgagggcaagtgatggtgcctcgatcaggagaaaccgcagcatggatacagccctcgtatacccggtcatggcatctgctgctttcccgaacatctcatcaacaccaccacgccttcctatatgcaaggcagactgaaatattatttcgatcgcatcaggcatctctgtaccatcagctatctgtcctacagtgctggctagtccttcagcatattcaacatcactaagaaactgtctctctatctgcatgcaggcatcatcagccag

SEQ ID NO: 52959 - DNA, 326 bp, Setaria italica
  Peptide Sequence Number=SeqID_118933
aaaagtaatccatcattccatcttgaccttgcactctgacgttgtcttttacaggcatccaacaggtacaccaaagtccgggcagtcctcaggttgtttggcaagataacattgaccctgacaatatgacatatgaggaattgttggatttgggtgaggcagttggaacccagagccgtggtctctcccaagaacgcatttcactgcttcctgtcacaaagtacaagtgtggtttcttttcaaggaagaaaacacgtcgtgaaaggtgtgtgatttgccagatggagtacaggagaggaaatttgcagatgacacttccctgcaag

SEQ ID NO: 52960 - DNA, 512 bp, Setaria italica
  Peptide Sequence Number=SeqID_118934
agctggatgcatgcatgtgaactcaaataagagtggaagggacatgatgcttggctggtataaattaatagacatcttcattgcttaatatttaaggtgaagaaatcatttcttagttcttacttgaataatcatgtcttttttggttgtttatctgaaaaactccttgtcaaaaatgcctatgtgagccgcttctctttggttcattcaatggaactgttgatataaaatttgatttcaatggttgagctatatttcgccaaccattctttggtaatgttttcttttaactatttcaaagttgattattttgaaaactccatcactaacaaggttttgttgacaggaattgttggatttgggtgaggcagttggaacccagagccgtggtctctcccaagaacgcatttcactgcttcctgtcacaaagtacaagtgtggtttcttttcaaggaagaaaacacgtcgtgaaaggtgtgtgatttgccagatggagtacaggagaggaaatt

SEQ ID NO: 52961 - DNA, 168 bp, Setaria italica
  Peptide Sequence Number=SeqID_118935
ttacggttaagggttttagtaaggttagtaattaagtaagtacttagtaatttagtttagtaattagttagtaaaaaactgtttaacaggcatatgttggatttgctagagatatgaatgcagttatagttgtgttcaggggcactcaagaaaacagcatccagaatt

SEQ ID NO: 52962 - DNA, 396 bp, Setaria italica
  misc_feature (353)..(353): n is a, c, g, or t
  Peptide Sequence Number=SeqID_118936
ttttttaactttttaacttttttctttttaaagtttttcccttttagtttatttggttccacataagatactgactttttcaaattcagcaccatccccggcaagcaactagcatttttacgggatccaacttcctctactgcttgcagatcaacatagagaatgtttgtatttgctggatagctaacctgcaaactaaatttagagagtagatgataaataattgataatatattgcccatttgtattatttgatatctatagagcgaaaaaatcaatgtcaaatacatctctggctctcttcatcccaccaaactgactgaactgaagcagatattcttcaaagtgggaanaagcacagaaagaaaatgttctaaaaactacaattatcatcat

SEQ ID NO: 52963 - DNA, 269 bp, Setaria italica
  Peptide Sequence Number=SeqID_118937
aaacgggcaaagtacgtgcaaaattatatttttgatttttacctcaacatttttccatagaaattctgcaacctctatttgcaactctgaacctttagaaatagagccacctatgaactgcgtggatgaaaatttgggtgaccatcaaggtatagataaggtaaagaccgaaaggttagatatagtacagtgtttcagaatgtaagaagccaagaactggcaacaaagcataacagtctgcaggagttccacagtccatactccacagg

SEQ ID NO: 52964 - DNA, 248 bp, Setaria italica
  Peptide Sequence Number=SeqID_118938
aagtgactcttttcctttcattgtatacaatgaaagtgtcaagctcacctgttaaataggaaatagcttaaactcaacataacaaagggaacaagtcattgcgcagagatcaataaattgattaccaaacatgtaactacttacatactttctattcctttgctgcatttgtagttatatgtgttcataaaattatctgcaatattttgcattgtgcactctagcctgcctccagcagcaactacaaa

SEQ ID NO: 52965 - DNA, 252 bp, Setaria italica
  Peptide Sequence Number=SeqID_118939
aaattaaagtctggctggaaaatacaaatagaaatacaaagaaatactgtgattgatattatgtccttatagttctatcaaattcaacttcacatgggcaccatcgactgtatacttccagtgccaggttccactgtccatcatgtcctcacttataggatccaagttaacaacaaaacctgatgggcaacaagaaactcattcaggaaaggatgcattacataagttattagtaacaaaaagaagtcaaga

SEQ ID NO: 52966 - DNA, 312 bp, Setaria italica
  Peptide Sequence Number=SeqID_118940
cagtctgcatctcccacaccttgcaccatagtgcagtatttgttcaccattttttgttcttcttggttgaacccatgatgttgtcagctagaataataaggcttccatccagctcaacatttttccatagaaattctgcaacctctatttgcaactctgaacctttagaaatagagccacctatgaacttttggtgtatgatgtcccagaatggacctaaagcaggatgaagaaatatgagaaatggtggtccagaatgcaaaataactacgactagttaatactttagaaccaattagggaaacaatacta

SEQ ID NO: 52967 - DNA, 237 bp, Setaria italica
  Peptide Sequence Number=SeqID_118941
tgaactagtcatgattgcaaccggggttatacattgatgtccaaagatcttgaagtgaagaaactctctagcctgcagatcccgtatcagcccttccaatagagacctcccacagtaaggaagcaatgcagcaggaagggattcaccagtatctgagtccaagaagccgacgatcatcctcccccctgataactttgcagagaaacatatattggatctttctttgacaagcaagtc

SEQ ID NO: 52968 - DNA, 325 bp, Setaria italica
  Peptide Sequence Number=SeqID_118942
gcacaataatcttacgtttttgctttgcagtcattccgtcttgctttcgcattggttttggtagctgtttcgttcatgattatatcactaagacaaggtatgatttctgactaaagattgatatttttattctttttgaaaaaaataatgatcaaccagccatagtttcatgttgtatattgacgtgccatgatgaaccttctcctgaggttacttttctttctctctgccacacaatttcttcgaaaataaaataaataaaatgcagtttcgtacaaagtctcacagacagttaataagaacaactgtggaattgatattcagc

SEQ ID NO: 52969 - DNA, 203 bp, Setaria italica
  Peptide Sequence Number=SeqID_118943
cgaccccgtttctaccagtcacgccattgatcggtgcagagggatcgttccacgtcaagtgagcttgccaacttgtcacgacacaaattttctgaagattctattcatttcattctttttgtaaagaacctggcctccccaattttgttcaacccttaacattctttacacattgctgcactaatttgtactttaaaaaaaaa

SEQ ID NO: 52970 - DNA, 411 bp, Setaria italica
  Peptide Sequence Number=SeqID_118944
acaacaaaagggttcatccggcgaatctagcaagctgcttagtctgtttcaggcctagtgatggtgattgaatattagggattgttgagactccggagaccttattaagtgaagatatgttggctcaaggaagcgccggcagaaccttccctgtgcaggttccgaatccaatgttgtagccttcacccttgcaacagccggtcaagatgacttcatccccatcttctagaaacttgcgggtcgaatttccaactgctatctccttctgcccgttccatgttagctccagcagacaccccagagattcaggttcaggtccactgagtgtgccggttgcaaatatactcccctggcctcatgttgcatccattgatagtgtggtgtgctagctgctgcgtcaccgtccaatac

SEQ ID NO: 52971 - DNA, 455 bp, Setaria italica
  Peptide Sequence Number=SeqID_118945
agaaaattaagtctttgcaacaattgaggcatcactttggtctttgggcttaatccagacttcaagaggaatatcatagtttatgtgattcttttcagctaagtaaggcaaaggctcaggttcctgcatgcaaagaaaattagttctccctggattggagtactacaaaatactgataaaaaatatatatagctgatttggttggtgttagcttagctttattcctagggcaaatcttaaatacaccatttcctcacctgcttaggagcctcacaggtgaaaggctttaaagcatccagagtgacaatccatggcgatattgtagtacctagagaaattgcaaaagcacagtaaagcttcagacccaaatgcaaaaatggaagcacatatcctaagtgagatatgtgtagggcttccaacttcttataaagcatggcttaatattcttattttcc

SEQ ID NO: 52972 - DNA, 240 bp, Setaria italica
  Peptide Sequence Number=SeqID_118946
gtcgaatttccaactgctatctccttctgcccgttccatgttagctccagcagacaccccagagattcaggttcctgaaatgaaacacattagaagacgaggattcatacagataggtatctcccaactggcatgtatataatagttggaatgtttcttccttacaggtccactgagtgtgccggttgcaaatatatcccctggcctcatgttgcatccattgatagtgtggtgtgctag

SEQ ID NO: 52973 - DNA, 381 bp, Setaria italica
  Peptide Sequence Number=SeqID_118947
ggcagaatgcactaaacattttggtccttggttggtcacacatgctatggaactgctgacagctgataatgactatgcggatactatgttgcatgaagagcggcctaacttaggcggtataagcatagaggaactgcaccggctagtctatgctcaagttttgtgctctcattctttaacttggcaggttagttatgtaacatactccctccattcctgtttataaggcgcacatgcatatcaagattcaaagtttaccatctttgaccaataatttagccaatatctttttattttgtaatgtaaacttgaaatggttggatttgtaatcaaatgtactctctaatgattataagtttatgaccataaacaatataatat

SEQ ID NO: 52974 - DNA, 479 bp, Setaria italica
  Peptide Sequence Number=SeqID_118948
gtaggcgaggtcaagtgactaaactggagtgcagtgtcatttggatccagtgtggtacaccaaaaaacccgtgatggtttgaagaatttgcttcatattatgatggggaacataaaggaactcactgcttctacctcccattggctggagctgtttgcttctcattttctttacataagaccatttacagtgggctttgaagggatgcaccatttagcacaaaagtgcatacagcttaagccgtcctctagcactactggattaacaggcctcgttattggcgtcctttcagaaaatccagaggttgtgctggcagaatgcactaaacattttggtccttggttggtcacacatgctatggaactgctgacagctgataatgactatgcggatactatgttgcatgaagagcggcctaacttaggcggtataagcattagtaggtaacttgtctaccggtcttagttcttattgtctta

SEQ ID NO: 52975 - DNA, 261 bp, Setaria italica
  Peptide Sequence Number=SeqID_118949
ctaacagttattttgtaacacattgggaagtcagtcgcagatgatagttttaaggtataaatctttgcttctttctgaactccttggctataacctgcagcttgttctctgtgcaatacaaccttaaaggaatccccttcagctagttgttttagcatataactcataacaattttgcatggtcagcaatgggaagggctgctcgagctacttggttctgatattggtagtgcgggtggtctcgagttccttcacaggtac

SEQ ID NO: 52976 - DNA, 392 bp, Setaria italica
  misc_feature (346)..(346): n is a, c, g, or t
  Peptide Sequence Number=SeqID_118950
aacaataagaccatttacagtgggctttgaagggatgcaccatttagcacaaaagtgcatacagcttaagccgtcctctagcactactggattaacaggcctcgttattggcgtcctttcagaaaatccagaggttgtgctggcagaatgcactaaacattttggtccttggttggtcacacatgctatggaactgctgacagctgataatgactatgcggatactatgttgcatgaagagcggcctaacttaggcggtataagcatagaggaactgcaccggctagtctatgctcaagttttgtgctctcattctttaacttggcaggcctagggctcttggagnttctacttctcaagcaacccatacaagataatcgcctagtactcaa

SEQ ID NO: 52977 - DNA, 318 bp, Setaria italica
  Peptide Sequence Number=SeqID_118951
cgatgaccccgaccactggaggcacaatgggcggtaccccaggaaccttcacgcccggtgccggcaccaccagcacaggcatgggaaccggtactactactggaaccactggcgctgggctcggtctaggaccggcaggcaccggcatggacactgcagcggcgagcttgctcccaagcgctggggtggccgccgtcctcaccgtgctcccaagcgctggggtgccgccgtcctcaccgtgctcctctccgccatcgcattcgcatgacgtttgaccccaagagacaagaccctacttctactagcaggtaggaggag

SEQ ID NO: 52978 - DNA, 200 bp, Setaria italica
  Peptide Sequence Number=SeqID_118952
ggcaccaccagcacaggcatgggaaccggtactactactggaaccactggcgctgggctcggtctaggaccggcaggcaccggcatggacactgcagcggcgagcttgctcccaagcgctggggtggccgccgtcctcaccgtgctcctcttccgtcctattcgttcttattttcgttcatgacgtttgaccccaagtag

SEQ ID NO: 52979 - DNA, 151 bp, Setaria italica
  misc_feature (62)..(62): n is a, c, g, or t
  Peptide Sequence Number=SeqID_118953
gcttgcttcaggagtgctctgatgatccatggagaaaggaacataacggaagcctaatgcancctgtccaaaactccactagtgcctgcttcgtgtcaggggtacactgaagaacatggtgtggtctcaaaggaaaacagaacgccaccca

SEQ ID NO: 52980 - DNA, 284 bp, Setaria italica
  Peptide Sequence Number=SeqID_118954
agaacgtgacagtaacgccccaccttggagcaagtactgtggaagcccagcttgctgtccttagtgggggctccacggtgaagacatcaagagccgcctgagcaactttgcctgaatcaagggccctcactagagcatcttcatcgatcactccacccctggccacattaatgatccgaacaccagtcttcatctttgcaaaggactcgtcgttgaagatcttgtttgttgttggtatcagtggcatgtggagggagataaaatcggctcttgctatggcctca

SEQ ID NO: 52981 - DNA, 296 bp, Setaria italica
  Peptide Sequence Number=SeqID_118955
acttgctccaaggtggggcgttactgtcacgttctcatgtaacaccagcttgctgtccttaaggtggggggctccacggtgaagacatcaagagccgcctgagcaactttgcctgaatcaagggccctcactagagcatcttcatcgatcactccacccctggccacattaatgatccgaacaccagtcttcatctttgcaaaggactcgttcgttgtaagtattctttgttttgtttgtttggttattctagttggtctattgttggtagggttagttatttaaaatttcggtta

SEQ ID NO: 52982 - DNA, 412 bp, Setaria italica
  misc_feature (1)..(67): n is a, c, g, or t
  Peptide Sequence Number=SeqID_118956
nnnnnnnnnnnnnnnnnnnnnnnnnnnnnnnnnnnnnnnnnnnnnnnnnnnnnnnnnnnnnnnnnnnctttttacggtatcgcgttcttccctgttgtggccataagacgtcaaatcccaagttcattacgtactatatcgaatagtatcaatcctactgaacactcgctatccatcatagctcggacgtagtcaacgcgagctgatgactcgcgcttactaggcattcctcgttgaagaccaacaattgcaatgatctatccccatcacgatgaaatttcccaagattacccgggcctgtcggccaaggctatatactcgttgaatacatcagtgtagcgcgcgtgcggcccagaacatctaagggcatcacagacctgttattgcctcaaacttccgtggcctaaacggc

SEQ ID NO: 52983 - DNA, 430 bp, Setaria italica
  Peptide Sequence Number=SeqID_118957
agacctagaccgaagcttctctgccagggaaacgtaaggagcaagctctgacatgacctcagctgggaccatgggcgcattcaccgctgtcgctgcgagctcgcccctcagcgcaccaaccacagcttccgcaatctcgatagcgacgccttcctgggcttccacagtacttgctccaaggtggggcgttactgtcacgttctcatgtaacaccagcttgctgtccttaggtgggggctccacggtgaagacatcaagagccgcctgtcgacattggcaagaaaaaagctcagctttcagctgaatctatcttcacatcaatgaaggtaaaatgacacttgaattgaagaaacgtctgacgatcacctgagcaactttgcctgaatcaagggccctcactagagcatcttcatcgatcactccaccctgg

SEQ ID NO: 52984 - DNA, 229 bp, Setaria italica
  Peptide Sequence Number=SeqID_118958
cctatcccctgtgtgccttgcctatcctctgttgcgtgtctcagggggctccacggtgaagacatcaagagccgcctgagcaactttgcctgaatcaagggccctcactagagcatcttcatcgatcactccaccctggccacattaatgatccgaacaccagtcttcatctttgcaaaggactcgtcgttgaagatcttgtttgttgttggtatcagtggcatgtgga

SEQ ID NO: 52985 - DNA, 302 bp, Setaria italica
  Peptide Sequence Number=SeqID_118959
agaagttcagatgatcacctgtaaaccagcacggggatgccggacttcacgagcgctccgacggtgttgatggtggggatctggaggtccagctgcttgtactcaagaacactgctcaattgaaccaaagtaccaaacattgcggagtcagttgatctcgatgacgaaatgcagaattgaacactgaaatggagcaatcgccgagcatctgagagcaagttcagacagggagcgcgcacacactctcacctgctgcagaccgtccacctctgcacgccgccgctgaggcgggcgttgtacta

SEQ ID NO: 52986 - DNA, 483 bp, Setaria italica
  Peptide Sequence Number=SeqID_118960
cgtttgatatcaagtatctcgacgatgaccatgaatgggtgaagctggcatgcaatgcagacttggaagagtgcatggagatctcacgaaattcgggcagccatgtcatcaggctgttagttagcgatattacagcacactttggtagttcttgtggaagctctggttgatatgcatgccagccttttgctttgttcaatgggtacgaaaaagttcttgtaccatgagttcagtttcacctgttgttaatctagttttgtcactagatagcattagctgcttcattgtgtttggtaaatgatgtatcatgttttttttgcccccaaaaatatatgtaattgtgcagaatgcacttctagtcaaaacaaggtgcctcccttgaccttatgcacaattacaacaattctggtttatgaacttaacaacagaaattccagtaccaagggcttaatatgtacatggtttgactagaagtgcattctg

SEQ ID NO: 52987 - DNA, 241 bp, Setaria italica
  Peptide Sequence Number=SeqID_118961
ttgacaccaaattactgggaggggccgaaaaataggttggtctgctgctggagtgaagagattcttcaagtctttggagctaccagaatcctcaatcagcatcaaacaaatgtccggtttgctggactaccctggcatgacccctctgatgtacgtgaatttatgctgccttctccagatgaacttctcgagtgagaagctttgtccgcctcaagctgagcatcgttgttattgtctataa

SEQ ID NO: 52988 - DNA, 159 bp, Setaria italica
  Peptide Sequence Number=SeqID_118962
ctttgcaatgaagaatctctgtcaccatcaacagcgagattcgaaggttctgtgatagatgtgagattaaatgcagcatctgagccttgaacagactcgattacctgctttaatttcgagagagaccggttgaccttattgatttttctagatggccaa

SEQ ID NO: 52989 - DNA, 441 bp, Setaria italica
  Peptide Sequence Number=SeqID_118963
ggatacctgcactcgcggtttagcggcgagactgcgccaatgagcataccgcaggtgggcggtgggcaggggcccctgtgcaccatcggaacatgtcggaacccacccgagccttcatgtttcctccaccgtctcccaagagtgtgcgaggggaggcagggatgcaggagtccccgactgaggccaatcggtcgttcaagagggcagatggcatccggatgggcgatctctatgctaacttgccatctggttcaaaggtgattgcttgcttttgtccgtaattaattcacgatgtttatttgcttagagcaagtttaataacgcagctagcaagcgggctgcaaggtttctcccagcctttttctagcccactcgtacaatggttagctcttcaccattaatacatggtccacaagtcattctcacaaagtttcttggttc

SEQ ID NO: 52990 - DNA, 331 bp, Setaria italica
  Peptide Sequence Number=SeqID_118964
ctccaacgatggtagaagcaggaaacctgcttgcgatgatggattggcaacgacaaaggatgggttatctatagagcaagtttaataacgcagctagcaagcggggtgcaaggtttctctcagctttttttctaacctactcgtacaatggttagcttttcaccattaatacatagtccacaagtcattctcacaaagtttcttggttcctgtgcccaaatcggctgtaagcttatagcccgcttctcctctctcacctcttctctctcctccatatcagcattcagtcagcttacagtcccttattatacttgctcattagaaatgattc

SEQ ID NO: 52991 - DNA, 154 bp, Setaria italica
  Peptide Sequence Number=SeqID_118965
gagggcagatggcatccggatgggcgatctctatgctaacttgccatctggttcaaaggccttcaaattaagagctgttacaagttcacagctgttggggggctaatcagagtagcattttctttatctggcaagattaaggacagtagggatg

SEQ ID NO: 52992 - DNA, 239 bp, Setaria italica
  Peptide Sequence Number=SeqID_118966
tactctgcttattgctggagaagctgctgatgccgatgcttaattgcaaggtctcatggtgacactcacatgcctggccctaacagcaggggaatagccaagaagccctccggaggttcttgcgcaaatctggcgtctcggaacaacagcaacaacatgctctatagacctcccccaatccctgtaaacaagggtggataccatcagtaggctctagacatcactgaagtctgtaaacg

SEQ ID NO: 52993 - DNA, 386 bp, Setaria italica
  Peptide Sequence Number=SeqID_118967
caagctgctggaggacggcgcgacggtgcacgtgctgaacgagacgtggagcaagggcaagcgcgactatatcgagggcacggcgtacaaggccgaccccagcagcgacgaggccaagctcaaggtcaagttctacctcccgcccttcctccccatcatccccgtcgtcggcgactactgggtgctctacgtcgacgacgactaccagtacgcgctcgtcggcgagccccgccgcaagaacctctgggtaagccgattgttctacatacacaagtacaagagcatgccacacagtattcgagtttcaattccaccgtgtgttctcatcggtctttgggcgtgcagatcctgtgcaggaagacgagcatcgaggaggaggtgtacag

SEQ ID NO: 52994 - DNA, 222 bp, Setaria italica
  Peptide Sequence Number=SeqID_118968
gcaatgcttgggcagcgagagatccttctggagttctctcgccatacaagttcgaccgcagagcagtgcaaagcggcgatgtttcattgaagatcacacactgtggagtctgttatgccgacgttgtttggacacagaatatgcacaatgattctaaatatcctttggttcctgggcacgagatagctggagttgtaactgaggttggttcagatgtcaaag

SEQ ID NO: 52995 - DNA, 455 bp, Setaria italica
  Peptide Sequence Number=SeqID_118969
aacatggttacgacttgcgaaggttgaccaaaacgctctagtatgaaaatggaacgctagaccaaatagacatgacttcaatcggctaatggttcctacttatcaaccatcccctcggtatttttcacacctaactagctgagaaccaaaagagatactttcatagaccccaagtggaagatttagctggcattcagtcacattgatcgaaatgaagttaacaacgtccgatgatttcttggtcatgttggtgcatcaggcaactccaatgctgacggaagacagggttcaggagtgcatcgacccgaagcttggcgatcagtatcctcctgccggagctctcaaggtttttgtctgtccgtaggcttgtgaatccttttcgcctatatcgccataaaacctaaccggaaacctggatgtcccctgcagctcgggcgatcgcggtgcagtgcctg

SEQ ID NO: 52996 - DNA, 178 bp, Setaria italica
  Peptide Sequence Number=SeqID_118970
gttgtcattggacaattaactgctagtgtacattacacaatgctccttgaccaggcttgctaaaacagccgataacataaaccaattatttgaggaaatcgcgaagaggttaccaaggccaacatcatcttgatggaacttgatcagtgtaggttttagaaagcctggtcaaggagca

SEQ ID NO: 52997 - DNA, 243 bp, Setaria italica
  Peptide Sequence Number=SeqID_118971
ttcttatgagctgatcatgtcacatttcaacattctgctgaatgctgcaaagagaaggggcatttggaggtggggcgttaggctgcttaacaagatgcaagagaaaggcttaaagcctggaagcaaagagtggaatgcagttctcgttgcatgttcaagggcttctgaaacatcggctgcagtggatgttttcaagaaaatgatagaggaagggttgaaaccagatgtagtttcctacggaga

SEQ ID NO: 52998 - DNA, 336 bp, Setaria italica
  misc_feature (280)..(280): n is a, c, g, or t
  Peptide Sequence Number=SeqID_118972
ttgatacatgtgtttctgcctgtgttgccaggttgctagaaaaaactgaagagatatggcgctgccggtgttctgtcatatggattacttaacactgtctactatgtcagtgcttttttattagtttggtaaggcatgcatggatatgtgacatcttactgctacaatatgtggacgtttattttcactgggtacaatacttttttactacttcaaactagccaatgctttgctaatgagaaacagtctatggaacttatataagaagtttgcaactgcntaagcattgggtagaaaatgaatatcataatggtttgcgttttaggttttattttg

SEQ ID NO: 52999 - DNA, 239 bp, Setaria italica
  Peptide Sequence Number=SeqID_118973
ctcccggagacccctgccgagatcaatgtggataatgttgaaggaactaggcagtcactaggaagtttcactggttcaggaaaggatgggaaggagtcaaccaaaagtttctcatctaaagagtattcatatctcactgtaaatccaaaaactaataatgacaaaactattaaggtttatgctgtctaggcctcatgacataactttttaaggttcatactgtaggaccttactgttac

SEQ ID NO: 53000 - DNA, 307 bp, Setaria italica
  Peptide Sequence Number=SeqID_118974
gtagaccatacaaacaacagcagcagcagaggtaacttattcctacttcctaagggaggactggcgttgtttaggtggagccatgcggcgctccttctttgcgttttgatgtcgcacatgctacaccgccgttggtgagaagcgatgcgacaattgctctttcctggagaagctgtaacactgttgtatttaatttttccttttttgcattactttgtgcttacctcaggtgatagtgatactcgcaacattttcttttctgtcttgcttatcaaggatgaaacccataattccatcttattcgtac

SEQ ID NO: 53001 - DNA, 498 bp, Setaria italica
  Peptide Sequence Number=SeqID_118975
acaagaggtttttcttttaaccagccctgaaatttgcttccacgaggaatcaaacccaggcactgtaagtgctactagagcattgcaaccactacgctacaagccctttcatgacaccggaatataatataagcctattcaagctcacaataaaagaaatccatatttggtgtgatgcagacactaccctttccagatttattccattagcaattatgacctacgggtaagtaagagaagtaacaattctcgatcctttatgtcactgaagaaaactcgatgaaggaagcttaccgggggttctagaggatatatgatattgacaaccgtgtcatcttcatcttcaggaggattcagtggcatataatatggcatgcagtaatcgaactttttgactctctcagttttgagatgcttcagcgcagacctccgctgggtgcagccgagagtaaatatttttgttttcaaactgtcgatcctgctaagccggtcctcaag

SEQ ID NO: 53002 - DNA, 477 bp, Setaria italica
  Peptide Sequence Number=SeqID_118976
catgttgtctcatggcccataagagactacattggaagatgtcaccaacctgattccgccggctaccaaatttctaataccaactcttcaagttggatagctcaatcaatgacaaagctcactgaaaatgtgagatcgggaatgccactacatcagataatgtgcgttccggtaatatctgttgatgtactttgccttaacattggaaacatcgggggtgtccggggttttcacaggataaaatttgtaaaatttgatgttctcaaatgcctctcttgtcttaggatccatgtcatcaatagctttcttcctggcttctttggcctgcataagtttttgggaacattgaatactggaaagcactaaatctcttgagaaaataattaaatatttcagatgattgtggacctgtttcagttctctctttctttctctaaccttctcctttagaaattcctgtaaacgtggcagttaaaa

SEQ ID NO: 53003 - DNA, 359 bp, Setaria italica
  misc_feature (271)..(271): n is a, c, g, or t
  Peptide Sequence Number=SeqID_118977
gacaatgttggaagctgcacttgttaatccctacaagttctatgatgatgcagtaatacagcacgagatgcttctgtagagaatacaggcacgagtgaagtacaccataacacagttaattctccttctacctcgatgccactggacccagctttgtcgaccaggatggatggagcagcggatgaaaaatcaacagaagcagataatgctgaagaggcggaacttttggcaagcttgcaaaacccagacatcaatgttcatgaccatcctnttctgccttggttagagagggcctttttgatgctggtgatgagatactagctgtggacccagcatcagactcagctaatcctagacaa

SEQ ID NO: 53004 - DNA, 190 bp, Setaria italica
  Peptide Sequence Number=SeqID_118978
tcaaattaattagacttcaggaaaaggcggtcacttaagaaaggaagttgtgggtttccagaagtcaataattgatatgttgtcaaggtttgacctagatctccatgaaaaggttttgttggccattaagagtctactgaaactttcctcaactgatgcggatgactttgagttctatgacctcgggggt

SEQ ID NO: 53005 - DNA, 222 bp, Setaria italica
  Peptide Sequence Number=SeqID_118979
aagtaagacaagaacaagtacctagaatttaatacttacaattacggacaagtgtctccatcctaccattgctgttctgctgcatatcaatggtttcattctcatccttcatctcttcagccttgttgtccaaatccagagatggcacctcttcagatgattcctctagttcctgatctgatgatgacaagctgctgtgctttgcagtggattgtccgtcac

SEQ ID NO: 53006 - DNA, 354 bp, Setaria italica
  Peptide Sequence Number=SeqID_118980
ctaaatccttgtgagagtttttcccaatatggtcgtcgattatccttacccagaatgcacttcctctgtgctacaagctctgatactgttcagagagttataccctagttatcgaacagaagagatcaataaatctgtcagaaaggcagcaacatttattgagagcagacaaaaggaagatggttcatggttaggcacttggggtgtatgttttaccatattgggaaaactctcacaaggatttagaatctctatccaagaagaagtccttttgcactcgtatgtagaaaaggtaccatctttgttcacaaaagataaaaggcaatcaacagcgtcatgcagcctttctcttcc

SEQ ID NO: 53007 - DNA, 275 bp, Setaria italica
  Peptide Sequence Number=SeqID_118981
aggctgcatgacgctgttgattgccttttatcttttgtgaacaaagatggtaccttttctacatacgagtgcaaaaggacttcttcttggatagaggtaagtttttacgaacttctgctcatattcatgttttttccccttaggaagatgcatcagtacttttaattcagttatcttggctttttatttacatattactgtttccagttccaccatattgacgtatttctgttaattaactagattctaaatccttgtgagagttttcccaatat

SEQ ID NO: 53008 - DNA, 214 bp, Setaria italica
  Peptide Sequence Number=SeqID_118982
ttaccccaaactaccgcaacatattccccatttgggctcttggggaatatcgtcgttgccttcgcgcaaacaagagtagtgggcccgtgtgagcatattagcattggtgtagttggttgacgaactaatcatggcttaattagtaaacttaattactaaaatttaaggtaattaattaaattaatttaatttaacccgtttaagtttactttta

SEQ ID NO: 53009 - DNA, 262 bp, Setaria italica
  Peptide Sequence Number=SeqID_118983
tagctcacacctagatccttccttgagtagccccgtgctaaatttctcatgacatactgattgtagtccttcaagatcctcattatgaggtccgaagtagaaaccccatctgttctttttgtttccttgaatttccaatctttttaacctaatataatatcagcagaaatatttcagtttggaagcaaaggaaagatgcatttaacatttacttggctataaaaggatacttacaaaatcatagacatcatttgcagccccg

SEQ ID NO: 53010 - DNA, 243 bp, Setaria italica
  Peptide Sequence Number=SeqID_118984
ggtccgcattagcaagccactcatcatgatttaacccagcagtctttgccactgtttgcaactgtaaggtatgcaaagctagatatcagtaaaactccatgaaagcaagtgtagccttccatgtgaaggaaagtagtaaatctagttctgaacaagtactgatcagtctcagagtaacaccattaccttttcctgatgcgccttcacagtttctcgcagtttattaatcttcatattaacttg

SEQ ID NO: 53011 - DNA, 162 bp, Setaria italica
  Peptide Sequence Number=SeqID_118985
gcaacgcacttaggctgccactggttgctgcacaaagacccagcgctcattccctttgctcagcctgtcctccccagcctctcttgtatcctgtccttgattgctgtttcctgagtacagtaattaaaaggaaatctgtttgagttgaaagccagcaaattt

SEQ ID NO: 53012 - DNA, 255 bp, Setaria italica
  Peptide Sequence Number=SeqID_118986
catttcaacaattatttccacgaagaaggtgcagggtctatgcgcagaaagtaaaccagggtgaaacgtgaaactgataaggcagacccatccgcggatcccattcacaaccgccccttcagtccacaacctcctccgacttcttaggctttgacaagagataccaacccaggccaactacaagggacaagaacaaactaagtaagaacctaagaaccaaaaagaaaacaaagaacgtaaagttaacctaagtaa

SEQ ID NO: 53013 - DNA, 457 bp, Setaria italica
  Peptide Sequence Number=SeqID_118987
acaaaccgaagcagcccccagttttacctgccgcctagggtttccacgccgaggagctacctgagatgacgacggcggcgcggcccacctgggcgccggccaagggcggcaacgagcaggggggcacccgaatcttcggcccctcccagaagtactcctcgcgcgacctcgccgcacacacctccctcaagcccaggaaagaggggcagcagaccacagaggagttacagaagaggaacctcagggaggaacttgaggaacgtgagcgcaagcattactcttccaaggataagtcctatgctgaagagagagacctgcggaaaagttcaatccagctactcttagaaggttggtggaatgagtgctgcatcaatatctgtttatgttgtggcttagtgattgatttattcctttcttgtctgtaactcatagggtcaaagagagatgctgaggataa

SEQ ID NO: 53014 - DNA, 262 bp, Setaria italica
  Peptide Sequence Number=SeqID_118988
aagagaaggtgggatgatgatgtggtgttcaagaaccaggcacgtggagagaccaagactccaaaacggttcatcaatgacaccatcagaagtgatttccaccgcaaatttctgcagaggtacatgaagtgaagcttgtgctgtgtacggtttaaatgtgtccttggcgtggtatgtcagagggcgctatatttcggggctcatcaatacttagtagaatagacttagtaggaatagaagggaagggaagaagaaccaaata

SEQ ID NO: 53015 - DNA, 232 bp, Setaria italica
  Peptide Sequence Number=SeqID_118989
cgcgacctcgccgcacacacctccctcaagcccaggaaagaggggcagcagaccacagaggagttacagaagaggaacctcagggaggaacttgaggaacgtgagcgcaagcattactcttccaaggataagtcctatgctgggtcaaagagagatgctgaggataagatagtcccacgagaaattgatgcagatgactccgatgtggagcctaaaagcgatgatgaaagcg

SEQ ID NO: 53016 - DNA, 281 bp, Setaria italica
  Peptide Sequence Number=SeqID_118990
aagaccaggggatctctaatcatgtgatggttcagtatcttccctgaagctgcatccactgaagatactgaaccaccacaagaccaggggatctctaatcatgtgatgcggccgcaggcaagatacccaacaacaatggccactttgcctgtacatgtatatccaatccttcctagaatggaagatgagcaatgtagcagtggcactactggtagtggagaggaaggtggtgtaggcaaccattaacaggtttcgaccagatctctcattctgtacttaag

SEQ ID NO: 53017 - DNA, 274 bp, Setaria italica
  Peptide Sequence Number=SeqID_118991
ccgtggtggaaggaatgggcttgatgcatgagttgttggagaacaaagggcagtgatgaacagccatggatctccatgaacataggtgcgcggtaaccatctggttgagttttgcaatagcacttttgctttctttttttttttccttttttggtgctattgctttaggagaggcataatactgtttgttgttatgaaaaaggggtttccactggatcctgtaaatgcaactgttgcatgatttaattttggaatacttgaaattaaaaaaaaa

SEQ ID NO: 53018 - DNA, 449 bp, Setaria italica
  Peptide Sequence Number=SeqID_118992
aaaaacaacttagctggtataatacttctagctaataaactgtgtgctttgttgctagatagaatgaataaattaaagatatgaaattgtacattttgccattcatggaaaaagaatcatctttatcaaagaaatttctgcccccattattattttttcctctaacatgatccctttttatttgtagattgaagtctcattttgaagagaatccaagagaccttgattttgctcaagcatgataaattgctaagcaacaaagaaattcctgcacacttgcgtgatgttcctgactacctaattgatccgaaaacaaaagaagccagcaacgttgtcaaactttccagggctgctatgggtatcgacaagccccaaaggcggaaacgacagggattcaagggaggatctggcaaaagcagagaccctcttagaactttctctgctgaggg

SEQ ID NO: 53019 - DNA, 328 bp, Setaria italica
  Peptide Sequence Number=SeqID_118993
aggtaagtaagtaccaattaggttaagggaagtgaaatggtatggaaggattacctgttaaacaggattccaattatttaaagctttgatttttttgttattttccattagaaactcgcacagattacttccttggactgacaaggtaacgccaaaaatgacttattgtttctttatttcttaggcattcaatgctagattatttgattatctgatagcaacggatgatgctaaaacaaaggaggagaaacaaactgataaaggaaaacaagaaagatgcaggtgtccgcaaacattgcagcagactttagatgccgaatttggagtt

SEQ ID NO: 53020 - DNA, 154 bp, Setaria italica
  Peptide Sequence Number=SeqID_118994
gacgaacagggagagcaataagaccggtgcatccatatgctgtgaagatgacttgaaagctctcatcccacatatcccaagaagctgtcagtccattctgatgtctgcaacttcaagctccgatgtcgacaaattgacgaagctacttctgcat

SEQ ID NO: 53021 - DNA, 353 bp, Setaria italica
  Peptide Sequence Number=SeqID_118995
gatggcatacttaagaacgacttagagacacaactcaacgaaacatccaggaaggcctgctttgaagcttgacggatcatcctcatcctaacagatatattgagctcatcactatatatgctgaccaaggcttcagtccaccacaagactactgatgcaatttcaagtgatttgtacgtcttcccacatgttatcaaagtcagagatcttgagttcgagtgacaacaagtttcatttgattacaatgggcatcgaacttctggtcccacatttgaggcctggtgagcaattcaatagtagaagaaacaatagttagaaagtaaaaagtagaaattaagtactttaccgacgga

SEQ ID NO: 53022 - DNA, 340 bp, Setaria italica
  Peptide Sequence Number=SeqID_118996
agaaggttacgaacttaattaggttacaacaagatggcatacttaagaacgacttagagacacaactcaacgaacatccaggaaggcctgctttgaagcttgacggatcatcctcatcctaacagatatattgagctcatcactatatatgctgaccaaggcttcagtccaccacaagactactgatgcaatttcaagtgactttgataacatgtgggaagacgtacaaatcacggaatgctagcaagtggttcgagtttgtcgggaggcatcacgactccctttttgtggtgcagcaccaatatgccaccaattgccttgtgttattatggctgccttg

SEQ ID NO: 53023 - DNA, 223 bp, Setaria italica
  Peptide Sequence Number=SeqID_118997
ttgttcaacattgcactatctactcgctatgagatcaacagggcctttgttcaatcttcgccagattgctcttggccgggacataaagaagttccttatggatgccgcagcaggtggcagtaccatggagatgaggatgcggaacagtgggtgttcgcagggacgtacgcggatgagctctttgaaaaagagctggctcaatgctacaatggatagaatgaag

SEQ ID NO: 53024 - DNA, 137 bp, Setaria italica
  Peptide Sequence Number=SeqID_118998
ctgctaggagaagcacataatacaattgatcaagtacataccagttacttcttcgatagtctaaagggtaactggtatgtacttgatcaattgtattatgcgctgctaggagaagcactagaaaaatcattcaaagc

SEQ ID NO: 53025 - DNA, 132 bp, Setaria italica
  Peptide Sequence Number=SeqID_118999
catctctgctggagtacttggtggtgtcactgcaatctggatcctctttgaatgcagtgacaccaccaagtactcctagtcagagatgttcctggtggtgtcactggcaatcttggatcctctttgaatgcc

SEQ ID NO: 53026 - DNA, 503 bp, Setaria italica
  Peptide Sequence Number=SeqID_119000
gaggtgttccggttcgggggtgagaggcagagatggcggcgtcggatgttgagtaccgctgcttcgtcggcggcctcgcctgggccaccgacgacaactcgctccacaacgccttcagccccttcggcgaggtcctggagtccaagatcatcctcgatcgcgacacccagaggtcccgcggcttcggcttcgtcacgttcgcgagcgagcaggcgatgcgcgacgccatcaggggatgaacggcaaggagctcgacggccgcagcatcaccgtcaacgaggcccagtcccgccgccgccgccgctgccggcgactccgctgtacccaactgggtgatgctggagcgcttggccttccggagggacgaccccgcctccttccgcgaggacaggaggaccttcgcttccggcaccacctccgccggcactcaattcgacgtactaaccttaacaaataaacctaaaacgaaaaccgaaaaagaaaacctaaaaccaaaacccaaa

SEQ ID NO: 53027 - DNA, 392 bp, Setaria italica
  Peptide Sequence Number=SeqID_119001
tctggatacttctttccgagggactgggactgatgccgatgcactcaaggggatgtaccgtggcttgtgtgtcactgaaggtggccatcggttggtatttgttgatgttgcccgtcatgatggaaaatgttatggcccgaggatgcccaacactggttcaccctcacctcccggacattgaagatgacagggaattgcaccatgccgtgggagtggaatgaggatgctgttgtcacttcagatgaactatggcatgcaaacaccatggagagtctccctcatgacattgtgatgctcccattgctgagtatggataaggccaatgttgcgcacctttcatttgtctttgtacttgggtattagttggtctagtatttcttcttatttagttt

SEQ ID NO: 53028 - DNA, 378 bp, Setaria italica
  misc_feature (336)..(336): n is a, c, g, or t
  Peptide Sequence Number=SeqID_119002
tagtaattaggtaaaatagttaataggacccgaaggaatagacccaaacaactggtttcaccctcaacctcccggacattgaagatgacagggaattgcaccacgccgtgggagtggaatcaggatgctgttgtcacttcagatgaactatggcatgcaaacaccatggagagtctccctcgtgacattgtgatgctcccattgctgagtatggataaggccaatgttgcgcacctttcaatgcttgactgggatggtggcagattctcattagtttccatcgacttgagtaacatgcaagtgatgggcccagtcattacatacctcggaaggggnggatgatactgctgatgctgacatcgtcaagacaaagcaagt

SEQ ID NO: 53029 - DNA, 502 bp, Setaria italica
  Peptide Sequence Number=SeqID_119003
gaggtgttccggttcgggggtgagaggcagagatggcggcgtcggatgttgagtaccgctgcttcgtcggcggcctcgcctgggccaccgacgacaactcgctccacaacgccttcagccccttcggcgaggtcctggagtccaagatcatcctcgatcgcgacacccagaggtcccgcggcttcggcttcgtcacgttcgcgagcgagcaggcgatgcgcgacgccatcaggggatgaacggcaaggagctcgacggccgcagcatcaccgtcaacgaggcccagtcccgccgccgccgccgctgccggcgactccgctgtacccaactgggtgatgctggagcgcttggccttccggagggacgaccccgcctccttccgcgaggacaggaggaccttcgcttccggcaccacctccgccggcactcaattcgaacgtactaaccttaacaaataaacctaaaacgaaaaccgaaaaagaaacctaaaccaaaacccaaa

SEQ ID NO: 53030 - DNA, 468 bp, Setaria italica
  Peptide Sequence Number=SeqID_119004
gtcactaacgctcttcggttccaaagagagagggaaagcaacacaggcacacacagagagagagagcaagcaagagttcgtcggagctgcagcaatggcgacgcgtcgcctctcttcctgctgccttctgcccgccgccgctgccggcgactccgctgtacccaactgggtgatgctggagcgctgggccttccggagggacgaccccgcctccttccgcgaggacaggaggaccttcgcttccggcaccacctccgccggcactcaattcgacgtctccttcatcctcgccgagcctcccaccccctcgcgcctctacctctcgtggccggaagggcccaagaagcggggccagggcctggtcatggcggccaaccgcaacctcgtcctcttcaggctcgactccctcgtccgacgaatccgagcctttcggggaggtagtgcatgattacttcatctacatagctg

SEQ ID NO: 53031 - DNA, 365 bp, Setaria italica
  misc_feature (178)..(178): n is a, c, g, or t
  Peptide Sequence Number=SeqID_119005
ggtctcctacatccgcttgcctctggatacttctttccgagggactgggactgatgccgatgcactcaaggggatgtaccgtggcttgtgtgtccactggaaaggtggccatcggttggtatttgttgatgttgcccgtcatgatggaaaatgttatggcccgaggatgcccaacacnggtttcaccctcacctcccggacattgaagatgacagggaattgcaccatgccgtgggagtggaatgaggatgctgttgtcacttcagatgaactatggcatgcaaacaccattggtagtagttcttcccttctattgttacttattttgtttgtttattttgtttctttttcccttttatttttta

SEQ ID NO: 53032 - DNA, 339 bp, Setaria italica
  Peptide Sequence Number=SeqID_119006
tctgccactatcccagtcaagcaatgaaaggattatgtgcacactttattccatccgaattccccaagttcctgggtctcagggagagagagaaccatccataagtcctgtcaccatatcggctggccaccgtcgtcatgtgtgttgcttcttcattttccggttcttagatgacgttgtgctggattctactgccgactttgttgattggctacttcaattctgagtttagtgctcagcctttgtgtgttccctgcacttgtgtactataaatagccaggaaaaacacctttaccaggctcatccgttgaactatatgataatgactagatgatgtgt

SEQ ID NO: 53033 - DNA, 354 bp, Setaria italica
  Peptide Sequence Number=SeqID_119007
tgggagtggaatgaggatgctgttgtcacttcagatgaactatggcatgcaaacaccatggagagtgtccctcgtgacattgtgatgctcccattgctgagtatggataaggccaatgttgcgcacctttcattgcttgactgggacggtggtagattctcattagtttccatcgacttgagtaacatgcaagtgatgggcccagtcattacatacctcaaaggggaggatgatactgctgatgctgacatcgtcaaggcaaagcaaggtttatgtgcacactttattccatccgaattccccaagttcctagatctcaagtaacttcagcgttgcctcccacttttacttgag

SEQ ID NO: 53034 - DNA, 289 bp, Setaria italica
  misc_feature (222)..(222): n is a, c, g, or t
  misc_feature (229)..(229): n is a, c, g, or t
  Peptide Sequence Number=SeqID_119008
agaagaagtactaccctacaatagaacaattagtagaatagactacccaattgctgagtatggataaggccaatgttgcgcacctttcattgcttgactgggatagtggcagattctcattagtttccatcgacttgagtaacatgcaagtgatgggctcagtcattacatacctcgaaggggagatgatcctgctgatgctgacatcgtcaaggcaagaanagtatgncacactttattccatccgaattccccaagttcctgggtctcaaggggagagagagaacca

SEQ ID NO: 53035 - DNA, 267 bp, Setaria italica
  Peptide Sequence Number=SeqID_119009
tctattattcggtcttggtcctaccgttcgttctattgttgttgtttgtctttctttctatttttccggtttctttagtattgtacgtttgttgtcttggtatttcttacttgccgtacttttgtttgatttggcttacttcaattctgagtttagtgctcagcctttgtgtgttccctgcacttgtgtactataaatagccaggaaaaaacacctttaccaggctcatccgttgaactatatgataatgctagatgatgtgtccat

SEQ ID NO: 53036 - DNA, 245 bp, Setaria italica
  Peptide Sequence Number=SeqID_119010
aggtgagggtgaaccagtgttgggcatcctcgggccataacattttccatcatgacgggcaacatcaacaaataccaaccgatggccaccttcgtcatgtgtgttgcttcttcattttccggttcttagatgacgttgtgctggattctactgccgactttgttgattggctacttcaattctgagtttagtgctcagcctttgtgtgttccctgcacttgtgtactataaatagccaggaaaaa

SEQ ID NO: 53037 - DNA, 371 bp, Setaria italica
  misc_feature (343)..(343): n is a, c, g, or t
  Peptide Sequence Number=SeqID_119011
gccgtctgagcaaggggtgtctgctgtgaggagggatcagctatgtagatgaagtaatcatgcactacctcccctagtacaacgtttattttgagatgcaagatactcgcgcgtttccggtgctggctgttggtctgttgtgccatggcgaagacgagtttgccgtggcgcatctgaccatcaggtctcgcaaaaaaaaatcagggtctcgcataaaaaaatcagctatgcaagctgagctatgcgtgctacgctcgtcattgtcctgcagtgatgatgccaaatgggagaccaaggtcgttccgctacagtaccaatacgatgatttatactatgattttcngaactgggaagtggatggtgtagttccc

SEQ ID NO: 53038 - DNA, 435 bp, Setaria italica
  Peptide Sequence Number=SeqID_119012
tttaaaccttaaaaattaaacgtaaaaggaaacaaaataaaacccccaaaaccctaaagaaccaataccccaaataccggaccgaccgacgtactaaccgaatccgttaagatccaatggccgccgccgccgccgccgctgccggcgactccgctgtacccaactgggtgatgctggagcgctgggccttccggagggacgaccccgcctccttccgcgaggacaggaggaccttcgcttccggcaccacctccgccggcactcaattcgacgtctccttcatcctcgccgagcctcccaccccctcgcgcctctacctctcgtggccggaagggcccaagaagcggggccagggcctggtcattgcggccaaccgcaacctcgtcctcttcaggctcgactccctcgtcgacgaatccgagcctttcggggagg

SEQ ID NO: 53039 - DNA, 263 bp, Setaria italica
  Peptide Sequence Number=SeqID_119013
gccaactcctctcgtcgtcctcgtctccaaatcgaggcataccccaacccctagccatccccaatccggccgccgctgccggcgactccgctgtacccaactgggtgatgctggagcgctgggccttccggagggacgaccccgcctccttccgcgaggacaggaggaccttcgcttccggcaccacctccgccggcactcaattcgacgtctccttcatcctcgccgagccctccccaccccctcgcgcctctacctctcgt

SEQ ID NO: 53040 - DNA, 203 bp, Setaria italica
  Peptide Sequence Number=SeqID_119014
attgaaatcatcagcatgtgttgtagctgacaattattgtttcctatttgtattgatgaagttctgctactgtattgcaggaagagagagaatcatccataagtcctgtcaccatatcggctggccaccgtcgtcatgtgtgttgcttcttcattttccagttctgttgtgctggattctactgaggactaaactcagaattg

SEQ ID NO: 53041 - DNA, 438 bp, Setaria italica
  misc_feature (438)..(438): n is a, c, g, or t
  Peptide Sequence Number=SeqID_119015
catgaacccagttctaacttctaactgcacataaactaattgtaatggctgttccttttttttctttttgtgaaacgtaatggctgctccttggttttgctttttgctgaatgtgaaggttgattctgtttgctgaatatgaaggttgattctgattgcaggaactcgcttattagggagactctcatctctccaagagggcctaacaggaaaaaacagatttcagcctccaagtactctgattaacgcgcaatcctttgcacctttagttacaattaacaaggatgcatagacactctgcaaaaccttggtactggcgacgagagctgctatgtgtaagaagccccatctgtatgtgtaaacacatagaagaaattgctctcatgcagcatgagttactaatggagtaatggttgacagtgtatggatgcgagttan

SEQ ID NO: 53042 - DNA, 443 bp, Setaria italica
  Peptide Sequence Number=SeqID_119016
attatatatcaatcttgtgaactgtcaatctgattgtcctttagcatcagagcaatgcgtgatggatattatgtgttataaatctgcagttctgattatttaatttggctttatgtgagtgaagtttgttttttctgcctcgtgatattttttcatacaatgcagttttcacctacatcagaacacatactattggcatatggtcggcaacataactcactgttgaggaccattttaattgatggggagacgagaattcctttgtacagagtcttggaggtgtatagagtttcagacatggagcttgtaagagttcttcctagtgctggagacgaagtcaatgttgcatgttttcatccttcccctggagcaggtcttgtttatgggactaaggaagggaagcttaggtttcttcaacacaacagtgcaagcatgggcttgaa

SEQ ID NO: 53043 - DNA, 273 bp, Setaria italica
  Peptide Sequence Number=SeqID_119017
ctaacttttcctaacaaactttgtacacatgaacatgagaatattggccctcaacaggtctatgggagtagggatcttaaggtaagagatagaaaaggatatatcaactaaggaagaattttaaaaaaaagagtatgcataccagggtcacaccatgaaataacaggcaagcgtttgcctgatcgaaaagtagaagcttgaaataaatcttcatcacttatgccccttggtacaatcagttcagaggggtaagttgaacacaatgcataacta

SEQ ID NO: 53044 - DNA, 403 bp, Setaria italica
  Peptide Sequence Number=SeqID_119018
ctagagcatcagaggcaggttgtggccttccacattcacggtataattctgaagctctgcgatagaaatcagatacttcattccagcgtcctagctcctttgctaaagcagcagcagattccatatgcttagcggcatcccatggtgaggagatcatttcttgtcctttcgaggccttctcaaatgcatcttttgctttctcattgtcctttctgaatctatacgcgatggcagcttgctcatacaaggaagtagcgcttttccaatcagcattccaccttgtaaaactcaattttgttttattgaagcttatctctgacaaccacttggaagcttatctctgccaaccgccgactacagtgtcggatttccccactatatggatcgatacaaaattgccata

SEQ ID NO: 53045 - DNA, 235 bp, Setaria italica
  Peptide Sequence Number=SeqID_119019
cggcatgacttggcatgaagaggtgaaactccgtgtaacagcaggactagatccaggtagttccggatcgctcaacatacagcttgtcggctttggtcatgagcctgtcggggtcggaagagctcgccatggtcgggaccgccgccgcctcgtcttcttcgccgcagcgctgcccagattcccacgccttgttggttgctggttcgagcagttgagctcgggtagggaacaagac

SEQ ID NO: 53046 - DNA, 309 bp, Setaria italica
  Peptide Sequence Number=SeqID_119020
ccagatgatgatgaatatgatttggagcaagctgaatctcgtgaacataagaggtggatggagaggcagaacgccaaactacaagagaaggccaaaaaggctgagtatgcacgagtgcgtactcttgttgacaatgcttacaagaaagacccaaggatccagaggaggaaggatgaggagaaggctgagaagcagagaagaaaggaggcaaagtattttggtctaaagtaaactagtctaggtaggtaggtaagttcttagttcttaagttagttctttgttcttttgttaagtttaggtttaaagtta

SEQ ID NO: 53047 - DNA, 119 bp, Setaria italica
  Peptide Sequence Number=SeqID_119021
gcttaggaaggcaatccagaagtatcctaagggaacttcacgtagatgggaggttgtttctgagtttgttgaatctggcttctgcagaagaacagtctttgtggccttgagaatctctt

SEQ ID NO: 53048 - DNA, 152 bp, Setaria italica
  Peptide Sequence Number=SeqID_119022
atgtgcctcgctatgctgtttgatatgcattttgatgaggattacgagaaagaaagttacttcagtgattgatgttggcctctccaataaatagtctgcctacggtctcttccctaactgatctagtaagcatggttccactaacaggtttg

SEQ ID NO: 53049 - DNA, 316 bp, Setaria italica
  Peptide Sequence Number=SeqID_119023
aaataatacaatataatggctagtgattctggtgaaactcagagtcacagtgatttaccttctgtacaaatgacttctacaggagctgattttgagaatgaaagctatcttcagcctggttatttttctgaggagcagacttcttctgactttgttgaaaaacaataactgagtcttcagagagggaatgctcagagagtgagactgaagacgatgctgaacttttgcaaaatgcaactgtgattctgcctatagagtcatgtgctcctgatccttactccattccagtttctgacaagttcaggcatgtggatta

SEQ ID NO: 53050 - DNA, 227 bp, Setaria italica
  misc_feature (223)..(223): n is a, c, g, or t
  Peptide Sequence Number=SeqID_119024
gaattttccatcctgcttgcacccataacactgccctgaacagaagatgcatgattacctgcatcaattaaatggcatgctagataagtgccactagtaccacaaagttgcatcttgaagaggcttgatgggcattgcttgagaaatttttttgaaataacaggattgaagtaagcaaggcaaatggcaacatgctaatcctggtctcggcaccaatgcaacngaac

SEQ ID NO: 53051 - DNA, 320 bp, Setaria italica
  Peptide Sequence Number=SeqID_119025
agtagaataacaataggggaatagactaggtaatactacaagaagagtgcaggagagcctagcaatgcaacagtgctcgaattagatgcttggtctgcagaaggtgctccagcaacattaattccatcaactgctggctcattatttctaggatttgatgaagaagcagatcctccatattggcttggtgaagccattcttctaaggtcactcatggcactggccagtctttctgtgtttgcaatgccaatataggcaaggtgctccagcaactcaaatctgtctgatacacgtggtgttgagccacgtctcgatgattc

SEQ ID NO: 53052 - DNA, 291 bp, Setaria italica
  misc_feature (238)..(238): n is a, c, g, or t
  Peptide Sequence Number=SeqID_119026
gtagatacatggggatgctggtatctcagagagtgcaggagagcctagcaatgcaacagtgctcgaattagatgcttggtctgcagaaggtgctccagcaacattaattccatcaactgctggctcattatttctaggatttgatgaagaagcagatcctccatattggcttggtgaagccattcttctaaggtcactcatggcactggccagtctttctgtgtttgcaatgccaatntaggcaaggtgctcagcaactcaaatctgtctgatacacgtggtgttgagtcc

SEQ ID NO: 53053 - DNA, 442 bp, Setaria italica
  misc_feature (421)..(421): n is a, c, g, or t
  Peptide Sequence Number=SeqID_119027
caagcacacctacctgaaaggacgctatgatgtggttacctccgttgccatcccccttgcacttgctgccaccagcatgttcatgattggtcgtggagtttacaacatgtctcacgggattgggaaaaaggagtgaacttctgtgtggtaactagtgtctttgtacttgggcatggaagtaataccatccaggctatgaagtcttctttgattgcaaaataatactgccaaagaagacttcatagcctgtgtggtaactagttgtctttgtacttgggcatggaagtaataccatccaggctatgaagtcttctttgattgcaaatatactgccaaagacgaattaaaacgaaactaaacatttactgcttcattttctgtttgtatctgtggatatctaatgccaagcaaacttgaaagngcagtcgttgtcgcttgtctt

SEQ ID NO: 53054 - DNA, 219 bp, Setaria italica
  Peptide Sequence Number=SeqID_119028
ttgatgtggggatataatgctttacctagacatgtctgtaattagtctttgattttcgatttttggattttgcagagcctagagcgtcatttgcatactttggagagtctccactcctccctgctataccatctccatccctgtcaacaagatggcacgtcagtctgctctctcgctcgtgagagatcgggcaaaggtgggagcgctgaagcgtttaac

SEQ ID NO: 53055 - DNA, 261 bp, Setaria italica
  Peptide Sequence Number=SeqID_119029
gcgcgagtcctgaacgacctgaaagggaatcacaaggcccacagatggggttgcctgttcgaggtgcttggaagaatggtggggggcagaaactcttttctagcaatggaaggaagtagaaatcattttactgctgcagtgacgtgtccatatacatggccaacaatagagggaagccccattgccaaatgtgagcattttgggatgggtcgatggcggagccgacgcctactcgcaattgacaaagggcggggccctcga

SEQ ID NO: 53056 - DNA, 440 bp, Setaria italica
  Peptide Sequence Number=SeqID_119030
gatcctggtgatatcatgtatttagggcagagtacaaaattaagacttccttgtgaccatatgatggtacttgatctaaataaccattgacaagttctagagcattctgcagcaagaccaataacggagcatctaactttttggaccttcttacatttttcctagttgtctccatgatatcaccaggatcacatgtatttagggcagagtacaaaattaagacttccttgtgaccatatgatggtacttgatctaaataaccattgacaagttctagagcattctgcagagatgaatcaccagaacactcaagtttccccatcaaagcattaatctgtgattctgggctccctccaatctctgtaagtcgatgagaaataccatctttaattgtcactaggccaacatggctcaaaggattctggtcaaagaattctctt

SEQ ID NO: 53057 - DNA, 276 bp, Setaria italica
  Peptide Sequence Number=SeqID_119031
tatgcttttaatttttatttcttgtttaaatttgaggttctgatgctttactccaatacttcacaggttcctttctctccttattaagggcctgtttgaagttgctgtgctatgctacgtagtattcactaattacagcaagactttactgggaagcatctaaaggttcgctttaactgaacagaataatactaggggaagaagtgcttttgaaaggccatccttatgccaaacaaccttatctggtgtctgtgcaacattttgaactatcagtta

SEQ ID NO: 53058 - DNA, 240 bp, Setaria italica
  misc_feature (23)..(23): n is a, c, g, or t
  Peptide Sequence Number=SeqID_119032
ctgtggtcatctccgattctccnccggcggccgcgccggcgccgccgaacccgcctccaacctccttccactgaagcacgccgggtacgccgacgaaggagctcgtggtcctcctcctcctctaccggatgcagctggggcccatttggagttgggattgagtggttcctttctctccttattaagggcctgtttgaagttgctgtgctatgctacgtagtattcactaattacagcaag

SEQ ID NO: 53059 - DNA, 434 bp, Setaria italica
  misc_feature (332)..(332): n is a, c, g, or t
  Peptide Sequence Number=SeqID_119033
gggggacatatgacaagattcaggaggatgcaaaggacctttctcagaaacccccgcatggatattatagctatcttcgtatggcttagtgaaggccacctcagggctgcccatctgcatcccatatgctccacctgtgccccatggtctcacttcaaatttagctaattcagcttatatcagtaagcttgtggacaagaagaggaagcttgaagctgaacttagagcaaatgagcacttacgtgatgagattatgcagcttcgtggtgaaattgagaagctcattgctactaggaaagaactctctgcagaggctgcatctctcatggaanatctgaccagggaaaaatctgttaagcaccagctacctatgctgaaagaagagcttgatggtctgcaactggaacttattcatgtgaggactgcttgtgaac

SEQ ID NO: 53060 - DNA, 374 bp, Setaria italica
  Peptide Sequence Number=SeqID_119034
ccagctttgatgcactgaaaagcattttcacatgctccagagggaactgcaacaatataataatgcctgcttatgaaccaagtcaacattcatattccgtcaagtattgcaacattcgatgctggctgctgtgctttgaggatttttctcatatctccaactcataaaccatctggttctatagggttcctgtgtacatatcttgatgtagggtgtcgcccttacagtacacataaccagatcaactaagaatttcaccctgcaaggacaaaaacaacagaattaggcatttgtgccaaacatataaaaaatcatatgtacatttgcagaatagtaaaaggacataccaaagtatagtatgataaaacaacatg

SEQ ID NO: 53061 - DNA, 248 bp, Setaria italica
  Peptide Sequence Number=SeqID_119035
agtactacaacttcaaatttagctaattcagctcgcatctgttcaatctcttgtgccatagaaatcatattcttctccattgccttcctttgttccaccaactcaaaattcccttttcgctctagttcacaagcagtcctgataatcagatggaatgcaaaggagactgcagatgtacctcacatgaataagttccagttgcagaccatcaagctcttctttcagcataggtagctggtgcttaacag

SEQ ID NO: 53062 - DNA, 347 bp, Setaria italica
  Peptide Sequence Number=SeqID_119036
actacggcacagcagggcctatttagcttgcatcgacccagcgaagggatcaaattcaacccaagaaaaaaaatttggcatgcactgccagcaccaagacatgagtttaaagtttaaacaagttctacatttgatttacatagtaatagcagagtcaaccacctacggatatcgacagtttttcgcaagttcggtaaacaagcgctggaaatcaatgggttatccaccagtgcaccaccaagttactaattggtcaccctcaaaagccaaaatgagccacttcctcatcttcttcatcttcatcatcttcatcatccacaaacttttcgaattcatcctcaaattcc

SEQ ID NO: 53063 - DNA, 197 bp, Setaria italica
  Peptide Sequence Number=SeqID_119037
agttctacatttgatttacatagtaatagcagagtcaaccacctacggatatcgacagtttttcgcaagttcggtaaacaagcgctggaaatcaatgggttatccaccagtgcaccaccaaatatgatatggtatcactcctcgtaccagctgctttcacattcttcaattccaatctgatgttgttaagctttgtc

SEQ ID NO: 53064 - DNA, 263 bp, Setaria italica
  Peptide Sequence Number=SeqID_119038
ctagagctattgcacctgatgttctggactctgactttcttaggagttcccaaggctgttgctgggcttttctcatctgaagccaaagatgttgccgttgctagagctattgcacctgatgttctggactctgactttcttggacttcagactttgcgccatttaatgcgtatgacccgaacatgggattcaacaatgtcaatgattcctaaaggtggcaatattattacctttaacagcatcacgaaattcaatccgctcaa

SEQ ID NO: 53065 - DNA, 386 bp, Setaria italica
  Peptide Sequence Number=SeqID_119039
ttttattctgatttacttatctttatttgttcaaagaaattactttccagtgtaagaaaggaaattaggtccctactaagttttgttctgtacatacagagctattgcacctgatgttctggactctgactttcttggacttcagactttgcgccatttaatgcgtatgacccgaacatgggattcaacaatgtcaatgattcctaaaggtggtgatactatttggggaggtttggattggtctccagaagatggtttgaatgcaaagctaagaagcaaaaaaggcaacgatactggggtttctagtgacattaatgtggaagatgttgaagttgaacctgagcctattaactatggaagattggtatcttttggtaaagatgtag

SEQ ID NO: 53066 - DNA, 251 bp, Setaria italica
  misc_feature (231)..(231): n is a, c, g, or t
  Peptide Sequence Number=SeqID_119040
cttgcttccgcctatttacatgactggccattattcaagtatgttaacttattatttcattttcaggttaccgaatgcacctgacatggaaatattttcaatgtacggagtaggcattcctacagaaagagcatatgtctataagttggccccacaagctgagtgctatataccttttcggatcgacacctcggctgagggtggagatgaaaatgctgcttgaaaggggtntttactagctgacggtgatg

SEQ ID NO: 53067 - DNA, 132 bp, Setaria italica
  Peptide Sequence Number=SeqID_119041
attgagacaggaagctgatgcggtgctgtaccactattttgggaatcgtacggcattgtatattaaaatgtacagggggaaaatacctagcaaatacttcaaaatcaatcaatagataaaattctgctagcg

SEQ ID NO: 53068 - DNA, 203 bp, Setaria italica
  Peptide Sequence Number=SeqID_119042
aggcggcggcggcggccaagagcgcttggccagcagttcttcaagatcttcttccccgaccagtcgcgggagcgattgaaaattccgacggcgttccaccaacacctcaaggagcagcctactggactggtttccctgaaaggtccgagcggcaacacatgctgagacacgcaacagaggataggcaaggcacacaggggata

SEQ ID NO: 53069 - DNA, 436 bp, Setaria italica
  Peptide Sequence Number=SeqID_119043
tagaataactagatggtacaaagtcttgtaaaggcttaaaagaggttgaacagccaagcccagtgtccatccttgagcctccaactgatgaagatagttgtttttcaggatgtttcaagtatgacttgcaagagatgactaagaaacaaagtgatggtcaccaaaatcattatgaacctgaagtttccatgtgtagtgatgatgaagaccattcttcttaccaatctttggaagcatttcaggtcgaggaagacagggacttctcatatctccttgacatacttatatgctctggtatcatagttgctgactggcagctcatttgcaaatcatggtacttgcctggttacccttcagggccccaaagaggcacacacgtgtctgctagactgcacccatgggtgcacatcaatacatggtgcgagtaccttggaaa

SEQ ID NO: 53070 - DNA, 366 bp, Setaria italica
  Peptide Sequence Number=SeqID_119044
tttagttaattagtaaagtaacctaatttactttactttaacctaaattcttttggtaagcatttcaggtcgaggaagacagggacttctcatatctccttgacatacttatatgctctggtatcatagttgctgactggcagctcatttgcaaatcatggtacttgcctggttaccctgttggccctcatgtctttgataggcttgaaaggaattacaacaaaatcgtcacatgggcaaagcctgagaggaggcttctgtttgacctcgtgaattcgatcctttccaaggtactcgcaccatgtattgatgtgcacccatgggtgcagtctagcagacactgtgtgcctctttggggccctgagg

SEQ ID NO: 53071 - DNA, 438 bp, Setaria italica
  Peptide Sequence Number=SeqID_119045
tcttgtattaaaaattggttacttctattttaaagtttcccctaaggttagtattcttgtctttgttcgtcttgtccgtctaggtaccctaattgtattcggtcttcggttggggttggtaaagtctagtctcgttgactgaaccgttgtgcccaggaagcttgtacaggatccgcctcgatgtcgtgtcccagatgtagaccatgcggtcagcgctcccagcagtgaccttgcggttatctggtgaccagctgcacttcaacaggttcttctcaaagttgtgctggtggcctgtaagggtcttgatgttccggttctctggagcataagggcgcagatcccagatcttgagctcattgtccattgcgttggtcaggaggtaagagccatcaggactaagctgcattccagtgatcatgtcctgatgtcctttgagta

SEQ ID NO: 53072 - DNA, 247 bp, Setaria italica
  Peptide Sequence Number=SeqID_119046
taagtagcattattggtgcctccagactggatgtgcgttgctttccaccaggcccaagggcctgatttggatgctgttgaacattagccagctccatccctggccttggggctgcaagagccaaagaattgttgcctggagcagagaacatcttgccgtttatagaaaggatcaagttcctctgccgttgcccggaggagggtgtggtgcggtgcggagagctcggaggaggtgtcgcggcctcgcg

SEQ ID NO: 53073 - DNA, 206 bp, Setaria italica
  Peptide Sequence Number=SeqID_119047
tgctgttgaacattagccagctccatccctggccttggggctgcaagagccaaagaattgttgcctggagcagagaacatcttgccgtttatagaaaggatcaagttccaggaagccctaggttgctgctgcccagtgcacgagaaccacgcgcaccgcaccacaccctcctccgggcaacggcagaggtgcgcggaggagggtgt

SEQ ID NO: 53074 - DNA, 415 bp, Setaria italica
  misc_feature (374)..(374): n is a, c, g, or t
  Peptide Sequence Number=SeqID_119048
aagaaaggaactaggaatttagaaaaagaaaagaactaacagggagttgtctttgaggatgttcctgtggctctaaagttgtttcaatggtgtaatcttcctatctgctttaatcattgattccacattggcgaccaatgaattgataacctcttctttgccagcctcatcgggtggaactggaacagccccagcaattccatttcttaaatcatcttctgtttggatgcgcaataacttgatgtcttctttggtttcctcagaatcaaatgtagaagtcagatgctttcgcacattatcacgggcataaggaaacataacatcagtcacaaatgatattggagtagttgttccttcaatgtcaagtacaacanactttgatgattcgctaattatcctatcagccatggccttc

SEQ ID NO: 53075 - DNA, 164 bp, Setaria italica
  Peptide Sequence Number=SeqID_119049
aagataatgatagcattcagcctgtgtcttggcattgatccaagagtcaccccacacatatattccatggttccgtacaaggacagcagttgcctttgggtatgctgcaatctgttaaataattttgtatcaattgcctacataaatctaaaatgtttttatta

SEQ ID NO: 53076 - DNA, 119 bp, Setaria italica
  Peptide Sequence Number=SeqID_119050
acgttttttagacaagcaaacggcttacttaggaaagaacgtacggtagaattgaataaaatttgagatggactgtcaacaccaagcgattgagagatctcaaaataactcttggtttc

SEQ ID NO: 53077 - DNA, 393 bp, Setaria italica
  Peptide Sequence Number=SeqID_119051
tctttggttttcttctttttgttttcctagtttgttggttattctaaaattaccctactactaggtaacttttcgttaggttctacctattgttgtttgttatttcccaaattaggagcctttgtgcctctctacttccacttgagtatatgtagacctttatgccactagcatgccagttctttagagccacaggaacatcctcaaagacaactccctgtagttctttcttttcaaatccagtcctccatatatgaccctgaagttgtttcaatggtgtaatcttcctatctgctttaatcattgattccacattggcgaccaatgaattgataacctcttctttgccagcctcatcgggtggaactggaacagccccagcaattccatttc

SEQ ID NO: 53078 - DNA, 248 bp, Setaria italica
  Peptide Sequence Number=SeqID_119052
tttccttattcttgtcttttaattctatttgtatttcctactatttggtcgtacctaattgtaatttgtattaaccttctttcttttgtcctagtccttctattcgggttggaacttggaacagccccagcaattccatttcttaaatcatcttctgtttggatgcgcaataacttgatgtcttctttggtttcctcagaatcaaatgtagaagtcagatgctttcgcacattatcacgggcataagg

SEQ ID NO: 53079 - DNA, 227 bp, Setaria italica
  Peptide Sequence Number=SeqID_119053
actcataaggagtattctcgataataggaataaccaattcatcacggtagccatgacctttgattcctttgatcatttccatgtgggtcatcctaaactcctttgcaccagggttaagcattgttgcgatgcaagtctccattccatggctgtgataatgtgcgaaagcatctgacttctacatttgattctgaggaaaccaaagaagacatcatcttctgtttgga

SEQ ID NO: 53080 - DNA, 199 bp, Setaria italica
  Peptide Sequence Number=SeqID_119054
aaaatacccacacaggaactttcgtaggtcaccatgtgttgtattcccaaataggagcctttgtgcctctctacttccacttgagtatatgtagacctttatgccactagcatgccagttctttagagccacaggaacatcctcaaagtactaacttcccttgttagtttctttttctttttctttaaattttccttta

SEQ ID NO: 53081 - DNA, 131 bp, Setaria italica
  Peptide Sequence Number=SeqID_119055
tagaagtggcggcagagctccgccaccagctcccgcgcctcccgcaccggctcgccctgcaggtacgcctccgacgccgacgccgtcggtgccggtgacccatccctgcgcgtagaagtggcggcagagct

SEQ ID NO: 53082 - DNA, 426 bp, Setaria italica
  Peptide Sequence Number=SeqID_119056
tattgggtgtcggcagagaggacatggtattgcgcctgctggggtcactgatgtgtagctggttgaacaaaggtataaagcacaccttgtgcaaaattcatgtttacaaccttctgcagcaacagaacagctcccttctaaacagacagcacaggggtcaatacaaacaggtgactggtttaggtacctccatccacactccctataaattgaattaccataaagccatcagatatttacaatacaaaaaatgaaaaacagtccaatatgataagctgactagtgttggaatttgtactgcatggttaaggaaaacaataacaatgcaaccgctcataattagggaattaagaagtatactaataaataacaccacatagacaaaccaataagaagcaatgcatagttatttagtatttaacatgt

SEQ ID NO: 53083 - DNA, 299 bp, Setaria italica
  Peptide Sequence Number=SeqID_119057
aataatacctttaaagaaaacttcagttttaaatgatatcagtgccaacttccaatgctgattatacttgattgcagattgatatatttgtccaagttcttcaagctgatggtggaacaaggtcagcatgacatcaatgctgcaacactagctcttgcagatgccgggattccaatgcgagacattgtcacatcttgtagtgctgggtatctgtgttctactcctttgctcgatcttaattacttagaagacagtgctgggggtgcagatgtcacagttggtattcttgcaaaaatgga

SEQ ID NO: 53084 - DNA, 405 bp, Setaria italica
  Peptide Sequence Number=SeqID_119058
tatgtcgaagttgataatgaaaaaattaccacatatggaatcaatttaaaaagcatttagaatgtcttcaaagaataaaaacacaatgagagtaccgcatcactagaaactcaaaaggctaacagttcacacattatggttgccattgtacatgaaggaaatgaaggatttttgctaccattaaagatgaacacttgtaactatccatcagcacatcatgtagcgattcaaagttaataccttgtatccatcaagtgcactttggactaattgcgatatttccacaaacacatcttcctgtgaagcattgtggtcaaaaaccttgtcatatgagaaggaaagcttctggcctgcatatggaaaaaaaaataacaacaaaggaacaccacattagtattcgttcta

SEQ ID NO: 53085 - DNA, 487 bp, Setaria italica
  Peptide Sequence Number=SeqID_119059
cccattagattctactgatgttggaaaagagatagatgctccttctggaccatttgaatcaccatcaaaccgaagaagcggtcgaactcgacagaaaaccctgatatttcctttcaattcctgcaaatatgaggccaatcaatacctagagagtgcagcatatacaataataacttcaattgctcatccaaagtatttacaaagaagagatactaataactaacagattaacaaagagataatatgctttcaagtattaccaatatagtattatgagttttttccgcaactcgtcaccttcaacaatttgagactctgcatgtgccaaacgctcctcaaggtattttattttctccttctgctcttcatatcctgtcatcgcctcgattgcagtcacatcagcaagctgcatagatgaataatttgttttctaaacgtattaaaaattggtaactaattgtctattttgtttttcttatttagttaa

SEQ ID NO: 53086 - DNA, 259 bp, Setaria italica
  Peptide Sequence Number=SeqID_119060
tttctttactttatttttacttagtttgttattggtcttactaacgtacttcacccataactcagcctagaatcgaaggaacgggcttgtgtctgacgccttggtatcccgatctcacaagcattcacccttgaagcaaacctcaaggagcatatcgtctccccaacagatgatgcctcaggtgaaatattgacaaacataagagttttcgagtctcctccaaggcaaggctgcaataggtacgtaagttttgagtttc

SEQ ID NO: 53087 - DNA, 246 bp, Setaria italica
  Peptide Sequence Number=SeqID_119061
cggaccgtcctaattgcaatggagaaatgtccgaaaatgaagtcagacagctgatgaaatccctcctacggaatcgcagacgctcgtcatgaccagcagcctcgaggccctcaacattgcccttgcagcagacttgaatgtgcgcgtgcctccgtgccggagacgagacggaagaggacgaggaggcagcgacgccgcgggcgccgagcagcgcggtggagaggaaggccgcccccgcctattttc

SEQ ID NO: 53088 - DNA, 232 bp, Setaria italica
  Peptide Sequence Number=SeqID_119062
aatcatttccagaccaatggcggtcccgacgcagctgccgatgaaatccctcctacggaatcgcagacgctcgtcatgaccagcagcctcgaggccctcaacattgcccttgcagcagacttgaatgtgcgcgtgcctccgtgccggagacgagacggaagaggacgaggaggcagcgacgccgcgggcgccgaagacaagacgacggtaggaagaaggaaaggaccgaccc

SEQ ID NO: 53089 - DNA, 235 bp, Setaria italica
  Peptide Sequence Number=SeqID_119063
gtcctcttggttcttctgccacaaaagttggagattggaggataccacacttcatactctctgtttcatttctatccctctcgatccttctcgcagatcgaccgacccaactgcttcctgtgtttgttgcagagttgttgtctattgtttttcctttgaaactgcctcttatggcttgttcctttttgccgtgttgatgcagtttcaaaaggaaaaacaatagacaacaactctg

SEQ ID NO: 53090 - DNA, 178 bp, Setaria italica
  Peptide Sequence Number=SeqID_119064
tggagatcggccaattgaaaggctagagcgattgggccaatatgggcttaaagtggatcagagaaagaagatggaggaagattggcccgcgggaatacaataaccaactcgatacaagtggtacttgtaaatattcgttttcgtttaaaattagagatagatcctagtcggttaggaa

SEQ ID NO: 53091 - DNA, 254 bp, Setaria italica
  Peptide Sequence Number=SeqID_119065
tccgatcggcgaaaaggttcttcttgttactgttcctgaaggagagcaagctggatttattgaacacgaagagttgaaggaaatggtgcttgcaattctgaatgaatcagatctaattctttctgatgacgctgtcgaacaaattgtggatcagactttcaagcaagcagacctgaacgacgacgggaagatagatcctgaagagtggaaggcttcgcgagtaaaaacccggttgctgaagaacatgacgctta

SEQ ID NO: 53092 - DNA, 159 bp, Setaria italica
  Peptide Sequence Number=SeqID_119066
ttcgtgttcaataaatccagtacctctcagatcatatagccgaagagttgaaggaaatggtgcttgcaattctgaatgaatcagatctaattctttctgatgacgctgtcgaacaaattgtggatcagactttcaagcaagcagacctgaacgacggac

SEQ ID NO: 53093 - DNA, 359 bp, Setaria italica
  misc_feature (71)..(71): n is a, c, g, or t
  Peptide Sequence Number=SeqID_119067
acggatgctttgaaaggaacaagagttgcttaagtgcttgtgatgaggatacatacaataagaaactttanggttggcttggagcccttcatagacagcttcaaagatctcaatatcaaattcgatatgggcatcctgttcaatttgttgttttagcactggctgctcttgtaatatttgtgtgcatattgaggacaatttggtgactgtttttatttggtcacaattggatttgaagcctcacaagatcagcagcctattgtttgtggtaatcaaggttgaaaggcatgtagtgtaatctgattggagcaacttatcttgccacatcttctgggcagtctacctcatcctcggaaaaa

SEQ ID NO: 53094 - DNA, 272 bp, Setaria italica
  misc_feature (265)..(265): n is a, c, g, or t
  Peptide Sequence Number=SeqID_119068
gcggcgagcaaaagcgggcggaaaggagagagagaaggggaaaagagccaggctcgccgttcccccaccaccaccgcgccagcagctcaaatcctgaatccgatctctctctcgcccgaggttctcggttttgacccggcaaggggggcatggcgacgtcgttcgaccgctgggagaaggaccccttcttcctcgccgccgaggagcttgatgaactggagcgtgcaatccgatcgaacgaccatgttatctcagcaaggaaaanatacaag

SEQ ID NO: 53095 - DNA, 300 bp, Setaria italica
  misc_feature (298)..(298): n is a, c, g, or t
  Peptide Sequence Number=SeqID_119069
tgtactaaattacaggcagaaaaatcatttctcaaaatttgggatccctttgcctgacttcatggaagtagatactttcccctgcttcctctatactgtgtaaagtatctacttccatgaagtcaggcaaaggggaaaggtttggctatcctctaatggtaaaaagcaagaggttagcatatgatggtcgaggcaatgctgttgcccaaaacaaagaggagctatcttctgttgttgcttcgttgggtgggtttgagcgtggcttgtatggttgaacggtgggctcctttcataaggngc

SEQ ID NO: 53096 - DNA, 262 bp, Setaria italica
  Peptide Sequence Number=SeqID_119070
gcggatgtatgattttgccaagtctgcgaaggataggggtgtggaggtcataattatagaaacacgagggctagctttcttggggtcatatgtgtcgctttgcagcaacttgtccaggcgtgattttacactcatcttagaaggccccacaattgtaatatgacccatctttctttgctttcgcatctctggttttgcataccaatgaactgatgcacctggaatatttaatgccctaccaattagctgatgagccaataag

SEQ ID NO: 53097 - DNA, 293 bp, Setaria italica
  Peptide Sequence Number=SeqID_119071
taaaaagaaaccaaaagaaaccaaaataaacctaaagaacaagtactaagacaagaagacaatacaaaataattcaaaatgtgatgccatatgccaaatgcttccacggaaattcggtggcagcaaagggataacaaagatcatcgattttacgtacagcagatgcttcctccctgtttttcacgagataatgacatcttcaacaggttaaatattgctctatatcggaggaaaagtagctaaagtagcctcaacttcttaaaaagatacattttcatcttcaactgccagac

SEQ ID NO: 53098 - DNA, 225 bp, Setaria italica
  Peptide Sequence Number=SeqID_119072
aaggcatctcatcgccggtcgctacagcacgcctcctcagctgctcgtgaagatcagcagcattgaggcgagccctgtggccctctacttctcagcctcgtggtgcccgccatgcaggcggttcactcccaagcttatcgaagcatacaaagaactggcttctcagggcaagagcttcgaggtcgtctttgtttcaggtgatcaggatgaggaagcattcaatga

SEQ ID NO: 53099 - DNA, 231 bp, Setaria italica
  Peptide Sequence Number=SeqID_119073
aacataattgaaaagacacaattgtttacatttggtgaatgaattcagctatcttgccatgcccaaccagaatgtggtaactgaatagctctgtgcattctccttatcttatcaagcaggtgaagatcagcagcattgaggcgagccctgtggccctctacttctcagcctcgtggtgcccgccatgcaggcggttcactcccaagcttatcgaagcatacaaagaactgg

SEQ ID NO: 53100 - DNA, 363 bp, Setaria italica
  Peptide Sequence Number=SeqID_119074
aacaaattaacaaaataagaagtaactttagacaaaagaatagaccaataggttggcggtccctttctctgactctgaaggccgtgaggcccttgatggccggtttaaggtctctggtatcccacaccttgtcattcttgatgcaaaaactggtgaagtttacactgaggatggtgttggattagtgagcgagtatggtgtagaggcttaccctttcacaccagagaggatcaatgaactgaaggagcaggaaaaagcagcaaaggagaatcaaaccattaaaagcgtgcttggcacatccactcgggactatctaattacaagcaagggagacaaggtacccatctctgagctcgaggggaa

SEQ ID NO: 53101 - DNA, 302 bp, Setaria italica
  Peptide Sequence Number=SeqID_119075
cgtgccttcctgcctatgcttgtcaaggaatacaacaagatcaaggtgaagcacagtgattttgagatcgtcttcatctctagtgacagtgaccagagctccttcgatgaattttcactgaaatgccatggcttgctcttcccttggaagatgaacgcaaggcgttcctggagaagagcttcagaatccgtgggatcccttcacttgtcgccattggttccttaattgggtctagtacttgttctagttagggtattgtctaaaggttcccttagttctttgtttattttgttttattttta

SEQ ID NO: 53102 - DNA, 392 bp, Setaria italica
  misc_feature (359)..(392): n is a, c, g, or t
  Peptide Sequence Number=SeqID_119076
aacgaaactttaagaaataactaagaacaaccccaaagtagacgacgactaggacaagaaggaggaaaagaagggtgaggaggacgggaaggccgctgaggaaaccccggctgggtatgtgtgcgagggaggtgtgtgcaggaaggcctagagctgttctcctgggttgcgtttgccagttgcagtgctgtctgaaatggtgtgtggtgtggtaataaataatcatcagatcagttggtttgcttggagttgaggtgtttggtctgtcgatgtctgtattaatcgatcgtagttgcaccctgaactttttaggagtatatgtgagtaccttttcagatcaaataaatggttttagcctnnnnnnnnnnnnnnnnnnnnnnnnnnnnnnnnnn

SEQ ID NO: 53103 - DNA, 474 bp, Setaria italica
  misc_feature (2)..(2): n is a, c, g, or t
  Peptide Sequence Number=SeqID_119077
tnttctagggtctaagtagtctttcgtaggttcgttcttttgttttctaggttgtattctaggtattgtaggtaagtctatttctaattgtagttacttttgtctaaagtattgtcctattggtttggtcggttccctttctctgactctgaaggccgtgaggcccttgatggccggtttaaggtctctggtatcccacaccttgtcattcttgatgcaaaaactggtgaagtttacactgaggatggtgttggattagtgagcgagtatggtgtagaggcttaccctttcacaccagagaggatcaatgaactgaaggagcaggaaaaaagcagcaaaggagaatcaaaaccattaaaaagcgtgcttggcacatccactcgggactatctaattacaagcaagggagacaaggtacccatactctgagctcgagggaagtatgttggtctgtgctttgtggtgcctggctat

SEQ ID NO: 53104 - DNA, 253 bp, Setaria italica
  Peptide Sequence Number=SeqID_119078
atgtcgtgccttcctgcctatgcttgtcaaggaatacaacaagatcaaggtgaagcacagtgattttgagatcgtcttcatctctagtgacagtgaccagagctccttcgatgaatttttcactgaaatgccatggcttgctcttcccttggaagatgaacgcaaggcgttcctggtagtaagtacctttctagttaatttccgtttgggttattttccctttttctttactttttgtttttcgttttctttt

SEQ ID NO: 53105 - DNA, 213 bp, Setaria italica
  Peptide Sequence Number=SeqID_119079
ttaagtacaatgacaccaattgtcttcccatcggtaccaataagaacaagtgtaggaagacaatgaacaccaatgttgcggacataattgaagagcatggttttgaggcatgggagggcttcccctttagtgctgagaagctggaaactcttgctgagaaggcaaaggctaagcagcatcacagaccttggagtcccttctaatcagtggtga

SEQ ID NO: 53106 - DNA, 186 bp, Setaria italica
  Peptide Sequence Number=SeqID_119080
tgttgtacctagtagtcttcctttcgtattgtaattttttcacttgaaattgccatggcttgctcttcccttggaagatgaacgcaaggcgttcctggagaagaccttcagaatccgtgggatcccttcacttgtcgccattggtcctaatgggcagactgtcagtagggatgcaaaggcccagct

SEQ ID NO: 53107 - DNA, 247 bp, Setaria italica
  Peptide Sequence Number=SeqID_119081
gaaggcgctttggtctgcacaggcatcccggaagccgagacagcgatcgtcgccgtcagcgccgtcactctcctcggcgcaatcctccgccgccgccgccgacacggggaaagcaaggagcaccaaggtcaagcagcatagcgcaagcaacgaacccccggtaaaggaggagcaggaaggcgccgccggcgaagagcggtggcggcggccgctcatggcgaaggaagcatgcggcggtcgagacttc

SEQ ID NO: 53108 - DNA, 235 bp, Setaria italica
  Peptide Sequence Number=SeqID_119082
tcatagggatcggaaagatgccagtagtcatgactaactcaagatctctcttaaccatagctgaagagaagtcagcttgaaaagaaatgagcattcttattgattcacttggtgctaagctaaatcccttgcagttgtccacagtgggaactcaacaccatcttcgccattgtcacaaagttcaaccccaaacaaggttggtccttttctggtgcaccatcagagctgaagcatg

SEQ ID NO: 53109 - DNA, 203 bp, Setaria italica
  misc_feature (177)..(177): n is a, c, g, or t
  Peptide Sequence Number=SeqID_119083
tctattattacgttattaatatctccatcagtctcttgaggcatagcaggctttaataacgtatatgcaagtgacggttcgcaaaatgatactaccatgccaaaacttgatgcttgtgaagctgttcatgttactgaagaagcagatcagtctttgcaaataccagcagaattttcngatgcaaaagaaccttctattgacga

SEQ ID NO: 53110 - DNA, 319 bp, Setaria italica
  Peptide Sequence Number=SeqID_119084
gcttggaagatgcttccaaagaatctgttattgctcaagaagctgatcagggccatagctccgcagatgtcagttctgatgcgcaaaatgaatctgagcttaccacaagtgagttggcagttatagccatcaccgatgaccatgaaaatgaattcaagatttccacatgcaaatcagaagatatttttgaggaatctgttattggtgaagaagctgatcatgatgagagctctgcatatgtcggtgatggcactcaaaatgaatatcagattccacttgaagcaaccttactagaagtagaacaaagtaggtaaaccaa

SEQ ID NO: 53111 - DNA, 492 bp, Setaria italica
  Peptide Sequence Number=SeqID_119085
gacctgtagatcaagacattgcaacatgagctttcatgcacaacagcgctgcttaaagtaaaggattcagagctcgaggtaagtaagcgcatggcttaactcagcttctttttgttatagatgccatggttttatacgtatgtactgtttgcagcgaaagaataaaactgctaaccaacggcggaaggaagtaaattcacaggaggtcttgaaagctatatcttccaaaggtgcagctgttgaggcacatcaaattcatggctcaataaccagtggtgttgaacaccagttgcttaaatctcaatgtaaggctcactcttcgttgttttgtgaatttttttactgcactcagcaatcatttcatctgttgtacctcaaggttttgaactgccttatttaacagaaatcattgtacaacttctattttgccttgagttcagccactgttaagcttctagttttcacttggttcaatctcttctcagctgccgt

SEQ ID NO: 53112 - DNA, 248 bp, Setaria italica
  Peptide Sequence Number=SeqID_119086
tgaggattatgtaaagatgcctcttattttttgtttttagctatatccatatattttctgcatttatttcccccaattctattaacacccgtttgcattaattcaggataaggtgggatcttggtatagcaaccctggaactggtgtcgctggttcaacaagcactggcggtggagttggcaagtatctaaaagctcgaactgctggctctgttgatgtgactgtaaatgctggtgcacctgatgatt

SEQ ID NO: 53113 - DNA, 267 bp, Setaria italica
  Peptide Sequence Number=SeqID_119087
ccgggtgcagcaaggagggcgcggcgttcgccagggcgttcgacgacgccagcgagcaggtgctgtaccgcttcttcgacgtgttctggaaggccaagaggctcctcaacgtctcctcggaggcggccatgaagcactcggtccgcaccatcaacgacttcgtgtacgccgtgatcgacaggaagatcgagcagatgggcagaaaccatcaaggaaattacgaccaaagaaaagaaggaacaatacctagtacgaaggttacctaga

SEQ ID NO: 53114 - DNA, 292 bp, Setaria italica
  Peptide Sequence Number=SeqID_119088
tttattttcttttgtttctttttgggtttaaaggttagttttcgttcgttactaggtctagtattgtaagatcttcgcggccgtgctgctctacctattcagattcgagatgtgggatgccagcgccatcatgggttaccggcctatgctgacgctcaagatggatggcccgctctacgttcgcgcgtcgctccggcgatgagatgcggttggaggttagcctgatgccctgatgccaaaaacgtcaaacgcctccgtgtgtcccatggtctgatcgtgtctactttggaaa

SEQ ID NO: 53115 - DNA, 257 bp, Setaria italica
  Peptide Sequence Number=SeqID_119089
cgtgtctcaggggaaggaggcaattactttagtttgatgagctcgttttgagcttgatttcttatcacgtgttcgcttccctggtaacttcttggctgatgaagccttcccgggttcctttgctgcattgtctggaagcatctttctcggttgttcagtcataccaccgagaactgttggaacagaggcaggctaccttaagaagtcggcctccctgcggcctcccatggtgcagggcaggctaccttaagagtcgg

SEQ ID NO: 53116 - DNA, 353 bp, Setaria italica
  Peptide Sequence Number=SeqID_119090
taactgaatactggaagtgaagtggttgcggcgatggtttgctcaaccagattacgaaggatccaaacatttgcaagcattttgattcaactgagtacctggacagtggaaacatcctccagatattctccaaactgacaagctgatgtaggatcttgcttggtagagttccatctgattctctggaagaagtgattctatggctgaaagtgattctctttgattctctagcgtaaactcttaaaaatcaggatattctctttgattctctagcataaactcttaaaaatcaggatggagaatcacttcacagaatcaagagtaggtattggtagtaattctactttctacta

SEQ ID NO: 53117 - DNA, 201 bp, Setaria italica
  Peptide Sequence Number=SeqID_119091
cggcgatggggcggctgttcctgatgcacctggacggcaacgtctacagctgcaagcactgcaagacccacctcggcctcgccggcgacatcatctccaaggccttccactgcaagcacgggaaggcctacctcttccataaggtttaaggtgtcaggccctgacggaagccagtactggattgcacctgatgctctattt

SEQ ID NO: 53118 - DNA, 232 bp, Setaria italica
  Peptide Sequence Number=SeqID_119092
ggctaccccagctccccacttgaacaggagtgctcccctgccagagccccacaggaatgacagctgtgacagccacactgtttcctgtgaacctgctgaatctaatggtgctaaggctgttgttggtttcaactcagccgtaactttcttcttcttcgttgttgccttatgattacgtagttatttgtaggtttagtagtcgttaactagttccgttactttaagtttcgtt

SEQ ID NO: 53119 - DNA, 394 bp, Setaria italica
  misc_feature (169)..(169): n is a, c, g, or t
  misc_feature (181)..(181): n is a, c, g, or t
  Peptide Sequence Number=SeqID_119093
gttcttggccattaatggcattatcaaaagctgcagtgttcatgctaaaggaaatgcaatgtattctcacattgtttcatgtgtaaatgtataggtcgagtggagtaaaccgcagagtgcacttcatgtggtcgctgtttgtggaaaacttgtttcagcttaactgtanaacgggattgancctttgccttgtattgcagagtttctgatacttaatgttgcaatcagaaaatacaaaaagtctataaaaacccaagaaccattttgacaaattataaaatggaactcaaagttttttaatatcaaagaatttgctgcttcaaccgccttttttatgaacttgttaactttcttactttgttttcctaattgttcttacttaggttaaacctta

SEQ ID NO: 53120 - DNA, 338 bp, Setaria italica
  Peptide Sequence Number=SeqID_119094
ttgttaggttagttattcttacgtttccttaagttccgttacggttagtagtctagttgttgtatttgcaagaatctgcaggaagctctgatgatggaggtggccagacagagcattacgtcaaaagcaaggattccactcacacgaatggcttcgtgcagatgggtagaagaaatcattctaatcagctttgctttagttctttccaagagcagtcatgctcatccaatcattatgagaatgacactaaccctcacatgaatgggttcgacatgaagcatgaggtaaagattgccaagtacaaagcacggaaaatggcacaagttgaagagggacta

SEQ ID NO: 53121 - DNA, 295 bp, Setaria italica
  Peptide Sequence Number=SeqID_119095
gaacagcactcgagaatctggacctgatcctattatgcctcgataaaattgttgatggagggattgtacttgaaacagaaggaagagagatagctgaaaaggtgacgggtcatggattggagagtgcttcatcagctgagcagactttagtcaatgccctaacgcaagcaagagagcacttggctaagtctcttctcatgtgatgctgtgctttccattttggggtgaagatggagtatcatcctatagcaatgtattatatcattaaaacattgctataggatgatactccatc

SEQ ID NO: 53122 - DNA, 260 bp, Setaria italica
  Peptide Sequence Number=SeqID_119096
ttacattaaccccaaactatgtgctaagaagtttaataatgcaagattctggagcttctgttgagtttggtgggaacagattagcaattgaagcattggttcccaccaaactcaacagaagctccagaatcttacattaaccccaaactatgtgctaagaagtttaataatgcagtggtgtgaggaaaaggggatcgaaccacctagcagatctaaaagtgatggctcttctcttgaggttggtgggaacagattagcaa

SEQ ID NO: 53123 - DNA, 324 bp, Setaria italica
  Peptide Sequence Number=SeqID_119097
ttgtttaatttggtttacttttggttcggggttatttcgggttaggttcttctagtctaagaacttcctcagcttgacatggcggctcatgagccgggcggtacaggctgcgccggcagtggatcgccacccagaactcgcccttctcgttggtccgcacattgtctgggaatccaggcaagatggcgaagagatccacggtgcctgccttctcgcctttcaaccagtatctgctcaacctgccgcgcgatccttcgcagaagacaaagaatgagccatccttgctcatggacacaccattgggaaattggaggttgcggtgca

SEQ ID NO: 53124 - DNA, 502 bp, Setaria italica
  Peptide Sequence Number=SeqID_119098
tattgtaagtagggtctaagtaattttcttggtttagtagttttgtagtatttgtttgtactaagttactagggttgtcctattattgggtaatcaagctccttataacgtgacggtaactttacttgttcccgggaactatcagggagataggcgcatcgtggtgagcagcatgtatcatcaaccagggaagcaacggatgatgcttcccaccgttcctgttagaactactggaactgtgcttgtggagatggtcgataaaaatgggctgtatttctctgacgagttctcactcaccttccacatgcattactataagctgctgaatggcttgtgctactgccaatgcttgggatgtttggtgttctcgtcatcttacggccccaagaaggtgcaccattgccatcattttcacggaatattgactagtgactatgccagggccccattgaagcagatgaagctgctaggagtatccccaacattcgcatgatggggactt

SEQ ID NO: 53125 - DNA, 387 bp, Setaria italica
  Peptide Sequence Number=SeqID_119099
gatgttgtggtcccaactgtgtcgggaaacatctatgttcttagtggaaaggatggctcaaaaattcaacctttcccatatagagcacatggaagaatcatgagtcctgttctactgctcgacatgagcaaacatggagaaaatacaaaggggttaactcttgctacgacgtcatttgatggttatttatatttgattgaggatcaagtggctgtgcggatgttgttgacattggagaaacctcgtatgtcatttcttctttgcttggcaaggcatatgatatcattgttgaggattgggtaccgcacttcaataaaatgagctgattgttgcactttaacttgcaggtacactatggttttggctgacaatgtggatggcggagat

SEQ ID NO: 53126 - DNA, 240 bp, Setaria italica
  Peptide Sequence Number=SeqID_119100
ctcacctccctgcatacttcctgatttattttgatctattggaggagattccttagaagcagcctctttggcaattgaactgtcatgaacatctggattggagcggtcaactggatctggatttagctactgccaatgcttgggatgtttggtgttctcgtcatcttacggccccaagaaggtgcaccattgccatcattttcacggaatattgactagtgactatgccagggccccatt

SEQ ID NO: 53127 - DNA, 285 bp, Setaria italica
  misc_feature (229)..(229): n is a, c, g, or t
  Peptide Sequence Number=SeqID_119101
tcgttctaatttttgttattggtttattttattattttgtatttgtagggtattctaagttggtcttgttgtcggtattgtttgttgacattggagaaacctcgtacactatggttttggctgacaatgtggatggcggagatgatcttgatcttattgttaccactatgaatggcaacgtcttctgcttttccactccttcaccacaccatcctctcaaggaatgganatcatcaaaccaaggaagaacaatgctgcatatcggtacaaccgtgaaaggtatta

SEQ ID NO: 53128 - DNA, 440 bp, Setaria italica
  misc_feature (386)..(386): n is a, c, g, or t
  misc_feature (419)..(419): n is a, c, g, or t
  Peptide Sequence Number=SeqID_119102
aattgcaaatctgttgtatcacataaagttgatcggtactccacctaggtgaataaatatacaaggcatgttaagctatcagattaagaacaaaatagctatatgattttcatcattaacaataccttaaatccacatttcactgcgatctcctctaacacacccaatattcctccatgttgtatgaagtatcttcctgattccatttgtctacttctttgtcttgaaggagcatgccgagtcgctatgtcctccccagaaaaggatctataggttgcaggtgcatggttatgaagcattcgatgatcttcattgtgaagtggccgaggaggatatctctggttcttatagctatgtctatctgcagatataggattgtccccgtnagggaatatgatggatgctgtggttgcttattntcattaatttacagagtcaga

SEQ ID NO: 53129 - DNA, 377 bp, Setaria italica
  Peptide Sequence Number=SeqID_119103
ctctgtagctaagcaaagcggaatatacaattttgcttctcacatgctgcttacacactgatatggtataaacgtgaacccaatagtagcatcgatgaaagaacaaaagaatgatcacaaaaagaagtaaaaatatacaatctttgccctgatggtggggaaaccactctcgtcctcactgcccaagcttcctccatattcctttctttgctgtcaggcacttcaatttgccaaacacaaatccggacttctgagggttgccatccacgagggagttctcgtatatctccttgcattcttgtacaaccaaaatcatcaaatgttcccctgtcaataagcaagcgtttggcactttttgtttggtacctaccgttcct

SEQ ID NO: 53130 - DNA, 281 bp, Setaria italica
  Peptide Sequence Number=SeqID_119104
tgtgagcttccataccttatgctcacaaacaatagaacaacgacctaaagagcacttagtttgattacttataaaatataagtatagcaacacaaaagagctgtccggtgtggctactagtatgtacttacctcaaacttgtacctgaagatttataatgatctttttgttcgaaattaaggtcaagcagggtcagaattgcggttccaaactaatgacggttgctggaataaaaaaaggtcaaattggattggtttatgatccaaagaacaaaaaggtga

SEQ ID NO: 53131 - DNA, 232 bp, Setaria italica
  Peptide Sequence Number=SeqID_119105
gctgttgagaatacatactagttttccttaataatgcaataaggcaacaaaatgtaatcttgtgtacacagaaatcaattgcaaaccctgagcccacatttgtataagcttgtaaaggaaagtggtttaggtgaagggtgtgaaaatcaaacatacaagtcccaaaagttctcaaaggagatatagtgcatgctcatacaaatgtgggctatttggtgttgatctgcatggt

SEQ ID NO: 53132 - DNA, 197 bp, Setaria italica
  Peptide Sequence Number=SeqID_119106
taagctatgatagcagaatgtttttgtttctacaattcgaggatgtgtggattgcatttcctggcctcatctttttcttgttgtaacttaggggcgcattgtggaaggtgattctgaacttattgatgattctgagttttatcagcaacttctcaaggaagtttcttgaagtacaatagtagaataagaaggggaca

SEQ ID NO: 53133 - DNA, 427 bp, Setaria italica
  misc_feature (109)..(109): n is a, c, g, or t
  Peptide Sequence Number=SeqID_119107
aaatcacatgtaatagagtaagcaaacaatatcaaattctctgagagaaaaggcattctgtgctgcagtcatgcagacgacagaatcatgaaatggttgcgccatctcngggaaaaaaaggggagtggtccaactaacaattgcaggtagatatcacataaatgcacgctaactactaccaacactaagtatctactaccaaacatattagcagagaaaaccagccatacgaaagttaccaggaagcacatctacttgacggacatgctcctcaaattgttcagttgaacgaccccaggttgatactctctcaagattgcaaatagaccaatatggcaaaccaaggacctcacagttagagaaattaatatttgaggtgttcttggtatccaagtcatgcttcagaaccctctgaccatcttcaaac

SEQ ID NO: 53134 - DNA, 480 bp, Setaria italica
  Peptide Sequence Number=SeqID_119108
caactcttgcaatgggtggaaaccagtatgacgatgactgggtgttgcccagtgctgatatcactcttgttcttgttgggaaacttggctgtggaaagagtgcaactggaaatagcatccttggacaggaagtatttgaatcagaatactcccatgttagtgttactaatacttgtcagatgggaagcaccaccctgcacgatggccgcacgatcaatgttattgatacaccaggtaagaattccctgtttgatgttatcgctgtctgttcaatctgttggctttttggcattgtgaatttgagatacctttatttgatcttgtgttgcatgtcactcttaccttctttttctggttatgttgttatgattaattgattatcgtttatcatagaagtatcattatcattcatccttgaatatgggaaattagtatgtttattctttgggttttgtaactttgttaattcgtcattctagt

SEQ ID NO: 53135 - DNA, 270 bp, Setaria italica
  Peptide Sequence Number=SeqID_119109
ttctgatggtttttcctgccacacatcggttttctcaagaatctgaaagtacaattgagagcattaaggcattctttggggaaaagattgttaaccacatgattttagtttttacatatggagatgtaattggtgaatctaaattgaagaaaatgcaaaataatgcccctgagtgtttgaaggttaccttttactccctttttctttctttttctaatgccatgccgatataaatcgatttctcacctcttttcatcacctaagtcatga

SEQ ID NO: 53136 - DNA, 225 bp, Setaria italica
  Peptide Sequence Number=SeqID_119110
gtctatgatcagctttaatgcataacgacaaagttccccactgtataccttcagatagacggtctaatatttccttgagaaaacttcaaatcttctgacattttttgttcatatgtgcgtcatgcaggaaagtcctatcaagtgggcatcacgctgggacacctaccttctgatggcagacgatcaaatccattggttttctattgtgaattctctgatgatagt

SEQ ID NO: 53137 - DNA, 271 bp, Setaria italica
  Peptide Sequence Number=SeqID_119111
tttttttttttttatttctaagtactcccgaagggtccatatattcaagaactgtggaagtacagaaacaaacacaaaggtattcaatgaattcatctaaatgtcttacaaaaccatatgttacaacagacaatatatgtcattataacctgataaggcttcttgggaacaatagcatcacccttctcatcaaactccccagcttttcttttcacctctccttcacagtttgctgctaaatgtcccacctgaccacacaagaagcatttat

SEQ ID NO: 53138 - DNA, 257 bp, Setaria italica
  Peptide Sequence Number=SeqID_119112
gaagagggccttatggaggcggaccaccacccacaagggctgattcacgatcacagcaatcacagaaccgttacggtgctttggacagaagttccaaccggagacctccatctggagggggctggtaacctccaccacgaaccccaggatacgctgatgggggttgttgcccatacagtccaggacccggtggcagagcaacaggctgtgatgaatacatgttgccaccagtctgctggtatccatatgcaggtacg

SEQ ID NO: 53139 - DNA, 207 bp, Setaria italica
  Peptide Sequence Number=SeqID_119113
ccagtttgtccacaggaacaccacagaaacaacaaaaagagatgacaaaatacctgttgctattatcatgaggcctcctgccgctgtcttcatgccacagcactggaggtggtttcagatccccagcttcaacagtcttcttgggtatgataacaccagctggaggccgggctatgtgcttatgatgatccggaagcttgtagatcg

SEQ ID NO: 53140 - DNA, 255 bp, Setaria italica
  Peptide Sequence Number=SeqID_119114
ctgtgaggtatgtcaagaaacttgcattgttcctcggtgtcccattcaccggcgaggaagaagaggatggtgttcatgagcaggtggtaaggttgtgcagctttgagatgcttagtggcttggaggctaatagggccggaaacttgaagctccgtccaagacccaatgtggtctacgagaaatcagccttcttcaggagaggcaaggtaggtgattgggtaaattatatgagtgaagagatggggagaaagttgg

SEQ ID NO: 53141 - DNA, 187 bp, Setaria italica
  Peptide Sequence Number=SeqID_119115
gcagaccatcctgggggtgctgatgttctgcttgaagcaaccggtaacggatgctcaagcagaacatcagcaccccaagtatttggaagaccatcctgggggtgctgatgttctgcttgaagcaaccggtaaggatgcttcaagcagaacatcagcaccccaagtattttggaagacccatcctggg

SEQ ID NO: 53142 - DNA, 301 bp, Setaria italica
  Peptide Sequence Number=SeqID_119116
cagagtgaattacatggtacacactgtggtctgcatgccagggactcacgcagcatttgatccatagtttcagcaatgtttgagtgctaattgtcggttagttgctctttttggatttaaccatgcgctctgaatgtttcagaaatggttaacagtttggcgggatcactggtgaggcggcaaaatccccatcgacaggaagatgatcaagctgtactgccctttcatcgcatccttgcattgcatctgtgatctgtcatagcaggagtagcaggaatccttgctagcttttaatagcaca

SEQ ID NO: 53143 - DNA, 314 bp, Setaria italica
  Peptide Sequence Number=SeqID_119117
ggaatggaatgcagcaatttccaaagacagttcagcgataagagtgagtctaaattgagctctgtaactgaatctgatgtggcttcttcagttgctgatcaggaggatcacaaggaccatgatgaaaaggatttacacatggaacacgagtcacctgctcttgtgagacaggatagtgaccttgcggatgttggaagtgactgctcagatggaatcaactccatcgatgtcactgttgtctagttcaacatctatggagttgaattccaatactagaagacaagtacaactttacctaaaactaattaccgtta

SEQ ID NO: 53144 - DNA, 220 bp, Setaria italica
  Peptide Sequence Number=SeqID_119118
ggagctgccaagtattgatggagcgctcttgtttagcatcaggagcctgccactgccactgccactgtgcatatactcttggcactgctatcagagaccttactgaacactgcatcaatgtcatcgtgagtctttgcctcattagaaaccatattgcttttactctccacagctaaagcatccccagcatctccaacattatgtggactttcgggatgca

SEQ ID NO: 53145 - DNA, 199 bp, Setaria italica
  Peptide Sequence Number=SeqID_119119
ctccactctctttgggctccgaatcaacattaacacctgaggtgtgtaaaatttcagattccatgattagccctcagacttctgacaatgtcagcttgaccatgtcggaacccagtgctgaagactccagggagcagtctccagtggttgatgacctaaatggccctgaatttagttggtcttttggagcatctcatgg

SEQ ID NO: 53146 - DNA, 348 bp, Setaria italica
  Peptide Sequence Number=SeqID_119120
ctttatttcttttcacgaaatcaaggagcattagtcacaaacgattaacctacatatattaatatgagatgtttggtcataattgcaagtgggttctctgcatggagaatctgtagtaaatgaaatttctggagcagagcataggtcactgccgatatccatgtgttctctctctctcaatattcatgtataccttggttgcagtgtctggaggctttttaacttggcttaggagatgagggaaaataaatttctgtttatttatttaggactgacatggtaatggtctttttgtatatgcaacgaacaaaattaccaataactaatactacaagtttttttaccaaa

SEQ ID NO: 53147 - DNA, 311 bp, Setaria italica
  Peptide Sequence Number=SeqID_119121
tccgggttacgggtaactaaggtagttttcattcgtactcctggagttcaacgctctaactggtccaccgcgagaagcttggcagtatgccagcatgtccttatgtcaacacaagtaggattagctagctggctgcaattgactaattagcccagctgatttatcaaattaattgaaaaacgataatttccttgtgcatgttaggtttaaaaatatcatttcctgctgcaacaatgagtgatagtctcagaaagctcgatgtaagattacctgcacaaaaatacagacatcaatttatttttttatcattg

SEQ ID NO: 53148 - DNA, 252 bp, Setaria italica
  Peptide Sequence Number=SeqID_119122
tccccactcaatcttgtagtttcttcttctgtgtaagcttctggaattcagtctatctttgaagattagccacatgaagatttttagctttttggtcactttagctttccaggtaatacattcttgaagagtaatttccattctcgcaacagtattgccaactgtctgtttcattgctttactgctgtatttgttcaactttgctttgcaaaatttgcagttcctccaatgcctgctgggatagtggtatat

SEQ ID NO: 53149 - DNA, 413 bp, Setaria italica
  Peptide Sequence Number=SeqID_119123
ttagtttagttaatttagtaagtaatttgaactttgaaaacaaggatttactgttgctgttttatatttccatttcaaacttgtacaggttgtttaaaattatatatcatcagtactttcactttgacaagggatgtattgttatgaagtattttatcatctaagttctatgacattcacagaataccggttctctttctacatcctaagtgcatgcaccaaagcttgctaggctcataaactaatgatgacagttagagcatattggtatgatagcatgattgcatacagcaatatcttatataattacttaaaagtttcttttgaaattgtgcaggcgaaagatgataatagtgaacttgagttagccagtatagagcagcagaggctgacttcgatgttctgaagctatt

SEQ ID NO: 53150 - DNA, 384 bp, Setaria italica
  Peptide Sequence Number=SeqID_119124
actagtaggtagggaaaggttacttagaaggaaagacgtaaccaatcctagaaaacaatagatgaggtctccaaaactgagttagagaagtcaggggagatggttgcaagactggcatctcagatagaggaaaagaaccgatacttgcaggatttggagacaaagaagaatgcaacagaactctcgatctcacggcttgaggaggacaacaggaagctacacgaggcgtacaatgaagaaatgcgaaatacttcatcgcagggctcgtgaaaatgctctgcgaattttccaagaaaatgacaacttgaggcaagaattagaaaataagaggagagaactgaattcacgagctaagcaacttgaaaagactgtcagctgagaatg

SEQ ID NO: 53151 - DNA, 249 bp, Setaria italica
  Peptide Sequence Number=SeqID_119125
agatgtatcctctgtgttaggaggggatcgagcagcacagggctcccacaaagccaataagtagtcgtgcatgcgcgccattggtgccattgtgggagccctgtgctgctcgatcccctcctgacataggagatgtatcctctgtgttaatgttccattgcgtaacgacattacaagcgtatgtgatgtgtggaagcatgtggttgtgctgttgccgcttcaggccctaaaaacctagatgtgatcggt

SEQ ID NO: 53152 - DNA, 480 bp, Setaria italica
  Peptide Sequence Number=SeqID_119126
ttagtaaaactaaattaagtaattagtaaggttacttacctaaaaacttgagttagagaagtcaggggagatggttgcaagactggcatctcagatagaggaaaagaaccgatacttgcaggatttggagacaaagaagaatgcaacagaactctcgatctcacggcttgaggaggacaacaggaagctacacgaggcgtacaatgaagaaatgcgaaatcttcatcgcagggctcgtgaaaatgctctgcgaattttccaagaaaatgacaacttgaggcaagaattagaaaataagaggagagaactgaattcacgagctaagcaacttgaaaagctgtcagctgagaatgctaacgactggaagacactcgatgatgagaagcagaaggcgaaagatgataatagtgaaacttgagttagccagtatagagcagcagaggctgacttcgatgttctgaagctattggatgaccagaa

SEQ ID NO: 53153 - DNA, 246 bp, Setaria italica
  Peptide Sequence Number=SeqID_119127
tgcaagaacacaagcccatggccaagcatacctctcaacctcccgtggcggccccacgttctccgccggcgcagaactggatcccgtaggaccaacattggctttgttgaggttgtgcctttgtttatcgatgagatagaaggcatggaaacctttgcaatcgtgaggtttaccaatgattggagtggatttaatgatgcgcttacgctagagaaccattttagtctcaaattccttcttccccag

SEQ ID NO: 53154 - DNA, 410 bp, Setaria italica
  Peptide Sequence Number=SeqID_119128
acttactttagaacaaagtcgaagtcaccagtgctttctgctttggagacacacggcaacatatgacagaagcacactctatcgccagattcaagaacatgtgcttcatgtcgtcctccaaagcaaataccagagcttttccatcaataactagagcaaatgctgcatctggatccttctcgagtttgaccatttgtgacccattggcgatttgtgacagaagactctcctttgcagcctgatcaccagtgggtatggacaaacatatttgtttcatgccttgcctcagcaaactgcacgcatatccgatgttaattgcagtttccatcttatcgccagtcagaacccagatcttgagacctgcttgcgccaaacgatctatgcactgaggaacccctttttgtaatttg

SEQ ID NO: 53155 - DNA, 205 bp, Setaria italica
  Peptide Sequence Number=SeqID_119129
cttcttgaagtgttcaattgctggagtttcatatggtgtgggttcaagaagtccatctgattgcaggtcaaagtgccagttttgtccgataacacagtatgaacctggccaagctcctcattcaagttggatgtacgagcctgagcagtattaccagtgtcctcatcaaacatatgaatgtcctggttaatgaaatgtgcttgca

SEQ ID NO: 53156 - DNA, 392 bp, Setaria italica
  Peptide Sequence Number=SeqID_119130
gttgacccactcccgattcccgatccccatgtttcagttccatcaggtcagatcttcaaaatgggctttcgctttcaatcatttcggcgtcagaaattctctaatgttacagagcatgcctttgtcatacggatttacaaatttgacttccaaatcttttagctacaagaaacagctaacgagaagacgacctgcaattgatgaagaaagagtccaaagcatgggaaatttgaaattacccactcatctgtcttgatgttgaagcagatgcaatatatgtgccacatcaagaacacaacctgccagaccacctggaggatagagaagagcatcgtactgattaccaggtttagagatacaggattctccgatcttagagttcctgaattaat

SEQ ID NO: 53157 - DNA, 261 bp, Setaria italica
  Peptide Sequence Number=SeqID_119131
gtggtccgggaagcaggacgcggaggtggatgcgtcgccagcggccgcggcgtcgttgccggcggcggactcgagcgacggggaggaggtcgactccagcgacaggtcgaagtcggtgagcatgatgtggccgtcggcgcgaatgagcacgttctccggcttgaggtcgcggtacacgatccccatcatgtgcaggtactccagcgccagcagcacctccgccgcgtagaaccgggcggacgggagcgggaagcggcgggg

SEQ ID NO: 53158 - DNA, 304 bp, Setaria italica
  Peptide Sequence Number=SeqID_119132
ttttctcagctcaatagcataagggggaccaaaaagcggggttggtgacaactgtacacatttctatctcacgtgaagatcctcaggagagcaaagttccctcttccttcaagaagcctgtgcgaagagtgaggagtgtgcttcaccgcgcagctcttggtgactaagttaacagcctctgaacttttcatcagacgaaggcgctggcaggtttccacaaacatcctgtgcggaggctcagccaggctgctgggatgcagtctgcgctggtttggttgcctgcactgtcatgtgaaccttggct

SEQ ID NO: 53159 - DNA, 252 bp, Setaria italica
  Peptide Sequence Number=SeqID_119133
agcgtcctggtttgcacgagttttttgcagcgaactagcgaatttgctgaccttgttctctttacagctggtttggaaggttatgcaaaacctctagttgacaggatagatgctcataacagattcattcaccgtctctatcgtccatcaactgttactacgtaagttatcattcgcatttccataagctgttactgttattgatgggctgttctgttcttgaggtttcttgctcataaaatagtaaaatgt

SEQ ID NO: 53160 - DNA, 309 bp, Setaria italica
  Peptide Sequence Number=SeqID_119134
cttccttgtaagtactgctctttaggttgccctgagatcttcccatactacagcaagataaagcatgaagcgcagtgcagcttcaggccattataattgcccttatgctggctctgaatgtgctgtggctggtgatattccattccttgttgcacatttgagggatgatcacaaagtcgacatgcacagcggctgcacattcaaccatagatacgtcaaatccaacccacgagaggttgaaaacgccacctggatgctaacagtaagtattaaactagcgagctattccttctatgattatcttatttt

SEQ ID NO: 53161 - DNA, 238 bp, Setaria italica
  Peptide Sequence Number=SeqID_119135
ataccaactcattgatctcatctatgctggcctgtaaatgagcagggtatagatccagatcaggattctttgcaaactcgttgaactcggagttgagcattcggatgatctccgcgctctcgttgttcacgatggtcttgagctgcttgtcccatagaacagggacgcttggtttcccggcgtaatttctgctggcgatctcgtaaagctccctgatgctcttggctccgttgaaagg

SEQ ID NO: 53162 - DNA, 191 bp, Setaria italica
  Peptide Sequence Number=SeqID_119136
cagggacgcagtgaaaacacatccaaatatcaaacccaatgcgcggactactcttttcgccattcgtatcccccgtccttcaacctcaccatattcctgtcaaaaacaccagatgcaaagaaattatcatattaaccatttcaaaaaacctaaacaacagctcagctcatgttgtaattaagaaccatcct

SEQ ID NO: 53163 - DNA, 362 bp, Setaria italica
  Peptide Sequence Number=SeqID_119137
atggttttaccgcttcaagactttgttttctattctgatggaaagaggtttctcaatatcacatttggttctccaatggaggaaattctcattgaaaagcttatcgttaaggtatgtcatggatgtgcatcaaacaagtaaatttcattttgctagtttaaacctgctaggcaaaattgcagattatgcgaccatcatgtgttggtattcattctaaaaccacagcctttatatatttttagttgtctgagccttatagtaggaatgcgaattacaggaataatattctacgcctcgtagtgattgcattatctgtgttttcccttgtaagtatctctgttgttggacaggttgttctacct

SEQ ID NO: 53164 - DNA, 447 bp, Setaria italica
  Peptide Sequence Number=SeqID_119138
actgcctgtgatcgtgcactttgagaacaacaatccttttgcagtcgcgaaggaagttataagggagattgagatatctcactggggaaatgtacagattactgaacactacaacattgcccatggtggtgccaaactcaagggtgaattttccaggatcgattatcagtctagaccttacgtaagaggtgtttcatcttttaggaatcttattgcgagactgcctccaagggcccactctatttattacagagatgagatcggtaaataatttacgaacaatacaacaatttagtaggaagtagaattactaaagaaagaacccaatactaggaaaattagaaaccaaaggtttaccaattagtttaggtagggtaggacaaaacaaacctttaactagttaggttaataggtttaaccgacttacaaagaactttagtttactaa

SEQ ID NO: 53165 - DNA, 378 bp, Setaria italica
  Peptide Sequence Number=SeqID_119139
taaatttaaacttaaggtttaaacttaaaccttaaaacctaaagtttaaagtaaaggaaacctaagaacaaattaagtttaacaatagacgacaactagaataatgtcaatttccaagagctctccttcttacttggccaagctacaatgggatgaggtgcaagccactgttcagaaaatccagggtctctttgagcaatgcttggcagttcatgataaactggaggcctcattgcgtgatttgtcaaggactggggacgtccagtcttgcaaggctgctcgtaaagctgctgatgcacagtttaaggagctatggaaagagctgaagccattgttgacatctctacagtcatctccccagtcttatcagatatggcc

SEQ ID NO: 53166 - DNA, 257 bp, Setaria italica
  Peptide Sequence Number=SeqID_119140
ttttttactttttttaaaggtttttttacgttttttaaaattttttgttttttggttttaccggtttacccttgtctctcaagttttactaatcctttcccaatatccaagcgaagaacttagcagctataagagcatttggaactgaaggaaaagtgaagggtccaagtactattctgccaattgaagttgttgagccttctggagctcccccagagctaacattcttttctgcattgttacccaaaccttttggg

SEQ ID NO: 53167 - DNA, 356 bp, Setaria italica
  Peptide Sequence Number=SeqID_119141
ttctggatgatcacatctgaaatcttgtctgttcccatcagatggtttctgcttacgtcatcaaatttaagcaaagctgcttggggtgcgctgcaaaagaacaacacacagctgatgatacgctcatatgagctaggtgtattattcttgccccaaacactccaatctgtacctcaattctcgtgcacggagaggaacgcttcaaaccgggatggcctcgcccttggcaagacaatcaagaccaagctggtcacgctctgctggaaaggcgacgaagaaaaggaaccgtctacgaagaccgtcagattgcctgtgccgtatcaactccctccacaaccttacggcacagaagacgt

SEQ ID NO: 53168 - DNA, 411 bp, Setaria italica
  Peptide Sequence Number=SeqID_119142
ggtagttaggaacttaggatgtggcatgttttctcatgaaggttgcctttagtgtagtggaggtaggttatttccttcaaatacagtgcatttgcctgtgttcgaactgcaaaagccacaaaacctattcccactcgttttagctgcttgaacaattgttggattgtgcttctggaaaattcaatccaaaaaggcaacctacaaatgtgctcagattattgtgctacatagtaatatatcaatattctcttttttcaccattttttacatcattcatttttaatgtaatgctaattagatgcaccattgtgcagcatgtccaagtttgagaaaagttccacatgtcctagtcctacatggacaagatggtgcttcagtagagcttatgaagaaactgaagcctgcaaattg

SEQ ID NO: 53169 - DNA, 403 bp, Setaria italica
  Peptide Sequence Number=SeqID_119143
atagttttttcgagtgttccattcaagtgagtaaatggcctccaaaagatttcctcatgctttctaaatcttcctatagtgcttactgttgacatggacattctgaccttgatttttccccctgtaccagtcgggcaatgcctcacataaaaacgtttactcgttacagtggtcaaaacattgcatggttctgcttacgtcatcaaatttaagcaaagctgcttggggtgcgctgcaaaagaacaacacacagctgatgatacgctcatatgagctaggtgtattattcttgccccaaacactccaatctgtacctcaattctcgtgcacggagaggaacgcttcaaaccgggatggcctcgcccttggcaagacaatcaagaccaagctggtcacgcttctg

SEQ ID NO: 53170 - DNA, 385 bp, Setaria italica
  Peptide Sequence Number=SeqID_119144
atggtttctgcttacgtcatcaaatttaagcaaagctgcttggggtgcgctgcaaaagaacaacacacagctgatgatacgctcatatgaggtacgctttcttgcattttcatgatattttctggagattcagggttacagattttgcaacttggagcactattcagctcttaagacttagctaggaatagtttttttactacaaagttgcggatgatccatggtcatcatggagtcaccacttatgccttgttgtttgaccacttttcagctaggtgtattattcttgccccaaacactccaatctgtacctcaattctcgtgcacggagaggaacgcttcaaaccgggatggcctcgcccttggcaagacaattctaagtact

SEQ ID NO: 53171 - DNA, 310 bp, Setaria italica
  Peptide Sequence Number=SeqID_119145
aattcttaattgatgggtcttatcactgctattgtaattctatttttttgttatttggtttcagactccagcttcatccccccattgatatatgctgcaatgggtagctctagggatatagcaatcgggccagttgcggtggtatctcttttactaggttcactcctacaaaatgaagttgaccatgaaaagaataaggaggaatacttgcgtcttgcttttacggcaaccttctttgctggtatcactcaagcagccctgggatttctaaggttaggattcctcatcgagttcttgtcgcatgctgcaa

SEQ ID NO: 53172 - DNA, 243 bp, Setaria italica
  Peptide Sequence Number=SeqID_119146
ttgacaattgcaagtctctgcatccctcaggatattggctattcgaagctcgcttatctggatccacagtatgggctttactccagcttcatccccccattgatatatgctgcaatgggtagctctagggatatagcaatcgggccagttgcggtggtatctcttttactaggttcactcctacaaaatgaagttgaccatagaaaagaataaggaggaatacttgcgtcttgcttttacggc

SEQ ID NO: 53173 - DNA, 265 bp, Setaria italica
  Peptide Sequence Number=SeqID_119147
cgggagcctgacggcctcgagctcggtcggcgtggcccgcggcggcggcggcgacgaggacggggacgagaagctaatggtggaggcctccatggttctagaaggggcgcgaggcgattagaaggttatagaagcttcagtgcgtgctgctaccgagatttgggaggcctgaaagatcgaagcttcccttccagctccaaagattcaagccttttgcacgaggatttcgtggctctgcgagacatgaaaacagggaattcgacaa

SEQ ID NO: 53174 - DNA, 303 bp, Setaria italica
  Peptide Sequence Number=SeqID_119148
actattgtgttcacttttttgtgaggtttagggagtactccaatagtacttcataaaccacagaatgaaatagcccatcacttaacacagcagaacccaaaaagggtgacaagtggccggtgcagtgaaagtgattcatgcagggttcttcctcgtcctttggagattcaggaacttggggaattctgctggaaggaagggcataaagaaatttggtttaaccttgaccaaatcagcgttcgtcagtagaaagattctttccttctatttgtattgttattggtaactaacttgtagtcctaa

SEQ ID NO: 53175 - DNA, 392 bp, Setaria italica
  misc_feature (366)..(366): n is a, c, g, or t
  Peptide Sequence Number=SeqID_119149
ttaattacttagtaattaacatgtatggaaagaatcatggaaccccaacagagaaattgaagcgccaagggtatgttcatcatatagcattaaactcaaagaccatattgtacgatatgatcaacctgcaccttgtaggtctggtgaaggcttttccctccagctgtctcataaaccacagaatgaaatagcccatcacttaacacagcagaacccaaaaagggtgacaagtggccaatgcagtgaaagtgattcatgcagggttcttcgtcgtcctgaaatacagtggagacttcagtatacaaattggaaataaacacttttcagggatcacaagtgttgatgatttcaataatagcaaaaatntatagtataaattgaaacttaggttt

SEQ ID NO: 53176 - DNA, 329 bp, Setaria italica
  Peptide Sequence Number=SeqID_119150
aagtagaaagaaaaataacaagtgcagtgctagcagtcagaattttcttattcctggctgtcctgtttgtctgactaaatggatttaaaaatttcacttcaaattgaaaggtcaagttcagccagattactccaaggacaccaaggttgaataataagatcggcaaaagctaaggccaacaaaaaggaatagactgcatgtaatggcaattattgtgtgcaagttacagtggaaggcaatgtggtaattacctttggagattcaggaacttggggaattctgctggaaggaagggcataaagaaatttggttaaccttgaccaaatcag

SEQ ID NO: 53177 - DNA, 264 bp, Setaria italica
  Peptide Sequence Number=SeqID_119151
atgcggaagtgagcgccgacggaggtctcgccggtcgcggaggtcctcttgtcctcacggaaagactgggggtcgtccctacggaagatgaagcgctccagcatcacccaattggggagggcgccctcttcctcttgccccgctcgtccgcgccgccacccagctcctgggtgccctcgtcgtctgagtcctcctcatcggagtaatcctccgtgttggacgtcgagaagctcatctggttgcccagggccatcggcatccccg

SEQ ID NO: 53178 - DNA, 427 bp, Setaria italica
  Peptide Sequence Number=SeqID_119152
ctgttctcaactgatttaacctctagaggactggatataataatgtggattgggtggtacaggttgattgcccagaaagcattgatatttacatccatagagttggccgtacagctcgttacaataagaaaggaaaatcgcttatgttcctttgtcctgaggaagaagcaatgcttgaaaaattgaaggctactgaaagcaaaatacctatacacatacggaagccaaaggcagaacaactggagcagatatctcagaatatagcctcggtgctggttaaatttcccaatctgcagcaattgggtaaaagggcatttgttacatatcttaagtcagtgtatctccagaaagacaaaaaggtgttcgacctgagcaggttctctagacaagaagaaagtttagactagacgtaaataagaactaagaa

SEQ ID NO: 53179 - DNA, 201 bp, Setaria italica
  Peptide Sequence Number=SeqID_119153
aggtatgccactattttagcacgactatttttgctctatttctcatgctgtaacctgtctgtcgcacttgcaggttgattgcccagaaagcattgatatttacatccatagagttggccgtacagctcgttacaataagaaaggaaaatcgcttatgttcctttgtcctgaggaagaagcaatgcttgaaaaattgaaggc

SEQ ID NO: 53180 - DNA, 388 bp, Setaria italica
  Peptide Sequence Number=SeqID_119154
agtactgatcgagcaagcccggcgctgcatcatgtggaggctaaaggttggcgagaggccaagcgacccattgctccgttcaccaaatgacttcctcggtagggaggtgtgggagttcgaccctgacgcaggcacattggaggagcgcgccgaggtggagaggctgcggcaggagtacacccgcaaccggttcacgcaacgggatatgcaaaacagaaccttcataatacaaaccttccagtcatcaagattaaggaggattcagaattaacggaagaaactgtgttaattgtgttgaggcgtgcccttagtcaatattgttctttgcaaggacctgacgggcattggcctggtggttacagcgggatttgtttattctgccactcat

SEQ ID NO: 53181 - DNA, 181 bp, Setaria italica
  Peptide Sequence Number=SeqID_119155
aacgtcatgaacatcattcattgtcattgattcgagaacgaaccaggcgattggtgattatcatgtagaatttggtaatcttgcaagcacagttcagtaatgtagtattactttggtcagttaagatcttcaggatgcaagtaccaatggatattgtaaggtgttagcctatatgcgtgat

SEQ ID NO: 53182 - DNA, 412 bp, Setaria italica
  Peptide Sequence Number=SeqID_119156
atttaaatttctacagaaattaaatttatgactcaccaattcctatatgaaataaaccacttggtagaaattttcttataccagattaaactgtgtacatctgtcagcatcacctgtattcatgatattgttcttagctagtatttgtttgtttattaaagaaagggcatgacgtttgccttattttgttctactaatcagattatattaacaagttcttttacctattttttttcttttctgtgattaggccttaaatatgatttgctgttggatagaaaaaccaaattctaaagaattcaggcagcatcttcctaggattcaagatcatttgtggcttgcagaagatggaatgaagtcaaaggtgtatgctggttgccagacctgggaaactgctctcatagttcaggcc

SEQ ID NO: 53183 - DNA, 288 bp, Setaria italica
  Peptide Sequence Number=SeqID_119157
ccttgagaaaactcaacgaaaggatgggtcctgggtatggctcttgggctgtatgtttcacttatggaacgttctttgctataaaaggattagttgctgcaggaagaacataccataacagtttgtcaatcaggaaaagcatgcaacttcctgttgtcaaagcagctaattacaggtggatggggagagaactatctcagctgtcaaattgaggagtatgtttgtagtggcagtccacatgcagtgaactacttgtcctattggtctaattgtttagtcttttacttt

SEQ ID NO: 53184 - DNA, 108 bp, Setaria italica
  Peptide Sequence Number=SeqID_119158
caggatatggatagtccacgacgatattccgaatgcacatcgtccttaattcaagctttagtattgttcagagtgatatgccctatctcttcatgacgatacataggg

SEQ ID NO: 53185 - DNA, 138 bp, Setaria italica
  Peptide Sequence Number=SeqID_119159
gagttttttctaaatcttattatacgcccgactgacatttgagcttattagattgtaaaaatatgcacttgaggaggtagagaaccaaatagggtcatgcacttcgttaattgtataactgaagagataatcattgcc

SEQ ID NO: 53186 - DNA, 361 bp, Setaria italica
  Peptide Sequence Number=SeqID_119160
taactcgtggacggatatgctctatatctctaaccgagctttgtagggtacgccccatcctatccaaggatttggtcctgcctccacctgccttccagcacgagtactctgatcgtacaccgtgtcttcatcgtcggatgagtggatatcggcgtagtcatcttccgtccacgcttccctcagcctgtgccgcgtcgcaccttggtaccagctctggtattgcctgtacgcactgtttgtgtgcggctcgttgttcttgtccaagttctgctcgaactgctcccattcctgaatgtatgcgtggtggaacgcggcccactcggagaccttccgtttcttctttcgatccacgttgtgtaac

SEQ ID NO: 53187 - DNA, 255 bp, Setaria italica
  Peptide Sequence Number=SeqID_119161
ggcgagagggtgaaggtggcgagggaggcggagtcgacggtggcggcgatcatgtgggggcggaagatgaggtagaggatgaggacgaggacgccggcgaagcagggcggggtgttgtagagcgaggcgttgtcggcgtgcgtcttgaagtcgagcatgaccggcgtgatgggctgcgcgttgccgatgaggtccttgcgcacgatggcgatggtgacgcccgaggggccgacgttcttctgcgcgccggcgtag

SEQ ID NO: 53188 - DNA, 398 bp, Setaria italica
  Peptide Sequence Number=SeqID_119162
tcgagaccaaggccctcggcgaggttgacaagtccggcgccttcagcgtcccgctcgcagcagacctcctccgcgaggacggcgagctgaagcaggactgcttcgcgcagctccacagcgccaccaaccagccatgccccggacaggagccgtcctggatcgtcatccctggacgggagccgtcctggatcgtcaggccgtccagggatgacgacgacaagaagaagaccttcgtcgcggtggccggcaagatgcactactcatcaaaagagtgcgcctccgcgttcctctgtgaccatttccacaagaagcccatcatgatccctcacatccccaaggagaccatcgtgatcccccacttccacaacaagccggtgcccgagtacaagccgccgacg

SEQ ID NO: 53189 - DNA, 401 bp, Setaria italica
  misc_feature (82)..(82): n is a, c, g, or t
  Peptide Sequence Number=SeqID_119163
gcatcttgccggccaccgcgacgaaggtcttcttcttgtcgtcgtcatccctggacggcctgacgatccaggacggctcctntccggggcatggctggttggtggccggcaagatgcactactcatcaaaagagtgcgcctccgcgttcctctgtgaccatttccacaagaagcccatcatgatccctcacatccccaaggagaccatcgtgatcccccacttccacaacaagccggtgcccgagtacaagccgccgacgcccgtgccggtgtatcacgcgcccgtgccagagtacaagccgccgacgcccgtgccggagtaccactcgcccgtgccggagtacaagccacccactccagcgcactcccacccgacgccgatctaccatcctcctgccgac

SEQ ID NO: 53190 - DNA, 274 bp, Setaria italica
  misc_feature (155)..(155): n is a, c, g, or t
  misc_feature (169)..(169): n is a, c, g, or t
  Peptide Sequence Number=SeqID_119164
gttacttaattagtttacgtaagtaacctaaaggtcccttcggcgaggttgacaagttccggcgccttcagcgtcccgctcgcagcagacctcctccgcgaggacggcgagctgaagcaggactgcttcgcgcagctccacagcgccaccaaccngccatgccccgganaggagccgtcctggatcgtcaggccgtccagggatgacgacgacaagaagaagaccttcgcgcggtgccggcaagatgcactactcatcaaaagagtgcgcctcc

SEQ ID NO: 53191 - DNA, 157 bp, Setaria italica
  Peptide Sequence Number=SeqID_119165
caaacttatatatatttatctaataagttaaggtagtttcatccaggcacatatcctcagagcaaatgctttattcctataagctgaattgaagcatatagtattatatagttggtttgtcggcatctactgttacgtaatgctgcatggatcctta

SEQ ID NO: 53192 - DNA, 324 bp, Setaria italica
  misc_feature (5)..(5): n is a, c, g, or t
  Peptide Sequence Number=SeqID_119166
taaanaaacaaaagaaaaacctaaacctaaaccgaaacgaaaggaaacggaacgaagactagaaagacaaggaactgcttcgcgcagctccacagcgccaccaaccagccatgccccggacaggagccgtcctggatcgtcaggccgtccagggatgacgacgacaagaagaagaccttcgtcgcggtggccggcaagatgcactactcatcaaaagagtgcgcctccgcgttcctctgtgaccatttccacaagaagcccatcatgatccctcacatcccccaaggagaccatcgtgatcccccacttccacaacaagccggt

SEQ ID NO: 53193 - DNA, 300 bp, Setaria italica
  misc_feature (231)..(231): n is a, c, g, or t
  Peptide Sequence Number=SeqID_119167
acggacggacttagtaactactaggacacgggcgcgtgatacaccggcacgggcgtcggcgcccgtgccggagtaccactcgcccgtgccggagtacaagccacccactccagcgcactcccacccgacgccgatctaccatcctcctgccgaccagaagaccccagaacccccgagacggaccctgagaagttcaagaagctcctcccgttcatcaagaagaaccccttnttcttccccaagttccgcaagttccctcctggcaaggtggagatccaaggcttagagagattggtggga

SEQ ID NO: 53194 - DNA, 465 bp, Setaria italica
  Peptide Sequence Number=SeqID_119168
tacgtaagtcaaataatttgtgatgttcaggaatggtgtgtatccctaggtctgctagatcgattggagcgtacctcgcaagcgcacccgcgcgtggtagggatgggcagcgcctcggccctcatcttcgggcggccacttgttctcctccccaagccggcgcggccgcacccacggctccagctcgccatggtgatggacccgaagaggaaacgaacgagccgtggcctccccgcagagaagccaccagccccaccatcatgagcctctccgtcgaccgccacccccacgatgccgttatgaatgaatgctatgaaaaaataggagctctgacgctcaatcaaggataaagaagttgtgaggtagaagccatgccgtgccacaccaccctgtgaaggcagcattgggagaagccccttaacacaacagaggaggttacacaacttggttcatctattttttata

SEQ ID NO: 53195 - DNA, 287 bp, Setaria italica
  Peptide Sequence Number=SeqID_119169
taattattgttagtttgtccgtcttgttcttatttggttttattattgtttgtagcaatgctactatcatgtacactgcaataatgtttcgaaactttcttcttactgccgcagaatctcgtttcagaacgtagttgcttcaggtttaatttgggggcagtccattcaccttcgccatcagttcgttctgcaatcaggaaatcaagatgctctcagaaacatcatgtgaacaacatgaacattgcacagagatgcaggctaatagttcaaattccaacgtcttttcc

SEQ ID NO: 53196 - DNA, 314 bp, Setaria italica
  Peptide Sequence Number=SeqID_119170
ttaaaggttggttccttcgtctacttattactaaaactttgtaggtaagtaggtttcctactttgtagttcttctacttgaagagcaattgtgtatctctggtgctctcgctgatcagtagcagcatggatgcttggcgcactcggcagtatgattactaccagagagtattgaatgggattttgtgacatttgcccacaggagcaccagactcttttggaaaccattttccttgaatccttgggccaaaccatgggatggcataggtcaatttggggctgatctatatgctcatcctatcttggtttctggga

SEQ ID NO: 53197 - DNA, 381 bp, Setaria italica
  Peptide Sequence Number=SeqID_119171
atgctatccaactctcctggtggtgtaaattttgagagtgcaccatttaagctgacaagggagctccttgaagtgatggattctgatgcagagggaactcctagcgagttctttgactacttcaaggtgctatgcattcaaggtttcctaacttgtcggaagcatgcagagcgcattatacttcttgtagagatgttgcaggattctggcttcccgtgctttaaaggtggtcctcgcactatacaaaacttgaggaagaggttccacttgagtctcactgaagaggttagctgactaatatttggaagtcatcatttcaggacttctcttactaatagtcttgctatggttgcagcaatgtgtatctctggtgctcttcgt

SEQ ID NO: 53198 - DNA, 251 bp, Setaria italica
  Peptide Sequence Number=SeqID_119172
cgtaatacattcttaaatttagtacttgttgattggcagtgttaagagttaagttgaaaagcaactgcttgaaaatcttcagtaacatgcattgtactattgtctgagcagtgtgtatactttttggttttcacagagaaactttgtggaaagcatggcaggatattcaattctatgctacctactccaggtcaaagatcgccacaacgggaatcttctgatagatgaggaaggacatattattcacattg

SEQ ID NO: 53199 - DNA, 300 bp, Setaria italica
  Peptide Sequence Number=SeqID_119173
taaacttacaataaggccgcagccaaaagtggcaaacccgcttcttgatatatgtcataaaagtgggtttgccactttggctgcggccttatgaagttattgtgacttctgcttatacagcactgatcgagactattcctgatacggcatcaatccattccataaaaagtaggtttcccaatatctcaagtctccgtgactactatgtggctaagtatgaagaaaattctgcaaatttcaaacttgcacagagaaacttttgtggaaagcatggcaggatattcaattctatgctaccta

SEQ ID NO: 53200 - DNA, 240 bp, Setaria italica
  Peptide Sequence Number=SeqID_119174
gccgcggccgggcacggcgcgccgagcaagacgcggatccggtggacgcaggaccttcacgagcggttcgtcgagtgcgtgaatcagctcggcggcgcggacatctttctcttgttgctgtgtgactctcgaagaggcgactcccaaggggattctgaagctgatgaactctgatggcctcaccatctaccacatcaagagccaccttcagaaaataccgcatagccaagtacatgccag

SEQ ID NO: 53201 - DNA, 224 bp, Setaria italica
  Peptide Sequence Number=SeqID_119175
cgagtgcgtgaaggtcctgcgtccaccggatccgcgtcttgctcggcgcgccgtgcccggccgcggcgacgacgttcccggtgtggctcggcggtggcgaacccaaagccccctccttttcacctcatgccacggcgaacacgcttatccaggcgatggagtcgccgggcatgcagagcccaattgagaacacgctgtccaggagttgcagtatcggtgcaccg

SEQ ID NO: 53202 - DNA, 369 bp, Setaria italica
  misc_feature (33)..(33): n is a, c, g, or t
  Peptide Sequence Number=SeqID_119176
caagtatctgatcattgcttggaggtgctgacngtttcaaaaggatatgctaatataaagggtttgttcagctgcatttgtacacgaggaactggtggtttttctcagaaggccattcttcattgtttgaggactatgggcatctttctttttcagaactgttgaacgatcacttttttgctaaactgatcatttcagttcttgtaacttcattcggctcggtgagtggcagcaagggcagctcaaagtattcgggagctcaaggcaaagcttgtgtaccaatatttatctagtatttttgtttggatagcagcggggtatttgttgatggtattgtttgtatttgttctctcagattcagcaacaaat

SEQ ID NO: 53203 - DNA, 223 bp, Setaria italica
  Peptide Sequence Number=SeqID_119177
cttgctgttgtttcattaatagtaggaggcatgaggctttattctgcttcaatggataaaacaaatcagagagaatgggatatcacttgtgttgttatgtgcacgactttgtcaattgaattcattgctagtgatagctgtcaggtgtgggatttggcaacattgcagtgcatacagactctttctgatcataccgatgttgttatgtctgtgctttgctggg

SEQ ID NO: 53204 - DNA, 182 bp, Setaria italica
  Peptide Sequence Number=SeqID_119178
ctgggagtaaggatggaactgttcgcatgtgggattgccaaaccgggcagtgtgccggtgtcagccctatgggtcgcgaggttgggtgtatgatcagcgaaggtccatggttatttgttggaatacctgatgcggtgactgagacacgcaacagggcataggcaaggcacacaggggatagg

SEQ ID NO: 53205 - DNA, 359 bp, Setaria italica
  Peptide Sequence Number=SeqID_119179
tgtagttacttgctttcttgtatctaacttgatacacgtgctgcacagccttatctccatgaatcacggcatcagcatgccctgaaaagggctaggggagctggaggccggtttctcaattcaaagtcagatgagaaggaagagaactccgactccagtcacaaagagaagcagaacggagttgtgccccacaagagtggccaaccgtcaacccctccttctcctaacggtgcatcttcagctaatcgggcagacagtcatgaatgaggcttcgaaaactcacatcccaagagagttaagcccctgacgctagatatggcaaacatttttgtacagtaattgctagcggcaacagcaag

SEQ ID NO: 53206 - DNA, 421 bp, Setaria italica
  Peptide Sequence Number=SeqID_119180
atcaacatcaacagcagaagcaagctgaacctgaggatcagcaagaagcaccagttactagttcagatagtcaaccaacagtgggcacaccatcggattatgtggctccctatgcccctcatgacatgggccatgcaatgggtcaatacgcctacccaaatattgacccatactatggaagcctttatgcagcttatggtggacagccaatgatgcatccaccgttggtcggaatgcatccaactggcttacctctgcctactgatgcaattgaagagcctgtgtatgtaaatgcaaaacaatacaatgccatattaaggcgacgccaatctcgggctaagctgaatcagaaggaagcttgtcaaggccgtaagagcaaataatcaagcaaattcttcaatccacctccctacttctacct

SEQ ID NO: 53207 - DNA, 362 bp, Setaria italica
  Peptide Sequence Number=SeqID_119181
taggtcgttccctaaggggtttgttagctcgccgccggctggctcgctctccggttcgcgtcgtcgtacaggctgtcgagtagtacaaagacaaagtaccaagaaccaaccggaccaaattttttgcttgaggcaacggcggtttcatttgaacttggcgcggtgacaagggccagttcccagcctgtcactccgttttcaaaggtaggagcggctttaggaacatcatctatcgggacgattgccagcgccaaggcgttctgctcttctattgcagtcgcagcagggctaggttcattcagacccagcaaatctggttcaggtgctggtggttcctctatgacaggttcaggttccggctc

SEQ ID NO: 53208 - DNA, 497 bp, Setaria italica
  Peptide Sequence Number=SeqID_119182
ttggtttgttctttggtttggttttcctttctttatttgttacttaggtttctaggtttccggtcttcgggtttctttgtttcttgtctttcttggtttctggagctggaggaggtgaagctggtttttcttcctcctctggctcttttttgtactctatcgccagcacagccttttcctttgtcatcgtgggagcatctcttacgtactcctccatagtctgtaagaatgatgctggaggctgttcaatttttaagaacttctcaccacgcccaatgtgtatagttttacacacttcgtaaaaattctgagagtctttcagcctggttagttgctcttttgtatatgtcaagtgccctaatagcatcgtttctttgcatctcaaagaacttgtcaaccagattgattgttccatcactaatggcggtgtagatcttaacactctctaaagcaaccatagaaagtgcatgctggattataatattgtaagacgatgc

SEQ ID NO: 53209 - DNA, 251 bp, Setaria italica
  Peptide Sequence Number=SeqID_119183
tactattctacttttgtccaagctcacagtcgttgtgtccttgagggcaccaaggtacttcctgagggttggctgagttccgccaactgccattctccttaacttagttgatatcctaattggcctgaatatggaacacagaaccaaactcagtacacatgactacatgagatgtctgtttgattccaactgaaaatactgtttgtcacagacaaatataggcaaaacatctgctgaatcttaatccgttc

SEQ ID NO: 53210 - DNA, 232 bp, Setaria italica
  Peptide Sequence Number=SeqID_119184
aactgatgcttcactgggttgaaagcagcgggcctgtgctaggttatcttcagatagaatcagttgttgtaatatgctattcttaatagcttgcgtctgttgtgtgcaggtgaaacctgtatctctagacaacgttatgtcaaagtgtgcgtatatgctgctgtacgcaagatgttcaccaagggcgccaagctctgtgaggaaagtgatggttcaagacccagcacgcccg

SEQ ID NO: 53211 - DNA, 432 bp, Setaria italica
  Peptide Sequence Number=SeqID_119185
caaggttgattgcacccctttggtcttcataaccttggcaacagttgctatgcaaatgctgttcttcagtgcttgatgtttactcgaccacttacaacatatcttttgggaggacttcattcaaaaaattgctccaaaagggaatggtgcttcatgtgcgaatttgaaaaactcattgtggagggcaaacgacgcaagactgctttatcaccaactgggatactctctcatttgcatgacattggcagtagctttggtcctggtaaacaagaagatgctcatgaatttctcaggtatgcaattgatgccatgcaatccgtatgcatgaaggaagactaagaaaaggaaggtagacccttacggtacaagacaaagaaaagaaaaactaaacaaacttaagtaagaacaaaattaagaaataattaggggaca

SEQ ID NO: 53212 - DNA, 246 bp, Setaria italica
  Peptide Sequence Number=SeqID_119186
tggacatgtgtttgagatgtattgcatggtgacggtgctgcaggagctacatatatagatgatagaaagaatgggagggagtgatggagaggagacctgcgggagtagaagacgggcttgtcgtcggggacgaagacgtcgactctgtggatgttgccgccgcgggaggcgatgcactcggacaccttggcgacgatgccgacggcgtcctgggcgaccaaccaaatggaataattaattaattat

SEQ ID NO: 53213 - DNA, 248 bp, Setaria italica
  misc_feature (51)..(51): n is a, c, g, or t
  misc_feature (85)..(85): n is a, c, g, or t
  Peptide Sequence Number=SeqID_119187
ataatcggtaggtagggaaggttctcatgtatcagtttggagacgaatagngttaaatggaacacactgggagtcctgcatatancttgccagcacaacaaaatctgtgccctgaatcaattctagtatctcttgctcccttttgttcccaggcgtggtgggtaagtagtagtatggaattgcatgcctctgaagaaagcgccgcacatgattgtcttgcggtctatcatggttgcttatgacacagt

SEQ ID NO: 53214 - DNA, 234 bp, Setaria italica
  misc_feature (222)..(222): n is a, c, g, or t
  Peptide Sequence Number=SeqID_119188
cccacggcgtggtgggtaagtagtagtatggaattgcatgcctctgaagaaagcgccgcacatgattgtcttgcggtctatcatggttgctgcaggagaattgaaagatatcaaagtggaagcatatggtatgtgtgactgagaggagaggagtgacgtttcttttgataggaagaaaatacatcgccttcaccttatgacacagttaatgtcaactggaancctgccttcttg

SEQ ID NO: 53215 - DNA, 255 bp, Setaria italica
  misc_feature (252)..(252): n is a, c, g, or t
  Peptide Sequence Number=SeqID_119189
aaacggtaaaaaaaccaaaagaacttaaccaaagaaataacaaggaatagaacaataagaatcaataactttcaggagagtcatcaacgaacaacaattctttgattctttgagttctaatcagatagattctttatacggcacagacactggtcagtagatggttacttatcggtacagtaaatacatacttctgataagaagttgagctaaaacattctttttttgtcaaaagcaaacataacaagggtntta

SEQ ID NO: 53216 - DNA, 370 bp, Setaria italica
  misc_feature (188)..(188): n is a, c, g, or t
  Peptide Sequence Number=SeqID_119190
catctatttcctaacttctgccttgggtattcctgagggattgatacctgttcaacttctatgggtcaatcttgtcaccgatggcccccctgcaactgcttaggttcaatccgcctgacaaggacatcatgaagaaaccacctaggagaagcgatgattcactgatcactccctggattttgttccgntacctgatcattggcctctatgtgggaattgcaactgtcggcatttttgtcatatggtacacacatggatctttcatgggcattgacctcactggagatggtcacactcttgtcaagttaactacaacaagactttacaaaactaggggaccaagtagactactaacttagggaacaaacta

SEQ ID NO: 53217 - DNA, 361 bp, Setaria italica
  Peptide Sequence Number=SeqID_119191
tcggggacaaggtgcccgccgacatgcgcgtcgccagcctcgtcacctccacgctccgcgtcgagcagggctcgctcaccggagagaccgcttccgtcaacaagacctcgtcacgccgtgcccgtcgaggatgccgacatccaggccaaggagtgcatggtcttcgccggcaccaccatcgtcaacggctgcgccgtctgcatcgtcgtgcacaccgggatggccaccgagatcggcaagatccacgcgcagatccatgaggcatcgcaggaggacgacgacacccgctcaagaagaagctcaacgagtttggcgaggcgtcttctacctaagtattctattcgggtcttctattcttgta

SEQ ID NO: 53218 - DNA, 241 bp, Setaria italica
  misc_feature (218)..(218): n is a, c, g, or t
  Peptide Sequence Number=SeqID_119192
tagtaaacttagttaaaacttacttaggtaccctaattaaaactaaaaacttaagtactttaaagtaaattactaactaagtaaattgctttcttgagcatttttgagaactggggagtatccatctctgtttgtaggattgtagaatcctgctgtaagctctgcagcatggcttgcagttctgtaccaccaatagatagatggaatctgatgaaagngaaggtttgccttgttatgaaac

SEQ ID NO: 53219 - DNA, 439 bp, Setaria italica
  Peptide Sequence Number=SeqID_119193
tggaatgttttgtgtgacacacttgcatctagactcctgagtgttggagatacactagctgcaactctctgttacatctgtgctggaaatattgacaaagctgtggaaaatatggtctcgcaacttgaagtctgaagatgggggcagacttatgttgatcttctccaggatttgatggaaaagaccattactctcgcccttgctacaggccacaagagatttagcgcgtcactttctaagcttgttgagaactatgctgaactgttggccagtcaaggtcttcttaagactgcaatggagtatttgaaactgttgggatcagatgagcattcacatgagctggcaatttgagagatagaattgcactttctaacaagaaagaagaaatagaatagactagactaaggaagttactttagtactaggtaagtaactagga

SEQ ID NO: 53220 - DNA, 482 bp, Setaria italica
  Peptide Sequence Number=SeqID_119194
tttgttccaccaagtgcaccgatcagctctcagctaccacaaggttctgctcctgtacaggcaccaccgcaaacagtaaagacatttactcctgcaaaacccaatgggtctgaaaaaacgcagaacaatatcaccaacctaataccttgggttcccagctttacatgcctgctgcaaaccagccatattctactccaccagtcccttctcttggtcctactgcctctgtaccaggaacggtccctaaccagatgtttccccattctgctgcaactaactcaacggccaggtttatgccatcaaccaatcaaggctttgttcagaggcctggcttgagtcctgcgcagccctcaagtccaacacaggcacaggcacaaggcacaaggacaacaaagacaacaaggacaacaaagacaagactacctacctagacaacctacccccgaactagtagacaagaacaagactagaataacaataca

SEQ ID NO: 53221 - DNA, 333 bp, Setaria italica
  Peptide Sequence Number=SeqID_119195
ctgctctatggaaagcacaagaaatcagtatcttagtaaagagtatctcgccctcttaaaggttgtttctgctatggtgggcaatgatttaatgagtttcgtgagtacttggccactaagttcgtggaaagaaactcttgcgctactgtgcacattttgacgcggaaagaggaatggaatgttttgtgtgacacacttgcatctagactcctgagtgttggagatacactagctgcaactctctgttacatctgtgctggaaatattgacaaagactagtaggaaaataataggtactacgacaaacttagaaagtactagaaagaataggga

SEQ ID NO: 53222 - DNA, 312 bp, Setaria italica
  Peptide Sequence Number=SeqID_119196
atacaacctagagttctctggactttatgcagctggtgatgctggtggtgccccagcatgtccaagagctccagctccaaaatggttgaaatgccccactggtgcatcttttggctttggtggtaaacttgttgctttccatccagcagcacccacccaaggcgcacaagcgtctacttctgaggtgcatgtgccccactggtgcatcttttggctttggtggtaaacttgttgctttccatccagcagcacccacccaaggcgcacaagcgtctacttctgaggtgctcaatcaccaaattgtgtacatgc

SEQ ID NO: 53223 - DNA, 231 bp, Setaria italica
  Peptide Sequence Number=SeqID_119197
ctggcaattttgagagatagaattgcactttctacagaagagaatgatgctgctaggagttctttgtctggtagtactggcgccagttcccctatgtcacaaatcatagttatatcacccaagaccagcctcagaatcttcaccagcaggtacaatcgtataatctgcatagtagcacatattcagatggttaccctcaacaatctaatgcagcctttgcatacaacaacc

SEQ ID NO: 53224 - DNA, 247 bp, Setaria italica
  Peptide Sequence Number=SeqID_119198
cgcccagtttccccccctatgtcacaaaaactcctagcagcatccattcacatgagctggcaattttgagagatagaattgcacttttctacagaagagaatgatgctgctaggagttctttgtctggtagtactggcgcccagttcccccctatgtcacaaatcatagttatatcacccaagaccaagccttcagaatcttcaccagcaggtacaatcgtataatctgcatagtagcacatattca

SEQ ID NO: 53225 - DNA, 113 bp, Setaria italica
  Peptide Sequence Number=SeqID_119199
ccgaatcggctcgcttcaggggctgagcagggggagctttgcatctgggatctcaagaacccagtcgagccagtagtgtacccaacactcttgagtggtgggtacactactgg

SEQ ID NO: 53226 - DNA, 242 bp, Setaria italica
  misc_feature (51)..(51): n is a, c, g, or t
  Peptide Sequence Number=SeqID_119200
cctcattcgggacatggcagacgtacatcgtcaagaacgagagcatgtggnacaaggtccgcagcgacgtgcccatggaatacgcggccaccgtcaccgtcaaccccttgaccgcgctcaggatgctccgagactttgtgcaactcaatcctggtgccaacttttgctacttgctagtacttccttcccttgtcagttggcacaccactcccccacaatgctcatgggctcatggccttcaa

SEQ ID NO: 53227 - DNA, 326 bp, Setaria italica
  misc_feature (236)..(236): n is a, c, g, or t
  misc_feature (315)..(315): n is a, c, g, or t
  Peptide Sequence Number=SeqID_119201
aaagaaacgaaacttaaggaaagttaagtaactactaggaacaacaagacaagcttaagctagatttctgtgcgatcgagttcatcttgtaaatgaaaatagcagttgtacacaaccacgacgccgggccacgtctggaggtttcggcgaactatgagtgtggatgttggtggatgccatcgtggcgagcagagtggtgaggtcgcgttgagatcctaatccaaccgggtagggtntggcagttcttgagttgagtggctactcgtgttgatgttacaattcaatcgggtgagttttattttgtttttcttttgngaaacaagttt

SEQ ID NO: 53228 - DNA, 230 bp, Setaria italica
  Peptide Sequence Number=SeqID_119202
ggaaccatttcgaatccactcagcttttcttaagaactgacggtggaaaccatttcatattctcttgtcttcctgttcttcgaacaaaggaagaaagcacctccaagccgctgctgaaagaagagaaccactgacagtagcattgctccacaaggtatcacaatgtcccatacgagtctgaaaagtggtgaagccattgctgcaggttctagtgcaatcactcacaacta

SEQ ID NO: 53229 - DNA, 417 bp, Setaria italica
  Peptide Sequence Number=SeqID_119203
cacctccaagccgctgctgaaagaagagaaccactgacagtagcattgctccacaaggtatctacaatgtcccatgcgaggctgaagagatcatcatgagggctagcatacatgtaagatggtctcaagctcggcacaaaatgctgtctcctgaacacatcatacacatgaggcagagcgcggatcatggtgcttccgatgtaaaaccctggggaaagggctctaactttggaatctgaggaagcattaaggatcacttgagggagcaagaacccatcgagtattaatccaccataagatacaaggtcctcccagaatgcatgtccaactggcttgatttgtactacctgccttagctatttctttcggtcttgttgtatttaaaccttctattgttgttaacttaaaccccttaaa

SEQ ID NO: 53230 - DNA, 414 bp, Setaria italica
  Peptide Sequence Number=SeqID_119204
ccgccgccgacgccgcaggaggagacgcgccgaggagagaccgcgaggaggcgaccatgagggccaagtggaagaagaagcgcatgaggaggctgaagaggaagcgccgaaagatgaggcagagatctaagtaagctgatggagatggatggtggtggtagtggcatgcttgtatgcatatcttcagatgcgatagcctcgtggagagatgtctcctagccatggtgttgctgctcatcgtctgttgaatggcttgtcttggaaacctgcgcttcagtaggcctgttatcgttgttctagttatatcgagagttttgcactgagacaaatctgtcgttttgtggacctagttaataggaagactttagtttagactagactaaataaataactaaaccaaagaacctaaattaa

SEQ ID NO: 53231 - DNA, 291 bp, Setaria italica
  Peptide Sequence Number=SeqID_119205
acgaccgacaaggaaggaagaacgacgaccgaaggaagagaccgcgaggaggcgaccatgagggccaagtggaagaagaagcgcatgaggaggctgaagaggaagcgccgaaagatgaggcagagatctaagtaagctgatggagatggatggtggtggtagtggcatgcttgtatgcatatcttcagatgcgatagcctcgtggagagatgtctcctagccatggtgttgctgctcatcgtctgttagaaaataaggaaacttaaagtaacttaaggaaaaacctagacg

SEQ ID NO: 53232 - DNA, 230 bp, Setaria italica
  Peptide Sequence Number=SeqID_119206
gaaccaacacagatattacttaataggctggtagatattagcagcaaacaaagctccataacaggtccacaaaacgacagatttgtctcagtcgcaaaactctcgatataactagaacaacgttttataacaggcctgttgaatggcttgtcttggaaacctgcgcttcagtaggcctgttatcgttgttctagttatatacgagagatttgtctcagtgcaaaactctc

SEQ ID NO: 53233 - DNA, 356 bp, Setaria italica
  Peptide Sequence Number=SeqID_119207
catgcagcagcatgggtttgcacggaatgtgaattggtctatcaaagttacagctggatctccttcggtgacttctgaatctgtgatagaccaattcagaagtcaccgaaggagatccagctgtaactttggaactgaaagatgactcttatagccgttctatgtgggattttagcttccaagcattatataaggtttccctgcactctacaagcttgtcaacaactctaaaataacaaatacggatgacaagcctttctcattcaactcagcactccacacttatttccgtgcttccataactggcgtttctgtgaaaggtctgaaaggttgcaagactctcaataaggaataca

SEQ ID NO: 53234 - DNA, 240 bp, Setaria italica
  Peptide Sequence Number=SeqID_119208
ctctcttctttgccctccaaaggatttttcgggtcaggatccttattgagagtcttgctacaaagattttgtctgtgtggaaaacgcaaagattgaaacagtacaactggagccgaaacaatcctgggtggcagagcagaaacttgaactactctgaagataatatcttgctgcaactgcatcaagcagtatgtgatgacaaatggcacttccccaatgaaattcttcatgcatatgtca

SEQ ID NO: 53235 - DNA, 382 bp, Setaria italica
  misc_feature (93)..(93): n is a, c, g, or t
  Peptide Sequence Number=SeqID_119209
acaatctgaaaattgagcctcgagtttctaggaccgagatacctattttgccattgcaaattcatgtcctcaaacaattttggcctacaaaanactttttgtcatgcagctttgccaaacaacgtagggacactatgttgatggctaaaacaagaaggtttctccactcctagatgaaaaaatggaccatctagtgcaacatgttgctgaagttcactgcatccatttagataaagataaaccatagatcctaagccccaggcaaacacgcatttaacatgttgctgaagttcactgcactatactttctctcgattctgtggtataaattgtgtttccagtgtcatgcagtgaacttcagcaacacgcattttaacatgtt

SEQ ID NO: 53236 - DNA, 335 bp, Setaria italica
  Peptide Sequence Number=SeqID_119210
ctcacaccatctgtcattgcccttatgggaggactgcttcctttcggtagtatcttcattgaaatgtactttgtcttcacatcattttggaactataaggtgtactatgtttatgggttcatgttgctggtctttctgatcctcataattgtaaccatctgtgtgacaattgttggtacatatttcttgctaaacgctgagaactaccactggcagtggacttcattcttctctgctgcttccactgctgtgtatgtttaccttattacttcctattattattttattttaccttacattgaagtacctaagtattgttctaggtatttctttca

SEQ ID NO: 53237 - DNA, 255 bp, Setaria italica
  Peptide Sequence Number=SeqID_119211
tgttgaattagttatatagcagcattgtagttgttgagtagtagctctagtatatatcacaattgttatccttgaacccattgaaatctgtatttatgggtataaactgtatcatccacattaccagatgtttgatgataaacacaattccaaaagatcagtcctattctgtcttaggcttgagcattttgagaggtaaaatcatgagggaaaaaagaggctcggttggtgtaactgaaagtaaaaattgcaata

SEQ ID NO: 53238 - DNA, 496 bp, Setaria italica
  misc_feature (447)..(496): n is a, c, g, or t
  Peptide Sequence Number=SeqID_119212
ttaattgctcaactaagctaagaaagaatgttcaacaagctacaacacaaaataaacatcaacgtgataagagaaatggagcagcctctttgcaggattctcgtatggaatctttacaagttttagatgttggtgtgaaatttattactggaactctggtgatgctacaacgaaccaacggtcatgccgggttccagcctactctgagtagcttagagtatgggtgggaactggtgacataatgcaagccaattgttacggtggctgcttgttctgtggttggctactgttgctgccaattgccttcggggcttcgccgtatggatgagtaaaagatatgtggaatccgcgttttctgctggcttcgtgtgtgtgttgaaactagataagtgcgtgaatgtaaatgaacaagaggtaaaagaatggattccattatcgaataaaacnnnnnnnnnnnnnnnnnnnnnnnnnnnnnnnnnnnnnnnnnnnnnnnnnn

SEQ ID NO: 53239 - DNA, 350 bp, Setaria italica
  Peptide Sequence Number=SeqID_119213
cgagcgtggaattgctgctcgtgacagtggtgcttttgcatgggagattgttccgattgaagttcctgttgggaggggaaaaccaccagtacttattgagaaagatgaaagcctggccaagtttgacccagtaaaactgaagaaactccgtccaagtttcaaggagaatggtggtactgtcacagctggaaatgcttctagtataagtgatggagctgctgcattagttttggtgagtgggcagaaggctcaaagaagacttaggacctagacaaagtaccttagacaaaggaatacaaaaggaataataagaacaaagaaataagaactaagaactaacaaaagaacaa

SEQ ID NO: 53240 - DNA, 260 bp, Setaria italica
  Peptide Sequence Number=SeqID_119214
cggcgacgactaggcgagcgccgccacccttcgccacgtttcgccggcgacgagcacccaccaggtcggttggctttggcagttcagaccggccgcgcggccatggcttccgacggaatcgcccccagagatgtatgtgttgttggagttgcacgcacccctatgggtggtttccttggcgccttgtcttccttgcctgcaacaaaacttggctctatagcaattgaagctgctctgaaaagagcaaatgtggatccggt

SEQ ID NO: 53241 - DNA, 179 bp, Setaria italica
  Peptide Sequence Number=SeqID_119215
cagcaaccccaatctttccacccttctccctaagaacaccaagaagggtgaccaaacactgttgtctgcaccactgttaacaaagtctgtgcatctggcatgaaagctactatgtttgcagcacagtcaattcaactgggtatcaatgatattgttgtggcaggtggcatggaaagcat

SEQ ID NO: 53242 - DNA, 434 bp, Setaria italica
  misc_feature (55)..(55): n is a, c, g, or t
  Peptide Sequence Number=SeqID_119216
agcaattgtaaactggatgctagaaatctagctaaaaactgattcaatcaagtangtttcagataccttagatgaacaatgttcatgttatgagaagcttgtaaaagtgtaccaaaatgaagctatacacacataagacatgttgagggttgtttgctatgttggttttcgtgttgttcctctacaccattccaagctttcatacattttcaattaatgttgtatgttgaccaagttaatcaaaatgctgaatttattttctcgtttatttatcctctaggtcattgcacgctaaccttctatctgaaaatgggctctagttcagaagatgattatgaaattagtgattctgagattgatgagcgtgaagcggaggtttatgaacaattaaaatacaaggaaaacaattaaaaagttagaaaagaattacgtta

SEQ ID NO: 53243 - DNA, 367 bp, Setaria italica
  Peptide Sequence Number=SeqID_119217
tgtctaaaagtactaaggtctaaccctaccgttggcccttgccaaatatttgaaggatgaatctgccaggtcatctgagccacagacacaactgaccgtgcttatagagcctcaaaatctcggaaacagagatgatcagtttgtctggccctggatgggtgttctagttaatgtgcctactgagtggaagaatgggcgccgccgcaccgggagccctacgacgcgtacagctacgcgcagaacttcgacgacggcgcggcgtgggtggagccagagaacctctcgcgatccttctccgcgcgcttcgccgtccctccagggtgctgcagagggtcgccgtgtagaggctttatcaaaccgccggcgg

SEQ ID NO: 53244 - DNA, 144 bp, Setaria italica
  Peptide Sequence Number=SeqID_119218
gaagcagaggcatgttagagctttctgttcatgcatcttagatgtgatgggcaatgcttggcaggcatatgtccctgcagcactcttgaacggcagggacatatgcctgccaagcattgcccatcacatctaagatgcatgaac

SEQ ID NO: 53245 - DNA, 409 bp, Setaria italica
  Peptide Sequence Number=SeqID_119219
atgccagcaaaaagataataaaaactcgtgctacagcagaacacaggtactccatttggcctatgtgatttcagctagcgctcggtgaagcgttgcatggtcatcatcttcacttcggcgaagcgtttcgcgcagttggacaagcacgaggcctcactcctgctgaagctgcttccgatgctcccagtaacgcatttgtcccagcaagcaagcgtcagctttgccacgagctcgtttgtcaaggccttcgttctctcctccagggccacaagtggagagttttaccactgcgccaggtccgcccttctgtatgctaactgtaaatgctcgatgagcgccttgaggcgcgggttgttgagggccgaagcatccatggctatggctgtcctcctctctctctctctctctc

SEQ ID NO: 53246 - DNA, 140 bp, Setaria italica
  Peptide Sequence Number=SeqID_119220
ccggatctaggtctagtactagtaaatgaatggggtggcatacgcatacctcgatgagcgccttgaggcgcgggttgttgagggccgaagcatccatggctatggctgtcctcctctctctctctctctctctgcctcgt

SEQ ID NO: 53247 - DNA, 405 bp, Setaria italica
  Peptide Sequence Number=SeqID_119221
tcccttccctgagtactttacacatcacatgttgcactgatccgacatgcagctccaatatgctaagccaattcctgttcaacatcatgtcacggtggtacacaaattctaatgatttgtacataactaatctgatgaaaagacaagttatcaacgatttgaaactacagtggactagagatgctgggcgttctgtggaggatgtggaagtactgggaaagcttgtgccaccaagtagtttgagggaatttaatatgacaggttacaacagtgtgaggtttcctgcctgggttatgtacattacgctttatctcccaagtcttagcaagattgaattgtgggatatacgcaaatgcaacagcttaccgccacaaaaatccccatcaattgtcgtaatgctatcca

SEQ ID NO: 53248 - DNA, 414 bp, Setaria italica
  Peptide Sequence Number=SeqID_119222
cataagatagttaaagatgatctgattcaccaatggatttcttgggtttcatcaagcccaaaaaaatactctctcctacacagctatgtgagaagtatattgtgcagctcctgggattatcattccttcaacattcttgtttgttacccacttatatctttctgatgaatgatcacctcgtaccaaaagagtgaagctccatggaaaacgaattaagcggtcatgtggaagaactatttgattataatatttgttccaaagcatgtgttgcatctacatttctcgcagcatggtcaattagttcagtcttgattcagaggtacaatttctgaagagggaaaagtttatttcatgatgtacctttgtacttgactagtgacttacccctaaattgtattactaattggggttagt

SEQ ID NO: 53249 - DNA, 157 bp, Setaria italica
  Peptide Sequence Number=SeqID_119223
agaatagtacacggaactgttcctagcatgacaatgcttgatacggtgacgaagatgagaacagaacaaccggatatcacaaatcaataccagcatttcaatgctatctgggtgcatctctgtacttggtggcaatatccttctagcaaggaatcac

SEQ ID NO: 53250 - DNA, 215 bp, Setaria italica
  Peptide Sequence Number=SeqID_119224
gcatacatttcacagaaggttggttccatcaaagctttgtcaaatatctgtgaaatgactcctgtaagagttgctacgttgtcaatgttgacttccttcacttgttggcaaagtttctgatgaggaagaggcgaagcagaggcagttgaaagccattacttaaacaaagaactaagaaacgaaccgaaacaaaaaactttaaagaaaaaaactaa

SEQ ID NO: 53251 - DNA, 281 bp, Setaria italica
  Peptide Sequence Number=SeqID_119225
taacttgtcctaaaggtattattctagtcttgtctaattacctattctttgttactaagataccctggttcctctccaccttcttgaatcaatttaccaacctcttgcaacggcaatatgttttcctgcacgaaccttgcaagaagtcgtccaaggtactcagtggctcttggagcatcacttagagtatcttccaatgagccaagaaccaatgcaaggccatcaatgagttgccctttgctcaacaaattatgtcgaccactgctaaggctgacaaaaag

SEQ ID NO: 53252 - DNA, 298 bp, Setaria italica
  misc_feature (92)..(92): n is a, c, g, or t
  Peptide Sequence Number=SeqID_119226
cttgtgaaccaccaaaatgaacgcgaatgtggaggcattcctccgaatgctccccttgttgggaacttggggatgctaatgcagatgagccncggggggccataatccataggaggtgctcctcttcttggaagagaactaacagatggaccacgtcctagcctgctcgattgagcatgcctttcttgagctgcatccctgtgaacctcctcgatcttcttgggaccttcgaccttacgcctactagttagaccaaatttaagttttttaaccgaacaaaggtaacaaaattaagaaa

SEQ ID NO: 53253 - DNA, 366 bp, Setaria italica
  misc_feature (1)..(1): n is a, c, g, or t
  Peptide Sequence Number=SeqID_119227
ngcagcatcctcaacaggccttggcttaggggcatcagatttacctgtcatttgggagtgcccagataccggaggccctgcagatggactgacatatggaatcgcttgcccagactgagtgacgggataattaaacctaggacccgaggatccagtaggaacctggtttacaccagttgtaggagggtaataaatccctgactgattgtaagaattcgacggctgatgaaagaagccgatatgaggagcatagctaccaacaggctgggactgggattgttgtgtcaagttaggcgctgccctctgcccagaagagtccatcctcttatcaagcttcaactcttcatgagtgtctggaatagaaga

SEQ ID NO: 53254 - DNA, 424 bp, Setaria italica
  Peptide Sequence Number=SeqID_119228
ttccctttctttgttcccttagttaagtagttcctattccttctttattcaagcttcaactcttcatgagtgtctggatgagtaatttttacggtagtcttccgaggagcggcaacaaacttattctgttgctgaggatattgtgggggcatgttcataggaatgttacccaactgaggtgggaattgatggccaactgaagtaacataactcataccctgcccttgatgcatcattgcttgctgttgcaattggtgctggatagtcggggcatatagctgctgcgggacttgcggtgcattactgcctgtcaatcccattgacatttgtaatgagctaggtacaacttgtggctgcagttgtggaccgtgaccaccaaactgtaatggaactggtgctggctgatggtgaaaggggatcgaca

SEQ ID NO: 53255 - DNA, 394 bp, Setaria italica
  Peptide Sequence Number=SeqID_119229
gcagcatcctcaacaggccttggcttaggggcatcagatttacctgtcatttgggagtgcccagataccggaggccctgcagatggactgacatatggaatcgcttgcccagactgagtgacgggataattaaacctaggacccgaggatccagtaggaacctggtttacaccagttgtaggagggtaataaatccctgactgattgtaagaattcgacggctgatgaaagaagccgatatgaggagcatagctaccaacaggctgggactgggattgttgtgtcaagttaggcgctgccctctgcccagaagagtccatcctcttaatacaaagacttacaaactacttaacaataagaaagtaagttaacttaaggtaaattaagaaagtaa

SEQ ID NO: 53256 - DNA, 316 bp, Setaria italica
  Peptide Sequence Number=SeqID_119230
cttgtgaaccacccaaaatgaacgcgaatgtggaggcattcctcgaatgctcccttgttggggaacttgggggatgctaatgcagatgagccgcggggggccataatccataggaggtgctcctcttcttggaagagaactaacagatggaccacgtcctagcctgctcgattgagcatgcctttcttgagactgacaataccctagtagaaacctacctacgaatacttacttagggaaccttacgaaccttaacgacctactagttagacctaattttagttttttaccgtactaaggttactaaatttagtaa

SEQ ID NO: 53257 - DNA, 228 bp, Setaria italica
  misc_feature (26)..(26): n is a, c, g, or t
  misc_feature (76)..(76): n is a, c, g, or t
  Peptide Sequence Number=SeqID_119231
cctcactgaaatctggcaaggcaccngccaaatggaagcaaaaattagcatacattttcacagaaggttggttccntcaaagctttgtcaaatatctgtgaaatgactcctgtaagagttgctacgttgtcaatgttgacttccttcacttgttcaaaagttttcaaagtttgcagaggcagttgaaagccattcttaacaagctgacgccgcaaagtttcaaagttt

SEQ ID NO: 53258 - DNA, 245 bp, Setaria italica
  Peptide Sequence Number=SeqID_119232
atttgtgcttgtttgagtagaggaattacaaagtgaactacgggtatacattgaccttgttctgccatatatcctacatcaaattcctaacctcactacacctcagacaatcaaatcaattaagctttgtaatcgaatcagtacaactctcgcaatacctcttcagtggtaccgtgggagagctgagcaaaagggattagagtagtagaaaagctatgggctatctgacctagaaaatgaatcag

SEQ ID NO: 53259 - DNA, 323 bp, Setaria italica
  Peptide Sequence Number=SeqID_119233
acaagtgtacctgtttgagtagaggaattacagagtgaactacgggtatacattgacctgttctgccaaatatcctacaccaaattcctaacctcactacacctcagacaatcaaatcaattaaggctgcctttggttgaactttttcaatctgcttttgcttttgcaaaagccaaaaagccaaccaaaaggtctaaaaaacaccatgtgcttttgcccaaaagctgcttttgctctagtacaaaactaaaagcaccttcacccctactttcaagtacttttggggtaaaatattaccctcgtaaccagtggcaggtgggtaa

SEQ ID NO: 53260 - DNA, 258 bp, Setaria italica
  Peptide Sequence Number=SeqID_119234
cgcacccgcccgggccgccttctcttctccagcgtccgatctcccactcgccgccctcaccgcagctctctccgctcggtcgcttccccacctccgccttccccgcgcgcgcgctcgccacctcgccctcccctccctccacgtcgcgcgcgccctcgcttatataagggttactgttgggtgggccgcggtggttgtggccctgcacctgcagcgcaggaggagcgcatggcggacgcgccggcgagccccgggggg

SEQ ID NO: 53261 - DNA, 256 bp, Setaria italica
  Peptide Sequence Number=SeqID_119235
acttctcctgaatcagcattttctccagggatctcctttaccaatttgatattgagcccctctttcctcccactgatttcttcacctgcctttgcctttgaatcagagccctctcttcttccaccaatctcttcactctgcctcttcatattagcaccacagatctctgtttttccttttatctcatcacgttgcttcaccaccaacactcccaagccaccaccagccactccttcccaccacttcccagacctac

SEQ ID NO: 53262 - DNA, 245 bp, Setaria italica
  misc_feature (172)..(172): n is a, c, g, or t
  Peptide Sequence Number=SeqID_119236
gcggccgcccgagccggagaaggtcacgccgcactgcctcttcctcagctaccagccggagcccggcgtccccgaccgtcgcgaccctcatcgagcggtgcgccccggcgtgcgccgcctcggggaaagccggcggcttcctcgccctcgactggtgcgactccaccccggngctctccgcgctcgcgcgggcctccttcgcgctccaccgccgcctcgccgccgacctcggcggcgccgacgcc

SEQ ID NO: 53263 - DNA, 284 bp, Setaria italica
  Peptide Sequence Number=SeqID_119237
ggggaattggataggtcgggggtggataggctttgtcggtaggtcctttccggggaaaattccattaagtttcttggaataaatgaggatttacgatccgtagattccgtgtttcgtaaactgctgatgtggagactgattatcttctcgttcttcgtcgtcatgggtaatttgaagggggatggggccagaaatgatagagcaggatggagggtaggaagaggaggggaaggttcaggaattctgtcaggcggatggcgatggagtgcctgtgctccggtgag

SEQ ID NO: 53264 - DNA, 334 bp, Setaria italica
  Peptide Sequence Number=SeqID_119238
tttctctctggagtccaggacctgcttctccacttcaaccttcttaggagcatccgccacctcctgcacagctgtgttcattccgcttctgtcatctttgcttccttgagttaccacatgcccggtatggataatcatgtggtaactcaaggaagcaaagatgacagaagcggaatgaacacatgattatccataccgggcatgtgagatcttggctgccctgatctgctagtggcatcagcctgtgaatgcaaatgtggtggtaagggtggccgcacgccaccagtaggcacaccaggtactccagggcctctttgtgctgcttgattctgtt

SEQ ID NO: 53265 - DNA, 242 bp, Setaria italica
  Peptide Sequence Number=SeqID_119239
cagaattagcttccaaactggcagttgaagaagctgcatttcgtgacgttcaggagagaaaagttgagctgcatgatgcgttagttaaaatggtacaaggcggaagtgttgatggtttgcttcaggttcgagccgatcgaatccaacatcaattagaagagatggagaaagctcttctaattgatgttggattcgatcggctcgaacctgaagcaaaccatcaacacttccgcttctgtcat

SEQ ID NO: 53266 - DNA, 352 bp, Setaria italica
  Peptide Sequence Number=SeqID_119240
ttcttttgggtattgtattgggggtattgtattattgttccccttgtttgtctattctttcttaattggttcattatcaaggatgaaagacgttacagtggtggtgaccgagtggctgagagtgaaataggatatgattttggtgatgattccgtgaggagccctggtagtgctggaaggagtgcctcaggaagtccatttaaatcttcccgctttgggatgcatgactcatctcccagcaaaagagaaagctacagtgatcatggtggttctgaatctgtttttggagacaagtttgctgatgaaacttcctggaactttgatgatcaagatactgactctgtttgggttc

SEQ ID NO: 53267 - DNA, 254 bp, Setaria italica
  Peptide Sequence Number=SeqID_119241
ccggtagacacggtcctcccagctgccgccctgcgctggtgccggcgctctgtgccctggtcgtggatcccacctcccggccgtcggcctgcacccccacccaagccgccgccccacgcctctcccggccacagtccggcggcctgcggtagtagtggtcaagagatgaacgtggcagtgccaccaccaccaccaccacatcttcggctatatgaatttgccaagaccgccctcatctaaaattttttcctttc

SEQ ID NO: 53268 - DNA, 339 bp, Setaria italica
  misc_feature (12)..(12): n is a, c, g, or t
  Peptide Sequence Number=SeqID_119242
gctcagactggntaaatgtgcactcatagacatctggatcaccagccagtgcacggagagatgactcgcaaaaacgggcagcagcataggccatggacagggtagcagaccctgcaccagcccttggcctccaccacctctgtcccggcattctgtatcctctttgtcagctcctcagtttcctcttctgtgaaggtaacagatggcctggtcttggacaataacggcaatattgtaatcccagcatgaccgccgacaactgggacgtcaacatcaattgtagtctttctaggtttctttctttcttgtttgttccttaacttaaatttgtttgtttta

SEQ ID NO: 53269 - DNA, 226 bp, Setaria italica
  Peptide Sequence Number=SeqID_119243
gtcagctcctcaatttcctcttttgtgaaggtaacagatggcctcatcttggacaataacggcaatatagtgatcccagcatgaccgccgacaactgggatgtcgacatcaatgagcttgaggttcttcttcagtgccacaaatgtgttggccctgacaacatccagggtggtaactccaaactgagacacgcaacaggtgataggcaaggcacacaggggatagg

SEQ ID NO: 53270 - DNA, 390 bp, Setaria italica
  Peptide Sequence Number=SeqID_119244
tggttccctattaactactatttgtccttactagtagcgttgcaagcccttggctttgcaacaattgccctctttctaccatcacccaggtcttcaatgtcgaaaacattaactgggcacttcttcactagctcctcagcatcgacaccttcaatttgattgagaatttcaacctcagggagcattctgtaccaagccgtagcaactggagaccacttggcatgaactttcccaactcccttaacagcatgtgcctcgagctcaatagcctgtcctgccccaagcctggcaatagttatatctttaaacttcacaccaagaggtcttttgtaatatattccttttggtctttgactgaaggagtgaaagtcttctgtttgtccccagact

SEQ ID NO: 53271 - DNA, 322 bp, Setaria italica
  Peptide Sequence Number=SeqID_119245
taagtcctaatctatgtgaaagaacctacatactgcctattaactgaggtgttgtcaagccttggatctgcatcaagtggaataagtcctaatctatgtgaaagaacctcatctgctataactgaggtgttgtcagccatgaagattttctcaattgccatagtcggaacctctgagatgaggattctccggaaagcattagcaattgatgcatcaacaccaatcatatcaaactccatatcatcttcagttagacgttttatatcaattttgaagttcttgcaaaaatttactccaactagaacaacaactaattaataca

SEQ ID NO: 53272 - DNA, 282 bp, Setaria italica
  misc_feature (253)..(253): n is a, c, g, or t
  Peptide Sequence Number=SeqID_119246
aaaatttaaacttaaacaaaaccaaaaaacaaaaccaaaccaaacaaaaaaataagtttagaatacgtaccaactaagtactacctgcaaaatatcagatatggcggactatgctggtttactccaccgttgcaagtgtcagcctctcaggatagctcagatatgaccttctcgcacttcccttccaaaatcttcacggcttctgtgaatagcacctccgggggcagagctccagtggactcaatggtaaatntgaaatggtctctaacacgccttagttgg

SEQ ID NO: 53273 - DNA, 490 bp, Setaria italica
  Peptide Sequence Number=SeqID_119247
ctgatgccgtggtgaataaactggtcattctttgtactgtgtcctgaataaataaagtgtggccctaccttaagaaatgtgcttgataatgagttcgttgtatatatcgggctatcagcaaatagcagaagttcatctcactttacccactattgatgagctactttgttgttttgtaggcaattcggcaaatcaagctattgaccttcttataagaaaaggtgttcctgaggaccgaatcattttcctaaatctcatctcggtatatctctttgcacagcgaacagctcttgatgtctctttcttcaagttgcataacgcctgccacatcttttttttggatgcaggctcctgaagggattcaatgcgtttgcaagcgattcccgttgctgaagatcgtaacatcggagatcgattatggtctgaacgaggaattcagggtcatccctggactgggagagtatggggatcgctactttggcacagacaa

SEQ ID NO: 53274 - DNA, 364 bp, Setaria italica
  Peptide Sequence Number=SeqID_119248
gtggagtgtctattgtgcgaagtggtgagagcatggagaatgcattgcgtgcttgctgtaaaggaataaaaattggaaaaattctaatacatcgtgttggagacaacggacagcagcttgtatatcacaaacttccaatggatattgctgaacggcatgttctacttttggatccagtgcttggtacaggcaattcggcaaatcaagctattgaccttcttataagaaaaggtgttcctgaggaccgaatcattttcctaaatctcatctcggctcctgaagggattcaatgcgtttgcaagacgtaatttacccgttttagttactagaaagaatacgtaaacaatacggaagaatacgaata

SEQ ID NO: 53275 - DNA, 205 bp, Setaria italica
  Peptide Sequence Number=SeqID_119249
gcatgacttgtgcaaaatctatcctaatgttcatgtagttcaatctttgttcttccttcaaagaagtatgctgacgtgattattccacgaggaggtgataaccatgtagcagttgatctaattgttcaacatatctgtacaaagcttggtcagcatgacttgtgcaaaatctatcctaaagttgattgaactacatgaacattag

SEQ ID NO: 53276 - DNA, 354 bp, Setaria italica
  misc_feature (35)..(35): n is a, c, g, or t
  misc_feature (85)..(85): n is a, c, g, or t
  Peptide Sequence Number=SeqID_119250
tgtacggattcgtgcagataaggcagcctggggcnctttttttcagcacgctggtggggtgcctgatagttgtgatcggggtganatttgtgtctctgcacctcaactcgtcaagcagcggtaaaccgagggcttcttcagcggaatacagatgatgttgagaaggaagtgtgttacttatttgatagaagactttgcatatataagcaaaccaaaccaaaccgggggctagcgaatagaactgggggtatgcatgttacgggctatttgttttagcctgcaaccaaagtagttaggaattacaatagttagttagtaatagaataagaagagagtatctttttccaaaaaaaa

SEQ ID NO: 53277 - DNA, 278 bp, Setaria italica
  Peptide Sequence Number=SeqID_119251
ccgtcgtctccgtcgctccacctccaccacctgcagccctgcagggaggaggaagaacttgttctcttccccgatggatggggttcctcactctctctaggagctgccagagcgactactagcgagggagggagggggttagggtttcttctcctgatcaggggttaggggttagtttcgatttcgaggatgcggaagcgggatctggggatcctactgctcgccgccttcgccgtcttcttctccctccaccacgagggcgacttctccttccgcga

SEQ ID NO: 53278 - DNA, 224 bp, Setaria italica
  Peptide Sequence Number=SeqID_119252
gccatctccataaccaactacactctcaagcatggagatgctggccttgtcatcgtaggaggaaggatggaaatgcagcaccatgtatgttgcctcttcgcactatttgtactgtattggtccacatgctttgcttgcttggatttggatgtgctactcgcttatacccttgtaattcagtcggcagatcttttcgacgaatttatgatgccagaagaccaccg

SEQ ID NO: 53279 - DNA, 181 bp, Setaria italica
  Peptide Sequence Number=SeqID_119253
taatagtgtgaacaagcccattgaacacaatccacctggaaaggatgcttccaatagaatagctagagtgcttgggaaggctgcagatattgctagctcaaataaagtcaggaaggtatgacgcataaacacggctgttgcattcagaatttgccttgtcttctaggaatgattgcggtca

SEQ ID NO: 53280 - DNA, 285 bp, Setaria italica
  misc_feature (205)..(205): n is a, c, g, or t
  Peptide Sequence Number=SeqID_119254
ttaacttacttaggttagttaggttaagttccttatttggttagttatttatttcgtttctttttttgttactaagtcctagggtaggtaggttggtacttcgttacttctcctgggctgcttggccatgatgcgggtatggaggtggcaagtatcaacaggggcaacatggtccaatctcccatctccgtcgggggatgatggngaacatagtggttcctactttgaaggctttctcattgcgttcctatgaccgaaaagaggtgatcatcgcaggcggcgatc

SEQ ID NO: 53281 - DNA, 449 bp, Setaria italica
  Peptide Sequence Number=SeqID_119255
tcaaaatcaatcaaatcctggtgcccagaaatagatgcaaggatctattacttcagttactgaaagttttgctctatctttatttctggggtcttgtcggttatttgttctgtcaatccggaaggaatcttacggtgccagtcctttttgttctaaggagcctgaaactgatgatgacatgctttcctgcagttctatgccatcgcctcctgtggcgtgaatgtgtattcctgtaacctattaggcattagctgctgtctgaactgctcttcgcctggtacaaatggtcgagcctgatgtctggattttgtcatttcctttcttgagcgcatctttctatggcatatactggtttagaaaggtttcactaattggtgttttggttccagatgttgtgatggcatggcttccatgagtaacatagtaatccagcttcatatcgatgctac

SEQ ID NO: 53282 - DNA, 238 bp, Setaria italica
  Peptide Sequence Number=SeqID_119256
tcattatatttatccacaggctactgctcgcttttcaggagttagcaatcatgaccagttgaattacattttatggcaggttatttgttctgtcaatccggaaggaatcttacggtgccagtcctttttgttctaaggagcctgaaactgatgatgacatgctttcctgcagttctatgccatcgcctcctgtggcgtgaatgtgtattcctgtaacctattaggcattagctgctgt

SEQ ID NO: 53283 - DNA, 423 bp, Setaria italica
  Peptide Sequence Number=SeqID_119257
tacaagacttagaaattacgaacgtagaattacggaaactaaactaggaatagaagactttaggggggcaccagaaagagaatctgttcccttagaggaatctttgccctgctttcttctcttgtcaccatccatatcgtcgtcagaatttccatcaccaccgcttcctggtttacttgctgcacctgcagttattccagggcctctgttccacaggatatcaagatataaacatgttgtaccaaaaaaacacattgtaaaaacaaactatgcaagcataaactcacaggtccagagttccattttgcaaatcaaagaaagaaatcctttgacataaccttgcaacgttcgttcctcctttcaataacagatactaagttggttgggtggtacttgtcttttaaccagtcctcattcttgtgg

SEQ ID NO: 53284 - DNA, 433 bp, Setaria italica
  Peptide Sequence Number=SeqID_119258
actgaagccgtaataattaagaccagatacatgcgacatgtcagaatagcacgctaaaatttgcagatttatgaattttttaaggcaagaaatggagtgtgttgttcttactggtgcagactgttgcataactggcgttccacctggtgcattaggatcgttcatgtagttttggaaataaagatcctctcgaacttttgaagtcgactctaacacaagctccgggtgcttgagcctcaaatgcttgtggacaaactcaggagcatgaaaaagtttagtacagcccttggctccacagccatatttccatccatacttttcatccctgattttccggacataaggctctaaaacttcaacagctgctgcatcaattttatccttggcagttagtatgaccagagggtcctgaccattcagtctttcctgccag

SEQ ID NO: 53285 - DNA, 377 bp, Setaria italica
  Peptide Sequence Number=SeqID_119259
caggaacaaatggtcccaagggaccagcaccaggtacaggcatcaatattggtggagggggggaattcggcaacaaaggagcattggagccccgtccacggaaagcatcaaacatctgatcatcaggcccatcacggcttggagagcgatcacctctaccatatcggcctccctctgccttatcattgtccttgttattgccacggtcaaatctcagacgactgtccatgccaggtttccgtcttcctctgtctggtgcaaactgttgcataactggcgttccacctggtgcaattaaggaatacgttacaatagtaagttttaggaaaataaaagaatacctactacgaaactttttagaaaagttacgaactaca

SEQ ID NO: 53286 - DNA, 278 bp, Setaria italica
  Peptide Sequence Number=SeqID_119260
actaggttgtccctaaaaattttgtatttttacttttgttttttcttttattttttgttttaaccttttttttccttttatttcttccgactctagagagaaacacaacccctattctccaatgagagcacgggaaaaccttaggcgtctgggggatgctggagcctacaagcttctgtagtcaaggacagtcacttcctcgtcaggagcatcaaggtcgttgtaacttcgtagacggcgaggatcatgacggaaattttggaggtctattagtttta

SEQ ID NO: 53287 - DNA, 247 bp, Setaria italica
  Peptide Sequence Number=SeqID_119261
ttcttgttggagttcaaaataaagacacgtttttgtagtagtgatatactcagttctatattcttgatacctgcgttcagcttcacttggtgaaatatcatcctctagaacttgcatgaactgtttgtatgtcatcaaaccttccctctgggtgatccctggaccatcattggcctttctctcacacatcttactaccacctctctctccatctccaatggcggccgccaccaccacctccccttcc

SEQ ID NO: 53288 - DNA, 281 bp, Setaria italica
  Peptide Sequence Number=SeqID_119262
aggacgaggaggaggggctggggctgccgcgctcgagttccgtgtccgccacggccgtggaggccaagaccgcggcggcggcggcgcgggcgcggtgggggtggcacttcccgagcccgctcaaggcgttccggcaccggaggtcgtcggcgagcgtggccgggcgggcgtgagcgcagcgcaaggtaccacctccagatggccggaaaagtgatcagcgggtggggtgggggtcatgtgatggccgggaatcgttaattattaattttaactatatgagg

SEQ ID NO: 53289 - DNA, 451 bp, Setaria italica
  Peptide Sequence Number=SeqID_119263
taaagaaggttagaagggttaatagaaaaagttacggagcttccccatgttctggtaagtagggtgcagattgaagctgtctttggtttcccataatggaaattcaaaacttaatctctggttaaatatgtataaattaaattattttatgtgcggcataaatccctgatattgttttagttcctcaatcccaggtttcccactcatttatatttttaacttttgtttacagactaaaactgcttctgggagggcagcagatcactgatatggggcccatcgtccagccattggatcatgcaagctgtgtcaatcaccggcttcctttagatgactccttttctcttgtagagataaatctaataagataaatgttaacaaactgcagatgcctaaatgcactgcactattttgtaattttccttcgtatttcagtatatagctattcggc

SEQ ID NO: 53290 - DNA, 385 bp, Setaria italica
  Peptide Sequence Number=SeqID_119264
acaaatggcagttcatctaagccaatcccctgaaacgaccaaacgatgaagctggtgacaaggcgaagctaacctgcaagaggagcccgcttgtcaaaataaacatggacggcaatcccattggaaggaaaatagacctcgcagcatacgacaactatcagaagctgtcatctgccgtcgaagagttgttttctggttttcttgaaggtacaaatgaaagaacagaccacagaaaacaatactccgtcaattttttttataaagacgaatgcttgcgtatctaaatagcaccaatcagaagcatcttttttacttctaaaatgttttttggttctgcagctcaaaacgatttggactgtactaaaagtggagagcaaggagcgga

SEQ ID NO: 53291 - DNA, 516 bp, Setaria italica
  Peptide Sequence Number=SeqID_119265
ttagggtggcatggacacataccattaaatttctaaggtcccgtttggatcattggaattgaattccattctaataatcataatttagacacaaattaattaagctaatataattgtatgtggaatatattagtatattattgttggtgatatgggagagatacttatgtgctgcacttctactatagggaagcgagtttaagagcgtgctataagaattgaatttcattctaataatcataatctatagaatcgatttccatctcacaccctatgaatttaagataggcttatatctaaactttgaaaggttgtggaatgccacgttccaagataaattagcctacttcattaagtagattccaattccttcgaatgaatggatccaaacggggcctaggtgaaaaatggaagaatgtttcgtacttaggtgcatagtttatttttcattatgtcagtcctctagttacatgtgtgtggtcgtgtggagacagagcaatgcttggtttagcacaa

SEQ ID NO: 53292 - DNA, 469 bp, Setaria italica
  Peptide Sequence Number=SeqID_119266
tctgaatatgcattaattgtatcctcataatacataatatgctttgtatttatgtgcgcagagggctacctgacctcatgctatatcttctgagatcttttgtccaaataaatatgttgcatatgttattgagttcatttggtaatgtcatggaaaattggcaaacaacaatatgcaggtacattgaacctcttccatcaggttctgatggtaaatttgaatttgacaacatgattattggacaagcaattccttcaaactttataccagcaatagagaagggtttcagggaagcttgcaattcgggttcattgattgggcatcctgttgaaaatattagaatcgtactgactgatggggcttcacatcaagtggattccagtgaacttgcttttaagctagctgctatctatgcttttagacaggtgatccatatcttggacacagacaacacagattctagtgaact

SEQ ID NO: 53293 - DNA, 459 bp, Setaria italica
  Peptide Sequence Number=SeqID_119267
tcagaagttacaaattactatgaggccccgtttggatccttggaattgaattccattctaataatcataatttagacacaaaattaattaagctaatatagttgtatgtggaatatatttgtatattattgtaggccatatgggagagatacttatgtgctgcacttctgctatagggaagcgagtcaaagagcgtgctataagttgcatattagaaacatagcatgaggatctatagaatcaatttccatctccacccccatgaatttaagataggcttatatctaaactttggaaagttgtggaatgtcacattccaagataaatagcctacttcattaactagattccaattccttcaaaatgaagggatccaaacggggcctgactgttaataggtgaaatatagcgtacatggtcttgagacattgatcttgtatgcaggatgcaaaagacaga

SEQ ID NO: 53294 - DNA, 474 bp, Setaria italica
  Peptide Sequence Number=SeqID_119268
aacacttttgatgaaagccaaaacacaaacaactaacagctttttggaagtacgcttcacgtcctcgcttacgaagatactcctgtaaatcctcatagcttgaacttttgctctccaacaattctggtgtcaagtcatccaaaagatagcaatactgttgtagcttagctatgagcttgctgaggtcccaattttcctttggagtatcacggcctatgtttgcatctaatatgtcgtccattgttaattcagcatattccacaattagcgactcaagactgtcagatgctagtgcacgccttctttctgcatatacacgatctctctggctattcaacacctcatcatactcaaataattgcttcctgatgtacaaaaaagtaagttctcaaactttacctactagaagacttacaatactaagggacccttagttaaacaatttttagaattacaaataaggaaagaatacca

SEQ ID NO: 53295 - DNA, 278 bp, Setaria italica
  Peptide Sequence Number=SeqID_119269
ctcccacactatgaatttaagataggcttatatctaaactttggaaagttgtggaatgcctcgttccaagataaattagcctactccattaagtagattccaatttcttcaaatgaagggatccaaacgggcctcactttctttatgcagatactacttttggaaaagttattgtctataattttgggcactgttgcaatataagaacacgcgggagacaatacatctagtaagaagaacactggaggttattcttttgacattttcactaagagtgg

SEQ ID NO: 53296 - DNA, 264 bp, Setaria italica
  Peptide Sequence Number=SeqID_119270
aaacaacatgttgcacttccatgtggcagcacatgctggaaatgggtggtagaatctagtacactggtccaagtgcaaaagaaaaggatataaaaaacatagaagagtctgtgttgacacatttgttttggatttcagttttgaattcaagggaattcttcttaggccccgtttggatcattggaattgaatttccatcctaataattataatttagacacaaattaattaagctcatataattgtatgtggaatatagttgta

SEQ ID NO: 53297 - DNA, 338 bp, Setaria italica
  Peptide Sequence Number=SeqID_119271
ttccatctcccaccccatgaatttaagatagacttatatctaaactttggaaagttgtggaatgccacattccaagataaattagcctactccattaagtagattccaattccttcaaaatgaagggctccaaacggggcctaagtggtattggtcctttttagccctatttaattaagcagtgtcatgtacattgttactggtgataacaaaaaaaaaatgagcactgtcatgttcaatgtatgcatggtgtacttgactacttgtgatatggaatgtgagtttctcttcacagagaacaatgaaataatggaatgcaattaaatagaccttgttcc

SEQ ID NO: 53298 - DNA, 261 bp, Setaria italica
  Peptide Sequence Number=SeqID_119272
tcccctcgtgtgccttgcctatcccctgttggtgtctcaggcccttcccatggccttgaatacaacctcatcagaacctttgtcctggagcaaggcggtggcgtaggtgatgtagttgcgcatcctcccctgcgtggtgatgcggatctcattctccttgatgggcgcctcctccctcggcttctccaccctctggtaccggtccatccttctcccgcttctctctagctgcgcggcggttagggcccgggcaccggcggt

SEQ ID NO: 53299 - DNA, 260 bp, Setaria italica
  Peptide Sequence Number=SeqID_119273
tcctctcctgccacggccctaaaacctctccctcttccacggggatatccgttgcccatatactcaggggcatgatcatcctccccccaaccaccatcagcatattcattgtatccatttcctgaaacacgtccacctcttccccttcccctgcctcgcccacggcctcgaccaccacggcccctccctcggccaccaggtgagtgtgcatcttcatcgttatcatattcaaccaaaggcttcacctcatcagcaggcaa

SEQ ID NO: 53300 - DNA, 249 bp, Setaria italica
  Peptide Sequence Number=SeqID_119274
tatgaaaccatagaaatcggttaaaaacaagcggtcgcagagaaaatcttcatatacagttaacaggatgcggtgtgcatacccaacagaggatgtgtccagctccttctttgaaagagttatagtgatcatagagacatgccttgttgtctcaagcctgcggagatatataatcattagactccaaaatatagttcaccagcagatatatcctggaacaaaaacaagtcacttacggaagtaggcctt

SEQ ID NO: 53301 - DNA, 253 bp, Setaria italica
  Peptide Sequence Number=SeqID_119275
ctcctctgtgtaaactttatattcatctagaataatacttacaataaaatagacaatttacttacaaaattacgctattaacatcatctcgtgttggtcccttctcacatgagtaggacaaccgctcttctgcttccagctcagttaacgatttctctccccattctttgacagccacttcaactgcatctttgacagatgatgatgtttcttttgaaagttcgcatgggaacaagctttcgtttgtcttcca

SEQ ID NO: 53302 - DNA, 268 bp, Setaria italica
  Peptide Sequence Number=SeqID_119276
caaaagtacttgaaatcaacttgacttgcttttatcttctcatatgtacccagccagtacatatctcttatcttcacttcaggaaattaattttctcaatgtatcaaatcttgtcttcatagaagaacttcatcggacaagactccactataataatcctttggaatgtagacatcccggacaggaccaacctttcaaaaggaactcgaagatcctccgctctgacacttaatggaatattgcggaccaaagactcccagaaccctcc

SEQ ID NO: 53303 - DNA, 246 bp, Setaria italica
  Peptide Sequence Number=SeqID_119277
caccagttgctcaggccatggacgtcgaagtgcaccgcgacgtcgtccttgccgctgtagacacactgcccagcctgcagggcgccttgctggctcgcggcggcctggaaggcggcgtcgaagtactccgaccacctgagctcgtccagcgcgccggcgtagctgtcgacgtggccggcgtcggccacggcgttcggcccgagctccagccacgggagcccgtcggcgccggcgacgctagcgttg

SEQ ID NO: 53304 - DNA, 260 bp, Setaria italica
  Peptide Sequence Number=SeqID_119278
caaccaaagttggtggtttgtgtacactttgtttccttgaagagatggaccacctgatcagtcaaaaccatctgttcaagcgaagtatcatactgataaaggcctggtgttactatgaaagtcgtatacttggagctcatcatggtcttatatcgacatatgccctagagactctggttctttacatttttcatgtcttcaacaattcttttgctggaccacttgaggtattgtatcggttcctagaattctttagttaa

SEQ ID NO: 53305 - DNA, 261 bp, Setaria italica
  Peptide Sequence Number=SeqID_119279
aaaagtagagaaggctgaatttcgagtgagagaagtacagtatattcaggcagaggtaaagataattaagtgtcttgtggaaaacattgttgttgacatctctttcaaccaagttggtggtttgtgtacactttgtttccttgaagaggatcagttcctgctaaatttggtccctattcttgatctttagttatattctgtttaccagatggaccacctgatcagtcaaaaccatctgttcaagcgaagtatcatactgat

SEQ ID NO: 53306 - DNA, 243 bp, Setaria italica
  Peptide Sequence Number=SeqID_119280
gtccttgatcaccagcgcctgctggcccacgagcacgacagtggggacgaggaagacggcgaagcagggcggagcagatgcggtgcgcgtaggcgcggaggagcagcaccgcgatgagcgtcttcccggcgcccgtctcgaggaacgccaccgtgttcccggccaccgcgcgctccagcgcctccagctggtacctgcatccagcagcatgggggaacaaccgcattaggacgagagagccga

SEQ ID NO: 53307 - DNA, 349 bp, Setaria italica
  misc_feature (349)..(349): n is a, c, g, or t
  Peptide Sequence Number=SeqID_119281
ttgaagtcaggattgatgtatttcctgtacatctccagaatctcattgtggctgacgacgccagggttggtgaagttccatatgcccctgcaatcccgcttcgccatctcgatggagaaaggcagaagctcatccaaaattgtcatgctgttgggaatgttcaccaccttgtcgtaacgagctatctttgtgatgaagttacgagggttgcttagatctgatgatataggcatcctgactctaagagtacacacattatcatactccttcaatagctcttccacctgcacaatgtttaccagtacaaaaattagatttagacattatgaagtaaatgtaatttttttan

SEQ ID NO: 53308 - DNA, 252 bp, Setaria italica
  misc_feature (250)..(250): n is a, c, g, or t
  Peptide Sequence Number=SeqID_119282
ttatcatagtccttcaatagctcttcaacctgcaccatgattaacagcacagaaattaactttcaggcattatcaagcagtaaaaggaattccactgataaaaggaaaagcaaagtgagcttaccattgctttagttttggaataaaaggagcctgtaaagttgggtgtgtcttcctctttaaagccgattccagacccttcagggtgcttagcatcatactcaaatatacagcctgtagcataattaanca

SEQ ID NO: 53309 - DNA, 380 bp, Setaria italica
  misc_feature (200)..(200): n is a, c, g, or t
  Peptide Sequence Number=SeqID_119283
ttctagtgccattggtggtcactctggaattcctgtgacatatataaggcttaagaaaatgtttgcttggacaggtatgaagaaagatgttatccaatttgtcaaagcctgtatgatttgtcagtagtcaaaacctgatagaaacaagcttcctggcttacttcaaccactgcatgttccttctggagcttgacaaaccntatctggccacgccaactgtgtgctgggtgtaattgattcttttaccaaatatgctcatttcttgcctctgcatcaccctttcaccgcagcaggatggcaaaggtatttatgaatcaaagtttaccgcttacatggtcttccattagcaattatatctgatcgtgatagagtattcacaa

SEQ ID NO: 53310 - DNA, 400 bp, Setaria italica
  Peptide Sequence Number=SeqID_119284
gtcaaagcctgtatgatttgtcagtagtcaaaacctgatagtaaacaagctcctggctacttcaaccactgcatgttccttctggagcttgacaaaccatatctggccacgccaactgtgtgctggtggtaattgatcttttaccaaatatgctcatttcttgcctctgcatcaccctttcaccgcagcaggagtggcaaagaatactagtataacacaagtacacattttgctattggaagatcccctttgaagctctgtatggataccactaaagcactttgggatatctgcggtcgaggttgttcaagttcctaagttgtcaaattggttgcagaatcgacaggtaatgaacaatctcatccaccagcatctacttcgagctaaatagcgtatgaaa

SEQ ID NO: 53311 - DNA, 216 bp, Setaria italica
  Peptide Sequence Number=SeqID_119285
cggttgcactggacacttgtgttagtctatgtgagagccgcgccaggtgagcagagcaggctacttatggtgagcgattggatgagggcgtgagcagggcacgggaagggggccgcgcccgggcgaaaccgcgaaaccggcggcggagttgcggctagcgcacctggctttggctgggacgacggaagaactagactaggacgacggaacaaagaa

SEQ ID NO: 53312 - DNA, 248 bp, Setaria italica
  Peptide Sequence Number=SeqID_119286
gaagcccatttccattaagagcatgggctcaaaagaaaaccatttcccaccagctagctatctaccgtcttgaaactaattttttccttgcggacttctctgcaaagtagtgcagctaagcccacagattctggtgcagaaaattgatagtgcatggaaatctcgatctctttttctatcaaaagaattaggtgctcccaaagatagcattgttaagatggtcacaaagcacccgcagctgcttcatt

SEQ ID NO: 53313 - DNA, 215 bp, Setaria italica
  Peptide Sequence Number=SeqID_119287
ttatctagttctaggggtatcttactttgattgctagttactattaactacatctgctgaacaaacatgtaaggggaggcgacatgaaccatacaatataagctgtagttagtgatgtattatagacccactgatcatcgagtatcaagtcagcaatgaagcccatttccattaagagcatgggctcaaaagaaaacctgtcagcagcaagctgg

SEQ ID NO: 53314 - DNA, 247 bp, Setaria italica
  Peptide Sequence Number=SeqID_119288
accatgtaaggggagggcgacatgaaccatacaatataagctgtagttagtgatgtattatagacccactgatcatcgagtatcaagtcagcaatgaagcccatttccattaagagcatgggctcaaaagaaaaccatttcccaccagctagctatctaccgtcttgaaactaattttttccttgcggacttctctgcaaaacctgtcagcagcaagctctgtctgaatgtatggtatttctccaag

SEQ ID NO: 53315 - DNA, 332 bp, Setaria italica
  Peptide Sequence Number=SeqID_119289
tttaaggttaaaccttagacaaccaagagtaatatgcaaagtggcagagccactgagaagactgatgtatacagctttggggttttggtacttgaaattgccgtcaagtaagatgttgcttgacttaatatcacgatgtattattcgaggcgaacaatcatgatgcaaataagacaagccttttgctgctccgagtattatgttaatacgtgcgtcccaatccaactgttcagacttttcatgcaacacttcatcgaggcttccaccttgaagatagtcatatatcaacagttttgatggaaggagagttgcagtaaccacgaagattgacc

SEQ ID NO: 53316 - DNA, 279 bp, Setaria italica
  Peptide Sequence Number=SeqID_119290
cggaggagcggccgacaatgcacagggtggtacagatgctggagtcggatgtaattacaccatgccctagcgatttctacgattcagagtagtctcctggacaaagctgtatacatcagtcttctcagtggctctgccactttgcatatactctggtgcaaggtaaccaaatgttcctgcaactattgtagtgatatgtgattcttcatcctctaatagttttgtcaagtccgaagtctgatacacgggcctcaaaattagccgtcaagtaagatgttg

SEQ ID NO: 53317 - DNA, 324 bp, Setaria italica
  Peptide Sequence Number=SeqID_119291
aaccggttggttcaacgggttggagaccaaacaccgcggcaatgcatttacacaatatctgcaagataaggaatgcgccttcacgggaaatcagcggcagtgtggctttgtccaggagactactctgaatcgtagaaatcgctagggcatggtgtaattacatccgactccagcatctgtaccaccctgtgcatggtgtaattacatccgactccagcatctgtaccaccctgtgcattgtcggccgctcctccggcaaagagcttacacattgcttggctagagaaagcagagcatctaaggtctcaatctgcacaccttcac

SEQ ID NO: 53318 - DNA, 173 bp, Setaria italica
  Peptide Sequence Number=SeqID_119292
gcggcagcgcgccgagaccacccgtcccagatcgccgcggcgcgttcctgccggcgtcggcgtcggcgcggcgcagggttggaaatctatttggccactgttagtggccacatgttaagtccatatctagtttgaaagatgcacgccaatatgactcatcaatgacatctagg

SEQ ID NO: 53319 - DNA, 405 bp, Setaria italica
  Peptide Sequence Number=SeqID_119293
agaactttaacattctcatgaatgttaagtagcctccgtttactgtacatgctgtaattttcaatgcaagagaaacttccttgtacaaaagaatgtaaatctgtacaccttgcttgcccttgattccagaagaatatcaagcctagaggatccgtggaagtgaaaaagggcgtctaagatacaattctgggcacagccaccagtcagttataaatatctctgatttggcttcctcaatggaagaagcaatagcatcaaatgcagcacgcccatctatgaaccattgtaccacactaccatcttcagtcaggcccctaggtggtgcaaatgaaccaaaacggtgagggtgacaccagccctctggggggccgtacgaagacaagacaatttaattagacaagtaaa

SEQ ID NO: 53320 - DNA, 246 bp, Setaria italica
  Peptide Sequence Number=SeqID_119294
tcagcctacgactttctctatgggcggaacaccttggtcttcttccaggagaggttagttgcattatggatcctgtggatgattcagcgtacaaaaacatctggatggccactgccaaggtgagtgtagtgggaatatggtaccttgaggcactatttttaaacttgacgagcgacaaacctgttttgaactaattgagacaatttgagtatgactattctggtgaacaccatgatctaccaacaa

SEQ ID NO: 53321 - DNA, 396 bp, Setaria italica
  Peptide Sequence Number=SeqID_119295
cttgtctttaggttcttatttttcatttgtatcattgctgaacttgacaatgtcacttattgcagaggaataaaagcaccaaatgagcaagtctaatttccattattaatgcctcatcatcacatggtaattcctcattacatgggtacaagcaaagaaacaaatggggaaacagagagtaaacagaaccacggcatggatgttaaatttaataggttaaactccttgacaacaccagcatcgtgtcaggacattccgttgcttttgccgcatgagcctgatcaccatgcatttccaaatggagattttggactgaatggtatgaatatcaacaatggtctttcagatcacccaaataaaaccaaacggaaccagccactgcccaaccgaaaggcc

SEQ ID NO: 53322 - DNA, 221 bp, Setaria italica
  Peptide Sequence Number=SeqID_119296
atgggatatttgaatattgattgtaagtgtaaacgaaacatatcacctcacatgagctcctcctccttgcggaggtactccccggcgtcagactggtgcagcacgacgactgcgttggtgtcggctttcctgcagtcctgcgccgacctcgcggcgacgccgaagccgagcggcacgtcggccatggacatgacgacgacgccgtcgccggccttggtgtt

SEQ ID NO: 53323 - DNA, 333 bp, Setaria italica
  Peptide Sequence Number=SeqID_119297
gagatgaggaaatgaagaagggaaggatggaacggcctgtactggaggaaaggtacactttcctatgtgatcctcaggtgagaatccaaatatccctacagccttattgtatgtcacacatctggcaactctagccatattttcatagaaggcgcctccaacgaaaccaaaatctgtgaaaatgaaagttctctcaacatcgaaaccacatgctataatgtctttagcattttcacgggcaagccttttactttcctcaatagtcaagttcttccagtagaacttgactattgaggaagtaaaggcttgcccgtgaaagttctctcaacatcg

SEQ ID NO: 53324 - DNA, 306 bp, Setaria italica
  misc_feature (74)..(74): n is a, c, g, or t
  Peptide Sequence Number=SeqID_119298
attccggaactccatccagatttgcgctaaaaaaggtttgattcaagctgcagaggggcttttgatcttgaacngttcttcaacgctcgaatcaactaaagttttgctcttctcaattgcatccaatagtttgctgatgccattgtcactgaagatgctggagaatggacaagagctgaattcttcgttcgagaagcttgacataagtgttcttgggctgggtgaaggaagcatccaatcctccatcaatgttccctgattgtcagttctgaccgaaacttttaaagcaaagtagcaaatcgcgcc

SEQ ID NO: 53325 - DNA, 149 bp, Setaria italica
  Peptide Sequence Number=SeqID_119299
gagaagaaactctaggagcaggcaaggcagtttcgttcttccgttgatgattgcacggaggcgaccggattggcgcagaagaactgacacgagatgtgtcaattttcaggacaccaaaaccggcccttgcagccatcctctccgcaaga

SEQ ID NO: 53326 - DNA, 439 bp, Setaria italica
  Peptide Sequence Number=SeqID_119300
ttattttttgtaaagtaaattgtttcgggtctagtaaaggtattacttgtcggtaagtatttgttaactttgttacgtcgagcacaaaccaatcagagagagcaccatcgaacaagaacaggaaagaaaccaataaaagctctcccacctttgtcctcccctttccggcggcctttccgggattcgtcaggccacgagccaccgcccgaatcgaagcctccacctccacccagcaagggccaccgccaccactactacctccgctcccccgtctctgcagtctctgcacgcgcgcacaaccgaagaaataaaccacgacgaacaccagtgagcgagacgaagcaactcttatcctttaaaaacgttcgcagggggggaccagtaatcaacatcggaacaggagtgcaacttggcgtaacgtacggccaaattggcatac

SEQ ID NO: 53327 - DNA, 273 bp, Setaria italica
  misc_feature (19)..(19): n is a, c, g, or t
  Peptide Sequence Number=SeqID_119301
ccaatgctcctgtccaggngcccgccgagcgcctgggcgaggtcgacgctcctcggcacccggaggcccgggaggaacacgaccacgtcgccgacgctccccggccgtctccggggcccgccggcggcgtccttctggctcgacgccccgcaccccatggcttcacagcggcctgtttactgttcgagtgtggacgcaggcagatgagcgaagaaggcaatggaacttcttcctcctggtgagctggactcccggaggaagaagtcagaagaa

SEQ ID NO: 53328 - DNA, 248 bp, Setaria italica
  Peptide Sequence Number=SeqID_119302
taaacgaacctaagtaaacaaaataagaactaacttaacaagaattaatacttacaaggccttcctaacaattggttggattttttttgatacgaaatttggttcaaacatactttgtacacttttaccatgctcagctttcgcatggcagatcttggtgcttcttgtttctctctaacgccaagcttttcgtctgaagaaaccattctgttgcatatacacctaatgacgtctgtcttctttgttcc

SEQ ID NO: 53329 - DNA, 336 bp, Setaria italica
  Peptide Sequence Number=SeqID_119303
tctgacatatgcttcagcatgttgcgaaacatctcttgatcttatcatccatcatacgtggcatcatctctcatagaaggcaaccaggacatttctaccggcttagagtggatacgcacatgggctcttcaagttgctgaagctgatcctgatacagaatgcacatcaatggccatgacctgcctgcggcttcattccgagatggctcttcagacatcgcgtgctctggaatctgcggatcactccaagactggcagggccctacctactaagcttgatagcatcatcataccgtttggaaacatgtgatgaactgcacaagtagtggagggatgt

SEQ ID NO: 53330 - DNA, 290 bp, Setaria italica
  Peptide Sequence Number=SeqID_119304
gtaagtagtattggttattgtagtccctattagttttcttaaccttcttgtctttccgtcttgtttggaggtcgcaacatcgcccggtgaaagctgtcctgtaaatgagttcactttttttaagagaactcacttgttcagccaaatttgccaaattgtttgtccaagcctctcaatctggacaaggatcaaaaaaaccattatccaagccttatgtcatgaaaaattatggaatggagactcacaaaccttagaacagttgttcctaattttccacaggtaacagctta

SEQ ID NO: 53331 - DNA, 197 bp, Setaria italica
  Peptide Sequence Number=SeqID_119305
cagagggcataattaaactcatttaattatgccctctgatgatttaactgagtgaaactagataattacccaaagatagtgttgaagaactggtgagtagtgattaagagctttgtatgtcttgctgacaagtccaagaagcagctctacctcatcgccaagaagatccacctctgcttccgctgtttggaggtcgc

SEQ ID NO: 53332 - DNA, 435 bp, Setaria italica
  Peptide Sequence Number=SeqID_119306
cccctcatcattttgtagtggctcctttggtagtgaagcttgtttggctgcaagctcggactctaactcctcttcctcacgctgtttctttagcttctcctcctcttccttcttttgccgttcaagagcagcttctcttgctgcagcttcctctgccctgcggagctcagcctcctccacagccttcaactccttttctcgatcagcttggagggctgcaagatactcatcgtcctgcaattgaaatattggtagtcatatgcaatacttgtgataatccagcagatgaatactgctcaatacctgctgttcccttaacaaccgctgtgcagttaatgctggtgatggaggacgtgctactcggggatagtgggttgatcgtccacgggttgggaaggaaaatggatacggtgctccttcaggaatccaccaaac

SEQ ID NO: 53333 - DNA, 351 bp, Setaria italica
  Peptide Sequence Number=SeqID_119307
aacaaaactaaccttttaactaacgaaataacaagacttaggaagggactagacaagaataactcaatcgtcctgctgttcccttaacaaccgctgtgcagttaatgctggtgatggaggacgtgctactcggggatagtgggttgatcgtccacgggttgggaaggaaaatggatacggtgctccttcaggaatcccaccaaacattgcagcctcaagcataacagcttcgtcatgctcttcggaagaaatgccaccccatcttctgaagggaaaccgccattatgctgatggtcattttgaatattatggggctgaggactcaagggaggactgtctgccatttgcacc

SEQ ID NO: 53334 - DNA, 238 bp, Setaria italica
  Peptide Sequence Number=SeqID_119308
acttgttccttcagtgtctctttatcagataaaatcaggagaaggctccgctacatgcattccctcttggcgcagagctctctctcgctccgctgtctccaaggacaaagaaactgcccgagcaagctcatcatcacctctgccacgtgatgtgttctcagtttctaccacttattttagattctattttgttctattgtcctttaaagtctttccctttttttgtaagtctttctaa

SEQ ID NO: 53335 - DNA, 154 bp, Setaria italica
  Peptide Sequence Number=SeqID_119309
agactggtgagatcttatcccaggcgtgcattcactcaatgacatctggctctccccatcagtgaatgcacgcctgggataagatctcaccagtctatatgttcctggtttgaaagtcctgctgatgtctatgaaatcgaaaagatactgaagc

SEQ ID NO: 53336 - DNA, 239 bp, Setaria italica
  Peptide Sequence Number=SeqID_119310
gtaccatcgaaattgcaaagtgatgtagccaaagaaaaaggtactgcaaaagtattcagaaacaatagtgttttttcttggtgctagtgcgaataaccagctgactgtaactgcactgatctgaatatctgatattgttttgcaaatatacagtactgttgaaagaagtgaatcagaattaccagtctatatgttcctggtttgaaagtcctgctgatgtctatgaaatcgaaaagata

SEQ ID NO: 53337 - DNA, 135 bp, Setaria italica
  Peptide Sequence Number=SeqID_119311
ttaattgtcttggttgtattggtaggtacgttgtcttacttcggggtattagttgggttgatcgtccacgggttgggaaggaaaatggatacggtgctccttcaggaatcccaccaaacattgcaagcctcaagc

SEQ ID NO: 53338 - DNA, 349 bp, Setaria italica
  Peptide Sequence Number=SeqID_119312
caaaaatgaatgcaatcaagagtcgtcaagcaagagatgcaacctgtaatgtaaaaaaaaaatgcaatacaagcatcatatagttttgcacaccaccaagggtgctatggaattcaatcaaactttagatgagggatctgaactgactattttgtataaaaaaggaccaccgatatcattaacccaggcgagcagagcttaactctcaatgaaatcttatttcattttcaaacaaatatctaaatcaacattcaagacctttgcaagctgcatgccagaatcttattcattctatttactaagttagtcttactacgggtaagttaggggttcttaagttttaaaagtt

SEQ ID NO: 53339 - DNA, 464 bp, Setaria italica
  misc_feature (383)..(383): n is a, c, g, or t
  Peptide Sequence Number=SeqID_119313
tgtcctcgaaccgaaccgaagaaccaagaatacgtagaccggacgtaaccggaaacctagactagtcggcgaaagtgcgcggcggggcccgaccccgtggtgacgaacaacgtgcgggacgaggacccgagcgccgtggcggcggcgttcccgtcgttcctgaagaagctgaggaagaacaaggacttcctggacaacagctactaccacaacaacctggcccggatcgtgacgttcaactcggactggcagctgctgacggagaaggaggcgctggggcacgtcaaggagtacgccgagaacgggacgctctgggacgaggacttctccgatgacgctcgtcaagctcagcaagctgcccatgccgcccacagcaagggggngatcaggaagcactgccgcttcctcaaccaccactagcagcttccttcgttccttggactactactcctacgtactacata

SEQ ID NO: 53340 - DNA, 478 bp, Setaria italica
  Peptide Sequence Number=SeqID_119314
aaggtgtcggcggcgctgctgtgcgcggcggcgctgctggctggtggtggcgccgctggcggcggaggcgagcgagctcaagctgggctactacaagaagacctgcccggggtggaagaacgtggtcaagtaccacgtcgccaaggccatcagggccaaccgcggcagcggcgccgccctcgtccgcctcatcttccacgactgcttcgtcaggggttgcgacgcgtcggtgctgctggacccgacgccggcgaacccgcacacggagaagacggcgccgatcaacatcggcctcgcggcgttcgaggtgatcgacgacatcaaggcggcgctggaggagcggtgccccggcacggtgtcctgctccgacatcgtggtgttcgccgcccgcgacgcgtccagcatcctgagcaacgggtctacgttcctactttcgtaccccccgtcggggtcgtccttcgtacggtcccctattctt

SEQ ID NO: 53341 - DNA, 414 bp, Setaria italica
  Peptide Sequence Number=SeqID_119315
taagacgaccaaccgtaaccaatgcaaccacagctgcagtgaccagtactggtgttgcttttccgcgggcgcgcgcgttggccggcttgcttgctttgcttcccgtggcacaggcctcctagctccacgccgaaaggaagcaaggatgacgacgaaggtgtcggcggcgctgctgtgcgcggcggcgctgctgctggtggtggcgccgctggcggcggaggcgagcgagctcaagctgggctactacaagaagacctgcccggggtggaagaacgtggtcaagtaccacgtcgccaaggccatcagggccaaccgcggcagcggcgccgccctcgtccgcctcatcttccacgactgcttcgtcagggtacgtgccgcgccgccgtcgtaactcaccacgcacaacacagctcc

SEQ ID NO: 53342 - DNA, 243 bp, Setaria italica
  Peptide Sequence Number=SeqID_119316
ttaactaaactaaaattaacggtacgtaagtactagaataccgacaacttccggcgcaagaacttcacggtggaggagctggtgatcctctccggcgcgcacgccatcggcgtcggccactgctcctccttccgcgggcggctgtcctcgccgccgagccagatcgtgccggcgtaccggaacctgctgtcggcgaagtgcgcggcggggcccgaccccgtggtgacgaacaacgtgcgggac

SEQ ID NO: 53343 - DNA, 111 bp, Setaria italica
  Peptide Sequence Number=SeqID_119317
ggggtcgaagtggacgtgcccgttgctcaggatgctggacccgacgccggcgaacccgcacacggagaagacggcgccgatcaacatcggcctcgcggcgttcgaggtgat

SEQ ID NO: 53344 - DNA, 411 bp, Setaria italica
  Peptide Sequence Number=SeqID_119318
tttcagattaataatctatgaagatgtcttgttttaccagctgccccttgatatggtgttgttctgctgagcctgcttgaggtgcattgtgagggcatagttgtttatctctaatgtcctcacttgttcctggtactgcaaaacaagttgcttcaagctttggacttcatgagacctctcatcaaactccttttggcgctcatgttgaatggcgaccgcccgtttcaggacagcattctctcgcagaacgactgtcaactgctccttgagcatcatgttttccttatgcaggttttgtgaagcttcagctcctgcacgctctacaatggacttctccaaagcttccaaagctctcgatgcacgagcccgtgcatcatctatgtcagaagcattagtcatctctctgacaaa

SEQ ID NO: 53345 - DNA, 288 bp, Setaria italica
  Peptide Sequence Number=SeqID_119319
tgaatccaccagtagcacactaccatatcaagggcagctggtaaacaagacatcttcatagattattaatctgaaggctgcctctatgcttagaagacatcaggattgaaacgcccaggcatggtgttgttctgctgagcctctaatgtcctcacttgttcctggtactgcaaaacaagttgcttcaagctttggacttcatgagacctctcatcaaactccttttggcgctcatgttgaatggcgaccgcccgtttcaggacagcattctctcgcagaacgactgtc

SEQ ID NO: 53346 - DNA, 259 bp, Setaria italica
  Peptide Sequence Number=SeqID_119320
tagctcaacccattcagaaccattattacttgtcgtgataaattatcaacggcaggtggatgttctgtagcagtatccacggcaccattaggaatacctgtcaaggatccaaaattgttcctactgtcagtaatacaatctggaaaaccaaggtaggcttttcagaaatcaataaaaatggaattaggaaataagttgtgatacaatcatcatttactgtggcaataataccattctaggtgatacaacatcatgttaa

SEQ ID NO: 53347 - DNA, 470 bp, Setaria italica
  Peptide Sequence Number=SeqID_119321
gtgattgggaggcaggatgagtagaagttaccccattccgtattgatcaccatgtttcctgatttaggtaaactacgaccctacaaaactttggtatggcgcttgcctcttcaacatatgcagcatttgagccagttcctaatatgacaccgatgacgacatcctcatcgttgtatctaccggcagccagtgtcccaacggtgtcattgatcaatgcagccacacgcatgtcaacgccatgcttctccatggccgtccgcaattctgcgacgacatcttcgcctacctgaaaagtttcagaaatgccttggcataagaaccacacagtccttgtaggattttgcaaatgacagtgggcaccaaatagaatggctcgccacaagatgaatacttacagcatcatcgattgagaacgctttggtccacttgatgagagtgcctgacgcaatcgatgttgtctcacagggaac

SEQ ID NO: 53348 - DNA, 169 bp, Setaria italica
  Peptide Sequence Number=SeqID_119322
taaatgacagacataattatgttcaatgtgcacaagttacttgaagtgaggattcagctgtaccatgtttcctgatttaggtaactcgccctcaaactttggtatggcgcttgcctcttcaacatatgcagcatttgagccagttccgtaatatgacaccggatgacga

SEQ ID NO: 53349 - DNA, 467 bp, Setaria italica
  Peptide Sequence Number=SeqID_119323
ctcttcgtcatctttgatataaatttactagaagaagaatacaactagtaatagacaatacttccaatatagtttctaacaaattcctcgaccttctcatccagtttttcacccaaaggataagcagctttccttacgtgattgtaaaacctcagcagcctttgctgccagccatactccaagattgtctatgcaatacaagaaagttgcgctcaattgttttatccttttctccgcattttccaaagatgaatcatgcagttttcccttcaggaattctaaatgctgagataatgtaaccaatgttattcatttgcacatcactcacagtggcataccagtcgtgaaccaattatataaggtataatcatgcataccatttagacccaggaaccagaataaactaatgtaggttacagagtcttgcagcacctttaaaatttaaggttggacaaaatatgtgttga

SEQ ID NO: 53350 - DNA, 328 bp, Setaria italica
  Peptide Sequence Number=SeqID_119324
acctttgtagtggcaaatggaatgtactgcgatagtgctgattcactttcaacagtgtacacctttgcattcatgagattctcaagctcagatattttcaccgagtagtcggaacgctgcaaagtttttgaattaatgagcgaggcagtcatcccaaatatcctcggtataggatctgatggcctagaattcaattggggggtgataaaaactccttaagaatgttggcgtaggggggaattcccgtgggcatggtggcactcgtcgaagatgaggagcgcgatgtcccgcagcctgaagaagcaagttggtcggtaggtttattcgt

SEQ ID NO: 53351 - DNA, 251 bp, Setaria italica
  Peptide Sequence Number=SeqID_119325
ggtcatactgcaaccgcaatttgttcaaaccaaggaaatggattgaattcaccaactcaaatgcagggagctcttattccccagcaggtctaactttggaattcatcatactctatattcaggtcagttttctccagttgcatgcttaagggaagaccctgtgagtaaacaagagaaagctgtgaaggaccatgatgattcaccagtcacaggctttagcatttccaatatactaaacaaggagaatccag

SEQ ID NO: 53352 - DNA, 473 bp, Setaria italica
  Peptide Sequence Number=SeqID_119326
ggttttagtcttctgaccttcgatgctgttgaaagctttaattgcttagcctttcatgattgcaaattgcacattcatctatttcgtgtaaaattagcttcccaactctttttgcagccagatccattacctctagtatggggaaaacaaagagatcgtccattaagtgacgaagagtgggcagctttcttagatcccgaaggtagagttatggactcgaaggcgctgaggaaaaaagttttctatggggggagtcgatcatgttttgagagaaaaggtatggaaattcttgttggggtatcatgaatatgattcaacatatgctgagagggaataccatgctgccatgaaacgagcagaatatgaagccataaaaatctcagtggaagagtatcacagccacccaagctaaaagatcaccaagtttaggaaagaaaggccttattgacaaagatgtggtgagaacagatagg

SEQ ID NO: 53353 - DNA, 507 bp, Setaria italica
  Peptide Sequence Number=SeqID_119327
cgtaaatgaagcaagtgataagcaaaaaatcagtatataacaccagaaaaggcttccatgccctcagctccaccggagccagatccattacctctagtatggggaaacaaagagatcgtccattaagtgacgaagagtgggcagctttcttagatcccgaaggtagagttatggactcgaaggcgctgaggaaaaaagttttctatgggggagtcgatcatgttttgagagaaaaggtatggaaattcttgttggggtatcatgaatatgattcaacatatgctgagagggaataccatgctgccatgaaacgagcagaatatgaagccataaaatctcagtggaagagtatcacagccacccaagctaaaagattcaccaagtttagggaaagaaaaggccttattgacaaagatgtggtgagaacagataggtctgttccctattatgaatatgttaacagaatatcacgtagaactacaacattccgattgtcatctccttcat

SEQ ID NO: 53354 - DNA, 249 bp, Setaria italica
  Peptide Sequence Number=SeqID_119328
ctccgtacaacagaaatataaaggtaaatgcccagaagattacatcttgtacagagttgctagaacttctgcaacaactttgtgtcgacgtattgttgtttggtttttgatactaacccagtaaatctcgtttcttgtaatctctacaatatgctggagctggactgatcatttgcgattcaaaagttcaagtttaatttcttttacaaaaaatatattcttgtttcctgaaatggtgttcatgattgt

SEQ ID NO: 53355 - DNA, 133 bp, Setaria italica
  Peptide Sequence Number=SeqID_119329
catcaacagccgtcagacgatcagctaattcgccggcaagaacaggggcggtcggctggcgttacctgaatcccgtagagggagatggttccgatcccgagccaggagtgcaggctgtagagattggcgatcc

SEQ ID NO: 53356 - DNA, 476 bp, Setaria italica
  Peptide Sequence Number=SeqID_119330
cattgttaattcctgttcctataaaaggctgccatttggatttgcgctgcgtgcagccatgcaggatctcgaatttgtcaatttgcgctcacctaattttcctgcatgcagccatgcagagtagctggtgtcactaaacaaaaaaatctaggcatgaactcaccgtttaattggcagggaactaatgttcatggaacccactacttgtccaaatgctacgatgacatgttttataggacaaattttgaatcctaaaatgacttgttttttgggaaagctggagtagaaaggaatgccgtagaagaattaaagcagtgtacgtctgcaaatctcttcgaaatatacctgcaatctgcatgttataccacgctgaatcacacggttcccacactgcatgccacacccacatttactccagcattcttaatgaattttctgacaagatgacctttacagggacccgtgaggctgcattc

SEQ ID NO: 53357 - DNA, 359 bp, Setaria italica
  misc_feature (1)..(1): n is a, c, g, or t
  Peptide Sequence Number=SeqID_119331
ntaaaaaggctgccatttggatttgcgctgcgtgcagccatgcaggatctcgaatttgtcaatttgcgctcacctaattttcctgcaatctgcatgttataccacgctgaatcacacggttcccacactgcatgccacacccacatttactccagcattctttaatgaattttctgacaagatgacctttacagggacccggtgaggctgcattcttagatcttttaagagggcaaactttacagtagaacctatgatgattttccgggaaatgattaacggaggtgcattcatcaaggaatgctgtcttaaccaggccctcaggtgtatacacgaaatcacccccagttgctcttgca

SEQ ID NO: 53358 - DNA, 434 bp, Setaria italica
  misc_feature (9)..(9): n is a, c, g, or t
  misc_feature (66)..(66): n is a, c, g, or t
  misc_feature (78)..(78): n is a, c, g, or t
  Peptide Sequence Number=SeqID_119332
ttatgttgntcccgaggttataaacaacaaagggtatgatggagccaaggctgatctatggtcatntggggtgattcnctttgtcctcatggcagggtacctcccatttgaagattcgaaccttatgtcactttacaagaagatcttcaaagcggatttcagttgcccatcctggttctccacaagtgcgaaaaagctcatcaagaagattctagatcctaatcctaacactgtatgttttactgttcattgtcaccattttaacatacattctgtttaacatctattctgcatgatagataactcatatattttttttggggcttgtgcagagaataactgttgcagatcttattaataatgagtggttcaagaaggggtatcagcctcccagatttgagacagcagacgtaaatttggatgatgtcaactcc

SEQ ID NO: 53359 - DNA, 246 bp, Setaria italica
  Peptide Sequence Number=SeqID_119333
tcttagtacttgtaaaagtcaagctattccattatatgtttttgttctcatctaacttgcccttcttacatggcagagaaattgatgaggccttgagacctggtgtgtattccctgattgatatatgcgaggaaagtgattttcaacagctccacacattcctgggtgagggtccatgccgaaccacactagctgaactggtgcatgactataaattacacttccagtatcagggcaagatctaag

SEQ ID NO: 53360 - DNA, 244 bp, Setaria italica
  Peptide Sequence Number=SeqID_119334
tggcttaattgctgtgcactgacttctgagcgaggagacatggtgctgatgaaaggtttacgatcaatatatactttataaattgaattcgaattcaagacaaacgaataggagattggttctgatttctctggtcttgtttcacagatttaaagcttgtcaaatcaacgtctggtatcttaacatatgagaagcagattgtccgtaagagtacatctccccagtgctcttcccagaaattgga

SEQ ID NO: 53361 - DNA, 232 bp, Setaria italica
  Peptide Sequence Number=SeqID_119335
cacctgagacagcccgtgaagcaggctcatactctcctagaaaaggtgtctattcctcctgctccccagtatgtagagtcacttgggttctctatggctcttttggcaaaatgaagaaccaagcagttcatctagacatctactaaagataataaaataactcggctactgccccttgcaggatcaaagaaacacatacaatttattgctcatcgtgcaagatggagtggtc

SEQ ID NO: 53362 - DNA, 197 bp, Setaria italica
  Peptide Sequence Number=SeqID_119336
taaagaatgcgtcttggtccgctgcatatttctccgcatagaccttgacgcattctttaaagactacactgagtctcatgctaaactgagcaatctgggtgcaaagttcaatcctccacagggattctctctggatgattagtgctgcacctgagcctgcttcacgggctgtctcaggtgcagcactaatcatccag

SEQ ID NO: 53363 - DNA, 222 bp, Setaria italica
  Peptide Sequence Number=SeqID_119337
tgtgcatcaacataacctgacagatgaacagatagtgctgcagccaacgtaaggccattgaaatcaagcacaaggtccactgaatccatggccttacgttggctgcagcactatctgtgcatcaacataacctgacagatgaacaaagtgacaaaccacgctcttatagggccgcagcaacgaattcgtcagaagcgacaacgcgcgctccaatggcaaata

SEQ ID NO: 53364 - DNA, 250 bp, Setaria italica
  Peptide Sequence Number=SeqID_119338
taataatttggatgaggagtcccagcggcaatttatgaaggacgttggcaaccttagcaaagtcagggtgctcaacattattattaactcgttggaagggatggtgctgtcagatctagtgcattcactaggcaatctccacaaactccagcatctggaactgacgggttataattatgaagccgcaatgagggagtgggacagagtggtgctttcggcagcatctccggcatttgggatttaggtccta

SEQ ID NO: 53365 - DNA, 204 bp, Setaria italica
  Peptide Sequence Number=SeqID_119339
cagcagcagcagcagcagaaagatgaagatagtttctgtggttggagttgggggactgggcaagacgactcttgccaaggcagtttacgatgagcttgttccgcgatatgattgtggagcctttgttcccattggtcggacacctgacctggcgcaagtcttcagcaacatattgtaccttctcgacaaaaacgaatacacggc

SEQ ID NO: 53366 - DNA, 198 bp, Setaria italica
  Peptide Sequence Number=SeqID_119340
aatatcaccacatcatgaactcgacaaacactggtgcccatgtaatctgacccgaccacctggatcatgcttctatttacgagctgattgaagtattcctcaccctgcggaggcatcggaaaagattctaaaaaaatgtggtggtgtaccattagctatcatcacaatggccagtttgttggtgggtaaaccaatctt

SEQ ID NO: 53367 - DNA, 204 bp, Setaria italica
  Peptide Sequence Number=SeqID_119341
atcacatggacatggcacaagtgaggtcattggttgcctatgattgtcatcttgagagttgggtgtcgttgttgcatccaagctataaactcttgcgagtgctagatttagagaaatgcagagtaccttcggagtgctggctgaatcttaagccccttggaaatctgcttcatttgaggtaccttggtctacgatatacatatg

SEQ ID NO: 53368 - DNA, 463 bp, Setaria italica
  Peptide Sequence Number=SeqID_119342
gaaagcgctaaggaggctgcaagaaattgtgatgcacttctggttgttggttcggcactgatgacaatgtctgcttttaggctggcaaggcttgcgcacgaagcaaatgctccaatagccgtggttagcattggggagacaagggctgacagcattttatcactgaaaatcaatgcaagatgtggggaggttagagcctcttactttgagttttaagtgccactgcatatgactcactgtggttctcctttgctttgctgcaacaacttcttcagatattgcccagaatactgcagatgggaagcctgacagtaccaaacgtaagctgagcgttgctgtcaaaatgtccaagttgtattctcacgcgactatcgtcgcccataagcacaacctctggagaactcggttcgctgtgaagaagacaaggtgaaacagtaactagctgtgagataattcaacatgt

SEQ ID NO: 53369 - DNA, 258 bp, Setaria italica
  Peptide Sequence Number=SeqID_119343
aaactaaagaacaaagtaagactaggacaataagctggttttgttcttatgaatagaactatgcttgatgctaaccccagcaatgtgatgcaaccccacacgaagaaggtggttgagtagcacttcacccccatgcaaacaatcatggtatcaatcatgccagtgtggttatccgttactctcatcctttggccatttgcgtcgtataccagggcagcaatctggccatagaggagtgagccagcgggatattggtga

SEQ ID NO: 53370 - DNA, 253 bp, Setaria italica
  Peptide Sequence Number=SeqID_119344
tataagaactaaaatagacttaagctaattgaaagccatacactaatgctacctcaataccttctctgcggtatacttcttcaccttcagctttctgttccttcttctagtgtcttcgtaattatcctggtcagcttcatcaacataaataatttcaggttcatcgccagtttcagcagtatccactcctctgcggctctgctcctcctcctcctcctcctcctcatgggtctctcaacagcttacctccccg

SEQ ID NO: 53371 - DNA, 203 bp, Setaria italica
  Peptide Sequence Number=SeqID_119345
cctatcccctgtgtgccttgcctatcctctgttgcgtgtctcaggtgccgcattctttttagatttaaatcactctcaagctgaatgttaagaaattcatatagcttttcttcttctgcatcagcaaattctggcgccacttgaccatcctctctcgccattttctttctaagcaggacggcctcgggaaacagcccggaggc

SEQ ID NO: 53372 - DNA, 278 bp, Setaria italica
  Peptide Sequence Number=SeqID_119346
caaaatcttgacttttgatacaacatcttcaacttcttcaacacgatcctcatgaattagataaactacttcgtagtgccgcattctttttagatttaaatcactctcaagctgaatgttaagaaattcatatagctttttcttcttctgcatcagcaaattctggcgccaccaccaccccaccggccccgtccaagaagccgcccacgccagccgcgacgccgcccaccacccccgccaccccggccccggccgcagcgccgcccaccaccccggcc

SEQ ID NO: 53373 - DNA, 231 bp, Setaria italica
  Peptide Sequence Number=SeqID_119347
ggcatgcggagcgtatatcctcagcagattccagctccgcagcaatttgcagagccatttcatattgtgataatgcttcttgaaaatggggaaacatgatgagacgattaaagaatgcacaaaagcacttgagctcaatccatcgtacctgaaagccttgcttcggagggcagaagcacatgaaaaactcgagcactacgacgaagctattgctgatatgaaaaaggttta

SEQ ID NO: 53374 - DNA, 398 bp, Setaria italica
  Peptide Sequence Number=SeqID_119348
catagcagcatgataggatgatgaaaccagctgtgcggcggctggtattgtaccacctacagatcaaaataaaataacttcagttatagcaagtaatagcatgcagtgagtgtcatgtgtaattgattccatggaatagtcatattcaacagaagcaaaaatgcaaggttgagagcgatgcttgcctaccacgcagctttactcctactttcgactatctatattctatacaagtaataaaaatgctctatgctaaccatgagaatcaataaatagaaaaatgtgcagtttccaactatgccgtgcctgccgatggcctgatgtcaataatgaaaaacaactaaatgccagttatgtgttgacgcttcatataattcaacaggcaagatgatgtgcac

SEQ ID NO: 53375 - DNA, 510 bp, Setaria italica
  Peptide Sequence Number=SeqID_119349
ctaaattcacaagaaatactttcacaattcctaaaggtacaggtgcaatttatcagcagtgaacaatatgaaccgtcaaatgaagcccagccaacaaacgaaacttatccagaacataaaatctctgtaaatggaatggaatcatatccagcattatgataataacaaatagcgtaaccatttagacaacagaatattcacacaaaatagctaaacagacaaaaacaagtagatatagaaaatattaaatgcctaacctgctaacccagcacatgcagaagagaacacaataaactggtggtgcaccaacaagaaaatgcatccacattggcccctttatgtaaacgtcgaaacaacaggcatagtgtggttgaaagccataaaaatgctccagctatacccccaacagcggaaccaatcatggagaaagctaatctcgaaccatcggaggcaccgtccagctgctcgtttccatgtccttggagagaggcccggcgcagtggtggcacc

SEQ ID NO: 53376 - DNA, 233 bp, Setaria italica
  Peptide Sequence Number=SeqID_119350
agacggaggaccctggtttgtagccctaaaatgtgtatctccacaagatccgcactggtgatcttttattgagcacgaattaatagcatccatccaagcacggaaaagagggccatgggagcggtccttcctgtgatgcttaacatatatgattgcatgaatcatttcatgcagcaatgcattcttccggtcagtgcatgagagatacttcagaaccggctcggagagtgtta

SEQ ID NO: 53377 - DNA, 435 bp, Setaria italica
  Peptide Sequence Number=SeqID_119351
ttctggatgctgttgttatttcgtttcctgatgccaaagctggggaagttcctattgcctatgtcgtgcgttcccctgttagttcattgacagaagttgatgtccagaaatttattgagaagcaggttgcatactacaaaaattgaagagggttacctttgtggacagtgtaccgaagtctgcttcaggaaagattttgaggagagaactcatagcaaaagtcagatcgtcgaagctatagcaaatccacttctaatctgtttcagaagattggttgccttctagctactagattggaaatttgtggattgagcgatatattgttccaagttggccccaatcctaatcaccatgttgttctgtcaaatactgggccttgctacaaaggcctaatttccatttcaatacagtaattgcaaactatatgaatctagt

SEQ ID NO: 53378 - DNA, 419 bp, Setaria italica
  Peptide Sequence Number=SeqID_119352
ccagattgcaccagctgagcttgaagggctacttctgtctcatccggaaattctggatgctgttgttattccgtttcctgatgccaaagctggggaagttcctattgcctatgtcgtgcgttcccctgttagttcattgacagaagttgatgtccagaaatttattgagaagcagtgtaccgaagtctgcttcaggaaagattttgaggagagaactcatagcaaaagtcagatcgtcgaagctatagcaaatccacttctaatctgtttcagaagattggttgccttctagctactagattggaaatttgtggattgagcggtaaggtttacatgttactgagtggggcttatgaaacataacattcagttttatacatcagacgctgatacattatgtatatgtggcacatacagat

SEQ ID NO: 53379 - DNA, 222 bp, Setaria italica
  Peptide Sequence Number=SeqID_119353
taacccagaaaaatggaacaaagctacgtacaaatttagggtacaaaccggaatcaacttgtctcaggagttgaagcaaagattgtagatatagaaacattgaaatgtatgccaccgaatcaactgggagaaatttgtgttcgaggaccgaacataatgcaagggtatttcaacaatgtgcaagctactgaatttacaatcaaggaagggtggttagacaat

SEQ ID NO: 53380 - DNA, 234 bp, Setaria italica
  Peptide Sequence Number=SeqID_119354
cctatcccctgtgtgccttgcctttcccctgttgcgtgtctcagccgcccgccgataaagcagagcgacacggccgcgctgctctactcgtccggcacgacggggcgagcaagggcgtcatcctgacgcaccgcaacttcatctcggcggcggccatggtgacagcagatcaagacgagcacggagagggccccaacgtgttcctctgcttcctacccatgttccacatcttcg

SEQ ID NO: 53381 - DNA, 382 bp, Setaria italica
  misc_feature (339)..(339): n is a, c, g, or t
  Peptide Sequence Number=SeqID_119355
ttcttgtaaccttgtttcagattgtcgaccaacttatggaatatattgcaaccacagcactgaacaaacacagttccatcagtgctgtggttgcaatatattccataagttggtcgacaatctgaacctgtttcatgagatgaagtgctatgttagtccagacttccgctacgaaggggatgctccattcaactaccttgacaataacgaggatggcgatactatcttccctctctaaaccttctcccttgtgtttcagtgcatgatgatgccgttctaatttgctcgtgtagctgtatgtaataagcagatgtaaccttcctgaactcgtgatattanacaggtgtatgtatataattgtttgtacttagtgcacaccttg

SEQ ID NO: 53382 - DNA, 347 bp, Setaria italica
  Peptide Sequence Number=SeqID_119356
aacttgacgaagatgatgaatgaggagcgtctggtaaaagatggcagcagccaacagtcattattgtgtaggaggataatgtttagtatcttcaggacatactgtcttgttcggtgctgtaggacagtgctctaggaggatgggttttattatgttcaggacgcactctttctcttgttgggtgctgcaggaggaagggagcatgggttttagtatgttcaggatgcactctgtatcttgttgggtgctgcagctgcaggaggattaggtatgttcaggatgcatccttagtcttggttggtgctgcccatgaccttggtatgcttcatagagaatgaagtatttga

SEQ ID NO: 53383 - DNA, 329 bp, Setaria italica
  Peptide Sequence Number=SeqID_119357
atttctgcatgtgcattgatgctgatgacaatgagctcgaagtccttgaaatcatccaccatttcgttgagatactcgaccgctattttggcagtgtatgtgaactggatttgatattcaacttccacaaggtaatctctaatgcttattgacactgaggatctgggattgaacttagtggttggcaacttcgtgctagcttcttatcatgcttatgggtttgtagtcatgttcatcagtgcagatttcccatttatgcaggcctactacatactggaatagaaaattactacaataagactaggtagaagacttacaaagaaatacta

SEQ ID NO: 53384 - DNA, 112 bp, Setaria italica
  Peptide Sequence Number=SeqID_119358
aacttccacaaggcctactacatactggatgaaattctcatagctggtgagcttcaagaatcctgtgcagcaataagtcttgcaacattcttacttgctagatttcttagaa

SEQ ID NO: 53385 - DNA, 223 bp, Setaria italica
  misc_feature (24)..(24): n is a, c, g, or t
  Peptide Sequence Number=SeqID_119359
tcaaactcgagtcatgacactggngactcagtgtcaggatcagattgggcattcaggtggcgcacaaggagtaacctggcacggttgacagctgcaaagtagaggcagatgtgctcctcaaggtcagcaagctgtcgtagcaggctgggatggttcttcctgagctgccgcaccacctcctctatggtgtgatgctgcccccctcccacgctccagcccaagg

SEQ ID NO: 53386 - DNA, 431 bp, Setaria italica
  misc_feature (370)..(370): n is a, c, g, or t
  Peptide Sequence Number=SeqID_119360
taaagttacctaaacgttaactttcgtttagggtaacttttaatagttttagttaccaaaaacccaaccaacataacattccttggtattttatcatacgccttctccaagtcaatgaaaaccatgtgtagatccttcttcttctccctatacccctccataacttgtcttattaagaaaatagcttccatggttgatcttccaagcatgaaaccaaattgattcataaaagacccgtgttatccttctcaaacgatgctcgataactttctcccatagcttcatagcatggttcatcaacttattcttgtatattggtaccggtatacttcttctccactcttccggcatcttattcgaccgaaaaatntggttgaacaaattggttagccatactatggctatatccctaaggcatctccacaccttaa

SEQ ID NO: 53387 - DNA, 392 bp, Setaria italica
  Peptide Sequence Number=SeqID_119361
ctcatcttcctttaccaagatgttctccatttcatccttaatgcacttaacttggttgaagtcctcgtctttctctcacaaaccctagccatcctatagatgtccttctctccttccttcgtacctaattgttggtaaagatcctcatacgcctaccctttgccacacttacagcttgctttgcgattttctttgcctccttgtacttctctatgttgtccacactcctgttgtggaacaagcgtctatagcattctttcttctccttaatagtcctttggacttcctcattccaccaccaagtatctttatctatgcctctaccccccttggtcactccaagcacctccgaggccaccttccgaatgcagttttgtccattctttcttcct

SEQ ID NO: 53388 - DNA, 400 bp, Setaria italica
  Peptide Sequence Number=SeqID_119362
ttctacttgtattaacactgcacagaaatgcagttggttaaacattcacatttaaaatgtagcggcagtgccattactcaaagagcacctcttactaccaagaactatttgctaaaaataggaaggtttgaaacttactgatgacagggaggtccatttcaagccctacaagctcaaggagcttgaatccatccatgtcgggcatgtgtacgtcactgataaccagatcaaacatgtccctgttctcccgtagcagcttcagcgcagtaatggcctggttggttgttgtcactgttaaagaagcaaaggatactcttatcagttaacaatggtgtaatcagtaagataatgaatctcatcagcggtatggctgcgacagacatgtcagataatggaaggc

SEQ ID NO: 53389 - DNA, 450 bp, Setaria italica
  Peptide Sequence Number=SeqID_119363
aaaatcaagtatgaaattattatgtacattgtcatcatcatccctcaccgtctttacaaccaatagcactggctaaatcttcttggatttgagctctgagatcctttcctcagtggccttcagggcatggccgaatttgcttatgatttcttcaacttctccaggagtcattatcagagggggtgacagcatgatgctatctccagccaccctgatgagcatcccacgcttctcacactcggcgccaaagattgcacccacacctgaaattaccaaccataatgaaatcgattttactactgcaatgcaaatcactcggcagggcttcctttgactctggtctatttatgatgaactttgcttcaatatgctacaataaattcataagcactaaggctgcctttagaaaacttttttggtagcccgaaattttcttttagcatagtaaat

SEQ ID NO: 53390 - DNA, 425 bp, Setaria italica
  Peptide Sequence Number=SeqID_119364
ctaacaaggattgctccaattggcaaataggcagaagagagagccttggcaatggaaacaagatctggtttaatgttgtacatatcacatccaaacatggtccctaatcttccgaatgcagtaatgacctcatctgcgattagtaaaatgtcatacttcttgagaactgcttgaatcttctcaaaataggtctttggaggaaggataacaccaccggcacccatcacaggttcagaaagacggaagcgccaatagtgagggcagtctgtgtgcagaacaaaaggtgctggtagatcaaacttctgatgaagtgcaggcagacctgatagactagccgctattaatgttgaaccatggtatgatttcgaccgagcaataaatttcttcttgtttggcctccctagtgcattgttgtaataccacac

SEQ ID NO: 53391 - DNA, 314 bp, Setaria italica
  Peptide Sequence Number=SeqID_119365
ctaccatccttttggaaccgtacgaccaagccgtcattggatctcgcaaatgaaattctctagtctattgttcactgcaagggaaatgggcaaagtattcttcacaaatagtggttcagaagcaaatgactctcaggttaaactagtgtggtattacaacaggaatggtagaagggtaatttgtttagctgctcagttgcagctttgattaatcgaggctcattaccacctaaagctgtacaccacagtcctgcaagagcatctatatacttcttcccattgatgtcataaacataagaaccctcagatctctc

SEQ ID NO: 53392 - DNA, 348 bp, Setaria italica
  Peptide Sequence Number=SeqID_119366
tattaaggggtaaaaaactattcttattgttccttgttattagtaagtttattctagttctacctatttgtcttctagttgacagacagctgctatcttgcacttcaagaacagtgcccgttccagtgcattattgccatctcccagccatggatttattcttctgtacatcagctgtgctcatttctgcctgacgtttatcgtcatcgtcgatgccttggctaattcttcttggatttcagctccgccaccctcgcctcggtggccttaagggcttctccgtagatgctcaccagctcgtcgacttcgccaggtgtcatgatcagtgttggcgacatcatgatggca

SEQ ID NO: 53393 - DNA, 234 bp, Setaria italica
  Peptide Sequence Number=SeqID_119367
ccagccagctgtaaacggtgccagcatgccatgacccttaaacccattttcttcagttgagtcagattgggcagacggtgctgaactaaaatgtctgactgatgcatccggcaaacattctgtgtgcccttgcaaacttgcagtgctagttacgtacttcactaagctgcttgcctgtaaacgagcaaggaaaaaggatcacgcatgagccgtgacaatggcaaaccttggcaa

SEQ ID NO: 53394 - DNA, 204 bp, Setaria italica
  Peptide Sequence Number=SeqID_119368
cccgaaattttcttttagcatagtaaattctctgaaaatggaacgtcgaatcaagaaagatacaaaccccattcagctgggaaaggatcatttggcgatttgttgtcgacaaattcagttccaagtatcagtccctgaccacgtatctccccaacaattgggcttcctgagaaggccttgattccctcctggaaccttggagca

SEQ ID NO: 53395 - DNA, 488 bp, Setaria italica
  misc_feature (89)..(89): n is a, c, g, or t
  Peptide Sequence Number=SeqID_119369
ttcaagttccaatcatgcccataagttttgcataaatgacaggatatccttgttgcttagtccatgtagtcatcaaatcctttacaggntccccggattcctcctcaagaacagcccataggtcttcagtcttagcatttgagtaggcatacttctttatatatgaagccaaagctttctgaaaacgctctgcgccaaggtaactctgtagcatacgaataacagaagctcccttgtcatagcttatggaatcaaaaattgcatcaatttcactggcatggtttacttcaacctgaacaaacaacattaattggtttaaataaatacaagtactaacaactgagacaaatggacatgctaatgctgtgaagtaaatgattgacaatatattgccacattgctcaattcctctaaaataacaatatactaaacatctggcatcagaggtggcagctcttccaagactggggacaccaaatccagcgcta

SEQ ID NO: 53396 - DNA, 238 bp, Setaria italica
  Peptide Sequence Number=SeqID_119370
tacaaagaagaagaaggatgcaaacctttaaatgaatcaggaagacaggaaacatgtgcatatccatcggatattatcaacaaaactaatttagaagtcctgcaacaataacataccttcagccaggtccatgcaacttcacgtccttccaagctaatgccaccaaggatataatacgaatcttgattccgactcatcagtgaatataaagttcaatgcttccaaaaacatatcctta

SEQ ID NO: 53397 - DNA, 416 bp, Setaria italica
  Peptide Sequence Number=SeqID_119371
tgccactcctgacctgaacaaagatatcaagcagcttttgatcaaccttcttcttccaactgccataaaattaggctgggatccgaaggatggcgagagccatcttgatgtaatgcttagatcactgctcttgattgccctggtcagacttggacataatgaaaatataaagttcaatgcttccaaaacaatatccttatctggtgatgaggacaaggagcctaagacacgggatttctcctggggttcagctgcttctctgtagattttgaggagagcatcataaccagatctctttgaggtactaacagtccgcatcacagcaaggtatgcagcctttctagtatctggtggaagaagggaagttttgcggtcctcaaagaagatatggaaacgccgaactccttcatttatag

SEQ ID NO: 53398 - DNA, 399 bp, Setaria italica
  Peptide Sequence Number=SeqID_119372
ttttttttttttttttttactttagtacttagtttctttatttaatgtttgtttaatcttggacttagcacaccactcttagaaacaattaaacaaacgtcaccacttcaattttccgcaacagatcatatacaagcaaacgacagtacaccgtcagaagtcagaaccacgcacggaagaactttttcaagagcattgtcatgcggactcccacgacattatcacaccaaggagctgctattttgaacgcatgtttatgctccggcctgcagcagctcctgcactgtctgaccaaggctgggctcgcatgcccactctcgccaccccttcctcgctcctcctcacccgccgcctcctcgccgtccggacgttctccacctcctccgccggctactccac

SEQ ID NO: 53399 - DNA, 382 bp, Setaria italica
  Peptide Sequence Number=SeqID_119373
gattccactgctaaatagcttacccaggaagcaaaaccctcatttagccacaagtgagtccaccattccatggtcacaagattgccaaaccattggtgagccaactcatgtgcaacagttattgctacctgttgtttgttggatgctgatgacagtagctcatcatacagcaaagctgtatcacggtaagtgactaacccatagttctccatggccccagcagcaaaatccggaatagcaatcatatccaacttaggcagcggataaggagtggcaaaataatctttatatagatccagtgacttcacggcaacatccagcgcaaactttcctttgatttagttctttgtcctaactttgtagttattactacgtcgtaact

SEQ ID NO: 53400 - DNA, 215 bp, Setaria italica
  Peptide Sequence Number=SeqID_119374
tcctcatcaccagataaggatattgttttggaagcattgaactttatatttttcattatgtccaagtctgaccagggcaatcaagagcagtgatctaagcattacatcaagatggctctcgccatccttcggatcccagccttaattttatggcagttggaagaagaaggttgatcaaaagctgcttgatatctttgttcaggtcaggagtggca

SEQ ID NO: 53401 - DNA, 124 bp, Setaria italica
  Peptide Sequence Number=SeqID_119375
aagagtggtgtgctaagtccaagattaacaaacgtcaccacttcaattttccgcaacagatcatatacaagcaaacgacagtacaccgtcagaagtcagaaccacgcacggaagtaactttttc

SEQ ID NO: 53402 - DNA, 200 bp, Setaria italica
  Peptide Sequence Number=SeqID_119376
cggcgctggctggaaggggggaggcgtgaaagggaggagagagaaaggggaatcgagcggagggggaggggagccatcagacttgagttccgaatcacactcagggctgaacccaacacacactacgggtggcaaattgccaatggtttctgaagatccggtgaataatatagagccaagtatgattgggatgaacaagt

SEQ ID NO: 53403 - DNA, 404 bp, Setaria italica
  Peptide Sequence Number=SeqID_119377
tcatgtagcaacctaatcgaccccacagcttgtgcttgcagaactgctccatgtatttcattcgacattctctgtttctgctctttgagcagctccatccacctcctcatagctcttcaatctgaagctcttgctgtactatccgttgaagagccacttgattctgaagctcttgctgcctcttcagttcttcaagtttcttctcttgagcaatcctaacgtcatcttgcggaggaagcgctctgtggagcggatctggttcttgagggaggcggtcttggtggcggtggcccgcttccgctttcggtcggccacggcggcgacgacagacggcgcgggagtagatgggcccggacggaggaggcggagggcagcgaggatggggattggggaaggaggcggcg

SEQ ID NO: 53404 - DNA, 266 bp, Setaria italica
  Peptide Sequence Number=SeqID_119378
gttagaagtattgcttgagcttgatatcacacgtttatctgcagatctggctcatttggtgctaatgagcgaggtggtggcataagaactcgagcatctctctgacgctggttcttttcatcgcttgacatgccagatgctgccctacccgcactggaagctggttccttagcacttttatcagtccactcatcaatacaagacctacttacaatacaacttagaaacttaccaagaacaataaaagaaagtacaatacaatacaa

SEQ ID NO: 53405 - DNA, 311 bp, Setaria italica
  Peptide Sequence Number=SeqID_119379
attccacgcttatatgaagtaacaatacccatttccttgtaaacattatataaggaaatgggtattgttacttcattccaaaatcttcttgacaacattttccttcctctgtttgaggttactatcgatccagcttcacacccacagctccatgtcttcttaaagcaggttgtagggttggatctggttgacgatgaaagtaaaccagaaaggcggccaactaagcacatgcccacacccgaacaatggaccaatgtgttcaaccctgcatttcatattatgcgtactactgctatgctaacttatacaca

SEQ ID NO: 53406 - DNA, 346 bp, Setaria italica
  Peptide Sequence Number=SeqID_119380
ttaacttaaaagacaaggttagtaagggttaggaatactaggttgaacgatgaaagtaaaccagaaaggcggccaactaagcacatgcccacacccgaacaatggaccaatgtgttcaaccctgcattttcatattatgcgtactactgctatgctaacttatacacactaaacaagctgcgtgagtcaaaggggatgaccactatcaaattccgtccacatgctggggaggctggagatattgatcacttagctgcgacatttcttctttgtcacaacatatcacatggaatcaatttaaggaagtctcctgtgcttcagtacttgtactaccttggtcagattg

SEQ ID NO: 53407 - DNA, 248 bp, Setaria italica
  Peptide Sequence Number=SeqID_119381
aattctcaggaagaggagagtgtgtgaatgatatttttgttgaatggatccgaaagatgtgtcaaaagattgtcgatggggccaacatgagttacaactccttgtttcttgattatcatcgcaaccctttcccaatgttcttccagcgaggtctgaatgtctcactgtctacggatgatccgttgcaaattcacctgacaaaagaaccattggtggaagaatacagaactgagcttccacagcgaagc

SEQ ID NO: 53408 - DNA, 384 bp, Setaria italica
  Peptide Sequence Number=SeqID_119382
cacctgacaaagaaccattggtggaagaatacagcattgctgcttcgctgtggaagctcagttcttgtgatttatgtgaaattgcgaggaattctgtctatcaatctggattttcacatgctctcaaggcacactggattgggaagaactacttcaagagaggccctgctggaaatgatattcacagaacgaatgtaccgcacatcagggtccaatttagagacatgatctggagaaatgaaatgaaactggtttacctgaacaacaacatcttaatatctgaagacctggaccagtaagatgtctgcccttgtgtatatcccatatttgctgtgggaagcatacttcatgtttgccggctgaggcactccagatcacatagct

SEQ ID NO: 53409 - DNA, 246 bp, Setaria italica
  Peptide Sequence Number=SeqID_119383
cctcccattcttgatttctttcaacttctcttcatgcgcattctctatgtcttttgcaagtcctaacggattaaacagtggacccccggggtagcctggctgtgaacctacaagtgcagcctctagccctatgaaggttccttcctctgcttgtgatcctggattgatgaagtccatgtacctcttggtttcagcgaatctgcagggaaacggagttacaatagagaagagaacagttcagtcttg

SEQ ID NO: 53410 - DNA, 369 bp, Setaria italica
  Peptide Sequence Number=SeqID_119384
tttttttgctattgaagttccatattcagttttcattattgaaaaatttgcaaagaggaaagctaaaataatgcacttcctgttagaaagcattgtgtgttgtttttgtgccacagcaccgtacagtgaaaagcagaggtatggggacagaattctcaggaagaggagagtgtgtgaatgatatttttgttgaatggatccgaaagatgtgtcaaaagattgtcgatggggccaacatgagttacagatgcttgcaccatgaagccaagcatggctaccattgccagcctccctgtcacagaaataaatcacgttagcaaaaatgaaagtgctctggtaggtatattttgctggcagaatgtactgaga

SEQ ID NO: 53411 - DNA, 170 bp, Setaria italica
  Peptide Sequence Number=SeqID_119385
aatatctgcagcaactgggtcaggttgaactgcatgaagatcattggatttaacagggtatgatttgaatgttgatttgctagacgtccatgaagacaaaagtacatttcatcgttttgacaaattcaacctaaaatacaatccatgtggccaaagtaggctcagagaga

SEQ ID NO: 53412 - DNA, 199 bp, Setaria italica
  Peptide Sequence Number=SeqID_119386
gcatctgtaactcatgttggccccatcgacaatctttcaacttctcttcatgcgcattctctatgtcttttgcaagtcctaacggattaaacagtggacccccggggtagcctggctgtgaacctacaagtgcagcctctagccctatgaaggttccttcctctgcttgtgatcctggattgatgaagtccatgtacct

SEQ ID NO: 53413 - DNA, 245 bp, Setaria italica
  Peptide Sequence Number=SeqID_119387
ctcgccggttcctccccgagccccaggggatcgaagccgtagtcacccggtagcctgcaatcaccgatcattgatgctaacatcagctgacaaacatcatcgcctgcagaaaaaagcacatgcggagcagagattcagagtttcagataaccgacgtgccgtcgaggtgagcaggcgggtccagtccgggcagccaggtcgcgcgctgggcgctggctcggacgacgacccgagctctcggcgac

SEQ ID NO: 53414 - DNA, 187 bp, Setaria italica
  Peptide Sequence Number=SeqID_119388
tttttgtttgaatggatcgaaagatgtgtcaaaagattgtcgatggggccaacatgagttacagatgcttgcaccatgaagccaagcatggctaccattgccagcctccctgtcacagaaataaatcacgttagcaaaatgaaagtgctctggtaggtatattttgctggcagaatgtactgagagg

SEQ ID NO: 53415 - DNA, 212 bp, Setaria italica
  Peptide Sequence Number=SeqID_119389
ttgcttataacctttgattttatatctgaattgaatcggcaatgtttcttgatgaatttaatgtagacagctaggctgtgatgataagaaatgtgaattggtacatataaaatctgaaataatcagcatccggtaagcagatgaataatggccaaaaacttttgaatctgcaagtgttaataatcctttgagcctttttgatcagcagagtg

SEQ ID NO: 53416 - DNA, 374 bp, Setaria italica
  Peptide Sequence Number=SeqID_119390
ttcgtttggttccttctaggggtattcctttgtagggtccttattgctgcgcacacaaggtgtgcaatgtcactgacaaagagagaagctgcgaaagaaaatactgacaacgacgatgatggagaaccccgtcttgggatcagggagctcttgttctacaacttgattggtttggcttcggcttcatgaaggaagaagctaggggttttggttgctcgtttgtacagtacgaaggcaaggcaacgatggataaaagccccggggttgcgtgctgtatgttgctcagtttgggtagcactgccgtgggcgtcgtgctgttgctgttgtgtggacgtggttctgtttctgtatgcttgatgctaatatagtggaga

SEQ ID NO: 53417 - DNA, 395 bp, Setaria italica
  Peptide Sequence Number=SeqID_119391
tatttcagcagctgaactaaatgaaaaattaactattttatatggaaacgactatttgatattttatggtatccatgccttagtggattttccccaaggtttctcagtttttaatccagcgagtgtgaaaccccccacttattagtcccttcacatgtttgtctggtactatgttgtcttgctttcacaggtggaatcatggcttgaagatcttctttgggaaaagaattctagtatggatatatatcgttgtaaagggattttacacatccaggactcagatcaaattcatacattacaggttgttacaccacttacatcatacaagaaccacagaggaatgagtcatgacctagagctatcaagcattttttttagatttccccttatcaacc

SEQ ID NO: 53418 - DNA, 459 bp, Setaria italica
  Peptide Sequence Number=SeqID_119392
agacgacgtacttacttcccggggggtggtgctcggatgagctgcttcgtgtgcttcggatcggcccaggatggggaggccaagaagcaagtcgccgacgccaaggacccgcgcaaggacgggccgccggatcgcggggtggccagggtcggatcagggatgggaacagtcaaaatattgcagcacagactttcacttttcgtgaacttgctgctgccacgaagaatttcaggcaagattgcctattaggggaaggaggttttggccgtgtatataaaggacgtttggagaatgggcagatctgccaaaagataaagaagctcttgattggaacacacggatgaagatagccgctggtgctgctaagggcttagagtaccttcacgacaaagccagccctcctgttatttacagggatttcaagtcgtcaaacattcttcttggagaaggatttcatcc

SEQ ID NO: 53419 - DNA, 254 bp, Setaria italica
  Peptide Sequence Number=SeqID_119393
gatgagctgcttcgtgtgcttcggatcggcccaggatggggaggccaagaagcaagtcgccgacgccaaggacccgcgcaaggacgggccgccggatcgcggggtggccagggtcggatcaggtgcgcgcgtgtgccgaactggatctcggaactgttcttcgcttctttgctgcggctttgagctgtgcggcgttaggcttggtcgtgttttctttcgttgcttgctgcgcgtgaaccatgagagtttgatgg

SEQ ID NO: 53420 - DNA, 365 bp, Setaria italica
  Peptide Sequence Number=SeqID_119394
gccttgttggtgtccgagaagggcatcttgtgcgttatgaacccatcaaaaatttaccttcagctcctgttgaaataacaaaagaacaacttaccatgaagcaaaaactaatttggcacctctttaattcataaaaggtctcacaaaataaaacttcctgtgagggagagaaataaaatagaaggacaaaatatggtagaaagtagaaacttaattttacagcagaagatgcagtgagtaagcataccccactcatgcacttgtccacgatgtcaggcagctgggacttgcccttgaagtcgccgaagacacagccggtgatccgacggccgtcgaagagctccatcgggtgcaacggcatcatc

SEQ ID NO: 53421 - DNA, 462 bp, Setaria italica
  Peptide Sequence Number=SeqID_119395
gccgccgccgtagccctggaagatgctgggccgcgcaccgccgcgccgcagaagggctccaggatgtgcacggggttcacggcgaaggtcacaatgttgatggccatcatcgcgctggcgcaccgcgcgttggcggggtctggcctccggtagaagtcgccgccgcacccgtccttggcggcctcgtagagctcgtcggagatgagccccatgccgtgcatgaacggcaccttgccgcccgagtcgtaccggtcgtccgtccccgcgttgccgaccaggtaccccaccaggttcagcttggggtcgtcgttgtgggtggcgatgtccagcgcggtgacgggcacggtgtagccggagtaggagtcgccgccgatgtagagcgggttggacgcgaactccgggtgctcggcagcaccacaccttcctcggccagccacttgcggaggaaggtgtggttgtctt

SEQ ID NO: 53422 - DNA, 327 bp, Setaria italica
  Peptide Sequence Number=SeqID_119396
ccgggtgctcggccagccacttgcggaggaaggtgtggtgctgccgcccagatcccgtgaggctgacgttgaggccggcctcctcccgcgagtaggagaagcccgtgcccaccggcgcgtccaggaagatgacattgctcaccttggtccatgaatcctcgaagtagacgaggcgcgggaaaccttcagtgtaccccgccacatcgaacttgagagggccgatctcgaagaggaggccggagagggcggagcatccggggccgccggtgatccagaggattgtagtcgggttccttccgtccgggtttccttctttccgttacgttc

SEQ ID NO: 53423 - DNA, 248 bp, Setaria italica
  Peptide Sequence Number=SeqID_119397
ggagcatggtagccgggcaggtggtgttcccggagtcgagccagcgctggatggaggtgcgctcgtaggtgacgccggtgcagaggctcaccggcgaccgcatgacgtccagcgagatggggcaccggaagaggctgggcaccttcacctccaggccctggtactcggccgacagccgcccgctcatctcccgccttcccatggatcaatcggtgttctttgatttgattagcttccttgccttggtg

SEQ ID NO: 53424 - DNA, 471 bp, Setaria italica
  Peptide Sequence Number=SeqID_119398
gctagtcatacatctcaagagattttcatttagtaggtcaacaaacaaaattagaaacttttgtcaattttccaatacataatttggatttgaccaagtatattgctaacaagaagagttcagagcgccagatgtatgagttgtatgctgtgagcaatcattacggcagcatggcgagtgggcattatactgcgcacataaaggtacatttataaattgcaagctattactttagtttctctgcaagaaatagtttgatagtgataccagtgttctatagctgtctattgcttgtatattgtctgtattcggttctactgtttgtgcatgttcttatgccatttttataatttgagctgaagttggttgtatcattgcaatcacaatggtcaatgcaacctgttaacaatgccacctcttacaattttaattcatttcagtttgcaatctagccccactttgggtataaga

SEQ ID NO: 53425 - DNA, 247 bp, Setaria italica
  Peptide Sequence Number=SeqID_119399
gcttggtataaattaaagcgaacccaacgtatgtcatgtcaatatgctatttacatgattaacataaatacttattgcgaatttttttttctgttaatattatcctttgctacttgtagggaccatggaaacaataacagcttgacatcttggaaaccctatggtgttcctcttattgcacaaatacctcgcaatgaaactgtcacaggttttgatatccatgagttggtccattaaaattgtcttt

SEQ ID NO: 53426 - DNA, 217 bp, Setaria italica
  Peptide Sequence Number=SeqID_119400
gacttttgacccgttcatgtatctttccttgcccttacaatttgcctcaacccggagcatgactgccgtggtcttttcttgtgacggaagttctccaccaacaccattcactgtaaatgttcctaagcaaggtaggtgcagggatctattacaagccctcggcatctccagaatttatgtaaggtctatgtttcacacgattcaaatcctcatggag

SEQ ID NO: 53427 - DNA, 187 bp, Setaria italica
  Peptide Sequence Number=SeqID_119401
aacttaaggaaaaagacagagcaacgtattttgactcgcggacgaccttagcctcgcatcttgggcgggctaaggtcgtccgcgagtcaaaatacattgcacaacttaaggaaaaagcagagcaacgtaaacgagaacaggatataatatatgagaggaagcttcagaaagagaggagcaaggagga

SEQ ID NO: 53428 - DNA, 413 bp, Setaria italica
  Peptide Sequence Number=SeqID_119402
cttaaatactgttactgcctgcatacagaaatcgttcagactactttcttgtccagccggtgagaacaatgcatctctcagaatacacatgacacacagttttacaaacatttaactcctttctctactagcaaacttattccactgcagagcatcttcagcttcagatcagcacttggagccacagattaatccatcttttcttacagtctatcctccaagatccattcaaggaaatctgaaaaatagtaatataaatgtaaatgttataacagcgttagtacaaatgtttgtgagagatgtccatgactagtcgtcaatcaggggcaccatggcctgtattgccgcctactgatcagcaaaaagattcagtgcatggtttggtccagtagccaacatgtactaggccgatt

SEQ ID NO: 53429 - DNA, 269 bp, Setaria italica
  Peptide Sequence Number=SeqID_119403
cgcccctgtttcgtgggcaggggtcgttggaggaagggaagagcacctcgctgttggaggaggagaaggcgttgaggccgtcgtagtcggacagggcggcgtcgtcgcagccgccgtggtccagggcgacgccggcccagttctccgaccggctccggttgtcctggcaaatgtggttcagcgctgccgcggccacgcactcgtcgtcgtcgtaggcctggccgagagcacggcaaccaagcaataagagacgccattgtcagtgacgg

SEQ ID NO: 53430 - DNA, 287 bp, Setaria italica
  Peptide Sequence Number=SeqID_119404
ggatcttgtacgccgcgcccctgtttcgtgggcaggggtcgttggaggaagggaagagcacctcgctgttggaggaggagaaggcgttgaggccgtcgtagtcggacagggcggcgtcgtcgcagccgccgtggtccagggcgacgccggcccagttctccgaccggctccggttgtcctggcaaatgtggttcagcgctgccgcggccacgcactcgtcgtcgtcgtaggccgggtaaacacggggtactcctcgtctgccgtcctggagcgcgcggggacgccgg

SEQ ID NO: 53431 - DNA, 259 bp, Setaria italica
  Peptide Sequence Number=SeqID_119405
taggcgcgggcggcgccgccgtgcggagcagcggcaaccgtagggagccggcaccgctaggagccacgcgctggggtatcagccagcgctaaggaaattctgggatcgggaaaggaccagtcgctgctttttatcggaagtaggggagttgttggagatcaaaattctactgaaatgcccaagaaaaaaggacttgctctgtcaagaagatgatcgttctgagggtggtaaaatttcaagatattcagggtcaggcctt

SEQ ID NO: 53432 - DNA, 464 bp, Setaria italica
  Peptide Sequence Number=SeqID_119406
gccccgcctctccctcccgccccagcaacgccaacttcgtatttcttcctcttgcgccctcttcagctgttttggtttcgaatcgaaaccgggacagatagattagaggagatacaagcagtggaccacgcgaactcttgcgcacgcagagacggtagggaggagagaggtcgcccgactgcccgccgcctttgtgctctcgataccaggtgccatagggatgctgtcgctaaatcgcgtcatgctcaagcagaagcggaggcgttgctggtgaatccaagcccgcattataggacggtggcaccgtcaagctcccagatccaccaagcgctcgcgactgcgccaaacttgctgcggtagcggcgttgcggaggcccggaggtcactgcctctctcccactgctcctccctcgcggatccagctcgtgcccacggtctccttcctccgatcctctctgtacccc

SEQ ID NO: 53433 - DNA, 281 bp, Setaria italica
  Peptide Sequence Number=SeqID_119407
gcctccgcgagcaaaggtagcatcaacagtagggcgcgggcggcgccgcgtgcggagcagcggcaaccgtagggagccggcaccgctaggagccacgcgctggggtatcagccagcgctaaggaaattctgggatcgggaaaggaccagtcgctgctttttatcggaagtaggggagttgttggaggttaatttttttttcaaataagattttaggcaatttttaaggagcttttgagttgctcttgctcccgtgatcccgttctgtcccgtatctctcta

SEQ ID NO: 53434 - DNA, 238 bp, Setaria italica
  Peptide Sequence Number=SeqID_119408
tatgtaataaactgatcacatttttttttgagatactaacttctgtatttttgttgattgcatgcagggatgttgttaaatgcagctcttgtcaaggtaattgtcataaagagtgtacatcaagatctattgttagcaaaggagtcagtgctacttccaatttgacatgcaagctatgcctccagaagcggaatcttatgcttacaagttacaatacaaatgcaagttatatccggcc

SEQ ID NO: 53435 - DNA, 239 bp, Setaria italica
  Peptide Sequence Number=SeqID_119409
gtgttgagatttgccttctcaatgttctctttgacctcctgaagctctttctgttttgatgctggagcttccaaggagcatgagtctgaagatgctaaacaaattagcaattcaattaaggaagctctagcatcaaaacagaaagagcttcaggaggtcaaagagaacattgagaaggcaaaggctgaggctaacgtgttgagatttgctgcctcaacactcaaatcagaactagacaa

SEQ ID NO: 53436 - DNA, 313 bp, Setaria italica
  Peptide Sequence Number=SeqID_119410
ctcgtatagctgtttggctacgatgctgtgtgctacagttacatatggagtgaggtttgagcaatatagatcctaagccccaaggcaaaattgcttctgccacatttggaaatcttaggaagcacatctatttgaactatgcaggtgtttgctgctgacctctttgtatcaaaatttaaagatgacttgctcaatcagcatgcaggattgcgattcagaaataaggtaatgactaatgctttcctagttattctgtactgaattcattgaatgcacatgtgaattgttacaagacacttgcatcactgcaggt

SEQ ID NO: 53437 - DNA, 387 bp, Setaria italica
  Peptide Sequence Number=SeqID_119411
caggatcaccatcgccgaggacagacatgagaagctggggcggcagggtgggcggctccttggcgaattcctcatctcctgggtattgcaggtcgtagctgtgctcgggtgatggaggagcctcaaattcagctacgctgtcaagactttcaggaacataatcatggacatcgaggaggttggccacttgtcctaactcatcagttacataaggttgctcagggatgtatctcaaatccccatccacaatgatcctgtaatgatatactccggatggaagaaccaataagatggcgtgatctttgccagacctctctaatgctctcctcgatgtccagttaatacccaaagaataccttaccaagaaaacaacctacaatttaccta

SEQ ID NO: 53438 - DNA, 234 bp, Setaria italica
  Peptide Sequence Number=SeqID_119412
gcacagctacgacctgcaatacccaggagatgaggaattcgccaaggagcctcaaattcagctacgctgtcaagactttcaggaacataatcatggacatcgaggagagcattagagaggtctggcaaagatcacgccatcttattggttcttccatccggagtatatcattacaggatcattgtggatggggatttgagatggcgtgatctttgccagacccctcaaattcag

SEQ ID NO: 53439 - DNA, 253 bp, Setaria italica
  Peptide Sequence Number=SeqID_119413
atctcctgggtattgcaggtcgtagctgtgctcgggtgatggaggagcctcaaattcagctacgctgtcaagactttcaggaacataatcctcgatgtccagttatcccaagatccttccagaaacacctcatttcctacttgactccatgtaatcagagttggaatccccttctccagggcgtggttggtggtggattcatctgttccatttatcggtgaatggttgaaaacaggagaaaattcagtgtcgt

SEQ ID NO: 53440 - DNA, 126 bp, Setaria italica
  Peptide Sequence Number=SeqID_119414
gatgagttaggacaagtggccaacctcatcagttacataaggttgctcagggatgtatctcaaatccccatccacaaagatcacgccatcttattggttcttccatccggagtatatcattacagg

SEQ ID NO: 53441 - DNA, 206 bp, Setaria italica
  Peptide Sequence Number=SeqID_119415
tcccaccttcctcgatgaacagatggttgaggacgacgtgctgtggctttggaggttgatcatcagcgttatcaggatcaccatcgccgaggacagacatgagaagctgaggtgacagtgtgacactgctgaagaagaaaggagtgttggccagggttcctgcgtttcccttctgtacaacactaccaagtcagctactctcccat

SEQ ID NO: 53442 - DNA, 139 bp, Setaria italica
  Peptide Sequence Number=SeqID_119416
cccgagcacagctacgacctgcaatacccaggagatgaggagcctcaaattcagctacgctgtcaagactttcaggaacataatcatggacatcgaggaggttggccacttgtcctaactcatcagttacataaggttg

SEQ ID NO: 53443 - DNA, 185 bp, Setaria italica
  Peptide Sequence Number=SeqID_119417
tggttggtggtggattcatctgttccatttatcggtgaatggttgaaaacaggagaaaattcagtaggtctctgcagtggagcaactgcggcgcgaagaggtagggcacgggcggtggctgctccagcatcaccgcgtccggcggcgacaacggcggcggcctcgcggcggccgccccccgccga

SEQ ID NO: 53444 - DNA, 167 bp, Setaria italica
  Peptide Sequence Number=SeqID_119418
accaaggcagtttctttgtggacaacaaaatgaattcatgacaagatctgataggtttagctcagagcaacttgaacattgacaactgaagaagctgaggcacccatatagcaaggctcttgcccaggccgaagacacaattgcagaggcctttgtaaagataggag

SEQ ID NO: 53445 - DNA, 276 bp, Setaria italica
  Peptide Sequence Number=SeqID_119419
ctatcattgcctgtacgattattttcacatacatatggcttttaaatatcttcccatttactaatttttatgcatgcatcacgctgagtttctttttgttttaggatatatcaaaagttggtaaggatatggaggaagttgctagatctctttttggaaatagtgatgtcagtctgaatatagatcctggatgctgcatgaattgtagatcccatattgatgtggcatctgctgcggctacatcacacagggaagcatcgaaggtcgattaggctg

SEQ ID NO: 53446 - DNA, 266 bp, Setaria italica
  Peptide Sequence Number=SeqID_119420
tcaggtgcgatgaggaggatgtggagatgtctgcagatgccaaggtcctgctcacaagattggtgtggagacctccttgaggtacgctatccacctgatcacctctgctgcactagcctgccagaagcgcaagggcaaggtggtggagatggaggatattagccgggtgtaccagctctttctggacgtgaagagatcgacgcagtacctgatggagtaccagaccagccagcaaataccatcccactttctctaggactgcatgg

SEQ ID NO: 53447 - DNA, 185 bp, Setaria italica
  Peptide Sequence Number=SeqID_119421
actgcggctggtaaatccgggaggcttacgctgaagaccacggacatggagacggtgtatgagctcgggggaagatgattgaggctcttgggaaggagaaggtgcagagtggggatgtgattgcgcttgacaaggcctcagggcacttgacaaacttggtgtgtgggccaacagcatcataatcc

SEQ ID NO: 53448 - DNA, 156 bp, Setaria italica
  Peptide Sequence Number=SeqID_119422
atttgtggacctcttctctgtaacacacctgcacatatggagaacaggtacactgccaagaatgtcataaattggcagtgtacctgttctccatatgtgcatttgggttatgatttgtggacctcttctctgtaactcagcaggtgtgttacagag

SEQ ID NO: 53449 - DNA, 431 bp, Setaria italica
  misc_feature (238)..(238): n is a, c, g, or t
  Peptide Sequence Number=SeqID_119423
tagtgaatctatcaatatcatcttctgtgaaactcttaatggaatggttattgtctaatgtccacatttcttgtcaggtcgttgaatgggcactgctatatcaagtcgcgttccatgccaacaacagagaactcacaccgtcaggacctgatactgcgcaaaaaaagaccaacaatagtatgtcaattgtgtttcaagttaagacaccatttatttttttcttttacaactcttttanggtacacaatactaggctatactagtgtcaaaatttattgtttagacattcaatggggaggatggtgggaagctctaagctcttatcccttcaacctacccacaccaaaactgtgtttccatgacccttcctagctccgacagaagaccagaatataatatatgcttatgaacttgtggccaaaaaaaaaaaa

SEQ ID NO: 53450 - DNA, 277 bp, Setaria italica
  Peptide Sequence Number=SeqID_119424
taaaatagttggtaacaattcagccagatgttttttaaaaactaaattgttaataaatgttaacacatgttgatggatgttaaaaaaatagttgtacataggtttaatatgggctaccttatggacttatggagggcatataggagctcccggccaggccgcacagtaaggctcatgttaccaaattctctttgaaaaaaaatatcctctacttctttttcaccaaaatttagagctcatgtttttggtatccatgtctatttgcatccaattcact

SEQ ID NO: 53451 - DNA, 410 bp, Setaria italica
  Peptide Sequence Number=SeqID_119425
acctttttcctataggaatgctacaaccgctagtgaatctaatcaatatcatcttctgtgaaactcttaatggaatggttattgtctaatgtccacattttcttgtcaggtcgttgaatgggcactgctatatcaagtcgcgttccatgccaacaacagagaactcacaccgtcaggacctgatactgcgcaaaaaaaagaccaacaatagtatgtcaattgtgtttcaagttaagacaccatttattttttttcttttacaactctttttatggtacacaatactaggctatactagtgtcaaaatttattgtttagacatttctaattggggtaggtattggttgggtaagtcttcttaagttctttcttttatttcccttttcttaacctttacccttacttacctt

SEQ ID NO: 53452 - DNA, 299 bp, Setaria italica
  Peptide Sequence Number=SeqID_119426
cttgcaagagcgctgagtattcatttggttccaggtgatgcttactcatgagcaagttaaatgattctgtgctatacatgaagctgcaatctgcacataatgatgctcgtcgaatcttggcacagatgatttgggttcttttaattcagtgaactgttctttcaaatggccacagaagcatactcacaccgttagaacccggtattggcggcaatgtttagccgtgcgggtcaaaatgatgttgatgttgactctgatatttgtaaaatgttttattccattgacatttttacaaatat

SEQ ID NO: 53453 - DNA, 467 bp, Setaria italica
  misc_feature (462)..(462): n is a, c, g, or t
  Peptide Sequence Number=SeqID_119427
aagtggaattgattcaacttgcctcacagcttaatggtgatcatgtgctgaacacatacccagatattggcaggaccatgactgttggggaagcaaaccgctacgcagaggatgctgtggccagattcctggaagctggtaggattgctctaagagctggtgcgaatgaatctgctttggtgacaatgaggcctgctctcaccagcagggcctccatgtcctctggtttatcatcagagctctaatacattgttccgcaatctgcgcacaaattctacatcatcattcgattccactctacatcatcattcacttccactctacatcataactgttttgtaatgggcaagagagcctccctcaaggttggtgtcgtgcaaagtaatgaataagcaatcaatgtaaataggaataaggtacttaaaacaatagtttactagtaaaataagaatagtacaatanaataa

SEQ ID NO: 53454 - DNA, 344 bp, Setaria italica
  Peptide Sequence Number=SeqID_119428
agaaaggaactgtgatccatgaaccaagtggtccgcaagaaagctcacaatatgagcattcgtccattcctgcaacagtaaagaagctatttaatttacactctaacttcctgacaaagagagatgcatgggctgggacctttgagaactacttcaaaatccggaagacaccaagaactgactgtccagagacactcccagaggtgacaaagtcactgcgaccatttggccccaaggaagattcatctctgtcagaatttcaagtggaattgattcaacttgcctcacagcttaatgatgatgtagagtggaatcgaatgatgatgtagaatttgtgcgcagat

SEQ ID NO: 53455 - DNA, 346 bp, Setaria italica
  misc_feature (103)..(103): n is a, c, g, or t
  Peptide Sequence Number=SeqID_119429
cactcccagaggtgacaaagtcactgcgaccatttggccccaagaagattcatctctgtcagaatttcaagtggaattgattcaacttgcctcacagcttaanggtgatcatgtgctgaacacatacccagatattggcaggaccatgactgttggggaagcaaaccgctacgcagaggatgctgtggccagattcctggaagctggtaggattgctctaagagctggtgcgaatgaatctgctttggtgacaatgaggcctgctctcaccagacaagggaacctaaccaaataagtaacctaactaaggtttaaataacaaataacaaagaaagaactaactaaa

SEQ ID NO: 53456 - DNA, 257 bp, Setaria italica
  Peptide Sequence Number=SeqID_119430
agagcctccctcaggttggtgtcgtgcaagtatgatagcatcatgtaatggataggtcttaaacatgtttctgtaaatagatgtcatgatatttgacatctcagtgttacccttcggcagactgtcgtggtaacactgagacagccagaaatatctcatcaacttatctgataatatacaattccacaatgctttagaaatccccgctacacattatcccagaaggggactttgacatagtatattatcagataagt

SEQ ID NO: 53457 - DNA, 112 bp, Setaria italica
  Peptide Sequence Number=SeqID_119431
aagtggaagtgaatgatgatgtagagtggaatcgaatgatgatgtagaatttgtaatgggcaagagagcctccctcaggttggtgtcgtgcaagtatgatagcatcatgtaa

SEQ ID NO: 53458 - DNA, 219 bp, Setaria italica
  Peptide Sequence Number=SeqID_119432
cgtaggacatctgcgttgagctttccttcgccctgtgcagagcaaggagctagccactagcaaaggtccggtacaggggcagggtactagcaccaggcagtactactttaaaatctcgcgaggctgcggcactgggagcccaacagcatcatgataagctaggaaatacactgtggaggtgtttacccagataactaaggtatttccacgatcttagcc

SEQ ID NO: 53459 - DNA, 387 bp, Setaria italica
  misc_feature (6)..(6): n is a, c, g, or t
  Peptide Sequence Number=SeqID_119433
gtaaangtgaggtgagcctaaaagggatcagtaactcttcggagaggcaaaggccgcagcatcactagacctgcggcttgacgatcctcacactgctgtagaagcgcttgaagtccttcatcgcctgctcctcaatctggattgagcggatggaggacggggcgtcagtctctggcttgaaccagcggttgggtacgttgtccttcacaccgccaacctctggtgatccaccatgggatggtatagcgaagcctgatgtccgggttttcgggctgtgggagatgctatggtgacgcttctccttgcttgtctattcttgtttattgttcccttgtagtcgtaaggtccgttgttacacatttgggttgtaggttagttcttagttaa

SEQ ID NO: 53460 - DNA, 267 bp, Setaria italica
  Peptide Sequence Number=SeqID_119434
gatgccttaagaagggtggaaatacaacacgccgtggggtgacaaggcgatgaccccaagtgaacacctctccatcaactcctaacacgattgtatgatattttgctgcagatacacctctaaaatacttttcctttcaagtactccaccattcttggaatacaatttgatgctgaatttgaaaggaaaagtatttagaggtgtatctgcagcaaaatatcatacaacacgccgtggggtgacaaggcgatgaccccaagtgaaccg

SEQ ID NO: 53461 - DNA, 251 bp, Setaria italica
  Peptide Sequence Number=SeqID_119435
ccaaggaatcagcaacttcaagaagttgtatagcattttttggctccaataaatactcaactgcaaccttctcacagaggcttttcaagctaggtacggttttgctcatttcaccactgcttcctgataaaccactgtcaggctggacatcattaaacaggatatcttcatcctaatttcttcctattccctacttgtttcctattttcttgttactattagtaattttattgtcttttggttattttttt

SEQ ID NO: 53462 - DNA, 212 bp, Setaria italica
  Peptide Sequence Number=SeqID_119436
cagacttggatcacttcaccgctcgtccctttccccactctttctgggctctgactgacatgcgacgaatccccatggccgcggcggcgaggaaacccgtctccgccctgctgctgccaatctggctcttctgcctcctcgtctgctcgtccagcgcgcagccgtacatcggcgtcaactacggcgaggtggcggacaacctgccgccgccg

SEQ ID NO: 53463 - DNA, 243 bp, Setaria italica
  Peptide Sequence Number=SeqID_119437
ctgactgacatgcgacgaatccccatggccgcggcggcgaggaaacccgtctccgccctgctgctgccaatctggctcttctgcctcctcgtctgctcgtccagtgagtaatccacacctttttctagaagtagcgatctctcttttctccgggggttcagcaatggctatcgcgagtcccgagaagcgcagggaaagaagttggcggatcgggaattccaggctttccgagccgtaaagcct

SEQ ID NO: 53464 - DNA, 258 bp, Setaria italica
  Peptide Sequence Number=SeqID_119438
tagaagtttttgctgagtaccctgttgtcttatgagtgagggtgtctctgttttccaccccgaatatattcatccgctgaagggttccaattattaggtgaattgcagtgatttgagccttcttttttggcatgcttcagtggaacagaaaccatcagtttcagctgccttcgaccaaaagatgtttatatgagctgttatttgcaagtctcacggtccaagcttattgccacctgattaaacccacaagtgttgcca

SEQ ID NO: 53465 - DNA, 251 bp, Setaria italica
  Peptide Sequence Number=SeqID_119439
ttactagacgaataactacaaagaaagactaggaatttagacaagtaacaactagtcctcaaccaccgaagaccattgccagctcatttcaaaatgtccgaacttgctagttcttgcggtgaggaatgtgattggagatagaggattaggggttgttgctgatacctgcaagaagctccaaaggctcagaattgagcgaggggacgatggaaggaggtgcgcaagaagagcaggggtggggtctctcaagt

SEQ ID NO: 53466 - DNA, 273 bp, Setaria italica
  Peptide Sequence Number=SeqID_119440
ttcttgtaccttagtagtctttctttgtctaaggtaacttgtctaagttctacttgtatttcccttgaagattagcgactgcgatctttcagatttaataggtttcttccaatctgccacagcattggaagaatttgctggagggacattcaacgagcaaggagaacttgccaagtacgggaatgttaaatttccatcaagattgtgctccttgggtcttactttcatgggaacaaatgaaatgcctattatatttcctttttctgcgatact

SEQ ID NO: 53467 - DNA, 342 bp, Setaria italica
  Peptide Sequence Number=SeqID_119441
aggttcaactccccgtgggagcgaattttcaggctggggtcaaaaatcccctcgtctgccaccacgccaaagcacaggtctaaggcccggccccggtcgttggtcgtctcacatgggctatgatgctgctgtgtaagggtggggcaggggttcgggggtcttctcaacctgcgtgagaaggtcttctcttcttagcaaaatgctcgggggctgtcttaccccccacagcgtatgctaaatacagaggtgcactaggcagtgttagaaaaggagtactgatatccgttggtaagggactgatcacttcacatgcacttatgagtttagaagctcgtggaatcc

SEQ ID NO: 53468 - DNA, 434 bp, Setaria italica
  misc_feature (237)..(237): n is a, c, g, or t
  Peptide Sequence Number=SeqID_119442
ccgtattgaagaagtaactgttgaggtggatgaagagcatgtgggtttcgtcttggaaacccttacacacaggaagggtgaaatacttgacatgggcccagttcctgggacaactggaagaactcggatctttatgacctgtccatctaggggtttggtgggtgttaaaggaattttcagcagctttacacgcggaactggattttatgcaccgtgctttccagggtatgatgctanatttctattgatcattcaattcagtgcttgatcacattcaagtctgttactgatctatgtgctattgccaaaaattgagttgttttcgtccaaatatggaggcaaactataaactggcctgcccatttactcactgcaggtttttaattatctgtgagtgcttagcatagatgttctttgaaacaccgtaagtcaaa

SEQ ID NO: 53469 - DNA, 269 bp, Setaria italica
  Peptide Sequence Number=SeqID_119443
tcctggaatgcagtattggtccgaggagacctcaatgtcatcttcttaccaacctccttctccattttactcagatactcagtgaccatgccagtcccctttgagttgttcaggaaaaccctcagatgcaacttggactgccaagactgggccaagttacctttaagaggaacccatacatcagctaacgctgacaagaaacccttacacacaggaagggtgaaatacttgacatgggcccagttcctgggacaactggaagaactcgg

SEQ ID NO: 53470 - DNA, 218 bp, Setaria italica
  misc_feature (20)..(20): n is a, c, g, or t
  Peptide Sequence Number=SeqID_119444
gtagagagcttggtttttgntctttttgcaaaccttggagctacagaagaacagctagatttcccagttctttatgcatcagcaaaagaagggtttccatgatggaacgtgatttttatctaggacgaatactcactgggagagtaagatctggagttgtccgtgttggtgacaaagtgcatggtcttcgcagcacagatgatggagttcagaagatc

SEQ ID NO: 53471 - DNA, 363 bp, Setaria italica
  Peptide Sequence Number=SeqID_119445
cactgcttctcgtccacccacgacttcactgcgtccgccgccttccagttagcgccggccgacccccagaagatgttctccccgtagggcccgccggagtgctgcagccggcagtcgccggccctctgcgcggcgtagctctccgcgaactgctgcagcttcgtgctccaggtaaccgggccgacaccgaccgcggcgcgggcctggttgtggggcgtgaggtagtcttgaggcgagttctgggcgcttgaaggctgcacggccatggcggcaaccatggccaacacgagcaacgcaactagcttggaacgaataggactaccaataagactaacaacaaataaatactaagaaaggacaaga

SEQ ID NO: 53472 - DNA, 381 bp, Setaria italica
  Peptide Sequence Number=SeqID_119446
catgatagagtttcagcaacctgggaataattcagcttcaactgaggacttagctaagttggaagctgcatatactgaatcaacctctggttcaaacgttgagcttgctgctgagaaggtggtgttaaggagacctaagcaggctatcttacatgtgatcacaggtaatctgttgctcctctacatcactttctagtgcatatagtcgatggtttcatatcaaagcttaacagtttatattcataacctttcttgccactatctttggaattgtgatctgtaactgtgcaatttaatgaatgagagcttctctgttacagataatgtatttacttgttttgagtaataagaaaggatttatacttgatttcgtgtttgtta

SEQ ID NO: 53473 - DNA, 417 bp, Setaria italica
  Peptide Sequence Number=SeqID_119447
caacacaaatgctatcatttaggcagtaacactgtatcggctgctgcttctactactacacaacatttcaaaaaaagtagccaatctgccacgataaaaaggcttatacatacacaagcgggcgcatagatatgagccgtcgaaagcagagcggcacaggcgggaataagttatggacgaactaatgaatctcttgtcctcactgttattgtattgctgatctgcatccccgattccgaccaccacgttccaataccgggtaaacaacagttccaacagcaaaccttttttctcacttgtactcgaacgacggtatcggggtgcttggcgtgtcgaagctctccaaggaatactactagaacttaagaacccccgaacccgaacgaaccggaaccttaacttaactaacctaaccaa

SEQ ID NO: 53474 - DNA, 392 bp, Setaria italica
  Peptide Sequence Number=SeqID_119448
tggtagtattggtccggtcgtcttgggggtagtagtaggttgggttgggtccttggtcgtacggtactttcttccggggggagccgcgccgcgctgcggtgggcggcggacaacctgctgcgcgccggtgaccaggtgctgctgctgcacgtcgtcaaggagcccgactacgagcagagcgaggccatcctctgggaatccaccggctccccattgattccgctctcggagctctctgatcctcttatcgccaagaaatatggggcaaagcccgatgctgaaaccttggatctactcaacaccttagccaaggagaaggaggttatggtggttgtcaaagtcctctgggagatccccgtgagaagctatgccaggctatcagcgacacgccc

SEQ ID NO: 53475 - DNA, 265 bp, Setaria italica
  Peptide Sequence Number=SeqID_119449
ggaaatgactgaatgtgttgctgtaataagaggatggttggcctgttgaagaacatgcactagtttccagctagctgaaacatgttgaaccaggcagttctattgtaataatggtcaaacgaccttttgaaggtcatggacatgtaaaaagtactgttttccagattagctgcaccatgttgaaccaggcagttctattgtaataatggtcaaacgaccttttgaaggtcatggacatgtaaaaagcatggtgcagctaatctgg

SEQ ID NO: 53476 - DNA, 212 bp, Setaria italica
  Peptide Sequence Number=SeqID_119450
taataagaggatggttggcctgttgaagaacatgcactagtttccagctagctgaaacatgttgaaccaggcagttctattgtaataatggtcaaacgaccttttgaaggtcatggacatgtaaaaagtactgttttccagattagctataaacatcactcatacagaaacaaaaagtctaattaggttagtactaagtactaaatactaga

SEQ ID NO: 53477 - DNA, 194 bp, Setaria italica
  Peptide Sequence Number=SeqID_119451
ccttgagctgcttggtcataggaagcagaggcctgggaaagctcaagagggtgctcttgggaagcgtcagcgactacgtcgtcaataacgcaacctgccctgtcacggtcgtcaagtcccacgatggctgatcttatcatggaaatgactgctgagacacgcaacggggataggcaaggcacacaggggatagg

SEQ ID NO: 53478 - DNA, 243 bp, Setaria italica
  Peptide Sequence Number=SeqID_119452
cgtaaaccaataattatgacatcaggttacatatgtaccacaaactcagttccactcatacaaaccaaatggcattttatggtgttaccatgttatcccaacaacacaaacacgacaaatatgaatgatgcatgcaatgtaacatatttattatacaaaagaaagaggtgcaaatctcacaagaacattctggggtttgatatcacggtggcagatgccaatgcagttatgtatataagcaag

SEQ ID NO: 53479 - DNA, 341 bp, Setaria italica
  Peptide Sequence Number=SeqID_119453
aaagatcagcgaaaactaggttcgcagcgccatgaacaaactctgccttctcgcgtgctctgggacaaggcgctccacaactcctggaggaacgcctttcagctcttgagatctgaagttgaagagaggaggcagaggccgcccattcggtagacgagtgtttgggtctctcagctcatcaaagaagggatgcatgcaggcttccaaagcagtgcaccgtagatttggtgagtactgcagaaacctgctaacaagatccactgcttcaggtgggagcttttttgaaaacctggatagaagagagctttgtgatgacataggaaccacaagagaaaaatgtt

SEQ ID NO: 53480 - DNA, 246 bp, Setaria italica
  Peptide Sequence Number=SeqID_119454
gttagcaggtttctgcttcaggtgggagctttttttgaaaaaccttgtgccatggatgagctttttcaaaaaaagctcccacctgctaacaagatccactgcttcaggtgggagctttttttgaaaaaccttgtgccatggatgagctttaatttgcgggaacttgaactccgtgtagtttgggttcatgcacttgatctcttcccttgttggagtacccaaaaccttgatgatctcaaccagttg

SEQ ID NO: 53481 - DNA, 240 bp, Setaria italica
  Peptide Sequence Number=SeqID_119455
aaatccgtcactgccgtcgtcatcaagggacttgctgatcacagggatacacttggagctcctctatgcccttgtaggcattatgatgacaaagctgctgaggtagcacaaggattttggaactgcccatgtgttcccatgccgtgagaggaaggaatgccactgtatgctttttctcactcccgactttgatgtcgcctctttgatctcctccaaggagatagcctggtcctgtccagc

SEQ ID NO: 53482 - DNA, 315 bp, Setaria italica
  Peptide Sequence Number=SeqID_119456
tttttttttttttttgttaagtaaattcggtagttaattgtattattatttgtattggtcgtcagaacagtttgacagcagccagcagccaaaatggggagctcagcagcaacaaatcatgaaaattggctcggccaatgcacaaacaggccgagccgaaaacctctccacttcagaaaaaatcgaacgagaggcatctccctcctttcctactcccttccctcttggttaatcctagtagtaaaggtggcaaaagcgatggcagaaagcttgcgggcaatattatactactactactttgcctcggcagcttca

SEQ ID NO: 53483 - DNA, 265 bp, Setaria italica
  Peptide Sequence Number=SeqID_119457
tttttttttgtttaagaaatcggagtaatgatatattgatggcgcagaacagtttgacagcagccagcagccaaaatggggagctcagcagcaacaaatcatgaaaattggctcggccaatgcacaaacaggccgagccgaaaacctctccacttcagaaaaaatcgaacgagaggcatctccctcctttcctactcccttccctcttggttaatcctagtagtaaaggtggcaaaagcgatggcagaaagcttgcgggcaatta

SEQ ID NO: 53484 - DNA, 351 bp, Setaria italica
  Peptide Sequence Number=SeqID_119458
tttagttactaactttgtacagcatctttaactttatctggggaaatcttatagaggaacttcccgctagggaaaaaatctcaagtaacggtagtagcaaaggctgattgtgtgtttaaaggcgactatgtactgtcagaggatggccagatagaaatggcactcctgtatccagggcatcggtacacacttgttaggatgtgccttaggcttagaggcaccaaaattggtgcaaacacaggttggacgtgctaaagatcctaaccactggagtgaatgcaacggaactgaaaaactggacaggcagcatacttagaacttgttgaggctgggaggaggatggagacacat

SEQ ID NO: 53485 - DNA, 259 bp, Setaria italica
  Peptide Sequence Number=SeqID_119459
ttggaatttgtcatgttctaacttttcaaatgctgacttgccctttggttactattcactatgtggttgactgcttgaagccccgtcgacctctaaatctttgcttcctaattctcgggacaatgctactattgatggtatgtcacaagggagtgctgaaatggactgttcagatgatgagggtaataccgtttcacgatttccaactacaaataagcctcatggtgagtcattggggaatggcccgaccactaaggag

SEQ ID NO: 53486 - DNA, 349 bp, Setaria italica
  Peptide Sequence Number=SeqID_119460
tggctacacaatggtgcgccgcttttaatcctctccaacagccccattggataactgatgaattgtgcatttgaagtaaaatttgcagctactagagccccaatccatcaggtaacccacgcccttgtttattcatggcctctttctcaatcatttcttctccttcatccattaacacataccctattttcctgctacaataaatttatcaagcacttgattggttaaaaaaagggatcaaagacattggcttccactagcaattggatgatcagaatggagaagcaagtgctcattgttgagacctaggtgtggagatgagatctgattttcatggagttaattcaca

SEQ ID NO: 53487 - DNA, 285 bp, Setaria italica
  misc_feature (1)..(40): n is a, c, g, or t
  Peptide Sequence Number=SeqID_119461
nnnnnnnnnnnnnnnnnnnnnnnnnnnnnnnnnnnnnnnntttttttttttttttttttttacttttactaaaagcaaaccagttttatgtattcatcactctggactgaccattacaaagacacatgagcacatacagagatgcatacatgatttcatttgtaacgatcaacacacacacatacacacatacatgagcacaaggtatagtagcaaaacacacacatgcaaactgtgagacgaaaacttggtactggtgtgtagtgtggtgaatatgcattcctt

SEQ ID NO: 53488 - DNA, 249 bp, Setaria italica
  Peptide Sequence Number=SeqID_119462
ttcattattgcataaaactgtcatatgcaagattgtctttgtcgctctaaaaaattgttcccttaaacaagtttatcccttttctgtgaactttgaactaccaatgttatttgattatgttttccgttctattatgatccgagtgacattatatttgttgtttccactatcagtgcacatgaagagatgcccaagaaatactttgctactatatcatgcaaactgtgagacgaaaacttggtactggtg

SEQ ID NO: 53489 - DNA, 247 bp, Setaria italica
  Peptide Sequence Number=SeqID_119463
ctccgagcataatgtgctctccactagttgcgacacaacattatacacctggggtatctgggatggatccacgggggtttgctgcagcagcgatttaagcatcaaaagaaccactcgctggtaatccaaagggcccctctccagcagcctcagcaggtgcccaaaggccaacgatgagtgcttagggaaccactccgcacaaatcttggcctgctcgttgctccaggcggcgcaggtcggggtcggc

SEQ ID NO: 53490 - DNA, 177 bp, Setaria italica
  Peptide Sequence Number=SeqID_119464
taggcgcggaggttgccgtcgggctccagggtcatgcggcggaacgcgcggacgccgcggttgaaggtgtcgaatgagagcacgtcggcccgccgccggccacgatctgggccttggcctccagcgccgtgtgcttgaagtacatggcggcggcgacgccgctcgacgacggcggcg

SEQ ID NO: 53491 - DNA, 384 bp, Setaria italica
  Peptide Sequence Number=SeqID_119465
ttaatttagttaagtttagtttaacttactaaaccttactaacttagtttaatttgttgttctatttcttcctttgtaggtcaaagtatatcctccatataactttctgaaagtaggaagtgctgctgtcctcatccaaacaatgaggtcctcttgctcgctcaacgggaccgttgggtcaagagttgctccacctttaagtgcaccattctggaagttgctcggatagacatctttgccaaatttgtgctccctatcactcttccaggagatgtctttcttgtccaccgtcaagttatcattaccacgagtgaaactataatgtatcattaaacaagctccaagcaataagaccacaaggaacaattggttgtccattagccg

SEQ ID NO: 53492 - DNA, 335 bp, Setaria italica
  misc_feature (271)..(271): n is a, c, g, or t
  misc_feature (295)..(295): n is a, c, g, or t
  Peptide Sequence Number=SeqID_119466
tactaagtttgtctagttggtattaggtacctagtcttttttcttttgtcctaccgtaagtcttattattgttatttgttagttgttactcaacctcactgttattgtgtcattctccttgaggtcaaagtatatcctcccatataactttctgaaagtaggaagtgctgctgtcctcatccaaacaatgaggtcctcttgctcgctcaacgggaccgttgggtcaagagttgctccacctttaagtgcaccattctggaagttgctcggntagacatctttgccaaatttgtgntcccctatcactcttccaggagatgtcttttcttggtcca

SEQ ID NO: 53493 - DNA, 258 bp, Setaria italica
  Peptide Sequence Number=SeqID_119467
ctcctggccgcgcccgcggcggccgcatccacggatccgccgttgctggtcccggccgcatggctgctcatctcgcctcccgccaccgacccctccgccctagcagccaaccaaggggggaccccgcggaagccgccgcccggtctggctgcgcggactgggcgtcgtcccggccgccggagcgggccgatgagggaggcgaggagcttccccgccgcgatctagctcgatgctgccggcttgcttgctggcgaaggt

SEQ ID NO: 53494 - DNA, 245 bp, Setaria italica
  Peptide Sequence Number=SeqID_119468
cttatcaatttccaagcgattgcagcatacatgagttaaaaagttactaaccttggttttatgaagtacagcaaggtgaatgcgaatgccaggaaaatgcagagcccaccaactataaggtatgcaaagccaagaaatcgttcttccctccgagccaagttgcagtggataggaccagctttttctgccaccgaagctatatgtattgtagttgttactcaacctcactgttattgtgtcattct

SEQ ID NO: 53495 - DNA, 181 bp, Setaria italica
  Peptide Sequence Number=SeqID_119469
ctattgatccctaatgccttgtttcgtggtacgagagctcaaaacgaacaaagaaccaaagaaacaaaacaacatagtcacgtagatccctttgcaaacaatgtacatgaagttctagcctcaagagactcgcttatgctcagcagcgatttcttgttttgggtaatgcatttcatacaag

SEQ ID NO: 53496 - DNA, 180 bp, Setaria italica
  Peptide Sequence Number=SeqID_119470
catcttagcggcctgcagggtgcctgttccacaactacttgtcctggaacaggcaccctgcaggccaagtagttgtggtctcccagtttccttggttttatgaagtacagcaaggtgaatgcgaatgccaggaaaatgcagagcccaccaactataaggtatgcaaagccaagaaaatcg

SEQ ID NO: 53497 - DNA, 337 bp, Setaria italica
  Peptide Sequence Number=SeqID_119471
agagctcattccgtagcttctctcgtccggttcttcatgctgctgcaagagtagttcaggaaatgggcaaaagtagagcagctgcttatgctttaggtgcttatgatgagggggcccctcttgatgttgaatctcttgattctgaacttgagaatccaacagctgaagctacccggaagcctaatccgctatccaacggtcatggtggcatggacacaatagcagggttattagcatcactgatggaagttgtgcggacaacggtagcatgcgagtgtgtatatgttcgagccatggtcatcaatctttccaggaactttagtggcgaagattcttg

SEQ ID NO: 53498 - DNA, 214 bp, Setaria italica
  Peptide Sequence Number=SeqID_119472
agacgatcttgctagagatattaggcagcatgataatagtaaacaagaatggagtgatgagctctatacatttcatctaggaccttgagcattgggcttattaaagatccaagaccagtaccactggcaccttgattttgtttctttattcctgtttcgttccaagggctaaatacttgcctcttggtccaaccagttccagactgcatggtag

SEQ ID NO: 53499 - DNA, 294 bp, Setaria italica
  Peptide Sequence Number=SeqID_119473
taacaaaacgtagaacatcagcaaaaccctgctctgaatctgataggataagagagcgctagctgagaacagggcatccagcccacacacgcacgcacaccacggcgaccggaggccgctcttcctgtattgtattgtatcttcattctccctttggccgagccgagatgttgaggcgtcaagtttgtctacttagttcgttaccttaaccttaaccgttaggtttactttttccttttcctttacggtttcctttattttgtttccggccccgaccgtacccgtacaccggta

SEQ ID NO: 53500 - DNA, 170 bp, Setaria italica
  Peptide Sequence Number=SeqID_119474
ctttggtatgttatatcagacggcggcaaacggggccctcctcacgccctggcgtaggtgcgggcgaggtgcgcggcgcggaggtcggcggcgccgccgccgagatctcgtgggtccccgaccccgtcacgggccactaccgccccgccaactgggccgccgccgccgac

SEQ ID NO: 53501 - DNA, 178 bp, Setaria italica
  Peptide Sequence Number=SeqID_119475
cccccaccaccccttccccctttggtatgttatatcagacggcggcaaacggggccctcctcacgccctggcgtaggtgcgggcgaggtgcgcggcgccctttgccgaagccgccaccgacgccgtggccgatcccaccgccaaggccgaccgaacccttaagaaccgaaaagaacaa

SEQ ID NO: 53502 - DNA, 395 bp, Setaria italica
  Peptide Sequence Number=SeqID_119476
tagtccggtagggtcttgggttaacttattagtctaggtccctaattaccttctacggtttgtaattgtctaacgtttatcccactcacaggcatcatggcgccaagcggaactgtcatcacagcatccacataggttgtgttccgctgatttctcttcacaacatgagtcattgggtcgtagtccgcgttatgcagccacaaaccacatgagagcatgcagtcaaccccttcgcgcaggctgaatggggtaaccacggacaaaatcagcacctttcctgtatggatcatagagtgtgttgaaaaagaaggcgtggcgggtgtcttcaaattgaccatgtgctgtgcaacagcatcaacagtcgacccagccgtgtcctttgctgggagcaattg

SEQ ID NO: 53503 - DNA, 293 bp, Setaria italica
  Peptide Sequence Number=SeqID_119477
cactccttcccattctttcaaactctcccagagctttacctgcttccgcatcacttctcatcacataaggcagtccagtcttcataccataccccaagctgtcgcataccactttagcacacaaaccattccatacgtcttcaagggtatcccatctgtgcttcccttcgttgcgtagccggagggctgggaacatagcaggccccaatacctcacggttgaatgcaacgtttatcccactcacaggcattctaattaggtacgtacctaaagtacggtaaacttagttacta

SEQ ID NO: 53504 - DNA, 374 bp, Setaria italica
  Peptide Sequence Number=SeqID_119478
aaataagaaagaacaaagaaccaaactaaggaaagacaacgtacgtacttaggaagtacagcgagtagacctccgccgctcgcgaggttgcgcggccggtactcgccaagctatgctccacggccctctcggtggaatcaaggatcttctccgtctcttgcacagattggttcatcataaggctactttccttcagctggcgtgctaactcgaccatttcatcagttaaatcttcttgcagcttcctgtgcttctcgatgtgagcctgagcttctgcatccaatttgataggtgcaccgatatctcctttcctctcctgttggcttgcacgaacctcgacatgagctgctgatctccttcgcaatcctgatgat

SEQ ID NO: 53505 - DNA, 270 bp, Setaria italica
  Peptide Sequence Number=SeqID_119479
tccttgttaaattaagtcttgttagtcttctaaggtctattcgtctaagtttgggtagctaacttgaaacaaacagtgagcagcgtttgcttccttcagattaccaaggtcaatccccagggttatctcagtcaatcgatttaacaatcttggtagtttaccaggcaagattccatgagctgcgcactcaaaagcatgcccgagcaatgaaatattttcaatatctaaaagagaaccgatgaattgagaaagattaaaagttgcaccccg

SEQ ID NO: 53506 - DNA, 259 bp, Setaria italica
  Peptide Sequence Number=SeqID_119480
ttgtacggcaccggcggcgccgagcatggcccacctggcgtggatcagctcgtaggcctggtacttggcgaagtcctctggcttcttgccgaggccaaaagggtcgtagccatagtctccagggacctctccggtgaggtactccggcggtcggcgcagcggtggcgtaccgtgaggagccggcgaagttgatctgggtgccgaggatcttcgatggagcgagcgccgccattgccgcagacccacagttcagaggaag

SEQ ID NO: 53507 - DNA, 342 bp, Setaria italica
  Peptide Sequence Number=SeqID_119481
cttcagagccataactctcttggccatcactgcattgaagtttgcatgagctgctacctttgttagttttcccctacccagccatgatgtataatccaccattttggctcaggagttctgcttctgtaggactaagttcaccatcctttttggttcaggagtactgcttctgtaggactaagttccaactgtccaaatcatgattctagtttcttattgatcctgtagaaagtgagctaagttgtaaattgtacaggactaagttccaactgtccaaatcatgattctagtttcttattgatcctgtagaaagtgagctaagttgtaaattctgtacaattt

SEQ ID NO: 53508 - DNA, 222 bp, Setaria italica
  Peptide Sequence Number=SeqID_119482
tgaggtagcagtgagaatacagaaaagcatgaatgaaattctcttcagagccataactctcttggccatcactgcattgaagtttgcatgagctgctacctttgttagttttcccctacccagccatgatgtataatccaccattttggctcaggagttctgcttctacaggatcaataagaaactagaatcatgatttggacagttggaacttagtcctac

SEQ ID NO: 53509 - DNA, 148 bp, Setaria italica
  Peptide Sequence Number=SeqID_119483
ccatcttgcacataactgacagaagaatagccaagccagttccagctatgccaacagaacactgagtcaaaagttcattgatctctggaccaccctgattcagttcgacttagccttgggattgctgagcaatgtgcaaggcaagaga

SEQ ID NO: 53510 - DNA, 406 bp, Setaria italica
  Peptide Sequence Number=SeqID_119484
ttaagtaaccttaaaattttaacttaaattaagtaaattaagtaaagaactaacttagacttttaaccttagaacaagaatggaagtggtgcttgactgctttccctgaagagtacaaatcactagtaccaaaagtacttgttgagaccatgagtgagttgaattcaagttttgtttctcgtgtcaacatagcaactggggatgttgttcctgaaaccagatctgtttccaaaggtatactggacgttctatcaggtgacttaccaaaaagcaccaagttgcagaataagcatcttcaagcactaattgaactgcacaatatgactggcacttttgctaggaacattcagcacttattttcagaatcagatcttgcagttgtgctgaatactttgaaagctattta

SEQ ID NO: 53511 - DNA, 307 bp, Setaria italica
  misc_feature (220)..(220): n is a, c, g, or t
  Peptide Sequence Number=SeqID_119485
gagatgactggagaaaatgatactaagcagctaactaagcctcaagtggatgctgaactggagaagctgaaaggcatgactaaggaagaggcagctgcctttgctgccaaggctagttgctgaggcggaagtagcaatggcacaagctgaggaagcagcaagggctgcggaggtcttagaaaatgatgctgaaactgcaatagcttttcttgaagccctnactttgtctttgagagacagaaatgccaattcgacggtagagtgaatccatcctttgtcaggatatctatgcgatgagtgcttttag

SEQ ID NO: 53512 - DNA, 416 bp, Setaria italica
  misc_feature (20)..(20): n is a, c, g, or t
  Peptide Sequence Number=SeqID_119486
ctgctgaagagatgactggngaaaatgatactaagcagctaactaagcctcaagtggatgctggaactggagaagctgaaaggcatgactaaggaagaggcagctgcctttgctgccaaggcagttgctgaggcggaagtagcaatggcacaagctgaggaagcagcaagggctgcggaggtcttagaaaatgatgctgaaactgcaatagcttttcttgaagccctcactttgtctttgagagacagaaatgccaattcgacgatgcttcgaagacttagactagaatacctttaacccaatagaccgtacaatagtaggttttaggtacaagacaagaaacaaacaagtagttactagactagaacaaaagaattttaccggaataagaatagaagtttacttagtaataagta

SEQ ID NO: 53513 - DNA, 279 bp, Setaria italica
  misc_feature (209)..(209): n is a, c, g, or t
  misc_feature (223)..(223): n is a, c, g, or t
  Peptide Sequence Number=SeqID_119487
tagtggaaagaaaatgtcagaaagctgccttagttaatgcaagttgctgcgataaaatgtttctagatacgattatttgatgccagcatcttaacattgtagctgattcacagttgtagtggattattggccgctgcctcatttctatttgttgtaggtatatccttggtataataatcatatctttacaacctaaaaaaaaaaaaaanaaaaaaaaaaaaanaaaaaaaaaaaaaacaaaaaaaaaaaactaaagagaacacgacaacgaagggaagt

SEQ ID NO: 53514 - DNA, 281 bp, Setaria italica
  Peptide Sequence Number=SeqID_119488
tccaagaccaaggacgacatggacattgcacatttccacacaaagagtttactaaaattagttgaaaaataaggtgtcctaaatcctgtaccaaagaagtaccagaaaagtttcaagggaaaacaaaccggattatgtgattgcaaccacattccagggttattgggattgctggggtcatatggatccccatgcaggaaatctggcaccacaacgaagtaaccagatgaagcaactttgtcggctatcttcctcaggtttggcgcttcaaacccgaggcg

SEQ ID NO: 53515 - DNA, 388 bp, Setaria italica
  Peptide Sequence Number=SeqID_119489
cattttcagttacaggcagcaaggaaggtcatatcttggtgtgcttgattgcgattctggttcagtttcaatgcttgacatccctttctctgatttatctaatgtggttgcttcagatgattacttctatattgaaggtgcttctgcaaatattccaatgtctattgcaaaggtttaacagatgtcaagtccatgatttttttttccaccaaattttgtgtatcgactatcaattgatgcatctgttgtgtcatccaggtgacattaaatgagagcaaaacaaaagtagtcaatttctcaatagtctggtcctcctctccagatgtcacacaatataaaccttttctttctagtctactacctagtaactttgtttgtagtttcccct

SEQ ID NO: 53516 - DNA, 242 bp, Setaria italica
  Peptide Sequence Number=SeqID_119490
cgggagaccatttaggttcagtaggagattcaaccaacagaggattgccaccagcaacacaaacccgttttgccaagtctccactttcagagaagtggccaacccaaagttctgatttatcccagggcatgtttggatgactccattcaatccatgccatccgcctcttatttgatcctcactttggccgttatgttactgtggtggaagaccgtcgaaagtgaggatacaaaataaggagg

SEQ ID NO: 53517 - DNA, 213 bp, Setaria italica
  misc_feature (50)..(50): n is a, c, g, or t
  Peptide Sequence Number=SeqID_119491
aaatggggtattgttgacgttgatgattgttgcggctgtgcaagatttcnggtggagagtgggaaagtagatgggcggcgcctttgtattactggtagatcagcaggtggatacactactttagcttcacttgcattcagagacacattcaaggctggagcttctttgtgtgtctcagctctcaacagagtcaaagtccccaacaccataaca

SEQ ID NO: 53518 - DNA, 210 bp, Setaria italica
  Peptide Sequence Number=SeqID_119492
cttttgtatacgcgctctggagctgtaagagctaagagctgacttgtgtgcatgctacactgttttcgctgtgctattgtggtttgttcttaccagaggcaatgtaaaaccccgaatatggaattgtgatgctgaaattattgcgcttgacaaagaccactgggtggatatgtcggaaagtatatgcatccatctggctataccgctata

SEQ ID NO: 53519 - DNA, 156 bp, Setaria italica
  Peptide Sequence Number=SeqID_119493
ccttgatttcttggagcaaaggaagaaccaggtgccaagatcgaatgcagttttgagttgaccggacatccttcaacaaaatagtttcaggcccagaagtttctgttctcttcttctttttctgaaccttctgctttacattttcttcctcagagt

SEQ ID NO: 53520 - DNA, 191 bp, Setaria italica
  misc_feature (9)..(9): n is a, c, g, or t
  Peptide Sequence Number=SeqID_119494
acaaattcngaaaatgtgctattctatcactcttaacttagaaagttacctttcgaagaaaggagacgcaaagccttattggcattcttcaaaactgcattcgatcttggcacctggttcttcctttgctccaagaaacttctgggcctgaaactattttgttgaaggatgtccggtcaactcaacacgtg

SEQ ID NO: 53521 - DNA, 246 bp, Setaria italica
  Peptide Sequence Number=SeqID_119495
ttcccttgctcaggaattacagcacaaaagcaatcaagaagcagaaataaaacaatcagaagcttgcttatagaaccaaactaactactcatcaccactagtccactacctcagcatctgggaagcggcagtcgtattcccgaatccagtagaacccgaagacgaacaacatggcgcgagcgagcgcacggccgcaccacacaactccctcccgcctccacccctcgagccgcgcgtacccatccc

SEQ ID NO: 53522 - DNA, 129 bp, Setaria italica
  Peptide Sequence Number=SeqID_119496
cccatttgcctgtctactatccttctgagcaagaaaaggatgatcctaagctctatgcaaatgggtcacctctacataatttacaaattgacagaggagcagaaatacatggcgtgcccctgacatgga

SEQ ID NO: 53523 - DNA, 226 bp, Setaria italica
  Peptide Sequence Number=SeqID_119497
atactagatatagcaagcgcgtagcaggtagtgatcgaacttcttagatgagctcctcctccttgtgcgtctcgatgacgacgtcggaggtggggtaggcgtggcaggtgagcaccatgagaccttgcaattaagcatcggcatcagcagcttctccatcgtttgttactctgcttattgctggtctctgtatcattcatttttacttgagcgaagcctatcatgc

SEQ ID NO: 53524 - DNA, 411 bp, Setaria italica
  Peptide Sequence Number=SeqID_119498
tttccgtttacgttacgtttcttactattccttcgtacctacgtccgtaggtaggtaagggtattcgtagtctgccctactcgtgccgcgccggctcctgctcctcctgcgccggcaagctcgtctccggcagcatcgaccagtccgaccagagcttcctcgacgacgaccaggtcgccgccgggtgggtgctcacctgcgccgcctaccccacctccgacgtcgtcatcgagacccacaaggaggaggaactcatcgtctaatgtatatgcctacgtgctcctaatgctatgcttgcttatttatctcggttgatttcttggttatacatcgtgcgtgctagtgcaattactcaataagcgttgtagacttcaaccatggagagacgtcctactctatgtactatgatgc

SEQ ID NO: 53525 - DNA, 253 bp, Setaria italica
  Peptide Sequence Number=SeqID_119499
acttcaagagggaggagagggagcacaagcacaaggagcgcctcggcgagatgggcgccctcgccggcggagccttcgcactgtacgaggggcaccgcgcgaagaaggacccggagcacgcgcagaggcacaagatcgaggccggcgccggccaccgtcgcgctgccggccaaggtcgcccgcggcgccaggctgcgcgcgcaggccacctacaacgtcaagctcatcacccccgacggcgaggtggagctcc

SEQ ID NO: 53526 - DNA, 217 bp, Setaria italica
  Peptide Sequence Number=SeqID_119500
accagcaataagcagagtaacaaacgatggagaagctgctgatgccgatgcttaattgcaaggtctcatggtgacactgacatgcatgatacaagaaagggaattgtccgacgtcgtcatcgagacgcacaaggaggaggagctcatctaagaagttcgatcactacctgctacgcgcttgctatatctagtatctgtcttgctcttgcaagagatc

SEQ ID NO: 53527 - DNA, 404 bp, Setaria italica
  misc_feature (206)..(206): n is a, c, g, or t
  Peptide Sequence Number=SeqID_119501
gttctgagcaacggacaaccagggcccgcgcagaatgttgacaagtcaactagtttagctcggaaagttttcaggcttttaagtttgtcaatgacctgcatgctctaattagtccccctgccaaaggaacaccacttccacttgatcttactcgggaagtcgagaatgcaatgctgtcaactttcctcttcctggatcaaattgtntgggctgggaggacaggaatatacaagaacaaggagcgagcggagttcctcagcaggatagcattctattgcttcctcggttctaacacctgcacaaccattattgagctagctgagctccaacggttgtatattcctgtcctcccaagacccaacaacaaatttagaataccaaggaactaactacaacaactagaa

SEQ ID NO: 53528 - DNA, 248 bp, Setaria italica
  misc_feature (4)..(4): n is a, c, g, or t
  Peptide Sequence Number=SeqID_119502
tganggttttgttctgaatcttcctgatcgattgtcttcatgtatctctcagtcgaagaatgcaatgctgtcaactttcctcttcctggatcaaattgtgtgggctgggaggacaggaatatacaaggtttgagaattcccttcgatatcgtcagcctagaaaaagtttgatctgctagagcttttccctatacctttttctgctcaaagaaacaaacaaagaaaaattgatgcagaatcgttctgcc

SEQ ID NO: 53529 - DNA, 361 bp, Setaria italica
  Peptide Sequence Number=SeqID_119503
ctggagaccgtgagaggagatcttgcgctggtcatttgtacctgaacaaggctgaagcaagagataagatctgtagagctatacagtatggatcaaagttctgagcaacggacaaccagggcccgcgcagaatgttgacaagtcaactagtttagctcggaaagttttcaggctttttaagtttgtcaatgacctgcatgctctaattagtcccccctgccaaaggaacaccacttccactgatcttactcgggaaggtatgctgattcttgaaggtggtattattacattcttcatctgtgaactcaattcagctgatgattggtttttgtttacttagtaaattaactttaaccttaaa

SEQ ID NO: 53530 - DNA, 190 bp, Setaria italica
  Peptide Sequence Number=SeqID_119504
atgcaatgctgtcaactttcctcttcctggatcaaattgtgtgggctgggaggacaggaatatacaagaacaaggagcgagcggagttcctcagcaggatagcattctattgcttcatccggtattgctcattcttgtacaactcttggtgcttgagctccttctcttagtctttctttcttattttgtt

SEQ ID NO: 53531 - DNA, 185 bp, Setaria italica
  Peptide Sequence Number=SeqID_119505
ctgctggtgaggatgtcaatgtgagagatactgaaggtagaactccattgcactgggctgttgaccgtggccatctaagtgctgttgaagttcttgcaaaagcaaatgcagatctaaatgctaaggtatatttgaaatgtttgcatacttattgcattcttattttttcacgaacaccgtactta

SEQ ID NO: 53532 - DNA, 287 bp, Setaria italica
  Peptide Sequence Number=SeqID_119506
aagaaattaagaactaaggtaagaacctagacctagactagtggatcgagaaaggtgcatcaaaattgctattgtgcatgacattgctgaagctattgttggtgacattaccccatcggatggtatacctaaggctgaaaaagtcggcgtgaacaagctgctctggatgaaatgtgtgaagttcttggtggtggtccaatagctgatgagattaaggaactgtgggaagaatatgaaaaacaattcttctattgaagccaatcttgtgaaagattttgataaagtgg

SEQ ID NO: 53533 - DNA, 251 bp, Setaria italica
  Peptide Sequence Number=SeqID_119507
agaatgcgaagtacctcaaccaccagcaaaaacgttttaccttgcaatgaagacagttttgtgcatttatgtgaagctttggatcacctttctcgtcagagacatattcgtaaactcgggctggacagtaacgtgattctggtccagcatacactggaagatttactttttcaggtagagtaggatccctcaagcggagatgaggaggctgatcatgctcatggtttgtattgctcctgtaccaaaggaat

SEQ ID NO: 53534 - DNA, 250 bp, Setaria italica
  misc_feature (231)..(231): n is a, c, g, or t
  Peptide Sequence Number=SeqID_119508
taataagcacaatatacaccttccaaatacattcactcaaccgcctcttgaggttcaaaagtctgtataaagaagttggaacatcgaaggttatctgtccatctggtttaggatattgaataggtgcatgcatattggctgcatctgttgcttcatggtcaggtttaccatgcttcaatgtataaggtgtctttcctttgaatatgtagcgttccagtgcagacaaacccntgcccggaataaatccgta

SEQ ID NO: 53535 - DNA, 266 bp, Setaria italica
  Peptide Sequence Number=SeqID_119509
tggttccttattattttctctgataatgaacctcggcaaccctcagcaagcagtgttattcgccctgcattttctaagtagctgacgatgagaagaacaaacagaatggaaaatgaacttatcaaatttataaaaataataaaagtggatattacccaatccaaattctaaacaagaaaaaaaggccacggactaactcaatacgcactctacattttagcatatatatgtgcggcagatgtttatccctgatctagtgatcggta

SEQ ID NO: 53536 - DNA, 292 bp, Setaria italica
  misc_feature (34)..(34): n is a, c, g, or t
  misc_feature (88)..(88): n is a, c, g, or t
  Peptide Sequence Number=SeqID_119510
gactctccctctccgattccattcatcatttcanatttttccatccgtccatccatccaagaatggacggtattgagcaaaagatgcngaaaaaaaaaaaaggcaaaaagaactgtacagttttttcacagctcagcccgcgcgtcactgccactcgtgcgtgtcgcaggggtagcacccttcctgcgcgacgtcggcgacctgcaccccggtgtcgtagacgcggccggcctcccaccgccgcggacaagacaacctaccgaactaccgacccaacaacccaacttagaca

SEQ ID NO: 53537 - DNA, 255 bp, Setaria italica
  Peptide Sequence Number=SeqID_119511
ctcgcgcacggcaccgcgggcggcgacaaaggaggagcaacagggcaaccaccaacctcttgtactcgacgtccacgacgcgatgcgcccggagccgcgcggcctcgccggcgcgggccatggccgcgtacgccgcggcgctcagcaccaggcccgtgcggttcgaggaggtccgcgcctggtccgtcaccaccaccttggtgccggcggcgctgcacagctcgctgtccctgcaccgcacctggaagcaggcgc

SEQ ID NO: 53538 - DNA, 254 bp, Setaria italica
  Peptide Sequence Number=SeqID_119512
cagaagagcgtggtgaggaaggaccccgggttgaagccgaaccacccgaaccacagcaggaaggtggagtagatgaggtacgccacgaactgcgtccgctcggcgatggagcccgacgtgatcccggccgcggcgatggcgaaggcccactggaagaggaagaagtcgtagtcgaagccggcctggggggagccgcttgaggccgaagaagtgcctgccgatgaagccgttgggagggggtcccgtacgcgaag

SEQ ID NO: 53539 - DNA, 187 bp, Setaria italica
  Peptide Sequence Number=SeqID_119513
tgcacgcaggccacccgtctgttttgttggatctcaccgtattatgctattgctacataagattgtataacaacaacgacgacgggtggcctgcgtgcattctgcacggtgcgcatatgtatatgcattactagtatagcggcactgagtcgctagaactcgccgctggacgcgttggcgatctgcg

SEQ ID NO: 53540 - DNA, 249 bp, Setaria italica
  misc_feature (241)..(241): n is a, c, g, or t
  Peptide Sequence Number=SeqID_119514
aggggctcaaggagtactccagctggccaaccttcccgcagctctacatcgatggcgaattcttcggcggatgcgacatcaccgttgactgtagggttgatgaacatgctgctccttctgaacacctacttgtctagttgaacacatgaagtcattgttaaaagtatgtgggatgcttatgtactgaagttaagttgagtggtctaaatttgcggtactgaacttgagccagaggaaaatntacacaaa

SEQ ID NO: 53541 - DNA, 521 bp, Setaria italica
  Peptide Sequence Number=SeqID_119515
tcttcgacctcgagccgcccggccgcgggaagcgcctcggcgaggacgagctcgtcacgctctgctccgaggtcatgagcgccggcacggacaccagcgccaccgcgctcgagtgggccatgatgcacctcgtcctcgaccccgccgcgcaggaacgcctctacgacgaggtcgtcggcaaggtcggcaagaccgcccggatcacagaggccgacgtcgaggctatgccctacctgcaggcggtggtgaaggagacgttccggcgtcacccgccgagccacttcgtgctgtcgcacgcggcgacgcgggacacggagctgggcgggtaccgggtgccggcggacgcgagcgtggagttctacacggcgtgggtgacggagaacccggcgacgtggccgggagaagtacgggcccagtcttcaccatgcggatgggccagcgcaccctcatcgtcgtcacctccgccgacctcatccacgaggcgctcgtcaagcagggccccatgttcgccagccgccccg

SEQ ID NO: 53542 - DNA, 227 bp, Setaria italica
  Peptide Sequence Number=SeqID_119516
gaaggcggtggacggcggcgtcgagatgatgagcgggcccggcgaggcgtacgtggactcgctcttcgacctcgagccgcccggccgcgggaagcgcctcggcgaggacgagctcgtcacgctctgctccgaggtcatgagcgccggcacggacaccagcgccaccgcgctcgagtgggccatgatgcacctcgtcgtagaggcgttcctgcgcggcggggtcgagg

SEQ ID NO: 53543 - DNA, 162 bp, Setaria italica
  Peptide Sequence Number=SeqID_119517
ctagcgttctcttttcttctcttgattttgatgatccaaaaaatgtacgtactacctactaccgatgctcgatctgctcatatatattggttgtcaacttgtacaaaaataaccattatatatgagcagatcgagcatcggtataggtagtacgtacatttt

SEQ ID NO: 53544 - DNA, 243 bp, Setaria italica
  Peptide Sequence Number=SeqID_119518
gaagcgcggctgcggcttaggagcagcagagattagctagttactactactactagtagttccctgcaattaacaagctgagctattcgaggaatcgccgcggctggccgtgcgctaaccttgtaggcgaaggatgtggaggcgaccatggccatggcggaccgctcgctcgctcgctttgcttcccggtgccgaagaattcgatctagttgctgctgttcctgcgaggacgatgaaccgtga

SEQ ID NO: 53545 - DNA, 379 bp, Setaria italica
  Peptide Sequence Number=SeqID_119519
caacgatagtgtacaccgatctgttccccatcaagtatgatcttgttgccaaccacactaaatatggcttcgacaagccgctcctgacatgctgcgggtacggagggcctccgtacaactacgatttcaacaagggctgccaatctaaggatgtgacggcctgcgacgacggctcaaagttcgtcagctgggatggcgtgcacctcacagaggccgccaatgccgttgtggccaaagcgatactgagctcccaatactccaaacccagtctcaagtttgatcagttctgcagggcctgatacttgttcatacctgatactgtacctttgaggtgccagctatatctccaggtaatttgcctaaactaaaaggtacagta

SEQ ID NO: 53546 - DNA, 376 bp, Setaria italica
  misc_feature (336)..(336): n is a, c, g, or t
  Peptide Sequence Number=SeqID_119520
tagttactaaattaagtaattagtaactaactaaagggtttacctaaaattgtctttatatatgatagacataggacagaatgatgtaaatgctcttctgtccaacttgccctatgatcaagttgttgccaaattcccaccaatacttgctgagattaaggatgctgttcagactctgtatagcaacgggagccgaaactttttggatacacgggacaggggctctcggttgcctgcctcagaagcttgccataccgaggaaaaatgatagtgatcttgatcagtatggctgtctcaagacctacaacagagctgcagttgcattcaacttagcgntgggcagcctttgcgatcaacttagtgcgcagatgaatga

SEQ ID NO: 53547 - DNA, 255 bp, Setaria italica
  misc_feature (1)..(62): n is a, c, g, or t
  misc_feature (232)..(232): n is a, c, g, or t
  Peptide Sequence Number=SeqID_119521
nnnnnnnnnnnnnnnnnnnnnnnnnnnnnnnnnnnnnnnnnnnnnnnnnnnnnnnnnnnnnnttttttggttttttcgtttttttgttttttttcttttttagtttttcttttaagtttccgttacggttggaggtcggggtggcgcacatcgggtgcgccgaggatgcggcggcgttcgtggcccctcgcggcggccgtggacctgagcatggacgcgtgcaggcttttcncgcaccggctgaggaaggagctc

SEQ ID NO: 53548 - DNA, 208 bp, Setaria italica
  Peptide Sequence Number=SeqID_119522
tcgtcttagccggggcggcacgccggggtgtagcccgaggggcagcggcgacttacaagacaaactaggacccctaggggaaactaaccgacgggttacgtacaatgtccgccgctgtccagggcgagggccggtgcagcaagccgacggtggaggtcggggtggcgcacatcgggtgcgccgaggatgcggcggcgttcgtggccct

SEQ ID NO: 53549 - DNA, 245 bp, Setaria italica
  Peptide Sequence Number=SeqID_119523
acggtggcgcgcggaaaaccctacacgggacgcaggcttagaggagcggtggtggtggtggtggtggtggagagaaggtggtagccgtgggagttccgcaaaaaatctcgaagccctcttcctgcctgccgtccccccttggccttcttccgcagtgaatgaggtctccaggttcatcccaaaggggcctgtggatcttttacccacagacccctttgggatgaacctggagacctcattacaaa

SEQ ID NO: 53550 - DNA, 236 bp, Setaria italica
  Peptide Sequence Number=SeqID_119524
actccatggatttaccctgaaagcaccactaagagacggggaggcacctgattttctgatgtgcatcggcaatgacagatctgatgaggacatgtttgaaagcatcaacggtatgacctccaacacagtcttgtcacccacagtaccagaggtctttgcctgctcagttggccagaagcctagcaaagcgaagtactacgtcgatgacaccactgaagtaatcagattgctcaaag

SEQ ID NO: 53551 - DNA, 310 bp, Setaria italica
  misc_feature (222)..(222): n is a, c, g, or t
  Peptide Sequence Number=SeqID_119525
agaagacttagtaagaagcaatggaagggagcccctgccatgagttccacactgacctcccagccacggacgtgtgggaggtctatggcagcctcgttcttgggcaattggtcccccaattgcttcctcaagtgctgtcagaggttgagcttgtagagggagatggcagcgtaggaacggtcctgcttgtcactttcccttcagcaggttagaatctgaacncttgaattcagttcagtaaagcatgatgtaatttcaggatcccaccttcaagtaattttgtattttctgattcgttttgcttaggagc

SEQ ID NO: 53552 - DNA, 400 bp, Setaria italica
  misc_feature (368)..(368): n is a, c, g, or t
  Peptide Sequence Number=SeqID_119526
ggtataagaactttgacgagctctacatgtactgctactatgttgctggaactgtgggattaatgagtgtacctgtgatgggcatcgcacctgagtctaaggcaacaactgaaagcgtgtacagtgctgccttggctcttggaattgcgaaccaactcacaaatatactacgggatgtaggagaggatgctagaagaggaagggtgtatttaccacaagatgaactggcacaggcagggctctctgatgaggacatcctcaatggtgtcgtcacaaaccgatggagaaaattcatgaagcagcagatcaagagggccaggatgttgttgtagtcgtttgcttcaatctcatccaggatttgccggtanaacagtagtgaggcccatactggccatctgct

SEQ ID NO: 53553 - DNA, 379 bp, Setaria italica
  Peptide Sequence Number=SeqID_119527
ggtataagaactttgacgagctctacatgtactagactaactaatagttgactaggaactagtagggaattaaatagaagtagtaacctgtagaatagggcaatcgcacctgagtctaaggcaacaactgaaagcgtgtacagtgctgccttggctcttggaattgcgaaccaactcaacaaaatatactacgggatgtaggagaggatgctagaagaggaagggtgtatttaccacaagatgaactggcacaggcaagggctctctgatgaggacatcctcaatggtgtcgtcacaaaccgatggagaaaattcatgaagcagcagatcaagagggccaggatgttgttgtagtcgtttgcttcaatctcatccagga

SEQ ID NO: 53554 - DNA, 408 bp, Setaria italica
  Peptide Sequence Number=SeqID_119528
gacttgaaaattacatgtgttacttagtggtttgacaaatttatgttgtacataccaatattctaacatcactaactcttatgcaatgcacgtatgtggcagcccttcagggacatgattgaagggatgcggagcgaccttagaaaggcaaggtataagaactttgacgagctctacatgtactgctactatgttgctggaactgtgggattaatgagtgtacctgtgatgggcatcgcacctgagtctaaggcaacaactgaaagcgtgtacagtgctgccttggctcttggaattgcgaaccaactcacaaatatactacgggatgtaggagaggagtaagtaaccaattcctttcaagttcttgctagaacgaggcatggacgcgtaaaatagtatatggctcta

SEQ ID NO: 53555 - DNA, 246 bp, Setaria italica
  misc_feature (242)..(242): n is a, c, g, or t
  Peptide Sequence Number=SeqID_119529
gatgattacctgcacatgtagcatatgccaacaatgcaagcaggataaccgtaccgtgaaatgcatgaaatccctcctgttccatgaaaaaaaaaatgcatgaaatcccggtaggagaggatagcagtaggagaggagaccaacgataagagataacaacaggcgacagacacatggccatcatccttgtacgagcagcgtcgcccgggctctccgacgcccgcccaccatgggagcgggancggg

SEQ ID NO: 53556 - DNA, 240 bp, Setaria italica
  Peptide Sequence Number=SeqID_119530
gtattgtccgtcttcttttcttgataccatctcaaggttccccatagacattcagcccttcagggacatgattgaagggatgcggagcgaccttagaaaggcaagtgctagaagaggaagggtgtatttaccacaagatgaactggcacaggcagggctctctgatgaggacatcctcaatggtgtcgtcacaaaccgatggagaaaattcatgaagcagcagatcaagagggccaggat

SEQ ID NO: 53557 - DNA, 254 bp, Setaria italica
  Peptide Sequence Number=SeqID_119531
ggatgcggagcgaccttagaaaggcaaggtataagaactttgacgagctctacatgtactgctactatgttgctggaactgtgggattaatgagtgtacctgtgatgggcatcgcacctgagtctaaggcaacaactgaaagcgtgtacagtgctgccttggctcttggaattgcgaaccaactcacaaatatactacgggatgtaggagaggagtaagtaaccaattcctttcaagttcttgctagaacgagg

SEQ ID NO: 53558 - DNA, 289 bp, Setaria italica
  misc_feature (64)..(64): n is a, c, g, or t
  misc_feature (190)..(190): n is a, c, g, or t
  Peptide Sequence Number=SeqID_119532
tgggcaatctcggggacaagaggatcgtccgggttgggggtcagttagcagggagcagatgganagcaagaccttagaaattgtcaaagcagggctccactgctctttaagaatgtcaaggcatatacttccattgctgttgatattaggatggaagacctttgtcttgaaagacaccttcggaggtttnaagggtaatctggcgggaaatgaattgtttctacttaagtaaaactaccttaacttagttcttatttagggttactttgtttcttaaggttacggttta

SEQ ID NO: 53559 - DNA, 427 bp, Setaria italica
  Peptide Sequence Number=SeqID_119533
cacaggcaacgaaatagaaatctccgatgaacaattaccgagtaacaccgatcccaacaccaaggttcccagcaagcataagtgcataagcaaagcatgtccgaccatctcactatggatggtagttggacatcgactacaatacgatcctacatggatcggggatacacacgaccagcgacaaatcgaaggaaataatggcccacaaacaatttcttgagacgacacggaaatcgtcgctgattgacatgcggaggtgctttgtcagcccatcgcatatttctgcgtccagctgcgggctgtcgactcgtacttcggccggtccgtcttgtacatgtgggcaatctcggggacaagaggatcgtccgggttggggtcaagttaagcaagggaagacaagaataggaagaagacaaagaacctttaa

SEQ ID NO: 53560 - DNA, 248 bp, Setaria italica
  Peptide Sequence Number=SeqID_119534
ttgctgttgatattaggatggaagacctttgtcttgaaagacaccttcggaggtttgaaggggtaatctggcgggaaatgaatgttcactaagaaaacaccaccagcatagggactgtcaggcggtcccataattgttgcttgccaatgaaacatgtcctcaccggcaggacctgcactgcatgatgtgggcgtctctctctctctcctctcgccgtccccaacctctcgtcttcgctgcctgcggaa

SEQ ID NO: 53561 - DNA, 224 bp, Setaria italica
  misc_feature (172)..(172): n is a, c, g, or t
  Peptide Sequence Number=SeqID_119535
cggtcccataattgttgcttgccaatgaaacatgtcctcaccggcaggacctgcactgcatgatgtggggggatctctctgcaggtccttcaattccttcaggatacgcttcgatgccatgacaaaaactcctgtttcatcatacattaggtaaaagaagtcaacaaaaacntagaacaaagattgcagtaaatcatatctattgtgtatttggaagcagagat

SEQ ID NO: 53562 - DNA, 237 bp, Setaria italica
  Peptide Sequence Number=SeqID_119536
tcgtccgggttggggtcgagttagcagggagcagatggagagcaagaccttagaaattgtcaaagcagggctccactgctctttaagaatgtcaaggcatattctttatattgaaaataaatctgaaatgtagaagtatagactatagaacaactgatggagggagccaatgacagaagctccacggctgaaaaaaaggtttgttacagttaccaagtccagtgtcccacccgttgg

SEQ ID NO: 53563 - DNA, 150 bp, Setaria italica
  Peptide Sequence Number=SeqID_119537
cttcaggatacgcttcgatgccatgacaaactccttccgcaggcagcgaagacgagaggttggggacggcgagaggagagagagagagacgccttcaaacctccgaaggtgtctttcaagacaaagggctccactgctctttaagaatgt

SEQ ID NO: 53564 - DNA, 138 bp, Setaria italica
  Peptide Sequence Number=SeqID_119538
ccacaaacaatttcttgagacgacacggaaatcgtcgctgattgacatgcggaggtgctttgtcagcccatcgcatatttctgcgtccagctgcgggctgtcgactcgtacttcggccggtcgtcttgtagacctgcg

SEQ ID NO: 53565 - DNA, 138 bp, Setaria italica
  Peptide Sequence Number=SeqID_119539
ccacaaacaatttcttgagacgacacggaaatcgtcgctgattgacatgcggaggtgctttgtcagcccatcgcatatttctgcgtccagctgcgggctgtcgactcgtacttcggccggtccgtccttgtagacctg

SEQ ID NO: 53566 - DNA, 334 bp, Setaria italica
  Peptide Sequence Number=SeqID_119540
actatacataggactgagcctaagcattggagaccctccaaatcgaatgatggggtactatgtatagttgctctgattggtactcacatggatttgtcaaatatttcaatccagtggttccgcatacacccaaaagaaagcaacaagaataatttcaggtgccacaagaccagtatatgctctagagccacatgatgttggacgctatttgcaagctgaaattgatgttggtggtgaaattgcagtagcaaagacagctgggccagtagaccctgatgctggattggtggattatgtggagacactcgtaaggaaacctgaaacggagttcaat

SEQ ID NO: 53567 - DNA, 318 bp, Setaria italica
  Peptide Sequence Number=SeqID_119541
gagtgtattagagtcactgagaggtcgggtgactggcaaaactaaggatgaaatcgaggagtctatatctatggtggagatccttgcagttcagctctccaaaagagaagctgagttgcttcagcaaaaagaagaggtcacgaaattagcaaaatcattaaagcaggcttctgaagatgcaaagagaattgttgaagaagaaagagctaatgcccatacagagatagaaagtgctaaggatgctgtccaaagagtttctagtctaagtctagtttcttaggttagttctttacgtttagtttaagtttattttgtttt

SEQ ID NO: 53568 - DNA, 236 bp, Setaria italica
  misc_feature (8)..(8): n is a, c, g, or t
  Peptide Sequence Number=SeqID_119542
aactgacncttttggctgctcaatgccattcaattgaagcaaaactaaggatgaaatcgaggagtctatatctatggtggagatccttgcagttcagctctccaaaagagaagctgagttgcttcagcaaaaagaagaggtcacgaaattagcaaaatcattaaagcaggcttctgaagatgcaaagagaattgttgaagaagaaagagctaatgcccatacagagatagaaagtg

SEQ ID NO: 53569 - DNA, 355 bp, Setaria italica
  Peptide Sequence Number=SeqID_119543
tttcttacttacgagtttcattaaatataagcagtgtttccataatgacagatatacacctatagtgaactgtctcactctgtgtcaaatgttgcgtataaagctaactaaagatatacatgtacagctaaatgaagctagaatcaacgtaatagcgtgttcaaaagaagagttgactgagtgaaactaacatgtttccttgattacttgcagtgttaagtgcctccgtgaaggtggtgtcaggttttctgtcaacggtcgacacttcttcttcacagtcctaatcagcaacgttggtggcgcgggtgatgtgagatcggtgaagatcaaaggaacggagttctaggtattggtt

SEQ ID NO: 53570 - DNA, 384 bp, Setaria italica
  misc_feature (51)..(51): n is a, c, g, or t
  misc_feature (140)..(140): n is a, c, g, or t
  Peptide Sequence Number=SeqID_119544
gcttcccagcatagatgagcctgcacatgcaacaggtttattaggaccacntaaatcatgaatttggagcttacagtttcaggttcattagtttgtgagtggcaggaagagtacctctgctgaacaggtggggatacccnctttctcctcaacacgctccttgatcctatcaatcgtgtcagtgggctcgatgtcaatctcgatttccttcccggtaagagtcttcaccttgatcatagttccacccctgagcctcaggaccaaatgaagggttgactccttctgaatgttgtagtcagctaacgttctcccatcttccaattgcttaccagcaaaatcagcctttgctggtctgggggaaatgccctcctttgttccttgtaa

SEQ ID NO: 53571 - DNA, 206 bp, Setaria italica
  Peptide Sequence Number=SeqID_119545
gactacaacattcagaaggagtcaacccttcatttggtcctgaggctcaggggtggaactatgatcaaggtgaagactcttaccgggaaggaaatcgagattgacatcgagcccaccttcgatgttgtaatccttggcggttttgtcatcagcaagttgcttcccagcatagatgagcctctgctgaacaggtgggataccctctt

SEQ ID NO: 53572 - DNA, 252 bp, Setaria italica
  misc_feature (13)..(13): n is a, c, g, or t
  Peptide Sequence Number=SeqID_119546
tactgtaacattntagcgtgttggatggactaggtacaacaagaaataaagactaataattctatggccgaccatagaggatactctctgtacattgcgtggtcggtggtaaaaggggccaatgttgaaaaagctaaatattgctcgggtgttttgacgctgctttggcacttgattttttgactgcctgatctgcaaacaacaacgttgaaaccgagcagttgagcagaaacaaggctgctgtaattttcc

SEQ ID NO: 53573 - DNA, 213 bp, Setaria italica
  Peptide Sequence Number=SeqID_119547
ccattatcttgacttgcccaaaagttggcatgtgtgtactgaaactttgtgtcgaaaatccctgttaccttgccaacacgatcattcacaccacaaatgacaccttagattgctcatagttccgcactgccgcttcaacctttccacggacaaaactttgttgagtgaggaaatcttgcttgtagtttgtgatctggtttaaggcatcttcag

SEQ ID NO: 53574 - DNA, 361 bp, Setaria italica
  Peptide Sequence Number=SeqID_119548
ccccttgtaccatccttaaacttcatcacgttgaaagaatatatcttttctaatgcactttgtgccttatccttgtcaacaattggaagagaccacacgctttggcgtactttgttgtcaccatcatcataattgaagtaagaaccattccataacttgctatacacagacttggccttctcatatttgtcccaaaaaagcttttcagaagcttcgtcaccaacttcccgtgccaaggctgatgcagcctgaagagcagccacccaaagaccacgcagtatgcacttataccagccattgaccacacatcattattgttttgtattcttgggttaaattttctttcttatttttttcttta

SEQ ID NO: 53575 - DNA, 379 bp, Setaria italica
  Peptide Sequence Number=SeqID_119549
gcttttttcttgaacacgcaggagagctgcgtatcattatattaagagaaaaaatcaaagcttgcagttaactagattcgcgatgtataccactgcccagccaattgatctgcttggatagatgtgctcactttgttgtcaccatcatcataattgaagtaaggaacccattccataacttgctatacacagacttggccttctcatatttgtcccaaaaaaagcttttcagaagcttcgtcaccaacttcccgtgccaaggctgatgcagcctgaagagcagccacccaaagaccaccgcagtatgcacttataccagcccattgaccacacatcatatgtttgatctgggaaattctcattttcaatcatcccatct

SEQ ID NO: 53576 - DNA, 401 bp, Setaria italica
  Peptide Sequence Number=SeqID_119550
ctttgtgtatgatactaacggaaccacaagtatgggagaagctaattgtgaatcacccaagagtagcgaagtttcgcaaaaagccatttccccacttttaccaattggaagcactatatgaaggaagtgttgctatatgaaatctaaacttcacatcaaccatgcaagtggatcctccttctgctcctacacctcctcctccttttgctcctgttgttcctcctcctgcacctcctgttgaaagaagtaactctaaacaaagcagcagtcacttgggtgcgtatccatttgcttcgagtttcgatggctaagagacttctaatgcacacaatgaatgcaatgaagctcaagattcaagacaggaaggaggtgtaagtggagaagcgtaagaaaagtcaaag

SEQ ID NO: 53577 - DNA, 260 bp, Setaria italica
  misc_feature (257)..(257): n is a, c, g, or t
  Peptide Sequence Number=SeqID_119551
taattgcggtaagtcattttgactatataaaatatgctaagaagaaattaagttattgttgttaaccaattatcttttctgttacattcaatagaatcacccaaaagtagcaaaatttcgcaaaaaaccatttcctctcttttaccaattggaagcactatatgaaggtgaagttttctcacttgcatagtttaatttattgctttcagtatcaaacaattttgtggttctaatatgaattccaattgtcctgtaanaag

SEQ ID NO: 53578 - DNA, 241 bp, Setaria italica
  Peptide Sequence Number=SeqID_119552
gctccccgccaagctcctccgcctcttcttccacgactgcttcgtcaggggctgcgacgcgtcggtgctgctcgactcggcggcggtcggcggcgcggcggagaaggacgcggcgccgaacgcgtcgctaggcgggtacgacgtgatcgacacggcgaaggcggtgctggaggcggtgtgccccggcacggtgtcgtgcgcggacatcgtggcgctggctgacccgggcgccgtgtcgctg

SEQ ID NO: 53579 - DNA, 276 bp, Setaria italica
  Peptide Sequence Number=SeqID_119553
ttttttttttgtcacatttataccagcatgctactatgcatttcacaatcacttgtttaacataccctaatatttaaccacctcaagaataataataaataaatacactacgcaacatggcgctaaccagcatgctaccctgccccatacaacgcaaggatacagtcacacatctcctcttatctactgcgtggtcacgctcttcgccagattccttggttggtccacatcgaatccacggagaactgtcagatggtacgccagcaactgtaacgg

SEQ ID NO: 53580 - DNA, 325 bp, Setaria italica
  Peptide Sequence Number=SeqID_119554
tgtttcgtccgtcttggtcccggggggtatttgcttctccatcgatctccggcacaaatcaaacccttctgttatctacagttccttctctgatttgatcaccatttctcctccttcccctcttttaattttctgattcgttttgttcatttgaaggtacaagtagatctggaggcgcgaatcaaccatcctggcacaagattgagtccgcagcaccattcccttcaggaagctccattgaatcccaggtactaaactttagcgggtggtatccaaacacctcctaagagtacaatcacgatcagaacacggagtcactactcac

SEQ ID NO: 53581 - DNA, 264 bp, Setaria italica
  Peptide Sequence Number=SeqID_119555
cgaacaacgacgtctttgcgtggaagccctcggatatgccaggcatcccgagagaagtcgccgagcattccttgaacatcagggccagctctaaaccagtgaagcaaggcttgcgccgtttcgacgaagaaaggcgcagggccattggtgaagagctccagaagctcctggcggccgggttcatcaaggaagtacaccacccggagtggttggctaatcctgttcttgtaccgaagaagaacgggaaatggaggatgtgtgtcg

SEQ ID NO: 53582 - DNA, 180 bp, Setaria italica
  Peptide Sequence Number=SeqID_119556
cgagcattccttgaacatcagggccggatctaagccggtgaagcaaggcctgcgccgtttcgacgaagaaaggcgcagggccattggtgaagagctccagaagctcctggcggccgggttcatcgcgatctggtgatagccggagtatgcgtcgaggaaactgagagtttcacacctggc

SEQ ID NO: 53583 - DNA, 228 bp, Setaria italica
  Peptide Sequence Number=SeqID_119557
cagagatgccaaccgcaagatgctgtgatctccgctcatgagcaaactgatttcacatccgtttgcctgcagtgggcgcagcagaagccccgtcaaggtcaaggccgcctatggatggagatcagaggaggccagccgccgccgccgtggtcaccgtcgcacgggcggcgcgcgcgcaggacagcccggcgcggcgcctgatcgcctggctgcagcttctcctccggg

SEQ ID NO: 53584 - DNA, 243 bp, Setaria italica
  Peptide Sequence Number=SeqID_119558
cctaagatacatttaaatgtttgagttctataaaaaactaagcataataacagcaacttcactatgcatcagaattctaacaaacagcatggaaattatacactgcgcagcttaactgttaggggcattcattgaagacaaaagcaatcatagtaactacaattacctggaatcctgctgaagtaagatagattgaatagtataagccggcaatttgagcatcataagcataagcattcaaat

SEQ ID NO: 53585 - DNA, 267 bp, Setaria italica
  Peptide Sequence Number=SeqID_119559
agaaaatcagagattaatgaaactgaaattcctctgccaaatgaactggtatgaataaacttcattacaagggaatgattacgaatttaaatgttactgagcaaaattatgaaaggaaagcttgcaccagaatattaagatccacatcataccttcagggcagaaaacctattaggcttaacttcaaaattagcaatttgcttcagtatggcatttaggagaaccctcatcttatcattgtaaccacctaaggagacctttaaacag

SEQ ID NO: 53586 - DNA, 129 bp, Setaria italica
  misc_feature (125)..(125): n is a, c, g, or t
  Peptide Sequence Number=SeqID_119560
tctactggggaggaatccaatctctccccagtagaaatgggattcctcccataagtttttgaacttctccagtttagagattgatgcgggaactctcaagtttgacagggtcgagtcagaggtcnctct

SEQ ID NO: 53587 - DNA, 287 bp, Setaria italica
  Peptide Sequence Number=SeqID_119561
cagatgacaagaagaagattgaggatgctgtccagcaggcgatccagtggctggacagcaaccttttcatcctggatggtgttcctcatgttgtaggcatagttctccagggagttcttggcctcaaccttcttcttgtgctcctcatcctcagacttgtacttctccgcatcctggaccatcttctcaatgtcctccttgctcagccttcccttgtcattggtgatggtgatcttgttcttctgtccagtcgtcttgtcttcagcagagacattcagaataccatt

SEQ ID NO: 53588 - DNA, 267 bp, Setaria italica
  Peptide Sequence Number=SeqID_119562
gtcgaccttgaaggagatatcaaacaactccaaatcatggtagaaactgtagtccgtgtggtcattttgtctgttcatcttggaatgcaaccagttccgtcgtcaatggcttgccaacgaagttgcagtacgtcagttcaacgagactgtgcttccagtaggatgtttgttgccactttgatggcaatgacgctagacaggcactgatgagagctagaaatgacatcaatgtggcaacaaacatcctactggaagcacagtctcgtt

SEQ ID NO: 53589 - DNA, 222 bp, Setaria italica
  Peptide Sequence Number=SeqID_119563
ccccatggtctgtgctacctgttatggtccatctgctggtgctgtgcctttgccgtctagtcgatacggagcacagcatgatcatatatgatatatcacgaacaaatatttacggacgaacagactagacggcaaaggcacagcaccagcagatggaccataacaggtagcacagaccctgcaagagcgggcaagagcaggagctggaataggcgagtagct

SEQ ID NO: 53590 - DNA, 214 bp, Setaria italica
  misc_feature (156)..(156): n is a, c, g, or t
  Peptide Sequence Number=SeqID_119564
gtgaccgggatatcaagaaagaatggaacaaatgaggcaaatatgaggccataaggtcctgatgcaagagtgctgatgtagtttgtatctttcaggataaccaatgacaggatctcaagaagtgatgacactgtgatagtgaacaagcaaaaaacncacttcgaggtcgctgctgcagaactcgtcgttgcggccgaggcaggagaggactccc

SEQ ID NO: 53591 - DNA, 238 bp, Setaria italica
  Peptide Sequence Number=SeqID_119565
ttgtcaaccagtactggttcctcaggaggaacgccaccggctttctgatcgtacgtacacgtgccgcggcgcaccgactgacacgtactaccagcacaccaacatctagaagcagtacagcgagcgcagagcacaggcccactagtctccagccttcactccacagctcgatcgcgagcaaagctagctcaaggcgccgagagagagagagagaaagagagagagaggcacgcccggg

SEQ ID NO: 53592 - DNA, 446 bp, Setaria italica
  Peptide Sequence Number=SeqID_119566
ggtagtctggaagcagagactttgggattgaagcaatatttcgaaggtcttctgttctagccaactttgctccagaaaagagttcataaattaaacaccccagtccccaagaatcaatggcccacggaggtgattttctaattgaggcccagtctgactttgtcagctccatcggcttgtactgcgttccaactaaccattcaaattgcaacatggggctaccagagacttcattgttagcatcaaattctgacagaacatcaaaagcatgaagcttccaatccagagtttgtgtgacaactacactcgccaagcatacattcccatgaacctgaattgatcaagtgatggcaatcaggtcatttaagaaacaaagcatttccagcctttgttagtttccaatttattgttgtttaactaccgtctaccgtttttaattttgtact

SEQ ID NO: 53593 - DNA, 190 bp, Setaria italica
  Peptide Sequence Number=SeqID_119567
cattgtcagctcaaactgttgatgattccccaaactgatctatgtgctgcaaaagacaagctcggatagctctgtcatttgcagcacaatgattccccaaactgatctatgtgctgcaaaagacaagctcggatagctctgtcattggaggcgaaaagcttgacaatagtaggcaaaaccttgatactaa

SEQ ID NO: 53594 - DNA, 402 bp, Setaria italica
  misc_feature (374)..(374): n is a, c, g, or t
  Peptide Sequence Number=SeqID_119568
ttcagaacataaaaaaatacaatctatactgcctgtcgctagtaacccacaagaattgcaaaaatattagtaggctaaagtgatccagcaaagtggatatagatcataaacaacaaactagatatgggtaccttttgatggtgttgcttagctatttgtaagaattgatcggtagcctgaaaagccttggttcgcacatcactatctgggtcaaatgtgaggacaacaacgttaggcaggatgcgagttgcaatttctgtcatctcatagtatgaactagtgacactcagtgccatgattccagctgctctggccggggggaaggtatctcgtaatgcacggactgtgaatgcattgatcaagactcttttccnggtcccatcattcatgtggcttgcaatg

SEQ ID NO: 53595 - DNA, 279 bp, Setaria italica
  Peptide Sequence Number=SeqID_119569
acaagaatggtatcctggacagaccagaaagcaagggggaaaaaacaagaggacaactttgcattcttatacaacacttgatatcataagacgtcacatcccagttgaggatgtccttcctattctttgagcaccaagttttggttgtgccggctttgtccctcgacccctacctgatgacgctaagggtctagctttggttgatggtggaggtgctgcaaatacgaaaccccaataatagtacgtacaactagtttagactagacggaccgaccttac

SEQ ID NO: 53596 - DNA, 247 bp, Setaria italica
  Peptide Sequence Number=SeqID_119570
caaatgttctctaccaaatctatgatgtcaggcttgctttttagggcatgctttggatgcgctgctaagtgctaacacaaggattattggtctcatttgctaacttgtttgcaggtagccaggaatttggggaagactttgcgtgctttccagccaaccattagagagttacaggatgtatcaagggagttcaggagcactcttgaacgagaaatcggaattgatgaggttcccccatcctcgaatt

SEQ ID NO: 53597 - DNA, 344 bp, Setaria italica
  misc_feature (291)..(291): n is a, c, g, or t
  Peptide Sequence Number=SeqID_119571
taagaaacgaaataagaaaactaccttacataatccttcagctcaaactttacttcacctagtaaacggtatgcttctgctttatcagggattacctagttcaaccaatgatactgccgcaccctcaagagcagtagggtcattaggtgacttgctcagtgtggcttcaaaaccttgtagtgcacccttaaattttgcttcttcctcttgagaaagcttttgttaacaactgcactttctttgctaggactaacactgaaaaggagtcacaacatgttcagaaaaaaaatntttataagtgttctattccattactataatcatctgttgatggccttaggaac

SEQ ID NO: 53598 - DNA, 265 bp, Setaria italica
  Peptide Sequence Number=SeqID_119572
ttaagtgcacttctccatctttggttatgtttcggtctgcggttctaaatgcaggctatcgaatctcaagcacccatgttaatccacttgggtaaagtctgatgccccttgggacgtaatttgggacatcatgcgctgctgggtaaattttgatcgttcccttacatcagaagtttctttcagtaactagcctcaagtatgaattagtggatgttatacatagatcaacttataaactttttgcaaatttcaacacaggtgaaag

SEQ ID NO: 53599 - DNA, 289 bp, Setaria italica
  Peptide Sequence Number=SeqID_119573
tcctcgactacctcgtagtctgagagggctatactacagtgttctaaagaaaaagaaaaataagaaccctaaggtaaactaatactaacaaggacaactaaaagggtataaccaagaacactaagaatgatgtatgtacatagttaccaaagttacctttggaatcatgctgccagcatgagagtggaaaagcatgtcacaggttgtagaaggtgacttggtttataacaaagaaagccctcctgaagaatctacttctgtagatattgcagaaactgatgatggccat

SEQ ID NO: 53600 - DNA, 434 bp, Setaria italica
  misc_feature (4)..(4): n is a, c, g, or t
  Peptide Sequence Number=SeqID_119574
cccngtttgtcattaaatggaaggataggactaacagcctggaagctcttgttcgcagcaaaagtcagtgttatagttggcacatcaggcatctcaagaggactaccactatagcaatacttccaagtactgtcttcaaaaggcactctccactgtgacagccttataaacgtcgggaggaagagaagtaaatgatgttccgctatcaactaaagcctcgaagccagtatcctcaagacatttatgtccaatacaagatttatcaacgttaacagcataagtttgaagtttgccatacagaggaacaaatggtgtagactgttgagtggacactccttgatctccaaagaaaattctcccagaattatcttccttaaagcacatcgagaaggaattacgaactagtccagctcttgcaaggaaactaggaactg

SEQ ID NO: 53601 - DNA, 457 bp, Setaria italica
  misc_feature (442)..(442): n is a, c, g, or t
  Peptide Sequence Number=SeqID_119575
cacttggaagattcactgtcgcaaatgccaaacatgctcagaatttcacttttcctcagccaaatgggctagatatttgaagctgaacttactaagccattatggttctgagttctactgtactctcagtatgcttgaagtgtatggaatggatgctgtagagaagatgttggagaacttgattccagttgagaacaagaaaactgaacctgaggacaaaaccaaggatccagtggagcaaatacctttgaaggagcctagcggggaaaggaatctgctgaggagcccttgatgaagacgaatttgaactggaagatgataaacaaaatggtgatgcactgaagaatggtgctaatgatcaagtttcagagacaaggacacttctaggtcttggtctaggttatttcctttggtttagttttatttttattttagttttttntttttttagtttttt

SEQ ID NO: 53602 - DNA, 154 bp, Setaria italica
  Peptide Sequence Number=SeqID_119576
accgacgacgacgcggcggccaagttcttccagcagctgggcgactgcgccagcttggagtacgaggaccatagcttcgccgccatgttcgccgatctaccggtgccgcagcctgggagtggtggaactagctcgaaggcgcagccggctccgg

SEQ ID NO: 53603 - DNA, 277 bp, Setaria italica
  Peptide Sequence Number=SeqID_119577
tcgtacttctagttcgtctacttagttaagtctaaaattactaattgtctttcgtattcgattcactggtgtggagatcaggaaattccctggacagactgaggcaactatgagtgcagaagttgagttgatatctacaatgggtgagaagaaatcatggaacagaccaccgattcagatggaattccaggttccaatgttcactgcttctggtcttcgtgttcggttccttaaggtctgggagaagagtggttacaacaccgttgagtgggttcgc

SEQ ID NO: 53604 - DNA, 239 bp, Setaria italica
  misc_feature (15)..(15): n is a, c, g, or t
  Peptide Sequence Number=SeqID_119578
gaatgaggccttggnggaaaatggtgacctgaaatcttgaagttgtatataactcaagaaggctccggtcaccattttcctccaaggcctcggacaagcctgttccaaatgcgacccttcaagtaaccggtgctgttggttggaagaaagaagaagggtacttaatagtaacaaagaaagaaataagaaaggtttaacttaaggaaacaaataaagttaagaaagaaagtaagtaaaac

SEQ ID NO: 53605 - DNA, 353 bp, Setaria italica
  Peptide Sequence Number=SeqID_119579
agacaagaagtgtaactcgaaggataccctgctccttttcatcattgatcccagctagcagagtgtactcgaaggataccctgcgtccagtttcaatgatgaaaaggagcacgccgaagaacttgcagaactgcttcatacatgtggaggtggttatcatgtgaacctaattccctataatccaattgaaggctctgaatacaagaggccatacagaaaagtggttcaagcgtttgttgatgcattagaagcacggaagataactgtcagtgttcgacaggacccgggggctaggatgctaacgcagcctgtggtcagctgagaaatgaattccagaagaatccgcttcttag

SEQ ID NO: 53606 - DNA, 169 bp, Setaria italica
  Peptide Sequence Number=SeqID_119580
gaagcttgtgagatgctagcatttttattgtgttgggagcactaatggatgactgcaagagttacttccttgaaactggacgcagggtatccttcgagtacactctgctagctaggttcacatgataaccacctccacatgtatgaagcagttctgcaagttcttcggc

SEQ ID NO: 53607 - DNA, 106 bp, Setaria italica
  Peptide Sequence Number=SeqID_119581
agcaaattatgtagacagacagctatggaattttgaaacactgttgtgcctcactaaatcatgacatccaatgtaagctctgtctacatgatttagtgaggcacaa

SEQ ID NO: 53608 - DNA, 214 bp, Setaria italica
  Peptide Sequence Number=SeqID_119582
gctccatcgaggtcatccagtgtctgatcgagctgtagtctgggggcgaagcgttcatccagggatcctggatgagcttcgccccagactacagctccatcgaggtcatccaagtgtctgatcgagcatcacaatgccgattttcaccgacgcgaatgaaaccgtatggagatgattggaatctcctctgtagatctctccggccaaaatgctt

SEQ ID NO: 53609 - DNA, 487 bp, Setaria italica
  Peptide Sequence Number=SeqID_119583
gtaggcatcaatggcagcaggagttattttcagctcaacgtactcatgttaccccgtaacgttaaacggggttacccgtaaaacggtaccgttacggtaacggtaacggtaaacgtttaaaccgtttttaccggtaatttaaacggtctttagtgccctttgaaagtacaaaactgatttctcatgctggcccttcagactatagtaatttgcaattatgcagcaagattctgggcggtatttatctgtcaaaaatactctgtgtgcaaggaaactcaaagcagtcaagctttcttttgcatatagtaaatttgagtaaatatccatagaatctacacggaaaggatcagtcctgagcagttcttcaaaaatcatctcagcttcatccaggtccctcatactgtactgcactgttgcaatttgagcctgaatgtagccactgcagcggaagatcccatcaaacgctcatatctttcagagcttcttc

SEQ ID NO: 53610 - DNA, 281 bp, Setaria italica
  Peptide Sequence Number=SeqID_119584
cataattgaagtgcattcaagcctttcattagtgcatcagtgtgctcaggtttcccgaccgaaatacgaatataccccttcaattccttcttgtcatagtggcggatcatcactcccatcttcgcaaggtcttcctgaaattttgttattaatagaaggaatcaatgatgtgcaaatccatactgttcaatcatttgtgctatttttttagaaaatgtgaacagagatattcttttgcagacgaccaatcttggtttggaaaagagacagagatgagagat

SEQ ID NO: 53611 - DNA, 259 bp, Setaria italica
  Peptide Sequence Number=SeqID_119585
tagagtgtaagacagaattaatttaggacagacgcgacaataaatccaggaatcatggaaggttagaaaagtataagtaaaaattaagaaagaactattagttacccacccttgatgacaagtgcaccatttactgaagcatcaaactcatacatagtgaatgtcggaggacaatcaataattttgtcacctggttcaagtacgcatctcataattaaatcgattagttcatccgcaccgcatccagcaagtatgtatt

SEQ ID NO: 53612 - DNA, 396 bp, Setaria italica
  Peptide Sequence Number=SeqID_119586
attctgcaacgctagtctactattgtcttgtaaactttcttgtcttgcgacagaaacattataaggctgcttggcccgccacaaatactcgataatgcttagaggaaatgctccataacccacacgaagaccagctaaacctgctcgtttgctaaatgttcggagaacaatcaaattatcatgcttcttaacccatgacatccttgtctgaaggctagaaaactcaatataagcttcatccagcactacaagtatcggaagatcaagtatctttaaaagatcctcattgttgattacacttccgtctggattgtttggggatgtcagaaatatgcattttgggttatcctgttttaccacttcaacaatacgatcgacatctagagaaaaatcagg

SEQ ID NO: 53613 - DNA, 251 bp, Setaria italica
  Peptide Sequence Number=SeqID_119587
ctctccctctcttgtaacagtaaatttttcacattcttccattgtacaacgttcaacaggagcacactgagttagataaagtcaaactatggaaagaatattagaatgactttgtaaaagtgatacctccaaataggttggattctgcaacgcagcacatgctgaaacttctgctgcgacagaaacattataaggctgcttggcccgccacaaatactcgataatgcttagaggaaatgctccataaccca

SEQ ID NO: 53614 - DNA, 242 bp, Setaria italica
  Peptide Sequence Number=SeqID_119588
atgtttccatgactggatcccatcccgagaagaagaattcttcccttgagcctagatggagaactggggctcagcagggtattatttgactagaaagtcaagctcattggcgcgccgatacagcagagctgaagcttctaccctgttgatggcaaacatgataaagaatttcaatcaagtgatgggtcaactcaacaagttagaaaataaggttctgtaataggaaaagtgattcaagcaaa

SEQ ID NO: 53615 - DNA, 190 bp, Setaria italica
  Peptide Sequence Number=SeqID_119589
gatcaactgctttgtgtttacggttaatagttggcactccagcacccaaattcccatccttcagatctgaaaaattcacacgctgatttgcatctgtagcaccagcagaatcacggtccaaatcatgcactaaaggctacatctaaaagtagagatccaaggctcaggtttttcttgagaactgccaagg

SEQ ID NO: 53616 - DNA, 251 bp, Setaria italica
  Peptide Sequence Number=SeqID_119590
cgaggtcgctaggcttggcgccctgtccgcgcgccgcgtccccgtgaggggcgcctcgccgcggccccgcgcgtcgcactcgctcaacctcgtcgccggatggctcgtgctcttcggcggcggctgcgagggaggtcaccatcttgatgacacttgggtggcttatgctggaattggagctggaaatagaccgcctactgtacttagctggcagcagttagcctctggcaccccaagtgggcgttttagtc

SEQ ID NO: 53617 - DNA, 210 bp, Setaria italica
  Peptide Sequence Number=SeqID_119591
aattgtgcatgggcgcatgcccatacctgtcgctgatctgtgaaaggaacggtgatccattgtaattttttgccatcaaggaccgatctgtctgtatatgggtttgaatctccattcctttgtcagattcatatgttccaaagaatgttcttgttctaaattaacctaaattaactaaggaaaacaaagaaataaggttaagtttaacaa

SEQ ID NO: 53618 - DNA, 386 bp, Setaria italica
  Peptide Sequence Number=SeqID_119592
ccatcatcatcatcatcatcatcatcatcacctgctgggcctcccacagcaacaggttcacctccatttggcttcccttcattatgattttccaaatttggcggtgactgctgtttctgcgctgctgctgcaatgttattgcgctgattatctctgaaccaaaacctggaggttccgacagatcatcatcttccgcttcgcctgcaacagtggttggtgttggtgttttcgctggcgaaacttgttgctctttgcctttcgtcttcagcttcttggaagaaggctcaggggccttttcagggttcagtatcctgttgtagacagcttctacggttccccttataatacaagtttacaattaggaattagaaattagtaactaatta

SEQ ID NO: 53619 - DNA, 243 bp, Setaria italica
  Peptide Sequence Number=SeqID_119593
gttcgttgagagacgatgagcgcctccttgttgctgaggtctacaataattccattatccggtacttggatgaaccttctgaagtcatctccctgattagagacggagatcgtttggttgcatatagacttccaaaagacagtgaagatgctcctattgtggttttcagaaaccagcgtatggagtaagtaaaatctttgcaatttctatgatgtgcataatgcatatcaatcaaatatagaa

SEQ ID NO: 53620 - DNA, 450 bp, Setaria italica
  Peptide Sequence Number=SeqID_119594
atgggatgaattcagccagcagattgccatcgacatgctttgagtggattgcctccatgcttagcacaaccagatctaactccagctcatcagcaacttccccaattattgcccgttggtttcctcccttccccaagacgctccatcagtccaaactccgtaaatccacctgggcgcaagcatgggtgtcatcattacagtaacaaaatagcaagagtgcaagtagcttcaatggcttgaccttctgagagatgccatctgatgcttgacatctgagtatcatgctctgggaatgactccttaggtttatcatcaataacttaaacaacagattcagaatatattagtcttaagctgtggggacgaaaagtttgcaacaccagaagaatgaaatgtttacaaaaatagaagaaccaataaccaaactaacaagtaaataggttagaaata

SEQ ID NO: 53621 - DNA, 239 bp, Setaria italica
  Peptide Sequence Number=SeqID_119595
tcccttccccaagacgctccatcagtccaaactccgtaaatccacctgggcgcaagcatgggtgtcatcattacagtaacaaaatagcaagagtgcaagtagcttcaatggcttgaccttctgagagatgccatctgatgcttgacatctgagtatcatgctctgggaatgactcctttaggttttattcatcaataacaactacagtaatgtttgctccgttactttctttagtctta

SEQ ID NO: 53622 - DNA, 283 bp, Setaria italica
  Peptide Sequence Number=SeqID_119596
aaagaaaccaaaaagaaacaaagaacgaaccgaatacgggaagaaccaattacgactaagtaggactttgctaaggtcataatgtccggtgctactccatatgcctcatgtgcccagaggtaacctgtgcgccccaaaccacattgcacctcatcaaagaccaagagagctccagcctcgtcacatgcctcccgcagcccctgcaagaactcctgggtcgcactatgaatgccaccctcaccctgcacgggctccacgaacacagcggcgagcctgccggact

SEQ ID NO: 53623 - DNA, 256 bp, Setaria italica
  Peptide Sequence Number=SeqID_119597
tttttgtttttacaaattacgatggttctgtgttctgaagaaatatgcaacagactgcaggggcaattggtggggctgcttcttctcttattcgcgttcccacggaggtggttaaacaaagaatgcaaatgagtcaattcaagactgcacctgatgctgttcgccttattgttgctaaagaaggaatcaagggtctttatgctggctatggctcctttctactgcgagatctaccatttgatgctattcaattttg

SEQ ID NO: 53624 - DNA, 422 bp, Setaria italica
  Peptide Sequence Number=SeqID_119598
aatccagaagttcagcttcaccagtattgccactgttaaccactgaatcaggctcatgaattagagaagcatccctgcaaagtgagaaactctcttgtaaatgacacagatgtatactgtagtatggttctcttattgatatgtgatgttctagctatttggctttcaaataggcataaatgaaattatgtgatatgacaaaaatgataatcaaacaaaatcctagaatactaggccatactaaaagtggaattagaagaaaaaaaggatccctacataaatcaataattaagaacgagatgcacatatactccacaaaaaatgcaaatggatgtctatgtgtattaacttgcaaataagctctgcatgtgcacagcaaaactgcatatctaaggaaagaaactacagtctatcagatgatg

SEQ ID NO: 53625 - DNA, 391 bp, Setaria italica
  Peptide Sequence Number=SeqID_119599
cttgatgacctgcgtatcttgtttggcaaggcacatgttagtgcatcttctgcatcctatcctggagatatatcctccaatgaggcaagtgatgaggatgtggatgagataccacaacctacacagaaggataaaatagtgaacttaggaaaaaggaaacgcaaggggacctccattggtgttgaagagaaggatgagaagagcccattctttcatttgtacaagaacacttgttcgaagatagaaactgctacagagaggatctccacaagtgttgaagcatcatcagcttctccaaccaacctagttcctaccgttggagagactatgaagatggtgaaagaatgtggggtgcaagaagaaactgctctaattgttactactagtccgt

SEQ ID NO: 53626 - DNA, 375 bp, Setaria italica
  Peptide Sequence Number=SeqID_119600
ctttcttgggttctatgatattccttgtgctttaatgttttatttagtgttgagttgatgatcatagcatttggtacttaacttgaagcggtgtggtcaatgcagtactaaattgggtaatatactggaaacataacaaaccttactgtgaactgcagatgggcgtcagcgtcatgctttcataggtttaggcttccgcgaaagacctgaagcatatgacttccaagctgctctacatgatcatatgaaatatctaaacaagaagaaggccgctgaagagatggttcagcactatgagaagcaatcgtcagtggattacagcctcaaagaaggggaaactttggttcttcagcttaaaagtaaagaaaccggcac

SEQ ID NO: 53627 - DNA, 234 bp, Setaria italica
  Peptide Sequence Number=SeqID_119601
atcgacatcagcgacatgtgcctggagtcctgctcggcgctgctgggtttcatctacggggcgatcgagccggagcagttctggaagcaccggctgccgctgctggcggcggcgaacaagtacggcatcggcgacatcaagggctgctgcgaggagagcctcctggaacatctccagcatcagctcccggtccgcgtggtggaagaagctatggatctcatccctcacgtcgta

SEQ ID NO: 53628 - DNA, 232 bp, Setaria italica
  Peptide Sequence Number=SeqID_119602
gttccattggctcctatgttatgctatgcagaagcccttcttccatggattgatagtaattgaactaaacgccacccaattaatactgctgacaggctactgaatcatcctcgtcaatctggccgaatgaaggcatggtgcagaggatcgctagcaagagcactctgggctgcctctcccgcctgctgacggagtcgatccacaccgatgtgaccatcaacacgaccgacgg

SEQ ID NO: 53629 - DNA, 328 bp, Setaria italica
  Peptide Sequence Number=SeqID_119603
aaagggacgacctactttacaaaactagtaccgaaagaaccccgaatagacaagacggaagcgccatgcttcttgcaaggggaaccctgccaccaacgaatggatcccgtcggctgacacggtgtatccggcgtcagacaagccgagcagaagcgacagctgagcaatgcaatatcctcggccccgcggagaattcagacaagtgatgccaccaggaaaataagaagccacactgtgttattacaggattagtgatgtctgtatctttgctattctgcatcaaaatgcctgtaatcttgaatttcaaataagctcgcgattcgcattg

SEQ ID NO: 53630 - DNA, 468 bp, Setaria italica
  Peptide Sequence Number=SeqID_119604
ttttttttagtttttacgtttaaaaggtttagttaaaacttaaggttacgttaaaaggtaactacttcgtaacgtaattaggttgttaactaagttcttctacttgtttgtaactttggtttccctctgctaacatcccacgagtttagctgcaaaacagtatgctattcatcctatgatcaaacactggtggctctgtgatgtattaacttcagtagtttagggatcgacatttggaagaccgccgaaaacatcatgcctggactggaagaaggttgagatatgaagggatgttcatgttagtcaaagtagtaatttctggtattatcttctggagaagcgaaggagatgatagtagtgactggctgtaaatacactaaaagctcccacctggaatttactgcttgtaacattgtatactgattaaacctaatcctctgaaagacttgcacaatcaaggtctctgct

SEQ ID NO: 53631 - DNA, 462 bp, Setaria italica
  Peptide Sequence Number=SeqID_119605
aacaaaaacaattaagaagtcaataatcctgcaccaagcttaaaaggcatacggaaatgcagtagcttcttcacattaagctttgtaaaacaaactaaagtaatgttgttttacatgaaagagagtaacaaaccctttgacaaggaaggttgcattgttcacaaggctcagcaagtgtgctctctttactgacagatggtagaggatctccttcaggttgattcaatgggacctctaacacatggcaagatttcgtacaataatggttgccacaaagaagaggattcccacataaattttgacagggaaacggcctccatttggaacaaggcatagcgcgttcttggccaagatgttgcccaaagcatggcactacaaccacctctttgcatggtgggcacagtgttccaggtgtacattctatgtgcttttccattttctttttgtggttttagtgtgaac

SEQ ID NO: 53632 - DNA, 417 bp, Setaria italica
  Peptide Sequence Number=SeqID_119606
cagtcatgacatcaatcataaatgataaatgtacacacggtcagttcaagagtgggcatcaatttatgaaataaagtagattgttcaagaatgttttctacatcccattattaacaggccagatgtagaactttaggatgctttgctagacacaaactggccaaaaagaacaaacaaatgctgcatagacctatctaagcttcagcgaccacataacaaaatattggtggtcgtcaagcataacagaggtgtgtatgtactatataacaagaagtaaaccatcaggaagacctaggctgattaaatgctgaatcaatgagaaaacatgtatcaaaaacccagacctgatgtgtagagtcaacaacccctccttgagccacctcttctagtagcattgatgccactgtgagttatcct

SEQ ID NO: 53633 - DNA, 381 bp, Setaria italica
  Peptide Sequence Number=SeqID_119607
caaagttcagaatatattggaccatctcagtgaagcctccagcacaagcatcgtgaagagggattgcaccttcttcatctttgcattccaagctagctccacgttccaacagtagctgcacacaagggagatgaccgtataagcatgctaggtgaagcaaagtatcaccatcttcaactggaacatcaatactgccatcatgattatcgagggcggcaaggagcgcggcgacgtcaccggtctgggcggcgttggcgagggcgcggaggtggggaggcacctcctcgtcatcggagacgacatcgctgaggccgttgcggccgccgggaactgccatctgcggcgaggactgcttgggattgggccggcgaagcgttccga

SEQ ID NO: 53634 - DNA, 256 bp, Setaria italica
  Peptide Sequence Number=SeqID_119608
tttctactagtctaaacttctaaacggtaaccttgtaattggtcattaatataatcagcattcccaaacaaggtcacacgcaacctctgctcccactgtgtccattctttagcatatgaaccttttgatggatccactcttccatgcctgctctgatgcagtctgaacaagctaatccccctcatctaacaccgctttcacagcaccaggtaatggagctctatctggccttaaggagaggcatcttaaccaggga

SEQ ID NO: 53635 - DNA, 405 bp, Setaria italica
  misc_feature (372)..(372): n is a, c, g, or t
  Peptide Sequence Number=SeqID_119609
ttgtaaactttggtcgagtgtaggttttggtattaagtttgttgttcttgtgttttttggtaaacccagcagttcggccaacaatcaaaacatgctctgttaggctttcttaataaagccgagaaattttgcccttggtcgaaaaaaaatgtttgcagaagtatggtttccagttttgttcggctgtgcttcttccggttgtgcagccagccaacaagcctgctttgctgcagctgctacaatagataaaacacaggtggcagcagctgcagccgcagcgctgtacagccaaacagagccattgttgttggtgcgtgctttgctttcctattaccttttttcgagtttcttatatttctgtcctaaaaaagngtttcttatatttcaacttatacttaagatgtt

SEQ ID NO: 53636 - DNA, 356 bp, Setaria italica
  Peptide Sequence Number=SeqID_119610
cgtcagtcgagctagctacgagaatgttatgaagaagtggctaccagagcttcagcattatgcaccgggtgtccccattgttttggctggaactaaattggcagttcggccaacaatcaaaacatgctctgttaggctttcttaataaagccgagaaattttgcccttggtacgaaaaaaaatgtttgcagaagtatggtttccagttttgttcggctgtgcttcttccggttgtgcagccagccaacaagcctgctttgctgcagctgctacaatagataaaaacacaggtggcagcagctgcagccgcagcgctgtacagccaaaacagagccattgtgttgattgtcgtgaag

SEQ ID NO: 53637 - DNA, 452 bp, Setaria italica
  Peptide Sequence Number=SeqID_119611
ctttgctgatgtcttcgtgcttgccttttcacttgtgagccgagctagctatgagaatatcatgaagaagtggataccggagcttcagcattatgcacctggggtgcccattgtgttggcaggcacaaaattggatcttcgtgaagacaagcactacttgatggaccatcctgggttggtgcctgttaccacagcgcagggagaggagcttcgtagacaaattggtgccatgtattacattgagtgcagctccaagacacagcaggtaaacacgtaaattaaagttgttgtaatggaaccatgttgctctagtattttttgttcctttgtattatgaaatcttgtaactcgcagttgcatcttgcttactttggaatatttcactaacatgtagaatgtcaaagctgtgtttgatgctgccatcaaggtagtaatccagcctcaactaaact

SEQ ID NO: 53638 - DNA, 230 bp, Setaria italica
  Peptide Sequence Number=SeqID_119612
ctagaggtagatgatcgaaactagtggtcatactcatgaaggaatatcatgagtatgaccacaagtttccgaagcttgaaatctgaatgtgcctgttgcacatcgtgtatatttgcacctttggttattaatcactagaggtagatgatcgaaactagtctgcttaagcgctgtgactccgccatgaaagaacaaaatctcattgtctctttggcctctgtcgaactgcc

SEQ ID NO: 53639 - DNA, 336 bp, Setaria italica
  Peptide Sequence Number=SeqID_119613
tttttttttttggttttttttattttattcatgagtatgaccacaagttccgaagcttgaaatctgaatgtgcctgttgcacatgtgtatatttgcacctttggttattaatcactagaggtagatgatcgaaactagtctgcttaagcgctgtgcactgctggtatggttagctctctgaattaggcagttcgacagaggccaaagagacaatgagattttttttttttcgaatggtgcaatggattctgacatggaatcatgggataagctaacagataatacattgagatcagattcacaaaagctagtgactccgccatgaaagaacaaaat

SEQ ID NO: 53640 - DNA, 400 bp, Setaria italica
  Peptide Sequence Number=SeqID_119614
gcttagccttttcaacttgtgagccgagctagctatgagaatatcatgaagaagtggataccggagcttcagcattatgcacctggggtgcccattgtgttggcaggcacaaaattggatctttgtgaagacaagcactacttgatggaccatcctgggttggtgcctgttaccacagcgcagggagaggagcttcgtagacaaattggtgccatgtattacattgagtgcagctccaagacacagcagaatgtcaaagctgtgtttgatgctgccatcaaggtagtaatccagcctccaactaaactaagagaaaagaagaaaaagaatcgcgcaaaggatgttcaatgctggacattttctgtggaagaaaatgctatgcttcaaatcctgaatgctt

SEQ ID NO: 53641 - DNA, 235 bp, Setaria italica
  Peptide Sequence Number=SeqID_119615
acggtatttaccttcgagtcttttaccaatctgatctattactaaattatccaattctggcaatatatatgatgcaatattctctgtgtatgtaggaatacagcctcatgtaacgatctatcattttgattttcctcaggctcttcaagatgagtacaacggactgcttagtcctagattcatagaggacttcacagcgtatgcagatgtgtgcttcaagaacttcggcgacaga

SEQ ID NO: 53642 - DNA, 235 bp, Setaria italica
  Peptide Sequence Number=SeqID_119616
tgcagcagtggcatacgacagtaagaatcttaggaccttgattttctcatgcatcagaatacaatggagaatgcattaacctagctagttcaatttttgcagtgccattcctcaagtcaaataaccagtttccgttcgggttgacgaacgattttatgaaatcgaccccctgggctctgaagaaaatgctgaatcatctccaagtgaaatacaagaaccctgctgtgatgactcc

SEQ ID NO: 53643 - DNA, 243 bp, Setaria italica
  Peptide Sequence Number=SeqID_119617
ccactctggatctcaagtctcatgcaaacaactatatcgtgtaactgcatgtaaaatatgtgctcatcatataggttcatgcatcctatggtgtatggagactaccctcctgtgatgaggaagaatgttggagccaggctaccgtccttcaccgatgaagagaggaaaagagtgaaaggattcttttgattttgtcggatttaaccactacgttgccgtctacgtgaaagctgatcttagccg

SEQ ID NO: 53644 - DNA, 274 bp, Setaria italica
  misc_feature (255)..(274): n is a, c, g, or t
  Peptide Sequence Number=SeqID_119618
ttttttaggtgatcaagtccatatataatcacaaacatcatgaaacttccagaatggagaacagatctcatcagtcatcgcaagcatgcatttttattcggattactattataccttgtgctcatgtatgtgtgtatgtgtgtgtgttgatcgttacaaatgaaatcatgtatgcatctctgtatgtgctcatgtgtctttgtaatggtcagtccagagtgatgaatacataaaaactggtttgcttttaaaacnnnnnnnnnnnnnnnnnnnn

SEQ ID NO: 53645 - DNA, 209 bp, Setaria italica
  Peptide Sequence Number=SeqID_119619
gggacacacaaatataagtgatcaagtccatatataatcacaagtcacaaccatcgacaaaccttccagaatggagaacagatctcatcacaagcatgcatttttattacacatgcagaggacactccaggccttctctcttaaacattaatcgtcaagcatatataataaaaagacagggacacacaaatataagtgatcaagtccat

SEQ ID NO: 53646 - DNA, 360 bp, Setaria italica
  Peptide Sequence Number=SeqID_119620
tttgtattgtcgtaaggtctagggtaggtatttaaggtctttgttcctagtctagttattgggtaaaactattctttagtatttctattattcccaaggcttaagaagttttcgcagtaagggttttccactctttgaggccttgggagagctttatgatggtcaaacaactgaagggacctacaactacacatccaatcaactaacagatcctacacaagtggagaatggggacaaggttgagaacatggaagttctgaattcagatttgcaagaacaatggcaggccgagaagatgatgacgtgatggtactagaagatgatcagatgcgacaaagaagggatgcaactgtgacaaag

SEQ ID NO: 53647 - DNA, 446 bp, Setaria italica
  Peptide Sequence Number=SeqID_119621
ccaggaatggtcggacatactctgcctgcactgatgatggctgtaaatgcccggatgggttcaagggtgatggtaagcacaaatgtgaagatattgatgaatgcaaggaaaggactgcatgccaatgcaaagaatgcaaatgcaagaacacatggggaagctatgagtgtggctgcagtggaggattgctttacatgaaggagcatgatacatgcataagcaaaaatggagcaacagaaacaggctggggcttcttgtgggtcatcttctttggccttgtagcagcaggaattgcaggatatgcagtgtacaagtacaggatccggaggtatatggactcggagatccgtgccatcatggctcagtacatgccctggaacaaccaaggaagaatagttacaagaagtacaattactacaatacaataattagaagaatagtaagaa

SEQ ID NO: 53648 - DNA, 310 bp, Setaria italica
  Peptide Sequence Number=SeqID_119622
tccggaggtagtatggactcagagatccgggccatcatggctcagtacatgcccctggacaaccaaggagatgttcagagtcattctcatcatattgagatgtgaggatgcagactttccgagaggaagcaaagctgtgatccaacttatagaaacttggagttagatgtgtgtgcataaccgtaacgatcttatgtctaagacaatagacaataagaagaagaataacctaacctaagtaaaaatttaacttaagaaaccgttaactaagtaaataaccaaacgtaagaaattaaccttaagggttaaa

SEQ ID NO: 53649 - DNA, 309 bp, Setaria italica
  Peptide Sequence Number=SeqID_119623
ttggtactaaccccttgtaggtagttagtttgggttagggttcttagttattttacttttagttagttaacttatttcttactttattttccttttctagtcgtcttaattaaccaagagctttggggataggctcaagaaggcaattgataacggtgacatggttaatgtgaatttggattggagggaggccctgccccatcctgatgaacgtgttgagtatgaattttggaccaacagcaatgatgaatgtggcccaaaatgcgatagccagattgatttttgtcaagagcttcaaaggggctgcac

SEQ ID NO: 53650 - DNA, 251 bp, Setaria italica
  Peptide Sequence Number=SeqID_119624
cgacgagatctccgaaaaccgcgccgcctacaacatcgagcacacgcccgcgccggcctgggccgcctcctgctcctccgccaccaccctcgccgccaggctgaacacattaaatggatgcccgcttgcgaggattaattggcatcaattaccagtgctgttcccctccagctcctgctgggctgctgccacgggaggttcgtggtggagaagaacagcctcaaggtgacggcgccggatgacctcaaggg

SEQ ID NO: 53651 - DNA, 426 bp, Setaria italica
  Peptide Sequence Number=SeqID_119625
tggactagaacttacccaggcaactagtatcccgattaattcaaagaaaagtggaagaaccggaagcttatcgatgatctgaaggtgaatcaaagatgagccggattaatcttatcttgtggcaaaatactttctctggtttggaactgaaagctgcatatctggacgtcattgaacttacctcaatgagatgtactgaagcccataatgcagctacggttgcaaagcctattccagctagagcaaagatgtcttcagcagtgctcaactgtttcatttaaaatataaatgatatcaaagacgggtttaattacgttccttgattcatataaaatatctcatgaagcactaatgtcactaaacaaagcataacgccaaggtactgcagcaaaaagtataacaacagagtagctggactgagcactg

SEQ ID NO: 53652 - DNA, 339 bp, Setaria italica
  Peptide Sequence Number=SeqID_119626
atcattttgaagctcaacttttaagcttcatatggctaaacaggtacgagaattgaggacaagaaactcacagaactcttgacgtatctcacaacgctcccggacgattccgaactgtcttgcgcgacgttcgccacgacgctgcggctcctgatcctacctgaaagtctgggagacggcagccgtgggagatggccggagaggctcctcctgccgcatggcgcaagaaccgctgcaggctggacgacggcgagggcacaagccatcatggctgcccacccctgagagtcgtcgcagaatgagatggtgtctgtgtggatgaaccgaagtaactgtatt

SEQ ID NO: 53653 - DNA, 240 bp, Setaria italica
  misc_feature (15)..(15): n is a, c, g, or t
  misc_feature (34)..(34): n is a, c, g, or t
  Peptide Sequence Number=SeqID_119627
cgtatctcacaacgntcccggacgattccgaacngtcttgcgcgacgttcgccacgacgctgcggctcctgatcctacctgcaccgctgcgttgcacatcacatcgtgcctgtatacagaaaccaaaacgcagagtatgttgcacggtgtaatttacctgaaagtctgggagacggcagccgtgggagatggccggagaggctcctcctgccgcatggcgcaagaaccgctgcaggctgg

SEQ ID NO: 53654 - DNA, 442 bp, Setaria italica
  Peptide Sequence Number=SeqID_119628
agcttggtgccgagtcgagctcgacaggaatcgcagatactctcgtcagtcagctgcacatgccttgatctctcctccaatcttgtcaaccgtgcatcgaggtttgtcgcacgtgataaattgtgaacaatctaaaatacgccaaggagggggaaagcatagaaattaaactggtaagacgtatctgacataagcttataaccagaaagaaagtcagttgaaataggccaaagtcaaagcagatggtttctcaaatggtcaaagcagatggtttctcaaatgggcaatataaaaaatccacctaaaaataggaaaagaattaatgttcacctgtccttgacgatgatggtgcacccgggctctcagcattcgcaaaattgtatctgatgccagctgaagaggcatatcgggagataatctcttgtacttaggtatcaacatt

SEQ ID NO: 53655 - DNA, 252 bp, Setaria italica
  Peptide Sequence Number=SeqID_119629
gttttcgtggcaaaacaaccaaccaattccagctccatggttcaagtcctaagcaatctatgcaacacagctccatggttcaagtcctaagcaatctatgcaacacagctacaggccttaaaaagcggcattctcccatgtgacgatcagcttcagccacggccacggcccctcctttgttaccacctttgccaccaattccaccccttccacggccaccactgcctctgcctccatcatcttggccacgtc

SEQ ID NO: 53656 - DNA, 232 bp, Setaria italica
  Peptide Sequence Number=SeqID_119630
atgcgcttaaggagttacgacaatggcttcattggtgcctggtgtccttgtgaagctcctgcagcatatgaacaccgatgttaaggttgccggcgagcatcggtcctcgctccttcagcatgatctcatcttgagcgacaagattcagctgggccagttcatccatgtggaccgcctggaggcagccactcctgttcccatccttagaggagtccggccagttcctggtcgc

SEQ ID NO: 53657 - DNA, 263 bp, Setaria italica
  Peptide Sequence Number=SeqID_119631
gtaaaagaatcatgttttcttcacataatgacattcctaagtttctaacttttcatacttgcactttgccctgattttcctcagttaatcatttagcaaataatagtatgactgatatgcagctgttgattttggaactgggtccaatccatggcccatattcagattacagaagaaatacaacttaccaggaaaatcagctcctttaagttcggaattttatactggatggctaacacactggggtgaaagtatagcaacaa

SEQ ID NO: 53658 - DNA, 433 bp, Setaria italica
  Peptide Sequence Number=SeqID_119632
catttggagatgacaagaattaccttcattaccttgttcaactggccagaagatatcttgggaacaacattgttctttatacaactgatgggggcgccattggtaatttaaagaacggatcaattcctcaagatgatgttttcgctgctgttgatttttggaactgggtccaatccatggcccatattcagattacagaagaaatacaacttaccaggaaaatcagctcctttaagttcggaattttatactggattgctaacacactggggtgaaagtatagcaacaacagatgccgctagtacagctaaagcccttaaaacaattttgtgccacaatggttctgctgtactttatatggctcaatggtggggaaccaaattttttaggggttttttaattaaattaggttagacaaaattaacttggtcct

SEQ ID NO: 53659 - DNA, 323 bp, Setaria italica
  Peptide Sequence Number=SeqID_119633
agttgtgagtagttgctttcttttggtttatatattgttatgttaaaaggcagtaaagcttgtatccaacgtgagttgatgttcttgcctttaaacaggaaaatttggtttacaaggaacaatttgaagctgttattagggagaacgctattctgaagaaagcagttgcaatacagcatgagcgccaaaaggagcaagatgagagaagccaggagcttcagcagctgaagcagttggttgttcagtatcaggaacaagttagaagccttgaggttaacaactatgccttgtccatgcatctcaggcaagcgcagcaaggcagc

SEQ ID NO: 53660 - DNA, 470 bp, Setaria italica
  Peptide Sequence Number=SeqID_119634
ttttttacgtaggggtaattagtattattcctaagtcttgttctaattgtttgttgattcaacttttgatttccccaagaacgcagaaacatatcttcacagggttggtagatctgggagatttggccaccttggtctggctgtgaatttgatcacatacgaggatcggtttaacttgtatcggattgagcaggaacttggaacagagataaaaccaatacctcctcagatagaccgggctatatattgccaatagtgatattagagagtgatcttgtagccactctcttgaaggaataagacagcttgtgtaaatatcagctcaccaggtttcattctgttatatcgtatggtgtattttaacccaaagttgtggggcaatcggtaactagtgacatgtagccaagctcatctaaaattcagactcggtgaagcgtttggatgatcagttgatcactgctagacattag

SEQ ID NO: 53661 - DNA, 438 bp, Setaria italica
  misc_feature (95)..(95): n is a, c, g, or t
  Peptide Sequence Number=SeqID_119635
gctttaactggtagtgacattcttgcaagagcgaagaatggaactggcaagactgctgcattttgtattcctgcactggaaaagattgatcaagntaaaaatgctattcaagttgttatattggttcccacaagggaattggctctacagacatcgcaagtttgcaaggagcttggtaagcatttgaagatccaagttatggttaccaccggtgggaccagcttgaaggatgatattgttcgtctgtaccaacctgtacatttacttgttggaacacctgggcgtattttggatcttacaaagaaaggtatttgcattttgaaggactgttcaatgcttattatggatgaggcagacaagcttctctctcctgagtttcaaccttctgtggaaacaagttgaattacgactaacctaccctagacttaagaccgaaca

SEQ ID NO: 53662 - DNA, 458 bp, Setaria italica
  Peptide Sequence Number=SeqID_119636
cgtcatttggactctgttaagtttgttgcataagttgtagtaaaaataagaaatagtaaggtgactagaatgatcctgaaagatcatgcgtctaggtgctaatcctttaagaatcaagtatgaagctgtgggtcttaaaagacaaaaatagtatctagtaactagaaaatttttagtaccctgttatgccccatttaagttgccaataaacttatttttagacttctgtttgattgtttcattattggaatttggtcctttggtcttggcctttccccaaaataatactcgtcttattttccaggcagacaagcttctctctcctgagtttcaaccttctgtggaacagttgattcgctacctccctgctagccgacagattttgatgttttcagcaacattccctgtgactgttaaggagttcaaggacaaatatctgcctaaaccttacgtgatta

SEQ ID NO: 53663 - DNA, 270 bp, Setaria italica
  Peptide Sequence Number=SeqID_119637
tttagtttaaaattttttaagttaatttacttaactattacgtagttattcggtttaacttgtatcggattgagcaggaacttggaacagagataaaaccaatacctcctcagatagaccgggctatatattgccaatagtgatattagagagtgatcttgtagccactctcttgaaggaataagacagcttgtgtaaatatcagctcaccaggtttcattctgttatatcgtatggtgtattttaacccaaagttgtggggcaatcggt

SEQ ID NO: 53664 - DNA, 203 bp, Setaria italica
  Peptide Sequence Number=SeqID_119638
caccaccaccagcagtacgcgcagaggcagcagcagcagcatcaccaccacaactacaatcaccagcagcagcaccacaatcaccaccagcaacagcagcagcagcagtggctgaggcggaaccagatcgcccgcgaggccgctggcgcggccggtaccagcgagccgaaggccctggcgccatccacggccgccgatggcgc

SEQ ID NO: 53665 - DNA, 275 bp, Setaria italica
  Peptide Sequence Number=SeqID_119639
gacgtcctttaaggcaaggatgttctcgtggtccatgtggcggagaagcttgatctccctcagcgtccgcttggcgtcgatgtggttgtcgaacgcattgccaaccttcttgatcgcaacctcctcccctgactccgagttaacagccgcgctaaaaacacagaaggcgaaaagggggaatacataagcacatctacggcaaaacattcaggcgcccccacttcatttcaccataaagttcattcctaaagcgttgaggggaaaggggaagtaca

SEQ ID NO: 53666 - DNA, 405 bp, Setaria italica
  misc_feature (338)..(338): n is a, c, g, or t
  Peptide Sequence Number=SeqID_119640
tttaatttcttaacggttaaaaacttaatttagttccttaaatttgttatttgttccttaaattattgtttggtttttgttttaggtagtaaacctactagtacttgcgccgcagaacacatggcagacacaatgagaccttcaacaccaaaattcgagaagaaagcttgcaagttacgtgtcagcctaaacgggacaagctcattgaactcgatcattccatttggatcataagctggatggaagtcagtctggaaaattttcccagtattttttgcaaacaaaattttgttgggagccctgccaccaatctgcagcatatatgacatgaagcaggngagagccacttggattgcaaactgcttcttgaaggttccagaggtagtggccaggttggtagaattc

SEQ ID NO: 53667 - DNA, 282 bp, Setaria italica
  Peptide Sequence Number=SeqID_119641
caacagccggcgtgtgttacagtcgattctgatttatagtagcaggggggctacgatcaccagaagggcagggggctgggctgacttcagaaccacgggtgccatgtcgggtccatcatgcacaagttcctcgaggataatgctgcttctaccagatctgtgacgcctctttggaccgactgaggtggctcagttgcgttctcctcctcttcagcaagataatgtggtgatattgacttgatacgaccgatgacataatccacattgtttgtaaccttctgt

SEQ ID NO: 53668 - DNA, 400 bp, Setaria italica
  Peptide Sequence Number=SeqID_119642
attacccaaaaagcttgccatctcacaagaccgaccgtggagttggtgtgcaatttgcctgtttgatcgaaactcttctcaaaaagaggtctaaatgcctaccagaattaggggatgctacatcaaactcatgagcggcactaagcatgccaggcaccgttcccgtttccagaggcactgaaagatagcaagtaacagttctagattttatatcactgatcacctaagttcatgttggcaataagctaggtcaatacagcagtcaacacagggcttgatgacaccctgctttatctacatgacacgagttcctagtctctaccagagttgccggaaaaggcgatatgtacagcatctacgaacaaactaccagatatgctactataaatcagaatcgact

SEQ ID NO: 53669 - DNA, 251 bp, Setaria italica
  Peptide Sequence Number=SeqID_119643
tgctcctaagagcttccattatgtctttcgcggcatcaaatgcacttgctgcagaagttacccaaccaagtccactggcgaggttccacaatctctcaggaaggaactctctggtgtatgtagagcttgcttctcacaagatgctgttaacaagcacgttgattttgtcaaggagtacaagcaagattttgagcgtgaccttgacccagagagcgctactacttttcctgcaacccttgctgaacttactg

SEQ ID NO: 53670 - DNA, 371 bp, Setaria italica
  Peptide Sequence Number=SeqID_119644
aaactaaagaaactaaaatttaaagtaaagaaaccaaaagaacttaacaagacaagtaagaatactagtctggttcttgtccttggacgttaccaccgtcatgagatgctgtagcaccaactgattgggaggcttgatgaacctggttgtcagaagtcacattaccacctgcatgattagatcctcttgcactcccatccggtaggttattggcagcattgtttgccaacatagcttgctgcatacgctgctgagccaacatgtttcttcccatttcagttttagtggcgacatcacggcgctccatcaagtatgtacgaagccaataatacaatgcctgcggataaacttgagctatctttagcaaacca

SEQ ID NO: 53671 - DNA, 263 bp, Setaria italica
  Peptide Sequence Number=SeqID_119645
ccttcctccagttttaatactgcagggaaccggtcctctacattactctgaagaatattcttccagtgtttcaatctctcagtaagttcagcaagggttgcaggaaaagtagtagcgctctctgggtcaaggtcacgctcaaaatcttgcttgtactccttgacaaaatcaacgtgcttgttccgtttaggctgacacgtaacttgcaagctttcttctcgaattttggtgttgaaggtctcattgtgtctgccatgtgttct

SEQ ID NO: 53672 - DNA, 154 bp, Setaria italica
  Peptide Sequence Number=SeqID_119646
atgcccaatcaggaaccttccataagcagtctaaaagaatttcatgattctccacacctttcccattattttctagactgcagtttataatacagtcacaggactgggaagcagtgagtgatgttttctggttgaagcaaaggccttgatctca

SEQ ID NO: 53673 - DNA, 230 bp, Setaria italica
  Peptide Sequence Number=SeqID_119647
ttccataatccacacctcatgtcttcttcattaagaagtctgtataactcagccaatgactcagagcacttagcctcattcataagcaccatatgactctcaagtaatgcaattgcaatataccatgcattgcaagtttttccaatatatttgataagctcactaaggacaatagaacgtaaggttaagaaagggtaaggaactaacaaaaatagaaagaaccttacaaa

SEQ ID NO: 53674 - DNA, 289 bp, Setaria italica
  misc_feature (224)..(224): n is a, c, g, or t
  misc_feature (276)..(276): n is a, c, g, or t
  Peptide Sequence Number=SeqID_119648
cactgtacaatccacggattccttcttcttttgcaatccgctgcaaagcagatgagacctggagtagtgccttaccaaagcatcttatctgctttgcagcggattgcaaaagaagaaggaatccgtggattgtacagtggtctcctgccttctctagttgggttgctcatgtagccatccagctcccagtctatgaaaaggtgaaactatactttgctaaaagngacaatactacagttgataaactcagccctacacaagtaagctatgtgtcancaggatccaaagt

SEQ ID NO: 53675 - DNA, 378 bp, Setaria italica
  Peptide Sequence Number=SeqID_119649
tagggtagtcaagatcaagttgtttccataacaagtcctctacccaattctggatgctgagaaattggcagtcagtgcagttgggttaacaaagtacattttacacattgcacgcagatatgtcaagttgtcaactaaaggccatgtagttctaacaggtaaaatgcatcacagtgaaccatagtagtacataattgatttattcatttaagtttaaagtggcagaacttctgaattgaaaacgagaatagcattttcctaagaactaagcaaagcaagatatatgctatgtacctgttctcttgagttcctactaaacacaacaatggtagcattgatatcactagcataaccaacatatgcctccaagcagttctc

SEQ ID NO: 53676 - DNA, 376 bp, Setaria italica
  misc_feature (317)..(376): n is a, c, g, or t
  Peptide Sequence Number=SeqID_119650
acgggaaacaaatagtagacaaagaaggtagaatggtggagacgacgctggacaaagagcggttgaaggaggcaattttgacgtgcacaaatagggttagctgattagctaggatctcggtgctgcgcattggacgggaccaattttctttgttctcccaagatagtttgagaatcatgttgttttgctttttgctttctcttcctattttcttttcttttcttttcttttctttttttggaggaattgcataggtctgtctgtacagaaatactgaggctgttcggaaatgcgtttcgttcttttatgctaaagtnnnnnnnnnnnnnnnnnnnnnnnnnnnnnnnnnnnnnnnnnnnnnnnnnnnnnnnnnnnn

SEQ ID NO: 53677 - DNA, 127 bp, Setaria italica
  Peptide Sequence Number=SeqID_119651
cttttcttgggatattttgtgagctgcattgaagaggctgctacatctgatgattcaagtagcacagttacaggttctggagttgacgcctctttcagcaggttgaagatccaaattaatttcttat

SEQ ID NO: 53678 - DNA, 368 bp, Setaria italica
  misc_feature (216)..(216): n is a, c, g, or t
  misc_feature (225)..(225): n is a, c, g, or t
  Peptide Sequence Number=SeqID_119652
cattgcagcaggcccttcaagaccactccaaggtggctttcctgtaaacatctcaattatcgtgcaaccaaggctccaaatatcaacagcgagatcataccctgcacttttatcaagcgtggcccgaacaacatgagaataatcagcctcatcgcaaccacgactccacgagagagaagaaaatgatgaaattaacacgaagaataaccagcttgnacccccctnaggagccatccagtacggggttcccttcaatgaaagattaggagctgcagtactcaaatgcttagccattccgaaatcagccaatttcactacaccattaatatccactaacaaatttgcccccttgatatccctatgcatta

SEQ ID NO: 53679 - DNA, 265 bp, Setaria italica
  Peptide Sequence Number=SeqID_119653
aaacactaaattcccataagttaaaggctgcgatataatatacctgtcattttcttatccatgtctttgttccctaaaccctccaagcggccatctttcttcctcccagttgcagtattgtgcatgataacagttggcggccacacaataaggtcctccctacttgctcggacaaggtcagcaggtaatgattggtatcccttagagttctcagggacttttgtataatcccatcccataaggacacacaatgccttgtgcaaaa

SEQ ID NO: 53680 - DNA, 461 bp, Setaria italica
  misc_feature (12)..(12): n is a, c, g, or t
  Peptide Sequence Number=SeqID_119654
aaactaaacctnaacggtggtcagatgcctttttcaaggggtcacgacttggtcagtacacgtgcaatgtttctgagaccattgctgagtggatccccagcagatatgagctctcagtagtgcagttggttgacacaatcagatgcaacctaatggagatgatgtatgcacgaagggaatcttccaatgcctgtacagaacttctaacaccatcagccaatcagaaacttcaggaacagatgaacaaagctctcacaactcaaatagttgtctgctcgactggaagtgatggaaacagtcatgtagtttgaggtgacccatcgcatggcacaatattacatttgagcccaattctaacccggaggcaagttggccgaccaaaggaaagacctgctgatccacgcattgcaatcaaaaaggcggtgcgctgcagcaggtgcaagggctatgggcacaacaaa

SEQ ID NO: 53681 - DNA, 421 bp, Setaria italica
  Peptide Sequence Number=SeqID_119655
tagaagaaaggactagaacaaacaaggttagaaagaagactacgaataatacaagaactactaggcactcctgcagattctgctatcatagctactactccagatggatccaagcggcaaaagatttgtgcaagttgggagaatgcgataacaggagttggtcaagtgtttgaaggtccaaaggaattccgtgatgcattacacaagtatgccattgcacataggttccattacagatttgttaagaatgactcttcgcgtgtaaccgcataatgtactgacgaaggatgtacgtggcgtatacatgcatcaaaaatctcatgcaaaggagttcgcgatcaagaaagtctttgggactcatacttgtgaatcagagaccatcaaaagtcatcgtttggcgtctcaaaaaatgggttgctag

SEQ ID NO: 53682 - DNA, 352 bp, Setaria italica
  Peptide Sequence Number=SeqID_119656
tactttccttgtctattgttgttaagtttaattgttaagtctaattagtagtatttgtcctagtagtattaattagtatttgtatttattaggagattacaggagtacatgtatatataggcaatgagccccccggatgacttgtggaaacaggatcaccggggggagatattgcctaatcctaaccaaccaagagataagcacggcctagggttggctgtgcccaggcgcaaggcctgatccccctagagagcacacacgatgcacatatacatgctaacagttaatattggtgcacattgaagactgacaaaattgctattgtttagacacaaatcttattgaacttaag

SEQ ID NO: 53683 - DNA, 252 bp, Setaria italica
  Peptide Sequence Number=SeqID_119657
gttaaccaaataaattagtaaatcaaataaaaccaaagaaacttcctgcatgtgtaagttaatgtaagcaatagagattgccagagataatagattgattataggagatacaggagtacatgtatatataggcaatgagccccccggatgacttgtggaaacaggatcaccggggggagatattgcctaatcctaaccaaccaagagataagcacggcctagggttggctgtgcccaggcgcaaggcctgat

SEQ ID NO: 53684 - DNA, 181 bp, Setaria italica
  Peptide Sequence Number=SeqID_119658
cgccgtgtctactcttcatggagtccattgcagcgttctgtatatgaatggattgaatcctttgcaaatttagtacagttatgtcgtgaagtgagcaagggatgaataagagtgtttattccatcagacggcataccaattaacactacacagatttctcaagtaacagcagcaaagttga

SEQ ID NO: 53685 - DNA, 461 bp, Setaria italica
  Peptide Sequence Number=SeqID_119659
actatatcagagacaggagagcttaatcctctcgtcatgttcttcatatttcacttctctttacatgaaaaagtggaaagaattcttccccgacaaggaattaatgcagacaccacggtttgaggccgaagctctgtgttacccaaaactaaagattgtctgtgaatacttgtcatggaggcaagcagagtgtaagttgtcccttaaaaaaggacatctgaacttggtttaaaacatatttgtaatatgcctgtattcatttgaattagcatgtctgaattaggtttgggtgcttgtatagctgcatgctgtgatatatactgtctcttttccttaattttattttaaggtatcctactgcaagggcttggcaacttcatcatttaaaataaatcacaacgacaaagacataaattggcatttatatctgctaatttttcaggtcatgctggcaaccaata

SEQ ID NO: 53686 - DNA, 230 bp, Setaria italica
  Peptide Sequence Number=SeqID_119660
caattcacatattacagtgtgattcactgaaataaaaattcgcagtgacaaatgagagcatcgtagcaatggaggaaggaacgaaggtattagctatgctttaacagtttgtatgaacatgagcagcatatttttcggtcacgcagagacgccaacgccaccaaatgtactttacgggaagccatctccggtgaggtgtccggcgtccccgaacttctccaggatccagc

SEQ ID NO: 53687 - DNA, 360 bp, Setaria italica
  Peptide Sequence Number=SeqID_119661
tttataagctcattgaagtaactctctcccacctcatataagttgtcattgtgttttcatgttggacaaaaaccttcggcgatccacctccatatcaatcgatccctcccaatgtcatgatcttctgaaaatatgcttagatataataaacatgccttcagatgaaaaggaagatcataatagctgtaggataatatctctcgcatgttcttcacgttatcaccaagtccatgaccaatagagttgagcacagtgtaccattgatctttgcttttatctgctggtgactaagaccaaaaagaactaagactaataggaaaattaataggaccaaataggtaaccccgaccaacaatttta

SEQ ID NO: 53688 - DNA, 242 bp, Setaria italica
  Peptide Sequence Number=SeqID_119662
cgcatgccggcaagcgccagcgcaccgccgccggggccgggaggcagccgctctccgcggccgcacagccgccgccggaggaggagcccatggtcttcgcgggcagggaggatgttgaggcccttctcaacgagaagatgaagggcaagaataagatggactacaagggtaagagtgagcaaatgatggaatacatcaagaagctgcgggcctgtatcaaaatggttgcttgagagagaaga

SEQ ID NO: 53689 - DNA, 255 bp, Setaria italica
  Peptide Sequence Number=SeqID_119663
ttcccaaaaactagtcagatattgcatgttgagcaagaggttgtgggtgatgacaccacggctttgcagtgtgttctgaatgctgatgttgaacgagttcaacttctgcaggaagaggcccgcctggttcaacaacaggttgactagtgaagaatttacttttcttgatatctactgcttcttgcctgattgttttttcctccttcgaactttccctctttgtctggtgttccattcagctaactgttaccattg

SEQ ID NO: 53690 - DNA, 223 bp, Setaria italica
  Peptide Sequence Number=SeqID_119664
agttttgaatacggttgtcaccgacattcttcatctacatggtagaaagctacatgcttacaaaggtgactatgacacgtttgagaggacaagggaatagcaccttaagaatcagcagaaagcctttgaaacaaatgagaaggccagatcccacatgcaggcattcactgacaacagcgtcaacatgttccattcgctccaatgccttgattcttgattgaac

SEQ ID NO: 53691 - DNA, 304 bp, Setaria italica
  Peptide Sequence Number=SeqID_119665
tagtaggtaactacaagaccaagttaataggggaactagaataccaaaatagactacccaaatacctccagtttggcccgcgacttctgaagcatcagggcaacaatggggagctggttatgcacctcaggctgcataccctgcatatggaacttatgactacagccatcaaatgcctcagcctgctgctcaagctgcttatggtgcttaccctcaagcatacccctgctcagggctacacacaacaaagctacgcacaacctgcagcaatggaccaagaccaagcaccagtgcccgcagcggc

SEQ ID NO: 53692 - DNA, 363 bp, Setaria italica
  Peptide Sequence Number=SeqID_119666
gactttcgatattcctcttcatctttgcccttattctgtctaatagactaatactacctctttattttgcaggctgtcattcatctagagtctatctttccatgtgtaaagcgtattgaatttttagattcacttgtggagaggtttattacacatgaatcatctcaaggagaggggtcaagtctaggcgacaaagaagaaatatcttccatatttttggagtttttggatctctttggggatgcaaagtcaatcaagaaggctttaactcggcacacggctctcttttcatgtaagagaagcattctaccatcaaagaaacggaaagcagatgatgctattatgtcaagacaagggtaacta

SEQ ID NO: 53693 - DNA, 205 bp, Setaria italica
  Peptide Sequence Number=SeqID_119667
tatctatcaagcaaggatggtccctcctttcttatggaggggcctccgtaatcagctaatggagtaatctgttatcaaattgtacgaaagatgtgttattgcatgtgctagttattcagaattctggatccgctatgtgcaatgtatggaggataaaggtagtctagaactagcaaacaatgccctggctcgtgccactcatgtg

SEQ ID NO: 53694 - DNA, 107 bp, Setaria italica
  Peptide Sequence Number=SeqID_119668
cgagttaaagccttcttgattgactttgcatccccaaagagatccaaaaggctttaactcggcacacggctctcttttcatgtaagagaagcattctaccatcaaag

SEQ ID NO: 53695 - DNA, 284 bp, Setaria italica
  Peptide Sequence Number=SeqID_119669
agatgcagcggttatcaatttcttccgcaaggggctggtctgttggcctgttgcaccgttttgaggcttctaggccaacagattacttcataagttgcttacttgacatccaccaagctttaaccgttgctgattgtactggctgtcaggagcactttgcaaaatcttttggaacatatttgatggtgatgaagatcgagtcacatggcagtgacagaagactaataggttgtcccagcagtctcgcccctgaacctaacactaccttataacatcatcgtcca

SEQ ID NO: 53696 - DNA, 257 bp, Setaria italica
  Peptide Sequence Number=SeqID_119670
aactaattaaacggcggtgacctgctccgctgactgctgggtgcgtaacagaggctgataatccatcacggggcgacgacgctggtggttcccggcgtgatcccggtgggatgcgcgccgccggtgctcgtcacgttcgccgacccagacccggtggcctacgacgcccggacaggctgcctcaaagcgatcaacggcatcgccgcccgccacaacgcgctgctccaggaggccctgcgagagctccgggacaagca

SEQ ID NO: 53697 - DNA, 293 bp, Setaria italica
  Peptide Sequence Number=SeqID_119671
ttaattggcctgggggttagggcgagactgcgagagtgaggggcggagcggcgtggcggcggttcagttaccttcttcctccggatgaaccccaggcgcaggcgataactgacgaagggcttggcctcgtttcctccgcgcgctcctccgtcgattgccttctctctttctccctcgatcgaccggtatttatggcggaatcgctgccgcgtctgcgaggggaagggcgattggaagaggattgctatggaagtaataaggaaataaaggaaacaaaaaaggaaaaaattaaa

SEQ ID NO: 53698 - DNA, 318 bp, Setaria italica
  Peptide Sequence Number=SeqID_119672
agctttctcgttggcagccacccttagtctagcagctgcattgatctcattcatggctctcttcacatgctcatcaggctcaatatcaacaatcagggtctgcacgatctcatatccatacatggacattgccttttcaagttcatcttccacagctttagcgatttcattcttctgctcaaatgtatcatccaagttcatcttaggaacactagccctgatgacaatacaaaagaacaataaataagaaactaaggaaataactaaagaaactaaaccctaaaggtaaagttaaaagtaaaaagaaacctaaagaaa

SEQ ID NO: 53699 - DNA, 255 bp, Setaria italica
  misc_feature (244)..(244): n is a, c, g, or t
  Peptide Sequence Number=SeqID_119673
cattgacgaagacattatcctgcacattattcacaacatggcattcagcataagaaaggtaaaagcagaaaaaaaccaactattagcatgcaagaaagtaaattcaacataacgtatttttttgccaatgcatggtaattgatttagcaaatataaattataaaggaaaaagcataaaagattttagaaaacctttgtctttgtttcgcagcggacatcaagctgctgaacacgcagtgaaagntacccagcaat

SEQ ID NO: 53700 - DNA, 228 bp, Setaria italica
  Peptide Sequence Number=SeqID_119674
cactgcttaatctgtgagaaaatgaacatgacattccctcattaaccacaacagagcatcagggtagcacaaaaaagcttgatgaaggcgtttcctcagcctcgccagcttagatagttccaaatagtacgatgacatgacgaatttttacagcaacaggcacttatcctttactggcacaatccatgcaatcctatattccctctagataataaacacacgtagcag

SEQ ID NO: 53701 - DNA, 401 bp, Setaria italica
  misc_feature (215)..(215): n is a, c, g, or t
  Peptide Sequence Number=SeqID_119675
tttatgcaatgacgaatcgatgtttcgtgtcgcctctgaccatgggatcctaatatggctaaatctacgagcaagtggtaatactgaattatcttcatttccatacaattgttgcacgaaaagacatgctggatcattcctccagctcgatcattctccggacgtcatcaattaccagccaagatttgtgcccgccgatcacctcggcctgttcngggatcactccacagctgtatagaaggcatcttctgctcgagccgcggtacagatcacacaagttggacaaaagaaggcattagcatgtgtactaatttaacagatatactaggcatccaatttgtcagttgtgtatatatgtaatgctgcagacaaggtaacactgtggccaaatgcatcatggg

SEQ ID NO: 53702 - DNA, 409 bp, Setaria italica
  Peptide Sequence Number=SeqID_119676
gattatagaagcttcaatacccatttgttttgtcaatgagaaggaagagtctgacatccccaactggggcaaaaacacgtacgtacaacctactacgccaccagcagaacgcaacattctccaggttcttacacgcgccaaccgcccgttcgccgccatggttccttggctcacgcacacgaaacgcggtaaaaccccaaacccaccggcaccacgagcccgacggccgcgcggatcatcatcagccgatcgatcaccacgagcccgacggcctcaacacaaaaccaataaacttagctaggtaaccaaggaaggtagcagcaagaggaggcaatggagggaaagaggactaccgctttgatggtgatcatgtgcctggtcatcttgagcctcaatgctaactcggcca

SEQ ID NO: 53703 - DNA, 174 bp, Setaria italica
  Peptide Sequence Number=SeqID_119677
cacaaagcacccccgggccagtgatgacttgatgtacatcatattgcctgcaaaaagtaactaaaccactattcccacatcagatcttcatgctaatgctggtgctgcagactcatcacttgatccattattgtcagtatcatcctcagggaaaaccacaatcgatctacacga

SEQ ID NO: 53704 - DNA, 313 bp, Setaria italica
  Peptide Sequence Number=SeqID_119678
ggccttgctcaggatgccatgaccgggagtatcccttgggcaaggatatgaaccgaaactttggatcatccataaccttgtcgcagatcaggatgcccttaaggagatccacccagcatatagaattgtctcccagcgcgaacacgacatcagcacagaaaatgtaagcagggtcagacgggaggggaaacgggagcacaacctccttgttgatccactggcctgcgacggcgccggaggaacaccacgtgaacagagtagccttgttgtttgtacgtaggttgtcggttggttagttaggttagtcttcggt

SEQ ID NO: 53705 - DNA, 469 bp, Setaria italica
  Peptide Sequence Number=SeqID_119679
ctcccaaatgttcggaaattgtttcttcacgcttattatacgatcacttcgattcattttagatatctggtcagcatttgtgaaagggtgcaactttcatgtttcagccatttttatcagaaaaatataggcaagggtaccattttgttgcattttatacctcttgagtttgattttggtatgagaagttaaagttagcttacactaaataaatgcactgatagttaaggagacctgcatgacacggctaattgtctggcagatgccgtttccactcaagcaggttctgcaacgcaagcaagttgccatgtggaaacagtggcagcacatttgggcgatagtgtgctgcagactacaaccgagtcgataatgaactcaaataaaacaagaaagagagattttcaggctggaaataaggtgctaaaagtttctgctgcggatggtgctgcctgctcttgtcttgcccgcc

SEQ ID NO: 53706 - DNA, 469 bp, Setaria italica
  Peptide Sequence Number=SeqID_119680
gcaaaattcttgtaaaattcagcctagacaggtaaacttttaagagtacatgagttccacatcatcatgtatgtaacagggtatgagttccgaaggtaaatttttttgagtactgtcgtttcactgtgtaagcagccatggcaatcatgctcacagacttattattaccctgtataattttttgggggggaggagaagatgaccacgggaggcaacatttgagtttttcacaagacatgtttatttttgctgtaactgctgcagagattgctctatgaagccttcatatcgtcaagaccaacactcgccagaaagtcatgatttctttgagaaatggtgaaaaggttgtgcgaaatttctcaatatctgcattgatgtcacccgttccgctgatgacctccataaatttaatctctgttaaggaagacaaagacttacaataggaccaaccgtaaaaactaagaaacta

SEQ ID NO: 53707 - DNA, 172 bp, Setaria italica
  Peptide Sequence Number=SeqID_119681
aaattttttgagtactgtcgtttcactgtgtaagcagccatggcaatcatgctcacagacttattattaccctgtataattttttgggggggagggggaagtaggcttgcctgttgcgcacgccatgttttccttgtgacttattgtacttttgggctatttatctatccct

SEQ ID NO: 53708 - DNA, 168 bp, Setaria italica
  misc_feature (129)..(129): n is a, c, g, or t
  Peptide Sequence Number=SeqID_119682
gacattggtggcaatatcacaagactagaaacaagtattcttcctgaaccatggtgtacaagtgctcatactttgatgggtctgaagaatactgttttctagtcttgtgatattgccaccaatgtcacnctttacaattgccatagcagctccaaatttatccaggac

SEQ ID NO: 53709 - DNA, 250 bp, Setaria italica
  Peptide Sequence Number=SeqID_119683
gcaactcacatggtgatagttacaatggcaccaggggagaagtctccataagcaataatggtgaatatagtcatccagaagcaaatccacaaactagcctggataattcggaaggttcgccatcaccatcagggagaacacaacctgctgtttccccacgtggccaaagcatagggcaaacagcaggttgtgttctccctgatggtgatggcgaaccttccgaacattttgatcaagttgttggtgattg

SEQ ID NO: 53710 - DNA, 416 bp, Setaria italica
  Peptide Sequence Number=SeqID_119684
attgtcaaggttttgaaaggaatgtgcatcatggatgctcagatattcaaaaggcacctgaaagagttctatccattgattactaaacttatctgttgcgatcagatggatgttcgtggagcgcttggcgatctcttcagcaaacaacttactccacttatgccctgaagcacagctctagttcttctattgcatatatctcttgttgttcatcattggcatttttgtgcaagcatggagcactggtagggagcttgacatccttaaggcacatgtctggcgcaacagcctactccctaggcatgagcttggttaagtagggaaaaccgacaaagtaccgaaaagaccaacaacttttttaggaatagaataggaaagggggaaagtaaggacttagacctagttagacgacaaca

SEQ ID NO: 53711 - DNA, 160 bp, Setaria italica
  Peptide Sequence Number=SeqID_119685
gtgaaggcacctgatgatgagggtggagcaatatcatcagaccggccttttggtcagaagtcttacatccaaatcaaaaggccggtctgatgatattgctccaccctcacctgtgaaggcacctgatgatgaggctgacaaggctgaagaggaagagagc

SEQ ID NO: 53712 - DNA, 215 bp, Setaria italica
  Peptide Sequence Number=SeqID_119686
tggtgcatcctcgttcgaagatttgaaggagagttatacgaagaagcaaattctaagagtgagaacaagatatccattattgctatctgctatgtgactgagcactactggtttccaatgctcgctggcttgtctgatttgactttggactctagaccagaagtcagacattgcgcacttgaagtgttgtttgatttgctgaatgagagaggaca

SEQ ID NO: 53713 - DNA, 334 bp, Setaria italica
  Peptide Sequence Number=SeqID_119687
cacataatccgatggtgtggcctaagatgtcaaaatcagattttgttcgtatgaacactgtgagtgatgcagaggaatgtgctccgaaggaaggctcttggaagaaatttatgattccattgtcaaggaagagataaaaatgaaagatgatttgcatgatgcatcaaaaactattaagagacctgaaaagtgcctgagtctgtttgaatagaatacttttacaactactactagacctttagttaatacaacttagactagaacttacaagtacttaggaaagggactaagaattagaaggaataattagaacaaagaacggacctactttaca

SEQ ID NO: 53714 - DNA, 370 bp, Setaria italica
  Peptide Sequence Number=SeqID_119688
aatgctggttgtactaatgtttttcattagtatgactcgatgcgccatgcctttgttagttgaattgccttgtcctgatgacatttgcttactattttagtacttagaagttagaagcactttattcttaaggaccaataagattataatttagcttttatactttttagaaatatgttaacttggttttttcttcaaattaaatagatactatatttgtgagggcgtatgaggatagaatggacctgcttagagctgtcattatgggaccagctggcactccttaccatgatgggctcttcttctttgacatttacttccctccacaatatccaaatgtaccgccaatggtgaattaccgtgctggtgg

SEQ ID NO: 53715 - DNA, 455 bp, Setaria italica
  Peptide Sequence Number=SeqID_119689
atgtgtgttgcctgcatatcacacaactaggttcctctgttcttcatgccagatctcttttgtttccagtttatctgcactgtattatactgttttgacatgtcgctcatttttttagagcatttgatatggtaaataaatagcttctgagcagcctgcatgttacaattatactgtactgaaagaatgttgatacagttctggtaactactctgattgatgcgttttcttccgaatcgtaggttgtacctcatgaagtaatcgaaattgatgatgatgaccctgatggagttatgattattggtgataataaagcatcagtggacaagaataagcaaactgttgtataccctatggattgggcaaagcatggcaagagtagtttggttcatgaaattcctggcccaagcacatatgctccaaaatatgccaatccattgggttgtactaacctt

SEQ ID NO: 53716 - DNA, 465 bp, Setaria italica
  Peptide Sequence Number=SeqID_119690
gctggttgtactaatgtttttcattagtatgactcgatgcgccatgcctttgttagttgaattgccttgtcctgatgacatttgcttactattttagtacttagaagttagaagcactttattcttaaggaccaataagattataatttagcttttatactttttagaaatatgttaacttggtttttcttcaaattaaatagatactatatttgtgagggcgtatgaggatagaatggacctgcttagagctgtcattatgggaccagctggcactccttaccatgatgggctcttcttctttgacatttacttccctccacaatatccaaatgtaccgccagtaagattttcttgacttaagcagcttatctccatcagttattttccttgtttcttcagttgcgttaaggatcttatgatgattagttaattctccacagatggtgaattaccgtgctggtg

SEQ ID NO: 53717 - DNA, 176 bp, Setaria italica
  Peptide Sequence Number=SeqID_119691
caagtttgatagcttggatattccacttggtgtggaggcttccttaccgtggactcagacgattgctattgagattgcaaataagtgaagcatcataaccatcatcttcatactcatcttcatcatatgcatagtcttcatcaaatccctcatcagaatagttgtagctgcatcgt

SEQ ID NO: 53718 - DNA, 433 bp, Setaria italica
  Peptide Sequence Number=SeqID_119692
acaccataagtacacagtggacgggataaccatttgtgacatttctttaataaacagcagactcacctttgaaccagcaagatcgatcatatttccgtttgctaataaatcatctacaacatcctcagaagcaaaaaactataaatccaaagcctctagagcgttttgtttcacgatcaaacataatctggtggtctaccacagtcccatatcttgcaaagaaattcttgaaatcatcttcagttagtgctgagggaagcccaccaacaaatatctttctagtcttgaaatccttagagctagactgcattgcaccttttggtattgttcttttaatctcaacctggagtaaacaaatggcagtactactaagtaactgtcagctgtcaataaatgggggattgcaaaggaaaatgttgtggatgaggtatgg

SEQ ID NO: 53719 - DNA, 312 bp, Setaria italica
  Peptide Sequence Number=SeqID_119693
atatgccccaccataggtggcaccaccaaagccagaactaccaggggcaccaaagctctgatcagcatcaccaccaaagccagaactaccaggggcgccaaagctctcatcagcaacagtgcgtctatagccactcaagtctccaccagcataagctccaccaaaacctcctccatataacccgaagcgactgggataaccaaacgaagatgcagctccataggcccctaatcctgcattagttaacgtacctattattcctaactacctaaacttctacccttatttcccttaccgtttagttctttgtta

SEQ ID NO: 53720 - DNA, 208 bp, Setaria italica
  Peptide Sequence Number=SeqID_119694
gccgatctttcattattactgaatcaactatttctccatactggccaaaatgcctcacaaatgtagctgcaacaggaaacagcaacacaaaatcagaaaaatggaaacaaagctaaactgagcagtgatgtgaattggtgccactaggatcctcaccgatccttttagttcaattagtactagttttccaaaatgtgtcctaaacctg

SEQ ID NO: 53721 - DNA, 375 bp, Setaria italica
  Peptide Sequence Number=SeqID_119695
tttagtttaccctttaattttaggtttaactttaacgtttccgtttcgttcttagttcttaggttcgttcttagtaacgttggtcgtctcgtcatcggaggcctccttcctccggatggcgtacccggccttgcggccgttgcagtagacggcccagacgtactcctccacgagccggcggcgcgcgctgcgggtgtcgctctccagcgccagcttcaccaccccggacgagatctcccggtgcagtgcgctcgtcagcatgggcagctcgatcaggaacagcggcggcgcgcgggtatcctcgtggatggccaggctcacgcgcccgcgccggtgcccgaacagcgtcaccgtcgtggcgtggtcggccaggga

SEQ ID NO: 53722 - DNA, 356 bp, Setaria italica
  Peptide Sequence Number=SeqID_119696
tattggtagtttgtacctaaattaattgtaactttctaagtaacttcctttgtcggtcccctattacttggtttcgtattgttcctttccgtcagaagagaagaccaagagaactgccaatagccctggaagaacttgttcgatgtacccagccgtgaagacagtccatacatacggaattgtctttgaggggatgatagcgaggtagttaagcgacgaggggaggagctggagcaggacgtatccgccgatgagcacgacgacgaggcccttgcaggtgcgggtgaaactcctttgccgggggacgacggcgggcggccggcttcccgggcctggttcttcccccaagcggccgg

SEQ ID NO: 53723 - DNA, 317 bp, Setaria italica
  Peptide Sequence Number=SeqID_119697
gaacagggtgaagccccagatctccgggctgggagaagctatcaactcgagatccaatcgccagaatggcagactccgggattcgggtggcccggctggtaagctcgataggcaacgagccagcgagcgagcaagcaagcaagaagagcaagaaggacaggcaaaggaaggaatcggcgcttacgacggcgggcggcgctccggcctgttcttcccagcggccggagccgtggccgtcggctcctgcagtggctggctctccatcatcactgttcctcctctgcagaaggctggagatctcccgctcccggctacca

SEQ ID NO: 53724 - DNA, 250 bp, Setaria italica
  Peptide Sequence Number=SeqID_119698
ccatggccgtgagctggggcttcagtatcaacagcatgatcggcagccaacctttcttccagcaccctctcaccacgctccctgtaatatttaattgaatcagtgagccttaaactggtaatatttctttttgagatgtcatagctctcaaattttcagtctcacagcaccttagctttatttttttagaggagcaccatatagctttattgaagacacaagtaactggtttatgccatagtttaacact

SEQ ID NO: 53725 - DNA, 234 bp, Setaria italica
  Peptide Sequence Number=SeqID_119699
cccggctggtaagctcgataggcaacgagccagcgagcgagcaagcaagcagaagagcaagaaggacaggcaaaggaaggaatcggcgcttacgacggcgggcggcgctccggcctgttcttccccagcggccggagccgtggcccgtcggctcctgcagtggctggctctccatcatcactgttcctcctctgcagaaggctggagatctcccgctccccggctaccaatctc

SEQ ID NO: 53726 - DNA, 213 bp, Setaria italica
  Peptide Sequence Number=SeqID_119700
tgcgcgccggctctgcgtctcatacacagctcatcagaaactcacctgacaagcaagtggcacactgatgctgaccaacgatcgttatctgaattctgaaacaggtctcgcccggcgaagcctaccagctctgccggtacgactggatgcggggaggcgctcaccgcgctgctggagcggctatcggtgatcgagccggtggccgcagcggcg

SEQ ID NO: 53727 - DNA, 274 bp, Setaria italica
  Peptide Sequence Number=SeqID_119701
cttttggggactagtgattttgtatggtgttgttctaatgtatgattagaagaaacatcaagagcaaatctatctgtcaaaagtattaaagtacaatagaaaaaattctccgtatctctacatattcgtcaagccacttgctgggggatgaagaaaaagggtcgtgccaagagaacccgaatccagaaaaatcagctactttggttcgaccctggactggaaagaataccccccactgtagtcaaacgagtcggtgctcacgtccttgtccttc

SEQ ID NO: 53728 - DNA, 230 bp, Setaria italica
  Peptide Sequence Number=SeqID_119702
tcgcggacgatgtacttgcccttctcgatcggctgcttcgcgacgatgagctcgagcatgacgacgccgaagctgtacacgtcgctcttctcggtcagctgctgggacatgtagtactcagggtccaggtacccctgcaggtgaagcaatcagtgcaaggtcaggatcaccggaagatcagagtcgtcctcgttggcagtagcgggtgcagtgacagagcctgatgaaag

SEQ ID NO: 53729 - DNA, 418 bp, Setaria italica
  Peptide Sequence Number=SeqID_119703
ggacatttcctttagtcaaacaagtgattcatacaaaacatgtttggactccaagcattcacttgcaagcaaagcaattatgatttgtagtgcaagggaatgaatcaaaaggaagaaacagaaaatcaagaatttagttagtgctatcgcccaatcaataagggcggctgctttagatcctgcctacacaaagctgagttgcgccagatagctgctttcagcaaaatcatggaggctccgatgaggcctgcctccttcattctcagtgctgcttattcctttattcaccatttttctgcaggcactagaatcctgcagaagtttaagcatttgctcttcaatggtaccacgcatagccaaagtttcgaccaatatgggataggagtatggaggaacaagttattagtcgagctcatcg

SEQ ID NO: 53730 - DNA, 270 bp, Setaria italica
  Peptide Sequence Number=SeqID_119704
ctgcatctcataatgattgccacaaccgggtaatgtgcatttttcactatcaagagctacacaatcaaggcacaaaatatgttggcagggtgtgataataggcaatcgacaccaaactttacacaggaaacgatggatgatttggtgaagctgggcctggatccttcttctagattgaatatcagtttattagaattgctcttttaaatggtgccagttgtttcaggtgtaaagtttggtgtcgattgcctattatcacaccctgccaaa

SEQ ID NO: 53731 - DNA, 439 bp, Setaria italica
  Peptide Sequence Number=SeqID_119705
caagagtgattccaaatgcttgtagccaaatttcacttctatatcacttatatcaatggacaaacaagagcatgcctactagtttcaatcatatcttggacatcactttccctgtatccccagtcaaggctaacccgagcgatatgcattagggaaccagagtaagtatccacaccaaatctgttatccttcaagaattctctatattcttcttccatgtgcactagcagttcaccaagttctgcgtgtacctgaatccccttgcttgcaatattatttgcaaacaaatgtgatgactgggagcaagcctgaattataaaaggaacaaatcaaaacacaagtcaaaggatgatgcttacacttagcaggtaatgcattcgtagtatctagagcatagcattaacaaataatgaataaattaacaatgtaaatgttagct

SEQ ID NO: 53732 - DNA, 208 bp, Setaria italica
  Peptide Sequence Number=SeqID_119706
tcttgtttttcttcttcttgtaattttgttagtttcaaccgatactagcatcttgaatttgtggatattatcttctgtaggaaggaggactgatgataaagtgcaacgatcaagatgaactgaactgacgttggtgggtgggaactgagagatggaaatcaagagcagctgcatgcgatgcagcgattctgctctaaggatgggtcta

SEQ ID NO: 53733 - DNA, 486 bp, Setaria italica
  misc_feature (53)..(53): n is a, c, g, or t
  Peptide Sequence Number=SeqID_119707
ctgctatgtgtgtcatttgcaacaagtttgatttcgaggtcaacacatgccgntggataggatgtgatttctgctctcattggacgcatacggattgtgcaaattcataatggtcagattggaatggggcaatcagtgaaaaagcagcattggccatgctgagatgcttttcaggtgccgggcttgtcagaggacctcagagctgctggctgggttaaggacgtcttccaacagtgcgctcctggttgggacagggatgcactgttacgggagcttgagtttgtttgtaagatattccgtttgagtgaggacccaaaaggtagggttgttgttcaggaaatgtttggatctgattgaaaggttgaggaacgctcctgctgattccatcaatcctagggtgatactacaggcgctccaaagaagacttagaagaataggaattaaccccaaaaagaaataactaactaagaaaaaataagaaaggta

SEQ ID NO: 53734 - DNA, 299 bp, Setaria italica
  misc_feature (188)..(188): n is a, c, g, or t
  Peptide Sequence Number=SeqID_119708
ttcttcttgtaaaattgtaggtatttctaggtacgtccttgtattctacttccccaggaggcctgcaaccgcatagcagaggtagtccaagaggccgtgaggaagatggagctcgtcgcggaagaaaagatgcgactctacaagaaggcccgcctggcggtggaggcctgtgaccgcgagctggaagngaaggtccgggaggcgcaggagctgaaggcagagcggcttcgcaagaagcagcaggtggaggagctggagagcatcgtgcggctgaagcaggcggaggcggagatgttcca

SEQ ID NO: 53735 - DNA, 371 bp, Setaria italica
  Peptide Sequence Number=SeqID_119709
ttccttacaaaaggattttggggtacatataggcttaccatgggtaggtggcttacaagctaagcaaagtatctaaagagcatctgacgagcatctaaggagcatctaagtagataaggtgcgtacaggcacatagatagatagatagcacacccaacacacacatgacttagtctatcaatctccccctaagtctagtgtgtcttgagcggcacgtggaccatcccaatcttagagtaaagttcttggaacttgatccttccaagagacttggtaagaaggtcggcgagttgatccttggtgctgatgcagttcgtcctgacactcccttcctccaaacgcctcggatgaagtgatacttcactctgatg

SEQ ID NO: 53736 - DNA, 391 bp, Setaria italica
  Peptide Sequence Number=SeqID_119710
agttccgatgatcagtctatatcaactgagaatgttatagcagagacattgatagctccgaatttttaccctcggagcttataccaatcagctattgtgggcactgataggcaaccgagcttgtctttcgaaatggatgttactccaaacaagaactattcagtatggcttcactttgcagagattgataatggggtaactgcagaagagcaaagagtatttgatatactcatcaatggagacactgcatttaaggatgttgatatagtccgcatgacaggagagcgttttactagacaacttagttactagaaataaaaaccgtaagactagtacaagtagggaacaaacaacttaaagaatacaatacttagacaaacctagtagaaaa

SEQ ID NO: 53737 - DNA, 177 bp, Setaria italica
  Peptide Sequence Number=SeqID_119711
ctcacggggcggcgcgccatcttcaaggaggccgagggcgggagccccgtgagcgcctccagcatcaccacgccgaacccgtacacgtcgctcttcaccgtcaggtggtggaggccgtagtactccgggtccatgtaccccaacgtgccggcggccttcaccgtcaggtgccgctgc

SEQ ID NO: 53738 - DNA, 166 bp, Setaria italica
  Peptide Sequence Number=SeqID_119712
aacctatgatatggcggttagctccttatttcattaaggagctaaccgccaggcgtcttgagttgttgcaaaaggataatgagatgtggaagcggcagactgaatcactgaagcagaagtgcaattgcactattccattgaaaaccatgcaagattaaggatgtgg

SEQ ID NO: 53739 - DNA, 382 bp, Setaria italica
  Peptide Sequence Number=SeqID_119713
acatgccctcgctgtctcaaggattctgaggaggatgctgtacttgagagttatagatgcaagaaccaagcatgtgatggctttctactgcctgagtcaggtacatatggagttcaaaattggcagactgcattgacgtattgcagattgacaattcctgtttatgaaagagtttatccaccatctcatccaatgatcggattacagttctatacttgtggaaagcttgaatggctgctcgagtgcacagaggatgctctgaaatctttaaccagggcagcagatatacttggaataacacacggtacaaaatcccagttcatgaaggagctctattctattgtccctacgtacttggtaggtattagtctttaaaagtaaa

SEQ ID NO: 53740 - DNA, 401 bp, Setaria italica
  Peptide Sequence Number=SeqID_119714
caactgtgtgagcccgagctccaaagaactgcagcgccccggagcatctgggtggcaggggaagggaccaggatggcgtcggggatgccaccggctggtgcgccaccatccgtggagggcaccgtctcaggttgaggagctgtggtcatggacttgagggcagcgttcaaccccatggatgacggctcggtagcgatcgttaaatcgaagctccttgcgtctgagctcatcgcggcgcagactcctgagacgacccagggcgggaggaccaggtcctttatttccatgctgtagcagatattgccagccgtggaggcaaatgctgatcccggttctgtgtcaaacccacccgaagagagcagccccatgtctgctcgcctcatctccctacatttcacctc

SEQ ID NO: 53741 - DNA, 244 bp, Setaria italica
  misc_feature (52)..(52): n is a, c, g, or t
  Peptide Sequence Number=SeqID_119715
tatatggaatcaatcctgtggaagtggtactgaaatcagaatgaactcacangtttccgcagtaatgcgcgtaggccacgtgtagattgtgacaagtaagcattacaggactgttttttctccaaatggcttccaccaatgaagagagcaacaaattgtgtcgtataaacatagaatatattcagcatattcttccggaacatgtagtaaagattttgaaatgaatcttcccagtcctgatgcc

SEQ ID NO: 53742 - DNA, 252 bp, Setaria italica
  Peptide Sequence Number=SeqID_119716
ggatggatggaccactcaagatcgatgtggattacctgaatgaaaaattgcaagaatgcttccttcaaaggataaggaataatgcaaacaaagtttatttacactggacatatttcaacttttatttggttcggtgcacctcttggtgttgtttgcacttcatttgtacatttatgcttgctgatacagactcgctaaagttggatgcttggagacagcttgctttggaggaagggaaggatatcccaagtg

SEQ ID NO: 53743 - DNA, 295 bp, Setaria italica
  Peptide Sequence Number=SeqID_119717
ccgaccaacctctatgtccctctgctgaatgttcttgtgcactgacactgcaacattgaacacatcccgtgtgcgcctgcagaataaagagaagaagagaaaggaatcaatcctgacagcatgtcacaaactttgattggtcatataaaatgcatcgaaatagagtaaatttgttgagctctttgattggcattcctctccgaaattcccataaaggaacaaaagggggagaggtgggactgaatggtggtatctctctcagagctgctaatctgaatatgttagtctctcccac

SEQ ID NO: 53744 - DNA, 286 bp, Setaria italica
  misc_feature (102)..(102): n is a, c, g, or t
  Peptide Sequence Number=SeqID_119718
tacttctggccatgtgtatacaatgggcagtgctgtctatggtcagctggggaacccacaagctgatggtatacttcctgtacgtgttgaagggaagctacncaaaaacttcgtggaggagatttcatgtggtgcatatcatgtagctgtcttaacgtctaggactgaggtgtacacatggggcaaaggtgcaaatggccggttaggtcatggtgacactgatgtataggtaattacttccttactatttggtttgttaagttcttactttgttaaagttatttaa

SEQ ID NO: 53745 - DNA, 239 bp, Setaria italica
  Peptide Sequence Number=SeqID_119719
atgccgtccaagaacctcatggccgagcgccgccgccgcaagcgcctcaacgaccgcctctccatgctgcgctccgtcgtgcccaagatcagcaaggtaagaaggaatccaaatccaaatcttttcttccagtttgtttgaagatgagatgaaatgtgcctcctttgtttggaacagatggacaggacatcgatcctgggcgacacgatcgactacatgaaggagctgctggagaggat

SEQ ID NO: 53746 - DNA, 205 bp, Setaria italica
  Peptide Sequence Number=SeqID_119720
cttttttatgagcaaatagaggttttgaagagaacttgcagagtaagggatctcattgactaacactatgtcatatccaccatctcctgtgctggtctcatttcccctctcccaggcacgactgctcgaggggaaatgagaccagcacaggagatggtggatatgacatagaggttttgaagagaacttgcagagtaagggatct

SEQ ID NO: 53747 - DNA, 228 bp, Setaria italica
  Peptide Sequence Number=SeqID_119721
ctggaaagatgggcaagatgatttggtggttgaggaaattggaatggctcttactgaagtgatgcaagcctatggtaatgaggacaacgatgaaggatcagatctggatgaagattctagcgatgctgacaacgatgacccagttctttctatggaatctgattcaactgatgatttagtggatattgactctgaattgaagacttgtcatcaactgatttactaatt

SEQ ID NO: 53748 - DNA, 232 bp, Setaria italica
  Peptide Sequence Number=SeqID_119722
attctagcgatgctgacaacgatgacccagttctttctatggaatctgattcaactgatgatttagtggatattgactctgaattggtcatatcaccagcctctccaagtggtgatgcatcggaatcatcaattagagaggctggtgatattgactctgaattggtcatatcaccgagcctctccaagtggtgatatgaccaattcagagtcaatatccactaaatcatcag

SEQ ID NO: 53749 - DNA, 285 bp, Setaria italica
  Peptide Sequence Number=SeqID_119723
gatcatatacatcaggagcccatgaaacactcaactttgtcatgattccctgtgacttctgcctcacatacagtgagagggcaccagaggagttcaaggaagggccactacaaatacaagccctccaagagcagcagtagcagcagtcgcagtagcagtggcagcaaaaaggcaagaagcattctcgccatagtagcagcatcagcagcagcagcaaaaaggataggacgcattcgcaccgcagtgccagtagtagtggcagcaacagaactgataccagtagtt

SEQ ID NO: 53750 - DNA, 450 bp, Setaria italica
  Peptide Sequence Number=SeqID_119724
atctatctatgcattagtcttcataattgtatccagtaattgtggatcgcccttatgctgccaaaagttgtgcgaaattttgcttattacttgtgcccattctcctttcaacagaaacttctctttgtaatttgggattaagcttgtggatgggcgagcctttggcagacttcagtgctgaatgtgttagcagcagctcatgtctctgctgcaacacctctgaaaagccaggttgtgagcacagctatgcttgctggaaagatgggcaagatgatttggtggttgaggaaattggaatggctcttactgaagtgatgcaagcctatggtaatgaggacaacgatgaaggatcagatctggatgaagattctagcgatgctgacaacgatgacccagttctttctatggaatctgattcaactgatagaatttaagtaaggaaataaataa

SEQ ID NO: 53751 - DNA, 238 bp, Setaria italica
  Peptide Sequence Number=SeqID_119725
acaacgatgacccagttctttctatggaatctgattcaactgatgatttagtggatattgactctgaattggtcatatcaccagcctctccaagtggtgatgcatcggaatcatcaattagtaaatcagttgatgacaagtcttcaattcatgtaagtttataatttagtttaaagtgtggattccttttttttggcatatattcctggtcagatatttgctttgcattcatattgtt

SEQ ID NO: 53752 - DNA, 322 bp, Setaria italica
  Peptide Sequence Number=SeqID_119726
aaaaaaaaaaattgaaaatcacagaccaaatttgttttgttaacatgtactatctttccattcagggcattccaaggttggtttctgcaatgaagggaacccgtgcaaagcagggaatcatgacaaagttgagtgtttcatgggctcctgatgtatatgatcctcctgtgacttctgcctcacatacagtgagagggcaccagaggagttcaaggaagggccactacaaatacaagccctccaagagcagcagtagcagcagtcgcagtagcagtggcagcaaaaaggcaagaagcattctcgccatagtagcagcatcagc

SEQ ID NO: 53753 - DNA, 341 bp, Setaria italica
  Peptide Sequence Number=SeqID_119727
gttagaagatcatgaccctatctggcttgagcttaggcatgcccatatagcagatgcaagcgagaggcttcatgataagatgaccaactcgtttcaagacaaagcaggcacaactgcaccaagcaagaaacggtggagaagtatctacaagagatttcaaaaaatggttcaggctcttccacagtacagcgatcaaattgacaagctttccctgcatgttgagattgcaggaaaactcaataacataatacgggagcaatagtactagaacgggaaataagtttaaaggaaaacaaaagaaactaaaaagaaaaaacaaaaaagaaaataaattaaataaa

SEQ ID NO: 53754 - DNA, 416 bp, Setaria italica
  misc_feature (140)..(140): n is a, c, g, or t
  misc_feature (270)..(270): n is a, c, g, or t
  Peptide Sequence Number=SeqID_119728
gggtcagcaactgaaaaaaaggaggtcctgttagaagatcatgaccctatctggcttgagcttaggcatgcccatatagcagatgtgagattactccttaatctaccttcctacgtgattcgtacattcgggaactgcangtttaactatgacattgtaggcaagcgagaggcttcatgataagatgaccaactcgtttcaaagacaaagcagcacaactgcaccaagcaaggtttgttgttttaaccagagtattatactacttagganacttttttttctcaaacacgcaggagagctgcgtatcattatattaagaacaaaaaactcgacctgcgggggttaagaccttctcacgacaaggaactaagaaagaaaaaaccccccgaaaaataaactaaactaaagaaacaaaa

SEQ ID NO: 53755 - DNA, 439 bp, Setaria italica
  Peptide Sequence Number=SeqID_119729
acaactgcaccaagcaagaaacggtggagaagtatctacaagagattttacaaaaaatggttcaggctcttccacagtacagcgatcaaattgacaagctttccctgcatgttgagattgcaggaaaactcaataacataatacgggagcaatgtctgcgggatgttggacagctagaacaagatcttgtgtttggcgatgctggaacgaaagaactaatcaattttttgagaacacaattgcacttaacccggagaagttcgaaagcgacaagggtgcaaaattgatgcagttggcaggattatctgttgatgacatgattgctgtaaataatatgcgttgcttatgtgggcctgatacaaaaagtcctcaggaggaggttttacactaaaatttgatgttcataagaagaaacatgcacatcgaaaagagcgaacat

SEQ ID NO: 53756 - DNA, 220 bp, Setaria italica
  Peptide Sequence Number=SeqID_119730
taatttacatccaaccaactaaagaaaacattgtcatgttcctatctgacatgtcaggaagaagccctttgtacaagaaggcatatgtgtttttcagttctcccgtacataaagaattagttgctcaaataaagaaggattcaagtgtactacctcgtatcggcgcacttagtgagggtttcacaactgaccatgagagggcattggaagaactttttag

SEQ ID NO: 53757 - DNA, 423 bp, Setaria italica
  Peptide Sequence Number=SeqID_119731
tcctcggcgtgccgtcgccgatccacggcagcatccaggacaccacgactgctacaacggatgcgccgccttcctcctcgaccgcgtccgccgcggctctgcctccgttatgctcgccacccacaacgtcgagtcaggtaaaaatccagaacaagcttttcctcttctttctccatgctttgccgagcaccgaacccaactgatcaaactcctgcgtgatccttcttcccaggccaactcgcggcggcgcacgcgcaggagctggggatcccgaagggagaccgcaacctgcagttcgcgcagctgatgggcatggcggacgggctgtcgctgagcctccgcaacgccgggttccaggtcagcaagtacctgccgtacgggccggtggagcagatcatccccctacctcatcaggcgcgcaga

SEQ ID NO: 53758 - DNA, 368 bp, Setaria italica
  misc_feature (38)..(38): n is a, c, g, or t
  Peptide Sequence Number=SeqID_119732
ggactacgggatcgaggacgccgaggacggcgacgcgngcgaccgcaacgccgccgggttcatcgccgccgtcgacgtcgccgcctcgctgccgccgggctcggcgagcgtgtgcatcaagatcacggcgctgtgcccgatcgcgctgctggagaagacgagcgacctgctgcggtggcagaagaagcacccgtccttcagcctgccgtggaaggcgcactcgttcccgatcctgtcggactcgagcccgctgtacctcaccgcgtcggagccgccggcgctgacggcggaggaggagcgcgagctggagctcgcgcacgagcggtcttgtcttggtcggttgttgtcgtcgtcggttgtcgtttgta

SEQ ID NO: 53759 - DNA, 256 bp, Setaria italica
  Peptide Sequence Number=SeqID_119733
gccctccctttctggtaagactcgggcggtttcttgctcaatagaagtagtggtgtggcatcctcgtagccgtcgcagtaactgcacgaacacgcgtgccgtgtcctctcgtcgctggcatggagcgcgtgtccggggggcaccctgcaactctgcactcgagttggaagcctcggagggggccggctgggtttatatcagtctttcagagcagagctcctatgcttctggtgattgattggttcgttcccgattt

SEQ ID NO: 53760 - DNA, 411 bp, Setaria italica
  Peptide Sequence Number=SeqID_119734
agaataaaatagacaatttagaaacaataacaaccaaccaagatgaatggtttcaaatgaatgctgttcttcgtgtaagcctggggaacttcttgttttttgcaatatttgccatcatgatgattggtataaaagaccagaatgaccggcgagatgcatggcaccatggtggctgggttgcaaagattgctgtctgggctgtactcattgttcttatgttctgtgttccgaacatttgtaacaactatttacggtaagctcgtttccctgatcattcatgttactctctcttccagcacaacaatgcgagatgaccatagtgcacttgcaaaaattcaagtgcacttcaagtgtgcattgcatatcataacattgttttgagtaacaaggtgcacatgacagcgtgtgcag

SEQ ID NO: 53761 - DNA, 317 bp, Setaria italica
  misc_feature (20)..(20): n is a, c, g, or t
  Peptide Sequence Number=SeqID_119735
atagttaatacctatagtanaatagaactagtaggtactacaaacgtagttctttattgtcatgactcttattcttgcttttgcatttgcaatagttgctttgcaccccccaggtcaatggaagcattatgcctgcttctgtcatttctgtctactgtgcatacctgtgctacagtagtctctcaagtgaaccggatggctacgaatgcaatgggcttcacatgcattctaagcaggtttcaatgagcgctcttatacttgggatgctcactaccgtactatctgttgtgtactctgctgtccgtgctggatcttcc

SEQ ID NO: 53762 - DNA, 233 bp, Setaria italica
  Peptide Sequence Number=SeqID_119736
ttacctgataaaatttgctgttatggtgtgatggaatactggttccttttccaggtcaatggaagcattatgcctgcttctgtcatttctgtctactgtgcatacctgtgctacagtagtctctcaagtgaaccggatggctacgaatgcaatgggcttcacatgcattctaagcaggtttcaatgagcgctcttatacttgggatgctcactaccgtactatctgttgtgta

SEQ ID NO: 53763 - DNA, 403 bp, Setaria italica
  Peptide Sequence Number=SeqID_119737
ttacttaagttaaggttaagttaccggttatttttcggttcgttcgttcttaggttaacgtactaggtattcggtcgttaggatgtggtgcgcgtcgtgcttggcgtccgcctgcgcgggctgcgcttgcaacctctgcacgtcggcggcgtcggccgtgtcccgccgctccgcgcgcctcgcctactgcggcctcttcgccgcctccctcatcctctccttcctgctccgccagttcgccacgcctctcctaaaagcacatcccatggataaatgcatttgaacatacaccaccagatgaatggttcaaatgaatgctgttcttcgtgtaaagcctggggaacttcttgttttttgcaatatttgccatcatgatgattggtataaaaaggaccaaggaatt

SEQ ID NO: 53764 - DNA, 403 bp, Setaria italica
  Peptide Sequence Number=SeqID_119738
ccacttcaagaccagctaacttggtctgatatttggacagcaagtcaagaagctccctgtatcccttactccataccatcttcccgatgtagtatgccccttttgtgaaggctttctccccactctgcagctgcctcaactttagtttgcctacctcaagaaattttggactaacaccatggacgttgcatataacagatctgggcagatcttgagtggcacctgacaacctgataatctgcattaagttcaggagaaaagtcagtatatgcctcaattaaacagggcaggacgactcaactaggcattcagttttctaaatccaatggtttatagagaggcagtagaaagaaaaccagcacatgcattatacgaggcaaattcaaggtacgtaagtgacaaa

SEQ ID NO: 53765 - DNA, 441 bp, Setaria italica
  Peptide Sequence Number=SeqID_119739
tccatagtctgagttgcttatgatttctctcctgtcggttaagcataatttgtaacatggctcatgtgaatctgcctgtagcacgcattactttgatgactgaagaattgtggaagagatcgcctattacgaaaattcttatttgatcatatctatttgacatgccatggcttcacgtgctgcacaaccattcatactttttagtactgtaaattttttggcttaatgtagtttgatattatgcatcttatattaatataagtatactatgtaaataatttttgttatctgtgttccaaattctgattgtttgatagttctattatctagtcctgagttctcacattgaaatgtttaccataaaacccagtctatctcaagcagcattggaggtcagccaaatggatggtgaacaaaatcaaaggaagatgcagaaagcac

SEQ ID NO: 53766 - DNA, 462 bp, Setaria italica
  Peptide Sequence Number=SeqID_119740
catttaattcacatttttcaggcttgggcctactgcactgaaatgaggctgggtcacagagagtgttgctgggctgtactgcccgtgtgcatacaagtgacaagacaccggtttacagtacaccactattggtcttcatcaatataccactattggtcttcatcaatatagatgtttgatcaaaaccaccaataaggtatatcatcaattattggttgatttgtgctgtacgagagtacgcagcacaaacagaggtttacatacctgctgtaacctttagcatccggtagctggtaggcgtcaacatcgccaatggttccaataatagcttttgcgagcgcatcatcatccatttctagctctctaaggaattttgctgtctcatcatagacttctagtgtttcagtaagtttgggtcacgatatgacaaataggagaacactcctgaatgggtgtcaaaat

SEQ ID NO: 53767 - DNA, 192 bp, Setaria italica
  misc_feature (190)..(190): n is a, c, g, or t
  Peptide Sequence Number=SeqID_119741
cagacagaatagaaaaaggagagaatgagctataagcttacatggggaaacacagcatcgcaagccgtgagaagtctagcacataccaatgtgcttcgctcctcgctctgaactaattattccctcccgtgtgcctctcctatccatccgcccagtatccactcctctgcggctctgctcctcctcctcnct

SEQ ID NO: 53768 - DNA, 420 bp, Setaria italica
  misc_feature (52)..(52): n is a, c, g, or t
  Peptide Sequence Number=SeqID_119742
atgggaaagagaagccaggattcggttacagccattggcgtcgagatgttgntcccgccatgtgttacactggcagacttgcagtcaagggtgaaggcctgaagtggaaatttcgaagaagaagaaacacctcacgactaatcctgcaaaggcaggagcggaggacctcacaggcacttctttacttctgggaatacctgcttctccttgtttgcagcttccacatcattaggtgatgcaacagcaaccacaaccccgttgtctttgatgctttcgactgcatcagcaaactccctgaaatccttcaggctgccaccaagaaaaaaaacaacacaatcaatgttccttgtgtagaaaacatctcgcttgagaatccgacaagcagaagaaaaaaaaagatttctactatgtttgtatctt

SEQ ID NO: 53769 - DNA, 148 bp, Setaria italica
  Peptide Sequence Number=SeqID_119743
agtttgttctgtgaactgaacatcttgaagaatggtatacatcagattaaacaagtcttctactcgtgttgccattgcctttccccgaacgatgatgcgagtagaagacttgtttaaactgcttgaacctctgttgttctgtgaactg

SEQ ID NO: 53770 - DNA, 453 bp, Setaria italica
  Peptide Sequence Number=SeqID_119744
ttttgtcaggtatcaagcaaatttcccccctgaacagccatacttttttcccatttcctataggctatgccctccaaaagtccatactggccatcgagacaaaatcaaaagctctagtgtcatctttcttggaattgcttgtcactgcaacatgattttgcggttgactacttgaattgaaaatatctggaagcactgatgcatttccactattcattgaatcgaaaggtgaattcccaactccagcattgaaatttccaaaattttgcagtagctgctgctgctgagcaagaagaatccccatggcaccataatttaactgttgcccaggaaatgactgattgagcatcatatgttgaggcaagctgtactgcaagggaacctgttgctgttggtaaaaggagttctgaccaagaatgccattcaatgctgcagcacctgccatgttgctgg

SEQ ID NO: 53771 - DNA, 198 bp, Setaria italica
  Peptide Sequence Number=SeqID_119745
ccagatgaggcacggctctcactttgaatttcacttggatcataccgaccgtatctttcagattctgtggtcaaagacctacggaggttagggctcttgtatgtgccaccattatcatttgtcatcattgcatgtgctgcagcaaagaaggtttggtccatatggttggaaggcgagatgttgtctagatacatagta

SEQ ID NO: 53772 - DNA, 247 bp, Setaria italica
  Peptide Sequence Number=SeqID_119746
tcagatcacatgatgaactactgactacatgtttttttcctagcagtttatttagtagaaaattaatcagtaactgtgtaacccatgcagggcctgaagttagagttgtcaacaggcgacagagtgggtctgttgtcagatgtgacacgcattttccgtgagaatggtttgacagtcacaagagcagaagttgcaacaaggggtaacaaggccatcaacactttctatgttcgtgacacagcaggga

SEQ ID NO: 53773 - DNA, 245 bp, Setaria italica
  Peptide Sequence Number=SeqID_119747
cctgactgcatttataccattttgtgcgatgaataagaaatcgcttccactcacaaacttcttccggtgttctgtcaagactgactttgcctgctcaggcccatatccattcgcaagctggtagtctccatgcaagttattggcgtcgatcagcttgttgaaattatcaaggttctaggtactccaacacgagatgaaattaaactcagtatagtttgggttcatgcgcttaatttcatctcgtg

SEQ ID NO: 53774 - DNA, 324 bp, Setaria italica
  Peptide Sequence Number=SeqID_119748
attaaacattacaataaatgaatcaacggatgccgttgatatatgtcaaactctatatgtaccagatttgtagagctttggcatacatgcataattgtgtaggagtatgccacagagatataaagccacaaaatattcagttgatgagtatgtgggttcaccagaatactcatcaactgaatattttgtgattttggcagtgcgaaagtcttggtatggttcataacttctagatgtactgaatgccacctgaaacatcacacaatctatgttatgccattttaaaaattgtaaatattctatctatgttaataggtacagggg

SEQ ID NO: 53775 - DNA, 445 bp, Setaria italica
  Peptide Sequence Number=SeqID_119749
aaccaaatatttcatatatctgttctagatactacagagctccagagctcatatttggtgctacagagtacacgacagctattgatgtgtggtctgctggctgtgttcttgctgaacttcttctagggcaggtaagatatcaaccaagttattgtgatatatcagccaactgcttgaaccaacttctttataagatatctgttgttggatagcctgtttttcctggggatagtggcgtcgatcagcttgttgaaattatcaaggttctaggtactccaacacgagatgaaattaagcgcatgaacccaaactatactgagtttaagttcccacaaatcaaagctcacccatggcacaagatcttccacaaaagaatgccatctgaagctgtagatcttgtttcacggctcctacagtactcaccaaacctccggtgcactgcatt

SEQ ID NO: 53776 - DNA, 405 bp, Setaria italica
  Peptide Sequence Number=SeqID_119750
aaggctgccatgaagaaagttggacagcaaagtgccacgaatgtcgctgtaaaaacctaactcatgaggcattctcactcccatgcaatttttcattttaatttatacctcacatcaccaaaaagatggcctcacgccccgacaacagtgtgtttgttgctggatatttttccattgtccttgtaagaaccatgctacaagagaccatgtgctgttccgtgttgtaaatttgttgaggttttgtaaggagtaaccgagtcggttctgcaagaaccaagctggcagccgatgagctgttggagtgagtgacacttgaagttgtatggtggcattggcaaatcctatgttatttgttattcttgttagttctttgtttaacttttatttgttggtcctaaaaaaaaa

SEQ ID NO: 53777 - DNA, 256 bp, Setaria italica
  Peptide Sequence Number=SeqID_119751
agaagttcgagcacttgaacatgttcatgttacatttgcccgacctataacctgttaaatgcactaatgaaaagcagtttgcttttagtgtgtgtactcgtgcaagccttcactttttgctttttctttataggtgcccccaactcgtgctaggtcaccaaaattgacacggagaaagagctgcagtgacactcctcatacacccgagggaggaaatggcagcgcagtatgctgccggttgcatacgtaacaacag

SEQ ID NO: 53778 - DNA, 205 bp, Setaria italica
  Peptide Sequence Number=SeqID_119752
aaacctaccccgcgccgccgcaccccctcgccgccgccgcttcctcgaattccggcgaggcggcgctgggatctgcccggcaaggcggccgagaacattgcaatggggaaagaagttgtagatatgtctacagatgaagaatcagactgtgtagttatatgtccacctaacggaaatgttgatcatggggaagttgtgagtggca

SEQ ID NO: 53779 - DNA, 393 bp, Setaria italica
  misc_feature (27)..(27): n is a, c, g, or t
  Peptide Sequence Number=SeqID_119753
ctataaccaaagatctccctgatgttnaaggggatcgcaagtaccagatatcaactttggcaacaaagcttggtgtcagaaacattgccttccttgggtctggtttgttggtagcaaattacattgctgctattgttgtagcttttctcatgcctcaggcttttaggcgcgctgtcatggttcctgtgcatgttgcccttgcagctggtttaattttccagacgtgggttctggagcaagcgaagtacactaaggatgctatttcgcagtactaccggttcatttggaatctcttctacgctgaatatatcctcttccttgtaacactgcagctctaggctctaaatctatattaacgggaagaggatatattcagcgtagaagagattccaa

SEQ ID NO: 53780 - DNA, 168 bp, Setaria italica
  misc_feature (137)..(137): n is a, c, g, or t
  misc_feature (150)..(150): n is a, c, g, or t
  misc_feature (161)..(161): n is a, c, g, or t
  Peptide Sequence Number=SeqID_119754
aaccactgtcttttccaccgttctggacgactgaaacttcctccatgtgtatgcctgtaagctgtaacttggctcgcacaaagctttatgctacagaacttgctgcaaaaaaaaaaaaaaaaaaaaaaaaaaaaaanaaaaaaaaaaaanaaaaaaaaaanaaaaaaa

SEQ ID NO: 53781 - DNA, 247 bp, Setaria italica
  Peptide Sequence Number=SeqID_119755
cccgggcgccaccacccagcccctcgccttgagcccctccgcccccacgatcgttccgcaggtccgagatgtgcgccgtgacctccgccaccccgacgccgtagctcgacacctgcgtcatcccgcgctcgtacagcagcgtccggatcaccgcgtcctgcgccgactccacccccaggagccccgccagcagctgcatatccatacatacatgttcaccaacatgtcagccgggcatgagaacatg

SEQ ID NO: 53782 - DNA, 358 bp, Setaria italica
  Peptide Sequence Number=SeqID_119756
gtattccacgtgaaacacgcacaaagctacttggttatgttgtaacactttgacaaaaaggaagcaatgttctaggcctcacctccgattttcaggtttgattcaccataattttaaaggcttcaaagctacttggatactaataaaaaaatagtgacagacctgcttaaggaagttagccaacttttttacttcagccttctcataaattaactccccttctcgttgagtcagctgaacggctagtgcctccaccagtgagatagcttcctcagcatcatctctatttcgaccagctacacggcctctcagtgtgtctaaaacatctctgagcttcttcagaagaacctgcctgtct

SEQ ID NO: 53783 - DNA, 377 bp, Setaria italica
  Peptide Sequence Number=SeqID_119757
tctactctcacaagcacaaatagacaagcacccaatcagccaatccacacaccctaattatgtaccatgtcgctgtcaaaacatgccctgatcacttcatcaggtgccttgatcacccgggccagtgagagcaacattgcaattcaaagcaaatttgcgagcaatcataattgcagcattcctgtccctgtctgtttcgaaagctagagtgtaggacaagcctttcctagcttgccagaaaactgccctagctgcagcattaccgccaccacggctcccacattaacttcattcgttagttggtaattacgtacttcttcttttgttcttttttgtttagttaccttatttccttttttcggttagtttttatttta

SEQ ID NO: 53784 - DNA, 268 bp, Setaria italica
  misc_feature (250)..(250): n is a, c, g, or t
  Peptide Sequence Number=SeqID_119758
tgaatcagttaaaaagaccttggaaaaagactaaccgttctctataggaccatctgtatgaactataattttgtctgcattcaaaaccatctctgcttgcaataagcggccaacatcaaacggttctggagcatatgtaaatttcgttgctcctgcaggaagagttcaaaatataaacgaagaagaatgggaatatggggaacagttttacaaatttttggaacgactgcatgagatgccaaaaaaaacngagacagttattatcaaa

SEQ ID NO: 53785 - DNA, 215 bp, Setaria italica
  Peptide Sequence Number=SeqID_119759
tttttaaaaacaaaaaaaactaaagtaaaccaaaacaaaacaaataacaaacgacaataccaactaaaagaaccaacctagaataatcaatcaatcgatgacttcaggaaaccagctgtctgtacacattccttagtaaataaaggaagtcttcctgggagaaactatgacaagcctttttccgttcaaatattacagatgtgacgcacaagaac

SEQ ID NO: 53786 - DNA, 172 bp, Setaria italica
  Peptide Sequence Number=SeqID_119760
ccctcaaagctttccagttcctcggattgtccgctctacgcttcagctgtcactgatatgtttggtgggtttcgtcagaggggagaggacggtcaagaagcttcggctgtcccaaagcgctgacgattccggaggggacgacggtctcggaggcgtgcaggcggatggacgg

SEQ ID NO: 53787 - DNA, 464 bp, Setaria italica
  misc_feature (73)..(73): n is a, c, g, or t
  Peptide Sequence Number=SeqID_119761
gattatatgtttcaatgtgataagttcattattagtattttttcctcgtacttctgaatgaagagatcattcngtttatctcctgagtactgatttcattgtgcaggatctgcaacatttccctcatgttgatgtgaaacttcagcttcagaatgaacaggagcggtccaaatctcgaactttaaacattagagtgcaattgaaaaattcacggcgttcagcatcaagagcatttgcccctagatttcccaaggcaaaacaagcagcttggtggctggtactggggaattctacaagttcagagctgtatggtttgaaaagaattagttttgcagattgggtggttaacactcgcatggaattgcctcagatgttcaatatccaggagtactaaagtcttgtatttttggttattcggttatttcctttacctttaggttttttgttacctttaggtttagttt

SEQ ID NO: 53788 - DNA, 467 bp, Setaria italica
  Peptide Sequence Number=SeqID_119762
taaaaaattaaaaacaaaattaaaacgggaaataaaagaactagacgtacaatggaagggcaggaagctgtacctcttgatcaagctttcgccatatgtcagacatgtcgcaagcagacctcaagcaaaccgggcacgagaactgctgatgagctctcatctcgtacaggcattgcagatgaatcgtgtgtccacaatggagcacgctgacagctttcgtcgagtcgaatagatactcaaagcatacagggcagttatgatgcattgctccgtccacgcaacgatgagaatccttcagctgataggtatagcaacatcctatcatagaaccagcccccacaaatagtacacaatttaatatgaacattaaatcaggacttgtcaaaatgcttagttcaaaccaattgtaaccgcatttcccacagtgatagaagttctactgcaccaccagttctacatatgccaca

SEQ ID NO: 53789 - DNA, 377 bp, Setaria italica
  Peptide Sequence Number=SeqID_119763
cacaccagctcctgtgcagcatggtttattttgcttccggtttccctcttggcttgttctcaaactctggagcatgcagctggaccgcccctcgtctgccgggtgttgtaggaactgcaacccgggcacttgtgcgccaaaaatgtggaactgcacgttcgatgtcattccacaatcgttgcagaggatccatatctgaaggggaaaagggccgaacaaaacatcttcttctgacaaattgccggcatcggggaggctgcaacctcttgatcaagctttcgccatatgtcagacatgtcgcaagcagacctcaagcaaaccgggcacgagaactgctgatgagctctcatcttcgttactaggtctatttgtcttaa

SEQ ID NO: 53790 - DNA, 316 bp, Setaria italica
  Peptide Sequence Number=SeqID_119764
aaccgacccctacgtactagaccgggtgttgtaggaactgcaacccgggcacttgtgcgccaaaatgtggaactgcacgttcgatgtcattccacaatcgttgcagaggatccatatcatcttcttctgacaaattgccggcatcggggaggctgcaacctgaacgaggggtcacttggatggtgctatattacattacgggataagctgcgtcatggagggcaggaagctgtacctcttgatcaagctttcgccatatgtcagacatgtcgcaagcagacctcaagcaaaccgggcacgagaactgctgatgagc

SEQ ID NO: 53791 - DNA, 341 bp, Setaria italica
  misc_feature (1)..(89): n is a, c, g, or t
  Peptide Sequence Number=SeqID_119765
nnnnnnnnnnnnnnnnnnnnnnnnnnnnnnnnnnnnnnnnnnnnnnnnnnnnnnnnnnnnnnnnnnnnnnnnnnnnnnnnnnnnnnnnnaataacctttctctctcttcttcaggcgaaaccatttttgcaagcagacatcacttatgggctgaaagcgaaaagcagcttagtggcccatcatgtcgataacccaatacgagaagggccgagcatatacaattccactattccaggcacagcaacgcaaacgacggtgaggtcaactagctgttctctggggaaggagatcaggagagtacatggacgctgtctacaggcctatagcttattgatcacaca

SEQ ID NO: 53792 - DNA, 213 bp, Setaria italica
  Peptide Sequence Number=SeqID_119766
taggaactgcaacccgggcacttgtgcgccaaaatgtggaactgcacgttcgatgtcattccacaatcgttgcagaggatccatatctgaaggggaaaagggccgaacaaaactgatgagcgcggctggttgatctgaaagaagaacccaaggggacagagagcctcctctctctgagaaggaagtgcccttaccatcttcttctgacaaatt

SEQ ID NO: 53793 - DNA, 386 bp, Setaria italica
  misc_feature (65)..(65): n is a, c, g, or t
  Peptide Sequence Number=SeqID_119767
gagaaacaacctcctggaccttggcacccttgtcataccaccaaccagtagaacctcatcaatcncctttgcggagatgccagcatccttgaggcagttcacacaagggatccgagtcctctcaatgagattgctcacaagagactcaaacttcgatctggtcaaggtaatgttgaagtgcttcgcaccagaggtatcagcagtgataaagggaaggttgatttcagtctgcatagtggaggaaagctcgaccttggccttctcagcagcttccttggtggtgaggactttgatagtgcactgcttgagtatctggttgctgagttcaagaagtctgacggcattgatctgagcatggacaagttagcgctgcaaaggctcaggtc

SEQ ID NO: 53794 - DNA, 234 bp, Setaria italica
  Peptide Sequence Number=SeqID_119768
ctggtcaaggtaatgttgaagtgcttcgcaccagaggtatcagcagtgataaagggaaggttgatttcagtctgcatagtggaggaaagctcgaccttggccttctcagcagcttccctgagcctttgcagcgctaacttgtccatgctcagatcaagaacatttggacagttggaggtgcaagaatgggagatctgcagagaaggctggaagaagttcaattgaatacggaac

SEQ ID NO: 53795 - DNA, 237 bp, Setaria italica
  Peptide Sequence Number=SeqID_119769
ctgcaaaccgaggaagggaaatcaagattatacagcaagatgatgatagcccaatatgacagaaaacaggtatcagtaatcattgccttgtcatcatgatgttcaagtgtaactgcacatttgccaacagctaaatcccaaattttaacagttgtgtccgcacttgcactagctagaacattcctgacttccttgttccatgcaagaccaagcacagaatttctatgacttcccttt

SEQ ID NO: 53796 - DNA, 350 bp, Setaria italica
  Peptide Sequence Number=SeqID_119770
caatctcagaaatcccctttgatccaagcaagcttctatcatttatgttagctgagccaatcaatgtaatgcggtcatcaattatcattaacttgctatgtacataaatctgcaaaggagacctgttagaagggtatcctgaatatatttttaatgccagttctgactagtgaccaagggacccccatcattcagtttaccatgtgctctaagaccataaaaggagatgtaatcatgtgctttaggtccaataacatcaaatagattctggagaattgaattagggcctctgcagatagtacgatattgccagtgcatgattgccctcactgatgcagctccaccatcat

SEQ ID NO: 53797 - DNA, 305 bp, Setaria italica
  Peptide Sequence Number=SeqID_119771
tttaagttaaaattggggttaccggtaagttggtagtattgtaattttattctaattagtattgtttttgattgttattacagctcggcaatgcttcagacaggcataaaagtacatgcttcacgacacatttacaatgtcaacacccatcgtttcagttccagggtgcaccatacttcatattcttaagttcctccagctgtctgcatgttttccttgtgggtatctaaaaagctcattataacttcaattgcaaatccaacttctctgccttcagcttttcatagtcagaaattgatgggcca

SEQ ID NO: 53798 - DNA, 216 bp, Setaria italica
  Peptide Sequence Number=SeqID_119772
tagaaatagccaatgtaagcagatagagtagcgcacattgccaacatagtacatattatacctgtctgcatgtttccttgtgggtatctaaaagctcattatacttcaattgcaaatccaacttctctgccttcagcttttcatagtcagaaattgatgggccacccagtttttgctgaacaaactcgactgccgacgaaggcttatcgttctcct

SEQ ID NO: 53799 - DNA, 234 bp, Setaria italica
  Peptide Sequence Number=SeqID_119773
ctggtgtgcacccccttgattgaagctatcaccactgtaactgccaggagtagcattatatccaccagtgtaaccagcatcaacaccaatcccaccttctcccacagaccggaggtatcttaagctccaatccactgctgtgcaagcagctcccgccatctctttctctctcctcggccggcttgcttagaacccacttgatcgctgcgtcgccgcccgggcctcctcccttcc

SEQ ID NO: 53800 - DNA, 197 bp, Setaria italica
  Peptide Sequence Number=SeqID_119774
gaccctgcaaatccttcccatccatgccagtaatggcagcggctgcctcctctgtggatgtgtatgtcacaaaaccaaaccccctcgatcttccggtttcccggtccatgattatcctagctgaacaataacaccaccgctaacaggagaaagtattcgtaattgtgtagtatatctgaaagagaacaaatacaaaa

SEQ ID NO: 53801 - DNA, 433 bp, Setaria italica
  Peptide Sequence Number=SeqID_119775
aaattcgcgcaatggtgggatcgctggtggcaggagaccattttgtatttgcataaagcttgataaaggagataaattctggaattgtcggttttcctgcaggtaattgtgtgaagcagaatcttggagcgctgcacttgaagttgcataatctgaggttgctgataggttgtattcagtattgtttgtaacatccaggaaattggctatcgtcacttcagattgttgtaccgatgtaacatcaagattctccatgttgctgtttgtcgcggaagcaacacattcattagctgctggagttcctgccgccttgctttcatcctcgtggattcttaaaaaaaggcttttaagcgctacacaataaaatggggtgaagaatactaaaaaaaagcaatacctgacaactgtctggtcaattgaatggtcatcaggt

SEQ ID NO: 53802 - DNA, 337 bp, Setaria italica
  Peptide Sequence Number=SeqID_119776
aaaaaaagaaaaaaatagaaaaagaacgatcctttttctatcagaatttgaataaatagatcgaactacaaccttgcccatatcctaagaaacgctacaagtttccaacatgtatctctcgggctcaaaaatgtcacgatagcaactcatgtacacagctgctatccgtctgcctggatcaggccaaaagccattggatgccatctctagcgtccgcgcacacaacagaagccgccaccttcaggttgacaagggatggatcaatagctaggccacattgggttagccttgagctagtctagttcttacttttaggtttttgttttccttttatttt

SEQ ID NO: 53803 - DNA, 354 bp, Setaria italica
  misc_feature (20)..(20): n is a, c, g, or t
  misc_feature (26)..(26): n is a, c, g, or t
  Peptide Sequence Number=SeqID_119777
gtaacatcaagattctccangttgcngtttgtcgcggaagcaacacattcattagctgctggagttcctgccgccttgctttcatcctcgtggattctgacaactgtctggtcaattgaatggtcatcaggtgctgccacaacgtccccatgacactcaagaggtttcgtggtcaaagatgcatcaagtgttccagacacaaaactaccaaacgtcaagtgtgcgcagtcagcatttgaaacctgaagatgatcagggattattactgccggattatcatcagaattagaatttttaggttaccttacgttagttaagtaagttactaaacttaggttactaaaatttagttta

SEQ ID NO: 53804 - DNA, 201 bp, Setaria italica
  Peptide Sequence Number=SeqID_119778
ctcttttcaataccatcttcattgacatctggcgttgatgaatcttcaatggaaggagctggcacatctgctccctctgctggaggtaacatgtcaattgaggaggcatctttaggtacagagtgcacctcaacagcaccatttggttctgatgcgaaagcagatctgctgcaagtagcacagccatgccagccgttggtg

SEQ ID NO: 53805 - DNA, 283 bp, Setaria italica
  Peptide Sequence Number=SeqID_119779
tgagaaggtcttctcttttagcaaaagcccgggggctatcttaccccccgcaggtcgagttttttttttaagtttaatatctgtgtttcatgcaacagtttgctcctggaagctcctcggaagttctgatcacttctgcagattcgagaatacgagttgttaatggcgatgaattggttcacaagtttaaaggtaatgcctcattctcctgtaaccgtaaatcatatatagttctatttttcagatagttacatgtatttattttccgcaaatataaaggggg

SEQ ID NO: 53806 - DNA, 266 bp, Setaria italica
  Peptide Sequence Number=SeqID_119780
ctcttttagcaaaaagcccgggggctatcttaccccccgcaggtcgagtttttttttaagttttaatatctgtgtttcatgcaacagtttgctcctggaagctcctcggaagttctgatcacttctgcagattcgagaatacgagttgttaatggcgatgaattggttcacaagtttaaagggtttcgaaacacgagtagccaaatctcagcttctgtagctccaaatgggaaatatgtcgtctgtgccagtgaggattctcatgt

SEQ ID NO: 53807 - DNA, 337 bp, Setaria italica
  misc_feature (18)..(18): n is a, c, g, or t
  Peptide Sequence Number=SeqID_119781
ctgaaattgcagtacacncgaaaaagatgtggctgtttggttatctatacaattactattagcattgtattgattaaaaaatatttgattttatctcgcaccattttaatgtacattgtgccattttcactaatatgtgttggttagttcttaacaaaacttatttaacttaaacatattgacaaatgttcagcacgaagaaagggaaaagaagaaggatcattcaaaggactcagcacgggatacaacattttcatcgtcttgtttattgcttcaatgctatgttttgctgtctgaaggactctcaatggtacatatggaaaaatactgtcaacct

SEQ ID NO: 53808 - DNA, 393 bp, Setaria italica
  Peptide Sequence Number=SeqID_119782
acttagggaaagaagtttagacaaggaattggagtaactatttcgatacagttggagcttgctttgaaaagagagttcggtgaaaccagaaatgtcctgcaccatgagaacatgtgcatgagagtatcaaagcaacttcttatttggactcaggagcatgcgtactgggttgcctctcggtttctcacgttgggtttcgaacttgacctatattctccaggcgaatactgtatggtgtactggtacatcacgaagaaaagggaaaaagaagaaggatcattcaaaggactcagcacgggatacaacattttcatcgtcttgtttattgcttcaatgctatgttttgctgtctgaaggctctcaatgatgctagctgtcctcagaaatgaaagt

SEQ ID NO: 53809 - DNA, 297 bp, Setaria italica
  Peptide Sequence Number=SeqID_119783
tattttggtttccttagtagtctattttcttcctagtacttttgtttggttcctaagattggcaagcttttacgggcaaaacttgttttctgatgtgatttcaagggctttatcattaccggacattataggcgataaggaatttcagatgaatgagtttgtagtgcagctaggtcagttggttatcaacttgcttaaaattctttgtacaaatactgcatggcaacgccgcaagcttgggaagagtttgcaggattggagtactatttcgatacagttggagcttgctttgaaaag

SEQ ID NO: 53810 - DNA, 223 bp, Setaria italica
  Peptide Sequence Number=SeqID_119784
gtgggagggaccagatggacatgttattcctcgtgatcgtattttgatctactgcacgaagcatgagatcataaaaaagttaggaactcccaagaggaatcacatcatctttccagatgtcaaaaaaactccgtgtacccaaaaggcttgtagatccacctaatgaaaaagctctggcaggtaagggctacggagaaagaagttctcacattagcagaaatgg

SEQ ID NO: 53811 - DNA, 344 bp, Setaria italica
  Peptide Sequence Number=SeqID_119785
atttatgatgagaaactgagagaaacaggcattaactcataacaatttagcttaagcaaacagggtagaagaaaagccttgtctggcatgctccattttacaaatttttcatttctcccatgatttacctccagaagattcaatcccatgacaatggccaacccagaagcagccactgggagtccttgcccaacctgcccataagcctttccagcaaaagaggcagcaacaccaagaatagctaaggttgttgccagtcctaatgaaaatgctaattgaaatttaccaacaaacctaaataaagaacaaaggaaaaaaagttaactaaaaattaactaaagtaa

SEQ ID NO: 53812 - DNA, 433 bp, Setaria italica
  Peptide Sequence Number=SeqID_119786
gcaactcaacaacctccagaagattcaatcccatgacaatggccaacccagaagcagccactgggagtccttgcccaacctgcccataagcctttccagcaaaagaggcagcaacaccaagaatagctaaggttgttgccagtcctaatgaaaaatgctattgaatttccaacaacctcagcctggcctttcccagaaccgaatgcccctatatatcctagagtcaatggtagaacactgagtgtacaaggagacagactagttacaagtccagcgccaaaaatgactgctaagctagagaaactgagagcagatagctgatcctgaacagcctcattagcctgctgcccagctgaaaacagcaaacctccaaaccaatctccaattgctaaaggttcttagttccttaagtttaggttttagtttttccttt

SEQ ID NO: 53813 - DNA, 258 bp, Setaria italica
  Peptide Sequence Number=SeqID_119787
ttcccagggagtacccctaccgtccgccgctcgtcttcgccttccccgccgcgccgtcggcggcgctcgtccccgaccaccccttcgtcgaccaccgcaccggccgcgtccaccgcacgctgccgtacctcgagggctggagcgtgccgcgctccagcctcgccggcctcgtgcggagcctcgtcgcggccctgaggatgtgccacccgctgacgacggcctccttcggcttcgccgccggggacgccaggaccacca

SEQ ID NO: 53814 - DNA, 252 bp, Setaria italica
  Peptide Sequence Number=SeqID_119788
ggcagggacgccgccgccttccgcggcggcgtcgacgaggacatccatgccatgtcctcgatgcaagccgggctccggacacggggagacgccatgggccgcgccgtccgcgacctagaagaggagaggacgcggctggagcgcgccgtgacggccagcctcgcccaccgcgggaagcttctcgcctggctgcacaagacgagcccggcgcctgatccgggagtggcactggcaccgcacgcggctgcaggg

SEQ ID NO: 53815 - DNA, 250 bp, Setaria italica
  Peptide Sequence Number=SeqID_119789
ggcggcgacagggccggcgacaccgctagacaaccaacaagaccttacaacaagaaacaagtctctctgacatgccgattgcgaggaggaattcactccataggttccttgagaagagaaagggcaggataactgcaaaggcgccataccaagtcaacagccctgttggtgtcgatgcgtccaagcaagcgactggagagaagaaatcttggctggggctgggccaagaagtggcagtgaagcaggagat

SEQ ID NO: 53816 - DNA, 292 bp, Setaria italica
  Peptide Sequence Number=SeqID_119790
tggagacagatatcgtactgcatgaatgactccagcagacatgaataataggtttcacttaccttgaatgctgaagatgatgtttgtcaacttcagaaaatcactcacacatttctccagctcgtcacatgttttcttttccttctgttcgttgtatgaggactggagcttccatgagtcctcaaggaaactgatccagatcttgactatattggattccacattacacaaggcgatggattttgagaggtcgtcctccttttttttcaagctaaatatgattttgattgtt

SEQ ID NO: 53817 - DNA, 379 bp, Setaria italica
  Peptide Sequence Number=SeqID_119791
ggagatttgggtgagtcaacatgtgcagctttcggggtagcaggcgcctgaagaggtgaaggactcagtttggatccctcaacaggtagtggcttcgctttctcagattctatgcttagtgttggcctttctatagactcgaatgattccctcaatttctcaatttcatcaactaaattcttcacctctgggtcatctctcctgaagaatatgtgaagtctcaaggagtaagatcacgttggtgcaaacttgaaaataatcaatcatatagagaacatcagatggtacctcgaattagccccttgctcggaataaaacaacctctttatgtgatcaacgatgctgaaagcaattataatctgaaaaagattgttaacat

SEQ ID NO: 53818 - DNA, 379 bp, Setaria italica
  Peptide Sequence Number=SeqID_119792
taccgtagtagggtagctggtgagcgctactgtgaggtggagtgcccctgtggcttaagcttctgctttaactgcatggcactggctcattcaccttgcccgtgcaccatatgggagaaatggaacgccaagcgttcagagggagagagcatcaaatggatcctcgctaacaccaagagctgccccaaatgctttaaggccattgagaagaacggtggctgcaaccttgtccgctgcaattgcggccagtgtatgtggtaagttgttggtattacacacctagggtaaccttttgggtaggctaggcatatctggtgagaactataatctttttcgtgaaaaagtgtgaatttatcagcaacttgacatgccaatgggt

SEQ ID NO: 53819 - DNA, 392 bp, Setaria italica
  Peptide Sequence Number=SeqID_119793
gcagcaagcactggattcatagctggaacactgccatcatctcccagttccaactggacgccgttgagcagcattgtcttgctctggacatcccgtccttgggggtcagatgatactcctccctcttcttcgtgtcgcttgatgccttacttcccagccatgaaacggctttcccggagcctgtgagagaaagaactgcgcttctcgaggtcgggtctttttaccgatgttgatgtcattctggagagtgacgttgtatccagtagtgttgcttaggttgatcaagagaagagtgatgccttgctgcattttgaagtaagcatgtttagaatgggaaatctagcagactgaaaactacacataagctgacatctccgtggaacaaactctca

SEQ ID NO: 53820 - DNA, 387 bp, Setaria italica
  Peptide Sequence Number=SeqID_119794
ttaaagaaagaaacaaaagaaacaaattaagtaacttaagaactactaggaacaataccccgtaccttagggggtacaagaatgatactcctccctcttcttcgtgtcgcttgatgccttacttcccagccatgaaacggctttccggagcctgtgagagaaagaactgcgcttctcgaggtcgggtcttttaccgatgttgatgtcattctggagagtgacgttgtatccagtagtgttgcttaggttgatcaagagaagagtgatgccttgctgttgtcttctacaatgagcataagcacgcaacctacgtggtgcaatgctatcaattgaaagaactccattgcccattagccgatgccataatagagcactgtagtaatcagg

SEQ ID NO: 53821 - DNA, 379 bp, Setaria italica
  Peptide Sequence Number=SeqID_119795
gttttctggaataaatcattcagtttgtcccacctatccatactaaggcaaccaactgagaaaccaaacaagccattggacatatttctgaacggggtgcatggactttctgctcccacatcataaacaactctgtcttgcaacgagcctcccaacctaatcctcaaaattgtcaaatgcttgaatagcttgagccagaaatgggtgatccaaatccaaattcagaatcgaagactggccccatggacactgattgtagttgcacttctccggcggccaccagtcaattgtagcacagacgtagtctcttctattccgttcttctagtctaattcctttagtttcgttagttcctttttaactataaccgtcgcctcca

SEQ ID NO: 53822 - DNA, 183 bp, Setaria italica
  Peptide Sequence Number=SeqID_119796
cgagctctggggaagagagaggaagagagaggagaggaggcgtcgcggtgtgatgaggaagatgctgcttttcatgcagctgggctatgcaagaaaaaagaagcaggacatcgcaaaagcagttaagcaaatcattcggtacatatattatagctgaagtcgagatatgttgtagagtcaagt

SEQ ID NO: 53823 - DNA, 246 bp, Setaria italica
  Peptide Sequence Number=SeqID_119797
agaactcagaattgtagaagctttattaggtcgaattaggtgtagggattaagatttccatggttttagtattagctaggtttgttagggtatgaatggccatagtacttgtgccagtagtagttgttgagaactcggtgagggtcttcacaagaaaagctgtgcttggccaagcactctagtattcgtctgacccccctcgattacaacaaggcagtcagttccttgttccgcgccaaggcacgc

SEQ ID NO: 53824 - DNA, 422 bp, Setaria italica
  Peptide Sequence Number=SeqID_119798
cacttatcagtggccagggaacgagcatcttccatattcaactctctagacccgtcattccagtcccaaacacttaatgtctcaatatgggtcaaacaccaagcttctgatacatattcccaaaaacccactttggcaacagacgtttccgcattcataacagatagcagatgattgtcctcatcaatgtcaccatcagtgtcaaaaacacatactaatccatccactgcggcggaaatgagtttactctgttgatttggtgcgaatttgacctgtcagtcaacaagtaacacaagacctctgccatcaacagtaagatattgttcgggacagcaacaaagtcaacaagttactgaaacagcaaaaagatatactaggatttagaaaacttatacattcttttacatccagaatgcatttaa

SEQ ID NO: 53825 - DNA, 248 bp, Setaria italica
  Peptide Sequence Number=SeqID_119799
ctgacagttccatcagaagaacaagaacagattacttgtggtgatgatggaactgagaaggagatttcatgaattgttccttcgtgtcctatacactcccccagatattgtccggttgctggagaataaaacttcagtgcatttgttgacaaggaaacaagaagcaatttggaagacatagtcatctccaaagttggtctggatgctgttcttaaggccgagccgcctcgaggtcacgcttccatcag

SEQ ID NO: 53826 - DNA, 303 bp, Setaria italica
  Peptide Sequence Number=SeqID_119800
tgtcggtcggtcgtttggtagtctagtaggttagtagtctaggtctagtttgttagttggttggtagggtagtagtcggggtacgggggtagttccgggggtagtagggtcggtcgttcgttagaggcgaagcgcggtggtgaggtcggcgttgcgggagcacatgtcgagctggtggcggaggagaccctcgggggactcgcgggcgcggcggcggcgggcggccttgccttcggcttcccctctggcaccgccggagtcctccagcgtcggcgtcgggtcagcgaccgtggcggtggagga

SEQ ID NO: 53827 - DNA, 278 bp, Setaria italica
  Peptide Sequence Number=SeqID_119801
ggcggcggcgttggagcagaggtagagcaggcagttgtagtggtggagggagagcgggacgggggagtccggggagagggcggcgtcgtagaggcgaagcgcggtggtgaggtcggcgttgcgggagcacatgtcgagctggtggcggaggagaccctcgggggactcgcgggcgcggcggcggcgggcggccttgccttcggcttcccctctggcaccgccggagtcctccagcgtcggcgtcgggtcagcgaccgtggcggtggaggagtaggagt

SEQ ID NO: 53828 - DNA, 457 bp, Setaria italica
  Peptide Sequence Number=SeqID_119802
taatttagttagtaaagtaaacttaaaaagacaacaagaaaggactaatgctaacagataaggtttctgacatgcaggagactttgaaaaatggtgaagaagaaagaagaagcagaatagctatgcacgcaaagctcttgaggttggagagtgatctatcagcatcggaagcatcacatgtacatgaagcagaattaaagaacgagcttagtaggatcaagagatcaaatagcgagtaccagaggaagttgcaatctcttgagcaggaaaatgaggatctcgccaggagagttcaagttatggaaaaggggtttgagaaaatgtcccacattaaagaagagaatcttggaatgcaggagattggaggagatgatcaggcagacattcagtccaaaattcagttgctggaaactaagcttgcagaggcgttggaggaaataagtgtacagagctcaac

SEQ ID NO: 53829 - DNA, 366 bp, Setaria italica
  Peptide Sequence Number=SeqID_119803
tggtggaaacggttggagcaatggagtcccatatggtggagaaggtgaagctgtaggtaatggaaaggctggagcaagggagcactttgcggctgctgagaggtacgaggatgttgaggtggagcagttggtactgcagaattactgtgcaccattgttgtctgtaaagatgtcaatggtgagaaatgtgatgggttttacaaggtctttgtcggtaccttctacttattaggtccagtgccaccatgaacatcagcaggtatgccagaaattgatgaggcctgtgaaggaagcaaatgatgcaagcctggcgtatttgtcgtatttgtttaatttggtttactttagtttaggtttagttactta

SEQ ID NO: 53830 - DNA, 304 bp, Setaria italica
  Peptide Sequence Number=SeqID_119804
aactatttggctcatgaattttgcatcacacatgattggtctttttatgtaaacataattgccattgtcccttttttttgcaacgaatgttaatgttcatcttcacttacctggaagtcagttggcctttgatatcgaaatcccagtcattgagtcagcgcatgctccccctcagcctaagatagttgaccccccggttgcttttggcagtggaaaatcagaaggtgatgctggggacctacagtcctcagcaggagccttacacatacgaggccgaggaagatacaacaccaagcggcatctt

SEQ ID NO: 53831 - DNA, 243 bp, Setaria italica
  misc_feature (110)..(110): n is a, c, g, or t
  Peptide Sequence Number=SeqID_119805
ttgcatgagttccgtggtcactctggtgacgtactggatctgtcatggtctaacaataaggtcagttaaaagaaatgtgcttctccccctcatttgttaggttttgattncaattttttttgtcattttctttctgatgactgaaatttgctaccttgcagcatctattgtcagcatcaacagacaaaactgttcgcttgtgggaacttggatctgcaaactgtgtcactgttttcatcacag

SEQ ID NO: 53832 - DNA, 334 bp, Setaria italica
  misc_feature (27)..(27): n is a, c, g, or t
  Peptide Sequence Number=SeqID_119806
ctgactttagattaaggctttgactgntccaggtcaatgatgttcgcttgcggagtgccggtgaggcttctcagaggagtactagggaagactgggctgaatggatgaggcatttcagtattgcacttctcaaagagtcaccatctccagctttacgcacttgtgcaaggctagctcagcttcaggtgaattttttctttggatatatgccactcatattatgagtatttctgacacaaattgtccagcctctgttggtcgcgagttgtttgctgcgggttttgctaagttagactaggggaccccaaaaatagaagtagaaatacttacccaa

SEQ ID NO: 53833 - DNA, 329 bp, Setaria italica
  Peptide Sequence Number=SeqID_119807
gtattgatggtatgaaaatcgtaaattctctccaagagcatgtgcaagacagcagagtgcctctgcagcatctttccgcagatcatcattgtttccgtccaggacaagctttagatgatgcactaaagctgaaacatgagtaccaacctgcaccttcggtataagcttagttaaagtaacaatggcacgccgcctgatatcaaccagctccactttaaacaaacgaacaagcactggagcaaccaagtgcatgtgctcatccaaatttccgccaaaaaacttcaagtgtgttgttaatattgttacgggaactaattaagtaaaattaa

SEQ ID NO: 53834 - DNA, 253 bp, Setaria italica
  Peptide Sequence Number=SeqID_119808
gagagatagatatgcttgtttttcaaagccttccgaggatacgaagtatcaccattcttggaggccttctgaggatatggatgagcagcttttcgctttggtcgtggaggtgggacatgttcgctggttccatttttctgaaccttcaaaaagtatttctgtgcatggctccttatctacaacaccaaaatgaagtgccatatgaaaatggttcaacgatagagtcaattgataatgaacagataggaactta

SEQ ID NO: 53835 - DNA, 417 bp, Setaria italica
  Peptide Sequence Number=SeqID_119809
aaggtaggtttactaccaagtactcaatggccataactccggccattttgaaccacgaatggtaagatctacaggcaacttatgcatacaagtcctcaatgatacgttcctgaacaacgacaagagatgaagctaaaattaggtccaatgtgatcaacatcggaggtatagcctgttgagaacacttaccacgctgcatcaggatcatcatactctccacagattggagagtttgcttcagatctttcttcatagcagctgttatctgttggctttctgaaaattgctatacccactctattcactctatcctttactttgttgaccattttccagcacattgacctagttagagcagacattgctagaacaatgcaaaaacaaagataattcttaggcacaaaatttataaatttc

SEQ ID NO: 53836 - DNA, 411 bp, Setaria italica
  Peptide Sequence Number=SeqID_119810
aggaactgcaagtaggagactaaaaaaataaagtctaacacagatcccagtgagagagaattcgaaaaatgaggccagagaaagatctccacaagttcagaaaggcagattgaacaatataaaacgactgcacagccttaccctccatatacagctttcatatccataacatttctaacagccgaccaatcaacacccaaaccattcatgtatgaattgctcacgactcgcttccaatgttcatagtccacttgaaaatcttctggggcaggtttcccgtatactccagcctcagaacttttcagccaataaggtggtttctccagtctcaatggccataaactaccggaccaatttttagaaaccaacgaaattaggttaaagtaattacttaactaaggtactaaacta

SEQ ID NO: 53837 - DNA, 228 bp, Setaria italica
  Peptide Sequence Number=SeqID_119811
cctttttttttcttccacggggttttagtgtcagagtggtggtcgatgacaatgatcttgccacaatcattagcttaggcttcaacttcatttggtcgccatgacgtcttttgcacaaacagcaagccttctttatcctgggaataagacatccggacctcccagtggagtgatttgcacaaacagcaagccttctttatcctgggaataagacatccggacctccca

SEQ ID NO: 53838 - DNA, 339 bp, Setaria italica
  misc_feature (297)..(339): n is a, c, g, or t
  Peptide Sequence Number=SeqID_119812
gtttcatacacgtagactgtcttgacataaagagaactgtagtatagtggttgtgtaagttgatggtgcgtattcagcagtttggtttatagacaacagaggaggattagtcagtgggttagataggcaacatatctttatcttttctttaaatcagttaggtctattcttttgctaggaaagaaagtttgtaatatagtcaaccagacggctcaaaacaggtttgagggaacgcagaaatatatgcgcgctcgctgtaactttacctgtgataattattgtaactcgttttgaacnnnnnnnnnnnnnnnnnnnnnnnnnnnnnnnnnnnnnnnnnnn

SEQ ID NO: 53839 - DNA, 225 bp, Setaria italica
  misc_feature (182)..(182): n is a, c, g, or t
  misc_feature (218)..(218): n is a, c, g, or t
  Peptide Sequence Number=SeqID_119813
tgaatggcacatctgaagcttttcttcatgctgttgcaaatgaaaaccagcttaagcagtcaaatgatatgctgcttcttttctcggtgatttacataattctgaatgttgttctgattaaatctgctggagctcttgggttaattgctgctaattccatcagccttgactgtctgtaaagntatgttgctacgaatcacatattctgcaatgtttancaaaact

SEQ ID NO: 53840 - DNA, 125 bp, Setaria italica
  Peptide Sequence Number=SeqID_119814
tccattcgtgttcaacatctggtttgtgcgccagctcggcgcagatgacggcgcggtgtcggaagcagcgcttgcgtttggggatcctcgtgatgtgaagttatttttacagtttgatagtggaa

SEQ ID NO: 53841 - DNA, 265 bp, Setaria italica
  Peptide Sequence Number=SeqID_119815
ctgaaactattatgtaaatatctgctaccccttcatttttgcaaacattatgtcttcctgtggtgggaaatactcagcctgcacttccattacctaatgccaaagaagtttaatcagttaaaataataattttgaatggtagccaaaatattgatcatattaccagttctgctatgaaattattggatactcccgaaaggaattcgatcaagcatagcatacaacttattcttcccatcatacgacaagcctacctcttcatgga

SEQ ID NO: 53842 - DNA, 377 bp, Setaria italica
  Peptide Sequence Number=SeqID_119816
atatcaaaattcctagcttaggcagatacacatcattttcctatatactgtcaatactggaacagttccttgtgcattctgtctagcgcccccattttttaataaggccaggtatctcaacaccgttaggccctattttgttgcgagatataaaattcagtatgtgtgatgcaaattcttcgggtacatcttcctgtatggcatgcccagtgtgccgaaccaccaccatttgaaactttccttgcatctgaccaattgttaaagctctgtccagtctgtcggtgccagctaataacaggatcttttgcactggacaagattaagaactttgttcttgtaaagtacctttcttatttaccttatttcctttttcctta

SEQ ID NO: 53843 - DNA, 445 bp, Setaria italica
  Peptide Sequence Number=SeqID_119817
aaattcagtatgtgtgatgcaaattcttcgggtacatcttcctgtatggcatgcccagtgtgccgaaccaccaccatttgaaactttccttgcatctgaccaattgttaaagctctgcaaaatgcattaaccaatacattgcacaattaatccttcataattgatcatggagttataggaggtgtttcacatttcagaatagtactaactatgacggcaataggactgcacacatccaataaaagcagcattttagaacacgacaaatgatttacaataggtttggcttcaatgaaagctgaatcttggtagtggattagcaccatccaatttgcaattcaatggctctagcaacaaaccctgtccagtctgtcggtgccagctaataacaggatcttttgcactggacaagataagaacttgtctgaaagccttcataccatcc

SEQ ID NO: 53844 - DNA, 327 bp, Setaria italica
  Peptide Sequence Number=SeqID_119818
ggcggccatcagggacgttcaggaggcttgctccacgatgttcctcacctggaacctcttgatggccaagtgctgccccaaggacaaggccatcaagaggttccaggtgaggaacatcgtggagcaggcggccatcagggacgttcaggaggcttcgcgtccatgatgggtacgtccttcccaagctgtacgccaaggtgcaccacctgcgtctcatgcgccatcccacgctcacatcgtccgcgtccgatcccgtgaggaagcgccgtgaccgcaagcccccggaacgcttcaggcgcagggaggataggccctgctggtgggcaa

SEQ ID NO: 53845 - DNA, 382 bp, Setaria italica
  misc_feature (345)..(345): n is a, c, g, or t
  Peptide Sequence Number=SeqID_119819
taattaaattttactaattttaaagttttaagttcaacataacgtctcagcttactccgaagtgaggtttagttaagtgctctggtctgctactcacctatatttttgtttaagtagccatctagatgtcgctaacagaattatttatctacgttcagaaaaatctttagatctgaagaagagaaaggaagagctctaaagttgaataaagaacgtcgtcttgcccaggagaggaagcaaaacatcttgaacgagcaatacggatagaaccttcctgctgcctggagttttgtatagtcgaactatttaccagattgttgagtgttgtgtatatgccggtactgntgcattgagtgagtgtattgcccggtatgataggcta

SEQ ID NO: 53846 - DNA, 416 bp, Setaria italica
  Peptide Sequence Number=SeqID_119820
atatgcaagcattgaagccaaatatctggtctagtctgtaatctctctatggaaggctgggggcagaggtgctgacaagaaaaatcttaatgatcagagagacttgttccaacgaatctcagattttattaaggtctaggtttatttcattttctattcttgaatcattcaatttcagactagaccagatcttaattctctttcttcagagtggtgagtgccctgaagaatcacttaggatttcaggcaagaatggcattttaagagttacatcatggcgtgaatcaatacagttgaactatttgaggcggtttcttggacgaggattcctgaagcatgcacaggacaatgatttgctgcatgatatctttgatatcaaaattgatcaggttaaaaatatgtcaaccaccaaaaag

SEQ ID NO: 53847 - DNA, 258 bp, Setaria italica
  misc_feature (169)..(169): n is a, c, g, or t
  Peptide Sequence Number=SeqID_119821
aaaatctttagatctgaagaagagaaaggaagagctctaaagttgaataaagaacgtcgtcttgcccaggtaagcatatgttgcttctgtcatacttatgatggtgaaacagattattacctgttgaaattttatctaatttgaactgtgcaggagaggaagcaaaacntcttgaacgagcaatacggatagaaccttcctgctgcctggagttttgtatagtcgaactatttaccagattgttgagtgttgtgtata

SEQ ID NO: 53848 - DNA, 231 bp, Setaria italica
  Peptide Sequence Number=SeqID_119822
cccggtattgataggcattacactcactcaatgcatcagtaccggcaattacactaggtgctggaagtagttcgcacgaaataatggatgagtcacatccgcagcttttgagaatcctacaaacttggcccgatgcaccaaagatgatctctgcacttgattgcctagctgttgtaacatttgtcagtgcaatgatcttgctgaaacccagctatctttagaaagccatcg

SEQ ID NO: 53849 - DNA, 418 bp, Setaria italica
  Peptide Sequence Number=SeqID_119823
gggccagacattccttgtaaagaaaagaaacagggaaaaataactcagacctgctgtacgacagcatcacggtaaaaacgatacaaattcaatgacgtactaactcggtcaagctgcaagcagtaaatcctaccatagctgccatatttgagaataagttagtggaaatgttttgcaaaagaaagacagcataaactgtgatggctaaagttttgccaaatttgagaaagcatacaccgttacaatgtgaacatcatctgcagctagaacaggcttgttgtttgcttcagttttagacatcatcatctcaaacttcggtattttgacaatcccaccagcagaaactgacagaaggatgataagaaacttagcacacaactaacagaaaaacaagacatttgtttggaacttaatacat

SEQ ID NO: 53850 - DNA, 261 bp, Setaria italica
  Peptide Sequence Number=SeqID_119824
cggtgcccaaaccaccttgcatctgattgcccagcattctttgtcacctcaattactagatagactgcttgttcaaccaagcaaataaggctccacttgtcgagatgactaaaactagaaagggacctgcagtcaacatggtacagtttttcttactacatataagttgataacaaaatagcatgataccaaatattttcctttggtttaaaaatcaagagccagatttctcacctgaaatccacagcaagtgcaccaaaa

SEQ ID NO: 53851 - DNA, 392 bp, Setaria italica
  Peptide Sequence Number=SeqID_119825
gtactatcgtctgaatcataggctctcgtgttctcagtctcagacatagactttggcatggcgttcagatggttgcctggctactgaaaggtggggtagacattatggtaagcatctccgtcacagaagccatggcgcttaccgctgctttaaggacatcctgtgaacacccgggcttcacaatgcttttcaccttctccaagtactcctgcagttgtttgattcttcccatgtagtctcgatcttcaacacatagtgaaataggctttgtctcagcacctggtccttcaaactgaagtggcccagggtttcggtagatgtcttccatcaagaaactggaagaattttgtcgcaacaactcgttattgctttttccttttctaagttcgtac

SEQ ID NO: 53852 - DNA, 295 bp, Setaria italica
  Peptide Sequence Number=SeqID_119826
ttttttttaaataacgaacaaaaaaacaatagttaatagacaaattttaataccttaatcacttaataatagtgtaaccagttgtattacgcacaaattattcctgttctgactcatctcaattaacacttgagctgaaaaaacacccaaaaacagagctgatattgagcaggggatctaacaagatggtggtttcagataaacagatgatacagtcagaatcaaaatatgtctgagactgagaacacgagagcctatgattcagacgatagactttggcatggcgttcagatgg

SEQ ID NO: 53853 - DNA, 294 bp, Setaria italica
  Peptide Sequence Number=SeqID_119827
caccacatttccacttgttcactggactctttagatttgtcacagtggccatgtagccattcaaaccagctgctaggatgtgatagcacacatgcccaagaacataagcataatcacagtcgaatttggaaggcagggcaccccttgcttggtagccaaaaaagtggcatattgcattgaacttctttcctttgtaagtgccttccttaaggcgtttgtccatttattagaaagcagcttcttctccatcctgaatctgatgaatctgctcaactttctcagattgagactgag

SEQ ID NO: 53854 - DNA, 253 bp, Setaria italica
  Peptide Sequence Number=SeqID_119828
ctggcagtaggaccacgagaccaccgttttacagtcatcatagacgtaataggagcagcaccacatttccacttgttcactggactctttagatttgtcacagtggccatgtagccattcaaattggcaagcctgctgtccacatggccagtgtcgacttgaaaggaaaagcatacgagttgttgcgacaaaattcttccagtttcttgatggaagacatctaccgaaaccctgggccacttcagtttgaagg

SEQ ID NO: 53855 - DNA, 180 bp, Setaria italica
  Peptide Sequence Number=SeqID_119829
gcccaagaacataagcataatcaacagtcgaatttggaaggcagggcaccccttgcttggtagccaaaaaaagtggcatattgcattgaacttctttcctttgtaagtgccttccttaacggcgttttgttcatttcattcttctaacttaatttgttgtcttagtaagtctttcttcta

SEQ ID NO: 53856 - DNA, 399 bp, Setaria italica
  Peptide Sequence Number=SeqID_119830
ttgttagttctttttgttaatttgtttgttaaaactttgggttccttaacttaaaggttgttctaactatttaacttattaccacaagaaccagccgcaaggggttcaaagcaggagctctgaagaaaggaatggaatgtgactatgcaaggcaaagcgaatacatagccatatttgatgctgatttccaacctgaaccggactttctgctccgaactgtcccattccttgtgaacaatccggaagttgcccttgttcaagctcggtggtccttcgaattttgcagtgaatgacaccacaagccctgttgacaagggtacagaagatgtttttcgattaccacttcaaagttgaacaagaagcaggatcagcaacctttgccttcttcagtttcaatgg

SEQ ID NO: 53857 - DNA, 321 bp, Setaria italica
  Peptide Sequence Number=SeqID_119831
aagggagatgaaggatgtagcacagtgctgcatggaccgtgatgatattccagtatcagtgcggcgaatagctgaagttgttgcagaacatatgggtggtcctgtgatagatgcaaatgaaatgtttactaggtggttgggcaaaagcattgagcagaggacatcacatcagacaagtctgctgccaattggccgcattgagataggtttatcccgtcatcgtgccctgcttttcaagatccttgctgatagtgttggtattccctatcattatccatctttatgatgctaaaagcgtcatcttcaacaccagtgtaatga

SEQ ID NO: 53858 - DNA, 423 bp, Setaria italica
  misc_feature (415)..(415): n is a, c, g, or t
  Peptide Sequence Number=SeqID_119832
cgagggcgaatcagctttgaatgtgttgctgttcattcaactctccatcttccttatgatcataagatgtatggccagaaccttactgttcagaatttcttcaatgcatcagttcctgtttctgtgcaagcaacttcccctatacatttgttgtgagcaagttcttgcagcctggagcctatgatctagttggttacatcgtgtatgagattgatcagcacccttaccagaatgtattctacaatggcacaatcgaggtcgttgaggctggaggcttactcagtgttgagtctgttttccttaatacaacccttaggaaattacgacaacttacttaggtactacttacggaattagtagggacaataataggaccaaggttacaagacaagactactacaaaagaaaaacaaanaagaccca

SEQ ID NO: 53859 - DNA, 321 bp, Setaria italica
  Peptide Sequence Number=SeqID_119833
ttccttatgatcataagatgtatggccagaaccttactgttcagaatttcttcaatgcatcagttcctgtttctgtgcaagcaacttcccctatacatttgttgtgagcaagttcttgcagcctggagcctatgatctagttggttacatcgtgtatgagattgatcagcacccttaccagaatgtattctacaatggcacaatcgaggtcgttgaggctggaggcttactcagtgttgagtctgttttccttatcacccttggaatcgcacttctttggtcttctttcggtatttgttgggtctattattggtcctaggt

SEQ ID NO: 53860 - DNA, 334 bp, Setaria italica
  misc_feature (286)..(286): n is a, c, g, or t
  Peptide Sequence Number=SeqID_119834
ttgttaggtttcgttttagttaggttctttggttaggttcttttacttctagttgtttgagtctgttttccttatcacccttggaatcgcacttcttggtctcttcggattgtgggcatatggccaggttcagcagctctcaaagaaaacaaagaaggccccccaaggtggagcttggaactggaacaactgatgccaacatggatgagtggctggagggcacttccttcgcacagagaagcaaatccaagaagaagcagacctgagtgaggctcactagtttaancatttgaggatctagaatgaggaaattgagggtagccctttcacaatc

SEQ ID NO: 53861 - DNA, 254 bp, Setaria italica
  Peptide Sequence Number=SeqID_119835
cgcacgcaaacacacgagcccctcccgatccgagatctgggccgggccagccatggcgattagggtttggctccccgccctcctcctcgccttcctcctcgccgcctcccccttcacccaagttgctagagctcagtcggaggaagatgctgctacagctgaggttgttgaaggggctgatttaggaattgtgggtgatgatactcaggtttccagtgatgaacctttgagtcctgctcctggtgtggagacag

SEQ ID NO: 53862 - DNA, 261 bp, Setaria italica
  Peptide Sequence Number=SeqID_119836
aaccgaacaaacgaacaaaaacaaacaaagaagaacccctaaccgaaaataaccgaaaagaaataactaagggaaccggaaccaagaccaataggacgaattaagggtttggctccccgccctcctcctcgccttcctcctcgccgcctcccccttcacccaagttgctagagctcagtcggaggaagatgctgctacagctgaggttgttgaaggggctgatttaggaattgtgggtgatgatactcaggtttccagtga

SEQ ID NO: 53863 - DNA, 184 bp, Setaria italica
  Peptide Sequence Number=SeqID_119837
catctgactggtgtttcttaaccgggtttggacggctgatcggttggcgaaaaggggacttccccatccggagtcctgtcccttctgtgatcaagctgaggagacaatacatcatttgtccaaacccggttaagaaacaccagtcagatgaagaacttgcaacgcgggggagcccagcttttcc

SEQ ID NO: 53864 - DNA, 295 bp, Setaria italica
  Peptide Sequence Number=SeqID_119838
atttaaatggaaaaattagcaacaggacactgatccttagatgtaggacattgaaatgcattttctatgctgtaggaaggttgtcagttctgtgagcacggagggtggcctctggtgcatggcgggggcctccaagctccaggaactcatgtccaggttgtccaggtcgctgcctcttggagcttaagctctgaagggctgctggttgtctgttttgctattccgtggtgcgaccgtgaagttttaggttttactagtaaagtagtagtaagggtaagtaagtttaaattaagaa

SEQ ID NO: 53865 - DNA, 329 bp, Setaria italica
  Peptide Sequence Number=SeqID_119839
cgcgcacctggatgatatctacaaggacttcaacaactacaagttccgtgtccccgtgtctggcgccatcatcctggatgacacctatgagaggtgcctgcttgttaagggatggaaagctggggccagctggagctttcctcgtggaaagaggaataaagatgaggaagaccatacttgtgctgttagagaagtcctggaagaaactgggtgtgatgtttctacgctactaaatttggatgatttcactgatttccttctttgtttgaggtgcaaacacagtatctctcttaacaccagttatgatatagagccgaactctttgttgt

SEQ ID NO: 53866 - DNA, 352 bp, Setaria italica
  Peptide Sequence Number=SeqID_119840
aaaggtactagtagaaccataaccaggcaatttccaatgagaattatgcgtgccctaatgcatatgatactgttatcattttttttttgcgaaacatatgatactgttatctggaatgcaagcacataactaacctaccatgtcataatgcttaatgcatatgatgaatgtatactgggatattttgcctggaatgtatttgaattccttggtttcttacccaggtcagctgtgaggagggcctcgccttcatagttgggacctgccaacactgttccagatggtgaaatgatgacactccctccacaacaacaacagattccggggatggctcttcctctaggctaccaaa

SEQ ID NO: 53867 - DNA, 501 bp, Setaria italica
  misc_feature (433)..(433): n is a, c, g, or t
  Peptide Sequence Number=SeqID_119841
ttgggttaggttatttagttccttttcttgtcgggttgtaacggtctacttgtcttgtactagtctacgtaagtctattccccctttctaagggtctaattattgttgttctactagtaagtccttgtcctaactttgtttacgtcaatcaacagtgggagcacaatatatctgaacacctttagcatacatggcggtcctgagaagtggcattctgttttcccagcaaatgagggcaccgatttttccaagaggagtatcatagacaggtattgtagatccatctccaaacccccaaaatactcgttccagtgcggtaggcatgagcttacggtgcttccctaggtatttttcccaggggatcaaaggtgagcactgtattgtaaagtgtatatcctgacctttcaaccacccctatcaccaaaaaaccttntattttccagctaatgcagctaagcggatacttcggggccaggcacatctatggctgatgcatgatac

SEQ ID NO: 53868 - DNA, 496 bp, Setaria italica
  misc_feature (161)..(161): n is a, c, g, or t
  Peptide Sequence Number=SeqID_119842
ttctagttttttttttttttttgtacttttaagccagagcttaggataagatccaccgtcctgaacataacagtttattcgcaaacgtacaacagaaagcccacaattattgtgatgcaatggccacttgcaatttgttgtattaggcgattaaagatgtntggtcattaggtcttcgaaacgtcatccctctttccagcaaaagtcttctctgcgtcggaagcgaaggagacagcagattttggatcggtattcaccaccaaactcagcacctctggtcgcgagtagtggcccaccacgtcgaaatcaaacttggctcgaacgatctctccaaggtccaggtcagctgtgaggagggcctcgccttcatagttgggacctgccaacactgttccagatggtgaaaatagaatagaacaactaccctaccaacaaacaaaacaaacaagaattaccgggaataggactacttacctactaagataacaaatagtaa

SEQ ID NO: 53869 - DNA, 206 bp, Setaria italica
  Peptide Sequence Number=SeqID_119843
ccgtcctgaacataacagtttattcgcaaacgtacaacagaaagcccacaattattgtgatgcaatggccacttgcaatttgttgtattaggcgattaaagatgtgtggtcattaggtcttcgaaacgtcatcccttcctttcccattcgtctcgtccctcctccggccgcagcgcagcagccgcctccagaaattcccaatcccc

SEQ ID NO: 53870 - DNA, 455 bp, Setaria italica
  Peptide Sequence Number=SeqID_119844
cactgctgacagcacgaagcatcccccttcaagggcaatatgtgtcacagaagcctttagcatacatggcggtcctgagaagtggcattctgttttcccagcaaatgagggcaccgatttttccaagaggagtatcatagacaggtattgtagatccatctccaaacccccaaaatactcgttccagtgcggtaggcatgagcttacggtgcttccctaggtattttcccaggggatcaaaggtgagcactgtattgtaaagtgtatatcctgacctttcaaccacccctatcaccaaaaaaccttatattttccagctaatgcagctaagcgggatacttcggggccaggcacatctatggctgatgcatgatacttccgaaagtcttcctttcccttggcagtgcgatgccaacaacgagtccaaaggtacgccccatgaggatagccaccaa

SEQ ID NO: 53871 - DNA, 211 bp, Setaria italica
  Peptide Sequence Number=SeqID_119845
acgtgtcagtatcaagcattatgtcaaagtggcttggagaagcagagaaatatgtgaaggccattttctctttggctagtaaaatatctcctgcagtaatatttgttgatgaggtgtgcgtgcaaatgggtgttcactgttttattccgtttgagactttgagcgtgttgtgcatttactgttacatttgtgactttttctttaacaggtt

SEQ ID NO: 53872 - DNA, 336 bp, Setaria italica
  misc_feature (121)..(121): n is a, c, g, or t
  Peptide Sequence Number=SeqID_119846
aacatatctctgcgccacagcctactgatgtggcacaatcagctggcaccgaagctgcagatgctatttcgagtgtgtcggacagtgttatccctgtcttccggcagcaagcagagcaacngttaagctcttctagtctgtctgcagctgacttactagccaaagcactggcaaaggcagttggatacactgacataaagaaaagatcattgctctcttctatggaggattacactacattacatcttcaaactggcaggcctatgtggtcaccggggtttgcctttacatctgcaagcttctcttctggcataaaccttttcaatatagtaaaag

SEQ ID NO: 53873 - DNA, 300 bp, Setaria italica
  Peptide Sequence Number=SeqID_119847
gtcatgcttctattgagcccagatacaagcacagtgtgagcaggttagaaagggagtcaggggttaagtttgaacatatctctgcgccacagcctactgatgtggcacaatcagctggcaccgaagctgcagatgctatttcgagtgtgtcggacagtgttatccctgtcttccggcagcaagcagagcaactgttaagctcttctagtctgtctgcagctgacttactagccaaagacaactaggacaaaaggacaagttaggaataacaactagaacaataaaagaaaaagaatacaa

SEQ ID NO: 53874 - DNA, 399 bp, Setaria italica
  Peptide Sequence Number=SeqID_119848
tattattagggtaacttaccttaggttcgttgttctaaggtattttcgtttgttaaaaggtaacttcttaaaattttgtaagttcttttgtaaatttccgttgttcctttgattgaagctgatgagatgcttaatatgggcttcgttgatgacgtagagctcattcttggcaaggttgaagatgttactagagtacaaacactactgttcagtgctactctgcctgattgggttaataagctctccatgaggttcctgaaaggtgacaggaagacagttgatcttgtcggcaatgagaaactgaaggctagtgcatctgtcaagcatcttgctcttccttgcaacaaggcagcaagggcacaagttattccggacattatccgatgctatagccatgga

SEQ ID NO: 53875 - DNA, 243 bp, Setaria italica
  Peptide Sequence Number=SeqID_119849
ggagtcaggggttaagtttgaacatatctctgcgccacagcctactgatgtggcacaatcagctggcaccgaagctgcagatgctatttcgagtgtgtcggacaggtaaagtaattccatggccattttgggataaacatgttttcattggtttgtgttactaaccgtgtggatgggtgctgtgtagtgttatccctgtcttccggcagcaagcagagcaactgttaagctcttctagtctgt

SEQ ID NO: 53876 - DNA, 233 bp, Setaria italica
  Peptide Sequence Number=SeqID_119850
tgttctgctctcttctagatattggcagttgtaattaataggaatttgttccttagggatacactgacataaagaaaagatcattgctctcttctatggaggattacactacattacatcttcaaactggcaggcctatgtggtcaccggggtttgcttttactatattgaaaaggtttatgccagaagagaagcttgcagatgtaaagggtgccaccctaacagttgatgga

SEQ ID NO: 53877 - DNA, 228 bp, Setaria italica
  Peptide Sequence Number=SeqID_119851
ccttgcaacaaggcagcaagatcaaagtccgcatgcacctgattggccagctctccatgaggttcctgaaaggtgacaggaagacagttgatcttgtcggcaatgagaaactgaaggctagtgcatctgtcaagcatcttgctcttccttgcaacaaggcagcaagggcacaagttattccggacattatccgatgctatagccatggaggccgaaccattatcttca

SEQ ID NO: 53878 - DNA, 168 bp, Setaria italica
  Peptide Sequence Number=SeqID_119852
aagaagacctacaagaagggaatacaaaacaaacgggtacaaagaaataggcctatctctattatgaccctcaaatgtccatactaatcatcaggataaccatattaagggtagatgctattacttttgcccaagtccatcttcagactaagacgagttgccaaaatc

SEQ ID NO: 53879 - DNA, 421 bp, Setaria italica
  Peptide Sequence Number=SeqID_119853
agaattggcttgtgttacttttcagagaacttgagaagcagggcatcactttgcccgagaggttcacagaagatgagttgcgcagattttatgtcgcagcaaatggtgacttttcaagtttactctcttcggttaagaagacaattcgttggagggagacttttcacatacttacattgcaagaacttgataggtggtctcacttagtcttttggcatggatttgacacaatgcttcggccttgtttagtaattcgtcttggacttgcatgtgctagtataccaccgcgtgatagacctcgtttcgggcaagcagtagaagatccaagaattaccgttttgctggattgccatgggatttctccattcaggtttccgatgcaaatgatgaggtcatttatcactgtagttcaagaaaacta

SEQ ID NO: 53880 - DNA, 344 bp, Setaria italica
  Peptide Sequence Number=SeqID_119854
agtaattcgtcttggacttgcatgtgctagtataccaccgcgtgatagacctcgtttcgggcaagcagtagtttctcaaattgaccacggtgttgtaaatttgaccaatgaagaagatccaagaattaccgttttgctggattgccatgggatttctccattcaggtttccgatgcaaatgatgaggtcatttatcactgtagttcaagaaaactacccaaatcgtctcgcggtattgtttgttgtccgccttcctccagttgtcagagttatttgtctactagtacgttttctttctaagttccttgtaagtccgttcttactaaagttcttagtaagtctta

SEQ ID NO: 53881 - DNA, 352 bp, Setaria italica
  misc_feature (43)..(43): n is a, c, g, or t
  Peptide Sequence Number=SeqID_119855
aaaacggaggccgctctcaatgaccatcgtacgaagggaatcnttaccggctagacttcaagttgcatagttctatagtcattttgaatagcatctatcttattgacaacagttttggatttttggctgtttttatccagaaccacctgagcgataagtttcttgtaaggcagatgctcatcacgcaagttcaagtgtgcaatatgccctactgtttcaaaaccagcgtataagctgtccataacttcgcaaactgatgtaagttgacttcacatatctaatgggctgcacaactaatggtgtggtaacatgttaaggcatcccttcctccacaaaaatccaattgcattgc

SEQ ID NO: 53882 - DNA, 427 bp, Setaria italica
  Peptide Sequence Number=SeqID_119856
tcagataagagccctggggagagcgatagctctggttctgtgtcgtcacattctgagccttacttcgatgatcaggaagtcaaacctgtttccagtatttcttccccaaatcatagtcattcaccttaagtttcttcaaggatgatgaccgatgatgagactcaagaagctggaacaacaaaatcattgaatgagaagctattgttggcaactatcttaaatgattcttctccacagcatggccagtcaccacagccagaggtgtgccagtcaccacagccagaggtatccccagttgtccaggattctgtaaagagtttgaatgagaaattgtccccaaaggtcagggatgattgattgtccaggattctgtaaagagttttgaattgtaaaaagttgttccgtctaaaggttctagggtattgta

SEQ ID NO: 53883 - DNA, 310 bp, Setaria italica
  Peptide Sequence Number=SeqID_119857
tttccgaatattcatcggactggggctggactatcttcatcactatcaccaaatgaagttttgtttcccttccaacgatggccagcaattttcattggcaggccctttatgccaagaccctgcttgcctgaagtagctttatcctgcagcaaatcacagaccatgcatatattaagaattcaggtacatttaattgttttaaagaacatgtctgttatgtaatcacgcacacaattatacaatgtaaataaatcaacatctaggtttgttcatcaagtgaaaatggacataatgtaatctctgcggagtg

SEQ ID NO: 53884 - DNA, 245 bp, Setaria italica
  Peptide Sequence Number=SeqID_119858
gtcaagaaactttgcaaaagaatacttcgtgaccttggttttggatttaatgtccgcgtgcaatactttatctgtattcttctctgtgtcaatcaattcaacagtagtggcaggttgttcctcattgtcatcttcttcaatttctgaatattcatcggattgggctgaactatcttcatcactatcaccaaatgaagaagatgacaatgaggaacaacctgccactactttatctgtattcttct

SEQ ID NO: 53885 - DNA, 193 bp, Setaria italica
  Peptide Sequence Number=SeqID_119859
cttcagtatgttgtcaaattgggtggtatcatatacccatttgtcacgaggatactctaggtgttggtgtagataatcctcgtgacaaatgggtatatgataccacccaattgtcacgaggattatctacaccaacacctagagtatcctgcttgttttcaccctaacatgaccctttaatgaccctagttta

SEQ ID NO: 53886 - DNA, 227 bp, Setaria italica
  Peptide Sequence Number=SeqID_119860
tgcctcatgctatgatgtatagaaggaggcaccttttcggaacatggaaaggagtgtttcctcctcatccgctccaaatgattgagaaagaccttggttttcagtcatctgccaatggatcctcaagtgccacaccatcgaggcctgaatctcaatccccacggccatccaatagcattactattgttaaattcctaaaattattttggtaagtctacgtactagta

SEQ ID NO: 53887 - DNA, 386 bp, Setaria italica
  Peptide Sequence Number=SeqID_119861
gttttctcttctgatactgacctcctggctaggttggcgtgttaatgcattccgtttttgcgtctgcgtctttccagagaacttggagtcaggctaataatggaggtagctttagagcaggactgcccccaggcttgtccaggtatgtagaggagagcttagaagtcatctctgaaacttcactgctgctttcttctgatcttccaagccctgcgttttgtacagacagcggtagtctggaattcaattgatcgattgggttgctaacacagttcacttcttctgagagttcttcaattgacgttgaaccattcaccagtaaaatccagaaaccaggtcgccattggtagactgtatactgactaaatgctggcgatgttcggcta

SEQ ID NO: 53888 - DNA, 332 bp, Setaria italica
  Peptide Sequence Number=SeqID_119862
gctgcaatcagtctctgacagtggtgcaagcaggtcctcatcagcatcatggaactgcgaagattccatccacagaggaggggagaatacttgatcaagagcatcatcagcgatacatgactttttttagggcaatctgcgaaaatgactgatgtgccagaccactgaccgggtcaagaaaattcatggcgctgataggatcatgtccattcagttcacttaacagaacaggacatgtgtttattggactgtctgcattgtagtaaatgtcactcgtgctctttgggaacttcatctgaggcgaagataaacctaatctttgctttcatcga

SEQ ID NO: 53889 - DNA, 254 bp, Setaria italica
  Peptide Sequence Number=SeqID_119863
taagctgaagcggatgtccttctcgagcctagtgaagaactgcttcaccttgcggagacgtcagaggcggaggatgccgagaaggctgtaggcggcgccctccctgacctcgccggtgacgaggtaggcaaggccctggaacgggatcgtcgacgccacgtccatgatgaagaacgtcgacaggtacctgcgcaagcagctcgcaacagcatcttgatcaaagcaaatactcgaattaattatttcttttttta

SEQ ID NO: 53890 - DNA, 461 bp, Setaria italica
  Peptide Sequence Number=SeqID_119864
tggttgacagatttccagtgctggacattgggaagcacaccactgaaggtgacccgtgagactgtcaatgtcttgcaagaatgttatcctgagaggttgggactagcaatcctttacaatcctcctaggatatttgaatcattctgtaaggtgagcacagccaactttcttctgtgaacttatgaaccagcatttcttctgtttttttgcctattatttcgtcctattattgtcataggtatgcgtataggagtgattgctactagcctaccatgattttgtgataaataggtccacactgattggattcagcaattatttattgcacctccattctctagttagatttgtttgtcaaatagttaaatagttttgttgtgtcatctatattcaaatgtaatcatcttcttcatctgtattccatgatgttttctacagtctctgcagttagctaaacctga

SEQ ID NO: 53891 - DNA, 334 bp, Setaria italica
  Peptide Sequence Number=SeqID_119865
tgtattagtctttgtctttgtaattctagtctagggtaaggtattacttcatggcgcggcctcggacgcctcgagtgaggcctccttctacagtggaaccgactctccgaaacatgaagatggtgaacacggcgccccaactcgacatacaattatctaactggagcgattgtcaggaccgatggctgcgccagtttacaagctggttagatcacgctgtcgggtctaggaggaatgtatatttgctgcccatgatattatagagaatatggaaagagagtctggaccatcaatggcgatgcactgcatgaatatcccaataagatggactcct

SEQ ID NO: 53892 - DNA, 479 bp, Setaria italica
  Peptide Sequence Number=SeqID_119866
cgtagttcttgtattgaggcctggcttagagaacactacctcagcaacaggcagatcaatatctagtttactctctggagaaagctattatgaaccacaccatcttctcttgatcttctgtcaggttcataatagctttctccagagagtaaactattatgaacctgacagaagatcaagagaagatggtgtggttgacagatttccagtgctggacattgggaagcacaccactgaaggtgacccgtgagactgtcaatgtcttgcaagaatgttatcctgagaggttgggactagcaatcctttacaatcctcctaggatatttgaatcattctggaagatagtgaagccattcctggaccacgagacccggaagaaggtgaagtttgtgtactccaacgacacggagagccagaagataatggcagaggtctttgacattgaggagctcgactctgcatagctgttgtactcaaat

SEQ ID NO: 53893 - DNA, 179 bp, Setaria italica
  Peptide Sequence Number=SeqID_119867
tgaaggtgacccgtgagactgtcaatgtcttgcaagaatgttatcctgagaggttgggactagcaatcctttacaatcctcctaggatatttgaatccagcaatggtggtacaactgagaaaggcttatccctagaagaacaccaagctccttgcgtagttcatttacttttcttgctg

SEQ ID NO: 53894 - DNA, 395 bp, Setaria italica
  Peptide Sequence Number=SeqID_119868
tctttagttcttattgtactattgtcttttcttgtttggtagtaacttggtattactggtcatcgtgagcagcccttccatgttgaggcctaccaccgtcgttcgcttaataatctgatacgaagatcaggtattgctgcgggtgatgtcctgatcatggctgatgctgatgagatccctagccctgagactgtgcagttgctcaagtggtgtgatggaataccaccagtcatgcaccttgagatgaagaactatatgtactcctttgaatttcctgtggacgacaacagctggagagcatcagcacatgtgttcactgagcgcacattatatcgtcactcccgtcagagcaacctaattctagctgatgcggctggcactgcagcttctgcttc

SEQ ID NO: 53895 - DNA, 386 bp, Setaria italica
  Peptide Sequence Number=SeqID_119869
gtcatgcttcatgttttgtattgttacctgattcctttggcttattttcttccttgtcttgtgaaatgcagattacattcagcttcggacatctgccacatcccccagcaagatagtgtttttggagcactctcctatgcttccaagagtttcactcatttctttctctgtcatagacgcaagaccacctcatggccagagacttgccccatccgtctgtaactagacgaaaagttttgcctttcaagtttctgataccgtttgttctggttctttctgtgtctgttattgctgtcacccagtatttccaaagtatctcctaccttctgcggccactgtgggacacaccacctacaccattcacccgcatcccacactattatgcc

SEQ ID NO: 53896 - DNA, 255 bp, Setaria italica
  Peptide Sequence Number=SeqID_119870
gacgggaggcggaggagcgggcggtgtagaggaagcggcaggtcgtccacggatgggagctttccgtcttgattacattcagcttcggacatctgccacatcccccagcaagatagtgtttttggagcactctcctatgcttccaagagtttcactcatttctttctctgtcatagacgcaagaccacctcatggccagagacttgccccatccgtctgtaactagacgaaaagttttgcctttcaagtttctga

SEQ ID NO: 53897 - DNA, 170 bp, Setaria italica
  Peptide Sequence Number=SeqID_119871
accgagcttcctaaaaagagagcccattgcacccagagaagaactaactggtgcctccatggtgccctgagttgaattcgtcatgccctgaaaagcatagcgaagtttccacttaatgctctttgcgcatccacaacaaatgcaaatccatgtggagtggaaggcaggaa

SEQ ID NO: 53898 - DNA, 417 bp, Setaria italica
  Peptide Sequence Number=SeqID_119872
cgtattgaaggtctttgcattgtgtccctagcacagctggataaggttcctcaatacgtggaagagcaccatctccgatttccatctgcttgacatccggcattcgcttcaagacgagcgtcttcaggtgaggaaagcacccagcagaaagaaccaaagtgcttgcactattcaccctgttaagacttaaataggtgagatttggcacgtgtggagcgagcacacccaatggatcttctccaagctgacaccagcttaacgctaaatatttgagatgttccccatgattgcgaaatatcggatacttcagtgtcccagaagcccactggccccttacaattaacctgtggagctttgtggaaatcggatcaagggcttggaggcaaagtgtctcattcacatctcttgcagagataa

SEQ ID NO: 53899 - DNA, 229 bp, Setaria italica
  Peptide Sequence Number=SeqID_119873
agagagcccattgcacccagagaagaactaactggtgcctccatggtgccctgagttgaattcgtcatgccctgtattattgcttcataatcatttgcagaaccaaacttttcttctttggcaatggagagtgccagatcccgcataatatcatgcatcttgcaagtgctaacccttccgagctcatcatagtccacaacttcaagcatattgcggtgaatcagttcca

SEQ ID NO: 53900 - DNA, 331 bp, Setaria italica
  Peptide Sequence Number=SeqID_119874
ttgaagaagggcagcagcatcgccaccagcgtggtgaacatgatgaggatggtgcggagcacgagcttgagcggcgccaccgccacggtggccggcggcgaggaagacgaccggaggcaggggacgcgcacgtagtaggtggcgttgatgaatttggcgtccggccaccggcacgccacgcagctttccagccgcgcgaagatgggctgcgcgaacacctgcaagcaatgcaattattcaattaatggaggcacaggattcagctggtgtacgtcgtcgtcgtcgttcttgatcgccggccggtggatattaagctgcaagcagagagatt

SEQ ID NO: 53901 - DNA, 261 bp, Setaria italica
  Peptide Sequence Number=SeqID_119875
tccactgggtggcatatttgaatatgatgcatgtcatccagaagggtcaggtatcggcttcaaagaggaggatacaccaaattttactggttcgttctactcgaagactaaggcaatggttgaggagttattgaaggagtatgagaacgtctgcaccctacgagtccggatgccaatatcttctgacctcagcaaccctcgaaactttgtgacaaagatcagccgttacaacaaggtggtgaaacaataccctaaacaaga

SEQ ID NO: 53902 - DNA, 249 bp, Setaria italica
  Peptide Sequence Number=SeqID_119876
gtagggaatcagaactcagaagacaggagagtgactgtgtgtaccttagctcaataggagtggcggccaaatttagaaccataagagtaacagcattgcaacggcttcccaacattgctacagcaacgccaccaagaataacagtggtcccacatattggaaagattccaatggtgactccaagggcagcagagaaggccagttgcttgggttccgctccccttctgatgacctgcagcacgggatcaa

SEQ ID NO: 53903 - DNA, 221 bp, Setaria italica
  Peptide Sequence Number=SeqID_119877
gggtctattgtcctactacttagtcttactaccgtcctttgtattcggcgtcctggggctcgaagggatgccgccaaacctatccgccaggatcttgaaacacgggaccgagacggtgtacaacacgcccagtacaaatggcgcggcaatcagccaacctagcatcgcatggactatgctcagcagcacatcctttgaggcattggtccggttgtaggtac

SEQ ID NO: 53904 - DNA, 242 bp, Setaria italica
  Peptide Sequence Number=SeqID_119878
tgtgaaggctgctgctcgttagccgttaggtgcagaaagtgtcggaaagtcaagcgtcaagggcatgacatgctctgttttcctattcccaactcgctctgtttcattgccacaagtagtaaccactaaccactatcattacggtcccaaaagttgggatcggtagccaagagaaagaaagaaaatgcaaaattcgaactacaaactaacaacggcttcagttctagtagctccacagtgcc

SEQ ID NO: 53905 - DNA, 296 bp, Setaria italica
  Peptide Sequence Number=SeqID_119879
ttttttagtttgtttaagttctttcttaattttttccttatttttcttttgttctttactttttagttctaaattcttgtttttccctaagtttgtcttctgcctcacttccaaatgtagtaaaccgtcacagtaccaaaatttggcttcggaccttcggagtccaaggaaaagaaaaaggcgaaaactgaactacagcgacctcggctctatgctctaatagctccagagcggcacatcggccacggcctcgtcgcagaacgccgcgactgtgcacggtggttccatgagcatcg

SEQ ID NO: 53906 - DNA, 425 bp, Setaria italica
  Peptide Sequence Number=SeqID_119880
ccagaaccggctggttagcttgccatcgactttgggctcactgacttctctgcatgaacttcgtattgcaaacaacaggcttgataacttacctattgaaataggatcactgaagcatctccaaattctgatagcaaataataataggataacttcattgccttcatctataggagattgtgaatctctcaccgagtatatatcacccaaatcttgaattcaggttgacttgtcatcaaatctcttaactgaactgccagaagcctttgggaagcttggttaattcttctaaggtttttgtctattcttaaggtaactaatggtcttacatccctgccttcgaccctattcaaaaagtgtgtgcagcttattacacttgatctccacggcacagaaataacgaatgatattcttcggcaggtgga

SEQ ID NO: 53907 - DNA, 414 bp, Setaria italica
  Peptide Sequence Number=SeqID_119881
ccgaggttgacttgtcatcaaatctcttaactgaactgccagaagcctttgggaagcttggtaatctcaaggttttgcatctaaggaacaatggtcttacatccctgccttcgaccctattcaaaaagtgtgtgcagcttattacacttgatctccacggcacagaaataacgaatgatattcttcggcaggtaccatttccttaagagtcatgtctgcccgtgtgtgtgtgcatgttattccttcacactttgttgtagtatgtattctttgttgccatcattaccctaaatgtgtaccttgtaccatcatttgtactggtggcatagtagctacttgcagtttttgtgtatttatctcaatttgacaagtatagcacttgtgtgtagaagaagaattttgctgcacctagtt

SEQ ID NO: 53908 - DNA, 246 bp, Setaria italica
  Peptide Sequence Number=SeqID_119882
tcagctgggaagggtctatcatgccttcaaaaattattaaacttgtctttaagccagaaccggtaggtcaaactcagccaattactcttgtcttgtgattcatagtaatctatgaatcatctgtgatgttgccggtagatataaagaatttctataagtaggttctcgaaaattagttttgctcatgattcttagtgttgctttaacttgccgactctgaagattgatattgacctagaatcaacc

SEQ ID NO: 53909 - DNA, 238 bp, Setaria italica
  Peptide Sequence Number=SeqID_119883
ggccgccgcgaccaccgcggagctgaagcgcctccttcaaccgctcacgaacgtccttccccgcggccagaggcttgtctgcaaaggaaaagtgcttcaggacgccgcgagtctgagctccatgcaggtggtgggcggatccaaggtcatgctcatcgcatcgcagggtctccatcagggggatggccccatcacaaagaatagcagcagttcggcaacaagtgtaacaagaaccttg

SEQ ID NO: 53910 - DNA, 173 bp, Setaria italica
  Peptide Sequence Number=SeqID_119884
ctgccaatgatatagatgatgagaacatcagctgggaaggtctatcatgccttcaaaaattattaaacttgtctttaagccagaaccggctggttagcttgccatcgacttttgggtcttctacttgtactttctttctttgttctttattttgtttaacttttttcgtttta

SEQ ID NO: 53911 - DNA, 259 bp, Setaria italica
  Peptide Sequence Number=SeqID_119885
ctccactcaaagcttgagctttcttttttcttgttttgttttattttcttggtaggagtaacaatagttcctggccttcctcatcctctctctatatcctaggagagagaaatccagaggcaaaagcttcaggatttgtgtaaattctagatccactaaccagaaaaccaaaagaaaaaaaaggaagagaagatgagtcacttcgccgccatgaaatattaacacaggaaactatttcattgaaatgacttcagcagtg

SEQ ID NO: 53912 - DNA, 364 bp, Setaria italica
  Peptide Sequence Number=SeqID_119886
tacgtgcgcgggaacatgatctgcgtcttcgagcggtacgccggcgacgtcgcgtggcgacactcagagagccccatcaccggcatggacataagggagtcgcggccgaaggtgacgctggtggcgcggatggtagcgtccgtcgccaactacgactacatcatggactgggagttccagatggacggcctcgtccgcatcaaggttgggctcagcggcatcctcatggtgaagggcacggcctactcgcacctaagcgaggccagcgagaacgaggacatgcacggcacgctcctctccgagaacgtcatcggcgtctattcctacgtattctacttacgttctacctttccgttccttacga

SEQ ID NO: 53913 - DNA, 104 bp, Setaria italica
  Peptide Sequence Number=SeqID_119887
gcttcgggctgcaggccatgccgctggtgccgctcaacgactgcccgcgccacgcgcagtacgtcgccggcgtaccgctcgaagacgcagatcatgttcccgcg

SEQ ID NO: 53914 - DNA, 265 bp, Setaria italica
  Peptide Sequence Number=SeqID_119888
gtgagcactcgtctcagaggcagagcggagaaaccaaaggggaaaagaagaggattttattttaaaattttcctcccttccaggcaacctgtttccctcccattttcgctaacgattggactcaaaaactgcaggtgcttggaagatggcgcagaggagttcttcctgaagcccgtcaagctcgccgacatgaagaagctcaagtctcatctcctgaaaaggaaggagcccaagatgtgccagccgcagatacagcctgagcccg

SEQ ID NO: 53915 - DNA, 392 bp, Setaria italica
  misc_feature (58)..(58): n is a, c, g, or t
  Peptide Sequence Number=SeqID_119889
aaaattacattaatcaaccagcatccaaatttcgatcatgttggtgccagcaggatcngaacctttatctgtaggcacatgcctagcctttgagaatctgctgctgtgcatagtctcatatgtcatgaacattaagaactcgagaaacaggcacttatctatgtcctcgttgttagcctggggatcattctccatttccctttgtgcccaatcaattatatttctagtagcatcatcaaaaacaaaagaatcttctctgagcttctcagcccacataagggctctcttcccaaacccttgcttgcagaaatgagaaagaaaaacattaagtgtgatagtgtttggttgaaaagccatcttaatcagcctgccagtcagtatcatagctcgat

SEQ ID NO: 53916 - DNA, 227 bp, Setaria italica
  misc_feature (61)..(61): n is a, c, g, or t
  Peptide Sequence Number=SeqID_119890
ttgtatttggtactgttacatgatgtacattcagatctttttactatacttaatgctaccngttggcagtactacacaaagatctgaaggggtgttgtatttggtactgttacatgatgtacattcacttgcaccaattgtcagtgttgtccttgtaattgcattatatccttgactatctctgaaacaataacaagcaatgcacctcccataacaactcctagagt

SEQ ID NO: 53917 - DNA, 375 bp, Setaria italica
  Peptide Sequence Number=SeqID_119891
taacagaaggttattcatcgaaacttaagatattttctggtcctttcatagttgcatgtattctaattcctctttcacatcagcaagcttcacatagaaatcttagcaaacaaaaagtaatgaggctcgttcatagggtggtttaggaaataggaagatacaaccttgtactcaggattatctcgcttgcgaagaagttccatgccaaatgccttctcatagaaatttatagcacgatcaagatctcccactcgaagcattacctggcacaaaggctcgggagtaggacctctttctataagctcaaatttgtaaccatcaggatcctcaataaaggcaattactgatttcccacctttgacaggacctggctcc

SEQ ID NO: 53918 - DNA, 405 bp, Setaria italica
  Peptide Sequence Number=SeqID_119892
ccaattataacagaagaacagtatacgataagaaccggttttagttaccaaccccttactaatcttttgctccacagaattgaacgggcgtcaccaaccaagtagtacagccggcatcaaggaaactccaacctcatttgtcaaagatttccgagtgcagacttcaattcccttcattcttcaggctcagtctattgaaagatgcgccatgcaccaacttcttcagcttctctgcatcagacttcgctcggtccaaagcctggatcagcgactcaaccctgcgcctcatcctagtatgcatgaatccttcagaacactgataaaggaaatagcaactcagaacttgaataattattaaataacagtttagtgtaaatgcaatatcaagagttaatacgacaatga

SEQ ID NO: 53919 - DNA, 270 bp, Setaria italica
  Peptide Sequence Number=SeqID_119893
aatccttcaaccttgtggagaatgttccctatgtattgtggtgtggccacacaatgtgcaagaactgtatccttggtcttcactgggctgttgtcaagttcccgtcccttcctctctgcttgtacatgatgaaacttcatcatcagaacaatctggattggatatgttgcattttgagggctgtgccttttctttttgcatcaaatgccatagctggaagcataaagaaaaggcacagccctcaaaatgcaacaatctggattggatatg

SEQ ID NO: 53920 - DNA, 234 bp, Setaria italica
  Peptide Sequence Number=SeqID_119894
gcatgagatgaacagtggcagctggataggaagggacgggaacttgacaacagcccagtgaagaccaaggatacagttcttgcacattgtgtggccacaccacaatacatagggaacattctccacaaggttgaaggattcccagcatattggacaatcaaggccttcctctctgcttgtacatgatgaaacttcatcatcagaacaatctggattggatatgttgcattttgg

SEQ ID NO: 53921 - DNA, 228 bp, Setaria italica
  Peptide Sequence Number=SeqID_119895
tttttttttttttttttcgttatcacaccatctttgttacgtgtatatatatacttcatataacaagatgaaacttaaccacaattatacatgcgtggagtccctaaattaaaagagaagaagagaagaacacactagtacatgaacaacacgccttaaccgagacgacgacacaggctttcagggtagtaaaactcaacaacattatgatacagagaggagcggacg

SEQ ID NO: 53922 - DNA, 445 bp, Setaria italica
  Peptide Sequence Number=SeqID_119896
gtgtaccagtacaccaagaagcgcgcgagtgggccgaagtgcccggtcaccgggaagaagatccaaggaattccacacctcagacctgctgagtacaagaggtccaggttgtcaaggaaccggaggactgtgaaccgtccgtatggtggtgttctgtctggtactgcagttagggagagaagatcgtgaagaaggtgttgaaaatccaaaagaccaaggacaaggcctccaagagctagtcacaattgcaataggcatttgccaccatgtttaattctcttcgaatttgtttcagtatgaaattttctcgtggtttctggaaatcctggttctagtgctagtatcagatcgatgtgagtgattgaattttgagcgaatccttttaacttttggaacttaagatcggtggaatgttttcgcttggctatgaggatgtcatataaaa

SEQ ID NO: 53923 - DNA, 230 bp, Setaria italica
  Peptide Sequence Number=SeqID_119897
ttttaacctccatgacaaagttattagcgttgtttttgacagaaattaagcagatgttcacttggtaatttgactgcgtgcagggctcaggtggttggatggccgccggtgcgctcgttccggaagaacatcatgtccgtgcagtccgagaagggcgccggcagcaaggacgccaccgacggcgacaagtcctcgccggcagccagcggcggcgccgcgttcgtgaaggt

SEQ ID NO: 53924 - DNA, 241 bp, Setaria italica
  Peptide Sequence Number=SeqID_119898
atctgtgctgtgttcttcgtcgtattgatgggttcggtggattcgtgcaggtgggaggctcgtgtaccagtacaccaagaagagggcgagcgggcccaagtgccccgttaccgggaagaagatccagggggtgagtggtgggggcagcttctaatctggttttggtttggttgtggattcgtgtagtctctgtgttcttgtaatgttatagttcgttaatcgttgctcctaggtactgcag

SEQ ID NO: 53925 - DNA, 242 bp, Setaria italica
  Peptide Sequence Number=SeqID_119899
tgccgggaagatgaagaggtccccaagccagagcagcgtcgtcaccgccgccgcccagcccgaccccgccgagaagccgcgcgcccccaaggctcaggtggttggatggccgccggtgcgctcgttccggaagaacatcatgtccgtgcagtccgagaagggcgccggcagctaaggtacgtcctaccgtacggtcgtactaagttccttcgtccggtctagtcctagtcggtcggtcgtct

SEQ ID NO: 53926 - DNA, 164 bp, Setaria italica
  Peptide Sequence Number=SeqID_119900
attccccacctcaggcctgctgagtacaagaggtccaggttgtccaggaaccgcagaactgtgaaccgtccctatggtggagtgctctcaggaactgcagaactgtgaaccgtccctatggtggagtgctctcaggaactgcagttagagaaaggatcatccgt

SEQ ID NO: 53927 - DNA, 168 bp, Setaria italica
  Peptide Sequence Number=SeqID_119901
attgcattggcattcgcatgtgtggtggtggtcaccatgtggtttcgccagtggtgcactccatgatttgcatcctcggaagctgtgggtctcaagggatgaacggcatgaacgagagcaagctggtggatctgctcaacggctccgagtacgtgccaacctacgagg

SEQ ID NO: 53928 - DNA, 116 bp, Setaria italica
  Peptide Sequence Number=SeqID_119902
ggagaaatgcaagaacagaagctgaacacatggcccttggtgcgaggccaatggagaaatgcaagaacagaagctgaacacatgggtcaccagatgcaagaaccaaagtctctgta

SEQ ID NO: 53929 - DNA, 272 bp, Setaria italica
  misc_feature (91)..(91): n is a, c, g, or t
  Peptide Sequence Number=SeqID_119903
cagggactttcagaaggtctttgtgctcagactcaacatgctctgcattggtgtcaatggccatctgttcgccttcattgccttccagtancttttttatctcaaggagctttctgttactggattcagaatgaatgactgctttgcccaatcttcggttggctgaattcttcacgtatccatcttgcaccattttgtcaattaactttctgaccgtattctggctggcttccccatccagctttccttgaagtttggctaattgtacaaca

SEQ ID NO: 53930 - DNA, 258 bp, Setaria italica
  Peptide Sequence Number=SeqID_119904
ccgccggaccaacggcggcgcgccgcagcagctcctctcctctccaccgctgccttggaccccccccccccccccctcctccgcagcagcttcctggagattccggggttggggacttggatcggcttcagcatgtttttgcaggacactgtgtgtgaagtgtgcggaaatattggttacaaacatcttctggtatgctgcagagactgcaagtgttctgctgtgcacctatactgtttggacaaagttattctttga

SEQ ID NO: 53931 - DNA, 412 bp, Setaria italica
  Peptide Sequence Number=SeqID_119905
catttgagtcaaggatatcacaacgacggttatatcgtcatggaaatgccgcctcacccgcggtcgattttcttgaggtctgaatatctcatctccctcttcttggctgcttcttgcatcgcgactttcactagctttcgagcgattccattacggggactattctggacaaggtcaactgcttcctgattgctgagatgctcccatagcccatcagaagcaaatataacaaactgatcgttgggctgtattctgtgttcagtaatttgaggatcagagctaagaattggcttctggaaggtttctcgaagccgaaacttgctatgaagaggttctctgttaaactccggtctctttagatatacatctccgattagattctttgtagtattcttggtattgtagtaccctt

SEQ ID NO: 53932 - DNA, 327 bp, Setaria italica
  Peptide Sequence Number=SeqID_119906
cactagctttcgagcgattccattacggggactattctggacaaggtcaactgcttcctgattgctgagatgctcccatagcccatcagaagcaaatataacaaactgatcgttgggctgtattctgtgttcagtaatttgaggatcagagctaagaattggcttctggaaggtttctcgaagccgaaacttgctatgaagaggttctctgttaaactccggtctctttagatatacatctccgatagatcttgtagattcttggtattgtagtaccctttctactacgtcctaaactatttgttgtttttagtaacctactaattt

SEQ ID NO: 53933 - DNA, 234 bp, Setaria italica
  Peptide Sequence Number=SeqID_119907
gcgagggttgcacagctaaagaaggagcttgctgaaactgatgtatagtgactttcaaagctgttgcgtctatctctgctggcaatgatgaatttatcggatccatgattgccgaagcaattgacaaagtgggccctgatggtgtcctttcaattgagtcttcatcatcttttgagactactgttgatgttgaagaaggaatggagattgaccgtggatatatttctccactaa

SEQ ID NO: 53934 - DNA, 315 bp, Setaria italica
  misc_feature (227)..(315): n is a, c, g, or t
  Peptide Sequence Number=SeqID_119908
agtggctgagccggcggagggcgcccttagtgtgtaaattttaacgttcttgaggccgctatttagatggttcagatcagttaaaagggtagaactttggtttgaaattttggttcaggtccactgaaaggtgtagtgtaggtttgccattttgcggatgaagggagaagggtaattttactttgatctgaagccatgagaagcaaaaaaaaaaaaaaaaaaaaaannnnnnnnnnnnnnnnnnnnnnnnnnnnnnnnnnnnnnnnnnnnnnnnnnnnnnnnnnnnnnnnnnnnnnnnnnnnnnnnnnnnnnnnn

SEQ ID NO: 53935 - DNA, 212 bp, Setaria italica
  Peptide Sequence Number=SeqID_119909
cctatcccctcgtgtgccttgctttcccctcgttgcgtgtctcagacagtcccaaagttcagattcatcactgctttctgaaacaagtacaacctcctcttcttctgcggtttcatttaaatacttttcagcatactcggcacatttttttatcacatgagcagattcatccacctcatctgctgtgctcgagtccagttttctacgaacga

SEQ ID NO: 53936 - DNA, 252 bp, Setaria italica
  misc_feature (143)..(143): n is a, c, g, or t
  Peptide Sequence Number=SeqID_119910
cgctgctgccggggtgctctgcggctggctgccgctggtgtaggggtctagggttttgtctccgccaggcggagggcgcattggttggcgcgcgcatggggatggtgcccaacgggctcctgccgaatgcgtccgccggggtnacccggcggctcgaccccgagcgctgggcggtcgcggagggccgcactgcggagctgatcgcccgcatccagcccaacgcgcactctgagggccggcggctggccgtgt

SEQ ID NO: 53937 - DNA, 290 bp, Setaria italica
  Peptide Sequence Number=SeqID_119911
tgtgagcaagggcaacagaagctatgttgatctttctgcccagctgatgtctcatgcagcaagtgtacagagaatgttactgccatggagacaccagccagaggtgaaaactgaaaagcgcatggtacaagttgcttacatcagtgctttatcaggacctaccatgccagtcaacgagaacatgttgaaagcctacagcaatgtgttaaaaaagcgcttggcactaggtgggagactgacatgtagggcctagctagacaatttttttaaacaaagggttgccagatcag

SEQ ID NO: 53938 - DNA, 340 bp, Setaria italica
  Peptide Sequence Number=SeqID_119912
acggttcacttcccagttcccactgatcatggatccgaataacttctctacaacactgatcttttgtcacgaaataaacgctaccagtacaaacactccgccctcccgcgccgtcgcgcgcctactacagctggatggtgacgcccctggctcccatgcccgacagccgctgctccgccgagccctccctctccatgccgccgccccagaggctgaaggcgccgacggtgtaggagaagaggagccagagcggggtgaaggccatccaggccttgatgttcatgcggcccagcacggagcccgccaggagcaccagcgtgatggcggcgaactcgaactg

SEQ ID NO: 53939 - DNA, 251 bp, Setaria italica
  Peptide Sequence Number=SeqID_119913
gctaccagtacaaacactccgccctcccgcgccgtcgcgcgcctactacagctggatggtgacgcccctggctcccatgcccgacagccgctgctccgccgagccctccctctccatgccgccgccgccgccgccgaccctggccgcgtcgtgcctcgtggcgtcgaacttctccccgtcgccccagagcgcgtaggcctcctcccgtgcgcggcgtcgtcgccgatcatgagctgctcgtcgggcatccg

SEQ ID NO: 53940 - DNA, 449 bp, Setaria italica
  Peptide Sequence Number=SeqID_119914
ctgttgtggacaaacggccgaagaatttaaacgctgtcacagtttttggcccaggatgggtgcgctggttagtcctccttcaccttcctgcaccatcgccccttcaacactgtaagtaataatgaaactattacattcacctaattttttttgaatgtcgcatggctaggctgctttggagaataattcatacacctttggcttacaaatacctaacaatgtcattcatatgtttgggtaatggctacgaggtattagatggaaggaaaaaatttaatattgacagctataacatacgcactaccagagcggaggaaactcctgatggccgaaaaccgtcagcaaagggccgaaaaccgtcaggaatcttggaatcgtattcccatgcaggaatcttactcctgacggtccaccgtcagtaacttgccgacagaagaccaattcctgac

SEQ ID NO: 53941 - DNA, 257 bp, Setaria italica
  Peptide Sequence Number=SeqID_119915
ttttggcccaggatgggtgcgctggtagtcctccttcaccttcctgcaccatcgccccttcaacacagagcggaggaaactcctgatggccgaaaaccgtcagcaaagggccgaaaaccgtcaggaatcttggaatcgtattcccatgcaggaatcttactcctgacggtccaccgtcagtaacttgccgacagaagaccaattccttatcaatcgatgagatggtaaaccacacttgctgcaaggtggccatagct

SEQ ID NO: 53942 - DNA, 168 bp, Setaria italica
  Peptide Sequence Number=SeqID_119916
ccatagctataaatttgctgcgcattggatctcaacaaaagaccatagtttattttccttttacagtatggttactaagcaattgcaccagtgctgcaatttttaattggctctgataaacaaataaaggtcaatttttcctgttgagaaacacagtaaaaacaggtc

SEQ ID NO: 53943 - DNA, 235 bp, Setaria italica
  Peptide Sequence Number=SeqID_119917
tcatcagggaccaacttgatgctatagaagaaggcatcaaacgatcctggatctctgtcttgtcaggaacaagggctgtattctatgatatgcgggactcgcttcttttctccttgtaccgagacagcgttgaaggagcacgcatgcagatatttatccctacaattgatcaagttcttgatcaagtatgtgatttgattgtcgatgttttaagagaccaagttgtgctcagtaa

SEQ ID NO: 53944 - DNA, 309 bp, Setaria italica
  misc_feature (59)..(59): n is a, c, g, or t
  misc_feature (92)..(92): n is a, c, g, or t
  Peptide Sequence Number=SeqID_119918
gtttccctgacggcatacctaattatgataatgtcaccactgatgtcatttgtcatggngaaaagagtgtcatcaaagaaggtcacaagagnttcccaagtggacattcttcatggcttttgctggtctaggttttcttgcgtggtacttggctggcaaacttaaagcttttgatcgcaaaggtcatattgcaaaactgtgcctagtatttctgcctctccttgttgcgtctcttgttgcagtttctcgggttgatgattactggcaatacaactaggacaaagaatagtagtttagacaaggaaagaa

SEQ ID NO: 53945 - DNA, 244 bp, Setaria italica
  Peptide Sequence Number=SeqID_119919
ggatgctgcagaccgtgtgtacatgcatgtcctcctcttcctcccgatccagagtcggatatgttagaacatgacgaagattctccaatggttcctcaatccatggatgtagtcacggaaaaggatagcacgcccactccatctgagtctcctggggtccctgactacgtaaggaacccttcaaagtacacacgttacactctggatataccagagtctaatgatgcctctaacaggagagctt

SEQ ID NO: 53946 - DNA, 428 bp, Setaria italica
  Peptide Sequence Number=SeqID_119920
ttcggttaattaaaaactagtaagtaattatttctttacgtattgtcttgttctaactaagttttaactattattacccagtatcagattcctccatggcttgttgaatggatacctcctaaagggggctactttatcggaaacctccagccagctcatatggacttccggttcttttcactgggaaatttatggtcaatagttagcagcttggcaacgactcaacaatcccatgctattttagatcttattgaatctaagtggtctgatttagtggcagagatgccactaaagatatgttatccggctcttgagaaccaggaatggaaaatcatcactggcagtgaccctaaaaacacgccttggtcgtaccacaatggagggtcctggccaacattatgtggcagctcacagtggcatgtatcaag

SEQ ID NO: 53947 - DNA, 270 bp, Setaria italica
  Peptide Sequence Number=SeqID_119921
ttcttagtaattctttctagttttttttgggtaaaattcattaaattgttaggactttcgattgtaaaaattaaagcaaaagatcctttgaacagctcatatcccacaagaatctatatttgcttgatgtaaattcactctatgtagaagttaccaatctacctggtgtggattgcgatcaattattgactgttctttgaatttaagcttacaggagtactggccacttccattgatacgcattgtgccatagtgatcacaataaatttt

SEQ ID NO: 53948 - DNA, 234 bp, Setaria italica
  Peptide Sequence Number=SeqID_119922
ttgatttgaacaatttaaaaatcagaccctactgcttgttcaaatatacatttaagtatttacacagctgcagaatagactgatgatgacattagcctaccctgaaattcaacccagggaaacaaggtaagcaacagctaaattttttttcctcgaacgacgcaggagaactgcatgtcatttcattaagatggaagaaagcgaacaaagggtccagaaagcaacagcaaatat

SEQ ID NO: 53949 - DNA, 229 bp, Setaria italica
  misc_feature (23)..(23): n is a, c, g, or t
  Peptide Sequence Number=SeqID_119923
ggttcagaactgaaccgcatagntccaagcatatgtagctcctggctcttcgcccaagaaacgccattggagaccataaacagcaagcctacaattttgcatatgtagttcacaatttctttataaaaaaagttcacaattttgcataagcggatgaaacaaacgctgaagggtattgacatagattagtaaattccttccttactaacggtcttgtatttattgttta

SEQ ID NO: 53950 - DNA, 246 bp, Setaria italica
  Peptide Sequence Number=SeqID_119924
tgattgggtactccttcgaccggctcttaattctcttgagaatcatcggccgcagctgcttccaatccaccctcgaagaagagtgccgcctctggttcagaactgaaccgcatagctccaagcatatgtagctcctggctcttcgcccaagaaacgccattggagaccataaacagcaagcaggtcggggaggtcgatctggcgaaccgcgccaggcccctagcagaggagccgaggccaaggccg

SEQ ID NO: 53951 - DNA, 443 bp, Setaria italica
  Peptide Sequence Number=SeqID_119925
aaccacaatagatgtattccaacatgaaaccacaacgaatattagttaatgcttgcatggagagcatgaatccgatcatgccgaaaggccactgcggatgctctactatgcatgcagttagctttacaccatgtttatcagtcaattcagaaactcgtacctcgtcgtcatacattaaatctgttatccaaccttcttccttgagtctggcaacctggtagactcctgaattaatgaattcctcaatttcttctcttttcttcccatgtgtagaagatatcgtgtccagccagtttccataaatattgtcaagcagtgttgccagcatctccctaacttcatttgacatgctcttgcgtgcaagctgatccccggcacttttatatttaccaattcgttgaatttctggttctattccaactttctcaagaacacctctgaga

SEQ ID NO: 53952 - DNA, 420 bp, Setaria italica
  misc_feature (382)..(382): n is a, c, g, or t
  Peptide Sequence Number=SeqID_119926
ttccttctcataaagcttttgaaggcagaacttccctgtaattccaggtaagcagttttaaaccaggaataaatacaaaacaattgctcaattcgctacctaaattctgaatagactagagctaatccaattccaaagttgtgacgaactacaggtggacaaccttagaatttgacgtagatgacttatcactagcaaggcggataaccttagaacacaaaataataagggtcacctgtaacaactccaatcgatcctgtaagagtaagtttctcagcaacaattactggtgcagccattgccatgtagtaccccccattgcagcaacgtcagacatcgaagcaaccacaggcttggagttggccagaagtcgaatttcccncacatcaggtcagaagcaagagcatcacaccagggctg

SEQ ID NO: 53953 - DNA, 376 bp, Setaria italica
  misc_feature (374)..(374): n is a, c, g, or t
  Peptide Sequence Number=SeqID_119927
tttggttccgttctttccttagttactttcgttaccttttgttagttcttaacttagttcttcctattcttgtattcaacactcattgatcgtgacatggctgctttatcacgaaacaaagcgtaagcattttgcgctgacttttcgaaaagctctgcctcatccggccttaaaggtcgttgatcagcagcattaagctcagcatatcgacccttggatagaatttctttattaaagtcaatcctctcaataaagcttttgaaggcagaacttccctgtaacaactccaatcgatcctgtaagagtaagtttctcagcaacaattactggtgcagccattgccatgtagtaccccccaacttgcagcaacggtnag

SEQ ID NO: 53954 - DNA, 171 bp, Setaria italica
  Peptide Sequence Number=SeqID_119928
ctttggatcaggttgtggttcgggctgtggtgttggtttgggccgtggctttgggtcgatcaccctgccacaggcaaggtcaggaacacttgcagcaagtgtgaggactagggccaagaggagagcggacctcatcgcgcttagtcttgtcttacttggtaattcgttagt

SEQ ID NO: 53955 - DNA, 425 bp, Setaria italica
  Peptide Sequence Number=SeqID_119929
aacaaataacaagaaccaaataagaccgtaaatactaattagacaataccaagcaacaaaaatgctctgtcattgatgtaataaatgaaattgtcccaacatgtccatcaatcctgaaattctttgcagtgtctgtagggtgatcttgaagtctctccacacctttataactttgccgcactttgtccaacatctctgcataaggaactagtttcttcacattccaaacattaccatcgaatggcataaactcaataaatctcacattgatgggcttgtgtctcgtcagttcaacaaaattacagatctcatcatcattcatgccacgcatgataacacaattgaccttcacagggttatatccaagttctacagcagcatctattgattccatgacctttgagtgccctttacgccttgtcatg

SEQ ID NO: 53956 - DNA, 489 bp, Setaria italica
  Peptide Sequence Number=SeqID_119930
attaacgaactatccatgaaacttcaattggctggacaaggaaagatgagaccctgtacaaggctggtccttttggaactgccaaggctttgagaacaaatccaactgtaatccctgatgaatctgttaatcccaggttggccaagatactggaagaagttgctgtgaaaaaggaacttatcgttgcattggcaaactccaacgtgagggagatgcttgaagtttggtttaccaatatcaaacgagttggtattccaaacttcctagttgtggcattggatgacaatatagaaagcttctgcaaatctaaaggtgttccagtctaccggcgtgatcctgatgaaggaattgacaatattgcaaaaactggagggaaccatgccgtttctggacttaagtttcgtgttttaagggagttcttgcagctcggatatagtattctcctctctgacattgatattattttcctgaggaacccattcgatcacc

SEQ ID NO: 53957 - DNA, 201 bp, Setaria italica
  Peptide Sequence Number=SeqID_119931
agatactggaagaagttgctgtgaaaaaggaacttatcgttgcattggcaaactccaacgtgagggagatgcttgaagtttggtttaccaatatcaaacgagttggtattccaaacttcctagttgtggcattggatgacaatattgtcaattccttcatcaggatcacgccggtagactggaacacctttagattttgca

SEQ ID NO: 53958 - DNA, 359 bp, Setaria italica
  Peptide Sequence Number=SeqID_119932
ttgttggttccagaagatcacaagttagttgattactggaagtatgtctgctttgagttaccaactcaggtaagaatctggttcagtaaaatgctttattccgtttgagctacttatgtttaaaagcttttatgtctcttggtgggatgcgaattatgatggtggtaaatgtggaggtaacacatgcatcaccgttggagtaaaatttgttgtctgattttcctcataatcctctttccttgagtgctcaaaagaactgagaactttgaaagaagaaaaattattatttaactcttctctttctttatggaatggcagagaacctggctttgttacaaaaaaaagagatagcaaaacat

SEQ ID NO: 53959 - DNA, 344 bp, Setaria italica
  Peptide Sequence Number=SeqID_119933
ccaccattgcttagtgctgctgagaagcggtcaaacaagtaccgtcgcctgccgctgaatcagctggtacccccgccgcgttccccttataatctcctgcaggagaggtacgcacatgacccctggaaggtcattataatatgcatgctcctcaacttatcaaaaggagatcaggtcaagaagaaattgaagggcttcttcagacgctatcctgatgcacagactgcatgtacagctgatcctgaaaagatggcagagtatctagcacctctgggggttgccaacgccaaaaagctccgtaatgtaggtccattcctctgaaacataatccttagacaatttct

SEQ ID NO: 53960 - DNA, 451 bp, Setaria italica
  Peptide Sequence Number=SeqID_119934
tcttccgacagtcttccaaactcttctcagcacatcacgaaccagcaagcggatatagtaaccgactacgacacaggaagctaccgcagcggctacaacaaaaaagaaaggacagtactacatagatgataacatcccagatatggggtcagggcacacccgccgtagcacttaatctccttcagcccatgcgcgaagtagaggaaggtcgggtcagtggctccatccttgtagtaggcgaacaccaggcttccatcatcatgcatgctctcgccaacaaagctgcaaaaaaacagacaaacatttactacgagctattcacgggatttagtagtgaagcaaaatgacagataggagcactacaaaaatcagtcatagaacaataatgaagacagcacaacctatcatccagcacaagcaacacgaatttaagaacacaatggcgaataag

SEQ ID NO: 53961 - DNA, 175 bp, Setaria italica
  Peptide Sequence Number=SeqID_119935
tctatgtagtactgtcccagatatggggtcagggcacacccgcctagcacttaatctccttcagcccatgcgcgaagtagaggaagcctggtgttcgcctactacaaggatggagccactgacccgaccttcctctacttcgcgcatgggctgaaggagattaagtgctaggcgg

SEQ ID NO: 53962 - DNA, 228 bp, Setaria italica
  Peptide Sequence Number=SeqID_119936
tatagtaaccgactacgacacaggaagctaccgcatcggctacaacaaaaaagaaaggacagtactacatagatgataacatcccagatatgggggtcagggcacacccgcctagcacttaatctccttcagcccatgcgcgaagtagaggaaggtcgggtcagtggctccatccttgtagtaggcgaacaccaggcttccatcatcatgcatgctctcgccaacaag

SEQ ID NO: 53963 - DNA, 250 bp, Setaria italica
  misc_feature (236)..(236): n is a, c, g, or t
  Peptide Sequence Number=SeqID_119937
tggagggtggaagagaggagcagctgaggacaggtgaaacagccgttggtttcgaagagaaaggcgacagccggtactgtggagtgagggagatgggtgtcacctatcacaccgccaagcaaccgcgctaggagttcctcaaactcatgcatgataaagccactctgcaccccaaaaccgtgcccaacatgaaactggtgaactgggatgttggaatggttcatgtccaccccaanacagctgcggactg

SEQ ID NO: 53964 - DNA, 380 bp, Setaria italica
  Peptide Sequence Number=SeqID_119938
aaagaaataatactgcaaaataccatactgaaaaaactaaatagcaggtaccaattgaatcccccacatacaaattgtcactcagattgtatttaactatatacagagagactttgatctggaaatgacctgaagattaagagctttcctcttaagatctttaggcaggagcggatgcgcaggatatttatcttctaaatactgtttaacccaataacagggcacttgttagtgactagtaatggatgcagtggcatgtcaaaagaacatatttgcttgaccgcacaatgaaaacatgctgaagcaacatttgaactcaccaatgagatggcaagagagtcggaaacgactatgtccccatctactagtgcaggaatata

SEQ ID NO: 53965 - DNA, 467 bp, Setaria italica
  misc_feature (437)..(437): n is a, c, g, or t
  Peptide Sequence Number=SeqID_119939
tcactgcacattaatcttatctagatgcaagtaagatgacaggttcacaaaagttgggtgaaggagtaagtcaatcaagaagttttaaatgtagtttggacaaaatttctatgtatgatcgaggtggggattcagctttgaggatcgtttcaaagtgattggtcaagggaaagtaacatgcataatatataaatttaggtcagccaaaacaaaccaattggacatcatctccagtagcatatttactctcgcatccatccaaaagcttttcaatggctctgaatcccttgtcaatataatgctgaactatttgaaggccctgatcaaagctcatgctgccctcatgcaaaccataacagcatagccttgaagaggttgaatgcttgaacaaactatgttagctatctgcaacaagagacagacttgttgaaaaaggngatgcagtacgtaggtgctaaaatgacaat

SEQ ID NO: 53966 - DNA, 195 bp, Setaria italica
  Peptide Sequence Number=SeqID_119940
caaaatcgggtacttcaacatatcaatttggaaacgattatgccggcatggatctgtggtgctagaaacacatcaccctctgaatcccttgtcaatataatgctgaactatttgaaggccctgatcaaagctcatgctgccctcatgcaaaccaataacagcatagccttgaagaggttgaatgcttgaacaact

SEQ ID NO: 53967 - DNA, 188 bp, Setaria italica
  Peptide Sequence Number=SeqID_119941
cctcctcaccgcgcggccctcccgcgacgcggcctccctcggcttcgtcggcgaggtgacgcgcgtcgacccctccgtgctccacccaatcatcgcggcgggccacatcccggtcatcgctaccgtgtccgcgttgatgttgtaagcctgcccggcctcgtccgcggccacggtagcgacgtccacct

SEQ ID NO: 53968 - DNA, 179 bp, Setaria italica
  Peptide Sequence Number=SeqID_119942
aggggggcgaccgctgtcggcctctgtggcaaggacgcgcgcctcatcaccgcgcgcccgtcacccaacgccgcggccctcggattcgtcggcgaggtcgcgcgcgtcgacgccaccgttctccaccccatcattgccgcggtgtcagcattgatgttgtaggctgcccagtctcgtaa

SEQ ID NO: 53969 - DNA, 333 bp, Setaria italica
  misc_feature (241)..(241): n is a, c, g, or t
  Peptide Sequence Number=SeqID_119943
taacttaaaacttaaaccttaaaaaaagttagtaactaattcccttccttaccctttttgtagtcaaaaatgaagcaggaatttgagtactggtatccctttgatatccgggtttctggtaaggatcttatccagaaccacctgacgttctgcatttacaaccatacagcaattctaccagaacaccattggccccgtggcttccgttgcaatgggcatcttatgctcaattctgagaagntgtccaagtcgacagggaatttccgtactcttaaggaggccattcaagaattctcatctgatgccactaggtttgcacttgctgatgctggt

SEQ ID NO: 53970 - DNA, 325 bp, Setaria italica
  Peptide Sequence Number=SeqID_119944
ttttaaggtaactaaaggaataagtagaattaggaagaacggtacaattcaataacgaccgacatgaacccgttctatgatgctttttgtccggtggcagatgagaaagctgaagaaaatgggcaaggttgttaaagatatgaggtatacaatctactctccattggatggccaaccttgtgctgatcatgatcgagcatcaggtgaaggtgtgcagccacaggaatatgtgttgattaaaatggaggtgattcccaccttttccccacctcagttgaaggcattgggaggggaagaaagtttacttggctgcagctacactgag

SEQ ID NO: 53971 - DNA, 243 bp, Setaria italica
  misc_feature (228)..(228): n is a, c, g, or t
  Peptide Sequence Number=SeqID_119945
taaaaataaaacttaaaagaaacaaaataaaataaacaaaaaataactaaataacaaagggtacccaacaagaagaccaacatgcttggctgagatatctggaaatgatctgattggtttgccgttgaagtctcctcttgcctttaatgaaatcatatatgcgcttcctatgatgaccatcctaacagataaagggctggcattgtgactagtgttccaagtgattcnccagatcgattttca

SEQ ID NO: 53972 - DNA, 367 bp, Setaria italica
  Peptide Sequence Number=SeqID_119946
atggcatgtgcgatatcaggagaaatcccacgtctgctttcaatctttcgagagcagctctttctatgtccatcagaagatgtgaacaatgtcataagcaaatctgtatcttgtcaaggatgaactcaatcaaaaaaagaactcaaactaaaacagttggaaaacagaccagggaaagacacataaagaggttcgcaagtaggaaaataagctgcaggtgcaggaattcttttggtgattgtctaaaatatggaattttcattcctttccagcttgacaaacgcagataaaatattaatgttgctcaatattcagccattagattctgaatatatcagtttaccatcccaggtattgtaataattca

SEQ ID NO: 53973 - DNA, 438 bp, Setaria italica
  misc_feature (399)..(399): n is a, c, g, or t
  Peptide Sequence Number=SeqID_119947
ttagttagtaacttactttctaatttctcatttgatgttgaatgtgttctgaccaatgcacctgatatttcactttgaagatgaagaaaggcagtcgctatgtgttgcctaataatgtctcgagtagtctgaagctagagactcctatgccaggaatcactgtctcaaagagtatctgccaaaatactaggccttatgaccctgccccatatgccttctgtagcaagttgaagcaaataacaatacaccagccaagaaagcactgtgatctatgccaaaatttccatattaataagctaagtgtataatgcacatttagccgtatggtctctaaattgattctaggcagaatataaaaagctgatttaatgttatgccttcgtcttcaatcagctttanattctgcctagaatcatttagcctatggtctctaattga

SEQ ID NO: 53974 - DNA, 380 bp, Setaria italica
  Peptide Sequence Number=SeqID_119948
ggcaggtcatgattattcaggatgacaggatccaagtacagctgacacttcgatggcagaattgcataagaactaagctcaacttactttgagaacaaagcttgtgcaagttcaatgagacgtctttctgaatcaggaaatattattaaataagcacggaatgtctttgaaatgtcgccgattgaagcctgtgtagactcattctggagattcaagagacaatcctctaacttctcaagtagattagattttaggttgtccactggaaagttcaattgtttaaggagaactacagcttctgctctctcttcaataggttcagaatctgagtataacttcgcctgaagatgttgtataactaatccattgcctcctcagat

SEQ ID NO: 53975 - DNA, 275 bp, Setaria italica
  Peptide Sequence Number=SeqID_119949
ttaggttatttgttcttagttctttgttgttacttctttcttaatttctcatttgatgttgaatgtgttctgaccaatgcacctgatatttcactttgaagatgaagaaaggcagtcgctatgtgttgcctaataatgtctcgagtagtctccaacgaaaaagctggtagcgcagcctctggaataacttcatcaattgcagatgcatcctcccacaaggaccgtagcattgccagagagagtctgaagaaaagaattccatcaacagatctgct

SEQ ID NO: 53976 - DNA, 465 bp, Setaria italica
  misc_feature (229)..(229): n is a, c, g, or t
  misc_feature (325)..(325): n is a, c, g, or t
  Peptide Sequence Number=SeqID_119950
ttgggggtttgtttgttttcggttttcttaagtttgttacttcctagtattttactattactagttcgacaacatgctacatgccctaaaccatatgcagttgcgcacctcactctaaagagtgtcaattggatgttaccaatctgtgcatagctactgcatatttgggtttgctctttaattttgctagtttgcatttgtgagcttatccaatatggggggctcaagngggattgggtcaagacatctctcatgtgcagcattgttcacctctttgagtaaaaagctaatagctgcttcatcatccacaaactccttaaggganctcttgagaaattccatatccaactgaatctgctgaaatccacttctgttgaaagtttgaagacggacaaattcttgcaagcttttcaggcagagcttgaggacagtagatattacagattcctgtgtgtattcaacttt

SEQ ID NO: 53977 - DNA, 369 bp, Setaria italica
  Peptide Sequence Number=SeqID_119951
agggggtagttagttacggttacaaagtagtaactaccaagaatttaacaatacagtcgacaacatgctacatgccctaaaccatatgcagttgcgcacctcactctaaagagtgtcaattggatgttaccaatctgtgcatagctactgcatatttgggttttgctctttaatttttgctagttttgcatttgtgagcttatccaatatggggggctcaagagggattgggtcaagacatctctcatgtgcagcattgttcacctctttgagtaaaaagctaatagctgcttcatcatccacaaactccttaagggagctcttgagaaattccatatccaactgaatctgctgaaatccattctgttg

SEQ ID NO: 53978 - DNA, 237 bp, Setaria italica
  Peptide Sequence Number=SeqID_119952
tgttactaatgtgcaggtcaaacctccaacgaaaagctggtagcgcagcctctggaataacttcatcaatttgcagatgcatcctcccacaaggaccgtagcattgccagcagatctgttgatggaattcttttcttcagactctctctgactgtttcatatcggctttatgcaaaagaaaagaaatattgagtgtgtatgagacttgtacaaaaaaagtgtatatgtgatgaattt

SEQ ID NO: 53979 - DNA, 244 bp, Setaria italica
  Peptide Sequence Number=SeqID_119953
gccgcgcacgagcacgcgtcaaattttttgccaagctatactacgagatgcgttgcactagaaagtagtaggaacaaatcactgtacagcagaggaatgcaggatgcattgctaaattacccagaagaagccccagtccttgcaggcctcgtggagccgcgccatggtccacgacctctgctcttcgccgccgccgaggccgccgaggtcgatcaccggaatctccatcggtcccgtcatcgcc

SEQ ID NO: 53980 - DNA, 242 bp, Setaria italica
  Peptide Sequence Number=SeqID_119954
ggggttgatctaaatcctaacaacttgaggggtgaaagaaatacacacatgagaggcaatgagttaggctactcactactcatacacgtatcttataatgaagagaacatttacatgtctctgccacaaaatactgcaaatatgtacataattagcagaaaaatggtcactcttcaacagagtatacacttgtagagcagaaatgcataaggcctccagtctgtttgcttgtgcaagcttaa

SEQ ID NO: 53981 - DNA, 475 bp, Setaria italica
  Peptide Sequence Number=SeqID_119955
aactaagagtaataatgatccaaagatagcagtgtcaaattaaatagatagaataagcattaagaaactcaagcagggagaaaacgtctcctttgctttgtcttaagacaggggactaccaaacccattttgagatgtactcacacaacctgagagcaacctggtatgagcctggatgggcagcctctcaactggaggctctaccacaaggttttttacaggtagaaaaagcatatcattgtaaacttaatttttctgtgcaagcactacatgcaacacaaacagaaccgaatctaacactggtggaccagattacactactatatcttccacagaactaattcgcaaaaaactttataaaaggtcagctcagaagaagctaagcacataccatgacaatatcctgaggatccacctgcagatcattgcaaagttgagatactccctccaccatgatcatatcagcatcaggttc

SEQ ID NO: 53982 - DNA, 115 bp, Setaria italica
  Peptide Sequence Number=SeqID_119956
gcattttcgataagttcacgatcgcaggttcagagccaccacttcccaggctaagttacgtgttctccacctgcgatcgtgaacttatcgttaaccagagtcccaaactcttgat

SEQ ID NO: 53983 - DNA, 388 bp, Setaria italica
  Peptide Sequence Number=SeqID_119957
tttggttttaactttttccttacgtaaattttcttctaatttgtaattcttacccctaattgactgcagtccaccaatgaattcctggcgagtaaattcacacattgtggcggctttcatgtgccacgatatgacaagcatgacaatatcctgaggatccacctgcagatcattgcaaagttgagatactccctccaccatgatcatatcagcatcaggttcttgatctattgaaaatgtcttcaaggtgccgagtattgaccgcagaaatctgaggctggctatagaagaagtcaaaagctccttccaagtgccaatcactagctttcagtgcctgaagggcaaccttctcactggcgccagttatggtcatgaactgctgcacctt

SEQ ID NO: 53984 - DNA, 267 bp, Setaria italica
  Peptide Sequence Number=SeqID_119958
actgccacattccaatagcagtctccagtgagagagacttttgaccctttcccttgcccaagtgaacgcgaagttgtagatctcacgaaacttattgtcatcttttagctcagctcgtaatgatggtaactcgccaggaattcattggtggactgcagtcaattggggtagattccaattgactgcagtccaccaatgaattcctggcgagtaaattcacacattgtggcggctttcatgtgccacgatattgtactaagcattgac

SEQ ID NO: 53985 - DNA, 226 bp, Setaria italica
  Peptide Sequence Number=SeqID_119959
tagcaactgccacattccaattagcagtctccagtgagagagacttttgaccttttcccttgcccaagtgaacgcgaagttgtagatctcacgaaacttattgtcatcttttagctcagctcgtaatgatggtaactttccacgaaatttctcaattgaatctaccccaattgagaaatttcgtggaaacttattgtcatcttttagctcaagctcgttaattgat

SEQ ID NO: 53986 - DNA, 263 bp, Setaria italica
  Peptide Sequence Number=SeqID_119960
cgctcggtggagaggccctgcgggctgcatcggaggttctcgaacacctcctcgatcgggatgttctcgagatcgacggcctccttgagcacggcgtccagattggccgccttgtcctccatcctagctccccggccggcggccgcctctcccctcctctcccggagggcagcagagagagcggctcggttactctgccaagtgcggcgagtctttgtcttggtcttggtctaggtctaggtcttaccgcacctcactacacc

SEQ ID NO: 53987 - DNA, 232 bp, Setaria italica
  Peptide Sequence Number=SeqID_119961
taaaggtatttctattgtatttctagtacttggggtattccttttgggggtacggtctacttggtcgggtctaattctatctggggcagtgaattcgaagatgaatttcacaaaagcttgaggcatgacaggcctttttacactttccatggccaatgcgggacctaataccaatggttcccaattctttatcaccactgtggccactccatggctagataacaagcacaca

SEQ ID NO: 53988 - DNA, 250 bp, Setaria italica
  Peptide Sequence Number=SeqID_119962
aataagaacgcaaagtttgagtaggagcagatagttagacgggtgccgcttgctaagaacttgccttgttcttgaaacgctccgcggcgaaccccagcacggccgcggcgaggccgagcacggcggccgccgcgcacacaaccaacgcgcgtttctgcatcgcgtatcggctggcccttccggtcgctctcctctctctctgtgaagctctggttgctcagtgaggcgatgcaggaaagaggaaatatct

SEQ ID NO: 53989 - DNA, 264 bp, Setaria italica
  Peptide Sequence Number=SeqID_119963
cgccttgaagaaggtggagtgggtctggtcggcggcgtagacggtcaaccgcgcgatcccggcgacgccgttggagcccatacggcgcagcggaacacgtcggacctcacgaaagccttgttcttgaaacgctccgcggcgaaccccagcacggccgcggcgaggccgagcacggcggccgccgcgcacacaaccaacgcgcgtttctgcatcgcgtatcggctggcccttccggtcgctctcctctctctctgtgaagctctg

SEQ ID NO: 53990 - DNA, 438 bp, Setaria italica
  Peptide Sequence Number=SeqID_119964
tacctaattacctttaattacttaggtactaagtactttaagtcccttccttaaattgcttgattgacaatgaggcggccaatggcaagccggctgatggggtgaacgaggttacaaccaagatcgaaggcttccacatcccaaaggaggggcagactgagggttaggacagcatggcatctctggcatgcttagcggtgattggttcgtattgggaggagattgccatcagagctgccgtggtcattcaatttctcccatcatcagcgcctgtttgctacgcaagggtatagcctggcttcttgagtcatcacagcactgggaaaaatccatatcccttcgtaagcaaatggtggtgggtttttgtatggggcctgcttgatagaacagtatcaacatagtgactgtagtgtcgaaaataaacctgagaaaagagtt

SEQ ID NO: 53991 - DNA, 372 bp, Setaria italica
  misc_feature (312)..(312): n is a, c, g, or t
  Peptide Sequence Number=SeqID_119965
tagtaaacttagtacttagacttggcttcatagtgaccaaactatattaagttcctgcactgatatgggtggagtaaggctatgggatgtgagaactggaaaaattgtccaaactcttgaaaccaaggcttctgtcactagtgcagaagtaagccaggatggcaggttcatcactacagctgatggctcaagtgtaaaattttgggacgcgaatcagtaagcttcttgtatcatcatttttcttgacaactttaattgattgatacctttccaacaagttttttgggtattttttcatcagcttcgggtttnttaaaagctatgatatgccatgcaatgtggagtcagcctcacttgaaccgaagtccggga

SEQ ID NO: 53992 - DNA, 270 bp, Setaria italica
  Peptide Sequence Number=SeqID_119966
atgcgccgcccctcgcgccccaaaccctagcaccccgatcggagaagagagaaaacccgcaacaaaaatccggggcaaaaaaaatcgggggaacggggtgcgagccgaggcgcgatggagcagaagaagaaggtgacgatcccgctggtgtgccacggccactcgaggcccgtggtggacctcttctacagccccgtcacgcccgacggctacttcctcatcagcgccagcaaggatacaaatccaatgcttcgtaatggtgagactggc

SEQ ID NO: 53993 - DNA, 317 bp, Setaria italica
  misc_feature (220)..(220): n is a, c, g, or t
  Peptide Sequence Number=SeqID_119967
ttaggttttagtttaagttactttggtcgtatttggtatttgggtactttttctaaggttctattaaaaggagcttgtttggtgctgttgtcttgacaaaaatgctctgcgtgccgcatctgcttctgctgacttctcagctaaagtatgggatgcgctaactggtgatgagctacattcatttgaacacaagcatatagtccgggcctgtgctttttcngaggatacccacctgttactcactggaggcatggagaagactttgcgtgtgtatgacatgaatcgtcctgatgcagcacaagagagcttgacaatca

SEQ ID NO: 53994 - DNA, 449 bp, Setaria italica
  misc_feature (427)..(427): n is a, c, g, or t
  misc_feature (439)..(439): n is a, c, g, or t
  Peptide Sequence Number=SeqID_119968
gaacatttatccacacgattccttttaaataatgggagtgattggtactttgtggggctgcgaaatggaagatctcaacctgttaatttaagagacatggtgattctaggaggatatggccttttcaaataagcttgtcgtcttcgacttggaaaacgaagctgtcggatggatggactacaaaatggtcctccggccattaatcttgaagatgagtgaaaaagttgagagccagacttcaatggtcccggttgttagttcagtaatgcagggtggctaggccgcagtgagactgaggccttgtttgggaggaggggctaaaatttagccttgggctaaactttagccctctcaaatgttgaggctaaagtttagcccttggggtgtttgggtaaggggctaaagtttagcacttatgttgacaaanactattaccatnttgtagtagt

SEQ ID NO: 53995 - DNA, 268 bp, Setaria italica
  Peptide Sequence Number=SeqID_119969
taatttcccccccttttaacctatctactccagtgtaatgctatataggacaatgtaaggcccttgttttggggtagggaagggggcgtaaaattttaagccttgggctaaactttagccctctcaaatattgaggctaaagtttagcccttggggtgtttgggtaaggggctaaagtttagcacttatgttgacaaaagacctatttacccatgttggaggagtgagaaggaggagagagaggaggggcaagggaaggaattttgga

SEQ ID NO: 53996 - DNA, 324 bp, Setaria italica
  Peptide Sequence Number=SeqID_119970
taatacgaccaaaaaatagaaagacaagaagacaaaacctagacaagttaggtaaaggttaggacaaattgcccttgtcaactgccaaccttaccagctgcaggagcatttcctgatagtacataattcttttgccacttttttgtgcaatgccagatggcttatcgatgtcatgtcatctgagtaggaactcataatgggaagtagagattgcgatatttgagatgcttatggcaatgcttcatagaaagagtatttatatgtaaattcttgagttcagtagtaatatatgtagtcattagtttcctatgcacaaaaaccatg

SEQ ID NO: 53997 - DNA, 367 bp, Setaria italica
  Peptide Sequence Number=SeqID_119971
catattcacattacacaagcagcatcattcatccgtgcacttcgaaacacatttcacaagacaatacatacagtaatagcaaaacatcgttcaaacattcaaccatatcaattatgaacaaaccaattattaacctcctctaaagcatgctgtgaaaagattagctccgggtgccttcttcttatcaccctccaccggcatcttggtctctttactagccgtggtagtagcggcaacgacgtcgtcgtcatcgatgaccttcccgttcaagacaggcgggactggcaggttctcctcggcaggcggctcgagctgccacagcccggtctccccgattgtacctattccccttttgtttccgttcttt

SEQ ID NO: 53998 - DNA, 203 bp, Setaria italica
  Peptide Sequence Number=SeqID_119972
gaagtgcacggatgaaaacacatttcacaagacaatacatacagtaatagcaaaacatcgttcaaacattcaaccatatcaattatgaacaaaccaattattaacctcctctaaagcatgctgtgaaaagattagcgttgatgttgcacctatgcagattaagcttgttcttccctgcttttgctatacgaactctgatgaaa

SEQ ID NO: 53999 - DNA, 287 bp, Setaria italica
  Peptide Sequence Number=SeqID_119973
cagacaactaaaaaacatattccaatgttgtttaatctcaacttcacctatggtgacttttttttggttgtttagttgaaagactgaaagaaaaattataattaataaaatctcaactcaatgtcatcctgtcaaaactcaaaagttgacttgggtagtgtccattttgaactctgtaaccgtttttgcttgattttcagcttgatgatggcttggagttttccttcactgataaaaggcgctttgcaagagttcgtttgattgaagataaagggaagaaacgtggg

SEQ ID NO: 54000 - DNA, 308 bp, Setaria italica
  Peptide Sequence Number=SeqID_119974
aatgcactgttgctgtgtgagagagcagggcatcctgaagttccagtagcagagggcagccctgagcccctaaaggatcatggaatcatgtcaagaaaatttgctgaatgaagaaatgaagtttcagaattgaagtgcaagtgtctgcatgcgcaaagctttttaaatagaattgatccctatgtataagaaataaaggaatatgtaatatctacattgtgtatatggatgattgactctatttgctctaatattaaatgaacaacaatttacaatagtaggttttacgaacctagaactaaaaaaaa

SEQ ID NO: 54001 - DNA, 436 bp, Setaria italica
  misc_feature (55)..(55): n is a, c, g, or t
  Peptide Sequence Number=SeqID_119975
caatcctaatggcgttcagaacaccaagcgtggaaatcattgggttgacgaccanatttggcaacgtcagcacgagggtgcaacgcgtaatgcactgttgctgtgtgagagagcagggcatcctgaagttccagtagcagagggcagccctgagcccctaaaggtgtgttagctcatgatattcccttgtgttaggagtatctgtctatttgttagagggaacactgcaagaaactcgctactcttctccaacaaatctacaatgctataactgcctctgtttcacggttcatgtacctttcatgagaaatcgaatttgacatgtcaacctgtgtggcttgaagaattaattaaagaaaaaaataaagttaggacaaaagacaagacaagtactagaaacttaaaccaaggtaaaaggactacttactttactaca

SEQ ID NO: 54002 - DNA, 221 bp, Setaria italica
  Peptide Sequence Number=SeqID_119976
atataggttgggattggatgacctgtagttgaatgacaaccaaataccattctagctgggacagaggctgctttggttggttcgtgtgagatgttgatgacaatatatcttgagcaaaatccctgtgcaagtatttcataacttatacatgtaatccttcagtgttttcttattgttagtattctagttaaaaagttattttatttttcttttacttttaa

SEQ ID NO: 54003 - DNA, 231 bp, Setaria italica
  Peptide Sequence Number=SeqID_119977
agattccaactgtcctggttcgcaccatcacgatcctgccttcctctccttctcattgcaggtcgtagacggtggaatcggcggcgtagcagccgagcacgcgcacgaacacggcgaacttctcgatctcctggatggcctcgcggacgcgcgggtcgtgggcggctgatgacgcggcggacctcggcggcgcggacgcccggcatggcgaggaggcagtagtgcacgaag

SEQ ID NO: 54004 - DNA, 235 bp, Setaria italica
  Peptide Sequence Number=SeqID_119978
agtagacaacaaagaatttgaccagatggccgatcaaacagcactgcatttgtgtcgatacccccagttgcagtgctgtttgatcggccatctggtcaaatcttgtgcacgcttactggtcactcaaagaagataaccactttgaagtttgttccacgggatggactctttgtaactggatctgcagataagactgttcgcatttggcaagagagcgagaatggaaactataact

SEQ ID NO: 54005 - DNA, 398 bp, Setaria italica
  Peptide Sequence Number=SeqID_119979
ttatttgttattttcttagttacttacgttccgtacgttaattgtcttgttggtaatttgattttagcggaaactatcttgccattggtggttcagacataagggttcaccaagtagctaatgttaaggttgagtggaatcttatcaagacgttaccggatttatcaggaactggtaaagtaacttctgtgaagtttggagccgatgctaagtacattgccgtaggttctatggaccgcaacctacggatatttggactccctggagatgaccaaatggaggaatcaaacacagcagctgagtgaggaaatccattgtacttgatttatttcttttttgcgatgctcccaatgtcatttgatgatggatagactgcgtgcccatggatacatcaacac

SEQ ID NO: 54006 - DNA, 154 bp, Setaria italica
  Peptide Sequence Number=SeqID_119980
aactactgatgctgttgttaaaatttgggacgtgaagactcagtcaaatgttgcaaagtttgaggggcatgttggaccagtcactgctatgtcaatttccgaagatcccaaagcttagacaccatcatgagcagcagtagcaaggaagtaacca

SEQ ID NO: 54007 - DNA, 153 bp, Setaria italica
  Peptide Sequence Number=SeqID_119981
tggttacttccttgctactgctgctcatgatggtgtcaagctttgggatcttcggaaattgacatagcagtgactggtccaacatgcccctcaaactttgcaacatttgactgagtcttcacgtcccaaattttaacaacagcatcagtagtt

SEQ ID NO: 54008 - DNA, 412 bp, Setaria italica
  Peptide Sequence Number=SeqID_119982
agtactacgtacaagtacgacccgacgtacgtactaccaaccgacgctgactcttgagcctcctcctgttgtaggcagtagtttagtagcagtaggcacccgcaattatgcaaagacttgcagggttaggcgttcgcgagagggatgattctttttgctgtcaagtcggatttggcctgggtgttggtttggtggaggtggactattgtcactcccaaatggaacgggatgggcttctgttgctctagcatccgctggtcttttgcttctctggtgttggtttgggactgacatgaatcgggttgcaggttgcagcccagcgaatgctccattgtgcaggtgcctcactgctggctggcaggatgcgacgaacgaactgaaaatgttgagggttcagtagagatagttctcc

SEQ ID NO: 54009 - DNA, 382 bp, Setaria italica
  misc_feature (204)..(204): n is a, c, g, or t
  misc_feature (332)..(332): n is a, c, g, or t
  misc_feature (362)..(362): n is a, c, g, or t
  Peptide Sequence Number=SeqID_119983
gatctatcgcttcttttttcagaattttttgcacttagattattcacgaataagttgaaacaatggctatcaactaaatatttatgtgcctccgtgtcaccagcttctgaaagcacagcccttcttgatgttgtgctgccaattactaacagattgattaattattatgatctaccatgtacagttatggctatttgacaaacncaaaggtcaaatttattatggtcacgactgatcttgatgtcaaagatgcagatgcccgaaattttttcaggaaattccatgccgcatatgtagatgctgtctcgaaccccttccatgttccagggaanaagattgcttcgagaagctttggcgcaagntaagcaccatagtgaagtcc

SEQ ID NO: 54010 - DNA, 182 bp, Setaria italica
  Peptide Sequence Number=SeqID_119984
gtttacatgatatttagatgcttatgcttgcctctgctatgtgggtaaaagaataccaggctcatgtccatctccgtttgctcagtttttcaggaaattccatgccgcatatgtagatgctgtctcgaacccccttccatgttccagggaagaagattgcttcgagaagctttggcgcaaga

SEQ ID NO: 54011 - DNA, 143 bp, Setaria italica
  Peptide Sequence Number=SeqID_119985
acatttatattatttgttttcttacttgtctctacattcattctgttgacagtaaacaatcctaaaaggagtgcgtctacattgaatgagacatttttgggtcttctctacccaactgagaactacaaagtgtgagtatcttt

SEQ ID NO: 54012 - DNA, 122 bp, Setaria italica
  Peptide Sequence Number=SeqID_119986
ctgaggctgaccggatcagattgcctcttctcgagggggtgctccagctgtacagctggagcaccccctcgagaagaggaattcctgtcagggtacttctctctgatccggtcagcctcaga

SEQ ID NO: 54013 - DNA, 346 bp, Setaria italica
  misc_feature (343)..(343): n is a, c, g, or t
  Peptide Sequence Number=SeqID_119987
cgtgtcagaatattgagagcgcaatagtctcaatggtgttagcattgcctcggatgatcaggctgatatactgtcggagtggatgaagaaagcagagcagttcaggtatcctgatctcactgaggcatttgaggtgtggtgttatcgcagtaaaacagcaaagagaaggctggtggacaatggagcaagcaaccccacagtcagcttgtaagggtactattaatttaatcctttgttgtgttttatagtcagctagaaattaaggtaggttaggtaaccaaagtaataataaccaaactaaatttactacaattagttagtaattttaattaaaaacaataanaaa

SEQ ID NO: 54014 - DNA, 482 bp, Setaria italica
  Peptide Sequence Number=SeqID_119988
agcttcagctatagcagtagataatacagtatctctcacagtaaagcacaaacacacacagtccaatgcgcacaaacctctctgctagtgctagctgagagtagaattttatttctgcaagtgaccaaccatcccagcgtgcagcgcgcagccaagcagcaggaccaagatcgtttcagctagaactcgtcgacggtgatgccgcccctgacgacctcgtacgcgtcccggctgcgcgacctcttgatcccggccgtgaagtgcaccttggcggcgtcggccttgacggcggtgaccctggcccagacgagcaccttggtcttgatcccctccacctccgtgaggcggccgtcgcccagcgtgccggtcaccgtggcgtcgaaccgcagctcggagccgtcgcggtagccgacctcgacaagggggaacgggaatagtagacaaccgtacaaggacgaccgacgtactaccggactacgaaa

SEQ ID NO: 54015 - DNA, 262 bp, Setaria italica
  Peptide Sequence Number=SeqID_119989
tatacaaagtagatccctatatgagcatcaacaaattgtacaacataaggttttgtgatctataaatatatattttgcaacaaggacaagctcacaattgttttgagtggccaatcaaatcgtaagcaagcaccctagtcaacattagcaaaagaacaacctgatccacaaaaaaattcagttccaagcatcaacgcatggttagtttagaagttcccaagataaaacaagaaggttgaataagataccgaacctgcaatta

SEQ ID NO: 54016 - DNA, 247 bp, Setaria italica
  misc_feature (215)..(215): n is a, c, g, or t
  Peptide Sequence Number=SeqID_119990
tgcaacaaggacaagctcacaattgttttgagtggccaatcaaatcgtaagcaagcaccctagtcaacattagcaaaagaacaacctgcaattatgaccattggtgcaggcaaatcttccatgaagtaagcatggtaccgcagctcccagggagaccaggcgtggtggaagctggagtagaccaggaaggccgcgtaagccaggacgaaccccgngaagacgcgcctccaacggcggctctgctgcg

SEQ ID NO: 54017 - DNA, 345 bp, Setaria italica
  Peptide Sequence Number=SeqID_119991
cagtctcagcttcgaatacttgatgtcgctgtgtcttcatcatcaacaacactaatgttccactcattatctaggtgaacaggacattcatttgctgcagatgcttcagcttccatcttagcctttgctgctgcatctctagcaggtttggagtccatatattctttctgtctctgaacacatgctggatttgaacactgcggatttggcctcatttccattgttgggaaataatccttaagtgagttatacccctgcacatttatgaagacatccaagtatggggaaacttgtaccaaagttcaacagatatttcagagcattctgcaccaggagaccagcaac

SEQ ID NO: 54018 - DNA, 249 bp, Setaria italica
  Peptide Sequence Number=SeqID_119992
acatgctggatttgaacactgcggatttggcctcatttccattgttgggaaataatccttaagtgagttataccccaagtatggggaaacttgtccaaagttcaacagatatttcagagcattctgcaccaggagaccagcaacaacacccattgtagttggcaaagaggcagcacaaacaccttctctcttgagggtacgctcactgagacacgcaacaggggaaaggcaaggcacacaggggatagg

SEQ ID NO: 54019 - DNA, 106 bp, Setaria italica
  Peptide Sequence Number=SeqID_119993
tgctgcctctttgccaactacaatgggtgttgttgctggcaaagaggcagcacaaacaccttctctcttgagggtacgctcatccacgccagatgctactaccaat

SEQ ID NO: 54020 - DNA, 324 bp, Setaria italica
  Peptide Sequence Number=SeqID_119994
gcgaggccaagtttttgcaaattcctgtccaatcactgtcagacacggtaggcagtctgaaggagcagattgctggagagctgcagctccctgcaaataagcagaagctgagtgtgaggactagtttcctcaaagacaatcttactcttgcttactacaatgtgggtcctggagttgtgatcaatctcacactgagggagcgtggtgggagaaagaaatgagtcttttcgacctcagtgtagtggcaaagcatggcaccacacaacacttaactgcagcaagataagaggaaaatacaacgttgacatagtgcaaaagatattg

SEQ ID NO: 54021 - DNA, 316 bp, Setaria italica
  misc_feature (316)..(316): n is a, c, g, or t
  Peptide Sequence Number=SeqID_119995
caccggatgatgagatttcacggaacattgttggtctccttaatcttggccaacatcctctctttctgcaacttgttgaggaaggaatgcgggcagcaagacttgaggagaatgatggaggagcacaagttaaggtggctggtgatgatgaggcacctatgaggattgtcaagaactacaagaggcctgaagagaggatccctgcggagagagacccaaccaagtttgttgtctcaccgataactggggagctcattcccatcagcgagatggaggagcacatgcgcatctcactcattgatcctaagtacaaggn

SEQ ID NO: 54022 - DNA, 207 bp, Setaria italica
  Peptide Sequence Number=SeqID_119996
gcagtctgaaggaagcagattgctggagagctgcagctccctgcaaataagcagaagctgagtgtgaggactagtttcctcaaagacaatcttactcttgcttactacaatgtgggtcctggagttgtaagcattaacctaccactacactgaggtcgaaaagactcatttctttctcccaccacgctccctcagtgtgagattgat

SEQ ID NO: 54023 - DNA, 193 bp, Setaria italica
  Peptide Sequence Number=SeqID_119997
tcgggtgtcggcgtaggaggcaggcgtcggagcggggttggtgcaggagtaggtgcaggtgttggtgcaggtgtcggagtaggagggacttcctgtgccacctacattagaggagttgaagcgccggaagaggatgcagaacttgggagaggaggaagcgatggaattggctgaacctgctaaggaagttgca

SEQ ID NO: 54024 - DNA, 406 bp, Setaria italica
  Peptide Sequence Number=SeqID_119998
tgtcagtttatggccatgagaaaaatgtggataacagtctgccgaatcaaaactgataaagatacattgagagaaggatacaggttcattctttccgaggaagatgacatggattcaacttgggagaagaggctggtcaaacgttactatgacaagctttttaaagagtatcctttttttagtatattttatattgcattgttctttctatgaggacatgtcagtacatggcatagttttcagataattttgtgaaataacaagttcatgtatgctgatgctaatgtcattacatatagttatttaatagtttggtaatgtaaataggcataaggcatgtgaatgtatcttaaacctgtaaagggcttatatctcttgctgtcctctgtattgttacgctcttcta

SEQ ID NO: 54025 - DNA, 435 bp, Setaria italica
  Peptide Sequence Number=SeqID_119999
cagttcagtttatggccatgagaaaaatgtggataacagtctgccgatcaaaactgataaagatacattgagagaaggatacaggttcattctttccgaggaagatgacatggattcaacttgggagaagaggctggtcaaacgttactatgacaagctttttaaagaggtccttaacttgaggtaggtattgcattgctgacatgacccagtataaaaaaggcaaggtatggtgctttaaccctatgtcaatgaatactgtttcctgatgtaaacatgtagtttctcctttagtcttgaatgatatacaaaaggaagaatgcatggcatgacttttggagggacatctaaaggcaacaatagtgtccttccaattgtgatgctcttgtgaccttgatgaattcatattcataaaattaatgcacaggcaggaat

SEQ ID NO: 54026 - DNA, 254 bp, Setaria italica
  Peptide Sequence Number=SeqID_120000
gttttatttgttcttaatttgtttctaggtcgtaaggattgacggcgcttctctggacatagcagagtctttagggttcttgacattatcagatagaaccttgatggcattttttgcaacgttctccattctcgatgcaacagtgtccatcctgtccctagcaaaaagtgcaaaagctcgtgtgagagtggtgtctcatttgtggtgcgtaccgtatgggccgttgtgctacaatttgtcgtatatgtctatat

SEQ ID NO: 54027 - DNA, 281 bp, Setaria italica
  Peptide Sequence Number=SeqID_120001
tgttatcttaacatcttgattttcctcattctcctaacaaactttccatatgcttatattctcaggttacaaaggaaatcttaactaaacggggagttgcggctatggaagtgacttccagcccaggcttccagtaagcaaactacacggatggttttagacttttagtcactgtccttgttccaataaaataggggaatgctgccgagcaattcgattccatattcacatgtaaactttgtaaacactccccttaattaaatatcgtgacaaagtcgttg

SEQ ID NO: 54028 - DNA, 181 bp, Setaria italica
  Peptide Sequence Number=SeqID_120002
catgaacatgatccggtgttcatgtaatgcatggccaacgaatctaattgaaagttccttcgactgcttcaagcatccatcatctccaaatgctttgagaatctttctccagcttcaagacatgcattggtcttgcatgttatagaaaccaaaggatgtgaatggtctaattgaaagttcc

SEQ ID NO: 54029 - DNA, 164 bp, Setaria italica
  Peptide Sequence Number=SeqID_120003
tcaaagacgaaaatggtacttattttcagaccatttgatgattaaaataaacttcttttgaaaagctagactatgtgactttttttctacttttaatgttttgcatcagatggtctgaaaatacgaatgatcaaagacgaaaatggtacttattttgaccgccc

SEQ ID NO: 54030 - DNA, 228 bp, Setaria italica
  Peptide Sequence Number=SeqID_120004
catgtgaatatggaatcgaattgctcggcagcattcccctattttattgcaacaattaacaatggttgcctatgggcaattccaggatcacataaaaatggtctgaaaatacgaatgatcaaagacgaaaatggtacttattttgaccgccctatcccatcctatgatcacaaagaatttgtgccattggaagtaaaatcagggagtttggtaattatacatggagat

SEQ ID NO: 54031 - DNA, 422 bp, Setaria italica
  Peptide Sequence Number=SeqID_120005
tggaaccctgatttcagcaaatgagatgccattccaaagcccataagctcccaagacccaatgaagccaatccgctttgctgctttagattccataacaagctggtcagctaatttgctcgcatcatagatttgttgactggcagcatctacgatgtttactccaaatgatgcttcccaaaccttcaggggtgaggcagatccatctccaattactgctgaagaaccatgtatcaattgttgataagcaacacccagaagtggcagtggaaacgttactgctttagccatatccatcacatagcttgcacttttctttgacgagtttaaaaagtcaataagcaaaaggaatacctacaagtacaagaaagtttaaggaaactaaactaccaacaaaataataccttagaagacttaccaaga

SEQ ID NO: 54032 - DNA, 286 bp, Setaria italica
  Peptide Sequence Number=SeqID_120006
ctttctcaggtggggacacatgagaaacagaaggatcgtatccagatgtttctggctcaggagcctctccttttgctttatctccccagatgccgacgttgctgacttgggaacttctatctcttcctttcttggaggcttgttcttttcctttgtcaccacaatcatccacatctgacagcttcctttccaaccactcagtagccttgtggatatttttttgccccttgactggatcaaaaatagacaataggtaaacaataagaaagactactacttacttaca

SEQ ID NO: 54033 - DNA, 186 bp, Setaria italica
  Peptide Sequence Number=SeqID_120007
cccatctgtttctagtacaaacagatcaccagagcacttatagataacgtcaaactgatcattgatgcaaattattgcgagttgacgctcgcctatttctttgtgtaagatgcgcaacccatattttgttaggcctgaattacaagacaaaacttactagaaatactttttaactacaaaagaata

SEQ ID NO: 54034 - DNA, 358 bp, Setaria italica
  Peptide Sequence Number=SeqID_120008
acaaaagttacaaactacaagggtagtaggactaggaccggacaattctaatgagggacttcctggggccataagacagacgccggaccctgatgggaggcggacagagatcacgtgtgctgcctgtggaggacatttggggcatatattcaaagggggaaggtttaaaacgcctaccaatgagcgacactgtgttaacagcatttcactcaagttcattccagcctcagaggaagcctgacggcagatgaacaccaacggcagaatgggagcttggcctttgtggttgctttgacaatgtagcctgatgaaagttgtaattcttctgataatatctgaatatgtctgtaattgtgat

SEQ ID NO: 54035 - DNA, 350 bp, Setaria italica
  Peptide Sequence Number=SeqID_120009
taatttaaccggtaacttaagtaaccgaacaaataaccaataaactacgaattaaatcaacaaataataggtaatagacaatcaatggagtcgccatttctcatagcgatcagataaagatctcctatcattctagaaggttataagattgtctgcagcaactcaggatgtccctaggtctgtgatttgtaatgttcacggagtcaaccccaaatttattgaaattggcaaattgaaacatcagcaggtatgccaaagagagcaggcattcttcaagggtgcatattatatcggaaagatggtatggagtaaaggttacacggagcttcttcagctgcttcgtaagcacc

SEQ ID NO: 54036 - DNA, 281 bp, Setaria italica
  Peptide Sequence Number=SeqID_120010
tggttgtctattatttattattcggtaaagtattggttattggtagttaaaggtttactacggtagtctttctttctagtctgcttcgtaagcaccaaatagaattgtctggccttaaaatggagttgtatggcagtggggaagattctgatgaagtaaaagcaacagctgggcgactgagcctagatgttagagtctacccaggccgtgatcatggagattcaatatttcacgactacaaggttttcataaatccaagcacaacagatgtggtatgcaca

SEQ ID NO: 54037 - DNA, 314 bp, Setaria italica
  Peptide Sequence Number=SeqID_120011
caaagtcttaataccgagttccaacttcacatactcatacaacaacgtggtcctattgttactacagaaacaagaaaaccccccacacatcttattgagcacatatttacacaagaggtcacctgacagcagtctgatacatatagggataacttgataggtgactgtaatcgcagtaagctcatacaaaacgtgaacatgtgacgatcctaatatagcagatatttgccacacgttcattgctgcctgtcacatgctcataccccgtcaacaaacctacaagggtaggtaagtaggaatacaatatacctaga

SEQ ID NO: 54038 - DNA, 320 bp, Setaria italica
  Peptide Sequence Number=SeqID_120012
aagaaaaccccccacacatcttattgagcactatatttacacaagaggtcacctgaaagcagtctgatacatatagggataacttgataggtgctgtaatcgcagtaagctcatacaaaacgtgaacatgtgacgatcctaatatagcagatatttgccacacgttcattgctgcctgtcacatgctcatccccgtcacaacctcagggtggtagtggatcatctcctgccacatcatttcgcggatcatgtctacgccaaggttttacaatactaatagtacgaagaatacgaatagggtaacttagagcaggagggtt

SEQ ID NO: 54039 - DNA, 454 bp, Setaria italica
  misc_feature (3)..(3): n is a, c, g, or t
  Peptide Sequence Number=SeqID_120013
ttncgggcttcgggttgtcaatgaactcaaggtcagcctcactcatggtgccaagaacatttactatgagcttaagctgattgaggcactcagttcctggaaaaattggcttgcgtccaagtagctctgcaaatatgcagccaacagaccatacatctattgatgttccatagttgtcacagcagagcagcagctcaggggccctgtaccagcgggtgacaacatattctgtcatgaactgacccttagtgttgtttgtgcgggcaagtccaaaatcacatatcttcagatcacagtttgcattaaccaggaggttccctggcttcaggtctctatggagtatcccagctgaatgaaggtacttcatgcctcggagcagctagaaaaaaggaaagtaactaggacaagtaggtacaattaggaaaagtaggttagaagaaataagaaatttaaa

SEQ ID NO: 54040 - DNA, 457 bp, Setaria italica
  Peptide Sequence Number=SeqID_120014
cgcatccacacggttgtcaaagtacattgtttatcttttttattgcaacctctcatttgtctcacggtttatagacgagcaaactattccgtaagcttcctcttccaatgggcttgattggcacgtacttggtgtcaatctcaaatagtgtttgccacatggtgtagtaatgcttcccttggtttcccatgccattggggggatccaccatcatcgccattttctcggactcggaagcaacaggtggtgcgccggtgcggtggtgcgccggccgcctaagctctcatcacccagccagcaaccgagagcaggatccgccgccgcccagcccaacggcaccgggacgcgctgcgtcgaccgaccggcgagaggcctatgtagtcgagctcgagtgggggcgacatggggagcagcaggacatgaaccggagggtgggggaggtgaggtagttggtctt

SEQ ID NO: 54041 - DNA, 197 bp, Setaria italica
  misc_feature (185)..(185): n is a, c, g, or t
  Peptide Sequence Number=SeqID_120015
ctcggtgacactaattcttttggtaggggatcaaagactagcatcttctgcaacagatcgatggcaagaggatgtgcttgtgggtacatgctggtgaggggaatgcctgcagaagaacttcgatctgccgcccaagaacgcctccgaggaggcgcggcggcgatggcgctccgccgtcggcgccncgtcagaacccg

SEQ ID NO: 54042 - DNA, 133 bp, Setaria italica
  Peptide Sequence Number=SeqID_120016
acatggaccacgttgttgtatgagtatgtgaagtggaactcggtattaagacaagaggtcacctgacagcagtctgatacatatagggataacttgataggtgctgtaatcgcagtaagctcatacaaaacgt

SEQ ID NO: 54043 - DNA, 363 bp, Setaria italica
  Peptide Sequence Number=SeqID_120017
ctacttctgcttcctgtgtatggtagcttgatagatacaacaaatgcagatagatatagatgccgtttgttcattggattcgcttcatatcttactataggggaaaaaaagatatagtatatgctgctggatgggtattttttgtattgctggtatacacccatgaaaatcttatgtgcttctgtatctggtcggtcaattcgttcatctgttccttggactagtagtcattatgtactacttggtggccatcatctattgtaatgcgttggttatttcttgtattgtaaactattgtcctgttactattaactattacttttaaaaaggtttttgtcccttgtccctaggtatttttttgtt

SEQ ID NO: 54044 - DNA, 319 bp, Setaria italica
  Peptide Sequence Number=SeqID_120018
ctgagggctgagaacagaccagcttcccccttagtaacaactttccagttcacaacccttggctgtactgcgctaagaagctcaaggaagaacaatccattcgataagctcttgtccttgaaactttccattcgagaagttcttcctgatgctttcactttgctgttggcccagtttagaatatcagcatcagtaatttcttttcagatgaggacaagaagctgaatgctacctacatcattagtgttgctaggaagcttggatgctctgtatttctgtaggctccaatacataatgctagcggtaagtgtaaggatca

SEQ ID NO: 54045 - DNA, 405 bp, Setaria italica
  Peptide Sequence Number=SeqID_120019
cttgaagtacttgataaggtttctcctggatctgtcaattggaagctggcatcaaaacctccaataaattgccattcagaaaactggagaattgcaatcaagttgtaaaaatcgggaaggagttaaagtttctttagtaaatctagctgggaatgatattgttcagggaaacaagaaactgattgttggtgagtctgtccacgtctaatttaccagtgacactaatggatcacgctcttaatatttatttgtagcatcatataactgaagtctttggtgttgtctttcagcacttttgtggcaattgatgagattcaatatccttcagctgttaaacaagctaagattccattcccaagggtcccaaggaaaagaaattactgatgctgatattctaaactgggc

SEQ ID NO: 54046 - DNA, 263 bp, Setaria italica
  Peptide Sequence Number=SeqID_120020
ttcatcaaccatttatttgtgttgagaagcatttttcccttcatgatgtaggctggaatttctttatcacgtacactttcattggatggaacctggcaatctctcgttaactcgttctcggcgaatgcaccttatatagtttctacagtgctatggatttactggggtgtttgtctcagcgatatgatcccgttctttcgtggggaagtctttttagacaaactaaagcatctgaaggcataagcagcaagttgtccttttag

SEQ ID NO: 54047 - DNA, 258 bp, Setaria italica
  misc_feature (81)..(81): n is a, c, g, or t
  Peptide Sequence Number=SeqID_120021
cacgtcggccagccgcggcatcagcgcgatcgggctcggccccggcgggcccgtcaccgtcgacacgaacgcgtccagggngccctccgtgtcagccggtccccttatgatctccgtttcaaaagggggaaaaagcgtcagaaatcaacgattcagtgtagtcactctgtcgtttgagctttagtgttctccactcagtttacttatcactggcatgtgagacttcggccaaagccaatgccaatgggatggatagag

SEQ ID NO: 54048 - DNA, 254 bp, Setaria italica
  Peptide Sequence Number=SeqID_120022
tcgtcctttgtttgtttctattgccaccagcacagttcagcagcacaaggccccgaacaacgtctaatttacaagatattggcggattggaacctgcagcagcaatgacgcatgcgaggctcccgacagaattgcctacgagcatcgtgggcctcttcacgacctcctccaagaagtccaggattaactcagcccatgtctccatcgtgtaagaaaacccaggaggcttgtccgaggcgccgaaacccagcaaa

SEQ ID NO: 54049 - DNA, 237 bp, Setaria italica
  Peptide Sequence Number=SeqID_120023
tttgtttatttcttagttccttagttagttcttagttaggttctaggtagtctaactttgtatcctccagtcatcgacgatcgccttgttgttcatgccaccagcacagttcagcagcacaaggccccgaacaacgtctctgttagactctgcagcagcaaatgacgcatgcgaggctcccgacagaattgcctagagcaccgtgggcctcttcacgcctcctccaagaagtccagg

SEQ ID NO: 54050 - DNA, 347 bp, Setaria italica
  Peptide Sequence Number=SeqID_120024
cgcgagcggaggatgaactgcgagacctgtcaactgaaagagctggagctagaacagacggagatcagggacgtgctgcgatgcattttgcacaccatattcttccatagaaccctcagccttgttcgccccaaagatgttgactgtaaaaaccttgagatcacatacgtgagtatttccctccattaagatctggatttatttcgtttgttcaaggcatgtggtgctgttgtgctgcaagttattatattcaattactacttccattcgaatttatcaatgctttcgcctttcaaagtctccgagatgcactttcactactacttattcagaatatatgagtgtaa

SEQ ID NO: 54051 - DNA, 281 bp, Setaria italica
  Peptide Sequence Number=SeqID_120025
aaaaaaccttgagatcacatacgtacaatgtggcctaccagaactagaaaaggaagttgatgaaaagatagacttgttcactgcttgggtggagaagcacccaaatcgcaaaagccaagtatgcctatccttcttcgacgagaaacacaaacacccaggttggtttgtcaataaaacagaacgtatttattgggaacaatgacaccaatgcagcacgccttgagctggtctcctccaagacatttcctccaatgtttgtaagccctttagagctgtttgat

SEQ ID NO: 54052 - DNA, 466 bp, Setaria italica
  Peptide Sequence Number=SeqID_120026
aatgaagcccaaaaaagaataataaacaaaatacaaaacaagctctaaagggcttacaaacattggaggaaatgtcttggaggagaccagctcaaggcgtgctgcattggtgtcattgcttaacgaagtgctattccagatcataaactttgccaacgagaaaaaggaccacattccggccatccctgacagaatattcaatcatgagatcatgatcccaaggtgaccccttttccttggaagtgttgacagctcctcggattctgtgtttggatggaacaccgacgcctttcgcagagtgctgaatagtgggcacccgtactcactttagctgaagacgaagaccggtgccgccatgctgtgtggaaggtgctctgctaaccacattatatgtcttaaggagaactagcgatgtgtacataatcgtgtatgcttaaggagaactagcttgtaaatattatgtgtg

SEQ ID NO: 54053 - DNA, 257 bp, Setaria italica
  Peptide Sequence Number=SeqID_120027
ctttgttactagctgtaatactgaacaatggtccaagctctacagctaactgaagcattatgatgacacaatcgattagactggccataagaatactaggaaaaaggagaagcacgcaaatcgcaaaagccaagtatgcctatccttcttcgacgagaaacacaaacacccaggttggtttgtcaataaaacagaacgtatttattgggaacaatggttcaaccaatgcagcacgccttgagctggtctcctccaag

SEQ ID NO: 54054 - DNA, 257 bp, Setaria italica
  Peptide Sequence Number=SeqID_120028
cacaacattgtaaagctctcagtaattattctttgtttacttgatgatgttcaacctaacattagttgctgttactggttaaattgcattacttttgtggaatcttgtgctggatagaacattgtgatcgatgagcggggttctcttgcggtgtgcagtccaatacggggtcgggttgtgagcttgctgaagtcactccaaaaggtcctcctctatgaagttcaacttcagagcgtcaatacttttaaaaattctgc

SEQ ID NO: 54055 - DNA, 465 bp, Setaria italica
  Peptide Sequence Number=SeqID_120029
gctgaagtcactccaaaagatgcctcctcgtgttgctatgaccggtgatgttctgcgcctgaaagactcgaaggtaacttgttttgaaatccctagcaggttagcagagatgaatatgctttgttgcctattataggtagtaaggtgatgacaattaatctccatacattgtgctcaaggttccaattattgccgatagcctgaagaaagctattatgaaggaacacgaagcttctagtgcagctagtcatggagtgtcagcaatattgtcttctgcgggtgctacctgcaggtcacgaagcgagggcctccttagtctactcaatgaggagagctcttacagcatcttcaaatttgacattgggtctgtaatgtgtgcttgttgattttgatgtttggaatcttttcttattacttcattcaagtagattcagcaagcatatcttccttgcagttcatgtgtct

SEQ ID NO: 54056 - DNA, 420 bp, Setaria italica
  Peptide Sequence Number=SeqID_120030
agttagtagaagacttgctgaagtcactccaaaagatgcctcctcgtgttgctatgaccggtgatgttctgcgcctgaaagactcgaaggtaacttgttttgaaatccctagcaggttccaattattgccgatagcctgaagaaagctattatgaaggaacacgaagcttctagtgcagctagtcatggagtgtcagcaatattgtcttctgcgggtgctacctgcaggtcacgaagcgagggcctccttagtctactcaatgaggagagctcttacagcatcttcaaatttgacattggttcatgtgtctacatagattcctctgggagcagccataatattgagttagacagcttcgaaccacaaaaccagatatgctaatgccgttctctgcaaagcttattgatggtatcaaccga

SEQ ID NO: 54057 - DNA, 192 bp, Setaria italica
  misc_feature (180)..(180): n is a, c, g, or t
  Peptide Sequence Number=SeqID_120031
gttgaacttggagcagcaacatcagattcctgtagttacctttatggtttgaggttggtatactttggactatgatgttgaacttaggaagacaagcaaacttgcaatatcagattgaattgaaatataaatccttacagtcgagtgaaaacccttttacatttaaacaaaaaagaaaanaaaaataaaaaa

SEQ ID NO: 54058 - DNA, 261 bp, Setaria italica
  Peptide Sequence Number=SeqID_120032
ctgctgtcgcagagtaacaaaatggatgcttgaatatctcgcagatgtcatgaatgaaaaagaaattagtatacaggatatgactgctgcttcatcggggattcagttaagaaagaggaaggctccattctcacctcgatctactgtgttagatcttgatcaacaatttcctattcctgggaaacatgcttttgaaatatggaaggatcttaatgcatctaacatgtttgcttttgctgctgcggttgacttggacttgcc

SEQ ID NO: 54059 - DNA, 183 bp, Setaria italica
  Peptide Sequence Number=SeqID_120033
cctgtggagcacatccaaacagtatgtacacgaatttctctatcaacacttccatgcaaacgcaccactcaattccagactttagtcgtgtatggaggcaaagctaggtaaatgcacacaacaacatcagaatcggcaattgtctctatcaacacttccatgcaaacgcaccactcaattcag

SEQ ID NO: 54060 - DNA, 224 bp, Setaria italica
  Peptide Sequence Number=SeqID_120034
gaagtgttgatagagaaattcgtgtacatactgtttggatgtggtcctgtggaggcaaagctaggtaaatgcacacaacaacatcagaatcggcaattgtctgtatctcccacttattaccagcaaggctgaccagcaatatgacaccaacaagcaagcctagaacgtgatgaggcttgcgatcacgagaaatccaaccaggatgagaagcgccttcaggtaca

SEQ ID NO: 54061 - DNA, 269 bp, Setaria italica
  Peptide Sequence Number=SeqID_120035
cgatgttagaggaaaggctcggtaggaatttgccttgaaagcagcttcaccaccttgcttcaattggttcctgtggaggagttatttgaagaagggtctgcgatgttagaggaaaggctcggtaggaatttgtccttgaaagcagcttcaccacctttcttcaaataactcctccacagaaccaattgaagcagacttgcctccaagctttccaactgaactatgagaccttctacggaaaagtgacttcaacttgttctgatttcttg

SEQ ID NO: 54062 - DNA, 283 bp, Setaria italica
  Peptide Sequence Number=SeqID_120036
cttctttttccgacagccaaacaaagatgtggaccgccccatggcgcatacggggaagagcagtaaccatcaccattatctgtcatcaaaccttcaaatggttcttggtccacttggcagattgcacaacggaaaggtggtgaagctgctttcaaggacaaattcctaccgagcctttcctctaacatcgcagacccttcttcaaataactcctccacagaaccaattgaagcagaactttgtaccttacctaaagtacttttacctaaacttagtaaactaa

SEQ ID NO: 54063 - DNA, 417 bp, Setaria italica
  Peptide Sequence Number=SeqID_120037
gcataagtcaatttattctacatcgaaggtacaacataaccacaaatagttataaaatagagaaaaaggatcaccattaacaaagcataccgcgtcagacatgtcacagtgaagcttggtcacagaatcacccctgcctaactcttggttaaatccataagcgatgtaagtttttggtccaagatctggcttcaaggctaccatcaggaagcttgactgcaagatttagtgggccatatcgaggatcagtgtattcaggaaatggcaatgcgctgataaactctgcaccatggcgaggcaatctctgatcaaatgaactagatcggcggcccagtcttagcttagcatctcaggccagtgtgtcgtagggtgagttctgcctcgcgtatatcccacaaaaacatgtgtatattaatt

SEQ ID NO: 54064 - DNA, 258 bp, Setaria italica
  Peptide Sequence Number=SeqID_120038
gaaaacaaagaatgttgcagtaagttatgtcaagggtaaccatagtgaacctgtacaattcaccatcagaatacagataccatcatgacatgaggtcttggttgtttcatcaacagttatattctgggaatcagtagaagttggtggtaggttatgttcagtgctggattctaatccaccgtaaagttcctgaagatcttgttctttcattttctttctgattttctctatcttcttaggtggataggtctcatcagg

SEQ ID NO: 54065 - DNA, 455 bp, Setaria italica
  Peptide Sequence Number=SeqID_120039
caaatttctcacttgatgaggacatccagcgggaatgaaactgcttcaccaagcttctgctcaaatgtccagggttcaacaccatattcttccttgagctttctcttatgctctgcagttaagtagaaagtctggtcgtgaatcgggtgaataacctgcttcactggattgcagtgaatatgccggaactctgacgaatgcttcctaagataatcttgtaatttctccgaatcctctctacgaaaaatgtcccataaagcaccaccagtgttctgttgctctgagccttcccccacgacagctttttcttgaatgcctttagaaatttgtttttatcagtgccattgcaatcaaccttttcaggtttctcttcttgagattcggtgccaacttcattgagagttccacctctaaatctctttccatgctgtcccatgccaatgtcatctgaactg

SEQ ID NO: 54066 - DNA, 144 bp, Setaria italica
  Peptide Sequence Number=SeqID_120040
aaaaatatccccacaaggcaccaccagttctctcatgctttccactctccttagattcatgggatggaggtttatcctcaacgtcaccttctagttattctaattaggttggttagtagtctatttggttgttcctaagtcctt

SEQ ID NO: 54067 - DNA, 365 bp, Setaria italica
  misc_feature (323)..(323): n is a, c, g, or t
  misc_feature (353)..(353): n is a, c, g, or t
  Peptide Sequence Number=SeqID_120041
caagccattcagtttctcatttgcttaccacacatacctttccgtttctgacatcagtgaggtgaggatagaaggtttggagacccttgattatcttgacaatcttagccacaaagaacggtttacagaacaaggagacgccataacatttgagtcagaggtcgatcgagtctacgttagctccccaaatgtagtagcagttcttgaccatgagaagaaacagtcatttgtcataaaaaaggaaggacttcctgacgttggtaagatatgttgccctttgccacctactagaaaatcaaccattaacagtgtgactggtttcncattgtaacaactgtatccctgtcagttgngtggaatccggt

SEQ ID NO: 54068 - DNA, 315 bp, Setaria italica
  Peptide Sequence Number=SeqID_120042
actacatttggggagctaacgtagtagcagttcttgaccatgagaagaaacagtcatttgtcataaaaaaggaaggacttcctgacgttgttgtgtggaatccgtgggaaaagaaatcaaagactatggtggactttggtgatgaggagtacaagcagatgctttgcgttgatgcagccgcagtggagagagcaatcacgctgaaaccaggggaggagtggacggggaaactggagctttctgcagtttcatccaccaactgcagcgatcatcttgatcaccaagtcgagctgctgactgatcatagatgaacct

SEQ ID NO: 54069 - DNA, 268 bp, Setaria italica
  Peptide Sequence Number=SeqID_120043
taagtaactaacaaagaaagaaaccgtttaactaagaaaagaatagaacaagaaaacggacaagaaggtaggaacaacgaaactgcgaagtatcaatcggaagcgatatatgcgaacgggaacaagatgaccatgtcgttccattccaagacttggcaacgcatgaggagcaggttgctccactggctggtgcagatgatcagccatcgccattggagatcctagcctcaactgagcaagaagcaggtgaagccgaacaggaggagat

SEQ ID NO: 54070 - DNA, 259 bp, Setaria italica
  Peptide Sequence Number=SeqID_120044
cccgtcgcatcagattcagaaatcttgtatttgtcaacaaggatgcgttcaacagatgacaacttcagccttcttatccgctttagatttctactattaatttggttgctgaggataataaatacttatccagagccaaccttcctcaagattgaggacctggcaggtaccagctggcgctctagtatatctctattcctgctaactagtaaaaagttttgtatttgcccacagaatttacatggaggtacatatttcc

SEQ ID NO: 54071 - DNA, 493 bp, Setaria italica
  Peptide Sequence Number=SeqID_120045
gttgccttttcggatgttgtagtggactctatggttgttgaaagagcccgtggagaatctcaaagtacatctggatctctccagtctctctgttggggatcttctgcctttggaggaattgtgagtgcctacttcagcggttcacttgtggatacttacggagtaagcatttttacccctgatgacatctgctgttgcagttcttgtaaatgaacatcgcatgcctttcggagaacgtactatcttactctctggttcaggatttgttgagagctctaagcagcacgtcagacagctttggacttcagtaaagcaacctagcattttcttgccaaccttgtttatattcctttggcaagcaacaccgcagtcagattctgctatgttttcttcatcacaaataagcttggattcactccagagtttctaggtcgtgtgaagcttgttacctctattgcatccctgcttggtgttgggatatacaacttatttt

SEQ ID NO: 54072 - DNA, 295 bp, Setaria italica
  Peptide Sequence Number=SeqID_120046
ggtgttacagcattttacccctgatgacatctgctgttgcagttcttgtaaatgaacatcgcatgcctttcggagaacgtactatcttactctctggttcaggatttgttgagagctctaagcagcacgtcagacagctttggacttcagtaaagcaacctagcattttcttgccaaccttgtttatattcctttggcaagcaacaccgcagtcagattctgctatgtttttcttcatgtatgtatgagaaagtctttacggtattaatatgtgatggatctgtcctgtacatgc

SEQ ID NO: 54073 - DNA, 419 bp, Setaria italica
  Peptide Sequence Number=SeqID_120047
caggtgcttctcgtaactggggcttaatcggcagtttgggatcagtgatgagtggttctctattggtgattcattaatcatcacagtccttagtcaggcttcatttatgccggtcttggtgtttagctgcaaaattgtgccctccagggatggaagcctacttttatttttgtcaactttgatgtccatttccaatgctggaagtgttactggtggtctggttggtgctggtctaacaaggtttttggggtcaccagggacacctttgggaatttacctctcttgattgtggtctgcaatcttagttcgctgttgcccttacctcttttaggcctcctgaccaagaaggaaatacaaggtagaacaacaaaattaaattaggtaagtaaaactaaaaactaattaaacttagtaactta

SEQ ID NO: 54074 - DNA, 411 bp, Setaria italica
  Peptide Sequence Number=SeqID_120048
ttcgttgtattctattgtcgtctaagtttcgtaccttgggtcgtcgtcttcgttcgacctggtgcgccgccacaggatcaccatcgcgcccttcgtgccccccatcgtggtcgagatcgccaagagctcccgcgtcaccgccgacgacctcgcatccatccgcatggtcatgtccggcgccgcccccatgggcaaggacctccaggacgcgttcatggccaagatccccaacgccgtcctcggccaggggtacggatgacggaggccgggccggtgctggcgatgtgcctggcgttcgccaaggagccgttccaggtgaagtccgggtcgtgcggcacggtggtgcggaacgcggagctcaagatcgtcgaccccgacaccggcgcggccctcggccggaaccagcccggc

SEQ ID NO: 54075 - DNA, 281 bp, Setaria italica
  Peptide Sequence Number=SeqID_120049
aagaactaacaaaactacggtagactacctaggacggggactaccgggacgggactaccgaccaatcgtgatcatgcgcaagttcgacctgggcgcgctcgtcgacctggtgcgccgccacaggatcaccatcgcgcccttcgtgccccccatcgtggtcgagatcgccaagagctcccgcgtcaccgccgacgacctcgcatccatccgcatggtcatgtccggcgccgcccccatgggcaaggacctccaggacgcgttcatggccaagatccccaacg

SEQ ID NO: 54076 - DNA, 165 bp, Setaria italica
  Peptide Sequence Number=SeqID_120050
catcgtgcggacagaagggtctgaactcaccgaggatgagatcaagcaatttgttgccaaggaggtaaaagcagtaccatgttcttcctatgtttccaattgaactgaacaaaagccagagctgttggacctcatgactgaaatctcacacaatgctgcgctgca

SEQ ID NO: 54077 - DNA, 142 bp, Setaria italica
  Peptide Sequence Number=SeqID_120051
ctcaatgaaagatgagcttgccggtgaagtccctgttgcattcattatacggactgaagattctgagattagtgaggacgagatcaagcactttgttgatcctcttgtagaacacaacctcctttgcaacaaactgcttgat

SEQ ID NO: 54078 - DNA, 171 bp, Setaria italica
  Peptide Sequence Number=SeqID_120052
caatgaaagatgagcttgccggtgaagtccctgttgcattcattatacggactgaagattctgagattagtgaggacgagatcaagcagtttgttgcaaaggaggtaataccaaattgtaaccttctgaaataaataattaacacaattgtcacatgtccatgcatatcta

SEQ ID NO: 54079 - DNA, 280 bp, Setaria italica
  Peptide Sequence Number=SeqID_120053
taaatttacctttcttgttctaaaattccttgtaggtaaggtaccttgtagagtcacgacttgctgcgggcattcctggtggtgacagtgcacagtccaaaagctaagcccgatattgattcttttttcccctccactttgtacacccttgccaaaaatcatgtagtattcatgagatatacatatagaaaggccaggcgatcaatattgattcttttagatgggtaaggtatactttgttatttgtccagcatatgtattgtgtcatgtatagataccg

SEQ ID NO: 54080 - DNA, 194 bp, Setaria italica
  Peptide Sequence Number=SeqID_120054
ggtccctcatgattgggttgtcatgcagcgataggttctgaagagccgtgcagtcttggcaacccagattccaccccgatgatgcaaggtagaaaaggaattcagacgtgagcagggcatgattggtggtgcttttcacttctccatcgtcggctacgcgaagcgacaatgcctaggcactctcgtctttcttt

SEQ ID NO: 54081 - DNA, 246 bp, Setaria italica
  misc_feature (211)..(211): n is a, c, g, or t
  misc_feature (217)..(217): n is a, c, g, or t
  Peptide Sequence Number=SeqID_120055
tgtagtgtgaatgtgtggaataacaggccgatctcgtgtggtcttctttagctggaataatgggttcagattgtgttaatcgggtaaattctgtgtagattaagaaggcttctctgtctcccctcaaatgcagtttgctgtgtcttttcttgtatagtttgataatcaaaaatctgctaacaatcagaggcaaaaaaaaaaaaaaactagngacacncacagggagtagcgagacgacacagggag

SEQ ID NO: 54082 - DNA, 225 bp, Setaria italica
  Peptide Sequence Number=SeqID_120056
ttaatttaaaagtcttgtctagttgtagtaaggtctaattaccttgtaaaattatttgttgtaaggttgtcttaggggtaaaccttgggtacttctatttctgcaaggtcttcctaggactgttagtctggatgacgttgctgccttgaattatgactttcattaatgatccgcactatggcaattcttcgattgagttttgatatcaatggattgattacttca

SEQ ID NO: 54083 - DNA, 265 bp, Setaria italica
  Peptide Sequence Number=SeqID_120057
gggtccggcgagcgtggggcgactgcgtctgccagtcgaacacctgcacgccccacctcgcggtacgcctccgggaccacgttctccggcagctccacggggtcggccggccgccgtgaactccgcgccgaagccgtcccactcgccggacacgcgcgccgcgaactctgcccacttgctgttatctgccaaacctggctgtgcgcctgcggtcgcggcgtccgtggcgacggcgttggaggtctcaggagagacgactcgcagt

SEQ ID NO: 54084 - DNA, 219 bp, Setaria italica
  Peptide Sequence Number=SeqID_120058
gggggcgccatcggcaacttgctgcagggctgggataatgccaccattgcagtgtcatggagcagcagcaggttaaagctgactcggatgccgagagtcaaatggtggagatgacaatcaacaagtgtggaaggaattgaatacctcatggtagcataattggtggaggatggcaattggcatggaaatggaccgagagataaggtgcaggctgcagct

SEQ ID NO: 54085 - DNA, 447 bp, Setaria italica
  Peptide Sequence Number=SeqID_120059
tccccctcgcttatatattttgcactggctgtcttctacctgcctgagtcaccgaggtggctcgtgagcaaaaggaaggatggtcgaggctaagagagtcttgcagaggctgcggggaagggaagatgtctcaggagaaatggctattctggtcgaaggtctgggtgttgggaaagatacacgtgttgaagaatacataattggccctgatgaagggctggctccacatccagagaagatcaaactatatggacctgaagaaggccaaaacctgggttgcccgacctgttagtggtcaaagtgcacttggaagtgcgtatggtctcctctctcaacatgggagcatggctagtcaaggtaagccctttgtggataatgttgtcactcttttcgatagcgtccacgagaagatgcccgatataatttcgagcatgcggagcacattga

SEQ ID NO: 54086 - DNA, 245 bp, Setaria italica
  Peptide Sequence Number=SeqID_120060
tttgggatgtctctcttaccaaaacctgattggaggatcatgcttggggttctgtcgatcccctcgcttatatactttgcattgactgtcttctacttgcctgaatcaccgaggtggcttgtgagcaaaggaaggatggccgaggctaagagagtcttgcaaaggctgcgggaagggaagatgtctcaggtaagaaaattaggtacttactttactaaattaacgttagttaattacttttacta

SEQ ID NO: 54087 - DNA, 223 bp, Setaria italica
  Peptide Sequence Number=SeqID_120061
ctgcacacaaaaagggtttcagacaaaggcgcctatgacatgcatggtgtacatgagcatgtcagttgtcagcacatatgactgtacgcacctttcaagtctggtcggcgttctacccgggtcttattcaacctgttgatgatctcgttgacacgcttctcgactgtcagcacacggacctgtcaattagtagatagctttattttcaatcatacttcacact

SEQ ID NO: 54088 - DNA, 263 bp, Setaria italica
  Peptide Sequence Number=SeqID_120062
gagaggccgggatgatggaagggcagcgggtggcgacgtaccagacgtcctcggggaggccgtacttgatgagctcctcgttctcgttcttgtcggcgcccatgtagatggtgtagtcgccggcgtccggccgcgccttgaagtagagcaccatcgctccgatcctaaactctcctcctccttcaggcctcttcttcagacctcttctttctctcttctacctacctcccgtctctgagctcaacggctactactatgtaaat

SEQ ID NO: 54089 - DNA, 231 bp, Setaria italica
  Peptide Sequence Number=SeqID_120063
ggtcagagcatttgcaaatgtctcctgttgaaggctgcccctccgtatttcaggctacttgcagcctgtctccgggaatgtaccagtacaagttctttgtggacgggagtggcggcacgacgagcgccaacctactgtatcaggagagtatggcatagttaacactcaatactgagtttatttgattaatttcccttgtcaagtatagagtgttaactatgccatactctc

SEQ ID NO: 54090 - DNA, 347 bp, Setaria italica
  Peptide Sequence Number=SeqID_120064
ggccacggacagacagacagagagacccgttcgtccatggcatacggcagcttgcttcacatctgctgtttgctacagttaaaactccggcacttgtcacaacaaaccatctatgccatgctcttctcacaagctcagcaagaacttgaaaatatcactcagcgatattatgccttccacacgcttgctcccagcttccacaatgaacacccgccgcaccccaggattagacagtcgctccatcactttcagcaaaggatcagaccggaggcacaatactaggacaacctactagacccgttagaaaataaaccaaaaaggtagtaattaggacaatacttagtaca

SEQ ID NO: 54091 - DNA, 415 bp, Setaria italica
  Peptide Sequence Number=SeqID_120065
cattattgtcatcttatttaatactagcatcgcacactgatttactagtggatgcgtttgtggcatgtgttataaaagaacggctttctcaacatggtatccaatggtagttcagatagaaatttgccagcgttattctaaaaggatccaaagcccaaaaactctcttttggcaaagctcaatgctgcgggtatccttgttgacatgggataagcttcttatatctttctatattgcaggtcaatcagaaaatgattgaaatcaacattaatcaaagatctttatggcgaaattgaccgacttaaagcaggttagcagtctcacaatcattgcatctcatcaggatggtgacatgatagcctcaccataccttgtctacttcccagaggtatatgctgctagagaaaaagtacga

SEQ ID NO: 54092 - DNA, 396 bp, Setaria italica
  Peptide Sequence Number=SeqID_120066
acgacgaattacgaaggtacaaacgcctgcttggagcccgggtgataccaccggctgctgaggaggacatgtgctttgggttcaaccggaggagccttgacgccatcgttatgacaagtggcgccgtcgcgtactactacagattgatgcaagtttgccaggtcagcgccctctcgccaagaacgcatcggcaattcaggtctccttccgttacattgttcgattttcagatgtcttccgctttgcctgtaagcatgggatcgtcagctgttcgtatgtactccctttatccctaaatttataagttattttagcttttttaaatttatagtattttattatactatttagatgtaccatatgtttagatgcataataatatctatatatatataa

SEQ ID NO: 54093 - DNA, 411 bp, Setaria italica
  Peptide Sequence Number=SeqID_120067
ctcctgaatcaagttttgtgcaccacttgttgctcttgctgcatgatcttcaactgaagcataggctttaccgccacatggtaaatgtctgcaatttattttctccaacaactttatcttagccaaaaaaaaagagaatcccagaaatttcgttcgcgacatagtataaatgactccataaggattcacaaatccatactctgcaatgccttgcaaactgaacttgcctatcaggagctgtagactaaatcatctaattgatagcatggcactaaacttttcggtcgaggaaatactgtgtatacattcgttccttttttgcttaggttaacctgaacctaacctaaattagaccaaatactaaatagtaccgaaggaagttacttactaattaaaccgggggtaaattta

SEQ ID NO: 54094 - DNA, 341 bp, Setaria italica
  misc_feature (112)..(112): n is a, c, g, or t
  Peptide Sequence Number=SeqID_120068
tgaagcataggctttaccgccacatggtaaatgtctgcaatttattttctccaacaactttatcttgccaaaaaaaaagagaaatcccagaaatttcgttcgcgacatagtntaaatgactccataaggattcacaaatccatactctgcaatgccttgcaaactgaacttgcctatcaggagctgtagactaaatcatctaattgatagcatggcactaaacttttcggtcgaggaaatactgtgtatacattcgttccttttttgcttaggttaacctgaacctacctaattgccaatctaatgtccgaggtagttcttctattaaccggggggtattt

SEQ ID NO: 54095 - DNA, 218 bp, Setaria italica
  Peptide Sequence Number=SeqID_120069
atcatctgaggagtccacattttgttgttttttgtcttgaatgccgccatagttatactgatccatgaacaataaggaatgccaaaagtgcaatggttctagttctatccactcgaaaagatcccttgtctgtaaggtttttaataagctatcacagtatgcatgtgctgatgccaagtctacttttccagtatcaatgataatcttggaaaagttcg

SEQ ID NO: 54096 - DNA, 432 bp, Setaria italica
  Peptide Sequence Number=SeqID_120070
aaactttacaaaagagccaaataaaaagaaaaggcactcaagaatatgaagcagatgcagataaagtaacaaataaaatactattacatgtgacactaacaatataaaagtttgataaagaaaatgccagccatttacagcatactggacttactgaaaatatatgcaaaacggtgactatttgaggataagatcatgtgctggtttggacaaatggtgcatgctgactgtcatttaggctatacgaaattaagaataaacacatctgaaacaaaaaaaacaatacactaactgcaggtttgtagatgatttacagaggagatgatcgattgcagggtccttttttttctgtagagaagtgccatacagcccaccaagaacaccagaggcagcaactgcaactgtattcaaaaagccaagcagcggattccc

SEQ ID NO: 54097 - DNA, 230 bp, Setaria italica
  Peptide Sequence Number=SeqID_120071
gctaatgccaattcctcttcaagatgtctagacctcaattcgaagctatccttctctgcctgaagtcttgtgatcagattctgagcatcctcagtgttttcctgagcttcgcttgtgattttcttttgttcacgctagagccttggatagcatttctttctcagcttcgagaagtagtacaattacctaagaaatagaagtagactactactaagttaccttaagaacaa

SEQ ID NO: 54098 - DNA, 256 bp, Setaria italica
  Peptide Sequence Number=SeqID_120072
agtcattcctagaatgagtgctctctagttccttagacagtgacaacgcactattgttcatctcatctagtgactttgttgcctcatccaggtctgcttcaagagcttttcgtgcttcagaatctacctgcaattgttttgccaacgcttcaagctccctatttaaggttgacacaattttcctttcctcaacaagctacaatagtagtacgtaagaactaccaaaattacttagtaacaacaataccaagacaaa

SEQ ID NO: 54099 - DNA, 358 bp, Setaria italica
  misc_feature (287)..(287): n is a, c, g, or t
  Peptide Sequence Number=SeqID_120073
tgatcgaagaagaggatgagtatcttcttgcaagcctcgtagcacataaacgaaatgccagcagcaggcaccaacttcatgtgctacgaggcttgcaagaagatactgatcgaagaagaggatgagtaaagtgcgttcagatgcatgacctcatcggagctcagttttgcgacaatctgacaccggccgtttttaggatatttcttgaatcaactggtgctggaactggaagaaactcacagctgaggttgctgctgcaagaagcggaaaactctcgacccgtttcngtatctaatttgatcagatgagtttacctgtgttcccggatttttcgacactttaatgagtagaaagcatg

SEQ ID NO: 54100 - DNA, 452 bp, Setaria italica
  Peptide Sequence Number=SeqID_120074
agatcaagcatcagtttccaacttcttagaatgcaaattgaagcacatgcacttatcgatgagggcctcagattcgttaccgtattctttgaacctgtactcctccaacttgaatgctgatggaaccttcccttcgctgtagcaccggttacacaggctgaacgagtgttttgtttccttgaatcgtgatccaatgatagggtaccggcagatggagcatgtgtggtggccgtgacgtatgtgatcactctcttcaagcttcaccaaagtgctgaggatcccaaatccccaatctgggtcattgaacatctctaggaactctgtgtatgataccatggtagggtcagactccccgtgcatttcgagcatgtcactagtcccctattgggttgggttatttatttaaacttagttcttacgtaagtaagtctttaattgttaagttaagtcgt

SEQ ID NO: 54101 - DNA, 256 bp, Setaria italica
  Peptide Sequence Number=SeqID_120075
cccaatccggactcgcctccgacgccgccgccgtgctcctccggcgacctgctccggagcaccctctgcgttgaatctttcctcctactcctgcgtcgcgctgctggagatccgtcctcctctcggtaagccctagcctcggtcgatttcgcttgcgtccatagtatgcgcgggaggaattgaatcctgcggcaagacctattgccgttgttttgcctttattagtggattagatgcaggcctgcggctcctttcg

SEQ ID NO: 54102 - DNA, 242 bp, Setaria italica
  Peptide Sequence Number=SeqID_120076
ccccaatccggactcgcctccgacgccgccgccgtgctcctccggcgacctgctccggagcaccctctgcgttgaatctttcctcctactcctgcgtcgcgctgctggagatccgtcctcctctcggtttcataatgatttgtgcaacaactgtaagcgtcctgggcattttgctagagagtgtcctagtgtggctgtctgccatacctgtgggcttcctgggcacattgcagctgagtgtt

SEQ ID NO: 54103 - DNA, 228 bp, Setaria italica
  Peptide Sequence Number=SeqID_120077
ccatattgctcgcaactgcaccaatgatcctgtttgcaacctgtgcaatgttgctggccatttggcccgtcagtgccccaagtctgatacattgggtgagcggggtgggccacctcccttccgcggcggcttcagtgacattatctgtcgggcctgcaaccaggttggccatatgagccgtgactgcatggctggtgccttcatgatctgccacaactgtggtggccg

SEQ ID NO: 54104 - DNA, 215 bp, Setaria italica
  Peptide Sequence Number=SeqID_120078
cactcagatcggtgggagatcagagtgttgtgctcgctcctgatccagcaccccctatacactggatgagctgcaagatggcatgaagggaggtgtagcattgtcatctctagctcatccagcacccctatacactggatgagctgcaagatggcatgaagggaggtgtagcattgtcatctctagcttgtaatggcaatctttctcgctcttct

SEQ ID NO: 54105 - DNA, 342 bp, Setaria italica
  Peptide Sequence Number=SeqID_120079
ccatattctcgtatatgttagctgaaggacttggcttgtcagggattgtttctatattattcacggggatggttatgaagcattacacattctccaatctttcagacaattcgcagcgctttgtttctgccttcttccacttactgtcatctttggctgagacatttgtgttcatttacatgggctttgatattgccatggaagagcacagctggtcacatgttggcttcatcttcttctcaattatattcatagttgttgcaagggctgtaaatgtcttttcttagtagacaataaacttaggttaaaacaaataagtaactaacggaaccaaagaaaaca

SEQ ID NO: 54106 - DNA, 386 bp, Setaria italica
  Peptide Sequence Number=SeqID_120080
tttctgtccttcttccacttactgtcatctttggctgagacatttgtgttcatttacatgggctttgatattgccatggaagagcacagctggtcacatgttggcttcatcttcttctcaattgtatccttaaaagtcctcttttttcaaaagaataataccaattgtggcctttaaattatttagtttgactttggttccttgacttgctcaaaaatagatattcatagttgttgcaagggctgtaaatgtcttttcttgtgcatacttggttaacatgtctcggccagaacatcgccgtatacctctaaagcatcagaaagcactttggtttagcgggcttagaggggccatggcttttgcccttgctctccaatctgtgcatg

SEQ ID NO: 54107 - DNA, 211 bp, Setaria italica
  Peptide Sequence Number=SeqID_120081
tataaacttccactggttgaatgccttatgttcggtgcccttatatctgcaaccgatcctgtcacagtgctatcaatattccaggaactgggctctgatgttaacttgtatgctttggtgtttggagaatctgttttgaatgacgcggtctgttcttacttctttccagtgcatgcaagaatactagaatagtcagtacttgtacatgtga

SEQ ID NO: 54108 - DNA, 530 bp, Setaria italica
  Peptide Sequence Number=SeqID_120082
cgtgtgggaggttgccggccgctgggctgccggttcctgcctgtgatgcacgcagggggtcaccaagacggcaacagcagcaggtagatgagaaacggagaacagggagatgaggaagtagataaattctgcctgcctctttctgatttgcggccgcatataaatagcccagagtacagacgcaacaactttgctagagtcccttaactaatcaacaccctgataacaaccaaatctaatccaatgctaatctgaaacaactaagacttgccgctgaagccaactaactgaactcttcggtgctttatccctagcacctcctcctctggtaggtgatgccgacaataacagtggtagagggaataaacgtattcaactacaaaaaaacaacagtaggtggttttttaagccacactttaatagcaactaaataagaagcataagagtctaccacagatgaacagtttctgcatgacaataatagacttagacctaaatttagttaccctaattactaaagggtacctaaa

SEQ ID NO: 54109 - DNA, 431 bp, Setaria italica
  Peptide Sequence Number=SeqID_120083
caggcgctggcggttcttgtgccagtcctggtcacagcgccagcagtcgtcgattgggttgcctgtcccgcacgacaggtacgccagattccgccgggccgtgctgttcctgatggacctgcagagcaaccattcatccaaccgaagcagcagcctttcagttttttttcacaacaaataaatttgtagaaattaattactacaagtagttacaacgcagaaaaggagcgcaagcagcattcggtagttcaggaataagctgaagcgaacaggccgcaaaccaaagcagtgattagatgacagaaagaacatttcttactaactcatttgcatctcatgcatgagccctggcaattctagacgcattcaccgttcaggaattcaagtacagtgattagaagatcaatgcggccagaaacttgcaataagtg

SEQ ID NO: 54110 - DNA, 370 bp, Setaria italica
  Peptide Sequence Number=SeqID_120084
atgaccccatagcggagggtgcccttgcgcgggttgaccgcatcgtcgtcgctggggtcggtgacgacgtatatcttgccgtcacggccaccgatggcgttgcggccgaagccgatgccgcagtcagccaggcgctggcggttcttgtgccagtcctggtcacagcgccagcagtcgtcgattgggttgcctccccaacaacagaaaagaaacaagacaacagaaaccaagctaccggaacaacactacggttacagttttttttcccttctcacttctcctttttgggccacttttgacgagggttatatatgatggtcctgattggtcccgattcacccattgctcaacctccccctgctcccgacat

SEQ ID NO: 54111 - DNA, 250 bp, Setaria italica
  Peptide Sequence Number=SeqID_120085
ggctgtcatattcataccgaaattcttatcttagatgggctccagacgataacacatctcctcataagtcacacatactcataagatcatatcgcctcccaattccaatgggggtctgagttgacaccccaaagctgttgtagagtaatggcagccgtacaggaagaatcaagacccaagtccagatggctggtggagcattgttctcttgtataaattgtaaagaaaagcaacacacaaaaggcaaacg

SEQ ID NO: 54112 - DNA, 217 bp, Setaria italica
  Peptide Sequence Number=SeqID_120086
acataatttattctatccagcctcacctcacagcacatacattacaacaggatctgaaggactattaccgtcctaccgcttcttcaacctccgggtgtcaaaactcgaatccaggacaaaaatcaagccgcaaaagccccctcaacacaagctttacaaccgaccattcgaaattgtagtactacggtactaaaggtaaaactagtctaaagtacta

SEQ ID NO: 54113 - DNA, 206 bp, Setaria italica
  misc_feature (191)..(191): n is a, c, g, or t
  Peptide Sequence Number=SeqID_120087
cagtacttgacccaactcttccaacagccaggaagatgtagttctccaggaagtctgatgccattctctggatttcttttgggaatgtcgcactaaacagcaatgtctgcctgacacctggtggaaggacaataagtaaccaaatttaagaactaacaaaacaaaattaataactaaattaataagttaanaaaaacctaaataaa

SEQ ID NO: 54114 - DNA, 516 bp, Setaria italica
  Peptide Sequence Number=SeqID_120088
gtacatagtcgtcaatatcattgggcagatcgaagttcacaacatgagcaacatgaggaatgtcgaggccccgagctgccacatctgtagcaaccaaataggagtttgcccactcttgaatgatctcaaagcatattctctttcctgctgatttctatctccatggatagaagtagctggaaacccattcatacacaaccagctttccaatgaatcagcaccccttttggtttccacaaagacaagtgtgagattttgctttccagtatctctttgtgcatgaagaaggtccatcaggtgacttcttttatctgcctcctgcacaaattcaattctctggacaatcaattacaagtaacttagaacccaaactacttaccaaacaagaccaaggaaagaatagtaagttactaccaaggaaagtactagaatagaccaattactactaggaatttacttttagggaaatagtacgacaactaaaacaagacaaatagtactagacctagaacaaca

SEQ ID NO: 54115 - DNA, 254 bp, Setaria italica
  Peptide Sequence Number=SeqID_120089
ggggattcttattcaggccatgaataggtttaacatttaacatcactgtatcattaacaaagaaataacagccaacctggatttcttttgggaatgtcgcactaaacagcaatgtctgcctgacacctggtggaggcatgtccatttgctcaacaattctcctaacttgtggttcaaaacccatatcaagcattctatccgcctcatcaagggcaaggtatctaattgactgcaaagatactcttgccctttcc

SEQ ID NO: 54116 - DNA, 367 bp, Setaria italica
  Peptide Sequence Number=SeqID_120090
tatggcttgtgtaccataatgaaggccgctcactatcaaaattgatatatacggctgaagaaacaaagttagtcaatggcactgccgaagtcaatcagacgcatgttcagcttattttctttgcttcagatggaacctctcttagacactttccggtctccacatcctcaaagcaaatgatcatgttctcaggtttgatatccctgtgagtgatattgcgatcatggcaagctttcagtcccatcagcagctgccataagaggttttgcatttgattttgcccagcttttgttgtccttaaccaataccaccacttcgatgggtgtagaacttgaatatgtctgacctcctcattattgttgccagt

SEQ ID NO: 54117 - DNA, 285 bp, Setaria italica
  Peptide Sequence Number=SeqID_120091
aataatacaattttagaatagtgagcggccttcattatggtacacaagccatatttcccttgattctgattcgaaagattctataaacctagccacatgcttgagtggttcttcggtaacagacatgttcctttcttcaagagttctggaagcatttgaaaataattccccaaagtatttctcccgcaatccactcaagtaagcagcatttcccctctcccaccatttatgcgcttcagtatgaataaatcaccatctactgttctgagacatgatcttcatcag

SEQ ID NO: 54118 - DNA, 319 bp, Setaria italica
  Peptide Sequence Number=SeqID_120092
atcctattcataggcgttttgatctgaaaggctcatctcttggccgcacaactgataagccacagacagagatagatcagtatacaactctgaaagacctggatctgaacttcatctttagattgaagaagcaatggtttcaagagttccaaaggcaagtagacagagattgtgaattccttgaacaggagaaaattatggactacagtcttctggttggcgtacatttcagagataacagaagaagaaaacttaactaagtaactaagaaaaggttaaccaaattaagaaactaaataagaaataaataacaaaacaa

SEQ ID NO: 54119 - DNA, 256 bp, Setaria italica
  Peptide Sequence Number=SeqID_120093
cacggcgcatgcgctcctcgacggtgcagttggcatcgaggtgggtgagctcgaggcggaggccggcacaggtggtgaaggtcaggcgtgcggtgtcttcacctcctacggcgccggcaccatcaccgggctcctccgcaccgaggagttcacgttcgggtcggagaaggtgaccctcgacttcgggtgcatcaccgcgacgaggatcacgccgggctccctggacggcgcgtccgggatcatcgggctcggcagg

SEQ ID NO: 54120 - DNA, 210 bp, Setaria italica
  Peptide Sequence Number=SeqID_120094
tagtaaaacttgcaactgcaagagactcgtaaatggtaacacaatgtaaattactacctaacagcgttcagattaaggagcaaacaggttgcttgccagctgggccatccaaatctactgcgagtggcttcggtacattaaacatcaccatgttcctgctagaacacattactgttaagtccagtagcacctaagatgacattactcagg

SEQ ID NO: 54121 - DNA, 356 bp, Setaria italica
  Peptide Sequence Number=SeqID_120095
tggcatcacaaactgatacaagtaattcaactgtgatggaaggaggaccttcagatcaggctaacattgagaaacatgaaaatggtgatcttgttgatcatatgtgtggtgagaagacctccatggagaatggtactgcaaaagatattgctgttcctgagaaggccaatttagggagcagttctggagacatctgcaagctaggaatggatgtaaatacgatgccagctgttacagagagaaatatgccctttttcatgtctaaaaggactaaggaaagggaaataaacaaactaaaataaagaaacaaaaggttaaagtaaacttaaagtaaaagtaaaacttaaagtaactaa

SEQ ID NO: 54122 - DNA, 275 bp, Setaria italica
  Peptide Sequence Number=SeqID_120096
cccctttgtcatcgcttccagagatcccatgcctctgtactttttgactcggcggccgtcctaaaagaaacatctcaagagttataactcaacattttttgtgaaagagcaagtgcagttgcatgtacaggaaatagaatagcacaaattcacagatcagaattagttaccaactttagaaactgcttctacgatagatacagcagcacaataatagacacacaaaatgcaaattagacgtttactacaacttagaattactttaaattaattta

SEQ ID NO: 54123 - DNA, 312 bp, Setaria italica
  Peptide Sequence Number=SeqID_120097
gggaaaagaaaatgaaaaagcggaaacccatgatgcaaccacatgcagtagaacgaatctgcacccccactacgtgcgtacaccgacatctcaccaaacttttccactctgtcagtgtccgccggcctgctctgtgctctccaccaccacacatcacctatcagctttctcaccaaacccaggatccaaccaccgcaaccacgacggcggcgacgggcgaggcgggcgcgtcggcgtcgatggtgccgttgccgccgcccgtggtgaggtacacgtcgagcttgacggtggcgtcggcgccgctcatgctgg

SEQ ID NO: 54124 - DNA, 445 bp, Setaria italica
  misc_feature (383)..(383): n is a, c, g, or t
  Peptide Sequence Number=SeqID_120098
aaaaaacttaaaaaagaaaaaagaaaaaacaaaaagaaaagaaaaggaaataagaaggactagaaggacaaggaaaaaggaagagcaagaagctgctttaaaacaactaaggaagtcattggtcattagagcaaaacccatgccaagcttctatcaagaaggccccccaccaaaggttgaacttaagaaggtgcctcctactcgtgccaaatcaccaaagtttacaagttcaaggagaaagagttgcagtgatacagcacagacaccagaggggaaaaacactagtgcatcatctgcccggacgcatcgtcacagcattggaagttctaaagatgctaatagagtacaatgctcgctgaagaatggtgtggcgactaaaaccngagctgttaagcctgagctgaaggccctttgaagaacattagcagccaagctctgcgattgt

SEQ ID NO: 54125 - DNA, 346 bp, Setaria italica
  Peptide Sequence Number=SeqID_120099
gtaaatttaagagcaaaaatgccatggaaatgaaaatggctaagagttagataattaggtttgtactgcgacaatcgcagagctttggctgctaaatgttcttcaaagggccttcagctcaggcttaacagctctggtttttagttcggccacaccattccttcagcgagcattgtactctattagcatctttagtgcatcatctgcccggacgcatcgtcacagcattggaagttctaaagatgctgtgacgatgcgtccgggcagatgatgcactagtgttttcccctctggtgtctgtgctgtatcactgcaactctttctccttgaacttgtaactttggtg

SEQ ID NO: 54126 - DNA, 389 bp, Setaria italica
  Peptide Sequence Number=SeqID_120100
taaggggttacttactaagtctagtaaaggggttggttgtaagtaaagttgtatttgtattaaatatgttgggagattgagatgttggagagcaagcatgttctcagggtcgaccaagatgagcttgagactgtgatccctcagattggtgggctggtgcggattgtgaatggggcttatcgggggtcgaaggctaggttgctctcagtggatacagagaaattctgtgcaaaagtgcaggttgagaaaggcctctatgatgggaagattctcagggctgtcgaatatgaggacatttgcaagatttcctcatgatatgattcatttcatttcctggatcatcgctgaagcaaaacaagagccatatgatctaggtactagctctgtca

SEQ ID NO: 54127 - DNA, 202 bp, Setaria italica
  Peptide Sequence Number=SeqID_120101
agaggaacgggaggatgactcaaaagaggccaacaaggcaacagggaagattgcgattgctcttcagaagtctgtgccagggccgaaggttaatcctttctgttgctcctctccttggccttctcctcctccttcataagctcatccaatgctgacctccttgcttctgctgctttcacacttcccttccccttcttcttgt

SEQ ID NO: 54128 - DNA, 246 bp, Setaria italica
  Peptide Sequence Number=SeqID_120102
gtttagttcgcatttccacttctgccggtgaagcatccaaaccatcttgcaagaaagccttgttcttggctctgttgaaccgcagtgtcagcagggttgttgtgctctgcagcaggttctcgcctcccttgcacaggcccagagtagtaacctgggacttgtgtgttcatagcgttctgctcgtcgacggcctgcgccggcaccggcggcgggagcggttgcggcttctggtagtgcgatggagcg

SEQ ID NO: 54129 - DNA, 227 bp, Setaria italica
  Peptide Sequence Number=SeqID_120103
gtcctatgggtttagttcgcatttccactactgccagcgaagcatccaaaccctcttgcaagaaagtcttgttctcggctctgttgaaccgcagtgtcagcagggttgttgggctctgcagcaggttctcgcctcccttgcacatgcccagcgtagtaacctgctcataccacaaaaaaagaagaaaacaaaaatccaatcgagttcccttaacaattaacaggaaa

SEQ ID NO: 54130 - DNA, 361 bp, Setaria italica
  Peptide Sequence Number=SeqID_120104
aggatgcaagcagtcacatcgtcaagcaagaactgcaaggacgcacctgggacttgtgtgttcacagcgttctgctcgacctgggacttgtgtgttcacagcgttctgctcgtcgactgccggacccaagcaggaaggccagcagcagcacgccggtggagtggagcacgcggtggaggttggtgcggaagagcagcagcgggatggcgagcggcaggaagtagtcgagcaccacgcggtacgccagggcgtccgccgccaccacgccggcactgctggccgtcagacccagcagcacgctcaccagcgccccgctcagcgccttccccaccggggtccgcttctccgaccagattgtcta

SEQ ID NO: 54131 - DNA, 199 bp, Setaria italica
  Peptide Sequence Number=SeqID_120105
actagcacactacacaaagtcagctagtgttcatttcagtcaccgttttgtgtgcgccatcgcatcttattcgacatgtaaaaaggttcttccaggagcactgtccgcaagtgcacctggaagaacctttttacatgtcgaataagatgcacttgcggacagtgctcgtttgcttgctggtgttactaaaaaaaaaaaa

SEQ ID NO: 54132 - DNA, 384 bp, Setaria italica
  Peptide Sequence Number=SeqID_120106
atgaacaccatttgccttccagttcagttcatgactcttgacttcaccaaagtccaggtgttgaactcatccatcctttagcgcaaacgaacttgaacttggttttccacctccaccatatgcctttgcaatctctgctgtattagttgtattgtcagtagtcctcaagcaaacctttaggatacctcgttgcatgaagaccactgctccaataggccttaatccagcagcagcactcctccgactcagctccaaaccgatttcatgactcaattttgagtgtccatctgctctgattgccttatagtaaaaaaaataaaacatgtactatagaaaatgagatatttttagagctaattatataatatttccccctaaaaaaat

SEQ ID NO: 54133 - DNA, 265 bp, Setaria italica
  Peptide Sequence Number=SeqID_120107
taaattacttgccttggaacagctcttgtgccatacggccggccacgccatcagtatctttccatgttctagccacagatggaaatggtaaagtgcgtgcaggtaggcgaagggcaacggggtcggagcgtatgcctacgcgccgtagccgaggaggtggctgttgttgagcggggggcacgtgccgtagccgtagccgccgccgccgccgccggtgtactcctgggtggtgctctggtacgactggtagcggcggccgccggcg

SEQ ID NO: 54134 - DNA, 416 bp, Setaria italica
  Peptide Sequence Number=SeqID_120108
agggaggggaggcgggagcggggaacggcgctggagccgaggtggtggcaggtgagcggcgaggccgcggtggaggacgccatggcggcggcggcggcgggggaagtggtggtggaaatggaggtggtggggtgaggagcgcctccgcgaacacgagcgagtagcctaggccgagggaggagctcccgaacgcggcgacgaaggcgtaggcgacgcgggagccgagcccggtcttgatgaacccgcgcgcgaagaagaaggcgagcgcgatgagccaggggatggggtcgccgaaggcggagaaggccgcggcgaaggtgagggtgcgggtgagcacggcggcgccgaggccgagcagggcgacggcaccgaggggcagcggctgggtgatgatgccgacgatggtggagaggaag

SEQ ID NO: 54135 - DNA, 295 bp, Setaria italica
  Peptide Sequence Number=SeqID_120109
atattgccgatgctgagaaattggtggctgctatgcaagcaaagaaggatggaaaggctgtgattgttggaggtggttacatagggcttgagcttagtgcagccttgaaaatcaacaactttgatgtcactatggtgtaccctgaaccctggtgcatgccccgtctcttcacctctggcattgctcatttctatgagggctactatgctaacaaaggaatctaagtattgttgtaagggttactagtttgttcttttgtttttggtttttttcgtttatttttgtttttctttta

SEQ ID NO: 54136 - DNA, 237 bp, Setaria italica
  Peptide Sequence Number=SeqID_120110
tggtgtaccctgaaccctggtgcagtaagtctcgttaacctgggagcttatcaggcatgttgtatttttcttgaaatctgaagcaagcattgaccttttctttacatcctgcatctgatctgttgtagtgccccgtctcttcacctctggcattgctcatttctatgagggctactatgctaaacaaaaggaatcaagattgtgaagggtacagttgctgttggtttcgatgctgat

SEQ ID NO: 54137 - DNA, 234 bp, Setaria italica
  Peptide Sequence Number=SeqID_120111
ctttcaggtggcaccgtatgagcgccctgcactcagcaagggatacctcttccctcagaatgccgcaagactgcctgggttccacacgtgtgtggggagcggtggagagaggctgcttcctgaatggtactcagagaaaggtgagctttctcatctgaccaatgtcgccgtacttgcagtctgttattggaacagaacttgttattcattctttcacaattcacatggacaata

SEQ ID NO: 54138 - DNA, 241 bp, Setaria italica
  Peptide Sequence Number=SeqID_120112
taatcctcaaggaattaacacacgtgttatgaactgaaactttcaagcgaagcatatggcagtactatagtctcagagacagtggagaccaaatacaacacagagaattgacttgagtcctgtaagaaagattttggctatctacctttatcttgtgagtcaaccaaagaccaatatcaagaagcagcttatttcctgatgcatcttgttgatctgatttggctatactttgtgcaataag

SEQ ID NO: 54139 - DNA, 238 bp, Setaria italica
  Peptide Sequence Number=SeqID_120113
cgcttcaatccgagttcaacaagctcagaactgcggcatatccccttttccaaattcaatctcaaactgtgcagtcttgaatggtggggcatgcttgttttttcacaatcttcacagcaacttgactacctattgtctcttctcctttctttaccaaaccaataacgcttgaatagttacaaagacgaaacaagaaagacaataaaaacttacaaaggacgtttagtacctaaccgta

SEQ ID NO: 54140 - DNA, 320 bp, Setaria italica
  Peptide Sequence Number=SeqID_120114
gaccttcacagctctgaacttcccagcattgtttagaagttccagtgacctcgtcgaatcacctcaagtgctgctaaaaagaacagggttactctagaatccaggcttccaatgttagggtggatgacagtctgaagccaagcaagcctcaagacaaggttcaaaccctgtacaatatttgattctctcaagcattgctgacacatacttcccaaggttgacaatgtggtttatatccccttcatcgaaccatctccttgcacactgtaggacaacagcaaagaagggtactatcgcatgttaagtcatgttcaatcctg

SEQ ID NO: 54141 - DNA, 450 bp, Setaria italica
  Peptide Sequence Number=SeqID_120115
ggtcatgtgggagcccttcattcctcacaccaaagttaaatcttatcatggtaatagtgcacgctttctagcattagttggtgttacacctgaactgtttgtattctgaacccctacaacgatgccctattttgttagttgtcttccacctcatgaaaaggaagtggaacgaccttcacagctctgaacttcccagcattgtttaggtgctcattctccaacctgacataaaagtttttagttcttttagtttgaattttttatatatcatattgaaaaagttctcatgtataggttgatttgctaaaagaatttacctgtagaagttccagtgacctcgtcgaatcacctcaagtgctgctaaaaaagaacagggttactctagaatccaggcttccaatgttagggtggatgacagtctgaagccaagcaagcctcaagacaaggttc

SEQ ID NO: 54142 - DNA, 151 bp, Setaria italica
  Peptide Sequence Number=SeqID_120116
aataaatacctgtaaagaggtttattcatgattgaagttccattaaatggatattgttacatttccgaagcaaagggaaatacaacaatatccatttaatggaacttcaatcatgaataaatacctgtaaagaggtttcgaatcgttttcc

SEQ ID NO: 54143 - DNA, 368 bp, Setaria italica
  Peptide Sequence Number=SeqID_120117
tcttgttattgatacccctgggcatgagtccttcagtaatctgcgttctagaggttcaagtctgtgtgatattgccattttggttgtcgacatcatgcatgggcttgaacctcagacaattgaatccctgaatcttttgaagagtcgagatgcagtgtttattgttgctttgaataaggttgatcgtctttatggttggaagagatgtcaaaatgctcctattgtaaaggctttaaagcaacaaaatgaagatgttaagagggaattcaatatgcgagttacagatattgtgacgcaattcaagatgcaggaggccctggctaggaggaaggaagctgaggagagacagaagagagaggaggaagagc

SEQ ID NO: 54144 - DNA, 350 bp, Setaria italica
  Peptide Sequence Number=SeqID_120118
tcccgaacatgcttagggagcttcttcatgtcaaccttccctttaggcgcctcttgctctttctcctcctctttcttagcctccgctccctttgctgctgccaagaagaagaagaagaagaaggaaaaagcagaaggaggaagcgaagaggttagaagccatgaggagacagttccttgagcagagtgaactccaaaaagctgagggcactgctcctgagacaaagaagaggccaatatacgattctaagaaaaagaaagctcaaccaaagaccgcggatactgcaaagatagttgaagaacaacaggaagaggttaatgaagctaacaatgattgaagaagtaattatt

SEQ ID NO: 54145 - DNA, 352 bp, Setaria italica
  Peptide Sequence Number=SeqID_120119
cggaagatgaggtagaggatgaggacgaggacgagcgtctgaggaaggaggaggaagagcggctgcggcgcgaggaggaggagaggaaagcagaggaagcaaagaggaggaagaaggagagggaaaggagaagttgctcaagaagaagcaggagggtaagctcttgactggcaagcagaaggaaatcaaagaagaagaaaagaagggagggtttatggtggatggtgaggatgcagaccagatccttgggaagatggaggaccacccacctcctgttgaggagcctgagcccaaggacatgaaggatgaggcccctgtcgctgctgctaccctgtcgatgatgctgaaggga

SEQ ID NO: 54146 - DNA, 306 bp, Setaria italica
  Peptide Sequence Number=SeqID_120120
ccacaaaagggcaaaaggtggctataaagattattgcgaacaattctgatgagcagcagaggagtttcggcaggcacttcgatatggaagatgagcttgtcagccggatctcaaggcgatctattgatattttgaaacaaaattacagggaggatctgtctttcgaagactggaaacttgttgtaaagttgaaaacaatattgaagatacaatgagctcacaagggtccctggtgaactctagtgtctttggcaactcccattacacgacagatattcagactacccagtggagaatggggcgcat

SEQ ID NO: 54147 - DNA, 353 bp, Setaria italica
  Peptide Sequence Number=SeqID_120121
taaaagggtactaaaaaggttaggtacttaattaaaagtaatttaatttagacgaaacaattctgatgagcagcagaggagtttcggcaggcacttcgatatggaagatgagcttgtcagccggatactacaaaggcgaatctaattgatattttgaaacaaaattacagggaggatctgtctttcgaagactggaaacttgttgtaaagttgaaaacaatattgaagatacaatgagctcacaagggttcctgtttactgtttagtcggcaactgagccccctgaagcgtggaatgcgccccattctccactgggtagtctgatatctgtcgtgtaatgggagttgccaaag

SEQ ID NO: 54148 - DNA, 429 bp, Setaria italica
  Peptide Sequence Number=SeqID_120122
gaggccccctcgtcgctgctgctaccctgtcgatgatgctgaagggaagaaatcaaagaagaaaaagaagaagagcggaaggacagcacaggaagaagaagacttggacaagcttttcgctgagcttggtgtggcccccgtctgcggaggacaagccagtgcaggcaccggattctacctcagtggccaaggaggatgtaggagctgctggggatggtaatgtggatgacaaggctggggaaggagaggtggaatctgctgctgccaagaagaagaagaagaagaaggaaaaggagaaggagaaaaaggcagcagcaaagggagcggaggctaagaaagaggaggagaaagagcaagaggcgcctaaagggaaggttgacattgaagtaagtcttcccttaagtctattgtttcgggtagtattgtcta

SEQ ID NO: 54149 - DNA, 249 bp, Setaria italica
  Peptide Sequence Number=SeqID_120123
tgggtagttggagaggacagaggcgcggaagggagggagaggggaggggacggaccttgacgaagcagtcgtggaagtggaggctaagaaagaggaggagaaagagcaagaggcgcctaaagggaaggttgacatgaagaagctccctaagcatgttcgggagatgcaggaggccctggctaggaggaaggaagctgaggagagacagaagagagaggaggaagagcgtctggaggaaggaggaggaag

SEQ ID NO: 54150 - DNA, 360 bp, Setaria italica
  Peptide Sequence Number=SeqID_120124
ttaagttcaccatgtagatggcaatagagagataagcatctcttatgcagtcttttgcaactctctgcttcttccagcaggatttgacccgacgtctagctcacaggatacctgataaccagggtgatctgtatctcatgccactggaatatttggctcattaaggttcacaaacgactcagcacgcatcatgcgcagagtgacagtgtcccaagagatgagatggtccataaagtttgtaacatatgttagcatatcatccttgtagtctaagtagtaagcatgctgaacagaaaaggagaaatgtcaatatttagcacaaagtaggatcttaaaactcaagagtcaatatccttacct

SEQ ID NO: 54151 - DNA, 267 bp, Setaria italica
  misc_feature (157)..(157): n is a, c, g, or t
  Peptide Sequence Number=SeqID_120125
cagcctgcggatgagcctgagccggaggaggtgaaaactcaggattctgtgcctgcccctgacgcggatgatgccactggaaagaaatcaaagaagaaagaaaaagaagggagggtttatggtggatgttgaggatgcagaccagatccttgggaanatggaggaccacccacctcctgttgaggagcctgagcccaagtttttttttaggattcctcaaccagtaaaacaagaatacggttccattccactacaacaagacgctgg

SEQ ID NO: 54152 - DNA, 231 bp, Setaria italica
  Peptide Sequence Number=SeqID_120126
cgaatagccaatggaaatggtgcaaactcagcagcttatcttaagttcaccatgtagatggcaatagagagataagcatctcttatgcagtcttttgcaactctctgcttcttccagcaggatttgacccgacgtctagctcacaggatacctgataaccagggtgatctgtatctcatgccactggaatatttggctattacgggctcacaactccaccatataaactgg

SEQ ID NO: 54153 - DNA, 132 bp, Setaria italica
  Peptide Sequence Number=SeqID_120127
caaactttatggaccaatctcatctcttgggacactgtcactctgcgcatgatgcgtgctgagtgacagtgtcccaagagatgagatggtccataaagtttgtaacatatgttagcatatcatccttgtagt

SEQ ID NO: 54154 - DNA, 160 bp, Setaria italica
  Peptide Sequence Number=SeqID_120128
aaggacagcacaggaagaagaaagacttggacaagcttttcgctgagcttggtgtggccccgtctgcggaggacaagccagtgcaggcaccggattctacctccttggccactgaggtagaatccggtgcctgcactggcttgtcctccgcagacggggc

SEQ ID NO: 54155 - DNA, 257 bp, Setaria italica
  Peptide Sequence Number=SeqID_120129
atgtggagcaagatcccagacccagtctgcatgcatgagcttttgcagacactccatgcgagtcctgtcccaaacacgaacagtcatgtcccaagaaccactgtaaatcctcaatgaatctaaggcaagacaagtcagaggaccttcattgttccccagtaggtcgtaaacttcttgtaattttctttggtttcttagtttacctttatttttccttttagtttagtttattttgtttttgtttttaaaaggttttt

SEQ ID NO: 54156 - DNA, 244 bp, Setaria italica
  Peptide Sequence Number=SeqID_120130
aaatccacaagtgccaaggtgtttagcaagtttctctccacatagcttatgccaatcatctgatgccctagcttcagctgttgtccacacgactgcacttgcttccttaaaatcaacagtagcagatgtaacttctggctgcaaatggggggcaaaggcaagtatcccaaggtatgagtataaaggagcagaaaaattattcagatcattgttcagcaaaaatcctaaaggcaagtatcccaag

SEQ ID NO: 54157 - DNA, 299 bp, Setaria italica
  Peptide Sequence Number=SeqID_120131
tttgtattggtcttaaattcgtttgtcttcgtagtaatttgtaagtagtaaattggtcttcctagtttctttccttaaagtttgtagtagtcgtaggtaaaaagtactaaaaggtattgtaggtaattctaaagggtgttgtatccacaagtacttctcgagaagcagcaattgcaaaattagcaaaagatactgatgatgagctaaatcaaatcaataagcagctggaggaactccggaaaatggtggtcaacagatgcaggaaaatgaccacagatgagaagaggaaactgggtgct

SEQ ID NO: 54158 - DNA, 282 bp, Setaria italica
  Peptide Sequence Number=SeqID_120132
aacctttcataataaattttccaaatattacttactaacaaggtcaagagcaatcatggctgcaatacaaaattaaaatacttagcaatgagtagaggtattaacaaagcaaagagatagggagttcatattctagaaacaaggtcacctttgtttggaagttcacttttggaggcttaaaggggtagtcaggaggaaaatggatattaacaaagaacacccctcctgtataggggctgtcactaggacccatgattgtggcctgccagtggaataaatcct

SEQ ID NO: 54159 - DNA, 456 bp, Setaria italica
  Peptide Sequence Number=SeqID_120133
ataatgttctgtccctcctcctcgtaggatccatcatcatataaccagaaatgagtattccgtgggcactgtacactggccagctgaatgaaaagccggtaaaactctgatcaagatcttgtacaggtgatgaatgatccccttaagcatcctgagttcagtttttgtgatctcccgcccgtttacgaaaacttgtgtagtgccattgctagcgtctgctcgcagctttcctcccacacttaactttgaattaacaattctatcaggcctctcaccttcctttccccacagcccggagtccttgtcataccagtaccggcccggagccaggcggtccggtggcagagcgcacccgatcagaagatccagctccccctgtgagagcccgcggccgttgacgaccacctcgtccggccgcacctggttggccgcacagccgtgctcggcgcgcatgac

SEQ ID NO: 54160 - DNA, 246 bp, Setaria italica
  misc_feature (56)..(56): n is a, c, g, or t
  Peptide Sequence Number=SeqID_120134
agcgtctttccaaacctcttgaacaattggtgcatattctcgattgcagcaggaanaaggcatccagatcacccagtgcaactatctccaacagccagtcagcaaactgcatcagtctttgattcaacgaatacagagatggcctggtctgagatacccctgtttcacctgttaacacacacattctgtaattttttccataaacacaggaaccaaaggcatgctcaaatccttacagatttatta

SEQ ID NO: 54161 - DNA, 340 bp, Setaria italica
  Peptide Sequence Number=SeqID_120135
atcagagtcgatgtatccagctctggtttgaattttgctaatatctcagcctctcttttgagtgaacatgagatttgtgagttccattcaactgcttagcatctttgtcatagtcgttggccagcacagatataaccctgcgtaatgtgtttctcctgaacagaaatattacagagacacccttcttgttcaaataactaactatatcatcatgattttccaaaattcccttctaaatgttcagaaggaccataaaaaacccaatatcaaagtacctgattaagcatccatttcagtccaaatgcagctgtgcactcattcttcgctgcactggtgagcc

SEQ ID NO: 54162 - DNA, 255 bp, Setaria italica
  Peptide Sequence Number=SeqID_120136
aatttgttatctccagactgctctagtgtcatcaactggttccccatactgtcttgtgagctaagatattcatattcttgaactatagtgccacctaatgtcctgcatttgcaggactcccaatcaatggtagagaaatttccaggtttagatgttaagacagccaaaaggttgcaaaaagagctggtgatgagagtactaaagtaaatgaggtccgttttattacatcgctgaatgaggaaaacaaaaaattct

SEQ ID NO: 54163 - DNA, 392 bp, Setaria italica
  Peptide Sequence Number=SeqID_120137
tggcaactacaccacccacgagattctcatattccaccctctcgaatccagcttcctggatcatctgagcaaacttttcctgattggaaccgacggatactctcaaccaagtattggtacgactgtcgatcaccagcaaccagctctcccatagttggaaccacagaaaatgaataaacatcatagatctgtttaaaaaccgggacatccacatgactcaactccaagcataggaaccttcctcctcgctttagaactctgtaagcttccgataggactttctcaatgtgtgtcacatttctgatcccaaatgcgatggtatagccatccatagatccatcctcaaaactacaagaagacttactagacaatactaccttagtaataaccaa

SEQ ID NO: 54164 - DNA, 503 bp, Setaria italica
  misc_feature (490)..(490): n is a, c, g, or t
  Peptide Sequence Number=SeqID_120138
tattggtatttaaagtcttgtaaggtaagtatttgggtttcttgttctaattgtacgtcctatttgcttggcaatcaggccaccagatggtgtgtcccagctgaggttgtagccaagatgaacgaggggcttgggtctgggaaggtggagaacggggaatatttgaggatgtacttgaaggaagatttgccttctcgcctgcattactcggagaattacaggatcccgccaatcattgggctgttagcggaaggctataaggtggagatgaagcgttccaagaggaatgagtgtggaggggcacatgggtacgacaatgccttcttctcaatgaggaccattttcgcggcacatggccctcgttttcaggggggtaggactgtgccctcatttgagaatgtggagatatacaatgttatagcttccattctcaatttgaagccagctccgaacaatggttcagcttctttccctggccatgattctttancgagcaaatgatc

SEQ ID NO: 54165 - DNA, 223 bp, Setaria italica
  Peptide Sequence Number=SeqID_120139
gaccttcttgaaatgagcttcccatgcataaagtttcaagaccttcatatgaattaaggactctgtcattgccttcagtctcgcgtcttgtgcttccataagtttactctgaaatttgtgttgcagcttggccagtggagcattgcaaagtacagtgatgatgatgacaaccagcgatgcgatcatagcaagaccaactgcattatacagaattacaagagca

SEQ ID NO: 54166 - DNA, 240 bp, Setaria italica
  Peptide Sequence Number=SeqID_120140
ctgcttctctgaaatttcttttgtaatgaaattcgctgaattgttttgatggcacccgccacccatgtacgtatactaatcccggcccttgttcaggtatccggcgagtactcgatgatcaaagccggtggtgccctgggcatgatcgacgagcagaaggtgatgatggagtcgctcatgtgcctgaggcgggccggcgctgacatcatcctgacgtacttcgcccgtcaggccgcaggc

SEQ ID NO: 54167 - DNA, 243 bp, Setaria italica
  Peptide Sequence Number=SeqID_120141
gctatagacttgggtggaggcacggacttcttgatgaggtttacaaggcacgcgatgttggtgttaacagttttaccggttacggtaccgttaacgttttacccgtaaaagttcctgatgcattgaagtctccaacaggggatgaagcatacaatgataatggtctggttccacgcacaatccgcttgcttaaagcaagttccctgatattgttgtctacacggacgttgcattggatcctta

SEQ ID NO: 54168 - DNA, 154 bp, Setaria italica
  Peptide Sequence Number=SeqID_120142
attggatccttattcgtctgatggtcatgatggtattgtgagggaagatggagtaatcatgaatgatgaaacagcctgcttgcacaactgataaactgtttcatcattcatgattactccatcttccctcacaatacaatgattactccatctt

SEQ ID NO: 54169 - DNA, 246 bp, Setaria italica
  Peptide Sequence Number=SeqID_120143
gccctgtatggtatatccacttcggtgcaggcaatccataggattcacggacaaacaagtggaaatccaccatcgtgtagttctgtggcgtagagttcggatcaataccaagatcccggtggctcctaagtccaacaatgacatgtggatagcacctgacctggttgtccaatgcaaagacaatggccggtatggcatgcctggatgtgcaacttggctccagttgggaagcgttcagggatttga

SEQ ID NO: 54170 - DNA, 445 bp, Setaria italica
  Peptide Sequence Number=SeqID_120144
tcgaggagtcgtggtcggagctggagagcgtcgtcctcgagaactccaactccgtcgtaagcaagcaagcagtgcctttcttgttggttcctctctctggttgctaagtgagcagctttaatttgcacgcaggacttctacaacttcctcaaggacgatgcgccgtcggacgccacgaccacgacggcgcagcggaagagatcgaccctgtcctcgttcaggagcaagaaaggctactcggggtacctcgagtccatggcggcggcatcgcaggagggcggcttcgaaggtctcatgaacacggtcatcaagaagaagctcggcatcgtccccaaggacgtctcgtacgtaatcatttgcttgcattgccttgttcagatgagatcatatatactgaccagcattccttctgttcctttgtgtgctctgcctgctgcaggtggga

SEQ ID NO: 54171 - DNA, 410 bp, Setaria italica
  Peptide Sequence Number=SeqID_120145
tgcgcgaccaaaggcaccatgggactgggttcagaagctcaagtcagtaaatttgtttggttctgcactgcattattctgtctctcatcatatactacacatgttccatcatatgctacacatgtcctgaccttgttgctgcttgctgccaggtgggacggcctcaagagcttcatggactcacccaggaagcccatctactgcaacaaggaaggccaatccggcacccaagccttcgtcaggtcctacaagaacctcaacttctactggatactcggagctggacacatggtacccattgacaacccttgccctgcgctgaagatgctggctgacattacacgatctcctgccaagtaacaagtaggagcacaggacgtcgaggacgatgaaatcaggctacagactac

SEQ ID NO: 54172 - DNA, 461 bp, Setaria italica
  Peptide Sequence Number=SeqID_120146
gtgttgacatgtcagatgaaattccttatgggtttatatttaattttattctttcattaaaaatgtaggttttccttcactagctgaagtttttgcaagaccagggacacatcatctgctgcagatttatatttgtcctacataaaacagcaattatcagaattttctcaatccagtaattcagaccatcttgcagcactaattatagaaccagtaatacaaggtgctggggaatgctcatgatagatccgctttttcagcgagtacttgtccgtgaatgtagaagtcgaaaaatacctgtcatatttgacgaggtatttaccggattctggcgtctaggtgtggagtctgcttcagagctgcgtgtcatttcattaagagagaataggaagtacaaagagaggggagagcccccagactaagtaccgaacacatcccaacacacacaaaacactacacac

SEQ ID NO: 54173 - DNA, 269 bp, Setaria italica
  Peptide Sequence Number=SeqID_120147
cgtaggctttcttggtcaaatgactcagggaactgaataggaaatgatctagcctcaccaggacgaatcccaatcaacgaaccaagaaatccaggaacaaggttattattttcttcagtgtccaagtggaaacctgtactctcagcagatgtaaattttttcacctttagatccatcactgttaatactttctggaggcctctatcagccactattctaagtaagcccagtgctttatgacgacgttgaagctctttttctgttgcctt

SEQ ID NO: 54174 - DNA, 407 bp, Setaria italica
  misc_feature (402)..(402): n is a, c, g, or t
  Peptide Sequence Number=SeqID_120148
cagatgattaaataagtgcaggatagcaggtgacaccaatcaaatgaacaagcaattcacattggtttccatgtttcaggaacagttattaatttctaagttcacccataagatgcatgagatacacaatttgaggatttccagaaaagtgattaacaaccaaataccattgacatgattacttcaagaagatttaaaaaatcagtggaaacaagaaaatttaccatatatataagtatctcattctcatggtaagtaacaaaaaatgtacctaaaatcatcagagtgggctagttttgccctttgtgtgtggttgctcctgacctcatacagaagagagctatcagcaggaacttccaagctaatgttcctaaaagaggcaacaataacctggaaaatacncttca

SEQ ID NO: 54175 - DNA, 458 bp, Setaria italica
  Peptide Sequence Number=SeqID_120149
aggaaacgaccgatcccaatccgctgtaactgtgtgagctctgcgccgtttgcaaagtatgttcgggttgccggtacaaccactttgttcacaaaaagaacccagagcgtaacgcatataacttcaaatgagtacaaggatgctggtggaatggacagggagccaatcttggtgttcatcacagttccctgctgaatgaaagtggtgtgcatttgagagattgcagcaccaaagagtattccagtcacccatattgggagtaagcggattagtattttcagttcctcaacttcagtaactgtgcatagactccatgaacttcgacaacttccactggccaagctcggatcaaaaataactgctgccttgtctaagaacctgagaaaaatgatggaatcagatgattaaataagtgcaggatagcaggtgacaccaatcaaatgaacttagaaattaat

SEQ ID NO: 54176 - DNA, 315 bp, Setaria italica
  Peptide Sequence Number=SeqID_120150
ctggcaccatgcttgctatattgagcgcactgatgcaattattaaatgccagggtcttcttacaaactccggtggcatggtagtaaacatggaatggggcaatttctggtcatcacatttgccaagaactccttatgacatctccctagatgatgagacacaaaatcgcaatgatcagggctttgagaaaatgatctctggaatttatcttggggaaattgcaaggctggtgctccatcgaatggctctagaatcagatggagcaccagccttgcaatttccccaagataaattccaatgatcagggctttgaga

SEQ ID NO: 54177 - DNA, 312 bp, Setaria italica
  misc_feature (274)..(274): n is a, c, g, or t
  Peptide Sequence Number=SeqID_120151
acgaaagtacaagaaaggaataactagacaaagaaacaatactgaagatacccgacactcctctgaaaacccgaaggcttgttgtcaaagtctgtggacatcgtcacccggagagctgcccgcctagccgccgcagggattgtaggaatactgaaaaagcttggccgggatgggagcggtgtggctttcaagcgggagaacgcgagggcagcctcggcggtcagtggtggcgattgagggcggcctgtaccaggggctacccagtgttcagggngtacctagacgaggcccctggtggagatcctaggggga

SEQ ID NO: 54178 - DNA, 148 bp, Setaria italica
  Peptide Sequence Number=SeqID_120152
cggcctgtaccagggcagcctcaatcgccaccactgaccgccgaggctgccctcgcggtcagtggtggcgattgagggcggcctgtaccagggctacccagtgttcagggagtacctagacgaggccctggtggagatcctaggggag

SEQ ID NO: 54179 - DNA, 323 bp, Setaria italica
  Peptide Sequence Number=SeqID_120153
cgctccttcgcattgggaggaagaggccgcgtacggaggcgcagcgggtgacgaggccgacaggggaaggggctgaaggaggagggctgggcaggaccatctgccgccgcgccgacacgggcatggccggcggcggacgggcggaggccatcatagagtgctccgagtccgaaccgtgaagcacatccgtgcgtgcggtgtagggttttctacagagctaagcaggacggtgctgtgctcttgggtttgcgccatccttgggattgttgctattgtattggttctacttcttacttatttagtttcttattttgggtttcttt

SEQ ID NO: 54180 - DNA, 223 bp, Setaria italica
  Peptide Sequence Number=SeqID_120154
cggtagaatttattaactgaaacttcaggtggaacatcgagtcaccatcagccacaaggagttgtcaacttaatgagaagacgacgaagatgacgatgcctcatgttcatgcccatgaccatgagagtgatcatcatgcccatcccacggcggcaccacctacaagggctacaccatcccgcacaacaagcgctggcacaccgtcgccggcaagggcctctgc

SEQ ID NO: 54181 - DNA, 169 bp, Setaria italica
  Peptide Sequence Number=SeqID_120155
taacttagcccagcaagctagcatcaaccatgcggcagacgtacccttggcttcctccatggcgccggggtgcgggagcgggagcgggagcgaagccgaccgagatttcccgcaacttttgcgggggcacagatgcggatgccgctcggctgacggagaaggaagagag

SEQ ID NO: 54182 - DNA, 244 bp, Setaria italica
  Peptide Sequence Number=SeqID_120156
ccaataaatttatcagtacatttggaacttctctttagtcttctcaaagacttgttccgcaatcagggctccatttccatctgcctgctttatttccatgttggacttctggtagtacccagttcctctgagagcatcagcaatgaaatcatcaaacccaatggcaatagcagcttcagccttggctccatacaccagcctctgcagtacagcatggaacaagattattaattagtaattttaa

SEQ ID NO: 54183 - DNA, 192 bp, Setaria italica
  Peptide Sequence Number=SeqID_120157
atccactgctgggaatataacttgatcctcggcaatactgtggaaaatgcacacatctgcaataaattgcagcctcgtattaaagtctgctatgtcagaaaagtctccagactgctggatcctttttgcctcttctgctatatcacccaacatatgtccaaggaagaagaacaggtcttcccattgctcgtc

SEQ ID NO: 54184 - DNA, 181 bp, Setaria italica
  Peptide Sequence Number=SeqID_120158
ctccaatccatgagaatacaatcttcacaaagtaaaaaactaaattaagtgagagacaccaacagctttataaatggaaagcaagatgcatgatgccataatcatgaggacctcttggaggagtttttcttcaggaactattttacgtaggcagtcaagaatatcttgattatcatcaggt

SEQ ID NO: 54185 - DNA, 233 bp, Setaria italica
  Peptide Sequence Number=SeqID_120159
agacaatgatgtcgatattcactgaacctgttgttaggtgtagggtcaaatgacgaataccatcattctttggggatattctgttgtagagtgtagatcattgtacaagaggaatgagtttctactcatgggtgcacatgtaataaaagggtggatacccggtagaaacttagcacaaatagttcaagtgttgtatttcctgaatggaggggagggctctgtttttcttgtgt

SEQ ID NO: 54186 - DNA, 292 bp, Setaria italica
  Peptide Sequence Number=SeqID_120160
cggcattgagtgctggcgtattagttggtcatgagtcaactgtgatgactgaaattcaccttttctggttgatccaaaacctcagttttatctgaggctgtggttgaatggactgaatgtttaactgattgttaaccaacattggattcattcttgatctagactgcaaatttgcaacattcatgctctgactatttgctgtggttaaaggtgtagagccagtagcataaaagctgccggaacaggggactctgctgagagcgctgattgaattgttgctgcagaggtttgg

SEQ ID NO: 54187 - DNA, 281 bp, Setaria italica
  Peptide Sequence Number=SeqID_120161
gggtttcttagttctttgttcttaccttcggtcgtacgtatgtccagcgtcggcgactgcgcgtccatcaccacgaacctgttctccccgtgcgctcgtcgtggacatagcacaccacgtagccgtcgtcctcgttgccgtccccctccacgtcgtcgggcacgaagaagggctccccggcgaagcacccgggcccgaagtcccgcgtcgccacggtgcagtctccagtgccggcgcgctccaggtccagcttcgccaccccgctgatcttgggcatgggg

SEQ ID NO: 54188 - DNA, 265 bp, Setaria italica
  Peptide Sequence Number=SeqID_120162
tcggggtggggtgcgcgaccgagacgcgcgggggagtttaagcgggcggtgggggggagggggaggaaggaagacgggcgggggcgcggcggccgacggcggtggtcgggacggggtgctcttcttcctgttgtagctggagttctgtgcagcagcagaggctgcaggggagatgtagtgaactctcccagacgaccttgaaggatgcgcagccatggagaggttagaggtgatcagtgttctctccattctgcaacctgcagat

SEQ ID NO: 54189 - DNA, 209 bp, Setaria italica
  Peptide Sequence Number=SeqID_120163
acccataaaagggtttcgtgagttgatatgttgaaacacaaagattcgtacactcgaatgctatatggcctagagttttgttcatactatgaccaattcagtattcagtttgtgtgtgttttctcttggaattctgtgctcctggtatgctccgaccatcgctgctgcgcctggagcccttcttcgtgcccgacgacgtggagggggac

SEQ ID NO: 54190 - DNA, 444 bp, Setaria italica
  Peptide Sequence Number=SeqID_120164
ctttgtactatattgtgcttagggatctgagtattgatggaatccgcaccattggaagcgttctgggtcagagtattgctcttgactactatatccgtcaagtggatggaatggtagctgagttcacagatatcaatcgtggaatggaaaaaactggcaccttcactatggaaaggaagaaccttttccagctcgtagggaaggccaactctaacttggcagatgttattcttaagcttggactctttgagaggtcagacatagcatggaaaaacgcaaactatgctcagatctgggaataccttcaggatgataataagccattccaggaaatccgacttcctgttctggaggatctcctgaagaaacctgatgttgtgctccacaaatttcaacttaaagtcaaggttccaaatctttgggtcagctcatattcatctcgaa

SEQ ID NO: 54191 - DNA, 326 bp, Setaria italica
  misc_feature (160)..(160): n is a, c, g, or t
  Peptide Sequence Number=SeqID_120165
tcatttcacagggttttaagtctggtgtcatagatgagagccattgtcactacatggtcgttttccaatatgggtccatcgtgctgtttaatgtttctgatcatgaagcagatggatacctaaacattgtcgagaagcatgcatcaggtttacttccagngatgagaaaggatggtaagcccaagaacacttaccctgaaggagtagagtttcccactcttttatctgctttggatgttatcatttatttccttgcatcagtactatcctaataaagttaaatggggagataccattataagtaaatatatctcatgtataagagg

SEQ ID NO: 54192 - DNA, 317 bp, Setaria italica
  Peptide Sequence Number=SeqID_120166
taactttaactaacttttaagaacgaccgactagaccaaattacaatactagaactacaaacctttagtcgccctgcctcttccagtgccaactggagcttgtcctctgcattttctaacgaggctttcaagttctccacttcagtccttgcattattcaactcagcttgtgccaacaaaagcttcccttttgcctctctggcctctgtggtttgctctttcaggctatggccaggtcatccatggccttcttgcacttctcctcagattccactgccagcttgagctcacgctgtagtgaccatgtctccacttcg

SEQ ID NO: 54193 - DNA, 313 bp, Setaria italica
  misc_feature (213)..(213): n is a, c, g, or t
  Peptide Sequence Number=SeqID_120167
ttttcggttttcggggttttacggttttcttttatttttccttttggtttccgtttccctttctttcccggtttcgtctagttggcggcgcacgggcgcgaggctgccaccatggcgaagaagctgctgcggagcacgggcaaggcggcctggatcgcgggcaccaccttcctggtgctggtggtgccgctcatcatcgagatggatcgggancagcagctcaaacgacctcggagctgcagcagcagacgctcctcggaggcccgccggcgcccatcaagtagattagattagcatcctcctcctctcctct

SEQ ID NO: 54194 - DNA, 246 bp, Setaria italica
  Peptide Sequence Number=SeqID_120168
cggcataattcagtctgtcagttactatgtggaagacatgatcagaaggatgcttggcatttaacactgttgaattaacaacaactgctgttgctagtatactatccgagaacaaggcataatgatattaacaacaactgctgttgctagtatactatccgagaacaaggcataatgatacagttttgggttactgagtttatgttggtttgggaactgctgctgaccaggatccaaggaaaagta

SEQ ID NO: 54195 - DNA, 325 bp, Setaria italica
  Peptide Sequence Number=SeqID_120169
cctggagttgctcctgccgtttgatgaccttcccgtttggcctccggtcaagggccgttgagctaccctctggtttactttggattcagatgggtactcaggatcgaaaaagacatagatgtcctcatcctttccaaggaagtgccctatgcataggacatagtcaattggagtaaccatgttttcgctgtgaacaatctcccctaaaatacgatcaattgcagcaccctttgtaactccaacagaccgaacttcaactgaccggctcccttgaacaactattctaactagtctagtctattttgtagttatttggtacctagtt

SEQ ID NO: 54196 - DNA, 335 bp, Setaria italica
  Peptide Sequence Number=SeqID_120170
tctccgactcagtctatactatcgactcagtctatactatgcattggtgccgacagaaggaatagtcaccgacaacctccttccttttctttcagacaaaactttcgacataccaccttgaacagagccagcaacaaacccaaccagactaagctcagctgctttataaaagaatgcactgattcgttttggtagatcaaactctctcaaaggatagctcttctcaaatatattgtttggaagtttctcaattgtattttggaagtcaaatcgtgatgtactcccatatgaacggcatggtgccaaaagcccaagaaccatcaagttgcaacaag

SEQ ID NO: 54197 - DNA, 398 bp, Setaria italica
  Peptide Sequence Number=SeqID_120171
tctttaacaatctccaagactaccgctaaacgtgtatttcgctcacaacggtacaagaaatcaagatattattctttcgaaaaacaagaagatagtaagaaattacaaaatggtaattgtcctacacctttgaaccacccctccaaatacaatcacaggcttcgatgtctccgctcattgccaaaacagctgttctcatctaccacgcttagtcgaacactccttacggcatagtggaactgaagcaaaattgttccagcactgctaccaaatccactgaattcaacctgaagcgacttttttgcggacgactctctttctgcgaggcttggacaatgtggtctcaggtccacccttgcttttattgtccttagtaagtacctaaggtccttagttaa

SEQ ID NO: 54198 - DNA, 397 bp, Setaria italica
  misc_feature (383)..(383): n is a, c, g, or t
  Peptide Sequence Number=SeqID_120172
ggtttctggccttggtcttctaggcataaagcagggtggacctgagaccacattaacctcaacaggcctcttgtatgctctcaaaagtcgatctgagtattgtgggtcagcttcctcccccaagccatgttcgccttgatgcctcaccaatctgaatattcatcagtcttgctgctgtgctaaagaagattgccacacccaaaacatcaaagcgctttaccatgtaatggtctagtccagatagcaattgataacgcaagttcgcgtatagtcctaggaaagctccataaccaagggcattggtgccgacagaaggaatagtcaccgacaacctccttccttttctttcagacaaaactttcgacataccaccttgaacaganccagcaacaaaccc

SEQ ID NO: 54199 - DNA, 239 bp, Setaria italica
  Peptide Sequence Number=SeqID_120173
tagaggaaaagactagccataaactcaaaagaccatcttatgtgggaatgctggatctgcaagtgttcttcctacaagacctctggagagccatcctggaagagctcttgaaaatgacctagtgcttgtaggtcttgcaaatattgacaggtatcgcaccatctgagcagaactcaccaatccctaatgtcggatatagcatgtaaagttcatgttattcaactatcataccaaagtat

SEQ ID NO: 54200 - DNA, 251 bp, Setaria italica
  Peptide Sequence Number=SeqID_120174
cggaagcgctcctggcccgcggtgtcccagatctgggccttgacctccttgccgtcaatgtccatgctctgggtctggaactcgaccccgatggtggccttggagtggaggttgaactcgttgcgcgcgtagcgcgagagcaggttgctcttccccaccgcgctgtccccgatgatcaccaccttgaagaaggtaactacctaccgacctacgaccctaccgaagtacgtacccccaatacgactacgaca

SEQ ID NO: 54201 - DNA, 236 bp, Setaria italica
  Peptide Sequence Number=SeqID_120175
atcaaataagaatgggtgcaaaccagagtagcatatgtacctctcatgaaagacagtgatgaactcgcattggacccagtgttcgtctgaataagaggatcaatagaactggaagagttctggtggtccatccgtggaccttcaagagtgtgttgctcattgcttgaatcctccccagcaactctgactctcagagagaaaatatgaacagttcctttgtcgctggacactgccaa

SEQ ID NO: 54202 - DNA, 258 bp, Setaria italica
  Peptide Sequence Number=SeqID_120176
tgcatctgttatgcatatttcctagtttattttgcagtctctaattagataattcgctgtgattttttcaaaaggagtttgacaacggtaaagatgcaaccctgtcagagtgtgctcagaaaggcattgcagtgaaaccacgaaaaggggacgcactccttttcttcaaccttaaaccagatggtaccaccgatacagtgagcggccatggtggatgcccggtcatcaagggtgagaaatggtcagctacaaagtgga

SEQ ID NO: 54203 - DNA, 478 bp, Setaria italica
  Peptide Sequence Number=SeqID_120177
caatgggcggacgtacacaatggcaaaaggatctgatttttcctatcagatctttgttcgtcaaatctcttgcttgcacaagtttgacttccaatgtaccaacaggcttcagttccaaatcactgtagtccccaggtattataggaataactttccttactggccatgttattgaatcttcaatagcattttttatagtttcctcaagagcatctgaaattccaggtatagcagaaatttcaccaccaatgaccttcagtctgaaatccagctttttctgaaatggtttgagaaaaatacacgagattaaatgaaaaagaacatctcaaataatcaaaggaaaaaagaatagaaggaacaaaccttctttcgtagagaaaagcaaacagctccaaagcaaggtagctcttcaaccagtggtttgaaaatcaagcggaaaattcctgtaaagccaatgtccttcacctatatgagaaga

SEQ ID NO: 54204 - DNA, 422 bp, Setaria italica
  Peptide Sequence Number=SeqID_120178
cagaagaaacttgaaatcgagcttcgtgagaaggcccttgaatctcttagagccaagaaagccatcaacaactagcctgagaatttttattccgacgcatttgagtttctattttcaagtgcttatctcaatgttatggaagtgtggttatatgatgcctatttaatgttctgtatgtttatgtggcagttgatctgaggattcctgatctgtttccttgatgcagctgcgtgcaggcttagctgccagttatctgattagcaccatgtgcacaagctttttatgttcctcaggatgatttgatccacgcctcaacaaaacaaggttgtgttcggggagatcagcatgctttggttagtcgtggattcaagaattagtactaagtactaattttttagttaaattacttaagtaaaatttaa

SEQ ID NO: 54205 - DNA, 335 bp, Setaria italica
  Peptide Sequence Number=SeqID_120179
ggaggcggatgggaagaagatccagatccagctgacagggttcatggagaagaacacagtgaagttcatgaaggagctctggggcctcctcttaagtgcgcaacagaatgccagtggggtacctcaacagtttctagatgaaaaggaggctgaaatacagcagagaaaggcggaggatgatagaattgcacaggagatccaaaagaagcgggagaaagagggaatagacttagaactggagaagcagaaaatgatgatagcttctccgattatttgggttcatatcattctttacctcaactactgtaggatggggatactagcaaactcaaaga

SEQ ID NO: 54206 - DNA, 265 bp, Setaria italica
  Peptide Sequence Number=SeqID_120180
ttttaggtttaaactttagtttgtaagtcgttgtccgttgtaggggtttcacgtgatgattctgataatgctactggggcaaagaaatatttttctaaagtcaatgagggctcccaatcggaagatggaagtcctgtcaaaaaagctcaagaaaagaacagatgttaaaaagccacattgattctggcagttcagggtccaagaacctgacaaacatagatcccattctgagaagcaaaggaacaagaaggcccataagcataag

SEQ ID NO: 54207 - DNA, 213 bp, Setaria italica
  Peptide Sequence Number=SeqID_120181
tgactcgcattcaaaggatgagaggaacagtgagcgtgccgtgaggggttcgacgtgatgattctgataatgctactggggcaaagaaatatttttctaaagtcaatgagggctcccaatcggaagatggaagtcctgtcaaaaagctcaagaaaagaagctaagaaaagaagaaagacgtcgtagacgtgaagagcggcatcgcagaagggc

SEQ ID NO: 54208 - DNA, 362 bp, Setaria italica
  Peptide Sequence Number=SeqID_120182
ttatttggggttcttagggttccttactttcctttacttttcgttagttcgtcggtctaaccttggtactattctttcagcggccgcggaccctgcatggcgaggccgccgtgctgtatgcgggtggcctccgacggcacgggggcccccaccacgggtggtactgcaactacgtcgaggtcaccgtcacgggcccgcacaaggggtgcgcgcaggagctcttcaccgtcgagcagtggctagccaccgacgcgccaccgtacaagctcgaggccgtcgtcgaccattgcgcccgcgccggcgctggcgccgccgccgcgtgacgtggcctgggggtgacgagtcggagctgctgcagttcg

SEQ ID NO: 54209 - DNA, 408 bp, Setaria italica
  misc_feature (39)..(39): n is a, c, g, or t
  Peptide Sequence Number=SeqID_120183
cgactgctgagcctgtggattttgtccacatatacgacncttatgcggactatggcaaatctcacgagattgacctttttggcgagattggaggtttgtcgttcagcccagacactgaggccttctatgttggccttgcggaccagacgtacggtggcctgatcgagttcagcaagaggcaccaacatcattacttgaactccttgtggtgatatcaaccacttgtttggtttcgcagctggtggatgccacgtgctgcaggaagtgcctgattgaatgttctgtaggaggaagatctcatggaagctattgctgcctttagtttttagctgcagcaaccaaggaagggacttacttaatactaggaaagtagtaataaaaattactaggggggttttagtttaccta

SEQ ID NO: 54210 - DNA, 366 bp, Setaria italica
  Peptide Sequence Number=SeqID_120184
tcttcagatgggaggttcctggcgactgctgagcctgtggattttgtccacatatacgactcttatgcggactatggcaaatctcacgagattgacctttttggcgagattggaggtttgtcgttcagcccagacactgaggccttctatgttggccttgcggaccagacgtacggtggcctgatcgagttcagcaagaggcaccaacatcattacttgaactccttgtggtgatatcaaccacttgtttggtttcgcagctggtggatgccacgtgctgcaggaagtgcctgatttgtaattgtttcttgtttaggtttaggttttaagtttttattttttttctttttttttctttttttttaa

SEQ ID NO: 54211 - DNA, 130 bp, Setaria italica
  Peptide Sequence Number=SeqID_120185
ggctgctaacaacgactgttccatcaggatcctgatatatcaccaactctttagagatatatcaggatccctgcggatctagaaggttggtggctgctaacaaccttcaggatccctgcggatctagaag

SEQ ID NO: 54212 - DNA, 266 bp, Setaria italica
  Peptide Sequence Number=SeqID_120186
tgttccttgggtagtattctattgtaggtattggtctttggttagttggtattccctaagttgttggtctaaggtctaattggttctctaagggccacttggattactcatttgcatctgcctggcatcctgacggcaacatcgtggccaccgggagtcaagacactacatgcaggctgtgggacataagaaacctatcgcagtcggtagctgtgctcggcggaaggatgggttcgatacgttgcgtcaagttctcttcagatggg

SEQ ID NO: 54213 - DNA, 259 bp, Setaria italica
  Peptide Sequence Number=SeqID_120187
gatcaccaactctttagagatatatcaggatccctgcggatctagaaggttggtggctgctaacaacgactgctccatcaggattttcgacacggagtactttgacctcctcaagcactatgtcttcccttggtctgtgaatgtaagtaggccctttcttgtttatgccctgtagttttatcctctttgtatatctgttaaatttttcttctcaaacagagtgtttctgtgagcccaaatggtaatctctttgcttgtt

SEQ ID NO: 54214 - DNA, 337 bp, Setaria italica
  misc_feature (245)..(245): n is a, c, g, or t
  misc_feature (295)..(295): n is a, c, g, or t
  Peptide Sequence Number=SeqID_120188
taaacttaaactaagaacaacaaagaagaagacaaaattcaaactgtaagcataacattatgtgtgcgaacgcgagagaaagagagggataccatgttgtgccaaatggcaaagtgcaagttcaatgtggcgcctaattggagcggcttcgttattggcattttttacaatccaaggaatgctccatcatcaattaataatgattttcccaccttatttccttgagtggctgctctagattcacnttttgcaaatttgcaatgccacgtgcaacttgtgcaaggacatcagggtncccacaccttaaccattccaagcaatgatttaattccacctt

SEQ ID NO: 54215 - DNA, 373 bp, Setaria italica
  misc_feature (357)..(357): n is a, c, g, or t
  Peptide Sequence Number=SeqID_120189
atttgtcttaattctaagtatttttctaacttgccacctcaaaacaagaaaagtaaactctcgaggagaagatggtacaagatcacaatgcctctcctgattagtcagtctggtgccgtgttttacgcctcctatgtgcacgagaaatgtaacttcatagcgtgtgagacccagctgcactttgtctgttatcacattttttatcccaatcttctcatctctgcttgaagagtggggctggatgtcaatgtccgatgtgccaacatccttatatcttctcgagaacaatcccttgagattcgaacaagttcccataaggcaccttcactgataatgtcttttgaatttactcatgtntgccaatgcaaagtgc

SEQ ID NO: 54216 - DNA, 170 bp, Setaria italica
  Peptide Sequence Number=SeqID_120190
ttcaaaagacattatcagtgaaggtgccttactgaatttacttcatgttgtgccaaatggacaaagtgcaagttcaatgtggcgcctaattggtacttcatgttgtgccaaatggcaaagtgcaagttcaatgtggcgcctaattggagcggcttcgttattggcatttt

SEQ ID NO: 54217 - DNA, 397 bp, Setaria italica
  Peptide Sequence Number=SeqID_120191
gcaacatatttgcttctaacttcattccgtgtggctaaatgcacatcattcaggatcggtgcaatttgccgacgctgcaaaatcaaagagagtcatggcaagcctccgaacatctggattactccacgctgcaggaatagcaacgtctctaacaaacacaagccagcaatggttagttccctctggaaactatgtttgattaaaaattctgccaggtgcccaggtgaaatgtttaacaaataacaagccagcaacttttgcttggcattttttaacaaataacaattgagcaaataattgtgcagggatttcccaaatggatgggctccggtgcagcatcttatagttgaggggctgttgcattctggatcagaggaggcggtgaaattagctgagg

SEQ ID NO: 54218 - DNA, 260 bp, Setaria italica
  Peptide Sequence Number=SeqID_120192
aggaaaaactagtactagtactagtctgctgcctgcacacccagcagagcacacccatggcaacgactccgcagtcaggcaggcaggcaggaacgcacctggatgggcgaccagccgcaggggtcggggtagatgccggagccgttccaccccttgccgacgaagctctcgatggccgcgtacagcgccgcccgctccttctcctccatcggcgccgtcggggagtcggacccgtcgtcctcctccccttggcccgcgca

SEQ ID NO: 54219 - DNA, 263 bp, Setaria italica
  Peptide Sequence Number=SeqID_120193
cgcaatcttgcagatttgtcaaaggcgctgatttttttttcaaactgctctaaagaaaatacacggtaacatctggtttttcttttgaccacgcgtgcaggatctgtttgccgccgggacggacacgaacgcgatctcggtggagtggacgatggcggagctgctccggcacccggccgtgatgtctaaggtccgcgccgagctgcgggacgcgctgggctcgaagccgcacccggacgagtcggacatcgacaggctcccct

SEQ ID NO: 54220 - DNA, 241 bp, Setaria italica
  misc_feature (191)..(191): n is a, c, g, or t
  Peptide Sequence Number=SeqID_120194
ctccgcgccgtgtgcaccaaccacctcttctcggcgcgcgggctggacgcgacgcgcgccgcgcgggaggagaaggcgagggagctggtcgcgtgcctgggccggcgcagcgctgagctcatcggcaggttctacgacttcttcgacgcaatcatcgcgcgccgtctcaacggcgccgccggtggaaaggnggatttctagcgtgttgcttcagcttcgctcggaggatcagctcagccta

SEQ ID NO: 54221 - DNA, 434 bp, Setaria italica
  Peptide Sequence Number=SeqID_120195
gcttgagctcgagtatgtgaaagccgtggcaccaaggaagcaggacaaaccctgcccccatgatgactgggttagtgcggtcgatggatcaaacccaaggttatggaaagatgcagcagtatgtacacaaattttggagggacacagcgaggcgattacttctaccagattcatcaataaaggaggtgacactgagagcagtctgcatgtagtgactggctcaaaggatagatcattgcggctatacaagtgtgatacatcagtcagtatggactacccaaagcgggttggggcttacaaaattcttcgtgggcacacatcatcagttcaaagtattgctgtagacccttcaagagatatgctatgttctggttcctgggatagcaccatcaagttgtgggcagttgaaggatctgaagaagacggtgatgctg

SEQ ID NO: 54222 - DNA, 395 bp, Setaria italica
  Peptide Sequence Number=SeqID_120196
tactattggtacttcacacaaagataaggttttatgtgccgactggtggaaaggggacagtgtgattagtggtggagctgattccaagctatgtatcgcatcgggtattgagattgtgtgatgaagggttttggcgtgcttctagagtccatggctattgaggtgttaaactttaacaggtgtttcccaaacaccccctaaaagccaagcaacgtcagattgtcaattatggctgggaacatatgcaaactttgagtcagatcaagatacagcacagggcctgccatttgtgtatgcacgagtactatgcacaaagtaagatccatagttgaaatggatcactacatttttggtctttctaacttttttgtcttgtttacttcattgatgaaatc

SEQ ID NO: 54223 - DNA, 123 bp, Setaria italica
  Peptide Sequence Number=SeqID_120197
ccccgatggcctactcaccaagtgttgcagcggcgtagtccactggcccataatgtcaccaagctgctccccaactaccctatatgttcgattcgtttaaatggtatgtttcatctctatact

SEQ ID NO: 54224 - DNA, 138 bp, Setaria italica
  Peptide Sequence Number=SeqID_120198
cggggagcaacaaggtgccggcgatctacgtcttcggggactccacggcggacgtgggcaacaacaactacctgcttgttggttttgttggccacggcgaggaatggcgggggctgcgcttgaagcccatgttcatag

SEQ ID NO: 54225 - DNA, 481 bp, Setaria italica
  Peptide Sequence Number=SeqID_120199
gcggcggcgaagcgggtgaggaaggcctcgacgggggaggcgctggtggagtccgaggaagcgccagcggcggcggaggaggaggaggatgagcgcttggagaggcgctcgagcatgaccaggtgcttgcggtggcccccgccgccggtggcctttggctgttggggctccggctccatcccgccgccggcgctggaaatgaagatatgcaggtggtaagcaatgaagtaaacaaaaaatgggtgtactgaagcataccaatgactgatgtttggttcttccaacttcactttgtctgtcaccgattgttgcctcatttttctcttcaagaatataacccacaatgtcaaaacagaacggttcttttccaaagtttacagtcaacttttcaggtggtgttgaaaaaaggtcctccagctcagtaggtagtaaagcaccatcctgaatataccaattgcatatcaggataagctaacattat

SEQ ID NO: 54226 - DNA, 389 bp, Setaria italica
  Peptide Sequence Number=SeqID_120200
agaaaccagttcagaatttcagtggcatatctggggaaaaaaactgtaaacatggaatggaacaacaacggccaacactttaattgctaaattgtgtgcatttgaggcctgccaaattatgagaaatcaagcaacctcacatccttttggaatctaacatttccaatgacatgaaactgaagttctgaaagaaaaggcacttacgccttacctgattctttcaaaaatgaatctacatgtagcaggatgttatgaagaggatgctgaagaaattatgaacttgtattcataatgtccacaactctttatacttgatttggttgatgaatctgaatacaagttcataatttcttcagcatcctctacatgtagcaggatgttatgaagag

SEQ ID NO: 54227 - DNA, 455 bp, Setaria italica
  Peptide Sequence Number=SeqID_120201
tgagctgccgtagtaacctctcgagacatgagtaaagacagctctcagggtccttcatggcagggttcgttgacaggacagctgcgttcactgcgtccgccacgaattcacgctgggggagcgtccagcaggtatccaatgcatgattctgcaggcttctcatacgcaagcagggccacactctccttcagcaacccctcaaaagctttgtgagtcaagaagcttgccaggttagcacgagcatatttcacagcatcctccagttgttcagccatgaaactatcaagggtgacctgaacgcaggcattggtgtccttatgatgatgcaatacagtcaagattttattccactttctagcaattaaacccctgatatattctatgaatctctgagaatggagtaagaagcaaataaccgatttctcatcctttataacttgtggataccactcccc

SEQ ID NO: 54228 - DNA, 245 bp, Setaria italica
  Peptide Sequence Number=SeqID_120202
gaagtaacaaaaaatgggtgtactgaagcataccaatgactgatgtttggttcttccaacttcactttgtctgtcaccgattgttgcctcattttctcttcaagaatataaccctgccaaatagaagcggaatacatcgataacaaagctatcgacatcatacaccaactgaacactcttgaatcaagtgtttagtaaatggcataaagccagttacatcataactatatccacataacatgcat

SEQ ID NO: 54229 - DNA, 260 bp, Setaria italica
  Peptide Sequence Number=SeqID_120203
tctgacggacaacttgtcggtggagacgacggcgaagaggcccgagctgttgacggtgttgagctcggacgggagcggctcggcatccaactccgccgccgcgcggtcccactccgtcggggcaccgccaccgcgatgccagccgcatcgggtccaccgtcgtccctgcccccggcgatcccgcctccgcctcctggttcgcttacctatttcgtccgggtaggtcggtaacggtacttggtattcggttggtttgtctt

SEQ ID NO: 54230 - DNA, 192 bp, Setaria italica
  Peptide Sequence Number=SeqID_120204
tatgttacatacaccgaggcatgcatgccgctaattgttcaagtgctcaatgcttaggtaggtcatactgtgtttctatcgcctggcactaaacaccatggtggcctcacgacgcactgcatgttcctcagaatagtccaccaaagaatcaaggagccatgcacatcttatgcagtattcagggcctgctgg

SEQ ID NO: 54231 - DNA, 385 bp, Setaria italica
  Peptide Sequence Number=SeqID_120205
taacaaaataacaataacaaataccccgacaacaaggaaataggaaatactactagacttaattaatcctaatctactaaagcgtcagcaaatcagagggcaggaagatctggacggactggacccggaaaatgcttccgcctatacacaagttataattacatgcatgaccttgaagataatactgttccggagatccaacgaaccaaccttgctaatgtcgtgcttactctgaagagtcttggtattcatgacttggttaacttgactttatggatccacctccatcagaagccctattaaaggccctggaacaactttttgctctcagtgcactaaacagtcgtggagagttgaacaaaaactggaagaagaatggcagatt

SEQ ID NO: 54232 - DNA, 168 bp, Setaria italica
  Peptide Sequence Number=SeqID_120206
gggcaaggacacaatatgtcatgtcagactagaatcttgaaataaaaatgttttttccctaactatctggcaatttggatcttgtttgttcatgttcagatttcaagcctccgctggctgttgaacctcccaaaactggcagtagcaaaaaggccgcaagggcatcta

SEQ ID NO: 54233 - DNA, 263 bp, Setaria italica
  Peptide Sequence Number=SeqID_120207
cggtccactgatatctgcaataacagtaactccaagtgtgttctttggactcctggtttgtcaattttgaatattctgttccactaattactatgggcaaggacacactattgaatatcatgtgtggtgttattagttgtgcggattatagttataaaagaaagctgttattagtttatgttcatgttcagatttccagattccgttggctgttgaacctcccaaaactcgagatagcaaaaggagttcaagggtatccattg

SEQ ID NO: 54234 - DNA, 229 bp, Setaria italica
  Peptide Sequence Number=SeqID_120208
aaaagaaaacggaaaataaaacaaataaggaactaacctaagaagtaatagactaatgcgtggttattaacagataaagctgatgtatacagttttggtgttgttgccttggaagttgtcagtggaaaaagtaacacaaactacaggccaaaggaagactttgtttatcttctagattgggcttgtgttctacatgagagaggagctcttctagaattggtagattcag

SEQ ID NO: 54235 - DNA, 123 bp, Setaria italica
  Peptide Sequence Number=SeqID_120209
tgccacggcaatgcaacagctgaagttgaaggctctggataagctcgttaagttgctgaatgtttttctcttgtgccgaaattaagaggggagattgcactcgcacgaatacttcgacgtcgt

SEQ ID NO: 54236 - DNA, 211 bp, Setaria italica
  Peptide Sequence Number=SeqID_120210
agggagcaatccatcgcggggagcaaagcaggtaggcaagctagggttccttaccaacaacggatgacgagatcaacccgagctgcgcagagatggatctccgccccacgccggctccgaaacaggagaggaggatggcgacgcgggaggtcgggatggaaggggaaggggtggctggatctcgtcggagcggcggcggggcagtaaccga

SEQ ID NO: 54237 - DNA, 408 bp, Setaria italica
  Peptide Sequence Number=SeqID_120211
agatgagaagcatggatctgtgcagcagatgaccaacagacaaggctaggagctgttgtacaggctcttcaacgctttgctgtgtgaatgaagcccaggatgacctgtgactggaaatgctgctgtgccccatggaagagctcctcctttgatggactggggttcatgcttgcaaggttgaagtgcttccagtatctccacagcgagggtgttccgagctttgtcagatttactttcgctcgcagcttcgaggtcggatgaaaattgcctcggttgctcgattttgcgcaggaggaccatggccttgtatgccgaacccttggctttgttggcttgtggtagtctatgcttgaataatccatgtctttctcgcccatgtcggagctgctgcacaatgaattattgcca

SEQ ID NO: 54238 - DNA, 339 bp, Setaria italica
  Peptide Sequence Number=SeqID_120212
acaccaaaggaggagatgagaagcatggatctgtgcagcagatgaccaacagacaaggctaggagctgttgtacaggctcttcaaccgctttgctgtgtgaatgaagcccaggatgacctgcaactcgtccaattgctgtgactggaaatgctgctgtgccccatggaagagctcctcctttgatggactggggttcatgcttgcaaggttgaagtgcttccagtatctccacagcgagggtgttccgagctttgtcagatttactttctgcaaacaataaagtaacaatacacttgcttcagtgcaatgcgatgtgatgaaaaacacatgagtaaatt

SEQ ID NO: 54239 - DNA, 221 bp, Setaria italica
  Peptide Sequence Number=SeqID_120213
gtcgtctcaagggaattgtagacatgttctgttctacatggtggcaagcattagttggttgcagtaattttgcagctacctgtgactggaaatgctgctgtgccccatggaagagctcctcctttgatggactggggttcatgcttgcaaggttgaagtgcttccagtatctccacagcgagggtgttccgagtctttgtcagtatttacttcgctcgcag

SEQ ID NO: 54240 - DNA, 397 bp, Setaria italica
  Peptide Sequence Number=SeqID_120214
ctccgactcagtgacgtatgtgagctgtgtaatgtttcaactgaattgatgggcctgcatagcgattttatcccttcaacccagcttgtaagaacttttggttggaacagcatgtcatcatagaactcttaactgaaggtcggggtatccagttctggccttgtatttctcgaatagctcttgcattgcagcgacaaattgcttgtggacttcattgatctcatcggtggtaggctgagggttctttacaacttcaattgggaactcccataccttttgctacaccaatgcatgtggttgttggaaggccaattgaagttgtaaagaaccctcagcctaccaccgaatagctcttgcattgcagcgacaaattgcttgtggacttcattgatctcat

SEQ ID NO: 54241 - DNA, 205 bp, Setaria italica
  Peptide Sequence Number=SeqID_120215
gatcttgcggcccaatctgctcttatcattgacgggcacgaacatgaagaagagctgcgtggccagcaccagggcggcgacgcggcgcgggaagaggaagagcgaggcgaggacgaggaagacgttgaagtggatggccccgagccagagtgcgagcgccaccgtggtggtgcccgcccccatcgatcgggccgcccgccggcgg

SEQ ID NO: 54242 - DNA, 208 bp, Setaria italica
  Peptide Sequence Number=SeqID_120216
tgttcctgattgccaggttcagtgatgtggcgtgcaaggaatgtattggttggatctgctcttggtgctggaatctgctttccccttggtagttttatctcatgatgaactcaagctggatacagttgaagctggcagaaaaggccaatcttgagattgcaaaactcgaaaccatcgtctgatttggcagagggaaaaaggaaatcag

SEQ ID NO: 54243 - DNA, 347 bp, Setaria italica
  Peptide Sequence Number=SeqID_120217
ctctccatagtgttaggcaccggtaaagaagacagatcatatgaactgaacaagtcctctatcacaattacctcacgagtgtttacgaggagcgtgatgctcggacaactctactgtcgatggtgcaggctctgaaccatgccaagcatggcgtcgacatcgtctcagggaccagggtgagggacacatttcgccagacccaactggaatgaagtcttcacgaggatcgcctccaagcatccgaattcgacagttggagtgttctactgcggcgcgccaacgctggccaaagagctgaagacactggcgcacgagatgagccacaagacgggcactcgcttccactt

SEQ ID NO: 54244 - DNA, 339 bp, Setaria italica
  Peptide Sequence Number=SeqID_120218
cactcgcttccacttccacaaggagtacttctgatagaggacttgttcagttcatatgatctgatctctccatagtgttaggcaccggtaaagaagacagagaaagggaaaattttgcacagatgcaagacaaaccaagctgacctctcctcctgatctggaactgtacatagcataaagcagcacaggatagttagtactagtacttagcagaatttataagtattgacaaaaaaaagaagaagaagaaaagggaaagggcagggtaagaaggactagtttagaacttacgtaaaggttaatttaggttaagtaacaattaggttaattaactaatta

SEQ ID NO: 54245 - DNA, 347 bp, Setaria italica
  Peptide Sequence Number=SeqID_120219
gcgggtagaggtaggggatggtgatggtggagaccaccgccaggaggatgtagcagaggatgctgaccgagttgggtatatggtcccggacaaacacctgcgccctgcggcggtcatcgaagctctgcatggccttctgctgctcagcggcgttgaggttgtggaacggcaactgcgtgtcaccgtcatcatcaacgccaccaccttgcattggctggctgcgccttagttgcaaggtatggcgtaacaatcccccacgagacagcactcccgatgaataaggaggcagtgatcatgtatgggcatagcatgccgatggcgacattggtcatgcagaaatcgaagta

SEQ ID NO: 54246 - DNA, 282 bp, Setaria italica
  Peptide Sequence Number=SeqID_120220
acatccctcgttgatggaaaattttataatgtcacaggtttccctgacataaatgtaaatgaccagttgcatttgagagacaggagtgttgctagctccaaaagatatggcctatgtttaacctctgaaagcaacccactactgtttgccagtggaatgttcacagtacaaaatttcctacacaagtgctatggaaaatggaaaggttgttttctgttaacagttaccgtagtatttttttgtccttatttgtatttatttcttttgttttccttaaactta

SEQ ID NO: 54247 - DNA, 334 bp, Setaria italica
  Peptide Sequence Number=SeqID_120221
agttaggggaaggagcaagagcttggggaggtggagggaggaggtgtaggccatagaacgccgccgcgaaggtgggaggtggggattgggtggtgactggtgaggtcggcgggccgcgggcggaggtccaagagcgagacttttgggcatgctgatacggagaaactgcccgacaagtccaggggatcaggggacgagtccaagaggtcaagcagacgggcagtggttgtggatgacagggcttgaggaggttgtgtcgaagagtgactctgggaagcggcggtcgggagaaagggagaaagggattttgggggaggaggggagaggtaccggg

SEQ ID NO: 54248 - DNA, 249 bp, Setaria italica
  Peptide Sequence Number=SeqID_120222
aggagccggagaaggggaggaagaagagaaagccgcggaaatcagaggccggcagcaagccctcttcaaaaggagagaaaactggtgaggatcctgctagcaaggatgaagtcattttggttgatgaaagccctcagaaaaagcaaaggagaggtagaaagcaagatgcagtactgaaggtgcctaatgctagtagaaagcgctgcaaggcattggagtcacctgatggtcctggtagctgtcagctaa

SEQ ID NO: 54249 - DNA, 251 bp, Setaria italica
  misc_feature (228)..(228): n is a, c, g, or t
  Peptide Sequence Number=SeqID_120223
atcatcagattttgcatgttatttgccactttatgtatgaaaagcaatacaatcatactgctagaaattccacttctgaatgtttgccccattggattttagatgaaagccctcagaaaaagcaaaggagaggtagaaagcaagatgcagtactgaaggtgcctaatgctagtagaaagcgctgcaaggcattggagtcacctgatggtttagtttttttaccccccncctattatttagatggttattta

SEQ ID NO: 54250 - DNA, 338 bp, Setaria italica
  misc_feature (323)..(323): n is a, c, g, or t
  Peptide Sequence Number=SeqID_120224
agaacggtaggaacaaagaccaacttagtaggaaccaagaattaataaagaagcttcttatgatcctggtgctgcaacagttcttgagagtgtattcaacttcaatctttcaattcctcttaacttcttatttgattcttttggaggaaaaatattagttatccagggtatgaaagatcccccttacaaaatctgaggcatttgttaccatgctccgagagcattgcagcaaggttcaaatcagagagttgaacgcaggtcatgctccacatgatgaagttccagatgaagtaaataccttactgttttgaatggatgaaacngattgaagtaaaacc

SEQ ID NO: 54251 - DNA, 246 bp, Setaria italica
  misc_feature (10)..(10): n is a, c, g, or t
  Peptide Sequence Number=SeqID_120225
cttaaagaanattatcctacagtacgtatactatgaagtcacttttatatttctttcaattcaacagtacctttcattcctgtgtaataccatttcatgtttagagaacggaacgggtggacaagccacttgtggaccagattataagagctgtatcctcatattgcacagtatagttggcatacatttaacagtctttagaaagtttccttgacaaataaatccagtcttatgatcctggtgctg

SEQ ID NO: 54252 - DNA, 112 bp, Setaria italica
  Peptide Sequence Number=SeqID_120226
ttttgtggatttgctaggttgatgcctactgcctaggtaggaggttcaatagaccattgatgtgtgaatatcttgttgtaattccttctactgattgttgtatgtgaatggt

SEQ ID NO: 54253 - DNA, 347 bp, Setaria italica
  misc_feature (268)..(268): n is a, c, g, or t
  Peptide Sequence Number=SeqID_120227
ttttttatttttttgtttttttcccctttttttccgtttttacgggtttttacttttacgtttcttttcgtttcgttaggtagaatggcgtgctgaagctcggctggaaggatctttgcctgctcactgcatctgcttggcgcccaattcagaccccgtgccgttaaatctgagagcaaaattattactattactactagatctcacttgaggttcttgcccagatcttttgcctctgtttagctagctgctcaatttggtcaattcngagattaggaaaaatgaaaacatttctgatcactaattgctagatctcttcacagtgatagttactgatgtaagcttag

SEQ ID NO: 54254 - DNA, 257 bp, Setaria italica
  Peptide Sequence Number=SeqID_120228
ctcgctagacgccagctacggcgaggacagcccggagcgccacgtcgtcgagcagcagctgctctccagggagatccgcaacgtgctcgccgtcggcggcccggcgcgcaccggcgacgtcaagttcggcagctggcgcgagaagctcgcacagtcggggttccgctcggcgtcgctcgctggcagcgccgccgctcaggcctactactagactacctacggacaatagttacccctaccgaacgggtaacaacgac

SEQ ID NO: 54255 - DNA, 130 bp, Setaria italica
  Peptide Sequence Number=SeqID_120229
ggcgtcgactacgtcttcattcagtatgccgacgccatggccaagctcgctgtcgaccaggccgcacgcatgctctacagatacaacctgcctcatgagaagaagagaccgcggaatttgagcaaacttg

SEQ ID NO: 54256 - DNA, 418 bp, Setaria italica
  Peptide Sequence Number=SeqID_120230
agatttcagtttgatgtgctactgagaattaattgtcatgtacagaagttacatggaaagagaatgttgagcttttggctgtacagcctagtaatatacaatgagatggctggttgatatggtctggagctcctggtcatggagacggcctagcgaggtactgcagccacacttctggcaacccctggctcctcttcagcgtcctgaatgcggattttgtcaagggcactgccagaatgtcgtaatccttgggcgccctgggtaacttgcgcagcttcatgtttgcctgctccagttgttctttcttgtaccctttcctttggtttagttttttgtttttcttttttatttttttcttgaacaggcagtcaccaaaagactcaacattctctttcctatgtgctactgagaattattg

SEQ ID NO: 54257 - DNA, 463 bp, Setaria italica
  misc_feature (378)..(378): n is a, c, g, or t
  Peptide Sequence Number=SeqID_120231
gtacctagaaatagacggaattttagtacaaagggacaactagaccaagaaatgtcgtaatccttgggcgccctgggtaacttgcgcagcttcatgtttgcctgctccagtgtcttctgacccttcctggagttgcatcttgaacaggcagtcaccaaattttcccattcccatttaccaccacgtgaaatcggaataacatggtcaattgtcaagttgtcccgagaagagcaatattgacaggtgaattcatccctgtaaagaatgtttttacggctaaggctctgcttgactcttcttctcttcacaacctgcagaagctgtggaacccttagaactgcagggatgtagaatgatccgctaggcgaagagaccgtntgatcgtagtactccagtacatcggccttctccaatgaattccaggcagatggcgcgcttccagcaaacacattgacaggcctgt

SEQ ID NO: 54258 - DNA, 300 bp, Setaria italica
  Peptide Sequence Number=SeqID_120232
ggttgatatggtctggagctcctggtcatggagacggcctagcgaggtactgcagccacacttctggcaaccccctggctcctcttcagcgtcctgaatgcggattttgtcaagggcactgccagaatgtcgtaatccttgggcgccctgggtaacttgcgcagcttcatgtttgcctgctccagtgtcttctgacccttcctggagttgtctatttcttttgtaactaggtctagttctacctaaattttcctattcctattttaccttaccttacgtttgtttaaattttcggtttaa

SEQ ID NO: 54259 - DNA, 207 bp, Setaria italica
  Peptide Sequence Number=SeqID_120233
ctcgtattcccatttaccaccacgtgaaatcggaatgacatggtcaattgtcaagttgtcccgagaagagcaatattgacaggtgaccatgtcattcccatttaccaccacgtgaaatgggaatgggaaaatttggtgactgcctgttcaagatgcaactccaggaagggtcagaagacacttgcgcagcttcatgtttgcctgctc

SEQ ID NO: 54260 - DNA, 200 bp, Setaria italica
  Peptide Sequence Number=SeqID_120234
gaggaagggccacagctttccttgtcgctgggcccggctttgatcccacgacaaacctaatccgcacggaaagatcggccgagatagtcaaatgaggaggcagtgcgtggcagcgggcagcgctggttagagacttcttcgattggggggattattaggatatcgttgtcaactctacgacacgtccgtgcatgacctcg

SEQ ID NO: 54261 - DNA, 262 bp, Setaria italica
  Peptide Sequence Number=SeqID_120235
ttgaccgcctttcaaagaacagctcttgaaaggcggtcaacccatacagatgtcaatagaccatgatccgaatgttgagcgtagcgtaattgaaaataggggtggctttgtttcaaacatgccaggtgtgtcctcaatccttttttatctttaagcatggtaccttggtttaaatgattggtttgcctactctgttttgatatttagttcactggtcatgctccagagcatctggacatcttaaatacaaatcttcgtgaaa

SEQ ID NO: 54262 - DNA, 244 bp, Setaria italica
  Peptide Sequence Number=SeqID_120236
agggaatcccgagcgtatggcaaggttttgctgctttggtgctgggttctcagaggcatctaggaacaaatgtaattgggagagcaaccaaggaagggtgtgagagtgtggatatgcatgcatgcatgcaaatttagagctgctccagttcaccgggcatgggtcaacagcatctggtaaagggaaaggctgtcacggacaagttaaggtctgctatggctataccttgtaagagggaagacaa

SEQ ID NO: 54263 - DNA, 193 bp, Setaria italica
  misc_feature (16)..(16): n is a, c, g, or t
  Peptide Sequence Number=SeqID_120237
aaggcatcggtggctntggggggcgttctgaattttcttcccttttccttttattttttgtagagggaatcccgagcgtatggcaaggttttgctgctttggtgctgggttctcagagttcaccgggcatgggtcaacagcatctggtaaagggaaaggctgtcacggacaagttaaggtctgctatggctat

SEQ ID NO: 54264 - DNA, 259 bp, Setaria italica
  Peptide Sequence Number=SeqID_120238
aaccatccaacgataacttccttggggttgaccttttggtgcgaggcgtacatgttatggtggtactcgatgtctatggcgacctggtcggcggactcgctgtgcggcacgacgtaggagttgcggacatggacggtgccatcggggaggtcgccatggtctcgacggagggcgagcgaatcggaggaggcttgcttctgctgcggcggcctgcgggggcggcggcgcgacggagagagaagggtcccgttgggtgtgg

SEQ ID NO: 54265 - DNA, 352 bp, Setaria italica
  Peptide Sequence Number=SeqID_120239
taataggtcaacactcagtgcaaaaaagcataggcggattcacttcaaagttactgacagtcgagtttaggtatccactcaatgtagtcagttcgtagttctaacttctaagaaatttatatgtatatattactagatgaagcgtttcagttctgcaaagttcacttgccataaatcaaaacaattcataaatagcatgagatgaattagtaatcagaaaaatgacacatacatccagctttctccgcctcaatcatccttagatccagagggatttcctggaattgcgcagcgaggtgcctatctccaagggacaggttggatgagatgttaggcttttgtattggtaagt

SEQ ID NO: 54266 - DNA, 160 bp, Setaria italica
  Peptide Sequence Number=SeqID_120240
gattctttccttctgatctcatttaacaagaacaaaaattgaatttctgccaccaactgggcacatgcccaaaacatcataaattgcatccatccatctctagttctccacaacccaagaaggcaagaaactcccgcagccatggccaccaccgcgtcaa

SEQ ID NO: 54267 - DNA, 249 bp, Setaria italica
  Peptide Sequence Number=SeqID_120241
gttcagagatgaacctcccaacttctgttgtcaggtgccacacgtccttccacaacatcgtcaacatatttgtagatctcatcaataagaatgtaaagcttttccattgaagactccattccttccaggtcattgggaagcttctccaccattgtatatttcaggatctcaactgttataaaaccaataaggatgacacaacttcaaaaggttttggcttctaatcattacaactgtcaagctacagct

SEQ ID NO: 54268 - DNA, 315 bp, Setaria italica
  Peptide Sequence Number=SeqID_120242
cagtagaccttgatccggtacatcggttggacgttgcaagttctttatctcatccaagtgtgttagatcaggtgagagtccaccatgcatacataatattttatcatcgattagagcagccacgggaagagtgttcaagggtggggcatgaatgacagaggggtctcatataccttcggtgctgacaaggtttcagaattcttggaaaagcatgatcttgatcttatttgtcgtgctcaccaggttgttgaggatgggtatgaattctttgctgacagacagcacatcaaagtttcatcaacgctcatcatcgca

SEQ ID NO: 54269 - DNA, 183 bp, Setaria italica
  Peptide Sequence Number=SeqID_120243
ttggaaactatatgccttcttcttgcatacaaaatcacctaagaatagatagttggcttcaggaggaaagcctccatattcaaaaagccttaaaagatcactgtattgaccatggatgtcaccgcagatcttgatgggcgcctcgagctcgaggaggttgggctggctgaggaagatgtcgcg

SEQ ID NO: 54270 - DNA, 243 bp, Setaria italica
  misc_feature (226)..(226): n is a, c, g, or t
  Peptide Sequence Number=SeqID_120244
tgagcgttgatgaaactttgatgtgctcattccaaattctcaaacctgctgagagaaaaaacaaatttatggggtcaaacaaaatgtgagatggtgaagagctgtctgtcagcaaagaattcatacccatcctcaacaacctggtgagcacgacaaataagatcaagatcatgcttttccaagaattctgaaaccttgtcagcaccgaaggtatatgagacccctntgtcattcatgccccta

SEQ ID NO: 54271 - DNA, 239 bp, Setaria italica
  Peptide Sequence Number=SeqID_120245
tttttttttattcctaagtaaacttgtattaaactactagtccttcggtcttctagttccttacctccatacaagtgatacaactgcttttaaatagtgaaacttgcaaacagaaactccttggtgttcagaattgttcctggctggagaaggaaatcgcctcaggtcaatttggcaacttcatccttccataatcaatatatctacagctacatgattgttccacacgcggtaacagg

SEQ ID NO: 54272 - DNA, 159 bp, Setaria italica
  Peptide Sequence Number=SeqID_120246
ggaggggggagacggggaggaggcggggtggatgaggatgagatggtaacaagttggggagtgctccatgtagtaccctcatttaagttctgattggctgatggctgccaacctacaacgtccggtactctcatctaactcgacgacattggacatact

SEQ ID NO: 54273 - DNA, 177 bp, Setaria italica
  misc_feature (136)..(136): n is a, c, g, or t
  Peptide Sequence Number=SeqID_120247
tgccattacattttcagaagctgctgatgttaaaggtgaattatccatagcaggaaccttgttctcagaccttggggatgaactgggacattcacattccagatctttgttattatttgatgcatccacctcaagngtttttgctgatccgcaaaacccggtccaagttttcgacga

SEQ ID NO: 54274 - DNA, 110 bp, Setaria italica
  Peptide Sequence Number=SeqID_120248
gaaccttgttctcagaccttggggatgaactgggacattcacattccagatctttgttattagtgaagatgaaaggggaaaccctttcgatttaggagggttttaggaaa

SEQ ID NO: 54275 - DNA, 374 bp, Setaria italica
  Peptide Sequence Number=SeqID_120249
cagccacagggacttatgcatcatcattttctattgggcaagaagtgttcggtgcgttgcatccaacagctctcagagggacatatgctgattatgcaattctttcactggatgagctgactcccaaaccatcgactctcagtcatgtggaggctagtgcaatcccatttgctgcattgactgcatggcgtgctttacatgacaaagagtacttgtgattggtggaggaggagcggttgggctagctgctgtacagcttgcagttgctgcagggtgtggggtttctgctacctgtggatcccaaagtattgagcgagttatgggagctggtgctgaacaagctattgattacaccgctgaggagacagaagcag

SEQ ID NO: 54276 - DNA, 328 bp, Setaria italica
  Peptide Sequence Number=SeqID_120250
tagtctggtgggagtggtgggactgcgagaacggttggcgtcgagggggcggcggcggccttggagtagcttccggtatccaagctgctgttgtgttcggcaagggaacagctggcgtgaaaggtatggctgcagcagaaacaggagcaggggctacaaatattggctgcattccatcagatggtgagacgtgatgaggtccaacagctggcgctggaagaacaccacttgcaggagcatatccaaagtgtttaggactttggggatggcgtgccatgttacccggccttgatgacggaccccacggcataggaggtgtcaatggagg

SEQ ID NO: 54277 - DNA, 188 bp, Setaria italica
  Peptide Sequence Number=SeqID_120251
atgtgacactagcatgaggtactgcagtacaagcttgatctacctctttgattttcatcatcaggagggccttcaatgataggaatacccatctgaacaatttcccttccatgaccctttcgttggtcttttaccaattataactgtctgcccagcttcaagaccccctcgccggcaagaagcttttg

SEQ ID NO: 54278 - DNA, 243 bp, Setaria italica
  Peptide Sequence Number=SeqID_120252
taacccagtaaagatgccgacttcaatgcagcgctgtgccccaagaatctgaaccagcattgctaacagctgagcctgtgcaggagaaacctgcatctgacttcccttcatggcagccgtctcctcgcggagctcccggagaacctgaaactatgaaggatgaatcgcaatgcggcaatccggtcgaaatgaacggaaacgagaggcagggatgggagggaggcgcacggggtgctcgcggac

SEQ ID NO: 54279 - DNA, 399 bp, Setaria italica
  Peptide Sequence Number=SeqID_120253
tattcggtagtcgggtctaactttcggttgttggtcctaagtcttgtattgtcgtctaacaaggtagtacgcgggagctcgtggccatgaagttcatcgagcgagggaacaggatcgacgagaatgttttccgcgagatcgtgaaccaccgttcccttcgtcaccccaacatcatccgcttcaaggaggtggtcctgacgccgacgcacctggccatcgtcatggagtacgctgccggcggcgagctgttcgagcgcatctgcgaggccggccgcttccacgaggacgaggcgcgctacttcttccagcagctggtgtgcggggtcagctactgccacgccatgcagatctgccaccgcgacctcaagctcgagaacacgctgctcgacggcagcccag

SEQ ID NO: 54280 - DNA, 229 bp, Setaria italica
  Peptide Sequence Number=SeqID_120254
tagcagcagcagcagcagaccactacgcagatccagatgacgctgcgccgcagcagatgagtaagagagcggcgatgagggcggaggcggcggccaaggccgccgaggacgacggcagccgcttcttcgacgccggcaagccccgccgttccgcatcggcgacgtccgcgcggcggtgccggcgcactgctggcgcaagagcaccccgcgctcgctctcgtacgtggcg

SEQ ID NO: 54281 - DNA, 228 bp, Setaria italica
  Peptide Sequence Number=SeqID_120255
tgccacttcacctctttggtgtgctcctcagaagtctcagagtggatcacttcgtgagcgaccatggggatgtcgtctactaccagactgaccacaccttgaacactgcagcagctcatggcagctgggccactccaaaaccttcatctttcagaagctcatcctcgcacgccaccagcctcagagtaaacgcgctcacgttcttacacttgaccttcagctgctcaa

SEQ ID NO: 54282 - DNA, 402 bp, Setaria italica
  misc_feature (1)..(58): n is a, c, g, or t
  Peptide Sequence Number=SeqID_120256
nnnnnnnnnnnnnnnnnnnnnnnnnnnnnnnnnnnnnnnnnnnnnnnnnnnnnnnnnnactatgccacctgattgattcatatagagttgttgactaggcagtggcacagcagtacagcaacatttttacagcagcctatctgtgctcagatcaactgctgattagattagatcagattacagcaacccggcccaagacatggacatcaactagactgctttgctgcttattccatcagcggccaccaaataatgataatatgatgctatatactatcaataccgccactatactactagtaataagtaatataaccgtagaacggtaagactaaaccaaataataataacttaacaagactaaccaaataacttaacaacgtacaatacaatagaatacaa

SEQ ID NO: 54283 - DNA, 243 bp, Setaria italica
  Peptide Sequence Number=SeqID_120257
ctgtattgatgactgcctctcagaaaacattagtctgtatgacacaagtaataatattacatgccacctgattgattcatatagagttgttgactaggcagtggcacagcagtacagcaacatttttacagcagcctatctgtgctcagatcaactgctgattagattagatcagaattaacaagacaaacccggacccaaagaacaataaggaaacaataacaaaactaaagaaactaagaa

SEQ ID NO: 54284 - DNA, 262 bp, Setaria italica
  Peptide Sequence Number=SeqID_120258
caaatggaacgcttgatgttctatgcagacgctttgaagtgctcgatggttcttctaccttttctacaccatcagatatgttgagcttcctcttactgaaggaactggagtacaaaaatgcttgaatgtcgctcaaggaatgcctggaggaaactaccgctttacctccagggcctccaccgacgtttgctgtgcctggctcaactatgatcttcaggtgattgttcctacgtagtcttgttcctagttaactttttcttcc

SEQ ID NO: 54285 - DNA, 467 bp, Setaria italica
  Peptide Sequence Number=SeqID_120259
attccaatttgtactaccattttttcttttccagttttattgcttcataagacttgacgacctccttgaacttctcttccgcaccctctgcgaacagaaaaatgttcatggattagcaactgcactaggaatcaaccacatgagaagaaacaaggtgtccatcaacaaaaggagatgttttgaagcacctctatcatcttgattctgatcaggatgaacctccattgcttttgttctaaaagcagtctgcagcaggtgaagccttagtcagataacaagaccacatagataaaattgtattgtattatgtgtaccccaaaacccaaaatcctgccaatttttgggatcgtactacccatatactgtgcctcattatcactatactgtataaatccttcaccctttgaattcacaaatgtagctattatttttggttgataatatgaatcaacccgataatccatcta

SEQ ID NO: 54286 - DNA, 332 bp, Setaria italica
  Peptide Sequence Number=SeqID_120260
aaaaaatagtaaaagaagaaactgctgtgttacaagatagcatttcttgataaattaagtgcaaaggaaatcaattgaatcactcaggaatatgtaattagagacaaggactgaccatgagtccagacagtctaccatgtaataactagattaacagatgagcacaaaaattgaacctacctgtcaagaccaagaactgcataatgatgtgacataggataaaccctaggtcctgccggtgtaataaagtccgtctagttttatgttccgagtgagaagtgtcagtctgccaataccaatcatcccgagggatataattgtagccaccaggt

SEQ ID NO: 54287 - DNA, 202 bp, Setaria italica
  Peptide Sequence Number=SeqID_120261
ccatatacggatgcagaagtaaagaccaagaactgcataatgatgtgacataggataaaccctaggtcctgccggtgtataagtccgtctagttttatgttccgagtgagaagtggaatcagttgtaacttgcccagtttatggaatttatgcacgtgagctcatcaacttactagctaagtgaacaataacacatcctttg

SEQ ID NO: 54288 - DNA, 252 bp, Setaria italica
  Peptide Sequence Number=SeqID_120262
cttgaggtcgcggtggatcacgccgtggcgatggcagagctgctacgacctcgacgatggtgcgggtgacgttggcggcggcggcggcgggcagaagcggctcgcggttctgggcgaggaggggtgcgaggtcaccgggatcgacgacaagtacgtcctggaccgggagctcgggcgcggggagttcggggtcacgtacctgtgcatggatcgggacaccaaggagctgctcgcctgcaagtccatctccaa

SEQ ID NO: 54289 - DNA, 231 bp, Setaria italica
  Peptide Sequence Number=SeqID_120263
gttgtcatctgcaatgatccgtccttttgtcagctttaggctcaggctggtgaaccgctctctcgaatactgtctcgaggctttcctccagtccgttccagccttcatcatcgttgcaaactcatcgtagcttatcttgccatcctgaagaacaagataacggttgagatattcagtatcataatgttcagtctatttatcaaaacaccaaatgatataaactagaaatga

SEQ ID NO: 54290 - DNA, 272 bp, Setaria italica
  Peptide Sequence Number=SeqID_120264
ttgagatccatcttttcaaacatgtcctttatgtcagcagcctcttctaccgaaagatgctcagctatgaccctaagggcatgcttcttgaacttgttcatcacagagaactgttgaagtctggccttaacagtttcacccaaattaacatttggagccttcttaatattctgtaaccatggggtgatctggaggaaaatacaattttatcagacaaatgtaaaggggagagcgctaatgaaatcatagagcaatttaagatggaaacattt

SEQ ID NO: 54291 - DNA, 329 bp, Setaria italica
  Peptide Sequence Number=SeqID_120265
ctgaagcatctgccgaacgagatctttagcattatctgaaacattgggccagggttctcgcttaaaatctatatttccccgaagtatagcttgtgcaactccttgttcagtctcagcccaaaatggaggaacaccacatagcaaaatatacaagataacaccagcactccatatgtctatttcaggtccatagttcctcttcaggacttcaggagccatgtagtagggacttcccacaatttcggaaaacttttcaccgggcttgaagaagatggagaggtccgtaagttcgtattggtcctttgtagtcggtcgtagtttcttccttt

SEQ ID NO: 54292 - DNA, 246 bp, Setaria italica
  Peptide Sequence Number=SeqID_120266
ggttatcatacgagtgatagcaaactgaccccacaaacataacgagagtaacggaagcacatgaccacatccatgtgtaattgccgttcaacagtaatgattctactatgaactgagccaaaatctcacctgcacgacctcgacgatggtgcgcgtgaccaaggcggcggcgcgctccgtgtagtgcccccgagccacgatccggtcgaagagctccccgccctcgcagagctccatgacgaggtg

SEQ ID NO: 54293 - DNA, 401 bp, Setaria italica
  Peptide Sequence Number=SeqID_120267
agagaccgccaaaattccccaataaatacaaagacgactacccctaaccaatttgtgtccacagcttcaatgagcatctgcacttctgattccgcaagatgagaaccaagttttgctattccggtctttagttcttcataagatacaatcccatcattatcagtgtccatagtcttaaacatctcctttatgtcctcaacttcctcagcagacaaatgatcagcgatgacccttagagcccttcttttgaatctattcatcctagaaaattgtttgagcctcgacttcacatatctccaagaggaacattaggagccttcttcgcatttttgaagccaaggatgttcgagaacctgctttgcagttaacctgagctttggatcaggctccaacatgtgtcg

SEQ ID NO: 54294 - DNA, 362 bp, Setaria italica
  Peptide Sequence Number=SeqID_120268
aacaaataagaaagaaaaaagaaaaagggggaccaaaagaaacttactagacttaagtaggagccaagggcctaactacatgcacacatatggatgcaggtcgctgttttcactcaacacccaattttaccgaaccatcctttataagcttcatgctaaggctattaaaccttcctcttgaatagtgccgggacgcctttctccaatctgtaccggtcttcatcatcgctacaaattcgtcatagctaatcttgccatccttatcagtgtcaacttcttgcaatatgtcattcaccacttccatgctatcagctgctccatcgtccactagagccctctcgaagctcctcaggctcaatgaa

SEQ ID NO: 54295 - DNA, 173 bp, Setaria italica
  Peptide Sequence Number=SeqID_120269
catattgtttgttccgatcaacatgagaatatgagattggattgaattgagattttggaattggtactgcatgagagctcccaggaatactgtgtgcaggaagatattaggatggacgaagtcacgcaagctgttgagaatctgaagaaagaatggaaccaagcggtttctca

SEQ ID NO: 54296 - DNA, 253 bp, Setaria italica
  Peptide Sequence Number=SeqID_120270
ccgtatcctgagccgctggttagtttgcattagagaattcatgttttgtcaactagcaattgagcatgagaaagtagccaggcatatgcatgtcgcggcgacttttttaattgtcgacgctactgaacaagcaccggtaagcgtacgtacttggtcatcccaggccttgtcgttgttgtagatgaccgcggctcccaggctcctggccgggttgatgccggtgccggtgatggggatggtggccaggtgcacc

SEQ ID NO: 54297 - DNA, 286 bp, Setaria italica
  Peptide Sequence Number=SeqID_120271
gatcgccgcgccgatgaacggacccacccagaagatccactggtcgctccaggccttgttgttgttgtacactacggcggcgccgaggctcctcgccgggttgatccccgtgccggtgatcgggatcgtcgccaagtgcaccatgaacacagcgaacccaatgggcagcggcgccaacaccgggatgtgggagtcgcgggcgttacgcttggggtcggtggcggaagaaagacggtagtaagaacgaagaaacgaaaggtagaccgaacaaatactacggacggac

SEQ ID NO: 54298 - DNA, 249 bp, Setaria italica
  Peptide Sequence Number=SeqID_120272
agcagcgcgcgcaccagcgacaccttgcgcgccaggaagaggcccagcgtgacggccgcgactcccacgtcccagtgcttgctcctcttcccatcgggttcgccgtgttcatggtccacctggccacgatccccatcaccggcaccggcatcaaccccgccaggagcttgggcgccgccgtgatctacaacaacgacaaggcctgggatgaccactggatcttctgggtgggcccattcatcggcgccg

SEQ ID NO: 54299 - DNA, 212 bp, Setaria italica
  Peptide Sequence Number=SeqID_120273
tgcttgtacccgatcaccgtggcgacagtgatgtagaggaagagcagcgtcgccacgaactcggcgatcaccgcgcggtacagcgaccacttggtcagctcctccgcgtcgatcagcggcctcgatgtctttcgccatccttgcttacaccaatgcaagctcggaagagctcacgaacgctgtgtgtttgcttgctgctgctgacttgctag

SEQ ID NO: 54300 - DNA, 445 bp, Setaria italica
  Peptide Sequence Number=SeqID_120274
agggactaattagtacaagtacaagtacagtccacatcagcgtcttggtccaactcagcgcaccaatgtggcaaaaccactatagaaaaccaccttagggtgttatttaaatggttttacaaagatgagagggttaaacatccggttttatagttgaggtgatgtagtcgatactccatacattagggggttatgtagactttttccgggattttttttaaccccagcctgaaattcgctcacacagggagtcaaacccaggacctgaggagtgctactaaagccacctaaccaactcagctagaggcccgttggctgacaaagttgacatcaacattgcaaatgtttaaaaaacaaatcaactaaaagctttaccagtattcataggtcatttctttcaagcgaatctcaagcctttgataaaggacagacttctcaaaatcct

SEQ ID NO: 54301 - DNA, 236 bp, Setaria italica
  Peptide Sequence Number=SeqID_120275
tccataattgtacaacacagtacatgctcgctttccatcatcacagagaccctacaaagattagtgacacaaaattgtacatccctaccaagtaccgagtgaacggtaatcggtagatatcagttgtccagaggccagttcttcccatactgcaggtctggaaagtaagcgagtcatcatctcggcttcgctattctcttagagcgtatgcatctatcctgtatcttcatgtacct

SEQ ID NO: 54302 - DNA, 324 bp, Setaria italica
  misc_feature (179)..(179): n is a, c, g, or t
  Peptide Sequence Number=SeqID_120276
cgagcattcatatggttggcacgatggagtgcacgggttgctttaggtaaacttttgttgtcataaccaagacgatggcaatgaaggcccctgcctacttacaaatggggcctacttgtcagtcagtcagtccacatcagcgtcttggtccaactcagcgcaccaatgtggcaaaaccncagtattcataggtcatttcttcaagcgaatctcaagcctttgataaggcagacttctcaaaatcctgcttatcatgggtaggtttaatgaagttggcctccagatgccaacaactcctcgccctttcccgtacgagttgtttgc

SEQ ID NO: 54303 - DNA, 505 bp, Setaria italica
  Peptide Sequence Number=SeqID_120277
aacaaattagggaaggactaagtagaacaattaacgtaatactaaaataatttaataacaataactcgtacaattaatgcaaccgctagctgactaacattgttgactacagagttttgtcacaattgaatctgaagtcaaccccaataaataccaaaggttatgagagcttgctacaacttacacataacaccgtaagtgatagtttcgatctatactacgggctcttcatgtataatgttaatgccacggagcaggcaagtaaactctcccgtcttctcatgatgcaccatcattatccttcacctacgttactatagagtatacgtaacatttgctaatagtatgtgcgcctaaaggctccaacatcacgcctttcataattttacgcacagcttgacaatttggagagggcatttgagaaggtgagacaaatgttgtatggtcggctccatgatttactacgaaagcaaatcgtggagagggtccctatgccggtggtttc

SEQ ID NO: 54304 - DNA, 221 bp, Setaria italica
  Peptide Sequence Number=SeqID_120278
taaggaaagtagcaaaaatggtagatgtgagtgatgacgacaccgatgattattctccttctgaatcagatcatgaatcaacagaatctgatgaggagttccacatgtgtcaaatctgcaacacagaggaaggaaaagagcctgttgctacatgggcatcttgcttctttttcctcatcttctactattcttgcatgtgtagcatgcccaatcatcagtca

SEQ ID NO: 54305 - DNA, 456 bp, Setaria italica
  Peptide Sequence Number=SeqID_120279
tcataaaccttgttattgataacttcagacattttaacctaaaatattgttttttctgttttggggtgaagtttattcctgcccttcagaactcagatcttgttgacctggagtattcctttgtttaaccaaacataggataattctaggagaccaacaatataatgaagttacggtttgatttctcacagtctgagtgttaattaatgtcctatgcttcgtcactgtaatctaacaggttcgtcaggttcacaagagaatacgtgttgtccgtttagtgacaacaaatgacagccaacgaattgttggactgctgattccgaattcagcagtggagtcagtactaacaggattgcaatgggtccaggatattgacgattgacatggaaaggcttcaattttgtttctcactcactcatattgccgggttttttaatcactgttctgatgtcacat

SEQ ID NO: 54306 - DNA, 439 bp, Setaria italica
  Peptide Sequence Number=SeqID_120280
tagtttaagttaaaggtattggtctaggtaagtagttattgtattgtctttctattcgtaagcagtgtatgcatggatctaaatgtaaaattgggagctactgtactgtaggaagaaggttgcaagaggttaatatactgggtggcctcatacttccagtttggggtacaatagagaaggccctggccaagcaggttcgtcaggttcacaagagaatacgtgttgtccgtttagtgacaacaaatgacagccaacgaattgttggactgctgattccgaattcagcagtggagtcagtactaacaggattgcaatgggtccaggatattgacgattgacatggaaaggcttcaattttgttctcactcactcatattgccgggttttttaatcactgttctgatgtcacatgcagcagcctttagggcctctgcatatt

SEQ ID NO: 54307 - DNA, 305 bp, Setaria italica
  Peptide Sequence Number=SeqID_120281
aaagttaagtactaaacaaccaaccttaggaactagggaatagaatgaactgatgattgggcatgctacacatgcaagatagtagaagatgaggaaaaagagcaagatgcccatgtagctgatttttcaaagaggtatgacgctgcactagagaagaagttgaagattttggatataatacgttccttggatctccctaataatcctttggatgatatcatcgatcagctggggggccctgacaatgtcgcataaataacgggacgtcgtggcatgctaataagagcttcggatggaaaaggcgt

SEQ ID NO: 54308 - DNA, 305 bp, Setaria italica
  Peptide Sequence Number=SeqID_120282
ttttaaaagggtacgtacttaaggtaaagttaagtactaaaaattggttagtattgttgtagttgtattgtacgtactaccgtattgtatttatttcttcctttcttgtaattctagtattctattgaattcaacagaatctgatgaggagttccacatgtgtcaaatctgcaacacagaggaggaaaagagcctgttgcttcattgttctggttgttctcgacatgttcacccaagttgtctaacaccaccttggactgggatgatgactgatgattgggcatgctacacatgcaagatagtag

SEQ ID NO: 54309 - DNA, 165 bp, Setaria italica
  Peptide Sequence Number=SeqID_120283
ggattgtattgtacttgtattgtatttgggtctattgtcttactactattgtctaagatagtagaagatgaggaaaaagagcaagatgcccatgtagctgatttttcaaagaggtatgacgctgcactagagaagaagttgaagattttggatataatacgttcc

SEQ ID NO: 54310 - DNA, 293 bp, Setaria italica
  Peptide Sequence Number=SeqID_120284
tttcccggttcttagtcgttaagtattgtagtctacggttcttgcgcggcgtccgccggcgttatcctctcgagtgggaaccccttccccatgactgcgccgagctccaccacttccccgtcgcggagcccacacaggcgctccgcggtggtccccggcacggacttgacgaggaactcgaaccgcgccccggcgcctggcggcgaggcgacggccatgaacgccggcttgagctcctccccgccgccggagggcacgcggatttggaggtactgccccggcgaggtgtagga

SEQ ID NO: 54311 - DNA, 472 bp, Setaria italica
  Peptide Sequence Number=SeqID_120285
atatgcttacatccattcttactagttactacttattctgcagacacaagctttatacagaattggtaaaggggaaggaccaacagttcctagtggtctttcaaaggatgcccgtgattttataagccagtgtgtaaaacccaatccagaagacagaccttcagcatccaaactgttggagcatccattcgttaacaggtcaataagatcagtacggtccatgaggacatcttcacgctcaaattcaactacacgtggcatcaattgataagcggggatgatttgtagcacggtggcagaatggtaagttacctcgtttcatgtttgtgctaagatatttcatctcatcgatggtgggtttaaccaatttgcttgtaccgtatggttcacttctattagtagaataatgtattaagtgggatgacttcatcatggatggattgttacaattcacccaattaaacaaaaggat

SEQ ID NO: 54312 - DNA, 446 bp, Setaria italica
  Peptide Sequence Number=SeqID_120286
cagatatttcagattctgtgagctttgatgataaggggagttcatctaactcagaaaatcataggaagaactcatatgaggttagtatctccttagcattttatggattggttaattcttgatctttgtcagatgttgttcattattggcattgattccatcgtgcttgcagaaccagtgaaatgccagtgttttgtcagatgtgtttgttatcggcattgattgcatcatgcttgcagaactagtgaaataccagctgtttaaccttcagtaccaacttaaataggctgcagttctttccgtctttttgaactccatgtttgatgcctactgtattttaattgttccaggttattgatatgaagaagggaaatggagccaaaggaaaagatttacggaagagacctgaaaagggaattattcaagaagttagacgagacgaataa

SEQ ID NO: 54313 - DNA, 396 bp, Setaria italica
  Peptide Sequence Number=SeqID_120287
acactatcatgtgaactaatcttgagattgcttactgatgtaaatacaattgaaacttaaatactcatatcttatgttggcagatttcggaagagcctgaaaagggaatttatttcaagaagttagacgagacgaataatacaagccagaagggtgccaaggataaaagaagggaaaccttttcggaaggtagtgctcaggaggagtgcaagtattattcaacaccaggtggatgcaaatttgggaaagcttgcaaatacctccaccgtgagggaaaagaagggaaagcagaggttgaaaaggttgagctgaactttctaggtcttccactgcgaccaggtgaaaaggagtgcccgttctatatgcgtactgggagctgctaaaatttttgttctt

SEQ ID NO: 54314 - DNA, 240 bp, Setaria italica
  Peptide Sequence Number=SeqID_120288
ttttgtaaggcacatttgttaggatctgggtggtgaaatttgcagttagtggcaaatttgcagctcccagtacgcatatagaacgggcactccttttcacctggtcgcagtggaagacctagaaagttcagctcaaccttttcaacctgaatgccagcattttgttaagagtggtttctgcaaatacaggatgaaatgtagatttcaccacccaagggcgcgtcagcctgcaccactaac

SEQ ID NO: 54315 - DNA, 333 bp, Setaria italica
  Peptide Sequence Number=SeqID_120289
tataggtttattgttacacgcaaaataaaaaggcattaatgaaggcaaaagtgcatacaaaacaaacaagcatcgaatcaacaggtggaactttgcagataatttatgagactatggggtgattttacatatactaaccgttttgatgtacagggtggaagtcacatgctgagattttcatgcttgacaactcagaactgtgcatagataggagagaatctggaggatggattgatggaagaatgtactattcaagaatagccctgcacggtagttgaaaacaagtggcttattatccatcagaaaacagtaacagagttcaaataaacaaaa

SEQ ID NO: 54316 - DNA, 455 bp, Setaria italica
  misc_feature (104)..(104): n is a, c, g, or t
  Peptide Sequence Number=SeqID_120290
tgacacaaggttaagcacagcatgtggagaaaggaaatgaggatggtttgtttgataagttcaatatcatcatgtgcaaatctttggcaatcattatggatgcnggaactggcttcacagctcaagtctatgagctgtctccacactttcttcataaggtaggaccttcccatttgcacctcatgtaattcactcttgttcgccgttctcaatttttgcacaagaacaggaatggattatggaacagtgggataaaagtttctacatcagttctgttgctggctccaacaatggaagttctcttgttgtgatgtccaaaggtatcgatatttttcttgtgacttaccttacccccaatttgcttggggcaaataggacttgttgttgctgttgctgcatatatgttcattacatccttatccctttcttttctgcctgtactagacagctgcagt

SEQ ID NO: 54317 - DNA, 367 bp, Setaria italica
  Peptide Sequence Number=SeqID_120291
ggaaggttttcacgtgacttcaatggcaacatcaggcagtcgatgggctatagtcatgtcccgcagtgctggattttctgagcaggttgtggaattggacttcctctacccaagcgagggcatccatagacgctgggacaatggctatcgtattaccgctatggctgccacaatggaccaatctgcgctgatcctaagcaagccaaggcgtcgcccaagagatgagacacaagagactctgcggactacacagtttcccagtcaacatgtcaaggagaagtgggctaaagaaacctctaaccttagactagggaataatagactaatagggacgaaaccgtaggacttaaacattcgtcggctgctg

SEQ ID NO: 54318 - DNA, 331 bp, Setaria italica
  Peptide Sequence Number=SeqID_120292
ccgtggcttaacatcgtcggctgctgacctagctgttcttgatgtatattttgagtttttgtccctctggtaccagcatcagccacagggcagtgtcttagtccttggaagatgatgaatcctgatgtatgtatctgaacctgattgtaggtcggggtctcgtaagttaatcgggggaaaggattctgatacattttttcccattgaaattcctggaaaaattcctaggataccaataatgacatgatgtaaaaagcgcactgcaagaggcacatgacagactcatttttattggacctgagtagcccggctgattaagaagcctttcccc

SEQ ID NO: 54319 - DNA, 315 bp, Setaria italica
  Peptide Sequence Number=SeqID_120293
taattagttacttttttactttagtttacttaaaaacgttacccttaatttacttaattttcctagtattgtagtattctattctagttgttcttaccacaacaactctagttaaccatgcgaaaggggcatccaaatctttcgatggaggctgtagatcacttgaacgctataagggccttgtaaacgggaacggtatgaacgtatctaccgattccagtgaagataaggagtccagcaactcagatgagaagtgtaatgagtttgcatctgctgagtcggaggacttggtgtcaggtgctctatatgattttg

SEQ ID NO: 54320 - DNA, 282 bp, Setaria italica
  Peptide Sequence Number=SeqID_120294
aagtacgaatagggactaataagtacaatagtacccgacaagtgactggattttctgagcaggttgtggaattggacttcctctacccaagcgagggcatccatagacgctgggacaatggctatcgtattaccgctatggctgccacaatggaccaatctgcgctgatcctaagcaagccaaggcgtcgcccaagagatgagacacaagagactctgcggactacacagtttcccagtcaacatgtcaaggagaagtgggctaagaacctctaccttgctg

SEQ ID NO: 54321 - DNA, 262 bp, Setaria italica
  misc_feature (238)..(238): n is a, c, g, or t
  Peptide Sequence Number=SeqID_120295
ttaaagaacttaaattaggaaccaaaacccttactaatacaaggacctaatcaatactgatggagcccaaaaggtagggcagaagcgtgccaggttgcttaatgatgatgacggccatgtgaaaaagaagattcggttggtgctccggcaacacagtggatttcagtatacaattcaaggtcacctatgaaacagaggtaccactataatgtggctgacacaaggaactggcttcacngctcaagtctatgagctgtctcca

SEQ ID NO: 54322 - DNA, 250 bp, Setaria italica
  Peptide Sequence Number=SeqID_120296
atggtggcctgcattgccgtggagtccatttccatcttggaaagcatgcattctaaaggatatgtgcatggagatgtcaaacctgagaactttcttctgggtcagccttcaacgcctcaagaaaagaaactttatcttgtggatcttggattaggtaaacaagccggtaccgaccaatatgttattcacttgcattattctggtgaaatcgcctccctttcttagactactggtggcagtgttgatcatt

SEQ ID NO: 54323 - DNA, 230 bp, Setaria italica
  Peptide Sequence Number=SeqID_120297
cagctctacttgaagcagaaaggacggttcagatagcattggcaaaagcttccttggtggatgatcaggtccaggtcggaggatcccccgagtacaaggtcgagaggaagctgggcaaaggtggcttcggccatgtctttcttggccgacgcctaactgctgcccacgctgcacgctcctcggcttccgctgcccaagaggttgccatcaaatttgagcacactagcagc

SEQ ID NO: 54324 - DNA, 251 bp, Setaria italica
  Peptide Sequence Number=SeqID_120298
catgattatggatatgctggggcctagcttgtgggattcttggaattcattaggccaatccatgtcatcggaaatggtggcctgcattgccgtggagtccatttccatcttggaaagcatgcattctaaaggatatgtgcatggagatgtcaaacctgagaactttcttctgggtcagccttcaacgcctcaagaaaagaaactttatcttgtggatcttggattagcaacaaagtggatcttggattagc

SEQ ID NO: 54325 - DNA, 259 bp, Setaria italica
  Peptide Sequence Number=SeqID_120299
acaatagaattaataggaataatgctggggcctagcttgtgggattcttggaattcattaggccaatccatgtcatcggaaatggtggcctgcattgccgtggagtccatttccatcttggaaagcatgcattctaaaggatatgtgcatggagatgtcaaacctgagaactttcttctgggtcagccttcaacgcctcaagaaaagaaactttatcttgtggatcttggattagcaacaaagtggatcttggattagc

SEQ ID NO: 54326 - DNA, 248 bp, Setaria italica
  Peptide Sequence Number=SeqID_120300
catgattatggatatgctgggcctagcttgtgggattcttggaattcattaggccaatccatgtcatcggaaatggtggcctgcattgccgtggagtccatttccatcttggaaagcatgcattctaaaggatatgtgcatggagatgtcaaacctgagaactttctctgggtcagccttcaacgcctcaagaaaagaactttatcttgtggatcttggattagcaacaaagtggatcttggattagc

SEQ ID NO: 54327 - DNA, 295 bp, Setaria italica
  Peptide Sequence Number=SeqID_120301
tggtggcctgcattgccgtggagtccatttccatcttggaaagcatgcattctaaaggatatgtgcatggagatgtcaaacctgagaactttcttctgggtcagccttcaacgcctcaagaaagaactttatcttgtggatcttggattagcaacaaagtggagagatgctgctagtggacagcatgttggttatgatcaacgtcctgatgcctttagaggaacagtaagatatgctagtgtccatgcacatttaggaagaaatactagtgtataggcaagtgattccaagtcat

SEQ ID NO: 54328 - DNA, 226 bp, Setaria italica
  Peptide Sequence Number=SeqID_120302
cctgatgcctttagaggaacagtaagatatgctagtgtccatgcacatttaggaagaactgctagcaggagggatgacttggaatcacttgcctatacactagtatttcttcataggggcaggttgccatggcaaggataccaggcgataataaaatacaattttttaggttagtagacaaagaaggaaagaatagaagtaacctacaacctagaagaagaaccta

SEQ ID NO: 54329 - DNA, 198 bp, Setaria italica
  Peptide Sequence Number=SeqID_120303
agtgtgagtagtaaacggggccaaagaagcttctgaataatgtatcatcacttctcaaactatatctgcttcggatgccgcacttgcagttatgcttcgagagtgaagaacgggcaaagaagcttctgaataatgtagcctccaggtttgagaagtgatgatacattattcagaagcttctttgcccgctgagactgc

SEQ ID NO: 54330 - DNA, 399 bp, Setaria italica
  Peptide Sequence Number=SeqID_120304
ccaccacgtgaggctgagcgtgagcgaggccccgagcaggccgaggcccagcacgtagacggcgagccagctcagcgccacgtggagcacgaagctggcggcgaggatgtaggcgctgggcgccacgatgctctgcgcctgcaaaaacttctgaatggggaagttggcggcgtaggcgaagatctgcgggatgaggccgtaggcgaactccgcggcggcgcctccagccggccgtcgacggcgtggtggtcacccgtcgtccgacccatcgatagagagatcgagatctcgatcgtgacactctgatgcgtattccgcggcggccgcgcgcaagcgcaagcaaagatgttttggtgcgtggccgcgtagcttgtgtattaagtattcgttacggtcgtt

SEQ ID NO: 54331 - DNA, 415 bp, Setaria italica
  Peptide Sequence Number=SeqID_120305
aggacggaagaatagtaaggcgctgggcgccatgatgctctgcgcctgcaggaacttctggatggggaagttggcggcgtacgcgaagatctgcgggacgaggccgtagacgaagacggcggcggcggacgcgatctccggggactcgccgaggaggacgaggatcgggcgggagaaggcgtagaggacggcgagcggaacgcccgtcgccatgagcagcaccgtcgagcgctgcaggtagacgcccagcatgtcgtacttgtgcgcgccgtaggcttgcccgcacagcgtctccaccgcgctccccatgcccagctgcacacagtccggccatgagccgccgccgtcagtcagagttcttcattcccagggctcatcgatcgtggattattttgcagatcaaatcgagacgcac

SEQ ID NO: 54332 - DNA, 251 bp, Setaria italica
  Peptide Sequence Number=SeqID_120306
tcttcgtagtcgttgtccgtaggttggtccggtagtaagtattcttgcgttcgacatggacatgaggtagttgatcatgtacaccaccaccgccggcgccgccagccgcaccagcaggcgcatctccaccagcgtcgccgcggacatccggcggccccacggcagggactcatcgctcaggatgctctccagccgcccgctcaccgcctccaccccgtgcccgctgccggtgtggctggccgtcgccgcgg

SEQ ID NO: 54333 - DNA, 248 bp, Setaria italica
  Peptide Sequence Number=SeqID_120307
cacaggtcggctacggcgcgcgaaacgacctcgccggtggtgaagatgtagctgagcttgtccctgagcaggaaagtgacgagaccggcaattgctgatacgaacgccgacagggccgtgaccatccacgcagagaacgcggcagacctggggttgccggcgcccagttcatttcctactctcacactgcagtgcggaacttcttcagacaagagttcagacaaacaaactcttgatacggataagac

SEQ ID NO: 54334 - DNA, 453 bp, Setaria italica
  Peptide Sequence Number=SeqID_120308
taacaaacttaagtttaaaataacttttaactaagaacgaacttaacttaccaacctactttagaacccaagttaggtcctgaatgtaacccagatcaggatcaaggtctgcatcagtgtgccaccaatcatgccgctccaaatgcccgccgctccgaggtcgaagtagaagccgaggaggcacccgagggggatgccgacgatgtagtagcagccgacgttaacgtacgcgacgaacgcttgccatccgcaccccacggccaccccggagaggacgggctggatgccgttgaggatgagagtgaaagccagcagtggcgtcagttgggacactgcccgtgacacgtcctcgccctcggtgaagatgtagctgatgtagtcccggcagagcaggatgacgacggagatgatcaccgacaggatgaatgacagcaccgtcaccaccaagacaga

SEQ ID NO: 54335 - DNA, 448 bp, Setaria italica
  Peptide Sequence Number=SeqID_120309
taaaatgctgcaccggcgcataacctagatacgatccagcagcgagatagatttgtggatcatttgtcagcgagacgaccgtggttaccgagaggactgatgatcatcaaggtggctcacttacctccttgttccagtcagttctcaacgtgatccagatcagtataagtgtttggatcagggtgccccctatcatgcctccccacaatccctgaaatgtggtacagatcagattgtcataataacctccgttgggctcttttacggtacggacaagtactcataaccgttgttcagtttctccagccgacaactgataagtcaactgaatatggacagtgattttttactatctccgatggtagaaatcagatttaaaatgtaacacgttcagaatcagccgtaccttgattccaaagtcaaacttgaatccaagaagcacaccgag

SEQ ID NO: 54336 - DNA, 365 bp, Setaria italica
  Peptide Sequence Number=SeqID_120310
tcattgctcacccggacactgaaatcatatacagaaatgaccatttcccgctcgtgttgttactaatcttctcaatgaataaacgagttcagtttggttgctaatgttagctagatttcagaacgattagcctacctggcagctgcattgaacccaaccgagatcatgaacacccaccctgagattgtcatgctacaacagagcacgcaaaaaacgtgttacctaatcttctgatttctaaacaatgcatgtatcacttaggctaatgttaccagagaataattaataatgttaccagacagagagcgatgccaacgcaagctcggggtccttgaggagtccagcgattgtagtctacgtagtta

SEQ ID NO: 54337 - DNA, 264 bp, Setaria italica
  Peptide Sequence Number=SeqID_120311
taataacctccgttgggctcttttacggtacggacaagtactcataaccgttgttcagtttctccagccgacaactgataagtcaactgaatatggacagtgatttttactatctccgatggtagaaatcagatttaaaatgtaacacgttcagaatcagccgtaccttgattccaaagtcaaacttgaatccaagaagcacaccgagtggaaggccgatgaagtagtagcatccaatgttgatgtaggctaccattgcttgcc

SEQ ID NO: 54338 - DNA, 482 bp, Setaria italica
  Peptide Sequence Number=SeqID_120312
ggctccaaagtgcaatgctatttgtgatgaggcagtaatccggaaactagtcattgcaaggcgcccagaccttgcagaacgctttgagagatttttgctggaatcatatattgaggataacgatacggtgaagtggtgcccaagcgtaccgcattgtggaaatgctatacgtgtcaaaggtgatatttattgtgaggtggaatgcgcatgtggatgccagttttgtttaattgttccttacaagcacactcgccgtgttcctgcatgatgtgggagctctggatcaagaaatgccgtgatgaatcagaaacagtgaattggataaacagtaaaatactaaaaccctgtcccaagtgccacaaacctgtggagaagaatggtggctgcaacctggttgcatgtatttgtggacaagcattctggtgaggttccttattcttcagcatcgcttctccaattaccaactgctagacttggtttga

SEQ ID NO: 54339 - DNA, 251 bp, Setaria italica
  Peptide Sequence Number=SeqID_120313
aagtgataacttctaactgtacattattctttgatgagatgtgacaggccaacgtagggagagagaaagagtttcatgcttcattacagaagtttaggggaagagattcagacatttctgaagagtctgctgagatcaaagttatttcttcccaacacagcttccatttatcagacaatgtggaccataagatattcaattaaatattttattcagggttatatagaatcaattcacagattacctaagga

SEQ ID NO: 54340 - DNA, 375 bp, Setaria italica
  misc_feature (56)..(56): n is a, c, g, or t
  Peptide Sequence Number=SeqID_120314
gaaatgtaaatttgtttacatattccatgaagttgaagttaattctcagataatcncttgaacactgctaatcgggatcaaccctgtacattctgaaatggacctttctgaaaatgacaccattgaacttttggagattttacaccgtgatcctgctttctaataaaataggtatattacgcagcatactcagttggaatgggaccagttccttgggttatcatgtctgagatattctcaattgacatgaaagcaatagccgggggcttggtaaccctggtcagttggattggttcctttgtggtttcttactcattcaactcccttatggactggaatcctgcaggtacgttctttttgttctctgcagcgagc

SEQ ID NO: 54341 - DNA, 238 bp, Setaria italica
  Peptide Sequence Number=SeqID_120315
agatgaattgatgatgattatgttgctactgttgatccgacggttttaggaaattgtagcactctagctgcagcatttctcctccattaacggggtcaaactggcatctgtagaagctgcgaaatcataaaaaatagattatcaagctcaaatctgtacttgtcaactacagcactgaaagaataaggttcgatttcatgcccataccttccatccataccaacaactgccacggtat

SEQ ID NO: 54342 - DNA, 363 bp, Setaria italica
  Peptide Sequence Number=SeqID_120316
tagtttcgtaataaagtcatttatggaatcaaatgtaccgctatgtgatgtcatgctttgactctggacatttgtttctaggaatatcaattctcattgctacccctggacgccttcttgaccatttgcagcatactgcatcatttgtttattcaaatttgcgctggatagtttttgatgaagctgacagcattcttgaacttggttttgggaaagcagttgaggatattctagaaaacttgggttcaaggaatggtgctcctgatcaaaataaaaacaaggagagcatatccgaaggcaaaaccttctcttatctgcaactcttaatgagaaggtgaatcggttagctaaaattgtttgaag

SEQ ID NO: 54343 - DNA, 266 bp, Setaria italica
  Peptide Sequence Number=SeqID_120317
cttcctttgggatgtcgaaggaaggaaccaaatgcaatggcttcaagctgttatactcgacccgtcttccctaaaaagagcccagctgtgcctctcgatgagattagcagcttcacaagagcgtatctttgcacaaagctgcaaggtcttagggtcaaatcccatcatgtaacccttcaagtcatgcgggttgacaactgaacttggtttcgaagaagatgacacctccccagagcctccaacagcttcttcctgctcttgtttat

SEQ ID NO: 54344 - DNA, 231 bp, Setaria italica
  Peptide Sequence Number=SeqID_120318
aaatgatcgggccatacccagcaagccaacctgtagcttgaggacggtggtcttcacaaaatgagaacgacacattgtcagaacgagagctccttgaagattacccgcttttgaggcctctatagaaagaaaaggttgcggattggccctgtggagaaagaacaaattgtagattcagttttggcggttttctcattaactatagcacagatcttgtatttgtaaaaaaat

SEQ ID NO: 54345 - DNA, 455 bp, Setaria italica
  Peptide Sequence Number=SeqID_120319
ttgattcaccagttgatagagaatggtgagaactggagtgtaggccagcgtcagcttgtctgtcttggtagggtaattctgaaacggagtaagatccttgttctggatgaagccactgcttcggtggatactgcaactgacaacttgatccagaaaacgcttaggcagcagtttttggagacgacagtcatcaccattgcgcacagaattacttcagttcttgacagtgacatggtgctccttcttaacaacggttagcgccactagcagaagtaattaccgaatttgaagcgttgagccctctgttgtgatgatgctgtgctattgttttcaggtgtagccattgagcacgacacgccaaccaaattgctggaggacaagtcgtctctgttctcaaagctcgtttcagaatatacaatgaggtccactgcatacatagatgacgagtgaagatt

SEQ ID NO: 54346 - DNA, 298 bp, Setaria italica
  Peptide Sequence Number=SeqID_120320
taaactaaaactaaattaaggaaacaagaataaataaataagaatagggtaccaacaaataacggaaaatggcctgaatgagggttgatttgccgtattgtggaccctactattggacagataataatagatggcgtcgatatttgcaccattggactgcatgatctgagatccagactgagcatcatcccacaagagccaacgatgtttgagggaactgttagaagtaacctcgatcctcttgggggatacactgataatcaaatctgggaggccttggattgttgtcagctagggg

SEQ ID NO: 54347 - DNA, 326 bp, Setaria italica
  Peptide Sequence Number=SeqID_120321
tcatctcttacatttgccttctctttgatatttttgatcaatctgccacctggtaccagcaatccctggatcaatggtaccaggtggcagattgatccagggattgctggtcttgcagtcacatatgggcttaacttgaacatgctccaagcatgggttgtctggagcatgtgcaatttggagaacaagattatatcagtagagagaattctgcaatatctgagcattcctgcagagcccccctctttccatgtcagaagataagttggctcataactggccatctcgaggagaaattgagctccatgatttacatgtgaaatacg

SEQ ID NO: 54348 - DNA, 220 bp, Setaria italica
  Peptide Sequence Number=SeqID_120322
agtcaacaatccgaagaagcccaccataatgtgatggaacacaaattttaaactcaaatttacttactcctggcatgcagtagatgcaggttccatggtttcaagctcattcagttcctcctggagggactggagctcctggtcgaggcggctgatggcggcggagaggcggtgcttgccgacgtagccgacgttcctcatcacccccggcggcggcggc

SEQ ID NO: 54349 - DNA, 435 bp, Setaria italica
  Peptide Sequence Number=SeqID_120323
cttgtgtccaaccaccaagttttgattgcacaggcatccctgtccattgtgtacaaatgtactaccttttaagatctttcattgtatcctagtcacctagttatgtccattccttacctgaaatgaatttagcgtcaagtactgttttggaccttattgtttaatacttgattccaaggtggcatgagtttatttttctcttcttattcaatccatgtgttataatactaatacatgttctagtaaataatgtatttatctatctctagattattttctgataaggatattgatgtggaaacattacagtagtactaggacatagtaactgaaagcgaattagcctgtgtttatcttgtgttttactcgctcttaggctcaagacatgaaggagcaggcccgtctacgcgaggaaatgaactatcagtacaggct

SEQ ID NO: 54350 - DNA, 437 bp, Setaria italica
  Peptide Sequence Number=SeqID_120324
cttgtatatgatgtcaatgtcaccaaatcatttgaaaaagctcaacaactggcgtgaagaattcctacttcaagctagcccatctgatccagagaatttcccatttgttgtacttgggaacaagattgatgtcgacggcggtaatagccgcacagtttccgagaaaaaggctaaagcatggtgtgcttctaaggggaatatcccctatttcgagacgtcagctaaagaaggcttcaatgtggaagctgcttttgagtgtatagcgaggaatgctatcaagaatgagccagaagaagacatgtatcttcctgatacaattgacgttgggggtgctggaaggcaacaacgttcgtcaggctgcgaatgcttagaagtattattggtaaagtcttgtatttccttcggtttgtatttggttttggtttcttattagggtt

SEQ ID NO: 54351 - DNA, 359 bp, Setaria italica
  misc_feature (341)..(341): n is a, c, g, or t
  Peptide Sequence Number=SeqID_120325
tttttttaggaaatggttcaacatagaaaaccaacatcacacacctcttcacagcaaatgtattgcgtgtaaacatgttctctttcttgctacatggttcaactcagggccaaggaaatgcttgctacaaactttgtaacaccatcctcataatcacaggagttgtatgatgaatactacattgacaacaacaactggccgtggctccagggatcaggtgcaggtccggaagatccgaacaacattctgttgttaagatgatatatattcacatgcgagtgagatcatccagtggagaggtcaactatgaagaattcctgtcaaggaaggctttgctttangacttgctcataccaggg

SEQ ID NO: 54352 - DNA, 204 bp, Setaria italica
  Peptide Sequence Number=SeqID_120326
acaattaaggtcctatgtaacatcacctgtttgtgtccaatcccccgaagattggtaccccggcctgtaaatatagtcttcataccatgctgcttagaatgaatgtttcaaggtgttgttttggagctacaaatgataactagttgatattgatacattcattctaagcagcatggtatgaagaccttaattgtcacacctttc

SEQ ID NO: 54353 - DNA, 425 bp, Setaria italica
  Peptide Sequence Number=SeqID_120327
tggtttaaaaactaagtaagtaggtcctaacttctaaattttattgtctactaaattcttgttggaacttgcagtgctcctttgcttcatgagagctgatgcacagtccaattcaacaaatagcgatggcggctcatgataaacatggtaacagtaggagcttcactagattgagcaacaaacagcacggcatgccaaccttcctgttggggccttgggggggcatgttgtctatttgcctcactgaactagaaaaccacagcaattttgtcagcctactcgtcctcctccgacaatacactccagatcatccagaacaaggacaggaataggagaacgatgagactgactatcttgaaaagacgtcgcttcttctcacgaccaagttgattaaatatctccgtcacatctactaaatgttgccg

SEQ ID NO: 54354 - DNA, 486 bp, Setaria italica
  Peptide Sequence Number=SeqID_120328
ctcgaggctgcctgccccggcaccgtctcctgcgccgacatcctcgccctcagcgcccgcgactccaccgtcatgaccggtgggcccgggtggattgtgcctctgggggcgtagggactcacgcggcgccagcgtgcagggctccaacaacgatatcccggcacccaacaacaccctccccaccatcatcaccaagttcaagctccagggcctcgacatcgtcgacctcgtcgcactcctcggtagccacaccatcggcgattcccggtgcacgagcttccggcagcgtctgtacaaccagacgggcaacggcctcccggacttcacactggacgcgtcctacgcagcggcgctgcgcccgcgctgcccccgctcggccggcgaccagaacctcttcttcctcgaccccgtcacgcccttcaagttcgactaacctagttacttactaagtaactattccttcgtccttaccgtcggtccttactt

SEQ ID NO: 54355 - DNA, 248 bp, Setaria italica
  Peptide Sequence Number=SeqID_120329
attaggaaaatccatgacaagatgtggtgagctgatctttaatccactcacaatctccaatagtagaacaccaaagctgtaggtgtcagacttgaccgaaaatataccttccattgcatattcaggggacatgtaaccactgtacaaacgagaccaaacgagtcaacagtacatgaggtctgcataatttgaataagtgcaagaagataaattccctctgaataatttgagaatgcacgagttattac

SEQ ID NO: 54356 - DNA, 440 bp, Setaria italica
  Peptide Sequence Number=SeqID_120330
agacgacgaacgacaagacaaagaaccgacacaacgaccggcccgagatgtggagttctgactccgagctcgccgccgccacgccggcgacgccgcccgtcaccaactggaagatctccagccccggcgacagccccgacgaggtgaaagcgcggctcaagtactgggcgcaggccgtggcgtgcaccgtccgcctctgcagctgaacgccgtctgccggtgacgcgcacggcgagcactacgccgccaggagaaacgatcgccgacgacgaaaaccaaattaaatgaccgatcgatcaaccgagaggccagtatcccgctggacgatgacgggatcagatcgcgagcgcgtcactgctgctgctgtaaagtgatcggagcgcggcgtccccgtcctgctgcatgctgcgacggcgggcgttggcggctgccatgattgc

SEQ ID NO: 54357 - DNA, 388 bp, Setaria italica
  Peptide Sequence Number=SeqID_120331
aaaagtaaagaagaagtaataatagttagaagttagtagaaccttctaatgggttctacagcgttaccggaagtgtgatcgtgtgattactcccacattgaagactattgaggctctcttcagtaaaaaggttttcttgaacagggagggttatagtgagttctacagtggacttgtagattcggtgggatctgagctgaagggatcaaaagatttcacaaagttatgtgcaggcctctcgatccttggatacatttcttcacaatcggatggaacttgcactaaggcattctctcaactcctcacgttcctaggccacagataccccaagatacggaaggctgcagccgaccaggtgtaccttgtgctgctgcaaatgatgatctta

SEQ ID NO: 54358 - DNA, 241 bp, Setaria italica
  Peptide Sequence Number=SeqID_120332
cttgcctctcgatcgtaacaagcaactgttagaaggtggggagcaagttgttccaaaacagccttcatatcataattggtataagcccgaccaaatgcccaacaaacatatgctgctgcatctcttacgtgtgatccaatgctatgtggacctcttcgtacatcatagtgtaaagcctgcagaggtacgtcatgaaatcaattgagacagtaaaagcttatcttactgaaccagcactaaa

SEQ ID NO: 54359 - DNA, 478 bp, Setaria italica
  Peptide Sequence Number=SeqID_120333
ccatcctgatgggcacacacacttgcagttatgcaatgggaggaagatattctctgttagatgctctcctgagagcttcattgttcaggttggagaggcagcagacatcttgtccagagggaaactgaaatctacacttcattcggtgagtagacctttgggttttgcagacatcagccgtgagacttttgtagtcttcctacagccctcatgggacaaaactttaagttattcttgttgctatttagatactgaagagcaatccagtcgtaataatgagacttcgatcaccagtaatggatcaacaggctcttgtgatgaagatgtatgtatgcaagaaattctggaaaaaattccccctctatcatcaaggctaagagaagggatgacatttgcagaattttctcggcaaacaacaaaacagtattatggtggcatccaacagaacaattgaagactaacagtacaatggtgagat

SEQ ID NO: 54360 - DNA, 263 bp, Setaria italica
  Peptide Sequence Number=SeqID_120334
gtcatgtgcctaaggaggctaggcgcaagggcaggcccaagtggcccaacacgtcagccatcttggcgctacagtaattcgcggctactgtagcacagccgctaggagtcagtctaggttaggttttaggaagaatctagaaaatagatttgcttgtaattcgagtcaagttagatttgcttgtaagtcaaggcagctcctccccataaatatgaggggaggggtaatggattcaatcaagtaggaaaagggcttaatcccat

SEQ ID NO: 54361 - DNA, 418 bp, Setaria italica
  Peptide Sequence Number=SeqID_120335
aaatgaaagcatgaggcttgttatggtaacgatatttggagccgtcctttggcttttttcattggaatttcatcccttctgtcagcataacaaagcttcacttcccagcagttttgtttcatacattgaggacaaaaactctgggctgactacccaagctatactaaatcatgcttggacttctgccagaaatgcaaggggaaacggtaccgaaccaacttcaaacagtagtttaaagatttatgtcccaaccaaccccaagggtgcagagaggctagcaccaggtattgttgtaccagagtctgacttccatctgcgcaggttgtggggagaagccaaagtagaaggaacctagacccttacaaaaccaaaagtaaccttagttaacctttaactagtacggaaatttagtacgaca

SEQ ID NO: 54362 - DNA, 310 bp, Setaria italica
  Peptide Sequence Number=SeqID_120336
taacttacaaaaacaagtaagtttaaaagttggttcggtaccgtttccccttgcatttctggcagaagtccaagcatgatttagtatagcttgggcttctgccagaaatgcaaggggaaacggtaccgaaccaacttcaaacagtagtttaaagatttatgtcccaaccaaccccaagggtgcagagaggctagcaccaggtattgttgtaccagagtctgacttccatctgcgcaggttgtggggagagccaagtgaggacctgcccttcaaaccaaagtaccttgttacctttactgtcggaattgcg

SEQ ID NO: 54363 - DNA, 253 bp, Setaria italica
  misc_feature (83)..(83): n is a, c, g, or t
  Peptide Sequence Number=SeqID_120337
cgtgcgcgccgcggcaatgtcagttgggatggatggaacggagggaggagcaatccgatcgatcaaggaggcggcggaggggngggagggcggtattacaagatgatgggcgatcacccctccaaactccacgctcgtgtagctctcgatactacaatggtggtggcggtgctgggtgggctgatgacactgggtacccacttgatatatagaggtatagatggtgagtgcgtttagctgctgatgaggaggt

SEQ ID NO: 54364 - DNA, 267 bp, Setaria italica
  Peptide Sequence Number=SeqID_120338
tagaaatactcaaatatgttgcattgggggaaagtttaactttggagctgtttagcctggactgtgtggaggctgctgctggttacaggaatgacttatgttgctcttaaaactttttcttcaggatactcaagagaggagatattgggctgtaactgcagagtcttaaatggtccaggtactagcttggaggtttttgaggaggtgcggaccaggattatatagcttgtatgaccattccctatcattttgcttacttttttctaa

SEQ ID NO: 54365 - DNA, 236 bp, Setaria italica
  Peptide Sequence Number=SeqID_120339
ctgaggatgctctttcacaaggaatggaagcccttcagcagtcattggcagaaaccttggctgggtctctttcgtcttctggatcaacaggaaatgtggcaaactacatgggtcaaatggccatggccatgggaaagcttggaacgcttgagaatttccttcgccagaccctacagcagatgcaaaggatcctgaccaccaggcaggcagctcgagcgcttcttgtgataagtgat

SEQ ID NO: 54366 - DNA, 234 bp, Setaria italica
  Peptide Sequence Number=SeqID_120340
ttaagtactttaggttaacgtctttgtagtaattttccttcgcctagaccctacagcagatgcaaaggatcctgaccaccaggcaggcagctcgagcgcttcttgtgataagtgattactcttcacggctccgtgccctgagctctctctggcttgctcggccgaaggaatagcaagagcatgtgatttgactggagtacttttcacagttcggtgttcgatggggatcttatc

SEQ ID NO: 54367 - DNA, 205 bp, Setaria italica
  misc_feature (205)..(205): n is a, c, g, or t
  Peptide Sequence Number=SeqID_120341
gatgataaaagttctgaagaagttgaagatgtgaaggtgtgcgacatatgtggagatgttggtgaggaggagaagcttgctgtctgtagcagatgcaatgacggtgcagagcatacgtaatgtttttttgctgcattgctttcctttctatacaactgttcagttgcatttgggaatcctgtatggtaatggttcaagttgcccn

SEQ ID NO: 54368 - DNA, 489 bp, Setaria italica
  misc_feature (1)..(99): n is a, c, g, or t
  Peptide Sequence Number=SeqID_120342
nnnnnnnnnnnnnnnnnnnnnnnnnnnnnnnnnnnnnnnnnnnnnnnnnnnnnnnnnnnnnnnnnnnnnnnnnnnnnnnnnnnnnnnnnnnnnnnnnnnaagtttttctttttctttccgtttcttcttctccatttcctccctcagtttcatttccctttcttgttccaacctttcttgcctatctctctcagcctgctccctctgaacctgcatatctcgttcattcttctcagccagagcttttgccgctcgctcacgggtcctctggtgacgttctagtctagcacgccttctttcttcactctccccctcaacatcttgaaatacatcagatgatgcaggggctccaaataagtcagacaaatcatacccaaaaattgaggctgacggcgcttttcgcacagatgccgaggttgatgctgctctctgtgatccattagctagttcctctaccttgagctccagaaccaacatagaactccactg

SEQ ID NO: 54369 - DNA, 454 bp, Setaria italica
  Peptide Sequence Number=SeqID_120343
cgatccgaatcaagcatctgccagtgtagcaatcagtgtgatagtagtcttccttgcaggaacgtcactagcaattttattgctacactggcagatgcttgattcggatgaccagcagtagagataagccactaaaacagttaattcaagcgaggcaacaatacaagcaaaacacttcatgatgtaaagactttgcattacatatagcttactatcccacaaggaacactgaatactggagaatagctaaactctgcatataatcagtgcaagtacatgtaccatctacagcaacagtaattaagaagcaataaacaagttgcagtccaattaagaaatacgagaatctcatgcagtatgtaaacctacatggcagtatcaccataaagagagcagcatcaggctagtagcagcaactcacgtgctagatcttgcctctaatctccatttttcc

SEQ ID NO: 54370 - DNA, 294 bp, Setaria italica
  Peptide Sequence Number=SeqID_120344
gtatgaagatggcagtcgtaaaggttttttgcgtatgttggaatttgtttctgccgaaagctgccaagaaggcttgtgaagagatgagtggacaagagatgcagggtcgtgctgtaagacttgactttgctcaggaaagaaatgcatacactcctcgcagtgggtaagatgaattttatatttcttctcaaaaagcattatgttatgtggtgttttgcaaccatgtgatcattctggtaaactggaacagcaacgacactggatctttccagaagccagttaggggtgccagca

SEQ ID NO: 54371 - DNA, 270 bp, Setaria italica
  Peptide Sequence Number=SeqID_120345
tgccaagcctaaggctcctgacaagtaggactagaccaaaaaaggaaagaattaccaagtagaaaagtgagtcagagagtgattctgaggatgaggataaaagtaaaactgcaaaagtagctcagcctgccaagagagctgcttctaagatgagtgatgactcagacagtgatgattcagatagtgatgatagcgatgaagagcctccacaaaagaagcagaaggacactgcaccttctgcagctgcaaaagctactgctgcaaagaaag

SEQ ID NO: 54372 - DNA, 221 bp, Setaria italica
  Peptide Sequence Number=SeqID_120346
gcgatctggagaagaggaagaagaggaagaagaggaagaagaagaaggaggaggaggaggaggaggaggaggaggaggaggaggaggaggttaaggtgcaaacaaagaaggcccttcctgccaagactgtcaaacaagagtctagcgatgatggcagcagtgatgagacctcgtgaatctgatgaggaacctgcaagagctgctgctaaaccatcggccac

SEQ ID NO: 54373 - DNA, 338 bp, Setaria italica
  misc_feature (306)..(306): n is a, c, g, or t
  Peptide Sequence Number=SeqID_120347
tgcggtaaacaagcatctccattagattgatctgcccctatacgagtcatttattggagttagtgggatcaattccagatttttcaaggtagtcggcatggtgaaggctgcagtggacaccaagcgcacacttatgagcaagaaggataatatccgcaatgcatgtgtcattgctcccagtgaccatgacaaggctattcttatggattcccttatggcagctgctgggactgcaaatgaagctccaagtgatttccgcttgactcgtgcaggtgcccttgcacaagaagtcctgaacagaaaacntttagaaaataacaagaagaaactaaacaata

SEQ ID NO: 54374 - DNA, 296 bp, Setaria italica
  Peptide Sequence Number=SeqID_120348
attactcaccagaagaaccaacaaatgaaaaggacaatgccgttgcactgaaataaaaacagtctctttaagatattccctccacattgatttgtgtgaagatgactgtaacatatccagcaaaataaacttcattttgtatcttgcgcacaaactggtgatcgaagaagagcataaggttcttgttttttcacaatcacctcatatgctgaaaatattggagcaagcgctttgtagatccatccattcgaacgatcttctccttgtcaataacacttccaagcgcttgctccaat

SEQ ID NO: 54375 - DNA, 237 bp, Setaria italica
  Peptide Sequence Number=SeqID_120349
aattaggaagacaaagcgcttggaagtgttattgacaaggagaagatcgttcgaatggatggatctacaaagcgcttgctccaatattttcagcatatgaggtgattgtgaaaaaacaagaaccttatgctcttcttcgatcaccagtttgtgcgcaagatacaaaatgaagtttattttgctggatatgttacagtcatcttcacacaaatcaatgtggagggaatatcttaaaag

SEQ ID NO: 54376 - DNA, 148 bp, Setaria italica
  Peptide Sequence Number=SeqID_120350
caagcatctccattagattgatctgcccctatacgagtcatttattggagttagtgggatcaattccagattcttcaatggcaacatccagacttagttggcagcagcagcactcttcttgggggtagcctcagtcccttctctgaag

SEQ ID NO: 54377 - DNA, 314 bp, Setaria italica
  Peptide Sequence Number=SeqID_120351
tgatctgcccctatacgagtcatttattggagttagtgggatcaattccagatttttcaaggtagtcggcatggtgaaggctgcagtggacaccaagcgcacacttatgagcaagaaggataatatccgcaatgcatgtgtcattgctcccagtgaccatgacaaggctattcttatggattcccttatggcagctgctgggactgcaaatgaagctccaagtgatttccgcttgactcgtgcaggttcacagatgcaaaaaacccagaaacacttgaagctaagttttacggaaggaggcctgctctgtacaa

SEQ ID NO: 54378 - DNA, 292 bp, Setaria italica
  misc_feature (54)..(54): n is a, c, g, or t
  Peptide Sequence Number=SeqID_120352
tgccaattaccgggggaagcacagggatgcggagcctcatttaaaaagcaaatntgttcaactttcatctagattggcgaaacttacaaatcctttcattctacggaggactaaagaattgttgaaggctgaaggataactaacttcaaataagtatgagtacaccatatggctccagctaagtccttgccaggtcaactactacagtactcttgtcacaagcgattttgtttgaggattactaagggtaattgtctacttctacttgtcgtacctaaaatttgtctacggt

SEQ ID NO: 54379 - DNA, 202 bp, Setaria italica
  Peptide Sequence Number=SeqID_120353
ggtgaaagtgcgtgatgagcaggaacatgacatgccccttctacaagcaatttccattgtgtttgagaggttccccgagttaaagtaattttcttgtgccacactcattattgttgttaaaattgaatagatcacgaaatctgctttggatagtacttgactgacatggttgccacttctgtaggctagaagggctagaaga

SEQ ID NO: 54380 - DNA, 215 bp, Setaria italica
  Peptide Sequence Number=SeqID_120354
tttttaccttttaagtttaattttagtttacttttaactttagttaaacctttaacgtactaagttactttggtgtcacgctggggctctgacccgaactctctggggtcctattcgtgcgacctggtcgggaagccggccgacgtctgcgtgaggttctccgctcccgtggagaacctgtacttcgccggtgaggcggccagtgccgaccactc

SEQ ID NO: 54381 - DNA, 337 bp, Setaria italica
  Peptide Sequence Number=SeqID_120355
aagtgcatatgcaccaaacacagcactggcacctgagaacaacagcagtggtggcaccaagcggctctcactatgcggtttcccagatcacccgccaaatcgaaagcgcccatttctcagaatctgacgagaaatctagatgagttgttgccttgttggtagtcagtgtgttccattggtgccatgttcatggtatatatgagtagtagagattactgctgctgttgccttgttgcagtacagtattagtattgctgtgttccagacactgataagtaggatcatatagttttgcttctcatgccacgttaaaattaagttgtgttggtaaaatcgc

SEQ ID NO: 54382 - DNA, 252 bp, Setaria italica
  misc_feature (214)..(214): n is a, c, g, or t
  misc_feature (246)..(246): n is a, c, g, or t
  Peptide Sequence Number=SeqID_120356
ctttctagtttacttccatatattactgatgattacataatacataattctctatttatgttgcatgtaaaggaaggtatacttggttgggcgacggggtcccgtacaagcagcatgcacagcaaaggagttgcgtgaaattttaggtttgaaaaatgttcgtatttgcatcaacgaagctgttcttgcaacttcgcctgcagatgaggagganatgaggaatagtagaatccaaagagggtttangagttg

SEQ ID NO: 54383 - DNA, 270 bp, Setaria italica
  Peptide Sequence Number=SeqID_120357
accagtcgatgcgccggttcgacgtgacgtcgcagagcggcttccactcccgcaccgccggggtctccgaatcttgcaaccattaaaaattagttaagcacgtttgcatgtcagctaatcatggaatgaccaactggtcaagaaactccaaaagaggcaatttttcccaaagaaaaaagttagctttagcttcatggagaacacagttcatggtagaccacccttatggaattatgatcgggcgagagccgagaggcctagaaataggaa

SEQ ID NO: 54384 - DNA, 484 bp, Setaria italica
  misc_feature (13)..(13): n is a, c, g, or t
  Peptide Sequence Number=SeqID_120358
tggggtcctagtntagtaaatttattctattctagtctagtcttagttagttgttattcaattatccgcgatgatttcgagaaatttccttgcgtgagaattcaagccattcgagtctttcttttggtacgagcgcattgcatcaaggtacacttcatttgctagttttgataggcactgcctagttaggtcgacaaggtcgtacctatatgtgatactttttgaaaaatcatttcctgcattgaggaatagttcaagggctttgatggcctcctttgtggaataccatagatgtggatgtggtaggcttccagagacctcacttaagaaaaacctcctatggttactcgaaattgacataccccttcgtttagaaagctgagtgctgaatgaacttggacttatgtccggaaattcaactatgtagtccttattatgatccgcaattccatcagtgcaattgtatattgtatgatacaaatat

SEQ ID NO: 54385 - DNA, 373 bp, Setaria italica
  Peptide Sequence Number=SeqID_120359
atcaaggtacacttcatttgctagttttgataggcactgcctagttaggtcgacaaggtcgtacctatatgtgatactttttgaaaaatcatttcctgcattgaggaatagttcaagggctttgatggcctcctttgtggaataccatagatgtggatgtggtaggcttccagagacctcacttaagaaaaacctcctatggttactcgaaattgacataccccttcgtttagaaagctgagtgctgaatgaacttggacttatgtccggaaattcaactatgtagtcctttatttattgattccgtctaatttcctattctagttgtctaatttgttattatttgttattgtattactaaattattcttcct

SEQ ID NO: 54386 - DNA, 336 bp, Setaria italica
  Peptide Sequence Number=SeqID_120360
tgtatttcttgtcttcttatttcccttcctattgtctactattgtcctaactacctaattcatttgtcgaattgtaactcgtacgggcatcaatagggccagatgcaattgaatcaagtatgccatacatttcaatattcccaccaaagttgtgtagcaagcaccagatgtatggtacgccgtagaattgagaagacattttccaaatgggcttgacatcagcaaataaatcaaggactatcatcttaccaattggaacagagtgaagtagtgctttcatttgaggttccttccagaacgcagcatctgaatagaataaccaaccctgcattaacc

SEQ ID NO: 54387 - DNA, 262 bp, Setaria italica
  Peptide Sequence Number=SeqID_120361
taagaaatttaccggaacaataaagtccaagttcaactatgtagtccttattatgatccgcaattccatcagtgcaattgtatattgtatgatacaaatatctccaagctttctctatttcagcagtgcaattgtatattgtatgatacaaatatctccaagctttctctatttcagcatttgcttgaccatatcgcctatttgagtaggttcttaaccaatcctcaacttcaaccttcttattacgaaatgccatttcaga

SEQ ID NO: 54388 - DNA, 269 bp, Setaria italica
  Peptide Sequence Number=SeqID_120362
cgttgttcatgcaagaacgttccaatcactgaagacacctctgttgaccaagatgattctgtattgtctggtccagctggtcgaagctttgtttctcaatcaaataaacctgacctgggatcttatgatgctccagtagataatttccatttagtagaagatatctcaaaagaaactcaagaatagaccaataggtacctagaaaaattacttaccaactagacttagtaagacctagaaaaggggaaattactaggtaaacttactaa

SEQ ID NO: 54389 - DNA, 334 bp, Setaria italica
  misc_feature (11)..(11): n is a, c, g, or t
  misc_feature (19)..(19): n is a, c, g, or t
  Peptide Sequence Number=SeqID_120363
caatcagatcngaacactnaaagggtcagcctgtcccaccagttcactagctgtagcaagaaagctaccatagagcatgttcgagaaaaaaaaggactaccatagagcaaagtgaagaagaaacaggagagttaaacaagataacagtagaggatatgcaacatgatatcaatacaagagaagtggagcatcttgattgtctgagctcttctcagaaagtgaactctgacacagaagatgtcagctccagccaatcttccttagagttgccgggtccagttcctcaagtttcttttgagtagcaaccggcaactctaaggaagtattggtcttg

SEQ ID NO: 54390 - DNA, 249 bp, Setaria italica
  Peptide Sequence Number=SeqID_120364
ttccgacgagccgctcttgaagtccaacatgttctctctcggtggcgccaagtttttcggagcagtcaaccgaagcatcaacctgggtaataggaattaggaatcctcccagtgacttgtgttcgtcactggtcctcggccatggagctaactgagccctgctaattttagtgatctctctggatactgcaggtggacagagtgctctagctctgcgtttgctcctcgcttgttttctcttcaaagatt

SEQ ID NO: 54391 - DNA, 198 bp, Setaria italica
  Peptide Sequence Number=SeqID_120365
gcagatgatatttctgctgtcctttaggattgtccgaatggcaaactgctaccggtttatcatgcagatctggcacatttctgatgacgacagacacgaaaaagcaatccatatcaatatgaatgattgttttcttattccctgaatgatcagcattcgacttgatgcttttagacttaaaacttaaaaagtaaaaaa

SEQ ID NO: 54392 - DNA, 212 bp, Setaria italica
  Peptide Sequence Number=SeqID_120366
tagacccttaccgtaccccggcctctgatagagaccatatcggcctgctccggccaccaccgggggctcaaatcctaaaggcaggccagttcaccgagcttctacaatggtcgtggcctatatgtcattgagggaattaccaacgggagcttacattaggcaatctgacattttagtgtccgtatatatcatgtacatataggtggatcaac

SEQ ID NO: 54393 - DNA, 259 bp, Setaria italica
  Peptide Sequence Number=SeqID_120367
cccgtacatacgatgtacatatagtcataggtggctcaacaggatagatggttctgtttcttcgaggctggagcaggacaggcaacagagggcaagcacctcaggaaagggcgctgaagaggtaccacgagttgaaggtcttacagttagagtagtatcttcagctgacagagtactgcaagtccaaccacgttttcatgaattttttaaacaagaaaagtatcctggggaatttccatacaaatcgaaggcaattctt

SEQ ID NO: 54394 - DNA, 348 bp, Setaria italica
  misc_feature (330)..(330): n is a, c, g, or t
  Peptide Sequence Number=SeqID_120368
tttttctttttcttttagttttattttgggtttattttcctttaagttttcttaagttaagtttcgtcttggttgttcggagaacgtgagggagtcgctccacagctggtgcaagagggtcaaggacaggaacaggcacaacccgctcttctcacggaacgggaccgtgacgacgaggtccgtgtgttccctcgacaccacctacgagaccgaccacgagacgaacacggtgggcacgctgtcgaggacggtgtcggcgacgtccctggacgacaatctcaccgtgggcaccgtcgacgacgacgacgagccgtccggcatcgagaaagntgtttgacatgctgctga

SEQ ID NO: 54395 - DNA, 449 bp, Setaria italica
  Peptide Sequence Number=SeqID_120369
aaattagttattgtagtcctttctttcctaatttgtcctactaccgtaattaaaatttcttccagttgcaccctgacgatctccatagtattcatgataaagagccagagcttcatgcatccattcttctggtataccaagttccacaatgtattgcctttgagcgtcatctttactccatgactcacaatactgtgataaaacttccctgattaacttctcatggatgtatggggcgtcatcaagatatggcatgtgtacaatgacatagatagcccaatggcacttcccaagacaaagtaattgataaacaaaactcaaatccagcaagtgaagatcatctaaaactgaaagcaccaatagcttccaaaattgaacgttgatgccatatcatatgatagtccaagggatcgtatgaagatgagaatgcactgaacatagttttagca

SEQ ID NO: 54396 - DNA, 212 bp, Setaria italica
  Peptide Sequence Number=SeqID_120370
ttcaaacacagctgcaaggagactcttaatccgatcttcacagtctagcattatactctccaaagaagcacaggacatacttagaagctatttgcagactgctgcagcgaaaaggtgcaggaggcatatgatcgagacagatgaattcttgtcaagcaataacgacagccttcttacagatccgatggctatatctgctgcatacctcaaaa

SEQ ID NO: 54397 - DNA, 421 bp, Setaria italica
  Peptide Sequence Number=SeqID_120371
tattctattctttaattgtattgttgtcttgtaactaattacttttttagttaggacaactaatagtaagttcacaactttgttgagcagtaccgacattgatgatcctgtaacagcttttggggaggataccaaggctagaatggcaacagaggctgttttcactataacaacggcttatggtgatcatatacgcagtggatggaggaatatagtagattgcattttaaaactgcataagataggccttcttcctgttcgcctcacttgtgatacagctgatgatcagggctcctcagatttgttgcccagcaaggctgcctcctcatccgcagtcgcacctccagttttgccagttagcgctacccaaaaatcttatggactgatgggcaggttcagccaactactgtattacgatgct

SEQ ID NO: 54398 - DNA, 381 bp, Setaria italica
  Peptide Sequence Number=SeqID_120372
gggtgacagcacaactcaaaggtgaagaaaacaaaattggatactccagcgcaaatctaaccaaaagcgctaatcaatagggcattacagattctctcatacaatcaagttagttgagctgcagctgggtctttcaagggaggattacctttcaattttttgttccaaagttatacacaaatgcatggcagtgctgtcagtggacattagggagagtaagctggtatattgtaattttcttagttatatatattattttgttactgacaaggttgcttttgggctttattgttgcaactccaaagttgtatgacatgtatatcgttgcaactgaatagaataactagtagttaagaccttagggggaaataccaatagaca

SEQ ID NO: 54399 - DNA, 290 bp, Setaria italica
  misc_feature (206)..(206): n is a, c, g, or t
  misc_feature (246)..(246): n is a, c, g, or t
  Peptide Sequence Number=SeqID_120373
aagaatagaacggaaggaaagaacttttaattaagaaaacaaatcgccgcataaatggagggaatgatcttccaagggagttcttgtcggagctttattattctatttgccgtaatgaaatccgaaccattcctgagcaaaggagctgggttgttctgaagatgtcttttcagtcgttgggttgatctgatgtggaggtcaaaagngaacatcaatgtatattgcttgtgactccttacccttttntgatcatgacatgttctctgtcatggcaggaccggcaagttgac

SEQ ID NO: 54400 - DNA, 385 bp, Setaria italica
  Peptide Sequence Number=SeqID_120374
ttgttgattcgaaaagaaaaattgcagtataaactcttgaatcattcaacaaagttgcagaaaatgcttgaccagagcaacaggtccaattagagcccaaatttcgttcgaaaaaaataatatagagcccaaataccttctgaaggaacttgttaagagccagaaactcttcgaagctcatggtgccgttccgatcaaagtcatacatcctgcacggaatcccgtccccattaagctcaagccaaatagccaatacccaatcaaacaattaaacagaaaaaaaatacaacaaagcaaaaggcaaagggcgagaggaggagagcgaccttatcatctgctgcacaacagagagagggaagtcaaggttgcccacggcgagcgcgct

SEQ ID NO: 54401 - DNA, 471 bp, Setaria italica
  misc_feature (54)..(54): n is a, c, g, or t
  Peptide Sequence Number=SeqID_120375
caattgttgtactggaataaatatcatacagccttatgtgttcttttacaaagngtgatcagagtgtaggtatttttagagcaaaggtttggctaggcatattgtgtgatttgtattgttttgcacggatagtattggccacaagtactgtgacatttatagagtgggtggatcggctccagcaaatttgaatatgggccgagcacctgctgcggtaaggggcatgaatcggaatcagtcatggcactgtactggctaactgagaggccactgaggcagtagcatgagtggtagtgatctctgttctttccaggcttatccctcaaacctccctctagtacctgagcacaaagcaggatgtattgttgcagggcaatgttgtggaacagtgggccaacttggttgctccgttgtacaaaatcatatccaaactttgcataatccacatcagaagaagattttctgaagtgc

SEQ ID NO: 54402 - DNA, 351 bp, Setaria italica
  Peptide Sequence Number=SeqID_120376
gaccttctccgagtaccctcctctgggtcgctttgctgtccgtgacatgaggcagacggtagctgttggagtcatcaagagtgtggagaagaaggaccctaccggcgccaaggttaccaaggctgcagccaagaagaaatgatgtgtctggtggttgattccgcttctgcttttgttatacctagatgcttcaatatcgctgaagttttgtctatggccattgctgttgtcatgtgtgtcatcattctgtttgtcagttcaacacagttttaatattttggattcggcaaaacttaaaattaacctgaagaactagaatttagtagacccccttagttacggttaagttaa

SEQ ID NO: 54403 - DNA, 232 bp, Setaria italica
  Peptide Sequence Number=SeqID_120377
cagacggtagctgttggagtcatcaagagtgtggagaagaaggaccctaccggcgccaaggttaccaaggctgcagccaagaagaaatgatgtgtctggtggttgattccgcttctgcttttgttatacctagatgcttcaatatcgctgaagttttgtctatggccattgctgttgtcatgtgtgttgaactgacaaacagaatgatgacacacatgacaacagcaatggc

SEQ ID NO: 54404 - DNA, 303 bp, Setaria italica
  Peptide Sequence Number=SeqID_120378
acaagaatagtgcgaagaaataattcgtcaaccttaatggctccaatctggtcaacctcgacacctgcagcttgcaagttgagcctctgggagttgggtgtgcgccctgcaatcaattaaatacccatgggtatagtattaaatgccaaaatactgtgttccatatagtgtaagaaatctgaagtctgagactcggggggaaataagtaaattgccacttttctctctcaaataactagctataaatattttctttgaatattttattaggaactaaataattattgtaagatagtacataca

SEQ ID NO: 54405 - DNA, 334 bp, Setaria italica
  Peptide Sequence Number=SeqID_120379
cggttctcgcaccgcagcctccttcggagctaaggttgcgatttgtgagctcccatttcacccaatcagagctgatggggtgaaatgggagctcacaaatcgcaaccttagctccgaaggaggctgcggtgcgagaaccgcgaacgccgccgctgcccgcgccgatgacgaagagatcgtagtcgtacttgtcgccgtcggcgacgggcgcctccccgtcgacgagcatcttcctcgccatgggttctcaactccgcgaaacaaaaccctgcgattcgactggattggattggatggatcttacgttcttaacagattggcagcagaattcgcg

SEQ ID NO: 54406 - DNA, 238 bp, Setaria italica
  Peptide Sequence Number=SeqID_120380
cctgttgcattgctggagttagattgatccggtttgtaacatcacccacagcccatacactgggagcagatgtgcgagaatattcatcacccacagcccatacactgggagcagatgtgcgagaatattcgtcaaccttaatggctccaatctggtcaacctcgacacctgcagcttgcaagttgagcccgacgtccaaaccaatgtcgcttacaagcttgttcttttggcttggacg

SEQ ID NO: 54407 - DNA, 362 bp, Setaria italica
  Peptide Sequence Number=SeqID_120381
tacgcaaccacgtatcacacaggtcccgccatgtcctcctagccaatcagagctgatgggtgaatggagctcacaaatcgcaaccttagctccgaaggaggctgcggtgcgagaaccgcgaacgccgccgctgcccgcgccgatgacgaagagatcgtagtcgtacttgtcgccgtcggcgacgggcgcctccccgtcgacgagcatcttcctcgccatgggttctcaactccgcgaaacaaaaccgttcttaacagattggcagcagaatcgcgaagacttaactaacttaactaaacgaaaccttaaacgttttaaaccggaaaagaaaacttttaaaaactaaaaacgtaaaactaaaa

SEQ ID NO: 54408 - DNA, 277 bp, Setaria italica
  Peptide Sequence Number=SeqID_120382
taggtcttcgttttaactaaattgtaggttatttgtctaaaagtaattaagtaaaaaaaattgtctaacttgtaggtctagtcttattctttgtactattgtcttttgttctttttagcctccacagggtaaaaattatatatgaacacaagaatgaatgtgtagcttcttttcttttgtaccgatgtaaatttaattaaaaagttgtgagctgatagcatgagcaagggttttggacttttggtggtcactcagtatattcgctcggctgtggaga

SEQ ID NO: 54409 - DNA, 308 bp, Setaria italica
  Peptide Sequence Number=SeqID_120383
taacaaagacaagggaaatatgcctatatgacatttaaagacaggtaatgtagttgaagtccatgagcactagattgaaaagaggggcaagtttgctgtccaaagttgtcataaatggatattgctaaattagttgctataacatgctaaaagcccaatggccacgatttgatgctataatcagattacaatggaaaagcttaatgtggaggataaagcattaccaaggaactgcagagcagaagctggtagattcatcaggacatgatcaatgtgctccccaacggtctttggttggtggcggtcct

SEQ ID NO: 54410 - DNA, 361 bp, Setaria italica
  misc_feature (244)..(244): n is a, c, g, or t
  Peptide Sequence Number=SeqID_120384
caaaacttcaaaagaaggtgaacctgattgccaagatggagatgctagttaaacaatacatggccttgtttggtgcaacatcacgaaccctatggaatatcggctctgctatcttagcattcaatttattctgtgcttcagatagtattgattcctcagattcagttgatcggatgaaacaataacagtgtatccaaggtagcgatcctgtccagtgtttcttttggacaagaccatcaaaacngtcaaggactgcagagcagaagctggtagattcatcaggacatgatcaatgtgctcccaggctttgtggtggcggtcctgattccttttactcttcttgttgtttcttgttttgttg

SEQ ID NO: 54411 - DNA, 240 bp, Setaria italica
  misc_feature (11)..(11): n is a, c, g, or t
  misc_feature (38)..(38): n is a, c, g, or t
  Peptide Sequence Number=SeqID_120385
gttcagatgtncaacatgaccaattgtctcaaacgaanagggtacctccatccagcagggaggatttgcttcagaatatgatctgcactccagtacgaataaccaagggtcaatgcataaggtacaacatcaacactgcttcagaatatgatctgcactccagtacgaataaccaagggtcaatgcataaggtacaacatcaacactgcatagttgcttcaatgaatcatgcatctgcta

SEQ ID NO: 54412 - DNA, 462 bp, Setaria italica
  Peptide Sequence Number=SeqID_120386
ctttgctagcttatgacattttctgaatatctatttatatctccaacaagaaacatgctatctcagggtgatagcctggcacaggaagagtgagaatcaataaatcgcaataagaatgatccaatattgcacacatagctatgaaaaaattctgggtgcatcttagcatgatatatcgcaccttgctaggcttgattttaatatttatatttattgcatataaacattttaaaagaaaatgctagaactgatggattaggtgagacataccatcataaatgttatactatgttagtgtacaatagtattttaggtccatgaatagcaaacttatgatacatatcttaaccatttgcaagaaagagggattaagaagttactaagaataagaaatttccagcaagaaactttgttttggtagtttgcactcatgggtaaaccttagtattcgattactttgtg

SEQ ID NO: 54413 - DNA, 437 bp, Setaria italica
  Peptide Sequence Number=SeqID_120387
ccaaggacgtatgcagcaagttagaaggtcatcaatgccattggcgttcatgacaaacttctctgcttctgcctttgtttgtgcatatgcatcaggaaactgctaacaataagaaacatttggttagaaaacaagttcactatactttcaaatttgtgtagctggataaatattcaaaagaaaataatatgagcaacaagcatgtcaaaagcctctccctcagtgggtctctttctcatactgtgaaccattgctagaggaatgaaagagatgcagtggatgtaatgtaaaacagcaagtgccagaccaattgagcagtcaatatctaaatttctaatatgcatattttttcattagtatcatcgatcatgcaaccttatctgggtatggcaatgattcatctacgttgaaaagtccatgaactccgtcaaacacaa

SEQ ID NO: 54414 - DNA, 345 bp, Setaria italica
  Peptide Sequence Number=SeqID_120388
ggatatatgattcaactgttgcctttagaccatccatgattgtcacggtaggtttgtatcccagttcttcaatagctttgttacaactaaatgtcctattgagtgtcgtatatttaatccttgccggtgtaagaatatgaggttggcacattccatagtggtagaaaaccttgtacccccactctaccaaatagcttatgggcttgatgataagcaaaggtattcttatcttgaatagttttccctccacttcgttgtgcacccttcatagtagaaagagtcctatcagcacatatgtgaccatggaccacattttcaacatacacaaaattctattctattagt

SEQ ID NO: 54415 - DNA, 412 bp, Setaria italica
  misc_feature (380)..(380): n is a, c, g, or t
  Peptide Sequence Number=SeqID_120389
atcaatacaataagttacttacccgtacgaccaaataaataaaacaaggaaccaaaaatggcgccaggacgtatgcagcaagttagaaggtcatcaatgccattggcgttcatgacaaacttctctgcttctgcctttgtttgtgcatatgcatcaggaaacttatctgggtatggcaatgattcatctacgttgaaaagtccatgaactccgtcaaacacaacagcactagaactggtgtgtataagccttttcaccttacagatcttacatgcatcaattacgctctttgtaccctccacattgaccttgtaatgaagttgcaagttgttcttgccgggatctgcagcagctgtgtggaatacaacatctaccccttnaaaagcttctataagctggtccaggttgcaga

SEQ ID NO: 54416 - DNA, 467 bp, Setaria italica
  Peptide Sequence Number=SeqID_120390
ttacagtgagctgtgaagtgggaattttgaggatgtggattgaggaagcattaagtaatgtacattagaagttagatgggtctaccaggtactggaatccaacccagctaattttcttatcgctaaaatggactgaaaagatatcttgtgattctagttaaatatacttcttttcaggtatccaccttgacctaatgaatcattacataaagtctttactcattgcatcatcctaaatcaagttctgtttttattaatggttatctgagtctgtcactaatagtgcgattaccttcttcaaggttgtgatgcttggtttggatgcagctggtaaaacaacaatattgtacaggctgcacatgggagaggttctttcaacagtccctacagtgggttttaatgtggagaaagttcagtataagaatgtggtattcactgtgtgggatgttgggggccaagaaaaactc

SEQ ID NO: 54417 - DNA, 200 bp, Setaria italica
  Peptide Sequence Number=SeqID_120391
tgtgaatgcacgactaatatatgctacaaatatttcatgcaactgccttgtaatgaaatccaatcaagataccttcagctgacaacttaagagctgccgatagaccattctctgatgcaccaacagtagcggataggatagcctcagctgactccaagcgcagctcagtcaaactttttattgcagaatctaaatcatct

SEQ ID NO: 54418 - DNA, 233 bp, Setaria italica
  Peptide Sequence Number=SeqID_120392
aatttgtaggtgatgaactggtgctttttttcttgcttagcaagctttgaatctgatcaatgtcctgaatctcaaggccacatgtctgccgcacagctggtcacctcactagacttccggttatccagactctctaggcttgcagtgctttgtactggtgagttctgaacttgtccatctccgctagtcccagggcaaccacttcggcaaatcatgctcttgagagcgagtca

SEQ ID NO: 54419 - DNA, 230 bp, Setaria italica
  Peptide Sequence Number=SeqID_120393
aaggcaacacatcaatggtcaccctaaattcgcatcatcgtatgattaattggaagacctcactgggcaaagtggttgtggtacctgtgactcaagttcagataattgtgcctgctttctccgcctggatcgtcgagcagactccctgttggacaccatccttcttattcgctttgtttccatagatttggtgcctcgctcacatgaacctccctctacctcatacaacg

SEQ ID NO: 54420 - DNA, 181 bp, Setaria italica
  Peptide Sequence Number=SeqID_120394
tgcagctggaggcgttcatccgggaaagcggcgagggcgccgttttcccggatgaacgcctccagctgcagctccgacgggcacttcttcatctccgtccgccagtggtggactgggtgccgaccgccctcctgtctcctgctctgccttcccggttccggcggaggtggtggcgcacgtc

SEQ ID NO: 54421 - DNA, 353 bp, Setaria italica
  misc_feature (86)..(86): n is a, c, g, or t
  Peptide Sequence Number=SeqID_120395
gaatggggtgaccatgtgacgttacaggctgctgctgacaagtcatcctaatgtaatgtaagacaacaatctgggtgcagtatggngtaaaaaatttttgtgatgacgtcgttcaaggatacctgctacatcgagatccagcctaaggttcagaagtccaacaaagtggtactgctgagcttctgggcggaggtgcactacaactccatatatcccccagaatggtgagtagctgtggtatcggcatgcagggtcatcgtcgccaacatgcaccaaggttgcagacgacgaagaagaggagatggtggccgttctcgcagcaccaccaccattgatggcggatggcagaggga

SEQ ID NO: 54422 - DNA, 366 bp, Setaria italica
  Peptide Sequence Number=SeqID_120396
tccattttaccacataaactaacagaaacggtgaatggggtgaccatgtgacgttacaggctgctgctgacaaggttagcccttatacaatccatattccagttgtcattcctgtcatctcttgttgcgtataggatctgacaagaatgctattcttttagtcatcctaatgtaatgtaagacaacaatctgggtgcagtatggagtaaaaatttttgtgatgacgtcgttcaaggatacctgctacatcgagatccagcctaaggttcagaagtccaacaaagtggtactgctgagcttctgggcggaggtgcactacaactccatatatccccagaatggtgagtagctgtggtatcggcatgc

SEQ ID NO: 54423 - DNA, 429 bp, Setaria italica
  Peptide Sequence Number=SeqID_120397
ggtagactggcagtgaaatttctcagcaagatatggtattaaaccaatatatactaattaattggcgattcccattataaccttcatgcatcacattcacaattctcttatcccatttggaaatataccatccttatatcaattgattctaattgcacacccccaattctgcagttccgagcactatcagatcagctttaccaaactccggatcaccatgagtttgtgagagagcagataattaaccaggtattaaatcgtatcgatttttgcttcacaatgcctagcgcacattcttttatctcttctctgataaaccatcctttccagcttaaaactaaccgtgacgcctatgacggatatgttcccatggcatatgatgattacttggagaaagttgcacggttagttgcacatcgtgccaaacat

SEQ ID NO: 54424 - DNA, 258 bp, Setaria italica
  Peptide Sequence Number=SeqID_120398
ccgtagcggtgacggaaattttgagatggaggaggaagtagggaagaggttttatcccatggtcccagttcctgtgagtctactgatcctttgaagtcagcatgtccctaaaattaatggagaaattccatcagtcgatgaagccactatggaccatgaaaggctgacagaaaggttgaagttgtatgagctgattgaacacaaagtgaaaggagatggcaactgtcagttccgagcactactgagaacaacgacaaa

SEQ ID NO: 54425 - DNA, 155 bp, Setaria italica
  Peptide Sequence Number=SeqID_120399
ggggttcttcggatggataggatgagaggctgaggaaggagacgatggatagtcggagtggagggccggtgaatggcaactaaaactcttgtattattgtttgtatccatctacaaattttgccggaatgaggctagaaaaaaaaaaaaaaaaaa

SEQ ID NO: 54426 - DNA, 157 bp, Setaria italica
  Peptide Sequence Number=SeqID_120400
ccaatatttgtttttccgtatcctcgaccggttgggatatcagacatctgaatttaccccctcactgtggtggttgcagtggtactgctgagcttctgggcggaggtgcactacaactccatatatccccagaatgatgcaccaaggttgcagacga

SEQ ID NO: 54427 - DNA, 215 bp, Setaria italica
  Peptide Sequence Number=SeqID_120401
ttttctgaatgccagcattgttagtcatccgagaaaagatggcctcagcctcctggaacagcccacccttagcatatgcatttgcaagagcattgtaggtctcaatagttggctgtgcccagcattattgcctattgcatgatgttgtcactatatgctaggaacgacaggtggactgatgcatatgatctgctggaagaaatgaaaacaatcgt

SEQ ID NO: 54428 - DNA, 371 bp, Setaria italica
  Peptide Sequence Number=SeqID_120402
tagtacttagtactaagttaggttttaggtaccctaacggtactaagtctaagtagtccgttttggtttctattggttctatttcgttgttgtgttcttgagcggatcaacggttggagtctgctgcataggcgtaggtctgtaggtgttcactcctccagcctgtcctggcgatggtcgtgcacccatgaggtgtggcgcaggcagaccaaccacccgactgggctgatggctcgatgtattgcgcatgtcccttgttgactgtagatgcgatgatgcagcaacactgggagttcttggtaacggcccacaacccgttattcattggagcacagtccggattcgtcacttgatgtccttggtaagttgaa

SEQ ID NO: 54429 - DNA, 222 bp, Setaria italica
  misc_feature (189)..(189): n is a, c, g, or t
  Peptide Sequence Number=SeqID_120403
taggtccttcgacatgcgaacaaagatgtcaactcatccctcagtcgggagaaaatgcagttggaatctgaaacctcagagctccaggaaaaaaaacccactgctacagtgccacttcgcttatccggagaaaatcacgatctgagcttcgtgatttccagaagcgctgggaccgggccgcaagggaanacagaacatgggtcgatccgtttgctcgctctc

SEQ ID NO: 54430 - DNA, 194 bp, Setaria italica
  Peptide Sequence Number=SeqID_120404
ttaaaattgtactacctactaagtaatttaaaattgtattcgttagttactagtattgtcataattttgtttcaactttgcagatccggagaaaatcacgatctgagcttcgtgatttccagaagcgctgggaccgggccgcaagggaagacagaacatgggtcgatccgtttgctcgctctcgaagaaaacgg

SEQ ID NO: 54431 - DNA, 162 bp, Setaria italica
  Peptide Sequence Number=SeqID_120405
tacagtgccacttcgcttgtaaaatctgcatttcccttgagttaaaaatgacaccacaagaattaaaatgatcgtagtacagattgtcataattttgtttcaactttgcagatccggagaaaatcacgatctgagcttcgtgatttccagagcgcgtgggga

SEQ ID NO: 54432 - DNA, 260 bp, Setaria italica
  Peptide Sequence Number=SeqID_120406
attcaaatgtattaagaccatgtaatgatacttctcttgatctataccaccaagtagtaacacttataattactattaaactgaataaaagagaattttgtggttcctgaactcctctctgtttgcctgtttatatgagtttttgagctggctttaataattgctctcttttttatgattagagctgggagaaaactgttgactgttacagccctgggcaaggattgatgccagccagcttcaagattaggaccgtacca

SEQ ID NO: 54433 - DNA, 240 bp, Setaria italica
  Peptide Sequence Number=SeqID_120407
tttttttaagattaaagttctctttcttaaacatcgcatcagttgttgacatctagccattccgtgcatgtgcagcccatggtcatatcataatggtggatcttggccaaccctgttgtggcagttcacattggcgtgcataaaaatgggcagaccagaattggctcggaaggccattgctgtggctgaggacagactctcagacgacaagtggccggagtactatgatacccggtctgg

SEQ ID NO: 54434 - DNA, 251 bp, Setaria italica
  Peptide Sequence Number=SeqID_120408
tttccgttttgtgggtctctatttattttttaagattaaagttctctttcttaaacatcgcatcagttgttgacatctagccattccgtgcatgtgcagcccatggtcatatcataatggtggatcttggccaaccctgttgtggcaggtacgtagataccactgcaattgttttcaaatttcttgctccttttcatgcttgtagatcattgatgactaatccttgtttctgtttacagttcacattggcg

SEQ ID NO: 54435 - DNA, 334 bp, Setaria italica
  Peptide Sequence Number=SeqID_120409
ggacagactctcagacgacaagtggccggagtactatgatacccggtctggaaggttcattgggaagcaatcaagatcttatcagacatggactattgctggttttctgacttcaaagatgttgctggagaacccagagctggcttctattctgacctgcgatgaggaccttgagctgcttgaaggctgtgcttgttgcctgtctaagaagagggctaggtgctcacgccgtgtggccaagtcacatgctgggtaaaaccccaaagctcatgctgttccttctgccgtggatgcacgatggatatctaacataacctatactaatgtacatgtg

SEQ ID NO: 54436 - DNA, 239 bp, Setaria italica
  Peptide Sequence Number=SeqID_120410
cagagatactttctgggacgtagtggaagtgccgtgacaagccccaccatccagaagtcaagagaagactgctcttgtttttggaagctttgtattctgtatttttctgtacataaagggtcacgtagctccatcttcttctgactctggatcctcagggaatgtgataatcgacttctattggggtatggaactgtaccctcggattggcaagtactttgatatcaaagtcttcacaa

SEQ ID NO: 54437 - DNA, 154 bp, Setaria italica
  Peptide Sequence Number=SeqID_120411
gatgcttggtatgggttccatccatatatacctctcctggaatgtaccttgtaaaccaccctgtgaatttgggtccccaatatccagattcccaccaaaagaacttagtgatatagatcaacatcagtgcagtattcacaagcatagaatctgc

SEQ ID NO: 54438 - DNA, 309 bp, Setaria italica
  Peptide Sequence Number=SeqID_120412
actttctgcatttttctggactgttcctgctctttttcagtcatttcctgccatacttctacgtgatctttttaacaatattattgtttgaccgagcgaagagggatgatgatcggtgctcatcaaagtacggaaagtattggaagatgtactgcatacaagggaagctaatcgcatcaaagttaaacaagatgtagcatatcagtgtgaagattggaagcatctgatgagctaaagagagttgtccagtatcttggatgctcagtacatgccagggatgaccctgtatggtactttgttgcagtacat

SEQ ID NO: 54439 - DNA, 310 bp, Setaria italica
  Peptide Sequence Number=SeqID_120413
tctaaatttcctagtctaagtaagtaatttgtagtagttgtcttagtcttggggtaccctaaatttctactagggttggttttactaaggttactatttccaggtagtaggttattattatggatggaacccataccaagcatccccagcaaatgtagaaaccagctctatcatgagcaatgtccatggtacaccaatatccagattcccaccaaaagacttagtgatatagatcaacatcagtgcagtattcacaagcatagaatctgcgactctgccattcatttcatactgctttatgcagtaggtt

SEQ ID NO: 54440 - DNA, 166 bp, Setaria italica
  Peptide Sequence Number=SeqID_120414
ctcttttagctcatcagatgcttccaatcttcacactgatatgctacatcttgtgtgaagattggaagcatctgatgagctaaagagagttgtccagtatcttggatgctcagtacatgccagggatgaccctgtatggtactttgttgcagtacatcttccaata

SEQ ID NO: 54441 - DNA, 199 bp, Setaria italica
  Peptide Sequence Number=SeqID_120415
atggatttggcattgatcctatgtaataatctctggttaaaaccatgtatatcagcaaagatgcgaccatgttgtacgtagacaacacatgcccaggaagagtatagacccggaaagagactactaaatcatgcatcctgcagggtcatcttcttgggcgcaacagcttcaatagcagtacccagaggccaagcacgcc

SEQ ID NO: 54442 - DNA, 180 bp, Setaria italica
  Peptide Sequence Number=SeqID_120416
agtaacgtccttcttggacgaaagggcagcagcgtcgccgctgggcagtcggccgcagcggaggaggaggagaaggcggcagaggcaaggtggagtaggagaagaagggcagcaaggccggcgaggcgagccattgccgctgcagcctgcaggtggtctactggtctctcacttcactcg

SEQ ID NO: 54443 - DNA, 445 bp, Setaria italica
  Peptide Sequence Number=SeqID_120417
ctgcatgcctaaggattaagaagtggctgctatacaaaaaacttgccaagacatgcccgacatttagcaatagatggtcaaagcaataaaaaagtagagtatttcgatgattttgacaatacaggtttcagggatggttgttacactacatggtgtttgctcctatttttattatatctgtactttaccctttagtttgtctagttcttgttgggtctcatacaaatcttgttgcacaagttttatttttgggtttcttttggtcccaaatccaaagactgaaaagtatagtatagtggcagtctcaaacagtcaggctattatggtagcatagtatgacaagaaaaataaacaggatgttaaaaggtcagacaaacatactgtgacggcagggcagcactctaagcttctctccaaaactgtagtcttctaggcaaatggcaca

SEQ ID NO: 54444 - DNA, 396 bp, Setaria italica
  Peptide Sequence Number=SeqID_120418
gtgtaagagtctaaaggggttggggaggactggggggtacgtagaaacagagtaagcgcgagaaaccgagtgcgacgaaggacgccggcttattggtctgggaggggatgctgccacactcaaccgggatgaagatgactgagaaggtaaccgaacagcagaagaaagtaacggggtggcctctgtagcagcaagttctgatactccactacttgcatcttgcttgcatacaggacagaatgttctccaagaagtcagccacaagtccacacaagctgcatggaacttgtgacggcagggcagcactctaagcttctctccaaaactgttagttcttccttaggtctaaattggtctactactatttgttacgttatttgtttgttcttagtttta

SEQ ID NO: 54445 - DNA, 248 bp, Setaria italica
  Peptide Sequence Number=SeqID_120419
tctcgttttgcgcttttgagaactcacgatgcaaatgaatgccatttcgcagtcaaattcacactgcctattagaggataaatcacacctcttgggctaaccctagtgggtagctatatagcagtcatacatgggcctattgggccataatacacacaatacaccaacactcccccgcagtctgaactaccaacgcagcggagttgcagactggacatgaaaagaaaggcacacacacaacgcccccc

SEQ ID NO: 54446 - DNA, 178 bp, Setaria italica
  misc_feature (29)..(29): n is a, c, g, or t
  Peptide Sequence Number=SeqID_120420
tactataaggtaatagatagattatgggntaaccctagagggtagctatgtagatgtcttacatgggcctattgggccctaatacacatagtacaccaacacaaacaatcattcaagtactgatctcccatcctatttctcaacttgttcttcacatgattcgttattgaaaacactc

SEQ ID NO: 54447 - DNA, 229 bp, Setaria italica
  Peptide Sequence Number=SeqID_120421
tactggtatctcaccagtaagctcattgtgtgacacattgaatgatacaaggactggaatctgagccaatgaagcagggatggtgccggtaagattgttggatgacaggtcaagtgtctgcagcttcgagaggttggcaagggaggctggtatgtcaccgccaatacgattgtcatcaagcttgagaagggcaagcgacgagcagttggaaatctctggtggtatcttg

SEQ ID NO: 54448 - DNA, 205 bp, Setaria italica
  Peptide Sequence Number=SeqID_120422
ttttttttctagacgagcagaagaaagcagagccatcagccatatgctttgcattgaacacagtactaggcaattacaggggagggcagaaaatgaagcaggcgggcgtacacgagatcctcatttcagacttcttccacagatcgaagaattttgtgtacagtcgttgagaggattcttttttttcttttgcagatgaactgat

SEQ ID NO: 54449 - DNA, 242 bp, Setaria italica
  Peptide Sequence Number=SeqID_120423
gaaccggccatggatgaattgttgtgatgacgcatcatggtagtgcaagagactgaagtgagagtgaaggccgtcgaacgcaccagtcgtacacggtggggctcctccgcccgacggccggctccggcccctcggatgccttgggtttccggcgaagcctcctccagctatcagccttgggcgtcgtagctgcacaagacacaccaccaagtcagagggtcaggcgtggtatcaatcagata

SEQ ID NO: 54450 - DNA, 385 bp, Setaria italica
  Peptide Sequence Number=SeqID_120424
taaatttaacttaaacctaaaaggtactaaattagacggtacaaaggaagacaagaacaagacaataaggggattccacagaaaatccctcagccgctcaatgtcatgtgactcccactccaagatgtctgtttcatcttccgcaagagctcacacggtacgacttttgctccttgggttgtgtgcttgagaccatttggttggaaatccaacaatcattccacagtaatctatgtcaatgcatgtagttgatctcagtcagtgctcaactgtgtttggaccacattgcttctgcagcttgtatctttgcattttgcctgaagtgttgattgttaactctgcagaaagttgacctgagcaagctagaactgactgcgctgtggag

SEQ ID NO: 54451 - DNA, 364 bp, Setaria italica
  Peptide Sequence Number=SeqID_120425
taaatgcataactgactgagataataataggtatgacaacatttgatttcaaactaagtggtcatgctaaaaggtgccaatttgcatcagtgacattttgcactcaattccaaacaaagtgtgatttttgtctgctgtcaaattccaggttcttactaatggcatagaggtgaagctgcaaaggaatgctttaagtgtgattgaacctccgacaggcaatgaggatgatgataaattcgattgtgaaaatatgcaatggaatagttcagatatggcatccgatgacgcacaatcaccaaaggcaatgcggtcaaggagcagacagcataggggattccacagaaaatccctcagccgctcaatg

SEQ ID NO: 54452 - DNA, 303 bp, Setaria italica
  misc_feature (2)..(2): n is a, c, g, or t
  Peptide Sequence Number=SeqID_120426
gngttttcaacctcctgcttgattcatgttcaccatctgatttgcgctgagacaacgagtgaatctatctcatcaacaaatatgacagcaggttgacgacaactggccacaccaaaaagtgcccgaactagcttttcaccctcaccaatctgcagcagcaaaaaatttaagatcactatcaacctccaaacatagcctaccccaacttgcttgggaataaaaggcttttttgttgttgtagcaattacctaaaactattgtatttatttatttccccctttttacttatttgttgttggggta

SEQ ID NO: 54453 - DNA, 281 bp, Setaria italica
  Peptide Sequence Number=SeqID_120427
ccttgctgagcttcgtgattcaacacccctttgaagagctcccttagtggtcccattgacgcatctttcactaagtttttcatgtcggatcctgagtaaccttctgttaatttgcagatggcacttgtttcttcttcagagagcatgaaaagtccatccttctccaatagattgcgaattatccaagcccgtgcttcttcctgaaggaagagggatgttatagacgttttgttgtagtacgtccttgtcgtcgtcttgtctttctattccttagtttcctt

SEQ ID NO: 54454 - DNA, 278 bp, Setaria italica
  Peptide Sequence Number=SeqID_120428
tttctttttcttatttcggttctttccggtttaacccggttaggtaagggtagtcttccggtccgcagctgctggacaggttcgggatgcacgcgcaggttggtaccgtcagggacgcagagctgagggtgaaaatcgtggaagagagggctcgcttcgacagagacccgaaggcgttccgtgactcctacaaagaggagcaggagaagctccaggaccagatctcatccgctcggtctaaccttggtgccgtgcagattgaccatgacctccgtgta

SEQ ID NO: 54455 - DNA, 264 bp, Setaria italica
  Peptide Sequence Number=SeqID_120429
tggccggccggggcgcgggccaagccggggcgagtcggcgaccccttcaactccgacccggacgacccggaggtcatgggccccgaggtccgcgagcgggtcctccagggggacaccggaatccccgtcaccaccgccaagatcaccatggtcgacctgcccctcggcgccaccgaggaccgcgtctgcggcaccatcgacatcgagaaggcgctcaccgagggcgtcaaggccttcgagccgggcctgctcgccaaggcaaca

SEQ ID NO: 54456 - DNA, 252 bp, Setaria italica
  Peptide Sequence Number=SeqID_120430
ttcttcctagattggaagaaagtcaacgactagagaaacagttgtccctgaccccgactataggttaccaattgctatacttggtgagctctgatgttagtaagtactaagtagaacatctcttaacatgtacttaaacctcaacagaagaagattggcaagtgtttagcatggttattaagggatttaataacagctattgtccaaatgcagggattgctggtgcttttgcatatgcagacaatcttctag

SEQ ID NO: 54457 - DNA, 217 bp, Setaria italica
  Peptide Sequence Number=SeqID_120431
tttgtacacagcagtgcaaccatcacgattggtgatcgagcgatgacgccgccacagtgtcactgacgtgctgtgcttgcgatgcgcgactcatgcaggtgggcacacgatcggcgtgacgcactgcgacaagttcgtgcggcggctgtacccgttcaagggctcccgaggcggcgccggcggtgcggggccgccgatgaacctctacttcctgcgg

SEQ ID NO: 54458 - DNA, 169 bp, Setaria italica
  Peptide Sequence Number=SeqID_120432
cgcgccgtggtgaagcacagcctccccggcgccggcttcgacctggaccagctcaacaccctcttcgccgccaacggcctcacccagaccgacatgatcgcgctctcagcgagtcgcctgtcacgaacgcggcggcgagcaggccggttggcagctgcggtcgggatcg

SEQ ID NO: 54459 - DNA, 373 bp, Setaria italica
  Peptide Sequence Number=SeqID_120433
aggaagtcaagagcttgagggctaacttaagaacccaaagaaaaggacaacgacaagtaggaagaggactggtggcccacctgcaccatcaggtgtgcctactggtggcagcaggggagcggttgaggctatcgatgaagatatggatatggagcaaccacgtgaaccacgtgagcagcgcagggagagtagagaagagagggaagcgaggatcgagcgtgatagaatccgtgaggagcgcagacgcgagagggagcgggagaggaggctagaagccaaggatgctgcaatgggcaagaagagtaagatcacgagagacagagatcgtgacatcagtgagaagattgctcgtgggtatgggcaagcactggtg

SEQ ID NO: 54460 - DNA, 254 bp, Setaria italica
  Peptide Sequence Number=SeqID_120434
tccagcagggcggcgaaggaatgtgaaagtgataacgcctctccgctgaacgaatcatcggtaatgtgagggtggcggcggcgatgcgtatggcatcgggtacactggtggcaggggccctcgaagtcgttgaagcggaggtcgaggaacttgagcgccgggaggtccagcacgacggcggggaacgcgccgacgaggcggttgttgctgaggtcgagctcgacgaggaggcggaggcggcggagcgcggcggg

SEQ ID NO: 54461 - DNA, 235 bp, Setaria italica
  Peptide Sequence Number=SeqID_120435
gtagacggcgggagcggacggcggcggcggtgagtggtggaggtggcgaaggcggggcgcggatggaagccgcgtaacggggcaggggcgggacgaacggcttgcacttgaacgcggcgcagtcgacgggcgggcgggcgtagaacgcggcgcactgctgcggcgtccgctgcgcggggcggttcggcaggcagttgccccggtcgctgtcccggggcacgacgcgcgcgcacgc

SEQ ID NO: 54462 - DNA, 286 bp, Setaria italica
  Peptide Sequence Number=SeqID_120436
gaactgcgtggagatgaagccccggttggcgacgcgccagccggcctcgcggagcgcgtcctcgatgtcccgggcccgtccaaggccacgcgcgcctacctgcacgccgagcgggacatcgaggacgcgcttgaggaagtcgaagtagagcgtcctgggcgcgaagctgatgagcagccgcttctccgccagcgacgccaggtgcttgatcatggcgcgcgcctcctcccgcgggtagtggatgagcacgtccaggcacaccaccacgtcgtaccgcccctgcagg

SEQ ID NO: 54463 - DNA, 252 bp, Setaria italica
  Peptide Sequence Number=SeqID_120437
cgaaacacgcacgcacgctacgacgacgagccggcgggcacggcctcgaagagcttggcgaagtagaactgcgtggagatgaagccccggttggcgacgcgccagccggcctcgcggagcgcgtcctcgatgtcccgctcggcgtgcaggtaggcgcctgccgctgcgcctcggagaccatggcggccgagatgtctgagcccagcacgtccgcgccctcggcggcgagcgggatggcgagggaccctgtcc

SEQ ID NO: 54464 - DNA, 323 bp, Setaria italica
  Peptide Sequence Number=SeqID_120438
aaccaaagaacaataagggttaaccttaaccccgaaagaacgactagacgacgtagcgctttgcgaggttgtaaggtcctgcattgatccagatccaaagaagagaccacggatggcagaggttgcagctcggatgagagagatcactgcgttggggcctgacggagcgactccgaaggtgtcgccgctgtggtgggcggagcttgagatcatgtcttctgagacctgaagttggcggccagccagatgatattctttaatctgttggttgctgctaatcttgtttcgtggacttgattaggtagagggtggttgagaatttg

SEQ ID NO: 54465 - DNA, 313 bp, Setaria italica
  Peptide Sequence Number=SeqID_120439
acttctctttttcttccttggccgaaagccacaatgcttttccaatccgcctagctgtatcctcatctggacgcacccctaattcctccatgtcagcatatacctccaaaactttatctggatgatggtgaatgtcatacatcaagatcatccgagagaacaacctcttgggcactgagcgcgtatgagtctgtataacagtagtccaaatagactcaagacttacgtactaacccttaccaataccaataaaaaaagtagaaccaagaacaaagaaaagtaagtaagtaacaaataaacgttaagtaaccaa

SEQ ID NO: 54466 - DNA, 268 bp, Setaria italica
  misc_feature (264)..(264): n is a, c, g, or t
  Peptide Sequence Number=SeqID_120440
gtagaaaatgctatatcttattacattcacatcggccgatctgatatatatgtagcggccgaaaataggtagtaagtactcatgcattcacatcgattggatgcattatttcggtatgtatgtatgatgaataaaccgggtggcttatggtcaaaagacatcagctatgtataagccgttttactaccatggctatgtataatttcataatattttcgtcaagagttttaccttttactaacccaaaaaaaaaaaaaaaaaaanaaaa

SEQ ID NO: 54467 - DNA, 185 bp, Setaria italica
  Peptide Sequence Number=SeqID_120441
tgattgtaccacaagttctgcaatctcatattgagttcagttcacgcactcaagcaaaattaaagctggatgcatttgaaatgtatagtcgtcgattatacataacatagtttggcttgagcgcgtgaactgaactcaatatgagattgcgtgatttgattgtaccacaagttctgcagtaatga

SEQ ID NO: 54468 - DNA, 202 bp, Setaria italica
  misc_feature (191)..(191): n is a, c, g, or t
  Peptide Sequence Number=SeqID_120442
ttgggagaactcagcctcccagagcgcctcaaacctaagcaaggacaggttcttgtttatttgttgaatacactcaattcaaatgggaaaccaccaaacaatactcttgtttgtggtgactctggaaatgatgcagaattattcagtgtcccttctgtacatggcatcatggtcagtaatgctcaagaggngctgcttcagt

SEQ ID NO: 54469 - DNA, 257 bp, Setaria italica
  Peptide Sequence Number=SeqID_120443
ctgcactccgcaagaagagccgacctccatggccgcggcccggtgaccgtacacataccatcctctttcacttccatgttccaacatttttttctagttttcttgccgtttgttcacgtgtagcggtgctgtttctctgcagctcggcaggttccatgaccgcggcttcaggtccagcaattctaaggtaccttatcctaaaaaatgagaattttcatgttcatgtaaatttgaggcaaatcagcatgcgtgcttcc

SEQ ID NO: 54470 - DNA, 264 bp, Setaria italica
  Peptide Sequence Number=SeqID_120444
accggagcagctgaaccaccatggcctcgccgtcgctcaagtcccactctcccgtcgccgccgctctgcactccgcaagaagagccgacctccatggccgcggcccggtgaccctcggcaggttccatgaccgcggcttcaggtccagcaattctaagaggtcggcgaaggtgagcgcgttcccgtcgctggacatgaagccgcggtcatggaacctgccgagggtcaccgggccgcgtcttggcggggcggaggcgggcttgg

SEQ ID NO: 54471 - DNA, 425 bp, Setaria italica
  Peptide Sequence Number=SeqID_120445
tcccgtttgttagttcccgttacctttcctttcgttagttctttgttttccgttcgttcgttttcggttcccttgttctagtccgtgtctatgtcgcggtggaccagaagactgggtcaagcagggggttcggcttcgtcaactttgttcacagagaggacgcggagaaggcgatcagcaagctcaatggttatggttatgataaccttatcctccgcgttgagtgggcgacgccaaggcccaactagttttttcgctgctacctacttactagagttgcatattttcgcaaagaagtgctacattggtatgttgtttggaatagcacttgtgtcatgcgcatatgctgtgtcgtaaaaacctgctgttaagtgttaatttggttggacgcggataattacactcgctgctgtttgtttgctgtc

SEQ ID NO: 54472 - DNA, 219 bp, Setaria italica
  Peptide Sequence Number=SeqID_120446
cgcactagtcggacgacgtgctcgttggacacccacttcaggttcccctcggcgccggcgacggccggctgcccgttccaccgcaccgtcacggtgaagctctgcttctcgttcaccctggagggcgaactcggtgtacacggccgtggtggacatgcccaagggcgtgtccgtcgtggtgcgcccccgatgctgcgcttctccagggtgaacgagaag

SEQ ID NO: 54473 - DNA, 255 bp, Setaria italica
  Peptide Sequence Number=SeqID_120447
ggaggcggaggtgcgcggcaaggtggtcctctgcgagagccgctcgatcggcgagcacgtcgagcaggggcagatggtgtcggcgtacggcggcgccggcatgatcctgatgaacaaggcggcggaggggtacaccactttcgccgacgcccacgtgctgcccgcgtcgcacgtgagctacgccgccgggtcaaagatcgcagccttgttcggcccgcgcgacgagaagaaggcgacggacggcgccggggacga

SEQ ID NO: 54474 - DNA, 218 bp, Setaria italica
  Peptide Sequence Number=SeqID_120448
tgtaccccgggtcttcgttgttacgtaccttcggtctacctaacgtagttacatcgcctacctctgcggctggggctcggtgacgacggcgtgaaggagataaccgggcgccgcatcgcctgcgccaagctgaaggccatcaccgaggcggagctcaactacccgtcgcctggtggtgaagcttctgtcccagccgatcaccgtccgccgcaccgtga

SEQ ID NO: 54475 - DNA, 116 bp, Setaria italica
  Peptide Sequence Number=SeqID_120449
gcaaggtggtcctctgcgtagtagtccgtcttcgtattcggcgagcacgtcgagcaggggcagatggtgtcggcgtacggcggcgccggcatgatcctgatgaacaaggcgcgagg

SEQ ID NO: 54476 - DNA, 153 bp, Setaria italica
  Peptide Sequence Number=SeqID_120450
tggatatgcacttcaagaggtacaggcctcacactaggcttgaaattgaatagaccatcatccgtaacgcccaaccaatcagctaaatcacgggcatttgcttaaattagtacttagtttagttaatttaaaaccgttaacttaaaaccgtta

SEQ ID NO: 54477 - DNA, 198 bp, Setaria italica
  Peptide Sequence Number=SeqID_120451
actggatgctttatagtgtttggtgattcaatggatggatgagtagaactcaagtaattctcaccagctatggactggaattaattgcttcacgctgattgttttgcagcctagatttgttgtaaatcgcgtcactgctggagactacgactgcccaagaaaggttctgagcttcttgactgacctgcatgcatcgtt

SEQ ID NO: 54478 - DNA, 367 bp, Setaria italica
  Peptide Sequence Number=SeqID_120452
tattggtacgtcttatttcctactaagtattcccttattaaagtatttgtatttatttgtattcctaggtcttgttgtttgagtttgagaatttacagacatatggaatactagacttgcattgaaggtcaagattttcttgtggatgctatggaaagacaagattcaaacagctttacagttgaagaagagaaatttggatgggcctattcattgcaaactctctggtaaagtagagggggtcaaccacttagtgtttacctttggtggtttttgtgcggtcctgggtaagagatgcactgggctgggatagtacatccacagggctgaggcaatttgacgaaaagtttaagtggtagtattgtgc

SEQ ID NO: 54479 - DNA, 348 bp, Setaria italica
  Peptide Sequence Number=SeqID_120453
attcctatgcaaagatcaaggcaattctacagaggtgccattaattatcaccggtttcatgctgatatgttttttgggtgtcattgataaacaagttcaggagctcaataataggtttgatgaggtaaacacaaaatctacttagatgcatggcatcattcagtccagcaaattccttttctgctttttaatgttgagaacttggttaagcttgctgggttctatccacatgactttgaatttcaagaaataacaaccaagacttacaattttacaagttagacaaccaactaataataacaaataagaaattaagtaacaaagtaaaaaattaagtaaattaagtaa

SEQ ID NO: 54480 - DNA, 169 bp, Setaria italica
  Peptide Sequence Number=SeqID_120454
cttctttaactagcatcatagacaactcaaattggtgcttgttctccctgttgcaactgctggtgatgagtgttttgcaattcttgctgatgagtcaagtgatgcatacctattggaacaattggctctttgtttgcgttttgtcaataaaaaggagaaccagttgagc

SEQ ID NO: 54481 - DNA, 477 bp, Setaria italica
  Peptide Sequence Number=SeqID_120455
tcgggctcggggtcggggtcggcctcgtcggcgcggagcatcccggagctgtacgaggcgaggggcgccctactgcgcgagttcggcctccgggagctccgcgccgccacgcgtgacttcaacccgctgctcatgatcggcgagggcggcttcgggtgcgtctacaggggcgtcctccggctccccggcggcggccccgatggcacgccggtcgccgtcaagaggctcaaccccaacggccgtcagggccacaaggagtggctcgccgaggtccatttcctgggcgtcgtcgagcacaggaacctcgtcaagctcatcggcttctgcgcctcggagacggaccggggcccgcagcggctactggtgtacgagttcatgccgaacaagacgctggacgaccacctgttcaaccgggcgtaccctgcccttccgtgggaggtcaggctgcagatcgcactgggcgccgccgagggttgc

SEQ ID NO: 54482 - DNA, 257 bp, Setaria italica
  Peptide Sequence Number=SeqID_120456
gggagctccgcgccgccacgcgtgacttcaacccgctgctcatgatcggcgagggcggcttcgggtgcgtctacaggggcgtcctccggctccccggcggcggccccgactggcacgccggtcgccgtcaagaggctcaaccccaacggccgtcaggtgtgcctcatccaccggccagctcatgaaccgcttgcacgtacgctcgcgacatggcaacgcacctgtgctcatccggctccgttcttgatgccgtttcg

SEQ ID NO: 54483 - DNA, 263 bp, Setaria italica
  Peptide Sequence Number=SeqID_120457
ctcaaagccccatccccatccgcaccaggtgctccctcttgtttgccccaatcaacctcctctttactcacaggatttctcacgatctttctaaatttcttcgatttttttgggctctatctccttgttgcagcagcgtcgcagcccgcagatcagcacgcgaccctcatgtcccgcttgggggctaaagtagaggcaccaccttctggagagattaaaaattaccgttttagatcagatgtgccatcccccaccttctcata

SEQ ID NO: 54484 - DNA, 364 bp, Setaria italica
  Peptide Sequence Number=SeqID_120458
ctggattcaacaacagaagcagaaaccgcactgtcaattctacaactcatttccaaaccagtttccctataaaccaatttgggctctcggagaaaactacaggtttgaacctgcctttgtggagtctagcaagttgatcaaagatatcggtgatatgatgaacatccaagttatcatcgaagggtcaatgaacagttccaacccatatttcaataagctcctggagcgaaatttgtgggtggtttcattctggacatgggtgtccaattcattgcaggactacgaatggtaatttgagcacgttctatttcaaaagttttgagtaaagtattagattaaggttctgaacttcattaccagaagc

SEQ ID NO: 54485 - DNA, 307 bp, Setaria italica
  misc_feature (20)..(20): n is a, c, g, or t
  misc_feature (70)..(70): n is a, c, g, or t
  Peptide Sequence Number=SeqID_120459
acttcaggatccacagatgngtttccagatgtacaatgatcgtcaaattttccatccgagaactccctgnggttaaaagggtttcaagtcatcatcttcgccttataggattcaagccattggattgcttgaaggattatcataacttgcgaccatcaacatttgtttatcccagtgatgaggagataagtggttcaacatgttaattttccatgcctaggctgctcagcccaacctttgctactaagcaaggaaatccttgctagtggaggccctcttaaagacaagtaaccttttcgtgggcaag

SEQ ID NO: 54486 - DNA, 503 bp, Setaria italica
  misc_feature (241)..(241): n is a, c, g, or t
  Peptide Sequence Number=SeqID_120460
tttccgttcgtcctttctttctttcggtcgtctacgtccttctaacgtcctaacgtattcggaagtcgctttatttcagcatggtcagtgatcttccatctgtctttgaagcattctcggacaggaaacatggcagagataggtctggtgttgatagcagcggcaagtccagacactcgtcaaagagaggaagcgacgggcacacgaagaattctagagcagcagctccgcctgcaaaggngtatgatgacgacgacgacgaagacgacgaggagcacaccgagaccttctgtggcacctgcggcgggctctacaattcgaacgagttctggatacggactagacgacatctgcgagaggtggttccacggcaagtgcgtgcggatcacccccgcccgagcggaccacataaagcactacaagtgcccggactgcagctcgaagaaaatgaggcagtagaaggccctgccggccggccggcgctcgctgacccccccgtctcg

SEQ ID NO: 54487 - DNA, 234 bp, Setaria italica
  misc_feature (207)..(207): n is a, c, g, or t
  Peptide Sequence Number=SeqID_120461
ggttggagaagctgtcattactggctgatacaatgtttaggacgggaaatacaaatataatttgaccaaactgcacaaggacatggaagcgcttattcagcatggtcagtgatcttccatctgtctttgaagcattctcggacaggaaacatggcagagataggtctggtgttgatagcagcggcaagtccagacactcgtcaaagngaggaagcgacgggcacacgaagaatt

SEQ ID NO: 54488 - DNA, 487 bp, Setaria italica
  Peptide Sequence Number=SeqID_120462
cttcacctggaagcattggattggtcttatgttaacatctgctgcatacttttttccatacaagcaacttgccagtatggcaaagccagtttactctgataatggagaattactggatggtggcttcgacttgagcactggtggggtttgcgagtatctgtatgatgtgatctatatcactgtctttgtgcaactgatgtccatcatttctgagaaattttggtggacgtatttagtggtaagacaacacacaccatatgtttgtttaataattgtgtttccattcaatgcttcagtgcccttttggaccccaatttcacagtgtgctttttattctgcaaagatttgatttgtcgtttttatctgaacattagctgtctgattaaaaacattggtcatatgtattattattatctgatatgtctagcctgtatttctatccatgtttcttaaaattgtcaaagcaaagtaatatgacaagtcgagt

SEQ ID NO: 54489 - DNA, 216 bp, Setaria italica
  misc_feature (121)..(121): n is a, c, g, or t
  Peptide Sequence Number=SeqID_120463
gggcaggaccggaggagaacctcgagcagcgcagccatggcgaagcaggggcgaagaagatgaaggacgagaacaagaagcgcttggacttgctcctgcgcatcatcctcatatccaacanatttcttcgctttcctggaaggccggaagggataacactctgcctagaactgaatctgggatgccagtgtgctgtgaagggaacaaaattgcctt

SEQ ID NO: 54490 - DNA, 274 bp, Setaria italica
  Peptide Sequence Number=SeqID_120464
aattacctagttagactagaaactgcacttgcatattctgtttattcctgttgcaaggaggagccctgctgctgtctgaagcttggtcttgttgctgcccctctcttgcgcgtgtgcaaaagcattgcaaagatcaagtacgttggatttttctatggcagctgaggaagatgtcaagcagaggcagatcattgaaaatcgtgcgagaaatataagccacaatgtccggtgcactgagtgtggtagccaatcaattgaagattcacaggcttag

SEQ ID NO: 54491 - DNA, 256 bp, Setaria italica
  Peptide Sequence Number=SeqID_120465
cggttttttgggcttctcctccgtcgaatggctctagagagcgcgttctgaggagcttccgtcccgaagccattttggtggtcaccgtttggcagggcttctacagaagccgctcgcggagccgcggcaaaagccctgccaaagggggccataattcagacacccagctttaaggcactatcccttgctaattggatgctgtatacagatcaagtacgttggattttgctatggcagctgaggaagatgtcaagca

SEQ ID NO: 54492 - DNA, 212 bp, Setaria italica
  Peptide Sequence Number=SeqID_120466
cctatcccctcgtgtgccttgcctttcccctcgttgcgtgtctcagaagatgtcaagcagaggcagatcattgaaaatcgtgcgagaaatataagccacaatgtccggtgcactgaatgtggtagccaatcaattgaagattcacaggctgatgttgctattctgcttagaaagctcattcgtgatgaaataaaagcgggaaagagtgataa

SEQ ID NO: 54493 - DNA, 446 bp, Setaria italica
  Peptide Sequence Number=SeqID_120467
atagggctgatgtccttttcttttgtttattgttttcttgttgcgtggcatactggcatgcatgtaccaagtattttataggggttgtaccttttttccttctataattaaaacatatacagctctcctacgtgttctagagaaaaaagaaatgcattaaagcaagtgtaaaacagatgcagcaatcacctcatatgctttagccagtgtaagagcaacaccaggggcaccgtgacaccagtgcaccaaccgatcagattcattgccttcacttgagggatagttgccactaggaaaccggttcttgatcatgtaccgcagggtgttcttcacatcatcctgctcatccagtttcagttcagtgtgcatgagcacgtgcatgattccagcaagaccatgggcagcaccccagtacttcttcccatgccattcgtacatcagcgggc

SEQ ID NO: 54494 - DNA, 261 bp, Setaria italica
  Peptide Sequence Number=SeqID_120468
actgaagttggtatgaagccataggttttgctgctaaactttcaacaaacgagaacgctcgagttgaagagttaaacttgcaatcagatcagatgaaggaatttgtacaggcagaggggcatgttattccccaaaagaggagtgctaaaattcatgatttttgccttgggattccttttggatacatcttttccagaagcaccataagtcttgtcttgggcgttgcgccagggttcgccactctgctacttggtactctca

SEQ ID NO: 54495 - DNA, 373 bp, Setaria italica
  Peptide Sequence Number=SeqID_120469
attttccacttcaaacatatccagacggatctttattgtcctttctagttctaccaggccaattcacagccggatagtcagctacctctcaaagctcctgtcaaatctccgaggactcacccttctttggggttctggtgatctgggagcagaaatacgagtccgaaatttatctccagtattatttctgaattgttttacagcaccatcacggtcatatggtttgacagaatgatttccatatctataagcatgatgggaacggtgatgatcaaagggaatatgctgatagatatgcaaatcattctgtcaaaccatatgaccgtgatggtgctgtaaaaacaatttatctccagtattatttctgaattgt

SEQ ID NO: 54496 - DNA, 243 bp, Setaria italica
  Peptide Sequence Number=SeqID_120470
cagagacttgttcatacatgcagttcatcacagttgtctgaactattccctctccccttccaggaaatccttgatggagttacggacatcgatatggtggttaatctaaaactgagggaagatgtcttagtagagaagtgccttggcagaaggatttgcagccagtgtggaaagaacttcaatgtggcctgcattgatgttaagggtgaaaatggattaccagcaatctacatggcaccattt

SEQ ID NO: 54497 - DNA, 362 bp, Setaria italica
  Peptide Sequence Number=SeqID_120471
tttttttttaaacgaaacaaaaataagaaaaaaggaaacttaaaataaaacgaacaaaacaataccaagtacggtacaatgtatcttagaaccacagattcttcaccgaggcaattctgcctttgccattaaggtctgtaatcctaccattttgccaatggacactcccaaggtttgtttttaccacgtgaagggtcccagtggcaaaaagtcaaaaaaccaaaatgcatctgggatttcatcacttgatggcaaaagcagaatttgcgcgctcttacactgcagccacttggttgtacaagcagccgtaggattaagcaaaaggtggatcacgtgatcagttacagatcctaagtaaacct

SEQ ID NO: 54498 - DNA, 299 bp, Setaria italica
  Peptide Sequence Number=SeqID_120472
aatggagtgatgggctttagatgtgtctggagcaacaagccaattccaccccatcaaaacacagagtgctttgtgaaaccctaagtgttttgtcttcaaccccgctttggatgtatcataagcatgtgatagcaaggcatcaagatctgggaacttcctcgcaacactgtgtaggaaataaacaaaaagcaaaataaacagagcatttcttcaggttagagattccacataaatgttcagttaatcaaactacgcagataagagaaaatatgttttgacaatccttctggacacattat

SEQ ID NO: 54499 - DNA, 165 bp, Setaria italica
  Peptide Sequence Number=SeqID_120473
tcttccatgcatgaaagttccctggaattgtgagtgggaacttggtctggacagcctctgagacataggaatgtgttttggacgcccatacgtcaaaatgtcagagtgaggatggtttccttgatccacatcagtccattccccattgttttcatgtggcaaagc

SEQ ID NO: 54500 - DNA, 358 bp, Setaria italica
  Peptide Sequence Number=SeqID_120474
ttcaaacatggaaattgcccgtgcgcaagcatatgggatgttcctccccaggtaaattttgtctttctgaattaactgttaaggcaaaattgcattaaaatgtcacagtacaaggtatcacagggcataaaccagaaaatgtacccacagttttctaccaaccatattggtcaaatgctaaaattcatttgacttgggtaagttccagcggaatttcaatcactggaagctttctactggcaatacctcaacctccttaacaggcattccctttctgacaagtttacttaatacaatagtttaaaccttactaaattaagaacaaataacttaaccaaataacctaacctttaacgaa

SEQ ID NO: 54501 - DNA, 266 bp, Setaria italica
  Peptide Sequence Number=SeqID_120475
ggaagatggatggaagaactaacctgagcaatggtttttcctagtccaaggtaccgtccagcgttttgtctgaaatcttaatattctgccttgtaaattttcctttatctttgttgcagagccagcttcagagatccaaacaaatgatccaacaaaaaccataagcatttgactaagtgaacgcgtgatggccatccatcttgtaaatcgtatacattggaatgtccatccaaggtcttctcttcgagtgacagacatttaaaaag

SEQ ID NO: 54502 - DNA, 262 bp, Setaria italica
  Peptide Sequence Number=SeqID_120476
cgcccttctcgatccggctcacctccgactccggcaaggtgctcgtcgccaacaacgtcatccccgccggctggaaggccggagccacgtaccgctccttggtgaactactcctgaactgcaacaggagattatattttgttacggctcacggcaattcgaggtagttcctaatgtgtgtccgggtgtttgagagaggcgcggtgtcagatgaggaggagaagccggtctaagaatcgtgttctttccctccctccacgatc

SEQ ID NO: 54503 - DNA, 199 bp, Setaria italica
  Peptide Sequence Number=SeqID_120477
cacaccgctaccccctcggcgtccgatgcacgcggcgatgcctacggctccggcggctggttgtctgccggcgcgacgtactacggcgcgcccaacggcgacggcagtgacggcggcgcgtgcggctaccagaccgccgtcgggcagcgtcccttctcgtcgatgatcgccgccgggagcccgtctctgttcaagggag

SEQ ID NO: 54504 - DNA, 213 bp, Setaria italica
  misc_feature (149)..(149): n is a, c, g, or t
  Peptide Sequence Number=SeqID_120478
gacatgaggggccaagcgcggcacttccgttgcgttcccaggaaggtgggaaacaacgccaggtgcccgcactctattttgcggtaaaccaaaacctgcatgcagtccgggtcatcctcctttgcctactcgggccctttgctgggttncggtaaccaaaacctgcatgcagtccgggtcatcctcctttgctctcgggccctttgctgggca

SEQ ID NO: 54505 - DNA, 283 bp, Setaria italica
  misc_feature (49)..(49): n is a, c, g, or t
  Peptide Sequence Number=SeqID_120479
agtccaggcggctgtcttggtgccgccctcgaagacgcagtagatgccncgggagtccttgtagtcggcgcaccggtggttgatgacgatgtccgccaccgcctggacgcccttgccgtggaacgcggcgatcagggatctgagctccgccgccgtcccgtacttggacgcgtccaggtcgtatagacgaccaggcatgtaaccttggcggacacggagttgcgtccggtcggtcggtctagttccttagttacgttttgggttttgtttacgttttcctttt

SEQ ID NO: 54506 - DNA, 235 bp, Setaria italica
  Peptide Sequence Number=SeqID_120480
aaaagagctattagactgccccaagtagaggttttggtggcctcgttcatgccacttctccttgggcagtctaatagctcttttagactgccccaagtagagggttttggtggcctgttcatgccacttcttcccttggcaattttgtttgggaacagacccatggtggtttgatgtaatgagctcacaacatcaaccttttaggtttgcgtgtgccgctgcttgcttggtttgt

SEQ ID NO: 54507 - DNA, 531 bp, Setaria italica
  misc_feature (1)..(1): n is a, c, g, or t
  Peptide Sequence Number=SeqID_120481
ncggtcggcgagcgcttggcctcgaggcggtcgtactcgtccagcatgtgggccaggtcctcgtcgcaggtgacggagacaagcacgtcgaggtcctcggcgacggagaggagctggtacttgatggccgctacttccgtcttgaacatctcctccaccttcttcttcatctcgcggaaggggatggatcggggcacagcgagaacgcgggtctccccgccgacgtacttgagcacgccgtcgtgcgggcggggcacgatgcggccgccaaagctgcagaggatcttgatgcggcctccgcctccaccgcgacctccgcccccgccgccgcaggcgcaggtcggcgaaagatgctcgtcgtctgtggtggtgccctcggactccgtcgtcgtcgccgttggcggcgcaccaaccgcgtcttctatctcagccatggtccggtttcaactaatcctcgctcgccggaggcaacgacaaaacgaaagtagaattaaacgaaagaacctagttaatacggaacgggaataggaa

SEQ ID NO: 54508 - DNA, 261 bp, Setaria italica
  Peptide Sequence Number=SeqID_120482
atagtgagccctcattaatttccatcatcactatgttcattggccaaagttcatctccgagtatctttggcaaaacaaaaggtggaatgatgtcagcagatagtattaaagtagagagcataaattagcatatcacatgcgttttgtttagtttttaacataccggcgaggtttattttgacgttgactgggttccccacttgcaacctctgttatttcttgaggtttcaacagagaagaggcattatttgcactaggttc

SEQ ID NO: 54509 - DNA, 374 bp, Setaria italica
  Peptide Sequence Number=SeqID_120483
catacaaaggcaacagcaaagaaaacaaatcagtaacaacaagctacgaagttgggaagatgagagaaatatgaatgtacataagattgcttcaaacagccagcagttagatacccgatcgcacataacgctccatggtaattttcaaatcttgatgggcggttttgatcaagtgttgaagtgaactcggacagaagagttagtgcggcagagcttgcaagagctgaagaagcaataccaagcagacgcgaggcagcttcacgagcatcagaatcaacatgacccaatagagctcttagccactgtatgcggtccgaataccgcgatgacaccaactttggttcacgagtcgaaagatcaaccaatgacttcaa

SEQ ID NO: 54510 - DNA, 378 bp, Setaria italica
  Peptide Sequence Number=SeqID_120484
agacctaacggaacgtaccttacgtagactagttaataaacgaaccaaagaaccaaataaggaacaaagaacaaagaaacaacaaatagaaagaccaagacgacaatccaagaaataagcaatcttttccctcccagaatcgacctggcaattctttcaaaaagtgattcgagaatattatggtggtgtggcgaaagggattctccaataacatcacatagcttctttgtggccttggctgacttttttttaccagcccatgatgacgatgacatgcaatcacataaaagagatacagtttctggtaaatacagtgttagggttactctttcactaataggaatatcctcccaaatttcttcatataaggcactggtg

SEQ ID NO: 54511 - DNA, 248 bp, Setaria italica
  Peptide Sequence Number=SeqID_120485
tatggaaggcagtgcacaatgcagaccaatatgaccaagagattccattgcaacggatgctaatgttgaaccttcagattcaacaacttttacaagaatatcaactgaattatttacaattccttcaggtatataagattgcttcaaacagcccgcagttagatacccgatcgcacataacactccatggtaattttcaaatcttgatgggcggttttgatcaagtgttgaagtgaactcggacagaa

SEQ ID NO: 54512 - DNA, 237 bp, Setaria italica
  Peptide Sequence Number=SeqID_120486
gcaaaagttgcctacggcctgacaattcgtgtttcggacatatacaaatgtagcattatcatggataaggagctaagtaacaaatgagcaaatgactgtcctgccctcatgacgcaaaaaagggagggagaacttgccgtattctgttatctgtactatattgcatataagaatgaatttacaatcagcattagttttataattcagggagggccatttcatcggcagtgttccagc

SEQ ID NO: 54513 - DNA, 216 bp, Setaria italica
  Peptide Sequence Number=SeqID_120487
gtttcaaggcttagagcggtcttcgaacacctgtactcgctgcaacttgaagaagacgacaaatagaacctctatttatgtcttcttcaagttgcagcgagtacaggtgttcgaagaccgctctaagccttgaaacaaccatttccctaactgaagatgatcgtgagactaaattgatgataaaaagaccaccctctgaaaggaactcttttgctt

SEQ ID NO: 54514 - DNA, 412 bp, Setaria italica
  Peptide Sequence Number=SeqID_120488
caatccacaatttattttgtcaatgtttagtatgtcttacgttctgttttatctgtgttttatttacagtaccaagtgcccagggagttcagtctgacagtgatcctaacaataccactgtgcgttctttgtgcttctttcatgtgtgcaagtaatttttaactagctgctaataacctatcgctgttgttgagcacagatttttgttggtggccttgaccccaatgtcactgaagatgtgttgaaacaagttttcgccccttatggggaagtggtccatgttaagatccctgttggcaaaagatgtggttttgttcaatatgctaacagatcttctgccgaggaggcatttgtaattctgcaaggtaccttgattggagggcagaatgtgaggctctcttgggtcgcagcc

SEQ ID NO: 54515 - DNA, 257 bp, Setaria italica
  Peptide Sequence Number=SeqID_120489
gctgatgttacggattacatattacaagagacattcagggtgcattatccttcggtcaagggtgcaaaggttgtcacggacaaactaactatgcgtccaaagggttatggctttgtgaaattcggtgatcctaatgagcaagctcgtgcaatgactgaaatgaatgggatgctctgttcttcaagacccatgcgtattggaccagcttctaataagaaagccacaggagttcaagaaaaagtaccaagtgcccaggg

SEQ ID NO: 54516 - DNA, 306 bp, Setaria italica
  misc_feature (57)..(57): n is a, c, g, or t
  Peptide Sequence Number=SeqID_120490
attcttcttctgaatatgccctgcctgcaagctttagtcatctattttgcacttacngttcaggaacaagctaggaaaaataggagattcatggtctatgtacattcaaaaggcatgattgtggatgatgagtatgtgatcattggatctgctaacatcaaccagaggtccatggaaggaataagagatactgagattgcgatgggagcataccagccacagtatacttgggctaataaggtttctgccccgcgtggacagatttatggctacagaatgtccttgtgggctgagcatattggtagt

SEQ ID NO: 54517 - DNA, 232 bp, Setaria italica
  Peptide Sequence Number=SeqID_120491
ttgtgttcctatatatgatatgtttccatatggcttagtcacatctttgttttatttataatgcagaacaaaaccaatgcaaatgatgtatgagacaatatatagggccttgaaagaagcaggcctggatgatatgtatgagcctcaggattatttaaacttcttctgtcttggcaaccgtgaagttgctgacagcactagcacttcaaatgcatcaaatacagcaaataat

SEQ ID NO: 54518 - DNA, 222 bp, Setaria italica
  Peptide Sequence Number=SeqID_120492
gcagatttttcaagcattcttcagttcaagtgttgctttgcccacgatctgctggaaaacgacacagctgggtgaaacagcagacagttgatgctcgtggcccaagggaaccgtggcatgacttgcattctaagatcgatggtccagctgcttatgatgttctacaaacttccaggagcgttggttaaaggcggccaaacgccatgggattaaaagttggct

SEQ ID NO: 54519 - DNA, 356 bp, Setaria italica
  Peptide Sequence Number=SeqID_120493
cctttcttgcttgaggatggtcgcctgctatgtggatcatcagttgaaagctggaattcttggggtgcatggcttgaggttacaaaagatgcaggccggacatggcaaaagtacggccctatatgtatagaaggtgaaccacttggagtgattcagccagttccctaccagactgccaatgggactattcgaatgttgctgcgatcatttgaaacaattggccgtgtctgtatggccgattctgctgatgaaggtgtgacatggagttatgtccacgagactgagcttccaaacccaaattctgctctcacttttcacccctggaaggtattgatggagttaagatgaaggattgg

SEQ ID NO: 54520 - DNA, 240 bp, Setaria italica
  Peptide Sequence Number=SeqID_120494
accaagaaccaattaagtgtagcataatatggagtacaagagaaatgtaattgtgcacagatagttgatagtgcaacaacaagaaactaatccaacagtagcatattttttatgagtaggttcttccttttctttcatcattgacgatttagttgtatccaacatcagcgcgctcaacaggtgttggaattgctacggccatcggtaaaattggtggcattgtttgccccattatcgctg

SEQ ID NO: 54521 - DNA, 382 bp, Setaria italica
  Peptide Sequence Number=SeqID_120495
ccatgtaccagctctctctgcttttgtcctttgcttccttctcatatttctggattgtccgttcatccacttgtccacttaagaataatatctgacctccagctgtggacttgcctgcatcactagtctgcagctccagagactgaagacttgactgaattccgttgacatcctgggccggaggagctgagaccgcctctccagcatcgtcctcggcggccgcagctgccggagccggagagtgggactccgctggcttctcctcgaaatcgtcgcgcgccgcccagtcgtccgcggcagcttcggcggcggatgcgcgggaggcgatcggcggcgccatctcggcgtcgtgttccatctctcgcggggcggttgctttttc

SEQ ID NO: 54522 - DNA, 449 bp, Setaria italica
  misc_feature (374)..(374): n is a, c, g, or t
  Peptide Sequence Number=SeqID_120496
atattcatatactttatgcccagattaagaaaattttgttagtggaagattcgtttaaaaaaaattcaaacataccaatattcaatcatatgatctaaactttaaagagaacttatcacatgggtgggttttcaggtttaacgtttgaaattggcaaaaaggctaactactctggtaccattggaatgttgctgcaaatatgctataagatgggacaaatgcaagcatcattattttggaacaattgggcacttgccttctgttcggagtgtaaatcttccgagctgaggaaaatcagagaagttctcgatgcatatcaagttattgacctggatgcagcagacaacaacagctcccattcttcacaaaaaagnggcttcctctttggccttttttcttctttcgggtcagtttctttcttcctcttcagatcaatttcctcttataag

SEQ ID NO: 54523 - DNA, 240 bp, Setaria italica
  Peptide Sequence Number=SeqID_120497
aatttccaatggtatataggaaaattttttcaacataataccgatgcgaagaaaaagctagcactgcaacgccgtcatcgcgagctgcctcggccaaccgcccaaccgacctccatccgtcgagcacgtcgacaaaattggcttaggctttaaacgttgaactcccacttggcggaacagcaacaacctttcctacagctaccgttttaccttctgttcggagtgtaaatcttccgagct

SEQ ID NO: 54524 - DNA, 214 bp, Setaria italica
  misc_feature (15)..(15): n is a, c, g, or t
  misc_feature (59)..(59): n is a, c, g, or t
  Peptide Sequence Number=SeqID_120498
tactgaagctgagcntaaattcagatacagcactgacaggattgttatacttgatagcncaaagccaggagtgatgtcctcctcttcaattcctgacaacttgagacggacattctcacctggtgcagcttttctcactttatcctcatcacagtggatgaacggacaatccagaaatatgagaaggaagcaaaggacaaaagcagagagagct

SEQ ID NO: 54525 - DNA, 253 bp, Setaria italica
  Peptide Sequence Number=SeqID_120499
tggggaagtagtgctcctctggatagcatgaatccctgcgctggattagacagggttgcttgaacttcttccaaagccgcatatccctcaccaccatgatggcatgccttcttgcgagcacaaaaaaactgcgatccagcacggaactggtcatacggaacctctgggagcatcacgtcatcacctcgggtcgttagttaccttgttcgttgttcttagttcttagttcgttttggttttgtttcttatttta

SEQ ID NO: 54526 - DNA, 170 bp, Setaria italica
  Peptide Sequence Number=SeqID_120500
taaacttaacgggtaaagtaaaaactttagtacgggtactaaaactaattattaatgaatgtgtgttgtttgacttcctcagctccctgaatacaaggactacgactagaatacctctccaggcccgtacatgtgtgggtggcctgccactgaatctgtccaatttaccc

SEQ ID NO: 54527 - DNA, 386 bp, Setaria italica
  Peptide Sequence Number=SeqID_120501
aattagaagtaattagttgaaatttatccactagaaaaaatcgtgagtacatgaaaagagcgatgatgaccttacaggctacagggtgcaataaaaacatttctgtaagaaaaatgatagccaagtataactgacatgttgctcataaaaaaagagtaatggtacaatcagaagtatacccaagaggccaagatcgatcaatataaccataggtgcatagagaaacgatgcatcatttgacaaagtgatccagaaatgttaagcagcaaaccaagactattctgccagaaagattattccatatgttaaaggttgccactgaacaacaagcaggggagaaaccaattcagaagggcacatactaattaagggaaacaaaagtgaat

SEQ ID NO: 54528 - DNA, 347 bp, Setaria italica
  Peptide Sequence Number=SeqID_120502
aggtgcatagagaacgatgcatcatttgacaaagtgatccagaaatgttaagcagcaaaccaagactggaccatttgcccatgcacactgaaggaagttatgtctttgaatcatatccatggtgtccatccctcatacatattgcataaattgtcgatacttgttgcttgtttaagaagatagtcaacttgctcggaaatgttcaaggacctggtaccatctatatcctttccatgtaacttatgctccacttgcttcaggatggacagagcaaaaggatttttacctctagttactcgaatcaaagaatcagcataggatttaggatcactgttgttgcattcttg

SEQ ID NO: 54529 - DNA, 181 bp, Setaria italica
  Peptide Sequence Number=SeqID_120503
actctgctagcccagcttccaatcaggaaagggctgtccaaatactaccaaggaaagtcccaatcattcacatcaatatctgatgctacatgtgttcaagaccttgcaaagaaaatttcatacagtaagaggatgaagacgtgtaaaagctattcagcaggattagacatgaaccaacggt

SEQ ID NO: 54530 - DNA, 325 bp, Setaria italica
  Peptide Sequence Number=SeqID_120504
gatccaggctgctgtactgttgcacccttcgtttgttagcgttgatgatatgaaagaggtcaagtgccctatttctatactgggagctgaggttgacaaaatgtccccaccagaattagtcaagcaattcgagcaggtcctttctgcgaaatcaggggttggtcactttgtcaaggttttccctggtgtgtctcatggatggagcgtgcggtacagccacgatgatgcagctgccgtgaaaaagtgctgaggaagccctggcggacatgatcgaatttaggttttaaactaaagtaaaccttagtaaaattagtaactttcttta

SEQ ID NO: 54531 - DNA, 376 bp, Setaria italica
  Peptide Sequence Number=SeqID_120505
acaaaataggaatacaattaggaaatagtagattcacaaaactttgggactggacgaccatgcgtgctgttactgtgttgggtattttaaagttgtttccaaatgccagtactaaagttcaatggtggcctctggttgtgacctcttaaatactatcaaagttgatataatcattgagcatcacttataaacaaatatctgatagtaatgtttaccttatctcatgaaggagatagccgacaaggttgctttatcaggatactttgttgtggtgccagatttctttcatgggggatgctttacatacctgagaatgagaagcccatacatgagtggctaaagtcgcatgctccggtttgttgccccagcccctttt

SEQ ID NO: 54532 - DNA, 166 bp, Setaria italica
  Peptide Sequence Number=SeqID_120506
cctttcttcttttgctgcacaaatttcatcaacaaagaaggtatttctttgctaggaaaaagggtttgaagatgcaaaaccagttattgctgctctaaaggagcagggagtgtctgctattggagctgcaggttattgctggggtgcgaaggttgttgtggagttg

SEQ ID NO: 54533 - DNA, 182 bp, Setaria italica
  Peptide Sequence Number=SeqID_120507
tacaagaacaactaggaaagaatacctaccgacggacgaacaaacgtagatagatacaatcaagaggcaaggacaagggggaaaccgggctcatcaagcgggtcattcgatcgcagaatcgtgttatcgtcgagggcaagaacttggttaagaagcacattaagcaaggggaagggcacaca

SEQ ID NO: 54534 - DNA, 276 bp, Setaria italica
  Peptide Sequence Number=SeqID_120508
gttccccatttctgcagagcaacgggccgcgctacgccgtggagaccgggcgccgggacggcaaggtgtcggccaagtccgacgccgacaacgacctcccgccgcccttctccaacatcgtcgacctcaagacatacttcagcgtcaagggcttgggctggaaggacctcgtcgtcctatcaggtagcataaattatactacccacaaaaaatcaatgaactagctagcttccattggaatttggaagtgcaagcaaagcttccaaccaacaaccg

SEQ ID NO: 54535 - DNA, 251 bp, Setaria italica
  Peptide Sequence Number=SeqID_120509
ggcctacctgccactctataaggaggtctcttaggcagattggtgattcacccctttcccattatcctcatgaacgacttcaagaatcccaaggcgatgaggtattgaaggcagaagcaagtgcaaaggtgcacaagtttacagaatgggctctaaagtgcattgggctacattcacgtgtgcgagagaataagggcaaaggaaaccatgacactgtcatcgaggttcaacttcagttgtctgctttcaag

SEQ ID NO: 54536 - DNA, 336 bp, Setaria italica
  Peptide Sequence Number=SeqID_120510
agttagggaataatagacaaggtaaccgtttctacagccttccttcggtcgagatgatacttttgatgcagtggttttgtcagatcctgaacactgctattgtgtgattctcaacgcacatgatggggcagcatttcctgaagaaaccgagtccaagaatcctggttcaaatgtacagcctgaactgagctctgggagtgcccaagagaaaccaccaaagagaactctcttctcaggttatgtgagctaccaaaacgtccgtgaggcttatgatgctggcagatcaaaatttgggagcttactctcacttgggcatgaccacactaaacttgacag

SEQ ID NO: 54537 - DNA, 254 bp, Setaria italica
  Peptide Sequence Number=SeqID_120511
gtagttttcatgcgtctgagatatcctagccattgcacctattatttgcatttgtttaatatattattaggtgggaaattgaaatctctgataagaagttactttcttttgagtagctgtgctaattaacctcatctgttttatgcgaaacagcttgaaaaggtcatcaatgttaatacactggaggttgattgggaacgttccttctatttgaatttaatagctcacacgtcatacactgttacagttgcaat

SEQ ID NO: 54538 - DNA, 223 bp, Setaria italica
  Peptide Sequence Number=SeqID_120512
gtttgtaacttgttaatattctgatccagcagtattaacaatcacatatcttgagcatggtgaagaaacactcacatttgattgggtggacgattgttgatgccgaggatgatgcgtcagatgttggaatggatgataagttctggcatgaaatgcttgatcttttctttgtgcgtggtgggaaatcaaagagaagtgaagaggatgaccttgtctttctttg

SEQ ID NO: 54539 - DNA, 134 bp, Setaria italica
  Peptide Sequence Number=SeqID_120513
ggcagcagatcctgatcggaacagggcgtcatggagtggatggaggcgggcgtcggtattgcagatcagagccgtgagaagtcaaagaaagatccaggagatagcttccgggtccttgttcacagggcagcttc

SEQ ID NO: 54540 - DNA, 467 bp, Setaria italica
  Peptide Sequence Number=SeqID_120514
ggtcgggtcaggtttcacaccatgggctaaattttacacccacacccgcacccattgggtgccaaacctgtgggcacccacattgggtcggattgccatccctagtcataactcataatcccacctgaataaatttatttggctcaaagtttgatacatcacatattgagaaaaatgtgttattctatatgcatcattttttccttgacggtacatacatgttcttgtgtgccccaagcgtgaagtgaaaagattcgctgatctaagttctgatgagacaagtgacttatgggttactgcaaaggaagtcggcgtacgtcttgagaagtaccataaagcatcttcgcttacctttgctattcaggatggtcctcaagctggccaaacagttccacatgtccacattcatgtcatcccgaggaagaaaggggattcgagaaaatgatgaatatatgatgcgattgatg

SEQ ID NO: 54541 - DNA, 429 bp, Setaria italica
  Peptide Sequence Number=SeqID_120515
agcaactttgcaactctgtgctgtagtagcatctggcattcctgttgcttagtggttacttcagattagtttctcgtagagaaagtataatagaagcactttcttggtaatgcgaggaggcttgttacttttttagtttacacccttgcagccatggctctgccattgttttttcagcctctcgcgttgggttcagaacatattatggccgcctggctggcctagttctcgtatatgctatgtatggagaagttgcagtatgttgaagctgtctcgttctttatgtgcaggtcatttacaaaacactctctccgcagtggaaccagacgtttgagttcccagaaaccggagaacccctgactttgcatgtcaaggaccacaacgctcgtccttccaactgctagcattggccattgcactgtcgaatac

SEQ ID NO: 54542 - DNA, 304 bp, Setaria italica
  Peptide Sequence Number=SeqID_120516
aaagggaaaaacaaagaaaaattaactaactaagaattaaaatagaagaccaactagagcaaattggccacagatggtgataaaggcatctgcattaacaaccccaaagacaatgcatctagacctgtggatgtcttgcctatgagttcaacccagcctgttccagcgactgatggcagtgaatttccagacttaaattcagctcgaatggatttgtgaaaatgtttaaagatgcatgttctgacaggcttgaagattcagctgctcgaataactaaatggcgagatgactctggccagcatac

SEQ ID NO: 54543 - DNA, 249 bp, Setaria italica
  Peptide Sequence Number=SeqID_120517
gttttctaattgttccagaagtatgctgaacaaattcagaaatggggctggatcatcagcagtgatagcaattcctctgaatcattcaagaagaacatgaacattctgaggagacaaacccgtctcgttactcttgttgctgtaaggaacacccttgcttcggtccatacaattcaacttgtttgtaatcaatgctgattgtatacgttttcctgaatctgctggacgtggtggcctattgatttgtag

SEQ ID NO: 54544 - DNA, 401 bp, Setaria italica
  Peptide Sequence Number=SeqID_120518
gtctccgactcagtgacgtatgtgccagctccgacacgccgactgatcaggatgcgaacgacaacgtcgaagccgagcaagcggctgcggcgagcgacgcaatcccggatcacgaacaagaggagctgagcggtggggcccgcgtggccaagttatcttgtcgctactactgttaccagagttatccctatgtgtcgtctagtgtcttcgtcgtcgtctccgacctgtgttggtcttctgtttcctgttgttgcccatctgtgtttttgatcgcaagcttgttcgtcgtgtctgtcgtcagagctatcctcatctccaaacatcccatgaaccgggtgttgggattgggatgctgttatcctcgtgaaactttgttaccatccgtttttaagtaatcagat

SEQ ID NO: 54545 - DNA, 312 bp, Setaria italica
  Peptide Sequence Number=SeqID_120519
tgtaggtagtaaggtttctagtcgtacgtatggcggataggagtcagagtcactcactaggtggtgtaccacaggtagtcggacttgtcccacgtcatgctgagctgctcaaccaggccgtccttggtgaaggcgcggtcgtccagggagttggtggcctcgctgtacgaccgccacgagaagccgccggcggggctcatcgtcgccggcgccgacggctccttcaccgtcgcggtgttgaacacggcggtcttgcagtccggcagcacgctgatggaccacgccggcagttcgtagcgccgcccgttgaac

SEQ ID NO: 54546 - DNA, 471 bp, Setaria italica
  Peptide Sequence Number=SeqID_120520
tgtcagcggctggtccggcggcgccgccccactcgacggaggagctcccggcggcggtgtgcacgcccagcgactcgccgtggaggccgatctggtacgtccatttctggttgctgaggtcccgcttcccctcgttcaggccggacagcgtcaccgggccgaggacgccgacgttccacgtctcgtagtgggtgccctggtttctgaatttcttgcgaacttacagggaggccgacggcggcgctgaggatggagatcttgttgctgccctgccacatcttgacgtacccgctgtacgtcagcttgggactgtcgtagccgccatacgcggtgccgtatgactgcccgttgacgaacacctgcagggcatggccggcggagtagatggtcagctgcggccacttgccggacttcaagaactgctcgctcgagtcgatgttgacgtaggtggtgtaccacaggtagtcggac

SEQ ID NO: 54547 - DNA, 268 bp, Setaria italica
  Peptide Sequence Number=SeqID_120521
gtgaccaggacggcatgaggagggagaggaagattggaagaagacgatgaggaggaggaggaggttgccgctggggttgagccacgacctggggacgtggtagtaccgctgggagacgtcgccgcagccgctctggcacttggtctcgctgtaggtgccggcgtagccgcacccgccgcacccgccgccgccggcggccttgtacgaccagtaccgcccgatgtggtgcccgttcacccacgcctggcccttcccatgctgcctaggt

SEQ ID NO: 54548 - DNA, 117 bp, Setaria italica
  Peptide Sequence Number=SeqID_120522
ccttctccttcaagtctggacccccaaaactggaacttcagatgggacgcaagttggtaagaagacccttgctattgatgattgtgattccagacaatccatctatgtatatggatg

SEQ ID NO: 54549 - DNA, 281 bp, Setaria italica
  Peptide Sequence Number=SeqID_120523
gaatttgagtatgttaaagttgaaaggaatccaaaaagaaaggatatgttcagctgcatacaacccgaggagttatatcacaatgaagctccaaattcaaatcaccatgggttgtatgcagcttcattgtgatataactcctcggacgtgtgaaaatttcctcacacattgtgaaaacggttactacaatggtcttatcttccatcggagtatcaaaaacttcatgattcaaggaggtgatccaactggcacaggaagtggaggagagtccatatgggggt

SEQ ID NO: 54550 - DNA, 244 bp, Setaria italica
  Peptide Sequence Number=SeqID_120524
tgggtgtgcttggagggggccgcttctttttagctccatgacaaggagctgaagaagaaatgggcggagtatcctgagccatagagtctttcctgctgccaccaatccctttcattcgtccatccatagcatcaccaagtaatccaagacccggtagctagctagttccgtgtcatcagcaggcagaggaattgaaggtccatggactccaagaggatgagctcgagctcgtcggtgcagtccg

SEQ ID NO: 54551 - DNA, 207 bp, Setaria italica
  Peptide Sequence Number=SeqID_120525
cggtggtggtggtggtggtggggttcctcctccccatcctgctccctcgagtctcagcagtcccgcgcctccagtaaaccgtggcgacgggggatttgaccacactgcgttcctcgtcgaagccagcggcggacgaaggcttgggcgcgggagtgacggatgcggtggaggagcgggagcaggtcgaggagacagcggatgcgtcgg

SEQ ID NO: 54552 - DNA, 345 bp, Setaria italica
  Peptide Sequence Number=SeqID_120526
ggttttttttaagtcaggataaacttgcaatatgcgggaaggacattatgttgacgctcattgctagacgctcgaggcattatgctggcaccaggtatctaaagaggggtgtgaatgacgagggcagagtagcgaatgatgtcgagactgagcaaattgtttatgaagacatgcttggaccaaggcaaataagctctgtcgtgcagaacaggggttcaattccactattctggtcccaggagacatcaaagctgaatcttaagcctgatatcatattgcatgaaaaggacaagaatttattgaggcttacctagtactttctattttttgtaaaattcttaaggt

SEQ ID NO: 54553 - DNA, 305 bp, Setaria italica
  Peptide Sequence Number=SeqID_120527
ggggtgagaggtttaggtttagggtttgggcttcgggagaggggggattagaaagggaggcaaggcagccgggtggggtgaggcggtcgctgaagaggttgcagtgggcggtgccgagggtgtggccgccggagaggacgacgaggtccttgacgccgaggcccttggcggcgaacatctggacgaggcgggtgaagttggcggtgggcggggggagctggttggtctcgttggcgatggagacgcggccgtcgcggcggccgagggcgacgggccaggaggggcccctggcaaggacgacggcg

SEQ ID NO: 54554 - DNA, 329 bp, Setaria italica
  Peptide Sequence Number=SeqID_120528
cctctagatatcatagacaaagcacagtatttctgaatatttgtgataaattgtttgcctcatttaaactgtttcttgttgagttactgaagcattgaatagctgcatgtaaaatcgcagatcgttggtcccttttattttcatgggctattcaaaggaaaatccacttttgaaattaagagtggagaattgtgacttgtccagtattggtgtcagtgaacttctggagtgcctcacatatgttaagcaaccacttgatgtgctatctatagcggacaatcctttagggagttctgtggcagccgtattggccaaattcttgggttaca

SEQ ID NO: 54555 - DNA, 343 bp, Setaria italica
  Peptide Sequence Number=SeqID_120529
aatccacttttgaaattaagagtggagaattgtgacttgtccagtattggtgtcagtgaacttctggagtgcctcacatatgttaagcaaccacttgatgtgctatctatagcggacaatcctttagggaggtgagtagtatctgattttcatgcattgtcctattgttttcacttattgaaatgcacttgcagttctgtggcagccgtattggccaaattcttgggttcacatgtaagggatctaaatattgaagatattgacttgggagcattaggtttccaaattctcgaggaagcattaccaatggaagtagctcttcgcatatcaacatcagtaagaa

SEQ ID NO: 54556 - DNA, 204 bp, Setaria italica
  Peptide Sequence Number=SeqID_120530
ccattttcttcagagcatttcctgtgatttccgcacgatgcgcctaacctttttcttgaagtcctccctcttctccctccactctttagctgcctcaatatttgctgtcgatctccaaatgttcatctgatgccagcgtcttgtatattctccacttagcgtctgtccattggttgatagtggttttgtctttagaatacgcga

SEQ ID NO: 54557 - DNA, 232 bp, Setaria italica
  Peptide Sequence Number=SeqID_120531
ctgatggtagatatatttagactaaagttaatgatcagattcagtggtattgtatttactttattgggacttaaatataataccactgaatctgatcattaactttagtctaaatatctctaccaacaaccacagctgaacagcatgcctaatactttactaataaacaactgatggtagatgacatcgaatttgcctacttaacagctgatgctccgtaagcgacaccgag

SEQ ID NO: 54558 - DNA, 220 bp, Setaria italica
  Peptide Sequence Number=SeqID_120532
ggaattaggcctttgcagctgcctgcttcgcaccaaccgcaaagaactcactgatgacctcaaggggcatgccctttgtctcagggaccttaaggaagacgaagacaaaggagatcatgcagacaactgcgtatatgccaaagacgcctgctagaccaatagcattgaagacaatacaacaaggaaaggactagtaaggtaagaaacaaaataaagaaaa

SEQ ID NO: 54559 - DNA, 259 bp, Setaria italica
  Peptide Sequence Number=SeqID_120533
cgtaaaccaatgctggaagcatcaataaggtagtgagagagctgatcaagatggatgctgatgccgagctgagaccaagattggaaagaagaactgccacaccagcttgttcaagaatttgtggggtgtagtagagaaccccgtttattccagcaaactaaacatgagaaacaaagttagtaggctatttttaagctcagttaataatcttacttattaagctatcaatattagaacaacccaaaacagaatatgacga

SEQ ID NO: 54560 - DNA, 384 bp, Setaria italica
  Peptide Sequence Number=SeqID_120534
taagaaacgaaagaaataagacgaaagaagaaaagacaacaacttaccaaagacaatgctgggtcccttggaaggtcgagcaatccatgattgtccttcttcaggcccataaagtgtgatatgttccttatcaccatcagcaacatgatcatcagctggctcagtggcagggccgatgatatactcttcaatggaggtgtctcctccaacctccaacccttcaacaagaaggccatttcacttgagacatcgtctttcccacgttaatttttgcaacaccttctttgcctctgccatccgccctttgctgaccagccatcgttggggattcaggcagatagaatatcgtacaatccaaaagaaaaacaatgaaggtatggcaag

SEQ ID NO: 54561 - DNA, 255 bp, Setaria italica
  Peptide Sequence Number=SeqID_120535
actctatggggtgattctcccattgctgtctacttgcagacagcttatagtgcagttatgctccttggcaggctctgtgtttccaaatgacaaaaacaccttggaagggagtgaactgttcttatagttcgaggttgcaaactggacggtttttgggttcgggtttgaagaattgaggctagtgttcaagataatggagatgcacagattaaacaccttattacgatattatctgctgttgttctgtggattgaa

SEQ ID NO: 54562 - DNA, 288 bp, Setaria italica
  Peptide Sequence Number=SeqID_120536
acaacgggaagttggggcaagttgctttgctcgtgcgcaagaggaaagggaagaggaagagggggagtaagcgagaaggccgatggcgtcgaagcggatcctcaaggagctcaaggacctgcagaaggatcctcccacctcctgcagcgcaggccctgttgccgaagatatgttccactggcaagcaacaattatgggtccaacagatagcccatatgcagggggcgtcttttttggtccaacagatagcccatatgcagggggcgtctttttggtcactattcactt

SEQ ID NO: 54563 - DNA, 204 bp, Setaria italica
  Peptide Sequence Number=SeqID_120537
cctatcccctgtgtgccttgcctatcctctgttgcgtgtctcagtctttttggtcactattcacttccctccggactacccattcaaaccacctaaggttgcgttcaagacaaaggtcttccatccgaatatcaacatcaatgggagcatctgtcttgatatcttgaaggaacagtggagccctgcactgacagtttctaaggt

SEQ ID NO: 54564 - DNA, 398 bp, Setaria italica
  Peptide Sequence Number=SeqID_120538
cattattattagtcatcactgcttaagtcagcatgtgtttttattacttgtcttttacatgaaccattgataaatgcctgccaattgttgaagtaattatgagttggtagactaactgataagcacatgaatgcaggattacaaaaggaatgcttttctggaggctgatttgcaatgttcaaaccgagtacagaacatggaatcaaaggtgcgggcagcatgtaaccgtcctgatgcaaagttagatgatgtcgtcaggctccttgatggcctgctcacagagtatgagtcaatggcctatggtcctgggaaatggaaaaggctagccacattcctacagcagtgtttggctgggcccgtgctagaccttttcagaaggctagttggtagtctattaa

SEQ ID NO: 54565 - DNA, 271 bp, Setaria italica
  Peptide Sequence Number=SeqID_120539
cgttggttcatgagttggacgtaggcgccggagaggctgtcgttgagcagcgcggcgtcggaggcgagcagcgcccggtggttgtagacgttgttgtagtaccccaggtcgaaggtgctgggcgtcgtggggtcgagcggttgcacggtggcgacgttgcccggcttgcacttcgccgtgaggttcttggcgtagtcggcgtcgagcgatgggtcctggtcgccggcgccggtgtagttgtagaggcggttggagaaggaggggcagtgcg

SEQ ID NO: 54566 - DNA, 443 bp, Setaria italica
  Peptide Sequence Number=SeqID_120540
ccgtttaagactacatgtctgtcacggaaacacaaaaaatacaattatcaagctcataagagaatacaagcacaagttcgtcaacgaagcaggaaaccatggagcttcttcagggcattcaagttcccgccatatatggataatggactgagaccggaggaggacactgtcgcaatcagccagtcctcttgatgatgtgcaccccgctctctgtatcaaccacgtcgcttatctcccccaccttcagagcaaacgcagccttctcgaaagccttttgcatcttacccctcccaaatgaacctgcaacaataaccataaggtaaacttaaatcaccatgggtaaatggattttcaattattttggcaatataatcaaaacagcatcagaaagggtattttttgcgagatgcataatgcaagattagtattttccttttactttt

SEQ ID NO: 54567 - DNA, 377 bp, Setaria italica
  misc_feature (45)..(45): n is a, c, g, or t
  misc_feature (68)..(68): n is a, c, g, or t
  Peptide Sequence Number=SeqID_120541
gtggtgaacaagaatcaatagtacaactacaaatagtctctgtangtataaaaatgctgctccaaggnaaaacccatcaggagatccacagcgatacttgaccacaaagcatgcttccgaattgcagctttgtgtgcatattcaacgttcacagtggagcttagggaggtatcccggaggacaattggccagtgaagaatttgacaactgcgaagatgaatgttattccacgaatgtttgaaaaccttgtgtaacatcaagtactggaacatatggcttaaacatttcggaacattagaatcaataaatagtaagaaggaataagttaagaaataagaactaagaaaagaaccaaaaaaaataaattaacccaaata

SEQ ID NO: 54568 - DNA, 272 bp, Setaria italica
  Peptide Sequence Number=SeqID_120542
aaggtgatgggattcaccggcttgctgacatcctcagccttcggaccaagctccaaaggagagtccccgcgttctctcttcacacctgtgacagagcatcccatgggaacgatatgtgctgcatactatgttctggtgcccatttacatgtggataaaggaccagattgtacccaaaggcatgccaatctgagtgaaggggactgagctgcaaggaagagaggatagccatcatctgaactggatgatgtgaatcttaaactgcattaccct

SEQ ID NO: 54569 - DNA, 178 bp, Setaria italica
  Peptide Sequence Number=SeqID_120543
acctcgtgctcccctccctccgggagaccctcaagtaagattattcccgggccgattcatgtgaaatttctgaaaactaatctttcctcttgcgtgccgtgggagcaggaacctgcagatggagtacctggacctgtacctgatccactggccggtctccatcaagcccatgccaata

SEQ ID NO: 54570 - DNA, 291 bp, Setaria italica
  Peptide Sequence Number=SeqID_120544
tttgtttagtttcctttaattttctttacctttaacgttaatttctttaaatttgttctattattgtcttgaagccagcaatggaaagagtctgctttgttgagtcctgtaattaagaacttgagtctcagggccaccatcttgagagccaaactgctttcgaacggcgctgtatcgtacagcaatgcaaacagcacgggacaaagccttagaagcatctgcaacaattgattgacgaaacaaaaaccattgtcccataaaagcagctgctttggcacatctgaatggaca

SEQ ID NO: 54571 - DNA, 136 bp, Setaria italica
  Peptide Sequence Number=SeqID_120545
ttgtttttttttttacttagcaaaggagtagatatgctctacctcccgccgctctttattaattaaatgtacctctgatacgatccgtacttaatggatgggtgaaataagctattctattcttgtcaaagccgag

SEQ ID NO: 54572 - DNA, 456 bp, Setaria italica
  Peptide Sequence Number=SeqID_120546
cgctaccagcttatatttctcactcgattcattcatcagagcctggaggagaggttgagctgctgcttgagcaatgggccggaggtactccgtggtaccccctccggcaccaccgtctcgttcagagggtccttccacgcctcctcgtacagggccgggtacacgttcccgtcgtaccgccccagcacagaccccaggtagtgatccgtgtagttgaacgcatccaccagcgcaacagcattcggccgcacctgcgcgtacagcttccccagctgctcgtttgccagcgctccctgctttggcgtgatgcacccagtcgccaggaagtcgcccaggtgcttgtggagaatgtacagcgcgtaaacattgcaaaggttctccagctgttccttcactccatttccagggattagttactttagtaacttaagtaaactaaaacctttaaaacttaaa

SEQ ID NO: 54573 - DNA, 412 bp, Setaria italica
  Peptide Sequence Number=SeqID_120547
gtgaaggaacagctccagaacctctgcaatgtttatgccctttacattcttcacaagcacctgggcgacttcctggcaactgggtgcatcacacccaagcagggagcgctggcaaacgagcagctggatgtgagccgcggcagcctcaagcaaatctggggaccgctcatagaaaccttcttcttggcttgttgcttggcctatgttctgggcgcagtttaccgccatcctgagagctctagcttcaaatgcctcttgtatggcagcagggttaagccaatcttcagctgtgttgacagcgcatttgcattgcatgagatattgtactttgcccatgtaagccattgtaccaacaggttgttttccagaggtcaaattgagatacagtcttcattagaatccttgcaacctg

SEQ ID NO: 54574 - DNA, 438 bp, Setaria italica
  Peptide Sequence Number=SeqID_120548
aataccaaccaagacgacaaacggacaattacgggacgacaacctgtgcgtaaagcttgcccagctgctcgtttgccagcgctccctgcttgggtgtgatgcacccagttgccaggaagtcgcccaggtgcttgtgaagaatgtaaagggcataaacattgcagaggttctggagctgttccttcactccatgtccaggaatgtcctgctgtaccttctcgatgaacttggttacaatgatcaactggatgtgagccgcggcagcctcaagcaaatctggggaccgctcatagaaaccttcttcttggcttgttgcttggcctatgttctgggcgcagttttaccgccatcctgagagctctagcttcaaatgcctcttgtatggcagcagggttaagccaatcttcagctgtgttgacagcgcatttgcattgcatg

SEQ ID NO: 54575 - DNA, 444 bp, Setaria italica
  misc_feature (192)..(192): n is a, c, g, or t
  misc_feature (203)..(203): n is a, c, g, or t
  Peptide Sequence Number=SeqID_120549
gttgaagtactccaaagcagtgccttcaagcctgctgtagcagttcttcttcatttcttctaccgcagatacatagtaaccctattgcattcaatctctaccaattcaaggcacttgatcgctctttattaattgatgaacgtattatattataccacttgacttgcgtgtctaaacacttacaagaatcgntaccagcttanatttctcactcgattcattcatcagagcctggaggagaggttgagctgctgcttgagcaatgggcggaggtactcgtggtacccctccggcaccaccgtctcgttcagagggtccttccacgcctcctcgtacagggccgggtacacgttcccgtcgtaccgccccagcacagaccccaggtagtgatccgtgtagttgaacgcattcctacctagtcgtctaactagtctatttcggtct

SEQ ID NO: 54576 - DNA, 378 bp, Setaria italica
  Peptide Sequence Number=SeqID_120550
ttagtacttttggtcgttgtattgtctaccctagttcgtcctaggtaagttcgcccaggtgcttgtggagaatgtacagcgcgtaaacattgcaaaggttctccagctgttccttcactccatttccagggatgtcttgctgcaccttctccatgaacttggttacaataatcaactggatgtgagctactgcagcctcaagcaaatctggggacctctcatagaaaccttcctcttggcttgatgcttggcttatattctgggcgcagtttaccgccatcctgagagccctggcttcaaatgcctcttgtatggcaacagggttaagccaatcttcggctgtattgacagcacatttgcattgcatcaaatctgtac

SEQ ID NO: 54577 - DNA, 306 bp, Setaria italica
  Peptide Sequence Number=SeqID_120551
ccttcataagtgcaagcaggaacatagacggcaaacaattcaggaagcccactgctgttcaagtaaccatgtccaccacagagctttctgcattcttcaattgcatcagctgttgcagatgttgtcacagccttcaaaccagcagtacaggcatgagcttcttgcagtgttgagtagtcttttagcttccagtttctgagtgacatccgtgtacagccacttgagccaatcaccaacgaatcttaaatgcattattgcttgtaagtcctagttcttaatttggttaaagttagtttctttgttctt

SEQ ID NO: 54578 - DNA, 223 bp, Setaria italica
  Peptide Sequence Number=SeqID_120552
agcagcagttcacacagttacacttcatcatcatcatcatcgtaacgctgctagcagaggaaacagagaccagcatacctgtgcgtaaagcttgcccagctgctcgtttgccagcgctccctgcttgggtgtgatgcacccagttgccaggaagtcgcccaggtgcttgtgaagaatgtaaagggcataaacattgcagaggttctggagctgttccttcact

SEQ ID NO: 54579 - DNA, 163 bp, Setaria italica
  Peptide Sequence Number=SeqID_120553
cgtctccgtcgatcgggagaataaggtgacggcgtgcgcggattcgctgaggaacaattgcttccgcgggaggacgtgcgcggattcgctgaggaacaattgcttccgcgggaggacgtgccgctactaccacccgcctcagcaattgctcctggatatgcgg

SEQ ID NO: 54580 - DNA, 338 bp, Setaria italica
  Peptide Sequence Number=SeqID_120554
ttaaggtaacttaaggtaactaaaagtaactaaccttagtaaacaagactttagtacaataggtacgtacaaaactcgcgcaatggatctgtttagtttgggctgccttattttctattgtatcactaaagggaagcatccttttggtgagtactatgaacgggataggaacattgtaaacaattgttttgatctttttgtggtggactacataccagaagcagtacatcttatttctcaattgttacatccaaatccagagatgagaccaacggcagtatatgtgatgcatcatcctctattctggagccctgaattgcgcctttcgtttctaaggg

SEQ ID NO: 54581 - DNA, 238 bp, Setaria italica
  Peptide Sequence Number=SeqID_120555
actatgatattatcactgtcatcactagttcgagcatttaacttgggtggtgctcaaaatcaaacccatgatgatgctcgatctcatttcatctctcctgatcctaaagctaccaacatgcccactaggaacacttatagatggtttttccccctgttccccatatttctggtcataggttatctgttcagcttgatgtctgcaaacaagacatgtaggcagttcgttattcagctta

SEQ ID NO: 54582 - DNA, 330 bp, Setaria italica
  Peptide Sequence Number=SeqID_120556
ggagcactccacaacatcaggaactccattgagaccctttaagcatgcatcagcaaaaaccgcaccagcatacgccattgacaaggttgcagagccctttccagcctttgcctcaacaacttcagtcccgccatcctgtgtcctcttggtgagagccttgatgtcttcatgagacaattgtctatttggtttgcaggggttgcctgtgagaacagtggcagaaatggtaaataacccgacaatagaaccaaccaaacaaacaaggaaacgttacaacaatacggtaaactaggtaacaattaggaccttacccaagacaataagaaaaga

SEQ ID NO: 54583 - DNA, 148 bp, Setaria italica
  Peptide Sequence Number=SeqID_120557
cctgcaaccaatgcattgtctcatgaagacatcaaggctctcaccaagaggaacgttcacatcggtaactggtacattggccttcccagcatagaaagtcttagcacgaacaacatctagggtggtcacgccaaacaacctcttctca

SEQ ID NO: 54584 - DNA, 259 bp, Setaria italica
  Peptide Sequence Number=SeqID_120558
agcgatttgttatcaacctgatggaaagggagcagtggttggaaccattaccgggaattgtcggttttatgatgcatcagataatctactgcggtttgatacacaaattgcgcttaatggcaagaagaaatcttcttttaaaagaatcattgcttttgagttctgcccaagcaacccaagtaaattaatggttacatctgccgactcgaagatcaaattcttgatggaaccattgtgactcagaattatagtggacttc

SEQ ID NO: 54585 - DNA, 240 bp, Setaria italica
  Peptide Sequence Number=SeqID_120559
acgagcgcgagggtttccctatcactgccatacgcgagatcaagatcctgaaaaagcttcaccaccagaacgtcatcaagctcaaggagattgtcacctccccaggcccagagcgggacgagcaagggaagccaagtatggcttgttctattctaggggtcgagttccactggtattttgttaatttagagcagtagtaatggttgacacgaattattgtgttttcttttgaattagtcg

SEQ ID NO: 54586 - DNA, 271 bp, Setaria italica
  Peptide Sequence Number=SeqID_120560
ctaggcgtgtttcgcaaaaccaaggtagtggacagcatcaagagttaccttgacgggcagggcggaggctatggaagtggcccgtatcctcagcaagggcgaggacctccaccgtaccctggtggtgggatgggtggagcagctggtccacggggtgctggtgttagtggctatggagctggtggaccaaactaccaacaaggtggcccgtatggtgcatccggtccaggtcgaggacccaacaactatcaaggtggctcccgcaatcagc

SEQ ID NO: 54587 - DNA, 261 bp, Setaria italica
  Peptide Sequence Number=SeqID_120561
ccctggtacaacaacttcaagcctccccgtccattaaagagacgagttaaagagttcttcaaacattttgatcggcacgcactggatctgttagagaagatgttgactttagatccatcacagaggatatcagcaaaagatgcacttgatgcggaatatttctggactgatccgttaccatgtgatccgaaaagcttgcccaagtacgaggcatcacatagaaattaccaagaactaaagaaaaaagacgtacaagacaaa

SEQ ID NO: 54588 - DNA, 361 bp, Setaria italica
  misc_feature (321)..(321): n is a, c, g, or t
  misc_feature (359)..(359): n is a, c, g, or t
  Peptide Sequence Number=SeqID_120562
gaggatatcagcaaaagatgcacttgatgcggaatatttctggactgatccgttaccatgtgatccgaaaaggtacaatcagatggatatttgtgttacagtggcacatagctcctttcgactacctccttttccttggattgacttttgacggtttgctaatacagcttgcccaagtacgaggcatcacatgaattccagactaagaaaaagcgtcagcaacagaggcaagcagaagaagctgcgaagcgtcaaaaacttatcatcctccaccacattctcggttgcctccaatccagcagcctggccaagcacaccctnaaatcaggcctggccagggtatgcacaatgcacctccngt

SEQ ID NO: 54589 - DNA, 263 bp, Setaria italica
  misc_feature (250)..(250): n is a, c, g, or t
  Peptide Sequence Number=SeqID_120563
tgttcttacttttgtattgtcggtaattattttcttgggtacttgtattccgttaccatgtgatccgaaaagcttgcccaagtacgaggcatcacatgaattccagactaagaaaaagcgtcagcaacagaggcaagcagaagaagctgcgaagcgtcaaaaaacttaatcatcctccaccacattctcggttgcctccaatccagcagcctggccaagcacaccctcaaatcaggcctggccagggtangcacaatgcacct

SEQ ID NO: 54590 - DNA, 382 bp, Setaria italica
  Peptide Sequence Number=SeqID_120564
tgttcttctgtttgaggactacaaagcgaaaattagcagatttcaatctttcaaatcagtctccagatatggctgctcgtttgcattctacccgtgtccttggaaccttcggttaccatgctcctgagtaattattcaactcaaattcttgaccatcgtttgggcttctcaattaatatttgtaatctactaaatttatctttgttaacaatgcaggtatgccatgactggtcagctaactcagaaaagtgatgtatatagctttggagttgttcttttagagcttctaacaggaaggaaaccggtagatcatacaatgcctagaggtcagcagagtctggttacatgggcaacacctagattgactgaggatactagttga

SEQ ID NO: 54591 - DNA, 256 bp, Setaria italica
  Peptide Sequence Number=SeqID_120565
atattactcttatagttatctcaaggttttaatttcgtctctttctttcatagcacatcatgctccaaacaatttatatgcagcaatgctcactgttttgttttcttccttttctttttgttcattcaaaaggaagaaagggtgttccaggtgcacagcctggcccagcacttgactggatgcagcgggttaagattgctatagatgctgctaaagggctagagtatcttcatgaaaaggttcggccttcgatacg

SEQ ID NO: 54592 - DNA, 378 bp, Setaria italica
  Peptide Sequence Number=SeqID_120566
aaagaaccaaaaggaaaagaaaactaactaaggaacttaacaagaaggtaggtagttaaacaaactacccaaggacaagagcaatagcagctaatgaagcagaagcatcaacatcaatgcaatacactaagaggaggctagatttggaggcaccactagctttggagcaccactggctttgaaggcaccatggagaaggcaacaaatgtggccaagaagatgacaccaaggaagaaacaggctggccagcaaggtgaaaaagaagtcacaagcaaagaagtagaagttacatggccatgaactgttcaagtctggaaactttgttctatgacgtgctgctgctgaaaatgcattagaaccatagtggttactattttt

SEQ ID NO: 54593 - DNA, 362 bp, Setaria italica
  Peptide Sequence Number=SeqID_120567
tgatgaagagtagacaaacaacaaagcagctaaggaagaagctgctattccagccattccagaagaccttgtagatgatatgaatgagacaagtattgatgtacttgacaataaggattcagagccagtgttggattgggacagggacaacccagaaatggcagtggttactatttatccttgcatggttgatttcaggtgcaaataaacaacctggaacacaagtgtgcttcaagaagcagagtgtgtggcacaatggctagccaagcgtgggttgctgaaagggcaattccacttttgaagaggaagtcaaatatgggtgctaaagaagtgaaggatgctttggaggacaagtacagaat

SEQ ID NO: 54594 - DNA, 264 bp, Setaria italica
  Peptide Sequence Number=SeqID_120568
tacaattactaaccagatttttaagtataattttatttataagctagatatttattttatgtgtgttttatgatcatgaactaaagtttgttgcaacgtgcaggtgcaaataaacaacctggaacacaagtgtgcttcaagaagcagagtgtgtggcacaatggctagccaagcgtgggttgctgaaagggcaattccacttttgaagaggaagtcaaatatgggtgctaaagaagtgaaggatgctttggaggacaagtacag

SEQ ID NO: 54595 - DNA, 518 bp, Setaria italica
  Peptide Sequence Number=SeqID_120569
cctgatgttttgctgtagaatttccactaagggtatgaggatgagcctaccatggagaaagctcacgggtccatggatcatcatcaaacttggaagaggtgaatggtctgcctggtggtaaggccaagaaaaaggttgtttatatatcttaccgttaggatcatcagggttgagcattactgagattggtagcggaagaaatcatgttcaggagaaagcatgcctctcatttcaacctaaaaggttgttctctgaatcctggtcaagtaaccacatacacgctaactgccttttagcctgatgtttctgttgaagcggaaaccggcaaaatgtacagggcaaattttcgagataaagaggggagagccgttgttattatgatttatgagacctacaaaggaggcaaggcttcctcttctgaattgccattccttcttcctaaaagtcagtagtctctctagaatgcttacccaatattcacctgtatgcttttcttaaatttcagaatacaacatccc

SEQ ID NO: 54596 - DNA, 379 bp, Setaria italica
  Peptide Sequence Number=SeqID_120570
tcaaacttggaagaaggtgaatggtctgcctggtggtaaggccaagaaaaaggttgtttaatatatcttaccattaggaatcatcagggttgagcattactgagattggtaagcggaagaaaatcatgttcaggagaaagcatgcctctcatttcaacctaaaaaggttgttctctgaaatcctgaatcaaagtaaaccaacaataacaacgactaaactagaccttttaagacctagaatagtttactagttagaaagacggaaaaccggacaaaaatagtaacaagggacaaaaattttacgaagaataaaagaaggggaagggaccgttagttaattaatagaatttaataaagaacctaacaaaaggaagaaata

SEQ ID NO: 54597 - DNA, 250 bp, Setaria italica
  Peptide Sequence Number=SeqID_120571
gttgcaacagagtttggagcagattgctcttcctgaaccgaaagaagaagaggtaagctgcccaccattgttgccatatatgtctagtattcacatataattaagcgattgccatgctcatacctgagctgtttctgattacaatgtacacaggtcctagcggtgccttgtgtattcttcaagtaaatattgccgagaaagtttgtcacctttaaagtttgctgcttttgctagtgccttagctaaaaag

SEQ ID NO: 54598 - DNA, 188 bp, Setaria italica
  Peptide Sequence Number=SeqID_120572
acaacggtttcagaaacaagcgcaaaccagctagcgaacctgctgttttggttgatgatggtcgggtacagcatgcgcaacatcgaggtgcgtttcgacatggagcgggtgctgggggctcccccgaaggttgccgagttaccatctacagtacagtaaaatcccggtggtatgatagctaattaaga

SEQ ID NO: 54599 - DNA, 468 bp, Setaria italica
  Peptide Sequence Number=SeqID_120573
cctcatgtttaattcattgtggtgtgtgacaaaggccttgcagctgctccaccagcaatcatgttcatcattggagtctcctccaagaagtggccaactaacttgtcaagcaaccgtgatgttgtctggggaggtggacatttcacatcatacttcgcacatgcttctatcaaataccgattagcttcatcacttgacagatcttttggtatatcgagattggccatagcctccaaatctttaatcatatctatccttctgaagggaggtgtgaaatcaatttctattgggggatttgtaacaccatttgcatgatattttatcttgtagccacctgtaagctccttaaccatgcctgacaacatggtctcagtaagctccatcaaatcgttgtaatctgcgtaagccatataaaattcacaagttgtgaattcaggattgtgtgttaaatcaatcccttcattcctg

SEQ ID NO: 54600 - DNA, 386 bp, Setaria italica
  Peptide Sequence Number=SeqID_120574
cctgatccctcaaaacataattctcgatgttcctacccattcctggagtccacgatgcaggtgctgcacttccttcacccttctgtcgaggcatcatatgaagacatggagagagcacaacaaatttctgtgggaatacactaagctcgccacgcttgctttttcctggatagccacatatgccaacaatatcacctcgcttcacacccgagtggtacttagtgaattcagcttcatccaactctgaggtcctggcatcagccatcacttgaaccttcaatgaccaaccaaccgtaaaagaatacaataaaaagaaataagacttaaagaaatagaaataagaaataagttaactaacttaagttaacaaataagaaataacctaa

SEQ ID NO: 54601 - DNA, 248 bp, Setaria italica
  Peptide Sequence Number=SeqID_120575
tttaaataagaacaataccaatagtttaatagtgaccaattcaaattcaaaactatgagatgaatgcaagttctacagacctggatagccacatatgccaacaatatcacctcgcttcacacccgagtggtacttagtgaattcagcttcatccaactctgaggtcctggcatcagccatcacttgaaccttcatgccaccaccgtaaagatcataaaagatagcttagatgatgatgttctcttgtt

SEQ ID NO: 54602 - DNA, 237 bp, Setaria italica
  Peptide Sequence Number=SeqID_120576
aaacaaaataagactacgaaatactactcagtcagtccaggtcgggacctatgccacttagctaatggactcattatctctggatgattgatgataaatgttggattcacgcatgtctcctccaagaagtggccaactaacttgtcaagcaaccgtgatgttgtctggggaggtggacatttcacatcatacttcgcacatgcttctgtcaagtgatgaagctaatcggtatttgat

SEQ ID NO: 54603 - DNA, 269 bp, Setaria italica
  Peptide Sequence Number=SeqID_120577
gtgttcattgagtagcaagagtactataccagtttaaatttaaataacggtcgaatccccttagaatcaggttcgatcgcccagagacgaactaaaccatttcctgctcctgatgcagcaagatcggaaccttttcttgcagttacagcactaacccatgactgggccattgacacattttcaggtttatgtattccattttctgcacagtgaaaagatgtaagtaataaatacggactccacaaatataaggaacaaacatatttcag

SEQ ID NO: 54604 - DNA, 267 bp, Setaria italica
  Peptide Sequence Number=SeqID_120578
gcgctcgtagttctggtaatcaaacggagagtttgaccgatccgcgtcctccacctcggctttgcttacgaagctgtctgcaccatccatgagagaccatgtcaccatgaccgtgaaccgtgcactgcacattcccttcagaggcgcatactgcattcgtgtgtgatggaggtcaggtaaaaattacgaaggggggaggagaaccgaccggggcggaggaaccggagaacggcgtccggcacggcggagcccggcaggacggcgccg

SEQ ID NO: 54605 - DNA, 265 bp, Setaria italica
  Peptide Sequence Number=SeqID_120579
gggaggtttcttgccttcttgggttgtggagaactggagatggatggaatggagtgcaatggcttcaaatgttaccttccaatcgcggaatgtactgagcaagaaggtcatggttaagaaggagaatgaggaatccttggacaacattaatctcttctctataattacagtgatgtcctttttcctattggcacctgttaccttctttacggaaggtgtcaaaatcactcctacatttttgcaatctgctggtttggatgtaaaa

SEQ ID NO: 54606 - DNA, 349 bp, Setaria italica
  misc_feature (343)..(343): n is a, c, g, or t
  Peptide Sequence Number=SeqID_120580
cactaacaatctccattagcatctcggatgagatcattccagcaatccccgctatgaaaatcttgtatggtgaatctgcaactacgtcagatattaacccagtctcttcagcaggcttcttaggagctacatttgtagatatttggataattaggcttagcaatcagcatactcaatgtttgctaacaatacatttacttgaaccatgctgtacaagatgtcttcctaatgtttccatgaactgagcaccataaggactctgcctgtctgccagcactgtaatgagccaatgaaatctggaagtagcagcagtcacataataatggcctacaccaggaagtcngcttac

SEQ ID NO: 54607 - DNA, 242 bp, Setaria italica
  Peptide Sequence Number=SeqID_120581
taatacagacaaatcaacccagttacttctgtcaagcagcaaacatactacgtataagtaaataacactgatatttcaacagctaatggtgatggaaagcaatcactgtgaactattgttaggtgtagaagaaaagtctggttcatgactctgacttgaacaccataatactaacagagacctgatgtcacatgtttgcatctgagacacgcagcgaggggataggcaaggcacacgagggg

SEQ ID NO: 54608 - DNA, 110 bp, Setaria italica
  Peptide Sequence Number=SeqID_120582
actgtatctctttctcgtgtttagggagtcaaatcatggcagcacaccttgaaattgtgagtacaggaaactccagcaagtgcaatcgcggtaccagggagttgatagga

SEQ ID NO: 54609 - DNA, 458 bp, Setaria italica
  Peptide Sequence Number=SeqID_120583
acttgataccctggctttggcctttcggaaggacttcatggatatatattccaagtttttgatactctagttgatgatgtagctgaacactttgctaaggtcaaaggtacactgtcattgtgatcttgctagtttctggtgctgtttctttcacaggaatttcagaaacggttgggtacttttgtgaaaaaaattcttaactcaagattaccatttgagtgtaaacatgctattgtttcttcttgttaggaaatcctgaacatagaggtctgccaagcttcctatttggtcaatctatgggtggagcagttgcattgaaggttcacttcaagcaaccaaatgaatggaatggtgcaatactagttgcacccatgtgcaaggtagttctatctttgtagaatgttatttatataagttaatgcctaaccacttaatcacaacatcattcaatagattgc

SEQ ID NO: 54610 - DNA, 251 bp, Setaria italica
  Peptide Sequence Number=SeqID_120584
tattgaatcatgcagtgccgcccatcaggattaggtgaatttctttggcgttgttgtatgccttcctgtcggggatcccagatccaacgcttgagaattttcatttttgcgacaaccttgtaaaattctagttctgattatttatttgtacatcatgtatctgaacaatgtacataactgatccacgtgtatttatttaccacgaattatttaagaaaaattcagttaagtaaaaaaaaaaaaaaaaaaaa

SEQ ID NO: 54611 - DNA, 252 bp, Setaria italica
  misc_feature (62)..(62): n is a, c, g, or t
  Peptide Sequence Number=SeqID_120585
taggtgcaatactagttgcacccatgtgcaagattgcagatgatgtggttccaccttggccngtttggcaagtactaatttttgtggccaaaattctgccaaaagaaaagcttgttcctcaaaagatttagctgagttggcattcaaagagaagaagaaacaagagcaggataaaccacggctccgaacagctttggagatgctgaatacaacacaagagatagaaagatgtctggaagaagtttctctgcc

SEQ ID NO: 54612 - DNA, 249 bp, Setaria italica
  Peptide Sequence Number=SeqID_120586
caagctctcaatccgcgaccatgagtcagatctgctttgtgttgacccccacccttaccaattatgccgccagcaagggaggcataattggtaagggtggggtcaacacaaagcagatatgccgagttgccggtgtcaagctctcaatccgcgaccatgtgcaggtacccttcacgaagttctcgcatagcttcgtcttgtagttgctcctgcccccggggcaccccctcggcctcctgctggcgcagg

SEQ ID NO: 54613 - DNA, 258 bp, Setaria italica
  Peptide Sequence Number=SeqID_120587
tattcgggtagtcttagggtttccggtcgtcgtccttctcccagacgcgacgcctggccatggagggagccgccgcggcccggaagagatcccggccggagacggccaacggggtcgcagccggtgggaagcgctcgaaaggtgaggcatcgtgctcccatccgttccgcctcccgtgcgcctcagttttttgctgctagatgttggttgtttatgcgtgtgcgagatatgcgactggatctgccggcagctgtgcac

SEQ ID NO: 54614 - DNA, 460 bp, Setaria italica
  misc_feature (189)..(189): n is a, c, g, or t
  misc_feature (368)..(368): n is a, c, g, or t
  Peptide Sequence Number=SeqID_120588
tatgcttctgcaaattataatgtatgcgatgcatagctcttagaattttctggtattgctacgagcttatctgtttcttctgatactgatgaattttttctgtttatacatttgctgattgaaagggtttgttgttattgttgcttttgctgctcctgctatacgtttgctgattgaatgcattttccngttgaatatgaaaaaagggaagctctcaggaagtagtttattcttagactcggtccatttcatcggaaacactgggtgctaagacaataatgattaaattgacaagtttgactattggatatgaaacgacatttacttttgtaatagtttatctcagttcatatcacctgaccatttanaactaggccacaatactgtgcctgcaggtgtggttgtttctattgaggagattaaatcaactgttactgatgttcttgaggagaatatggaa

SEQ ID NO: 54615 - DNA, 394 bp, Setaria italica
  Peptide Sequence Number=SeqID_120589
atatcttcaaataacttcagcgactcctcaatgggcctatctctccatggactattgaggagtcgctgaagttatttgaagatatgagacatgggttgattgctgagggaaaggctactctccgaatgaagcaggacatgcagaatgacaacaagaacatggctgacttaatagcatatagaataaagtttacacctcatccacatgctggagacaaatggttcatctacccaagctatgactatgctcattgtttggtagattctcttgagaatattacacactcgttgtgcactctagaatttgatatacgtcgtccgtcatactactggttgcttgtagccttgggccaataccagccatatgtctgggaatattcaaggctaaacatatc

SEQ ID NO: 54616 - DNA, 474 bp, Setaria italica
  Peptide Sequence Number=SeqID_120590
agaagtgataatagcttgattcaagttgaacgccttgaataccatattagagaagagcttaacaaagtagcccctcgagtctttgggttgttttgcatcctctaaaggttctgtgtaaactatttcccaaatccttacttttttcttactttgttaatcgcttaactgatgaactaatcatttttcattgttttggtggatataggttgtcataactaatttagattacggaacgataatgaaccttgatgccaaaatgtggcctaatgctcctgacagtgatgcttcagcccactataaggttccattttcaagaacactctacattgaagaatctgatttccgcctaaaggattcgaaagatttctatgggcttgctcctggtaaatcagtaatgctgaggcacgcattcccaataaaatgtgcggaggttatctatggagacaatccggatagtattgttgaaatccgagc

SEQ ID NO: 54617 - DNA, 361 bp, Setaria italica
  Peptide Sequence Number=SeqID_120591
cttaattaaaacagctctcgatcgatggtgttttgcgccctctaaaggttgtaataactaacttggaagaaggaaaagtaatggatcttgatgggaaaatgtggcctgatgcttctgatactgatgcttcctcccactacaaggttcctttctcaagaactgtctacattgagagtactgattttcgcctaaaggactcaaaagattactatgggctagccccctggtaaatctgtcatgctaaggtatgcattccccataaaatgcacagatgttatctacggtaatagccctgatgatatcgttgaaattacgaagactagaaataatagaatacctttagaaagaacttactaaaaca

SEQ ID NO: 54618 - DNA, 450 bp, Setaria italica
  Peptide Sequence Number=SeqID_120592
ttgtttctaacctaaagttcttaaaattgaataattctccaaatcacatgtaaaattgggcttgatgatttcggtaccattttgaactaaatgaattgttttctcattgccaccagtgtgttattctgctgatcttcccaatttctaatatcatgtcttcgcagtcaatggaaatttctgtgctatgtatttaggtcattgaattttacctttttctttgaagtcttagtttcactgttgaaaatgagtaatgaagcataacttgtttctcttggtcagagcattcacagtttctgagcttaggaagaaactacgaagtaagaattatcctgttgatgcaattgatgctgtggttgctgatttcaaatcaaggtaagactgtttttctatggattaaagtcacactagtagacgtacgactcttcactttgaccaaatgaccaatagttg

SEQ ID NO: 54619 - DNA, 396 bp, Setaria italica
  Peptide Sequence Number=SeqID_120593
actgaatgacgtgatgtgcggaattagtgaaagcgtggtgcgagatgtggggaaggctgcaattgaattgcttgctgccagagcattcacagtttctgagcttaggaagaaactacgaagtaagaattatcctgttgatgcaattgatgctgtggttgctgatttcaaatcaaggggtttgctgaatgatggtttttatgcggaatcattttcgcgatcccggtggatgtcatcgacatggggtccaaggcgaataaaacaggtggtgtttggttggctcaaatgtaacgtaatctgattactgaaggcacttcgccaaaaagggtgtgccagaggcagaagtagatcaggcaacaagaagtgtgttccaggatggtgatggccatgggaaagagg

SEQ ID NO: 54620 - DNA, 324 bp, Setaria italica
  Peptide Sequence Number=SeqID_120594
ctcatgaaatacatatataaactattttgtaatttgacaacacccgctctcaaattaggcacttcgccaaaagggtgtgccagaggcagtagtagatcaggcaacaagaagtgtgttccaggatggtgatggccatgggaaagaggcaacatatggcatatcggaagcttccatggatcatctgtttgctcaggcattaaaacagtggcagcgtgggcaaagcttgactctggagaatcgccgtgggcgcattgtgaggtggcttcagtaccgagggttcaactggtccgtgaccaatgccatcgtcaagaagttggaggctca

SEQ ID NO: 54621 - DNA, 231 bp, Setaria italica
  Peptide Sequence Number=SeqID_120595
aagacagcagggcagcgctgagtttatagggtacccaagtaaaagttacattcctcactttgaatcttacttttacttgggtaccctgtaagacagcagggcagcgctgagtttatagggtacccaagtaaaagtaagattcaaagtgaggaatgtaactaaggatgattatggtacagcaagtgctgtttaggattatttgattgtttcttatgtgattgtacataagtg

SEQ ID NO: 54622 - DNA, 398 bp, Setaria italica
  misc_feature (157)..(157): n is a, c, g, or t
  Peptide Sequence Number=SeqID_120596
ggtcgacccactgaagctggagctctattccccgcactccacgttctttagcctgacaaccaggtcctgcttcaccttcccctcggatacataaatcgagctctcctctgctaggcagttctctctgttgggcaccactttctttacaatggttttntcgggaacatcctggagtttcatcttcacaacgtcgaccaatgggcggatgtccagctctgcattacccattgaatcgtccacaaaagtgtccttgtcaaacacttccaatctgacaggatctgcagggttctcaatggagagggtgagttcttcgttccattccggattggtgctcttctttaatacaacccgtagttttacaaacttactagacttagaccgaatagacggaacgaaca

SEQ ID NO: 54623 - DNA, 268 bp, Setaria italica
  Peptide Sequence Number=SeqID_120597
gtcgggaacatcctggagtttcatcttcacaacgtcgaccaatgggcggatgtccagctctgcattacccattgaatcgtccacaaaagtgtccttgtcaaacacttcctggaaatttagaaaggaaaatcacttgtcaatgcgtggtaaccgaggacataagttcatctctcgcttcaagagaattggttaacgaaatcatagtagtagtggtcctataatagctggttatagcccatcttcttgaaggaattgttaagtgtttcaa

SEQ ID NO: 54624 - DNA, 396 bp, Setaria italica
  Peptide Sequence Number=SeqID_120598
tggtgttggtagtgtgcttccgtctaccttcttctgagttgattggcaaatggggtgtatatggaaacacatgcagaattgataggccttgtgtggtggatgagatccatcttcgaagatttgatggcctcttggaacatgagggggctcacaggtgtgtttttgctagtatcactgtgaaagcaccagttcgagagatttgtgccaaacctggctatcagtaggattgtccttcgtgataataacaaggtccgcataatgcaggagggttgcaaaggcctactgtatatggtccttcatgcccgtgttgttatggatcttcgcgaaaaacttgaggaagagatcagctttgaacaagttgagggtgatttctactcattcaaagggaaatggcgc

SEQ ID NO: 54625 - DNA, 235 bp, Setaria italica
  Peptide Sequence Number=SeqID_120599
tagttaaaacctaattacttactttaattactatttttgtattgctaggtcactgctttatgatgcaatttttttgcatttattgttgaaatataggtttcttcaaagcaggaggttgtcaatgctcttgttaaagaacaattttctgtggatgttgcacagtgggtggccacaaatctacgtcggagcagtccattaggtcagcgatcatcttcaagcttctcatggacttttg

SEQ ID NO: 54626 - DNA, 243 bp, Setaria italica
  Peptide Sequence Number=SeqID_120600
atttgcgctgccatggcgactcagcatcaattaagaagcgcggaccacacactgttgcctcaactgctcttgatgttctaaagctggtagtgcagctcaggctggcccctcgggttttggttggtcacagctttggtggaaaagtggccctgagtatggtagaacaagctgcaaaaccacttgctcgtcctgttagatgttgatcctcaaaaggtatgggtccttgatgctactcctggcaaa

SEQ ID NO: 54627 - DNA, 126 bp, Setaria italica
  Peptide Sequence Number=SeqID_120601
aatacaagacctagaatagttggcaagcatgctggagttctggcctatgaactggtccaagggagccttgtaagtttttgctttaacttcaatgaccggtcattagttgtacactagctcaatgtt

SEQ ID NO: 54628 - DNA, 252 bp, Setaria italica
  Peptide Sequence Number=SeqID_120602
cgatattggttttcttcttaccctcgactacagtttcatcttccacctcgcgctcctcgacctcgactaattgagtttcatgagccagtaacacgccatcaaatcgctcttcgtacgagaagaggagcgcgctgagctggcggcggacggcgcggtggacgtcggcggcgttggaggggtgcacgtacaccgtgagctccgcctccgcctcccggagcgcctccatcgcgggcggcggctggcggcggggag

SEQ ID NO: 54629 - DNA, 255 bp, Setaria italica
  Peptide Sequence Number=SeqID_120603
atgcagtcatgcagtgcaaggaatctctatcctggaagattatcatccatagccctgctaattggattggtgttaatggttctagtggattggtttaagaatggagctgcgtcaatttggtgggatccaaaccaggggttgcaggccaattaggcactcgggctgtcgggcaggtccacacgccactgcaccaggcgcaagcgaggcggaggtggaggtgtgagggagtcctggcggcgatggcgggaccgcggg

SEQ ID NO: 54630 - DNA, 277 bp, Setaria italica
  Peptide Sequence Number=SeqID_120604
attatactattggaagaagagatgactttgctagaccagaatatttcaatggccaaaatgcgattgtagcagttaatgttcatcaggggtttaaccaagaggattccttggttatgaatagggcttctcttgaacgaggtatgtttaggactgagcacctcaggagctataaggcagatgtagaaaacaaggatgtaaccaaacgactgaaaatgaaggtaagccatcatcattctaagtatttgttcgtactacgttccttcttttttgttctttt

SEQ ID NO: 54631 - DNA, 347 bp, Setaria italica
  Peptide Sequence Number=SeqID_120605
ctcatcaagcaccaaatttttgcctgcttgagcagcgccctacccagtgcaatagttggcgctgtcccacactccagttatcccattttctagcactggactgtcaagtttttcttccttggaacgaatgacctctcctagctgacacttctctagtgcctcccaaatttcatgatcagcacgctcttcaagaggatcaagattcattcttatagtaccctcaaacattgacatttctgcaattggcctccatgatttgcggtcacggttgagcatcatcccacaagaccctacattgtttgagggtactataagaatgaatcttgatcctcttgatcagcacgctc

SEQ ID NO: 54632 - DNA, 310 bp, Setaria italica
  Peptide Sequence Number=SeqID_120606
actaattacctaacaaaaagaattgacaccaagcattagtaatattgataacctgaaaaacaaggtgcacgaaaatgtccatggtttcaatagcttccttatgagcggaaaccaaagcgttgaagtcagttccagcttgcagaagatcatcgtactttccagcttgggtgatatggccatccttaagaaccagtatcagatcagcagctggtagaaactcaacttgatgggttacataaattactgtttggtcgctaatgcactcagtatgtactccttaaatagttcgctaccggtatgtgcatgacag

SEQ ID NO: 54633 - DNA, 384 bp, Setaria italica
  Peptide Sequence Number=SeqID_120607
cagatcagcagctggtagaaactcaacttgatgggttacataattactgttttggtcgctaatgcactcagtatgtactcctgcaaaacagaagcagaggcattatgcaatagaaacagcttcagaaacaattagaataaggcaacagtggtaccaaccttaaatagttcgctaccggtatgagcatcgacagcactgaagggatcatcaagcaaataaatgtcagcatcttggtagagtgctctagcaagctggactctttgtttctgacctccactcaaattaatgcctctatcaccaataatagtctgatctccgtattggagcaactcaagatcttcttcagagagcatgccgcaatgactctcttgtaacgttgtctat

SEQ ID NO: 54634 - DNA, 246 bp, Setaria italica
  misc_feature (17)..(17): n is a, c, g, or t
  Peptide Sequence Number=SeqID_120608
tttccagaaccaattanaccacagactgccactctcatacttctcactacactaaggtgtataccagaaagtgtaggggttgggagagtatgggttccaagagaaggaaagggaacgaggaagagttagcttaaatgtttatttgtcgtacatgggggaagcctacaaaggtacactgataccgctaattatcttggctcaaaccatgttccaagtgcttcagattgcgagcaactggtggatggc

SEQ ID NO: 54635 - DNA, 232 bp, Setaria italica
  Peptide Sequence Number=SeqID_120609
tcaacttatcttggtagtgctcctgcagctttgccacaggaacagaggctgcaatcgatagcacagttgctatcaatgttgaaaccatggcgatcccaacgttcttgtacaggatggcgagggcaagaatgatcactcgtgtggctctgccgtgaggcgttcgacagtcggagccccttcctatacaccatggcggtaagcccagacttgacatggattcccatgatgtcca

SEQ ID NO: 54636 - DNA, 312 bp, Setaria italica
  Peptide Sequence Number=SeqID_120610
aagatccttcacccagtcaggcttgccctctgcctccttccacagcattctcgagttcaacacaaagccagcccactctaaacccctgggcagaacaggggctgcctcgccaaccactgtggcagtcttcccagaaaacggcaatgagttgaatgtgtgccatccagcgagatgcccagaggagttacaagctgggccctggactggaagaggcatattctgcttgtcctcctcgctagaaggacgtaggttagttactagaccgactaccaagtagtagtagacaaaggaattaccaaacggaacaacgga

SEQ ID NO: 54637 - DNA, 257 bp, Setaria italica
  Peptide Sequence Number=SeqID_120611
gagaattgtactggccttgtaatgtatatctcttacacctgcaaaacacagtaggaagcatatatctggttaatctggtggtggttcggggccgagatgatttgttggctcttgacaaccgcctgtcctcctggtctttcttgtcattcaacaactcggatggaagctcattggtggtttcaggccacggagtgcgttttgcaggaacaacgatgtccaaaggtggctctatcacccaccctgaggaaacttgctat

SEQ ID NO: 54638 - DNA, 240 bp, Setaria italica
  Peptide Sequence Number=SeqID_120612
aggctacacaaattctgtattgtgactacacaaattaactatctgcattaccaagctgccttaacttgacagatgtttctatgagattgtgcataggctgtagagactgaacgggtgaaatgaaatcatttagaagaatgagtacagaaacagctaaatatatggcaccttttggtccgccaatgtctttgagtcttccagcacatcattgttagccaacaagaccaactgctgattacg

SEQ ID NO: 54639 - DNA, 246 bp, Setaria italica
  Peptide Sequence Number=SeqID_120613
tttttttttttagtcaaccaaagaaaaatttatgctgggattttatgcaggtacagggattaagaatacacaggcaaaaaagggtaatgtctactgtcttgtgtctatcgtatttcactatttctaaatcctatttggttctctctctgcattttgtaatgtatgtatagatgcgaaaaactgaaaaatgcaaacgcaaaaaaaagaatgaacggatgtatagctactgctgcgtgtgggtgttct

SEQ ID NO: 54640 - DNA, 262 bp, Setaria italica
  Peptide Sequence Number=SeqID_120614
tccgtacgtacctactaagtagtccttccttctattcccgttgtctcgtcagcccggcgccgtggacgggcatgtgcagcctccgccgccgcagccacagttggcgcagggggaggagcatgaagggatgctccagctgccttcggcgcacaccaagaagaagaagaaggtggtgaagaaatggagggaggagtgggcggacacctacaagtgggcctacgttgcggtgcacgacaacaccaccaggattttctgctcagtg

SEQ ID NO: 54641 - DNA, 224 bp, Setaria italica
  Peptide Sequence Number=SeqID_120615
ccgaaatagctgattcaacacagtattcatatgacaggaataaattacatatattgatgcgacggcccaatgggtgacaacaacctaaagagactaccttagatggactatattatttggtttctcctgttacaccaatctggaacttctggaatgttatttgtgtctacgaaacacttgggctagaggagttccgatcagcattttccatagcttctgctcac

SEQ ID NO: 54642 - DNA, 288 bp, Setaria italica
  Peptide Sequence Number=SeqID_120616
gcctgcgaccggacatagtcaagcgcccggaggaagaggtcgtagcccctctcagtgaagttcttgaggtagaacacaaggatgtcaccagcgttggcgcgcaggtactgcagtctcgcctcgatgttgggctggtactgcatcaccagtggctggaggaacgtctcgtacacgatgtctgttccctggttcataacagaatgatttttttttcagaattcagtcaattatattggaaggcacactatggttcaaaaaaataattctgacatagatcaacagattgcg

SEQ ID NO: 54643 - DNA, 238 bp, Setaria italica
  Peptide Sequence Number=SeqID_120617
cgcaggtactgcagtctcgcctcgatgttgggctggtactgcatcaccagtggctggaggaacgtctcgtacacgatgtctgttccccttgtctttgggtaccacaggtacacgaggaaggcaagcttgagctcgtagtacattggaatcctgttattggaatggagggaattgtcagaccacaaccaattttcttaatgaaggtatggttggtgttttggtgattacttggaaatca

SEQ ID NO: 54644 - DNA, 356 bp, Setaria italica
  Peptide Sequence Number=SeqID_120618
acttgtgcataggagaaaaaaatacttatttaggggtaaattgggccgattgatatagttgtgggagtaaataagtacggcatgcatggataactgacctgtctctttgggcacattattttgatgaggaacattagtaggtgtagtgttctcaactggttgttctgaggaatttgggataccagatggaaccagatgtgctaaatcaggaggactatccttacccacagctggtgtatcctctaagttcacatatgccggttgtttcccaatggagatgagaaacttgtccagattgcttgagcttaagagtctaatttgttctacatcatttgtcagtggatggaagttagcta

SEQ ID NO: 54645 - DNA, 322 bp, Setaria italica
  Peptide Sequence Number=SeqID_120619
taaggagcatcatacataacaggttgatttcattcaatagtcaatagcatataaaaatgtaaatcagattcccgtctcttgtatcaaactatcaaatttagtttcgagagggtcgggcgtttaaaacatggttcaacatgctttcggaaccagcgtgaaaccctgaggtgtatgatgcattcttcagactcgtcgttatactctccaaatctggggcagcccgtcccctaatgccatctatgattcgtaggtaaagtcttctttcctttctttaactattcctaattttctttctaattgtccttctagtactaacaactaa

SEQ ID NO: 54646 - DNA, 234 bp, Setaria italica
  Peptide Sequence Number=SeqID_120620
gtttcttgggcccttgctctgaactttaggcttaaccttcacttctgatcatggacaaattgtcatgcttgactgtctctttgggcacattattttgatgaggaacattagtaggtgtagtgttctcaactggttgttctgaggaatttgggataccagatggaaccagatgtgctaaatcaggaggactatccttacccacagctggtgtatcctctaagttcacatatgccg

SEQ ID NO: 54647 - DNA, 215 bp, Setaria italica
  Peptide Sequence Number=SeqID_120621
gttcctgttggactttacgcagtacaaggcgagaacatatttcctgaaagacctgaccagcctgagtgccagttctatatgaaaaccggagactgcaagtttggtgctgtttgcaagtttaatcaccctaaggagcggctgattcctgctccaaaactagtagacaattaaagtaccaattagggtacttaccaacttacgtaccgggaagtaaa

SEQ ID NO: 54648 - DNA, 438 bp, Setaria italica
  Peptide Sequence Number=SeqID_120622
aaaaggacatggctgagcatcaagaaatatgttgatgctggaatcatcaaaggtgctaggtgctcatcagggttacttcaaatgcagtgtgttctcatacagaagaataagcagctgataagtttcacaatgatgcgatttaacaaatattagaataatatatcattcagaaagtccagcatgaattgaataggatgagacaaaaaataaactgaagatattcacagacgtagaagtgttgaaaccaaaagttgcacatcctattgattgtgataaaattgaagctatattttccagagagaaaggcttcagtcactgccacaaaagtacaagacaaagtaaaacactctccatatgcaagaataaagcatgctactaaccatctccaatgtttaatgacacacgagggtcctcaaatccaacagccagattgagggt

SEQ ID NO: 54649 - DNA, 357 bp, Setaria italica
  Peptide Sequence Number=SeqID_120623
tgtcgtactaatttagtctaacgtattgttctttctaattgtattgttgtctattattgtctagtccattatgctctctgcctgggtgcatacaactccgcccgggcgtaaagctctggccacggactggaagaaaggcttctcaaaaaagctcttgggccggacctatcggatcagaggaatccacaatcactgcatcataagtaccctctggtacatttttcaaaaaggcaaccccatctccaatgtttaatgacacacgagggtcctcaaatccaacagccagatgagggaaaaattgacttggacacaatctaccaccatcttgtcaatttcacaaatgtcaatttgttccac

SEQ ID NO: 54650 - DNA, 242 bp, Setaria italica
  Peptide Sequence Number=SeqID_120624
actccacctaacaactgcggcgaagttttagcgccagcgaagaggccgcgggcgggaggatcctgagagcgagcgaggcaatccgcgtccttctctcccccgcagcgggtgtccatgctattgatgacggcggccgtcgcagatggccaccaagcgagcctataagctacaggagtttgttgcgcatgcttccaatgtgaattgtgccaaatttgggaggcggacatcaaggatcctcatca

SEQ ID NO: 54651 - DNA, 291 bp, Setaria italica
  Peptide Sequence Number=SeqID_120625
caacccacctcaaggatttgaccgctacaactgggttgttctcggcctgagtgtcccctgatggatacgagtggcgaccatggaatgatggcggttttgaaagcattggaggccttagtggggtttgctccctggactggtggtaacgggagcgttcttcacgatcttgcatgtgaggagttgaagtgggtgaaacgcctggccttggaggagctcgtgcagtagacatttcaaaaccgccatcattccatggtcgccactcgtatccttgaggtgggtttgtttcttcgt

SEQ ID NO: 54652 - DNA, 268 bp, Setaria italica
  Peptide Sequence Number=SeqID_120626
accactccttggggtgcgaggagtaggggtgggacgagtagcgcgatgcctcgagggcctcttctaggtcgggctgtgcggcggcgtcgcggccgatccgctccgagacgtgaagccccgccgaggccacgtcggggccgatggcctcgtcctccccccatgccatggtcggagcgccgcggcacaacgcggcggtgcgggagagcggcttacctcccacaatactatcaaccaggagcatccgaacccaatacagttcaaatatcaa

SEQ ID NO: 54653 - DNA, 374 bp, Setaria italica
  Peptide Sequence Number=SeqID_120627
gtgacacaccacaggttggcccttggtgctacaatccatcgggacttcagagaatccctgatcagccaaaaatgcctctctactgccctcggtccatgtagtcaacaaatggaaatatcaacccctgcttcacccacacgtacttcttctcatcactgaactctgtgcaccagccaaatagcatcacacaaagcacagagacaccgcgaggctgtggcggcaatgcctcagcagcagcctcctgagttgggtcaaccaccactcctggccacatcggttgccgcttgccaagctttgcccacacaatgtctccatacacaaactcttcagtacaaagtaatgcatccttctcctctttccttctaattaattta

SEQ ID NO: 54654 - DNA, 196 bp, Setaria italica
  Peptide Sequence Number=SeqID_120628
catcttgttgagcgccgcggcgatctcggcgcgcgcggccttcatgatggcggccgccctgctcctccagctgcttgacctcctcggaggcgtccttgacgtcgccaagctcgccgcggatcttggcgtcccgctcgtccatgtaactttgtccgtagtcggtcgttgtaagttagtagtctttgttcctagtcgt

SEQ ID NO: 54655 - DNA, 247 bp, Setaria italica
  Peptide Sequence Number=SeqID_120629
actactcctcccacctcgtctccggcgggcgatctctccgatcagcccccctcccgccgagatcgagcgatgctccgtggcgaggtgaggacgcccttattccgcgctgttgccgtacgtgagatctcggggtggccatctcgcggcggcgacatgccgtctctgcagctgctgcagttgacggaccgcggacgggggcttctggcttccaggaggaggactctcgcggttgtttctggcgcgctga

SEQ ID NO: 54656 - DNA, 267 bp, Setaria italica
  Peptide Sequence Number=SeqID_120630
cgagcaattcgatcggagaaagcgaggctgcgagggtttgcttgcacgggtggttcttctggtcgccgggcttcatgcgggacggcgaccagaagaaccacccgtgcacgctacctacgcaccgccccccgcgcctcctcagatgcaaaaccgaacaaagcaagccccaagcctagatcagacgaggaggaggaggaggaagccgaggccgagacggaaccgcccgccaatcagaccgaaccgagccgctccgctctgaaccgatcg

SEQ ID NO: 54657 - DNA, 382 bp, Setaria italica
  Peptide Sequence Number=SeqID_120631
aatagaactatagaagagaggtaaagaactaccggatggaggaaaatgaaagaattcagctacacacacacaatgaagacttcagcgagtaaagaggctcctccatcacatcgacgactccaccacatggatcatctgcaagccatgttagagagttcatgaccatgatgagtaccaatgtgcaaagaaaaactaggcacggtagggtagttcacatgcattgtatcatgcaagccagggctaaagaaaaacaaatatgctaaagcacttaccttgacagagacacaaagagtcaatatcacaagtctgggagttgctcttcatcttcaccatcccctttgctatgtacaaatccgagctgggcctctgacttaaggctccc

SEQ ID NO: 54658 - DNA, 155 bp, Setaria italica
  Peptide Sequence Number=SeqID_120632
acttttacagtcaaaccacattacaaacgatgagcaagaaaaaggtacgccagcttaccgcattggtgatgcctctttgcaatttgtacagatgaacataggttccaatttgacctgcttctgatgtcccatgtggaggaggtataatgcggaaa

SEQ ID NO: 54659 - DNA, 118 bp, Setaria italica
  Peptide Sequence Number=SeqID_120633
taatttaacacttggattgttatttacagcagcactactatcatctactacatatttactgatgatggtggtttcagtaaatatgtagtagatgatagtagtgctgctgtaaataaca

SEQ ID NO: 54660 - DNA, 212 bp, Setaria italica
  Peptide Sequence Number=SeqID_120634
atcctttctttgaacaccagattcaagaagcttaggagactcttgggtgagatttacatgaattatcctaagcttcttgaagctggtaagaagctggatatgacatattcagtgaagtgggtcgcaacagatgtgtcatttgcacgtcgttttgaagtgtacctggactatcctttcattgaaaccaaaccagttaggaaataaccatcata

SEQ ID NO: 54661 - DNA, 202 bp, Setaria italica
  misc_feature (8)..(8): n is a, c, g, or t
  misc_feature (27)..(27): n is a, c, g, or t
  Peptide Sequence Number=SeqID_120635
caatagtnaccatctgtgtcactattntgggtactattcttgctgaatgccgagaactatcattggcaatggactcgtttttctctgcagcatcaactgctctgtacgtgtatctatactccatctttgtcttcacatggtagtagtagatggagtatagatacacgtacagagcagttgatgcttgtctagtagaaaacga

SEQ ID NO: 54662 - DNA, 250 bp, Setaria italica
  Peptide Sequence Number=SeqID_120636
tcaatgtgtagccaaagtagaacttgtctggaagaagcctgacatctttgtcttcacatggtagtagtagatggagtatagatacacgtacagagcagttgatgctctgccttggtctaggcatactttgcggtgctattgggtatgtagggtcaactctctttgtaaggagaatctacagaaatatcaaatgtgattaaattcctgctactcactatcatacgcaagcaaggcctcgaaaatggatcat

SEQ ID NO: 54663 - DNA, 237 bp, Setaria italica
  misc_feature (192)..(192): n is a, c, g, or t
  misc_feature (204)..(204): n is a, c, g, or t
  Peptide Sequence Number=SeqID_120637
ttggttcttatttttgttcttacggttcgttttttgtaagttttactttggtacttacccgtttcttttgtaactattctagtatttcacttggttctccatcttcaactcgttcatgatggttattttcctgacttgggttttagtgtcaatgatattgatgaggacactgagaaatgattatgcaaaatntgctcgtgaagntgatgacttggaatctcttgagcgagatgttaa

SEQ ID NO: 54664 - DNA, 392 bp, Setaria italica
  Peptide Sequence Number=SeqID_120638
actttgtgttcacttccttctggaactacaaggtaaagaaaactatatgttggtgcatgctccaccactcagaagtaccttttattccaataactgccatttgtgaaagatgtgcactactttcttaattacagaagtttggttgccaagtaaatttttctatatgtcaatgttcagttctcttagtttgaggaatattaagatcgtctcttttgttgcttggcaggtgtactatgtttatggtttcatgctgctggtgtttgtcatcctcataatagtcaccatatgtgtcactatcgtgggtacttatttcttgttgaatgctgagaactatcactggcaatggacatcattcttctctgctgcttctacagccttgtatgtatatttat

SEQ ID NO: 54665 - DNA, 345 bp, Setaria italica
  Peptide Sequence Number=SeqID_120639
ctcccaacaacccatgccgtgtgaaaacaattccacgtcctattcctgaaaagaagtggtaccttacaccttctgttatttcattgatgggtgggcttctcccctttggcagcatcttcattgagatgtactttgtgttcacttccttctggaactacaaggtgtactatgtttatggtttcatgctgctggtgtttgtcatcctcattaattagttctacctattattgttgttctacttattcgttgggtaacttatttcttagttgaaatagctagaagaaactaatacaactaggacaaatggaacaatacaattacttactactagactagacttactaa

SEQ ID NO: 54666 - DNA, 405 bp, Setaria italica
  Peptide Sequence Number=SeqID_120640
ttatttatttattttattttctttattttgttttgttaagttacttaaagttatttgtttcttaggttctttctttcctagtactaagtcttttactttggttacaccctgatgttctgtcttggattggggatactttgtggtgctgttggctatctgggctctactctatttgtgaggagaatctacagaaatatcaaatgcgactaaatttctgctcattgctgatagaggctgttcacaatcatatcttgttgcagtctggtgcagagtaatacttgattctgattaacttttgaaaccacacaggaggtcgctctccctctgtttactccttttttggcttatctatttcctccatggaactgccctgataaatgtatacctattagttgggggaattta

SEQ ID NO: 54667 - DNA, 387 bp, Setaria italica
  Peptide Sequence Number=SeqID_120641
accatgtgaagacaagatgtcaggcttcttcctagacaagtttctactttggctacacattgatgttctgccttggtctaggcatactttgcggtaagctctcttttttaactgaacaacgtgcctttgttatatacgggactgctttagtttttgactcctgactcctgctttttccccctgtgattcaggtgctattgggtatgtagggtcaactctctttgtaaggagaatctacagaaatatcaaatgtgattaaattcctgctactcactatcatacgcaagcaaggcctcgaaaatggatcatatgtattgtcagtgcggaagcaaggcctcgaaaatggattaatggtagatcctgaataggtttttgaaactacagagg

SEQ ID NO: 54668 - DNA, 390 bp, Setaria italica
  Peptide Sequence Number=SeqID_120642
ccctgtcccctccgacgggcccgcgggcccctcccaccttgctgcgcgcatgctctgtcactccccgatgagaccatcacaaaagttttctttaattatttatttattatcataaataattaatccttgtgccgtagattggcaccatgcatcttgctgtgtcatacgtacttatatgtgtgtgatggtgaaactaaactaacacgtgcatgattaaacatttcgcatggatgctgctgctgctgcatgatttagttaattttactcatggtgtgtgtgcagaagtaccggtcgcacagaaagcacctgatggctcgggaggcggaggccgccacctgggcgcagaagcggcagctgtacggcggcggctacggtggccgtggaggcggc

SEQ ID NO: 54669 - DNA, 161 bp, Setaria italica
  Peptide Sequence Number=SeqID_120643
agcagctgggcatcgacaaggccgtgccgtcacggatcctcgagatcatggggatagagggcctcacacgacacaacattgcaagccacctccagaagtaccggtcgcacagaaagcctgagacacgcaacaggggaaaggcaaggcacacaggggatagg

SEQ ID NO: 54670 - DNA, 322 bp, Setaria italica
  Peptide Sequence Number=SeqID_120644
ggccgtgatctaaagaagttcctaatcgttattgcaggttttctggcttctttcagtccttggtagctgctgcaatttcctgacattgttttacattgtctttgtggtgctgtacactgtgccagtactgtatgagaagtatgaggacaaggttgatgcttttggtgagaaggctatgattgaactgaagaagtactatgccatcttcgatgagaagtgcctatcgaagattccaaagggccctttgaaagataagaagctacttagtatttggttacttaaggtttcttcgttctttatttgttaatttatttgttattta

SEQ ID NO: 54671 - DNA, 220 bp, Setaria italica
  Peptide Sequence Number=SeqID_120645
actaaggttctcgctatgaatatgataaatcacctttggttttggaaggatgattgaactgaagaagtactatgccatcttcgatgagaagtgcctatcgaagattccaaagggccctttgaaagataagaagcactagattggtactaaggttctcgctatgaatatgataaatcacctttggttttggaaggatggttgctggttcaggtcactagtt

SEQ ID NO: 54672 - DNA, 309 bp, Setaria italica
  Peptide Sequence Number=SeqID_120646
aaagaaaggggtaaaacctaaaacgtaaaccgaacgtacggacggacggaaggaccatgaaggccaagatctaccgcctcttcggacgcgagagagacgtccactccgtcctcggcggcggaaagactgctgatcttgtcctatggaggaacaagaagatatccggcggtgtccttgccagtgcgacagccatctggctcctgttcgaggtcatggagtaccatctcctcactttggtgtgccactgcctcatcctctcactggccatcctcttcctgtggtccaatgcctccactttcatcaacaagt

SEQ ID NO: 54673 - DNA, 198 bp, Setaria italica
  Peptide Sequence Number=SeqID_120647
cgatccatctcaacaacaatcgccacaggttgcctacatctgatcttcaagcgtgagaataaatggtcagcatgtaaaagatcataggaccttggatacgtgctaaatggctcacaccaatcgtgatatacaccaatcaggccacgctcatagattatgggtagggtgtctgaagcatgcacaggaacgacattcatg

SEQ ID NO: 54674 - DNA, 248 bp, Setaria italica
  Peptide Sequence Number=SeqID_120648
gcggtggcggaggaggaggtcgtagttgcggtggatgctgccgccgagggagttctcgacggggagcacggcgcggtcggcgatccagagctcgacggcctggaaggcgacctcgaactggtcgcaggggatggcgtcgcagcccgggtaggccttggcgtcagggattggtgatttggctgtgaaagaggatgtctcagagggagcggttgctatggatatggctgccgcccctgctgatgttgaga

SEQ ID NO: 54675 - DNA, 213 bp, Setaria italica
  Peptide Sequence Number=SeqID_120649
cggcgcggtccgcgatccagagctccacggcctggaacgccacctcgaactggtcacaggggatggcgtcgctgcccgggtacgccttcccggccgccttctcgctgtacgcgcccggcacgccctggtacgccacgcgaagctgcgacccatgcatcggcgccggggacaggtccgagatgcgcagcggctgcggcaggttcttgctggcgg

SEQ ID NO: 54676 - DNA, 286 bp, Setaria italica
  Peptide Sequence Number=SeqID_120650
aaggaaaagggtaatacaagaagactaggcctttgtgaggaagtgatcacagttatgcccatgttagttgcaagccttggagctgaagctcattgatggcgaagggaactgggagctatgttcaatccgccagtgagtgatgccacacctgagctgatgctatcatatgcgccttcagctgcatgtacaaaagcaagcagctatcgcattgccattgtgtatgataatagacagtggcagtgttggtgtcctgaaagcagctatattcttgtcagatctgcttggc

SEQ ID NO: 54677 - DNA, 414 bp, Setaria italica
  Peptide Sequence Number=SeqID_120651
tttggttttggtttttcttaagttagttaaaaagtcttattggtttgtatgctaaatttgtaaagttacttaaccactcaaagattctcttgaggaaacagtggctttacggtattgttgatgattttgttacaaagcaacttcctcacaatgtgacatggggtcttagtctattatatgctttggagcacaagggagacagagctttgacctcaactcaaggagagctggcacatgctctacgattcttggcttcagtggtgtcacagagcttcatagcctttggcgacattcttgagttacataagaagttccttgaactctctggtgggattaaccggatctttgagtcttgaggagattatatgtgccgctcaaaggataccgtggtgtcttccaatgccatcagtgcat

SEQ ID NO: 54678 - DNA, 400 bp, Setaria italica
  Peptide Sequence Number=SeqID_120652
caacttcctcacaatgtgacatggggtcttagtctattatatgctttggagcacaagggagacagagctttgacctcaactcaaggttactaatcttcacaactcttccattctacattatttttcgtcttaaacatcccgaaatacattgttcctttggtttgtgtaacaggagagctggcacatgctctacgattcttggcttcagtggtgtcacagagcttcatagcctttggcgacattcttgagttacataagaagttccttgaactctctggtgggattaaccggatctttgagcttgaggagattatatgtgccgctcaaaggaataccgtggtgtcttccaatgccatcagtgcatcctcagaagatattatttctatttcatgaagtggac

SEQ ID NO: 54679 - DNA, 241 bp, Setaria italica
  misc_feature (200)..(200): n is a, c, g, or t
  Peptide Sequence Number=SeqID_120653
acaataatttattgctttgcctgcgatagcatatatatatctgctatactatatgcttacatgttactgggtttgggcttcctgagagcagtatcccctgactttggtcgtctctcaggccaagaacaagaacttgaaggaacattcaggttcatgcactcaagactgcggacacatgctgaatcaattgcttttttggnggtggttcaagagaaaaagctatggttgatgctaaatttag

SEQ ID NO: 54680 - DNA, 406 bp, Setaria italica
  Peptide Sequence Number=SeqID_120654
ctgcttatgtttacgaccattttgttcggccaatgtttgtgaaccgccaaatagtaaacatatggtatgtcccaagaaatgataagccaagtaaacctgatgatgtactgtcagctgcagagagatatattgaacaaaatggaccagaagcatttgagaagctcatcagcaaggtacccctgttctgaactttttttttgcgggcacccctgttctgaacttgaaatcattgcaaataaacaaatcaagtatttccttcaatagcatcattcctcttatctaattcaaggtttctacattgctgcttaagatgtgttgctctttttgaatagcatcattcctcttatctaattcaaggttttctacattgctgcttaagatgtcattagtgttaaacctgtgtgtt

SEQ ID NO: 54681 - DNA, 310 bp, Setaria italica
  Peptide Sequence Number=SeqID_120655
cttcaactgctggttggtcttaccttggttcagcggtgctgcttatgtttacgaccattttgtttcggccaaatgtttgtgaaccgccaaatagtaaacatatggtatgtcccaagaaatgataagccaagtaaacctgatgatgtactgtcagctgcagagagatatattgaacaaaatggaccagaagcatttgagaagctcatcagcaagtctacaaagtctccaggctgtgacccaacaagactgctgattaaactcgaagtagtttagtgccggtagttttttgtcgtagaaaggtattttttct

SEQ ID NO: 54682 - DNA, 415 bp, Setaria italica
  Peptide Sequence Number=SeqID_120656
ccttggttcagcggtgctgcttatgtttacgaccatttgttcggccaatgttgtgaaccgccaatagtaaacatatggtatgtcccaagaaatgataagccaagtaaacctgatgatgtactgtcagctgcagagagatatattgaacaaaatggaccagaagcatttgagaagctcatcagcaagtctacaaagtcttctaaatcaaggaccacaaggcggtcgatcttggaggatgctgaggctgaaagagaatcctgggtgaaaatcctttctacgacaaaaactaccggcactaaactacttcgagtttaatcagcagcctggagacgaccttcccatgttcctgactcgaggactgtaccttgttgcatccactgctactaaactacgatgagttgtagagcaattgtgg

SEQ ID NO: 54683 - DNA, 443 bp, Setaria italica
  Peptide Sequence Number=SeqID_120657
gaatgacttgaagttgttcagggagagcatcgagtacaaggatgtgaggactctctacttgcatctgttcatatttgagcttcctgtctggactcacttatcgaataaacagattgaatcatacataagatagaggtttacctaccgaattacacaaatctggcggtgaatgacaattctgttggtgtgtgtgttcgccttgtgcgttgcagatgtgggcatcgaaattccatcctgttgtggagaaatccctggagctgcatttcagcgttgaccccgtggggaaccagctgatgtagagcgttcatgaatattcatgagcagctgagctgaccatcaggctccgagtaaagttgctgcacgccatggccggtgttctgtatttgttgagttagtagaagatggaatcgtgttggagttggacaagatggacagtggatggg

SEQ ID NO: 54684 - DNA, 243 bp, Setaria italica
  Peptide Sequence Number=SeqID_120658
gcacaataaaagaaactgcattggctgatcaaactctgcagagaagatgatgcatcctccattgcctctcgtgatgcagtttccaagaaagatatcagcagcataaactcgacaccatagttaaaatcctgccaaaggaccaggttttctcacccctacgaaagagagggataatgtcatcttccacctcggactcgaaatctacagaaactgagccctgtaagttatccaaattgtgactat

SEQ ID NO: 54685 - DNA, 230 bp, Setaria italica
  Peptide Sequence Number=SeqID_120659
tattcacacagctcagtcacaatttcataggtgttgctttcattcgctatagcagtcaacatctcaagtttcagcttcttcacataagacggatcactatattggcagtagaaacttttgtagtcagatgaaaatatcctcaatggagccatgattgtatagctgttgttggaaatatcagtagcaaaaatattcaggagccaaaaggaaaagcagctctcatttggatg

SEQ ID NO: 54686 - DNA, 221 bp, Setaria italica
  Peptide Sequence Number=SeqID_120660
ggtctatctgacactcaccaggcttttgcaatatgatcctgctgtggcagaacgagtagtaaaccctaccccaaaccaaagctgtctctgtatttgcagatacgcagagcagtgaaatgaaagatcgcatatttgatgttgggagaatattcacaagacatgcatgatgctccatacgtacttgaaagtcttgttgaaaactgggatgcaagcgaacctca

SEQ ID NO: 54687 - DNA, 244 bp, Setaria italica
  Peptide Sequence Number=SeqID_120661
ttcaactgagcccctcccttgtagctggagttcttattgtgatgatgttggggttggggaggccggcagttatatatgactactggtcagcccttgctcccgtcgtcgtccggaagtgcagattcacctttaaagcagcaggctcctgctcggccttcggtagcctcattaggctgcctctgcactactgattcattctcttcatcactgtacgaggattgtgacacggcttctgtaagccttg

SEQ ID NO: 54688 - DNA, 261 bp, Setaria italica
  Peptide Sequence Number=SeqID_120662
ctcctctggatttcattttcgctccccgcaccagacgacaggcggcgaggggggcgatcgcgatcgagctgccatgtcgacgtcgcggaggcgaaccctcctcaaggtcatcgtcctcggcgacagcggggtcgggaagacgtctctgatgaaccagtatccttgatttcatctccgacgcctcgcgttcggtaattaggtccagtttgatgtccgtgaagttggtcccaattcagtggatttgttgtaggaacgcatcta

SEQ ID NO: 54689 - DNA, 248 bp, Setaria italica
  misc_feature (217)..(217): n is a, c, g, or t
  Peptide Sequence Number=SeqID_120663
tacaaagctacaattggtgcagatttcgtcacaaaggaggttctcattgaagacaggctagtcacgttgcaggtgagtgccactttgtctccctgagttggtgagctttctcaaagagaagggagatgctgctgctgctgctgctgttgtggtcacgtgttgctttcatcctagatctgggacaccgcggggcaggagagattccagagtcttggtnttgcattctatagaggggcagattgttgtgt

SEQ ID NO: 54690 - DNA, 429 bp, Setaria italica
  Peptide Sequence Number=SeqID_120664
caagttcactccaagacgcatcagcccaatcaagaatccgatgaaaggcagaagagtgagacccgtgaatgcaagcgagagttcctttggtggcctcttctctggtgcacggaatatgtgtgatatctctgcctttggcccaaattttgagaatgggtcaacagcttgtgcgggaggttttggggctttctctggggcctctggcaggtccaactccaagtgcccaagaggtcgtagaaacgaattttccatagcagcatcaccaactgcaagctcaaggtcatatcttccagaaaggtagtaaaatttctccaccaaacctaggaagtctagaacaagttttaaaactagacctttagacaagaaaccaaggacaaccaacaaaaattaaaagttaagtttaactaaaactaaatttaagtaacttta

SEQ ID NO: 54691 - DNA, 461 bp, Setaria italica
  Peptide Sequence Number=SeqID_120665
ttttaggtaccctaaaattttttagtaagtaaattggggttctaaactagtctttgttgtcgggaggttttggggctttctctggggcctctggcaggtccaactccaagtgcccaagaggtcgtagaaacgaattttccatagcagcatcaccaactgcaagctcaaggtcatatcttccagaaaggtagtaaaaaatttactaccaaccaaaaacctaaggaagtctagaacaagtttaaaactgccttgcagaaccaggcaccacaaataagtgttcaacattgctttcatgcttcaatttcaagaacacctggtgaggtttaaacgtgtgcccaagcggtgtagttagttgaaaagataagcgcaacttttgcagatggtttgcagagagagacacttttgtattctttcagaagatcttaacttttgaacagactccatggtcccagcgtcattat

SEQ ID NO: 54692 - DNA, 373 bp, Setaria italica
  Peptide Sequence Number=SeqID_120666
agcatcagcccaatcaagaatccgatgaaaggcagaagagtgagacccgtgaatgcaagcgagagttcctttggtggcctcttctctggtgcacggaatatgtgtgatatctctgcctttggcccaaatttttgagaatgggtcaacagcttgtgcgggaggttttggggctttctctggggcctctggcaggtccaactccaagtgcccaagaggtcgtagaaacgaattttccatagcagcatcaccaactgcaagctcaaaggtacaataatacttaccaagaaaaggtaagtaaaaatttactaccaaccaaaacctaaggaaagtacctaagaaaccaagtttaaacttagacctttgcaagaaacca

SEQ ID NO: 54693 - DNA, 232 bp, Setaria italica
  Peptide Sequence Number=SeqID_120667
tcagtgtgagtagtcagaagactgcatgagtggacaatgcaacagaggtaggatagggtcctatggcccacaaacacaaggaagatgccgaggaagcctaggtacttcagggttgtgaaaagatccaacttgagccagaagagaacatagagcagcaggactgctcctattccagagtggaaaagcgaggcaaatgcagccggtcctggcaaggatgggaagttcttcaagt

SEQ ID NO: 54694 - DNA, 301 bp, Setaria italica
  Peptide Sequence Number=SeqID_120668
tttaggttaagggttacgttaaatttacttactaattaatttaaatttctaatgattaaacatccaatctattcagaaatcatcagtgcatcatcatacacgaaggtgaggtcctactacatttctagtatcaggattcttgaaatccaactgaaataaaccaagtctttactcaaaactcgagtcgctcaacaaaatcttggggagcagttaaagagtaccaagcaaagactgagaacccaaggacctgcaatggccacctcaaaaattgatgatcctgaaacctctgttgcattgtcca

SEQ ID NO: 54695 - DNA, 401 bp, Setaria italica
  Peptide Sequence Number=SeqID_120669
tttttttctagaacacagtaatgctgataccagagtcattatcacctacccaaataggtgggcttcccagatgtgaatcaccaagggagggaaatcaaggcgtacagtaaattgtaggtacagccaaagtaggatttccaaacacagtacaggaaggtctgcctacaacatggcaacccatacacgctcctcctgcttttaggtgaatcgaacctattctttttctgccaaacaactcacaatggagaggggattgccaaacacacttcctttgccaagtgttctaccataaaattatccattaaaataagcagcaagcagatcagtattgcttaaatcgttctaatggaccatgccagaagtgccctcatcaggcatggcatcctcttccttcctcagcc

SEQ ID NO: 54696 - DNA, 477 bp, Setaria italica
  Peptide Sequence Number=SeqID_120670
gaagtcaaatgaggaccattatcctcttcaaagtttataactttgtagtggttaaaaagcaattgcgatatatctgcaacctcaacccactcatcacaaaattcccaaattggtgaccggtaaagcttcacacgaccatccacagtgcaaacagccagcaaacacctagatttgtcatccatataaaaatatgtaagtgcagtaggatgagcagatgaacctgtgcacaagaaaatacatccataattaggtgcaaatccttgctgagaccatgaaattgaccgggcacatggttcagtatcacgcgctaagcatgtaggcaccaaacatggctcaaagagatcctctctgttaaccactcctataggaaaaaggatcactgcgacgaagtccaaccagtccacgaggcccctcaagcgcagctgggttcagaatagtgacaatgtgaccagatgcgacagccaccaaattgtcact

SEQ ID NO: 54697 - DNA, 297 bp, Setaria italica
  misc_feature (1)..(1): n is a, c, g, or t
  misc_feature (275)..(297): n is a, c, g, or t
  Peptide Sequence Number=SeqID_120671
ncattatgaccttcctcgtccccagtcgagccacaattattcaggaagtaatgtatttgatgtagcccatctactgtcgttaatctagcggaaattgcagagtttcattgagccattgggtggctgtgtctatgcatgataatcgaagttaacgacgctgatacatacggatggagcagtgtaatctgcgttgcgattgttctcgtttggcctgtgtctctatgttcactgtagcgcggagaaggttggcttgttctattcttcttgttactttnnnnnnnnnnnnnnnnnnnnnnn

SEQ ID NO: 54698 - DNA, 105 bp, Setaria italica
  Peptide Sequence Number=SeqID_120672
aaatggaatacgtttatgagctgccaaccatgtgatcaagagggcgaacctattccaggcactgagcaaagtgtgtgtactggtacttgtcattctgtggggttg

SEQ ID NO: 54699 - DNA, 264 bp, Setaria italica
  Peptide Sequence Number=SeqID_120673
cggcacccctgatggtgcccatcaccgtcctcaagtccgccgtcgacgcgggagccgtgtgtatggatggaacaccgcctgcttaccacttggatcctggctcgggggcgggaaacaatagctggattgtaaaccttgagtgtgtcgatgaacgctcatgcagggaggcggttggtgcaacaacgtgagggcttgccagttccgcaagaccagtcgccgaggctcgtcggacctcatggagaaggagatacccttacggaagga

SEQ ID NO: 54700 - DNA, 253 bp, Setaria italica
  Peptide Sequence Number=SeqID_120674
caaccataaaaggcaacagactggatgatggtgatgactcaattaaggatcacacctggtaatagtaaaaaagaaaaatatcatggtttggctggtggactcaaaggtttgttaccaaaggaatattcagaattgctaatacaatattttcttcaactgattatctgatggcctgatgcaatattttatatatagggcttaattgttagctcccgtaaagatcccttccgtcattcaaacaaccttgggcaca

SEQ ID NO: 54701 - DNA, 273 bp, Setaria italica
  Peptide Sequence Number=SeqID_120675
gtaacttgctacatttttctagaatgtgggaaggtcagtttccataattggtagtgcttactgctaacgtttactggtttgatcgatttatagacaaaagctccgattgaagagtgccgccagaaggtttggctggtggactcaaaggtttgttaccaaaggaatattcagaattgctaatacaatattttcttcaactgattatctgatggcctgatgcaatattttatatatagggcttaattgttagctcccgtaaagaatcccttccgt

SEQ ID NO: 54702 - DNA, 470 bp, Setaria italica
  Peptide Sequence Number=SeqID_120676
tgtcggttggtacggtcgtcttccttcttgtcgtacctaattggtcggtcgtattggtccgtcttgtcgtctagttcggtctattcctaacgttgcgcgcgacgtaccacctgtacaacccggcgcagaacggctgggacctgaaccgcgtcagcgcctactgcgccacgtgggacgccaacaagccgctgtcgtggcgccagaagtacggctggaccgccttctgcgggccctcgggccctaggggccaggcctcctgcggcaagtgcatcaaggtgacgaaccgtgctacgggcgcgtcgaccgtggcgaggatcgtggaccagtgcagcaacggcgggctggacctggacttcgagacggtgttcaagagatcgacaccaacgggcaaggggctaccagatggggcacctcaacgtcgactaccagttcgtcgcctgctgaggaagctcccgcacgtacggacggat

SEQ ID NO: 54703 - DNA, 431 bp, Setaria italica
  Peptide Sequence Number=SeqID_120677
tcgtattctacgggttggtacgggtcgtcttcgtcggttggtcggtcgtcttccttcttgcgccatggcggcgatggccgctgcgcagtcggcatccaacgtgcgcgcgacgtaccacctgtacaacccggcgcagaacggctgggacctgaaccgcgtcagcgcctactgcgccacgtgggacgccaacaagccgctgtcgtggcgccagaagtacggctggaccgccttctgcgggccctcgggccctaggggccaggcctcctgcggcaagtgcatcaaggtgacgaaccgtgctacgggcgcgtcgaccgtggcgaggatcgtggaccagtgcagcaacggcgggctggacctggacttcgagacggtgttcaagaagatcgacaccaacgggcagggctaccagatggggcacctcaacgtcgact

SEQ ID NO: 54704 - DNA, 328 bp, Setaria italica
  Peptide Sequence Number=SeqID_120678
aagaaccaaaaccaactaagaacaaattaactaacaatacgaacttaggacaatactagaccaaaaactaaggagactcacaaggacccagcagctatggcggcgatcacgggtggacgggcgctcgcggtggcggcgctcctctgcgccatggcggcgatggccgctgcgcagtcggcatccaacgtgcgcgcgacgtaccacctgtacaacccggcgcagaacggctgggacctgaaccgcgtcagcgcctactgcgccacgtgggacgccaacaagccgctgtcgtggcgccagaagtacggctggaccgccttctgcgggccct

SEQ ID NO: 54705 - DNA, 293 bp, Setaria italica
  Peptide Sequence Number=SeqID_120679
tctttaagtcatggagttcttgtattcctatggaggaattctgcagccatcggagaaaaacttagtgaagttactgtgacattgagagctaaattccgaaattacatgcaagcagtggttgagaagcttgcagagaatgatgcaggcattgaaggatcagctaattgaggcaataaatcatgtgcacaaagtctccgaagtacatgtttttgagccatatgccgaggtttttgggaccggatggggacaggacgtgctgagtttcctggagaatcgcaaagaaaataaatcct

SEQ ID NO: 54706 - DNA, 325 bp, Setaria italica
  Peptide Sequence Number=SeqID_120680
ttaaaaagcctccatacaaggtgtttattcagctactactacaatgcctcaaggagatgcaagctgagaaggaagtgacaggttcccagaatttgaagcggcataatagcagatgtgatggcacgctatcgcaaacatacagaaaacccattcaccctagaaggaaaaatgaccttatataggtcttttctctacagactctgggcagcgtcactgtacaaccagtccttgcatcacacaggagttctcacagatcacggggaagacttactttaagaataggacaattaagtacctacccaatttagaattaagtagaaaccaa

SEQ ID NO: 54707 - DNA, 231 bp, Setaria italica
  Peptide Sequence Number=SeqID_120681
ctgtcccagctggaacaagagttgcacagatccagaaatcagggagcagtgtttggtggtggagctctttctggcagcaatggcggactaagcccaggcatgcaatttattaaaccctagctacctaaactgctcatacatcgcaccttggacgtttacgtgcatgcttaatctgcatgcatcgtcgtgatcttgtgcaattgttcgcagaggcggcctggttcgacatgg

SEQ ID NO: 54708 - DNA, 428 bp, Setaria italica
  Peptide Sequence Number=SeqID_120682
taattctaatttagttgtattgtccttaggttaccattctaattttcacaagcattagaaaattttgacaaacgaaaacaaaaactggaaacttggtgagagaattaaaaatttcctaaggatagtacataccaatccaaacaccagtaaggccttctaagagaacatggattgcagtgcacggatgatcacttctgaccttaggtaccaatcaagataccttccgtgatacacattgataattgggtgcaaaagctgtttgttcagttaagtcagggcccggcccatgaagggtcaacgttatcacagcacagcgatgcagtgtactctcccaagaggtcaatctagattattcgtgaaaacctaactagctatgtgaaactggtatacacattaccctattgagttcttgatgatatagagacatc

SEQ ID NO: 54709 - DNA, 460 bp, Setaria italica
  Peptide Sequence Number=SeqID_120683
aaagaaggtttacttaagacccaattagaaacaaatagaacaagagactctaaagttcgccacctctcatgtccctcaatcttctacgcaatatatattgtgtacgatacaagattctccgttcactgatgcatagcttgttcgctagctgttttaacagtaatgtcctgtttgcttgcttagcatttattgaaacttgtggagagccattgccaccctctaggtacttcgtatactttgctatattagattcgcagcagtccaggataaactgaagagcctgttcttccaattcaggataattgaatccaggtttggatgaatttttattcgacgcagcaatagccatctcctcaaagcgttgactcatgtcaggaggactgaccacaaggaaggcataagccatcagctcaactggccatcctgtaacccgcaatgggaaactttcagatgctgacaa

SEQ ID NO: 54710 - DNA, 234 bp, Setaria italica
  Peptide Sequence Number=SeqID_120684
taacctgctcccttctagcatacagacgctgctccagtctccagatgagaaattttcggctgagactgcaatgtgatttggtaagaaacacatgaagctcctgatgcaaggtcaaagcaccatgttatcagagaaatcaaaactatccgataggatccattccacctagaaatgtagcccatccatttatttgaagagctttcttagcccattgaacaatgacagagctctaag

SEQ ID NO: 54711 - DNA, 424 bp, Setaria italica
  Peptide Sequence Number=SeqID_120685
tcacgcacacgcctgcacgcgcgtgagctctcacacacagaaagcatgggtccctaggcccaaccaccatcagtagcatgagcatggcgaaggcggccggcgttggcacgaagaacagcgcggttgctgccaccgatcagcagcaagctgcaggccagaagaactgcagcagctacgccttccagatgccactgcatacccgcggtacaagaaggccgactacgagaccatgccggagtggcgcgtcgactgcctgctccgcgagtacggcctccccgtcgccggagacctcgacagcaagagaaagttcgccatgggctccttcctctggcccgaccagtactgaagcgctagaaattaaccaaataccgggaattagaacaaggaagaaccaaagaaaattttacaagtaagacaaggaaga

SEQ ID NO: 54712 - DNA, 516 bp, Setaria italica
  Peptide Sequence Number=SeqID_120686
tgttcttatctagcaattctttttttcatttttagtgcactccttgatcattaagacatcgtttaactttctgcctcctattagggatgtatggtttgtaagcaaaagacactctttttggcgctgtgggtgttgttcagttgcagcacatacggagtatgcaccataaccagtgattcatctaaaagacaatacaaagtgcaatttgctggaggcgtccttctgattggcttctgcaaaatgaggtctatccttttttccccttaaaattggtcacttcatgttgtcatatattaaatgaataataacagcttatccagtctaatttgataaacaggcaagagggaaactttctagtataagtattaaaataatttatgtgcatctagtcattgtattttctccaagctcagtgctgattcctccatcacatttaatatccttttgtttcatccctagatccttggaagattaatactgaacaagaataagttatctttgaggtttagctaggac

SEQ ID NO: 54713 - DNA, 313 bp, Setaria italica
  Peptide Sequence Number=SeqID_120687
tttaaatttctttagtattgttagtattactactaattcgtcgtatttattcttgttcaactgaagtgtacacagagacggtgcataccatgttcaagaaaatgttgatagttgataggtcagcacagcgaattcagggaagtcattttcacatgtgtgaatcctgttagctttctgcaggcgaacgttattacttatatgtccccagtttctacgtatcagaatataagggatgtatggtttgtaagcaaaaagacactcttttggcgctgtgggtgttgttcagttgcagcacatacggagtatgcaccat

SEQ ID NO: 54714 - DNA, 239 bp, Setaria italica
  Peptide Sequence Number=SeqID_120688
caaattagactggataagctgttattattcatttaatatatgacaacatgaagtgaccaatttgataaacaggcaagagggaaactttctagtataagtattaaaataatttatgtgcatctagtcattgtattttctccaagctcagtgctgattcctccatcacatttaatatccttttgtttcatccctagatccttggaagattaatactgaacaagaataagttatctttgagg

SEQ ID NO: 54715 - DNA, 259 bp, Setaria italica
  Peptide Sequence Number=SeqID_120689
aggatttcctataacgccagcagaacctaaaaccttgtaaagttcatggaggatttgcctgctataatgcctcacaagaatgtcctgaacagattgccaactggccataagattttccaccattatttctccaaggtgaactggtactccttcaacatctaagagggccataagacctctctggatcgcagtagtgttgttgaaaccttgttgtcttgggtattccgtaacctactattctatttccttacttgtagta

SEQ ID NO: 54716 - DNA, 255 bp, Setaria italica
  Peptide Sequence Number=SeqID_120690
tttcttgtttctgaggtgtgtagtagctcaaactcctcgaaactcaaatcagttatatagtgagggtatttgtcatctgaaagggtgccaagcagaatttctttgtcatcaactttcacaaagattctcacatctccgttccccttgccagcatgtagtgctatctgtgaaacacgaaaacagaactctcctgggttacacttcactgtctccccaggtctgactactactccccactgctgcaatttgaacccc

SEQ ID NO: 54717 - DNA, 193 bp, Setaria italica
  Peptide Sequence Number=SeqID_120691
ggagatgtttcttgtttctgaggtgtgtagtagctcaaactcctcgaaactcaaatcagttatatagtgagggtatttgtcatctgaaagggtgccaagcagaatttctttgtcatcaactttcacaaagattctcacatctccgttccctgagacacggaacaggggataggcaaggcacacaggggatagg

SEQ ID NO: 54718 - DNA, 176 bp, Setaria italica
  Peptide Sequence Number=SeqID_120692
ttgactcgtgacaacaacataaccaccggaaagatctaccagtctgttattgacaaggagcgtagaggagattatcttggaaattatgaacggtttctggacatcaagttgactcgtgacaacaacataaccaccggaaagatctaccagtctgtttttcccaggtaatctcctct

SEQ ID NO: 54719 - DNA, 264 bp, Setaria italica
  Peptide Sequence Number=SeqID_120693
ttttcgtttgttaggttctttaatttgttccttaactttctttcttactaaacgtacccctttttcttggtcttccgtttttctgagtgtagtctgctagctgtagaaaagggtctactgtgtgcagctggtgcttcttcatgcaatgatgagattgaagtcaatgttgtggggtcaggacaatggcggcagttgatcgtcaacccctgtgcactcgagaagtaattcagcttctgcacgtgtgacttcagatgaacataaaaa

SEQ ID NO: 54720 - DNA, 335 bp, Setaria italica
  Peptide Sequence Number=SeqID_120694
gaaaaggcttgacttaggacaaatctaagttgttgtgataggagaagttacagcttatgttaacatcacgagtaatagctactgtatgcatccactcagctatgaacaattctaaaaaacaaggtttaaatatagaggtcagttatgcaggtacactgcattagtcaatgtgacattaaggttcaactcaggaaagacaactattatacacagataatgtcaaaagcacgttaccttgtatgcccaataaagataggagctttcgtcgtttatttctttgccaagacgagctatcacctttgacggtgtccaaatattctgcaggcaacaataaa

SEQ ID NO: 54721 - DNA, 250 bp, Setaria italica
  misc_feature (91)..(91): n is a, c, g, or t
  Peptide Sequence Number=SeqID_120695
gaggtcccgctcctgcgacgcgtagcggcggcgcagctcggagatcttgggctggatccgggtgcgcacgaactcgagctcggcgatgggngccccgcagcgagcggcggcggcggcgcgagcgcggtggaggcggaggcgaggagttgctcgagctcgcggtccgcgagcgtgcggagggagtcggcccgcgcgcgcatgaggcgcaggtcggcggtggcggagtcccgcacctcgcgccaccccttgg

SEQ ID NO: 54722 - DNA, 398 bp, Setaria italica
  Peptide Sequence Number=SeqID_120696
atttgattgtgttcaagatttacttgaaatcttaagctggagactgggttatagaatcattttccttttctgttttcagtaacctgagtcaactcaaagggtttgcttttgaacatgattggccttgaaaccattcaggagttgaaaattgttgctttttattcgattttaaggatttcaagaagagctattgctcataagtttgccactccatatttcacaaaatttcaaatagttaaaaaggttcaagcatcaaaggtatcagtgtcactcagatggcaagatctcaaacagttaagacacagcaggaaagctgatacaagttggcatgatatgaagcaattgaaaggaccatcaaatgccatcagggctttaagaattacagaaagctgttccgg

SEQ ID NO: 54723 - DNA, 226 bp, Setaria italica
  Peptide Sequence Number=SeqID_120697
cccgtgcgcatctccctcttcctgctcaccgtcctcgccaccgccatggtcatcaccgacgcctgcctcacgccggcaatctccgtgctctccgccgtcggaggactcaaggagaaggcgcccaacctcacaacaggaaagaaagaaaaaagatgcatgcttgacgattgcaattgcatagatgacgcacgcacgcggacaccacaagcatgcacatgcatatatc

SEQ ID NO: 54724 - DNA, 200 bp, Setaria italica
  Peptide Sequence Number=SeqID_120698
tttattggtagttgtactattgtaatttttatttagttcttatgcaatccttcactaatgtttgtgcttgttatacattgctttatgctattttgcagacagaagtcccacaaacggttactggattgctgaattctctgggacttgagaagtatcttgttctctttcaggctgaggaggtaagcttcgattactaaatt

SEQ ID NO: 54725 - DNA, 341 bp, Setaria italica
  Peptide Sequence Number=SeqID_120699
ttaaggtctaggatattcttcgagggagggtgtcctagcatcaagaccctctcctgttgcaagtcgaattccttctgcaagaagtgtggatgatttgttgaagttggattcttcaagaaaccttactcctcatggcagccgatggtttgaggcacagatcacctgaaaggcttacaagtgttcggggtgatgcgtctccaccaagagcttttgatcagattaggcccatgccatcccatagatctgctggttctttaagacctcaaaagtacttaattaacaaagaagaatagactacctagaacaacaatacaaagaaacccaaaacttaatagactaga

SEQ ID NO: 54726 - DNA, 256 bp, Setaria italica
  Peptide Sequence Number=SeqID_120700
agaaagtaatagctcccttggagatgatggttcaggtgataataaaccttaacttctagtattcgttcactaagatttgaaattagaagatgtccgacactacttacattattgcattggcctgcaaaatatttgaagatcgccatgtcggcaaggatgacctgagactgaaacttatgaggaaaggcttgttacagaggagcaatggtggcgcagaacagaatggagtggatctccgtgaaaagctttcccgaaa

SEQ ID NO: 54727 - DNA, 506 bp, Setaria italica
  Peptide Sequence Number=SeqID_120701
cgtttaggcaaatctgtgattgctgagcccagcaatgtgattttcttgtccgccattcttaacacagaagggtcaaaccctagtcacaagtgtgacaaaaggtgccagaatgagcacatatttgggaacatgtaccattgcaaactgactggaaccactcacatctgcgacaaaaaactgtaaccagaggatcctctatgataaccataactcgctctgccgagtgagtgggcagttgtttccgctctctccactggagcagcaggcagtgaggggtatccgcaggaagcatgaagtcgacagcagtgaaggttgctcctttaagcgcaggcgtggtgcacagctgcatccctcccctttcgagaggtcctacactgctgtgtctccaatcccgagccaggttggagatggcatggaacctagaagactaagaagactaaatagaagaacttaacttttactttaggaccaagaccaacctaaattaccgttactttactaaccca

SEQ ID NO: 54728 - DNA, 188 bp, Setaria italica
  Peptide Sequence Number=SeqID_120702
tctttggccagccacctaattccgttctttctaccccttccccttcaattacaggatgggactataagagcttccttctttgtagacttatgaagggatatgagactccttagatgcactgaataaatgtctatgtactactaatttagaataggcagttcaaccaaagtttacgagttacaacaagg

SEQ ID NO: 54729 - DNA, 221 bp, Setaria italica
  Peptide Sequence Number=SeqID_120703
aattttgtttgtgaattgacttttttctttttgttttttgtcaggtgaactgctgatctctgattcctttcctatcatcagtggcaagttacaaggggctcttctcattccttgcagtggagactgttaagcttcagctgagcatgctgctttgcaggtaaattattagccatgtattgtttagcagtgtcagaatatgattagtcataatatcacctctt

SEQ ID NO: 54730 - DNA, 361 bp, Setaria italica
  Peptide Sequence Number=SeqID_120704
tggggtttactagttacgtttcgtaactagtctacttggttgtcttgggtatttcttttgttctagtagttacgtcttcttttaggtattcttttattcttgatgcagccaatcggctctcccaaggtcttgctgacatccagcgttccatccagctccagcccccagttaggattcccaggttccgtgaaagttggggttatagttcgaccagaattcctccactgcataagaagaagaaacaggaaagagtgagaaacagagcaacatgcattgaacatgtcgctgtagatacagatgttaagaatgaagtaaacaagaaaaataggaactaaacagaaacagaagtgacaacttacct

SEQ ID NO: 54731 - DNA, 375 bp, Setaria italica
  Peptide Sequence Number=SeqID_120705
tttgtggaaactttgtgaagccccatacaacaagaccctggattggtccaaatggtacatcttctggactgacgaacgtgctgtagcaaagaatcatgctgagagtaactataagctaacaaaagaaggattcctcgccaaggcttcagagcaacaaggcttaaaattagttgttgagaggaccagccagtggagtcttagataatcaagaattccctgttctttattgcaatgaattgttcaaagaaagagcaggtcaagagtagcggtacctattcttaatggccatgtctactccataaatgacaatgccacagtggaggatgcagcaacagactacgaattcgtcatcaggcagctggtcaaggtccggac

SEQ ID NO: 54732 - DNA, 484 bp, Setaria italica
  Peptide Sequence Number=SeqID_120706
gaggagggccacataagctcagaacgaccggtaggaagataagcccatgcaggaacccaatgaggacaagagccaagtacatttggaagtaatagaccacaaaaacttcagattttgcaaaacgcaggacaataactcccacaagcttggtcaaagtgattccactgaatacagaagcacccatcgtggatagagcctgccttgcacgagtttctctgtccccagtgccaatcaaggatggccatcactcccatcaaatccaagactatcattgccagcacaattaaaatgattgctgaagcccataaactgctggtgactaggaagcaaacgacaaatatagtaccaaggcaaaacacatatgttcatgatagctgtcttccacacacccagatattgctcaaagaatatatagaacacagaatatgggaaaatttccatctgtaaatctttggacattttagaactgaagtcccgagcagct

SEQ ID NO: 54733 - DNA, 468 bp, Setaria italica
  Peptide Sequence Number=SeqID_120707
agttaaataagtagaaaatacaattagaaaattagaaatagggccagtttgggatcctctgtgcgtccatgtacataacatccatctctcccggtgcaggagtaccatcgagttgtacagcatttgttgaaggtgaaagcagtgctatagatccatagaaaaagactgtacatatccatctcttattgtttgcataactaggttagttggtgcttacatggtggaaaaggaactaagaggcgtattggggtctagattgtgcggcatagctaggtggtgtttggattcaaagttgatgggctaaagtttagtccctaaattttagcctctaaaaatttagtccttgtggggtgtttggatgcaagagctaaaaggtagtcttccttgagctaatgactgatttgccctcatttcaattttcaatgatttcactattaactcgaataaaatcccatcaagtccgctcgg

SEQ ID NO: 54734 - DNA, 367 bp, Setaria italica
  Peptide Sequence Number=SeqID_120708
ttatccaagtctgagtgtaggaagcacgttgtgcagttactgcaggttctgcttgcgctgcaagtgcctgaatcctgatcgagttggcagcatggaggctgatcatctggagggcagtaacttccattcacaaatttcctacagcatccgaatgcttcaggagacatccaaattaggaagtcatcaagccatgaagcagcaggtttagcaatgtaactagtctcaggggataacgattgtcttgctatctgcattattgcaaaaataatgttacacagagtgcaatcttcacaacaaatgaactgttgcaccagatgctcagtttgcagtgggagaagggtagccttataggtactaaacaagctca

SEQ ID NO: 54735 - DNA, 187 bp, Setaria italica
  misc_feature (147)..(147): n is a, c, g, or t
  Peptide Sequence Number=SeqID_120709
tacatggtggaaaaggaaactaagagatggatatgtacagtctttttctatggatctatagcactgctttcaccttcaacaaatgctgtacaactcgatggtactcctgcaccgggagagatggatcctctgtgcgtccaatgtacntaacatccatctctcccggtgcaggagtaccatcgagttg

SEQ ID NO: 54736 - DNA, 425 bp, Setaria italica
  Peptide Sequence Number=SeqID_120710
tgtcggtcgtatcaggaaccaccgggcgcggttgccggccaagaccggcgacggcgtgtaccatcacctcaaggactgcaagctcactgtccccacggaccagctgaggtacatgatacatcacgtcacgtgagacctaaacccaagatgccgcagcagcatcgttgaaggatactggtagtggtagtggtaggtgcgtcatgctcgtgcctagtttgacgcacgcggtgaccgttcaggttcttgaacaaggcgtgcatgatcggcagcaccgaggagggctcgggctcgcccagcaacagcggcaggaggccgtgcacggtggaccaggtggagcagctcaagtcggcgatccgcgtgctgccgatctggtcgtccaccatcttcctcgcgctggccatgaaccagagcttcgccgtgaagca

SEQ ID NO: 54737 - DNA, 243 bp, Setaria italica
  Peptide Sequence Number=SeqID_120711
gttgaatcaagtttgcctgtcattgagtattatagttcaaaggacaaggtcaagaagattgatgctgcaaaaccaattcctgaggtgttcgaagacgtcacggccatttttgccccatatgctccaaaggtgacctattggtttcagatgtgtcttttttgatctattcttctgcacacagcatttctggatgaatctgactcctgtttgcatgctgaatgtatgtctaccaacatttagttt

SEQ ID NO: 54738 - DNA, 139 bp, Setaria italica
  Peptide Sequence Number=SeqID_120712
gagggtgggaagtgcccaaccccctactgaatgcactgggctgggattgagtgcatggtgcattcaggagggtgggaagtgcccaacccctactggcaccatccactcacttgatgagccgtccacagctggttccttt

SEQ ID NO: 54739 - DNA, 239 bp, Setaria italica
  Peptide Sequence Number=SeqID_120713
ctgcaatttgcatcttcacgtaaagaattggttcattaatccgtgactcccttgtctcacgcaactttgtgatcaccccctcctaagaaagtaattgcagcatccttatcaggatactggcgagaatttgttggatgaagggaaaaccactctggatagtatgactgatgttgatcccacagttcatgctagcttttactggatatcatctcaataccacaaggcccgccaagaatttg

SEQ ID NO: 54740 - DNA, 399 bp, Setaria italica
  Peptide Sequence Number=SeqID_120714
taacactcaatgggatagttctatcttctgatggccggctaaagattatctccatcaggcaaagaatattgatcttttcaagcagctccgttcattctgcaccaaagctggctgtgcagtaagagcagcattgtgaaccctgcaaagttcttggtagagagcaaggttgccggtgttgaacgcttgtaacatatgatagacccactccaccttggttccaataagactattgataatcggatgcgctaacaattccccaaagttgtaaatgttatcacccagcaaggctgccagagaaagatcaaaagccaagtccagcttgaatgactctgagagagattaccaacaagttagtagtaaggaccaagaataagaagaaaagaaaagaaacaaaattaa

SEQ ID NO: 54741 - DNA, 256 bp, Setaria italica
  Peptide Sequence Number=SeqID_120715
ggttcattaatccgtgactcccttgtctcacgcaactttgtgatcaccccctctaagaaagtaattgcagcatccttatcaggatactggcgagaaagctatcaccgcaaaatgggcaagctttagcagattaatcttgtgcaacaagatcaggggtttccgcctcaactgaaagcaatgtggtatgcacctttccaacccaggcatccagcctttcacgcaaagcctttacctgtggaattccaagtactctagg

SEQ ID NO: 54742 - DNA, 182 bp, Setaria italica
  Peptide Sequence Number=SeqID_120716
ctgagagagattccacagttgtgtaggccagatagagaagagcattcttgtagaactcagcaaattcttggcgggccttgtggtattgagatgatatccagtaaaagctagcatgaactgtgggatcaacatcagtcactgagacacgcaacaggggaaaggcaaggcacacaggggatagg

SEQ ID NO: 54743 - DNA, 343 bp, Setaria italica
  Peptide Sequence Number=SeqID_120717
atccaacaaattcttgcactcctttggtttcctttctcaagattaattgctgcaatttgcatcttcacgtaaagaattggttcattaatccgtgactcccttgtctcacgcaactttgtgatcaccccctctaagaaagtaattgcagcatccttatcaggatactggcgagaagctatcaccgcaaaatgggcaagctttagcagattaatcttggtctcgaagtcagtgatgaaattgttgtagagctgaatgatagtgtctccagtctgtgctgcctggagctgcaggaatttggttcgtagtactttagtaagggttagtaagactaggtagaccaaca

SEQ ID NO: 54744 - DNA, 129 bp, Setaria italica
  Peptide Sequence Number=SeqID_120718
cagggttcacaatgctgctcttactgcacagccagctttggtagagagcaaggttgccggtgttgaacgcttgtaacatatgatagacccactccaccttggttccaataagactattgataatcggat

SEQ ID NO: 54745 - DNA, 366 bp, Setaria italica
  Peptide Sequence Number=SeqID_120719
cctcccacttaaccgctagcagatctgattaaatttgtgatattttcaaacttgtcaattgttgggatgaatgtgagcttgatgtggaactctgtgggcttttatcagattgcaaagctgtgcatgatacctgcctcatgtcttctggagtgtgaatgcaagaggtctggttgcggctgttatagctgtttggagcacagctttccaacaatactatgttcattttctccaaaagaagtacgccctgaactcgttcaacctcctgggccacactgctccagcccaagcagggtccctcctgcctagtggggaccaatttgtcgattacttgttgacaggcaaaaagggtggatcacttcaatttct

SEQ ID NO: 54746 - DNA, 253 bp, Setaria italica
  misc_feature (64)..(64): n is a, c, g, or t
  Peptide Sequence Number=SeqID_120720
ccgacggcgagcgcctcccatcacctgccggcggcgagtcgtcggcgagccgcaatccagtggngaccccttgtcctctagccgcgtgatctcaaggaacaacttccagatccactccgcttctcccaagctacgttcaagcttggattcctgaatcttatggcttcattcctttggagattgtaattcagcaagctttatattgaatttgtgaaaatagagatgagttctctgaagaaatccgacaagaaag

SEQ ID NO: 54747 - DNA, 237 bp, Setaria italica
  misc_feature (181)..(181): n is a, c, g, or t
  Peptide Sequence Number=SeqID_120721
tgacacgagacaacacacaacacctgcgcccacccaaatctcagatcaaaacaccacaccggaggaggagccagggatccattgcttcaaggcttcggagcaatccggccgccgcagttcaagcttggattctggatctgatggtgtcagtctcttggagattgtaattcagcaagcgttnaattgaaactgtgcaagtagatatgacttctctgaagaaatctgacaagaaggcgg

SEQ ID NO: 54748 - DNA, 247 bp, Setaria italica
  Peptide Sequence Number=SeqID_120722
accagcttcctcctcggcctgtcgccggagctcggcaggtcgctccgcctcgacgtgctctaccccgtcggcggcttctcccgctgcctcgactccgacaatgggttcggtaagcgcgcccatctctcgcccgctcctcctccccatcccccttcctttcagctcggcaattggcatctgcgtgtgctgtacctgcactgctacatggtttcattctgatataagagtgccttgaattggagggtga

SEQ ID NO: 54749 - DNA, 310 bp, Setaria italica
  Peptide Sequence Number=SeqID_120723
agaaggtttagtaaatttgatacatgcaaaattgcttcatcattatgcctgtggcctttttcttaagcagaccacggtatcttaaaaccttgaagctgaatactacgtttttttaagggctaaataccacattgatctatacaagcagaacatcagtcatcagtaactattctctccactttccgcagcttgaagtgacgttccaaagaggcttgcaagcagtaaggatcatggtacgggaaggattcaacaaaagtgcaacatttgtgaacactccactgccattagaaatgccattagaaatgttgaa

SEQ ID NO: 54750 - DNA, 250 bp, Setaria italica
  Peptide Sequence Number=SeqID_120724
gatcattcagcaaggaagaaaaggaagagcgcccatctcctcaggtggccgtccaatgcccatccttttacatagatatatgatgatcttgatataccgtttgcaaaattgcggctgctgccaaaggggggacatggcgggcataacgggatgaggagtattatcgaccatttaaaacagagccgcaattttccacgtctgaggatgggcattggacggccacctgaggagatgggcgctatcagttttt

SEQ ID NO: 54751 - DNA, 258 bp, Setaria italica
  Peptide Sequence Number=SeqID_120725
ctactcgtctcccccccaccctgctccgccactccaaattggctgcagatttctcgtctcatggcagccgacgtctccatccccacgcagccagctctcgatccccctccaccaccagctgattcctcctagtccctcttctcctcttgcgccgacgactcctcctccccctccctcgctcgccgcctgtctccgctgcgcccgcggctctccccctccgctccaaggagcacaggcctctcgccgcgccgttcgccc

SEQ ID NO: 54752 - DNA, 375 bp, Setaria italica
  Peptide Sequence Number=SeqID_120726
taagcggaacttgcttactataggcttgtggttcagaaaaccccagcagtatcgatcaaaggacccaaattcatcagcaatctttagtatctggcgagcattctcaaggacagctcggagcttttgctctgacaaaagagaaagggcaacacttccaggtgccacaagcttcttctcatttattttagagacggcaggagggtcgaagtccatgaaaatttccctgaaagattcagcatggatgtgacagaataaaccatgaagaatacgtttatatcttttcaacagtacagaaccaatacctaaaaagttgcctcctcttgagaatttcgggccatgtaagctcagccaatgcacaagatagtacaagtagct

SEQ ID NO: 54753 - DNA, 392 bp, Setaria italica
  Peptide Sequence Number=SeqID_120727
tttactgatcctaaaactgtgaataaaggccaccatccttcgcttcgctaaccattcaatgtacaatagagtggcattaccaacagaagtgatttttacacaagtcctaacctcaattcaaggataacctagcacactgtctaacatagagataacacaagttcagtagctgcactgttattccaatttcttcatggtgctatgaaacgataagcgcatcaatcgtcctcggcatctctgcgttagtgccaacctcctcacaacatatctttgttgtcatctcgtctttcttcagatctgccttcatgtttgccttgttgatgtctctcgtgcaaagagttggagtggcatctcgtctttcttcagatctgccttcattgtttgccttgttg

SEQ ID NO: 54754 - DNA, 252 bp, Setaria italica
  Peptide Sequence Number=SeqID_120728
ttactataggcttgtggttcagaaaaccccagcagtatcgatcaaaggacccaaattcatcagcaatctgcatcagttcgcacaaactagtagtttcaggcaaaagtcgtaccaacggaggcaccaatttggtggtatgatcaagcaggcattacaaacctttagtatctggcgagcattctcaaggacagctcggagcttttgctctgacaaaagagaaagggcaacacttccaggtgccacaagcttctt

SEQ ID NO: 54755 - DNA, 211 bp, Setaria italica
  Peptide Sequence Number=SeqID_120729
gcaatgccactccaactctttgcattcttcgaaccggaagcaactgaccaggtgatcatttgttagccctgcagcctgcatgaaggaatatatgacagttggagtggcattgcattcttcgaaccggaagcaactgaccaggtgatcatttgttagccctgcagcctgcatgaaggaatatatgacagttgggcccacaccacgaaattct

SEQ ID NO: 54756 - DNA, 401 bp, Setaria italica
  Peptide Sequence Number=SeqID_120730
aggaccaacggacgaccgacccttacaacgacaagtcgagaagggtttgaaaactgccataattgagggagatgttgtgggtggtacttgtgtgaacagaggttgtgttccatcaaaggctctccttgctgtaagtggtaagatgcgggaacttcaagatgagcatcacatgaagtcactgggcctacaggtttcctcaccaggatatgacagacaggctgttgctgaccatgcaaataatcttgcctctaaaatacgcagcaacttgaccaattcaatgaaagctctaggtgtggatatactgactggggaagcaaaaagtgagatatggaaaggttggttttccagacaatgaaatcaccgctagaaacatcataattgccaccggatctgttcctttt

SEQ ID NO: 54757 - DNA, 222 bp, Setaria italica
  Peptide Sequence Number=SeqID_120731
atggaaaattaaaacgcgagcaacctacttaaaactcctgtaactatccatgtgacacaaggatattctattgactgatatttgtctcttttttttctccagaaatgtttttgctgcatactttgagaaaatgaggataggatctccaagagttctggacaacttcctatgctgctcctgtgattataagatcactattcttgcagctcttccttcctgtgc

SEQ ID NO: 54758 - DNA, 193 bp, Setaria italica
  Peptide Sequence Number=SeqID_120732
gtttcatgcatcatctctcggagagagggcacgtcctccaggtcatgtcaccttggaataggtgccaatctgctagatctgtttgtttgaccacttgcatctctcaggtgcagaccacttaactcaactgacaatgaacgatcctcttgcagaagtgactcatcactatagttcggatcccaatcggctggat

SEQ ID NO: 54759 - DNA, 442 bp, Setaria italica
  Peptide Sequence Number=SeqID_120733
gctcttgcatttcttgctcccaaacgttgagcacatattaggacagcctgcacatcttgtatcctatttgacgtagtagcagatgaatcggtgttgaataatatcttatgcatgttagatatgataatattcaatggatcctctgggtcatcagctaaaaggggatccagaccttcaagatcaaaatgttcagaaattgcccatatcaagcgtgaagatattcgtggagtatgaacctggaagatacagttaatcaaatttaataatcttataggccattctggaaaagaaaacaaagatcatgaattatgttgctattggtcttttattcacagtttaaaaaattggctgcatataccaatgtaggaagcttctttaagagaggatcgatgaatagatcttgaaaggaaacatagacaaaaacatagcataatcagatact

SEQ ID NO: 54760 - DNA, 396 bp, Setaria italica
  Peptide Sequence Number=SeqID_120734
cgggattccccgaatccatccagttcctcactctgctttcgctcctcttcctcctcttgctcggtcttggcgggtgggaccttggcttggccgccttgagaatggcgagcctctccatagagatcttcagccgctccgcggcagcactcttcacctcatcctcgggcatgtattccacagcaccatcggtgatatcatccaaccatccttggaggtcagcttcgatctctctagtgattgattcatcagatgcacgcatgacgaatttgcagatcattgtggtggtctcatcacccaggtcaacgttccggctgacttcacttgcgccaaagattctattctattgtccctactaaaccctacctaaacctaagttcttttgtctagtctattaac

SEQ ID NO: 54761 - DNA, 207 bp, Setaria italica
  Peptide Sequence Number=SeqID_120735
tgaggatgtgagggtgaaggaagatctaaatagcgatatcacatctgttcctggaacaggcttctgacctcttcgaacactttcctttgcaaacagatcaacacaaagagcagtccgacatatacatgccaatgcatgcatacgatctgattctgctctcaagtttctcaccatctgaagcaatcttggaatgcaggtctctctgtt

SEQ ID NO: 54762 - DNA, 231 bp, Setaria italica
  Peptide Sequence Number=SeqID_120736
caagaacagatgcaagccgaagtccgaaaactgatgtctgggcaactgcgccctcccacatcgggcggtagcctctacgcgacgagatcgcgaccaccgcagcgtccccaaaggccaccactcatcgcctcttgcagcccattcggtcgcacgggaacaggcatggtcgctcgggtagccgcggtgagcacagagctcgtgtacagcttcttgagacaccatctggctgca

SEQ ID NO: 54763 - DNA, 242 bp, Setaria italica
  Peptide Sequence Number=SeqID_120737
gcgacgagatcgcgaccaccgcagcgtccccaaaggccaccactcatcgcctcttgcagcccattcggtcgcacggtttgctgctgctccaacttaccgctgatcctacgatcgtagctaatctgtgtgcttcggcttaccgacaccggcatctttcgacgtttctgtccgcagggaacaggcatggtcgctcgggtagccgcggtgagcacagagctcgtgtacagcttcttgagacacca

SEQ ID NO: 54764 - DNA, 383 bp, Setaria italica
  Peptide Sequence Number=SeqID_120738
tttgattgaggctgtagctttattctgttgtactgaagttcctccgccgtccgggagtttatatttttttgttctaatcattttatgctgtaactgtttgcggaatagcttgatgttagtgccacaaggatagcagtagacctgatcgttttattcctttgctattactactaaaaggacgacaagctttgctgctacaagcttaccatgatatttgtctccagattcttctcattatattgtcaatgctaacgtgtcatttactttggaatttggatttccagctccagtaattgatggtgaacgcctgaagaagtatgtgttcttcaagctccgcactgaattaccagagggtccattctgcatcttgtacattcacagta

SEQ ID NO: 54765 - DNA, 254 bp, Setaria italica
  Peptide Sequence Number=SeqID_120739
tattctcaaccatcttgtttatcaaattttgtaatatgattctagatcgatattcctatttaacaaatcatgcaatgagtgatttgaggcttgagaattagcattaaaattatctgatcttttaattgtaaagcattcttccttttatagtatcggcaaatgaggaggagagaacaggaccggctagcacgaatggatgctgactaccaaaagaaggaaagagatggctttgttcgaaatgcgaaaggaggaga

SEQ ID NO: 54766 - DNA, 209 bp, Setaria italica
  Peptide Sequence Number=SeqID_120740
aggtcaccattcagacggagcaccgcttgcttgttgaagaagaaagcatgtgcgttcctccctggttggctgtggacaatgaactagcatctggtatgcctgttgtaataggctaatgcctgttgtaataggctaagacaggtcctgtgtctgttagaggatcaaaaggtactgatacaaggcattctccgaacgaggaacacaaacag

SEQ ID NO: 54767 - DNA, 253 bp, Setaria italica
  Peptide Sequence Number=SeqID_120741
gtcgtcccttggttgttcgtacttacgtacgagacgttcagtccggtggtcaagccagctaccgtccggactgttctctcactggctctctcccgctcctggcccgtgcatcatctcgacgtcaagaacgccttcctgcacggtactctgactgagacagtttactgcagccagccagcacagccagccagcgggtttcgttgattcttctcggcctaatatggtctgccggctcaacaagtcactctatcgg

SEQ ID NO: 54768 - DNA, 243 bp, Setaria italica
  Peptide Sequence Number=SeqID_120742
cgtctaccagcgccgggcgcggccagctccactacacctggagccagccccgccaccggcgtcgtcgcctcggtcaccgcttgtggactcttctccgccggccccgactgcccgtgtcgcgccgtcggtgtaccatccgcctctcctacaccagcacccgcgtcatgttcaccctatggtgacgcgacatgcggctggtaccctgcagccccgggctcttacagcgatgcccggcgagtcgca

SEQ ID NO: 54769 - DNA, 375 bp, Setaria italica
  Peptide Sequence Number=SeqID_120743
attcttagttactactacctagtccttctttgcagtatcagcaccaccgttgccatctgcagtatcagcctggatggggttgatcctggagcttgcaactggatcattcctatcttctgaattgtaatttcctgatctgtcatcagccccattttcatcttttcttgagggtttactcccatcatgtgattggtggacagccgtaaccatttgtttgcctttgtctacatcttcaaaagttcttccttcttctgaaattgtcgttttggtactttctttgtactttaccgacgaaggaaacgacttaggtaacggtaggacccccaattttacaactagtacaagaaactagactagactaacctaattacgtaa

SEQ ID NO: 54770 - DNA, 320 bp, Setaria italica
  Peptide Sequence Number=SeqID_120744
cttaagaaaccttttcttctcttaacgcctatgatcactggatgagctagtatccaatgatgacgacgagtatgattctgactcagagccactatctgaggaataggatcgtgagtctgaagtatctgagctatatgaatcggatgaatagtgttttctcttctttctgtgtttatcatcactggatgctttttttggatttggctctcccttcagcaatggagttgccatctgcttttcttagcttcttgtctgcagaaagaggtaatgaggaatattagcagagagtagatacaatacattgcagatctgctatttta

SEQ ID NO: 54771 - DNA, 307 bp, Setaria italica
  Peptide Sequence Number=SeqID_120745
cacttcctcctaggaaaatgaaatagttgcagttctcataggagtagccccaaaaaactcagtgacttagaatcgcaaaattgtttattactttgtgtcagatttggctatgtgatttttcagtttactatgacagtaataaatggtcaaggttgaggaataagttgtttctatgagaggtactcacctcatcagtgaggagaacactatccaaaacggcaaaccctgcagcaacgccaccttcgtttgatgaagaaactttggtgcgcattaagtaaccacactggttattcaggatgaccttgtc

SEQ ID NO: 54772 - DNA, 281 bp, Setaria italica
  Peptide Sequence Number=SeqID_120746
gcagccctagcaaatcgaccccccttccgtcttccccatccctttccccctttccttcgcccgtggccgccgccgggcacgcccacctggttcctcctcgaagcggctcctcgcttctggtgttcgtgcttctctccgttccccctctcctggccggggaaggcgtggatccgaacttggggggctgatttctcctcttgctcttgtcgcatggcggacgggggcattttggtagccatttgccaatatggtggagagttcacttctggccccaatggtaa

SEQ ID NO: 54773 - DNA, 252 bp, Setaria italica
  Peptide Sequence Number=SeqID_120747
atccgatctccgctctccatatcggatcggatccgcagcagcatccgcgatcgcgagccatggcggggaggaccaacatccccacgaacaactccgccctcatcgctatcatcgccgacgaggacaccgtcactggcttcttgatggccggagttggcaatgttgatctgcgcaagaaaaccaactacctcctcgtcgataacagtaagtaaaacgaacgccttcacaaatatcaagattgctttacccggg

SEQ ID NO: 54774 - DNA, 232 bp, Setaria italica
  Peptide Sequence Number=SeqID_120748
cccactcttctgatgcattgtgacagagttccaatttgcctcggagaattctctgccactgtttgcactgggaccttgatcagattgctggcctgagtacatctccaattgtccagaagcaccaacgttccttaatcccctgaccacggaatcacatgaacccttcagctccaagaggccggccaccaatttctcctggcgttggtgcgcattggagagagagacagctcgg

SEQ ID NO: 54775 - DNA, 245 bp, Setaria italica
  Peptide Sequence Number=SeqID_120749
cgaagtcgttggttgcgtatgtggtgcccatgaccccatgtctcctttattgtatttactacggtggattccttatccagttcctgattgaaaagatgggcatgatgggatctcttccaaaaccatacggatattttgtgcctgatgttattgtcggagcagtagttggactggtggttggttggtgttttggtcctctagcatcaaccacagagaaaccatagtttgaatccacaatatcatta

SEQ ID NO: 54776 - DNA, 366 bp, Setaria italica
  Peptide Sequence Number=SeqID_120750
ctttaccttcaagaagcaaacctgtcttttctttactgccgctgcagcagccatcgctaaccttttcttttttaatgattggcagggaacaatgctcttaatgtggatccggtacaattgctccaaggggatgggaaacatgatcaaacttgtagtcacagccttgatcaagctcttttccttcatccggcttttcatctctagagctgagaggaggcttgagatcgtccatcgttctgctcctccagtaatccaagcagctgagaagccacggcctcggaccgtcagtgatgaagagatgtgcgcctgcttacagcgtcttgacaatctcgagtccttgtgcaaatacaatactacgaccaacaa

SEQ ID NO: 54777 - DNA, 308 bp, Setaria italica
  misc_feature (304)..(304): n is a, c, g, or t
  Peptide Sequence Number=SeqID_120751
tggtgcagaaaccaatggctaattttggggccatcttccaccaacactaggcctcatgatctcgggaacaatgctcttaatgtggatggtacaattgctccaacgggggatgggaaaacatgatcaaacttgtagtcacagccttgatcaagctcttttccttcatccggcttttcatctctagagctgagaggaggcttgagatcgtccatcgttctgctcctccagtaatccaagcagctgagaagccacggccttcggtaccgttctagttgtattgtaagtagtattgttgtgtcttgtnttta

SEQ ID NO: 54778 - DNA, 243 bp, Setaria italica
  Peptide Sequence Number=SeqID_120752
cagaggacacggaggtcatccgaagcacaaataggggtgtgccgttggttctcaacgacccgcctacaccagctggccttgctctggagcaggccacctggcgattggtagaaagagatgcgatgacagcagtcatggttgaggagcaggagagacccaagaagaaaggtggcttcttttcattcttcaagtaggtgagcattgagttcaactgtggagtttatttaggctgtagatgctgta

SEQ ID NO: 54779 - DNA, 408 bp, Setaria italica
  misc_feature (346)..(346): n is a, c, g, or t
  Peptide Sequence Number=SeqID_120753
tcgttgcgctcgttgaagccaagcccgacgaggcgttcgacttcaacgtcgcgctgtcggaccacgagaagtacgtcaagagggagcaggagaaggagactgccggcgctggtggcgaggatagcggcagcgggggcgagattgatatacaccccgacgattgacggcggggtgtatatcaatctcgcccccgccgtcaatcgtcggctcaaggaaggtgaaaccattaggataaatgtaaaaaacagccatcaactggaagtggcatgcttacatctgccggtttatctggaggagccgctgcaaaacccaagacaagcatgcttcttgcgccgccaccaaggancagctggaaagcttcggtctcctcttccacctccacctaatgaccctgcagctgcaaggatg

SEQ ID NO: 54780 - DNA, 453 bp, Setaria italica
  Peptide Sequence Number=SeqID_120754
acacaatatggacaattaagtccacaggagcgggataccattgacgctatagtaagagcaagccagttccccctgtcaattgttcttgtcggggttggtgatgggccatgggacatgatgcaccagtttgatgacaatatacctgctcgctcatttgacaatttccagtttgtgaatttcacggagattatgtcaaagagcatagctgctgatagaaaggaggcagaatttgcattgtcagccctgatggaaattcctgaacagtacaaagcaacacttgatcttcaactcttagggtatctactatgatttccaatattgtactgagtcaattagaactgtaacttgagctttgggaaatagtgtgccaatttgatcactttcttaatatttcttctactctttcagccgccgccaaagaataactccacgagttgctctgccaccaccaac

SEQ ID NO: 54781 - DNA, 347 bp, Setaria italica
  Peptide Sequence Number=SeqID_120755
gctgccacaaggcggcctgggcctgacacttatgcagcagaaagtgctttagaggacagaattgtacgtatatctttcttgttctcaccatctccgacccatttcatgcccaaatccaaagttaaactgaaacactggaaatttgattttatgttattaggcttattcatattgggcccttgcattttgttgctttaacttcccttgcagaccataatacctaatctaatttgactatttctcagttcacttctaccttcttatgttccatttgatctgaaaacaatattttttgaaagtaaatctgaaaactaattaattagtccgtttattgttcttttgttctt

SEQ ID NO: 54782 - DNA, 319 bp, Setaria italica
  Peptide Sequence Number=SeqID_120756
acccgaagtgttgatacacaatatggacaattaagtccacaggagcgggataccattgacgctatagtaagagcaaggtactttatctgactgaggtttcgaaagaaaacaattactactttcatgttctgccaaatcagtaaagtacacatagaataatatctcttttttaaaaaatattccagccagttccccctgtcaattgttcttgtcggggttggtgatgggccatgggacatgatgcaccagtttgatgacaatataccttctcgctcatttgacaatttccagtttgtgaatttcacggagattatgtcaa

SEQ ID NO: 54783 - DNA, 245 bp, Setaria italica
  Peptide Sequence Number=SeqID_120757
agtttagctacactgagacttcttacgcagtaagactaacacaccccttcttcggagaacaatgtgcagccagaaacacacgccaggttgcagaggaaatattccaggattggtgatgactaccgctctttgagccaggtcactgatgctttggcacaagcaggccttgaatcttcaaatcttattgtaggcattgattttacaaagagcaatgaatggacaggtaaaatgtccttcaatcgccg

SEQ ID NO: 54784 - DNA, 211 bp, Setaria italica
  Peptide Sequence Number=SeqID_120758
tccttgtggttatgggctgctggcatagagggcagcgctccaaattcttcccacactcatagcaagtgttggaagagactcttgcgcagaatcatcagaaccagctttaatgctaccgtgcttcatcagcttgtaattggtgtgttagtcttactgcgtaagaagtctcagtgtagatggtgtgatgtcactgtcccagtaccaatctgaa

SEQ ID NO: 54785 - DNA, 292 bp, Setaria italica
  Peptide Sequence Number=SeqID_120759
ccccaacctcccagcacagaggagctctcctcttcttgatccgagcagagttcgccttggaaggagcagggagactgatgggccaatgtgaagagcacacaagaacagaagaagaagaagacggccgggagattatatactccagtccaagaagaactgggctaaccaacaagagctagccgatgactcaccaaccgaaactagaaacaagattaggtagaaagaaggaacccaaggaacctaaactaaaaaccaaagaaccgaactaactaacaaaacgggaaaacgaaac

SEQ ID NO: 54786 - DNA, 374 bp, Setaria italica
  Peptide Sequence Number=SeqID_120760
cggctaaagagaagctcgaggcagctggttgtaacctgactgtactgcctaaacggaagaaatggctttcacagaattatctgaagaaccaagcccgtgcagaggagtactttgccaagaaaaaggcagcgctggtgaatctgatggcgcctctgcatagattcctatatgatgtacttctcttcttccctttcctttagcatattcttattgctctctttttctcttggttattcgtatatcatgaattttgtatctatgcgatatgcggttattttctgcccctttttgtgaaatgtgaacaacatcgctgtagtagaataatagaccctaggtagacttactaggaagaattacttttacaaatagaaaaa

SEQ ID NO: 54787 - DNA, 393 bp, Setaria italica
  Peptide Sequence Number=SeqID_120761
gggaacaccacacaccgtaatgggggttgacctttattatatagccaatataatcaagtatacatggaaagctatgaatcagctatatacggctatacattgcctaataattagtccgcctggttgtctgaataaaaatgaatgtcacattggctgaatagttattgattatttatgatctctgcaggcaaattgcatggctaattttactcagtttattgccgttagataaaaaatgctgagataccattcttatgctcgtcaccagcaatcgcttgctacttgtaatgtactgagataccattcttatgcagcatgttttggagcacgggaagcctcacgaaagatccatcattattgaaaaattagctggacagatcattcagatgagcc

SEQ ID NO: 54788 - DNA, 243 bp, Setaria italica
  Peptide Sequence Number=SeqID_120762
aaggaaaggaaatggaagggaaggtgacgcgtgacggcgaggaggcggctttctctctgctggtgctggtgctggtgctgggggaggaggaaagtctatattttgcgacgagactgtacaaatctgcatcctgcgagagttagcgtccgcttaggataaggtttcattgcccgccgtgtttatcactaatggatgtttgtaatcctgagtaactgatgtaacaattccagcttctgaaaccag

SEQ ID NO: 54789 - DNA, 359 bp, Setaria italica
  Peptide Sequence Number=SeqID_120763
tgtcttggtactagtattctatttctagtattgtagcctaacagaaatttgcctcgaatgttgttgagaagtgtctaacattcggcggacctacagagcgagaagttctcataaatgaaatgcttggtaccactgatgagaatgagcctctacaggccatgatgaaggatcagtttggtaactatgttgtacagaaggtacttgagacttgtgatgatcagcaacgtgagttgatcctgtcacgggtaaaggcccacttaaatgctctgaagaaatatacatatgggaagcacatagttgctcgtgtagagaaacttgttgctgctggtgagaggaggattggacttcaatcaacaaaa

SEQ ID NO: 54790 - DNA, 368 bp, Setaria italica
  misc_feature (337)..(337): n is a, c, g, or t
  Peptide Sequence Number=SeqID_120764
gaaagaagtttcaggatgatcaagagttctttgccagcaaggttaatgctgcattgagcaactattccaagaaaaacgggggacactttgaaattcatattatttgcggtgtgaatcctaatgtaagcgaaggtgcaaggtcacatatcaacttttgggcaatacccaagggatcaaatgttgctagcactactcctatactgttctttgctgaatgtagcaatgatgctgatgaggaagaggaatcaatgtgtttctctttatcttctgcttcgaatcaaaatagatccagtcctcatccaatacatgcaccatgtcaacatcgaaactggcaggnctaatgagcaactcattgctgatgctgtgtt

SEQ ID NO: 54791 - DNA, 158 bp, Setaria italica
  Peptide Sequence Number=SeqID_120765
cataatggctattggagaacacattgattcctcttcctcatcagcatcattgattccgtgcgctgctttgactgtgaatactatggaataaagattgtgcattcccatgatacacttcatcacacggatgcacaatctttattccatagtattcacag

SEQ ID NO: 54792 - DNA, 263 bp, Setaria italica
  Peptide Sequence Number=SeqID_120766
agttctttgccagcaaggttaatgctgcattgagcaactattccaagaaaaacggggtcagtgcatttcctttctgttgtttttgtttcgtaaatttcactattatttggttaaatgtaattttatcaatttattctgtctactgaactgctatatgcagggacactttgaaattcatattatttgcggtgtgaatcctaatgtaagcgaaggtgcaaggtcacatatcaacttttgggcaatacccaagggatacaaaaaaa

SEQ ID NO: 54793 - DNA, 242 bp, Setaria italica
  Peptide Sequence Number=SeqID_120767
ccggctgtccgcaaagacagccgaacgcatgaccgtcgcccggcggtcgctcgaaggccttcatccacccacagagaggcaaacccgggttcagtgtcatctccctcaccaccaaggtagcccttggctgtgctgctgtctctgcaaagcaccctgaaccaccgacctttctgagagcgtcgcagttgttggcagctcagctggacaatgcctccatgattctgcccgtgctgcacaacggg

SEQ ID NO: 54794 - DNA, 259 bp, Setaria italica
  misc_feature (25)..(25): n is a, c, g, or t
  misc_feature (90)..(90): n is a, c, g, or t
  Peptide Sequence Number=SeqID_120768
cgtcctgtccgagcacctcctctcnggttttattgatcggctcctcaatcacccgccttgtgcagtccttctccgttgtattcctctacnggttttatgtcttctcagtagcctccctgtagttagttgtaaattttgcaattaactaagctttctctataggatatgaatcgatgactccatatttcagtgatagtgcgccttagtttgagagactaaggttgatggacatgtgctttttgttagtgtaataggtgcc

SEQ ID NO: 54795 - DNA, 183 bp, Setaria italica
  Peptide Sequence Number=SeqID_120769
cggagctccaggtcggaggatgacctggacctccaggcccagatggagaggaggaggaagcggaggaaggagtcgaaccgggagtcggctcggaggtctaggctgcgaaagcagcagcatctcgacgacctcacctcacaggcttgcactgatgtgcaggtgaaaaaagcaaaacagatgtga

SEQ ID NO: 54796 - DNA, 156 bp, Setaria italica
  Peptide Sequence Number=SeqID_120770
aatagaaacaaaacgtgccgtgctgagcagttaatacgctagtggttcttgagctctccggaatggattgacaagctcatactccacaagtgagaggttgttgtcctccttcacattgaagcttgccggttcagtgacttcgatgcggccccattt

SEQ ID NO: 54797 - DNA, 384 bp, Setaria italica
  Peptide Sequence Number=SeqID_120771
tgtagtaagtaacttggtacctaaaaattttccttcctttgttaacactccatgtcacttttaacatcagccagaatggttggaccaacaaaattgccatcctcgaacttaggaaccacaatatctctcccgtcaagcaaaagacgcgccccactgtcaacaccattttggactaacttgcagatacggtccttggcctgattaaagtaaactgttaggagcgacgaacgagtgaaaagataaagggccttaataaccaagctagcagctcttatgagtattgactattgaagtaagaccaaggggaaaatatgtgtttcattagcaaactagtaatttgtgatcatgataataaacccaaggcaagttgattcaagaagaatg

SEQ ID NO: 54798 - DNA, 346 bp, Setaria italica
  Peptide Sequence Number=SeqID_120772
cagtgctcaatgccatgcacctttgccctgctgcacaaacccagcagcataagggcattcagtgtggcatctttatcggcatcaggaaggataattgcatgattctttgctcccatgttgcactgaacacgcttgcctgatgccgatgctctagaatatatatgcataccagctgtgttggaaccaacaaaagatacagccttaatatcctcatcatcacaaatattgttgacaacatcatgtgtaccatgaacaatgttcaaaacacccttaggtaaaccagcctccattgctagctccgctaagtctattctattggtaagtccccttgggtcctttttctgat

SEQ ID NO: 54799 - DNA, 241 bp, Setaria italica
  Peptide Sequence Number=SeqID_120773
ttcacccatttgtagtgtccccattccacaagcatgctccaccacctctagaccccgaaacacatcgccccaagcatctttcagcgtcttcccctgctccgtcgtgatgttctctgcaagcttgtcctgcaatcaggaggaggcaacagtcacagagtcactaaaacaaggactgtacagcatcagaatgacgcaatgaggacgttgattaaacaaatagtcaccatgtttgcccggatga

SEQ ID NO: 54800 - DNA, 243 bp, Setaria italica
  Peptide Sequence Number=SeqID_120774
ttcacccatttgtagtgtccccattccacaagcatgctccaccacctctagaccccgaaacacatcgccccaagcatctttcagcgtcttcccctgctccgtcgtgatgttctctgcaagcttgtcctgcaatcaggaggaggcaacagtcacagagtcaactaaaacaaggactgtacagcatcagaatgacgcaatgaggacgttgattaaacaaatagtcaccatgtttgcccggatgaa

SEQ ID NO: 54801 - DNA, 234 bp, Setaria italica
  Peptide Sequence Number=SeqID_120775
gtcgacgtgctcgtcggcgcgcgactcgacgaactccccaccgatgaggaggcgcacccttggcggggacgaggcggggccgttggaaagccacgaggcggcggcggcggtggagagcggggcggccgcggccatcgccggcgagcggcggagcccggaggctgcgcgcggaaacggagggcgtcaggtcagtcagtcagtcagccagggaaggggacgcgcggcgcaacggcg

SEQ ID NO: 54802 - DNA, 234 bp, Setaria italica
  Peptide Sequence Number=SeqID_120776
acttcacaaatcgcatcgcctatgtccagaggtgtgaagcgctggagagtgtggagggagagttcctgccacctcacttttgcgaggtgggcatggagagggagacgcgctgcgccggcgactccttccactgctgcgtgattgtctttatctgggtgaagaactgcacgccagccttgcctgccacacccaatgccacatgtacagtgcatgttaatcggacccgaacgctaa

SEQ ID NO: 54803 - DNA, 421 bp, Setaria italica
  Peptide Sequence Number=SeqID_120777
ttaccttaccttagtaaacaactaccaatgtcacttttaacatcagccaagaaataggttaggaaccaaacaaaaattagaccaatcctcgaacttaggaaccacaatatctctcccgtcaagcaaaagacgcgccccactgtcaacaccattttggactaacttgcagatacggtccttggcctctctgctgatcactggaccaaggtctgcatcattaaccattcctgaattaacaacaagaccacttgcacgtttgacaagttcttcctcccatgattctgaacctccaacaaaaacagcagtgctcaatgccatgcacctttgccctgctgcaccaacccagcagcaataagggcattcagtgtggcatctttatcggcatcaggaaggataattgcatgattctttgctccatgtt

SEQ ID NO: 54804 - DNA, 214 bp, Setaria italica
  Peptide Sequence Number=SeqID_120778
gcctatgtccagaggtgtgaagcgctggagagtgtggagggagagttcctgccacctcacttttgcgaggtgggcatggagagggagacgcgctgcgccggcgactccttccactgctgcgtgattgtctttatctgggtgaagaactgcacgccaagaccttgaccgtaagaaaattacaaagtactacctagacgaaaggaaagaccttaga

SEQ ID NO: 54805 - DNA, 184 bp, Setaria italica
  Peptide Sequence Number=SeqID_120779
tggaaaggttgcaggcaggacccatttgtaagtattatgcagaccaaaatatacaacatattacaggtgcaaaaattgtgccacaaatagatataaacatataggatactggattcacttactgtgttggaaccaacaaaagatacagccttaatatcctcatcatcacaaatattgttgacaa

SEQ ID NO: 54806 - DNA, 226 bp, Setaria italica
  Peptide Sequence Number=SeqID_120780
ttttttttggttagtaagtaaccggtctacgtacggtctattcttttatttctgctcttattttgagagtttacacacgacaccccatccatctgcatacctgtggcttttactgtattctctacgcagcagaacgggcagcgctcaacaatctctaaacctggccgctaattcgatgtttcaagcgaggcagcatgcatggtgtccggctttgcgcgagtcgtag

SEQ ID NO: 54807 - DNA, 141 bp, Setaria italica
  Peptide Sequence Number=SeqID_120781
gacttgaatttctacggcaaggctggcgtgcagtagaagaatggcagtggtactggaattgggacattgattcccacctgtccagcttcaatgtctgtctggaatttccttgcagagactccagatgttgtaaatatagaa

SEQ ID NO: 54808 - DNA, 364 bp, Setaria italica
  Peptide Sequence Number=SeqID_120782
cgcgaagaaaaatccagcagagttttgccttgaacaagcaaggtgttcagatcggaattaggacagaatcgcgctctgagaaaccaagaaactaaccccaggtgaaaattttggcagagtgtcggcctggagaacaaggtttttgggcaagaaatttcggcagagtgacggcctaaccagcaaggtttctggtgaaaattttcggcagagtgacagactgaacagctaactagctaggtctcctgtgtgaaaaaacaatccggcagagtcttgccctgaatcaagaaaaggtttaccggaccgaaaaaattaccgaacaagaagtttttaggactagacaacaagaagaacaactttagactta

SEQ ID NO: 54809 - DNA, 364 bp, Setaria italica
  misc_feature (346)..(346): n is a, c, g, or t
  Peptide Sequence Number=SeqID_120783
tttaaggttttaaacttaaatttaactaaagttaagaagaacaattaatttaacaattacaatcttcctctcctttgtattgtggacatttcatcctttcatccttcagaccaagcgcttctacactgttctgatctggcgcagggtgcttgccttcttatgtgcttctcaatttctacggataataacattctattccacacagcttccaggtcccaactatcattgtcgcgagggctcacctctggccagattaccaccaccccagaatgcagcagaggtccttctgattaatttcccaagggggatgatatatggctgtggtgacttgatattttcatcccanatgattttcactctagtc

SEQ ID NO: 54810 - DNA, 336 bp, Setaria italica
  Peptide Sequence Number=SeqID_120784
gtaccgacggccgcttcggctcgttgatctggtccagcgcctcgaggagggtggggcccttgtaccagtccaggttcgtcgacctctcgatcatgttgtcaccctcgaacccagagatgggcacgaagtggatcttgtccgggttgtaccccaccttcttcagataggacccgacttccttcacgatctcgtcgtaccgagccttggagtacttgggggtggtggcgtccatctgaattttcagcaaaaactttcattagcaattagcaccaaagatcatcaaaccaagaacaagcagtatattgttaccttgttgcagcagcagatcatctgcct

SEQ ID NO: 54811 - DNA, 264 bp, Setaria italica
  Peptide Sequence Number=SeqID_120785
gggttgggggtccctttgttacctagtccaggttcgtcgacctctcgatcatgttgtcaccctcgaacccagagatgggcacgaagtggatcttgtccgggttgtaccccaccttcttcagataggacccgacttccttcacgatctcgtcgtaccgagccttggagtacttgggggtggtggcgtccatcttgttgcagcagcagatcatctgcctgacaccaagagtgaaggcaaggagggcgtgctcacgggtttggccat

SEQ ID NO: 54812 - DNA, 237 bp, Setaria italica
  Peptide Sequence Number=SeqID_120786
gtctcagaaagacctcttgtttatatacaaatatcagtacactgtctgcagtctgtattccttcacccacaataaaataagggaggagcactaccggacgctgcggctgcggccgggggccacccgcggcgaggtcaagaaggccttccgccgcctcgcgctcatgtaccacccggacgtctgcaaggagagcgacggcggcggcggcgcgacgcctgcggcgtccagtccagcgga

SEQ ID NO: 54813 - DNA, 452 bp, Setaria italica
  Peptide Sequence Number=SeqID_120787
agtgtggtgcctgctagggactatggtttacaaaatggtgatgccaaatccttcgctccaaactccgacactttagtcaggcatcaactccagggtgcatccatgcaaaaagacttagttgtggaagaccccaatactcgtctcatggatcctgagaccaaggaactttactttagatcacaatcacaagaggacgagatcttgttgcttcgcaagcaagttgcagatgcatctctcaaggagctgagattgctgaacgaaaaacatattctggagaggaggcttacagacttgaggatggaagaagctatatctggtgctatgaaacaactgaaccagaagaaaaaccatattgaggaaaatatgagactggcaaatgatctaaaagctgaggaagaagagctataccttttcacttcatcattgcttagcatgctagcagaatacaatgt

SEQ ID NO: 54814 - DNA, 400 bp, Setaria italica
  Peptide Sequence Number=SeqID_120788
ccaaggaactttaacttttagatcacaatcacaagaggacgagatcttgttgcttcgcaagcaagttgcagatgcatctctcaaggagctgagattgctgaacgaaaaacatattctggagaggaggcttacagacttgaggatggtctctatgaaagatacatgtcactttgctttatgttccatttgtagaactatgcattaatttaaatcttactttgctaggctgttgacgagaagcaggaagaagctatatctggtgctatgaaacaactgaaccagaagaaaaaccatattgaggaaaatatgagactggcaaatgatctaaaagctgaggaagaagagctataccttttcacttcatcattgcttagcatgctagcagaatacaatgtccgcc

SEQ ID NO: 54815 - DNA, 456 bp, Setaria italica
  Peptide Sequence Number=SeqID_120789
aaccttccccatcttataatatggatgcaaataggaacactcttcggtatgctcaagtttcaagtgatcggcatgttgagcaaatgtaccatggatcccattttcagcaggatattgtgggcactacaccttctaattattttgaggaaaatgttcgtaatggagaagaacactgctgttggagcagaggtgacccgcagcttctcaagcaaaaagaacatcgtcaccttcgggacgcagcatgccctggaccccagcaccactgtgaaggcccgctacaacagcaacggcatggccagcgccctcatccagcacgagtggaggcccaagtcattcgttaccctcaccactgaggtcgacaccaaggctttcgagaagagctccaaggttgggctgtccctagtccttaagccctgatgatgatgccgatccctttttggtcctaggatggttagg

SEQ ID NO: 54816 - DNA, 358 bp, Setaria italica
  Peptide Sequence Number=SeqID_120790
gtttcaaattgttggcgagcctagactaggatctacattaacagcatgtaggtttccctacaaatggtactaccctttgcaatttccagtgggttcgccatcttgaaaatggtaccaggcagtctatcgaaggtgctacgatgtatgactatgtggttactgcagatgatgttggcactcttcttgctgtagactgcacgcctatggatgataatggtcgtcagatccagagatgcagaatcatattgatgcatgcattttgaatgggaaagctgaatttgaagttgttgtcctgcatgcatattctcctcctgaggatggactggctacattggtgcttacacgacctagctatcag

SEQ ID NO: 54817 - DNA, 302 bp, Setaria italica
  Peptide Sequence Number=SeqID_120791
ggttactgcagatggatgtttggcactctcttgctgtagactgcacgcctatggatgataatggccgtcaggagggagtagaaacactattatgataagtttccgctctcaattctgtctcaataataggtgatttagtgacaaaatttgctaacaatgggtataagataacctgtgatccagagatgcagaatcatattgatgcatgcattttgaatgggaaagctgaatttgaagttgttgtcctgcatgcatattctcctcctgaggaatgggaactggcttacattggtgcttacacg

SEQ ID NO: 54818 - DNA, 462 bp, Setaria italica
  Peptide Sequence Number=SeqID_120792
agagaattcgatggtggaaatcgagcacatcgacaagggggattgaattcttggatcatgtgatcacgcgcagggtcatctacccgaccttgcgatatactgccagtgaggtaacattgtcagtgagaagggtgtcggaacattgttgtctgtaacagcgagcttgcagaggtgcattaggcattttaggaaacttgagcttgtaaagggggacagggatcctgagccattgccatgttcaccaatgttgtattctgggcaggcacacactaactcgcagatgaacaagtttctcgagaccatggctgattggtacaggtatgcagataaccggaagaagattgtagggttctgtgcatatgtcataaggagttcactggcaaagatctatgcggcaaggtatagactgaagtctcgaagctaaaggtctaacaaagaatacgacttacaacgggaatacta

SEQ ID NO: 54819 - DNA, 236 bp, Setaria italica
  Peptide Sequence Number=SeqID_120793
gaccggccagacctcgccaccgtcgtgctcccagagctgaaccgcctccgcgcgctcggcgaggacaacatggagtactgcaaccccatgaccggacgcggcggcggcatgcacagctcctccggcttccacagcggccactactcccagccacgacacgtaacgccctccctcctctttgctgacacttctttgctgaatctgatgcatatcgttgacactggtaatctgacata

SEQ ID NO: 54820 - DNA, 416 bp, Setaria italica
  Peptide Sequence Number=SeqID_120794
tagcaagtcagaccaattcttcagattcagaaatgggctgacgaagatgcaagagataaaatgctgcttgtcagctcaaccaattgatactttctgccacttagcttgcagcaggcagctacattgcccagaatctatcagggtcgggactaaataatgtatagtcctggatctccaaattcgcaacatgccagttaacgagtccagcttgcagtgacttgataagaaaaagaataacaggtagtatccaccattcattgtcttccctactcttgaagctttttgcgttgtatacatgatgcactgaggacaccgccaaagaagagagccaaaaatacaaagcaccatatatcattgatacaatctgcattaaactaatatggttaaaactccaattggccttgttaattgtttgt

SEQ ID NO: 54821 - DNA, 260 bp, Setaria italica
  Peptide Sequence Number=SeqID_120795
ttccaccattcactccacctgtcaaccgcttcccatggggcaatagacctatcctaaacacacgaccaagatgcaaaactgagaaagaaaataattaccacatatctgaactacgctggagagctcccagaaataggaggaagttccaggtctagcaagtcagaccaattcttcagattcagaaatgagggaacactcgagtcactagattataaaagagactatctcttccctttttcattgtttccgcatagcctata

SEQ ID NO: 54822 - DNA, 259 bp, Setaria italica
  Peptide Sequence Number=SeqID_120796
gaaccaccctagctccactcgaacaccatgcctctcaagttggggattcccatgactgttgatccaagtaacaacagggctcaaagttgagcggatgcctccttgtcttactgtcctcaattgggcattcaaaccagcgactaatctgttccagatcgcagtcgatacatactaaaaaaacaaagtcgacgttatacagggtgattgaacaaaacatgctgcacttttttagcatgttcatcaaaacaccaacgaatta

SEQ ID NO: 54823 - DNA, 285 bp, Setaria italica
  Peptide Sequence Number=SeqID_120797
tcggccttgcctgccggcgggtaggcggaggaaggcgggtaggcggcgaccggcggaggctgggtgtaggcggactgggcgggggtgggagcgtacccgccggccgattgggtgacctcgccgagcttgtatgagaagttgaggactccctggggcttggcggaggagatcttgcggacctggtaggcgacgaacttggcgggatccctccacgtactcctccgcgccgagcgcgccctcggcgaccgcgacgtcggcgaggtccacatcccgctctccgagctc

SEQ ID NO: 54824 - DNA, 300 bp, Setaria italica
  misc_feature (275)..(275): n is a, c, g, or t
  Peptide Sequence Number=SeqID_120798
gttctttggttcggtaggtagtattctttgtcggtaccttggttaggtcgacgaacttggcggggacggggccgtcgggggcgccggagaggagctcggagagcgggatgtggacctcgccgacgtcgcggtcgccgagggcgcgctcggcgcggaggagtacgtggagggatcccgcgccgctggcggggacggtgaagcggagcgtggcgttccaggtggggttccggccgccggtgcggtcggcctggatccgctgccgcgagcgggggtcnccggagagcgacaccacggcgtaga

SEQ ID NO: 54825 - DNA, 418 bp, Setaria italica
  Peptide Sequence Number=SeqID_120799
cggggagcaacagcttcgccggcaacgcctggacgtgctcctgggagcccaattccgtcgactccacggaccggaccaggacggcctcgcagtcatggcagtacaatggtgacgaggtggagcaggtcacggagcagtcatggcagagcaagcagaaggcggcggcgtcgcaggagcccagccgccgtggttcaactagcaatgttcacgttcaacgcgtgcgtggcagtgccgtcagtggccggtccgatggtcgcggtgtttcggcgagctcttcggttgtttaacgatgctactgtagacaagtttaaggaagtaaaataagaactaactaaaggtaagttaaaataaggtaaagtttaactaaggtttaaagaaaaagtttaaacttaaaggtaaactaaaaagtaaaattaaa

SEQ ID NO: 54826 - DNA, 245 bp, Setaria italica
  Peptide Sequence Number=SeqID_120800
ggcgtggcagggccggatcaaggaggtgctcgggttcctgctccactaaccacactagctgcagagagagacgccacggagctctggtcaaatctccgctcaccaatttgattgagttgtacttatacatgtacctagtcacgtaaagaatctactcatagtagaatacagttttagttttttcttacacaaaataatgtatttgccaaaccatttacagattaaagtaaaatgaaaagaaaaat

SEQ ID NO: 54827 - DNA, 272 bp, Setaria italica
  Peptide Sequence Number=SeqID_120801
aaggaaataaataaggaaaaagaacaaaaggaaacgaacttaaggaacaataggttagactttagacttgttcaagatatgcgagcacaaggtgtagctcctagtgtgctgacatactcaactttgatagatatctattcaaaggcaggaatgcatggagatgcatttaatgtctacttggattttaaggagtctggcctaaaggcagatgttgttctgttcagctctttatgattacattagccaagaatggcttggtagaatgtgctttg

SEQ ID NO: 54828 - DNA, 172 bp, Setaria italica
  Peptide Sequence Number=SeqID_120802
agacaaggagctcagcaagttgtgcttgaaggggtaaaccatcgtgtttgggagaacacatggagcgagttctgcctggacctgcaccttatgtcatgtggtgcagctcaagcaatgttgaagcgttcgacctgaaacggtgctccaattgaaaggagcaatgcttcaatga

SEQ ID NO: 54829 - DNA, 327 bp, Setaria italica
  Peptide Sequence Number=SeqID_120803
ctattgatttgattctagaatacatataggtgtgacaaatattcaagcaagatacccagaatctgatacatgaaaacagtcagctatccaacaggatgcatcctcaggcagtatcggtcacagggtactcatagaccacatccttcccgcaaagcctgcggtacacagcactgaatgtctccagcttgtactcagtgttgttgcgctcctttgggtccaagaagatcttgatgatctttgatccatcaaaggtagaataatactagaacaacgttttacccaacaaatactacaagaccgggtaagaacaaacaatacctaaccaaa

SEQ ID NO: 54830 - DNA, 385 bp, Setaria italica
  Peptide Sequence Number=SeqID_120804
ttccaagtctccagtgccagcaggtttaggggtggggggctgacctcaacctcctcctcttctacggttacagttactacagttttccgaggtttcctacctcttgtccgcccaccataacgtcctcgcctagttagactcggaagccgatgaaaggggtatgattggatggggaagaacaacaaggcggtgtcgcagaaccagatgtccgtcaggcaacaacatcgcagctgcatcttgagaaaggtcttgccagcaagcattggacagcattctcaggtattgggcggcacccgtttgttatagagactaagatggatgatggactggtataaggtgatcagtcatgagtgtacatactttgtcggcctactagttgcgactt

SEQ ID NO: 54831 - DNA, 264 bp, Setaria italica
  Peptide Sequence Number=SeqID_120805
gacggtttgtttctcatgccttatttttcgcacttgcatcaaagaagtttgagcttgtcaggaagatagtcttgtagaacaagaagggagatgtgctggcagttttcagcatagtaaagacgggggatcagtattcgggatctcttggctcaaaaataaaggtagatgtgctgacccgatagctttggagaagccagggaagttgtttggccattcatttggaactgcagtggagctagaaaaatactaaagaccagaacgtaa

SEQ ID NO: 54832 - DNA, 354 bp, Setaria italica
  Peptide Sequence Number=SeqID_120806
taggtactacctactattttaattagtctattattttgactgccttgtgcaagtaaaccttgtctgtgaccaggtgagggttaattgcgagcatcctcatgagggctgaagaaacaaaaagacacaaaatgatgttatcccagttgaatgcttgacagacaaacaacacgggccttagaatcacataaacagaaaatatgaatggagttcaaacagtttttaatcatgctggcatattatctccacaaagtacggttatattgtattcgttgtagatagaggatgcccgaaaaatggccctcacagtgtgcagaacttcagaagttacagtcattgagtactttgccaagaaca

SEQ ID NO: 54833 - DNA, 247 bp, Setaria italica
  Peptide Sequence Number=SeqID_120807
tctgcagctagttttgccttcatgatttccacatttgtagcaaaggcagcatcagctactactgttggatttgcaatattcattattgggttcttgactcaggtaatgttttgttaatcatcatattatccatcaagtatttcattttgtcagaaaatatgcagataccattgttattgcctccctgtgcagcttgttaccacctttgggttcccatattcggctgactaacaaaaaattgtaccgg

SEQ ID NO: 54834 - DNA, 248 bp, Setaria italica
  Peptide Sequence Number=SeqID_120808
aagcaatatgtagcaaaacatcagcagtgggcatcacaacagtggggaaattttactattacaggatgcacaacataagtgatatatacttcatcggaggctttggaactgttgcttgggtagatgttaacgagtacgaaactactcaacctgacaaggtagcagttgatggtgccgagaaaagtttgaaggtaaccataccagatcactgataccttgtttacggtataatgatcgcagcatgttag

SEQ ID NO: 54835 - DNA, 223 bp, Setaria italica
  Peptide Sequence Number=SeqID_120809
ttgtggaagtattggtgtatactttactttttcggggaaaaatgatgtatatcagagttctgtgtgccaaggtattaccgtcagaagcggttctttgtgatgggggataacaaatgtcaagaacgtcctgctctcctcttttgggtcaacatcaagccgctggccagcacaaaagaacaagcatttacatccaagatggtaggagaaatgatgtcaagtcaat

SEQ ID NO: 54836 - DNA, 235 bp, Setaria italica
  Peptide Sequence Number=SeqID_120810
ttagggctctgcatgtggccatttccagagaaattaacgttagtgatatatcctgttccaaatttcgacttcagccttattgatgtcccaatgcaacgcagtttcccctttgccattattgctatccggtcactaagaatatcagcctcctccatggaatgggtggtcaagacaatagctcttcctttcttcgcctcttctatgatgaaccgactactggcatggatccaataac

SEQ ID NO: 54837 - DNA, 134 bp, Setaria italica
  Peptide Sequence Number=SeqID_120811
caaatgtaaatggtgtccgaaagtcagttttctactttcttattccttcatactggacgggtaaaggaggcaagatgcaaggtcagaaattgaagtatttggtagatctttacagtgtttcaactgtaatttct

SEQ ID NO: 54838 - DNA, 228 bp, Setaria italica
  Peptide Sequence Number=SeqID_120812
ggccatggttaaccctaacatagaagctgtcaaatggttcttcatgtggccatttccagagaaattaacgttagtgatatatcctgttccaaatttcgacttcagccttattgatggcccaatggagccggtaaaacaactacaatcagttgtctgactggaatcacaccaattacagggggtgatgcattcatttatggtcaatctgtccgaagcgctgttggaatg

SEQ ID NO: 54839 - DNA, 251 bp, Setaria italica
  misc_feature (229)..(229): n is a, c, g, or t
  Peptide Sequence Number=SeqID_120813
ccccctcaaaaaataaaaaactttaacaagagtcgtggatcccacgattgagattgagaattctgctcctagtcagcactcaccagatacttgctgtcacatactatacatttttagagtacacgtatacacgcgtcgtatctgagtgagatttgcgttgcagatctgcacgggcggcgcgcgccacgacgaggtggacttcgagttcctgggcaacgcgagcgggganccgtacctcctgcacaccaaca

SEQ ID NO: 54840 - DNA, 225 bp, Setaria italica
  misc_feature (216)..(216): n is a, c, g, or t
  Peptide Sequence Number=SeqID_120814
tggatttgatacaccccaacctttttccttgtatgcttcccggacatcttcacacgtgttacaacattgatcatcagactacattcaattaggagagacattcagtccaggttgcatcacataacaatctgattcatctaaatgagatacaactaaaagaagaaaaaaaggttggggtgtatcaaatccagatctgcttgaccagtgcaaaagggnggcttcctt

SEQ ID NO: 54841 - DNA, 399 bp, Setaria italica
  Peptide Sequence Number=SeqID_120815
aacagaggtgtcaaagcctggcaatagagaccttctaatctagacaagatgcatcggttcaagtaacttttcaagaggtccagtgcaactacagttttacgggcggatatgagatcatcgtcgtttgtacatgcaagctttcaactggggccagtcgattctctttgccactttactcttttcctgcagggtcatggcaagccactgagctcagcgtgaaggccgaatcatggcgcgacagtaatcagcaaaagttgcaactaaccttttccttgaaacaagggaaagccaagctggatgatggctttagagaacttttcaggatcagcgcctccattatttggatctagcctacttcgcacttcagcaatacaagccaacacttggcttgagacccta

SEQ ID NO: 54842 - DNA, 249 bp, Setaria italica
  Peptide Sequence Number=SeqID_120816
acgagcagttgtattgtggtcatgtggggaacatggcttacatacattaagtgactaaattgccgcaaaaaggacataaaccaggcatatatgtagtagaatgtttttctctgtatgtcaacctgagggtataggatttctaacattataattgttcaaccgtgcatgcagataaatgccacgggtacagcagatgaaatctttgaagcagtccgcaggctcttctcttccttaaggttctgacgagga

SEQ ID NO: 54843 - DNA, 434 bp, Setaria italica
  Peptide Sequence Number=SeqID_120817
atcctgcaaattttagctctgatccagagcaactttggaattgaagacttgaatttttctgatttgccaacaggtgccgttatcactaggctcctcagtttttgggctctggaatgcttactccaacatccatctttggtttggcattccattagctttcctttggatcattcttcatgttttttcttcatgtaacctaccaggatcctcactttttacaggctcaacaaacttgggtggcaaaatgtgctccacggggtcactgttttcagaaaatttctgatcaccatttctcttgaatagcgagagttcttccggaacatccaaaccagccttggacaactgcatggcacgcctacgtttttctttcaaagtctcaacttgaccaatagtccctgaagcatgcagcagtgaatatgcatcttctgagatca

SEQ ID NO: 54844 - DNA, 380 bp, Setaria italica
  Peptide Sequence Number=SeqID_120818
caaaagcagcaaataaggatgtagctgcaaagaacaactttgacagaatgaccacagcttgaactggtttccaccacatgagcagccacagtacaatcgaggtgggtaaggactatgatgaactcatcactgttaacaatgaagtttaggaaatggaacaccctctgcgttgtccacccatactcaggtaccctacactcgattcttatcagttggaccatgacaaatgcttcttttgtatcttttctgctacaagtccaaggtgatgttagatgagcctataaagggcaaatcctgaaaaaaatgtcaccacggcaaagaagcttctatcagttaaccaactgcaccgtaatcttcttgactagcctttaactttcttg

SEQ ID NO: 54845 - DNA, 379 bp, Setaria italica
  Peptide Sequence Number=SeqID_120819
gaagcccattggttggctagttgtctacgttgtccttgtattagttagattttcagcccaaaagagcaccaacagagcataggtcgtgaagaatgctaggccaggcaaatcaataagcacatgttgaaatatctcaggatgcacaacttgcacattccgtcgcagaacaaacacagttgaccttacactgttaacaatgaagtttaggaaatggaacaccttctgcgttgtccacccatactcaggtaccctacactcgattcttatcagttggactagggctacgagtgcgacgacgccgtagagcgcggcgagggcatggaaggtgcggtcctgccacagcggcgagttgttcacatcgtcccaccaggcgtccaga

SEQ ID NO: 54846 - DNA, 253 bp, Setaria italica
  Peptide Sequence Number=SeqID_120820
ctttaccatatgctgcagctgagtagagacggtaacagtgcccaggccctgttcttccagctcttccagcacgctgggatgccgatgccttgcttatccattggacttcataacttgacatgccagtagcatggtcgtaattcttaaccttttctttcccagtatcaactacatattgtatgccgggaattgtttaaagtaggttttcttgtcgtactatttagtttgtcctacctactacttagttgtcgta

SEQ ID NO: 54847 - DNA, 208 bp, Setaria italica
  Peptide Sequence Number=SeqID_120821
tagaccactccattgatcgtatagaaagctggtcgaagcccatggttggcagtgcacgtgcctgatagtagatttcagcccaaaagagcaccaacagagcataggtcgtgaagaatgctaggccaggcaaatcaataagcacatgttgaaatatcacccgacgcccaacaacacacccttcgagtcatcaccgccaccacggcacgcc

SEQ ID NO: 54848 - DNA, 169 bp, Setaria italica
  Peptide Sequence Number=SeqID_120822
atgatcgtaaagttcgagctattcgctatcaatctcctgatgctctggaataggtgtgatttctccttgcaactctatcagcccatccagccacagattccttgcccaagaagaaatcacacctattccagagcatcaggagatgaatcgtaaagttcgagcgtattcg

SEQ ID NO: 54849 - DNA, 384 bp, Setaria italica
  misc_feature (344)..(384): n is a, c, g, or t
  Peptide Sequence Number=SeqID_120823
aagaaagactaggaccggggaatagacctaacgtaggaaggaagacttagaagaagggtctgacaaaggtcgcgtgctggtgcattcaggatgatgaaggcgaccggccgaccatggggctcgttgtgcagcagctcgaaggtgttactgatgttggactgccgccgataccgtcgcggcttcacatgctggcgacggctaatgggtgcgccggtggggttgccgaggacgaaccaaaaaacggtagcaaattagcgacagaattgtaacgtgtattagttactgcactggtgtaagacctgtaatgctagtttcagtgtttcagcatgatttttccttagttnnnnnnnnnnnnnnnnnnnnnnnnnnnnnnnnnnnnnnnnn

SEQ ID NO: 54850 - DNA, 244 bp, Setaria italica
  Peptide Sequence Number=SeqID_120824
tggcataactatgcaattgctagaaacatgataaaactatatgcacaatggcatacaatacttccccgataacattttttctagcaaacaaatgaatatcagcatcgctaataaagtgggaaattttagtatcaagtcaagacttccatctctacaccactgagattacaatagcaagcattatccccgaccatcttatgcattaacaaattatcgtgatgcttattttctaatccgttcgggg

SEQ ID NO: 54851 - DNA, 410 bp, Setaria italica
  Peptide Sequence Number=SeqID_120825
tttaaattaaacttagtactaactaattacgtattcttcctcaaccaagctatcacagttccgtttttagggccctaattcttcgttcattcaatttgaaatctggcaggatgcatatgatcctatattaaaaggaatcctttctgacagtccaacctctaagctactgtgtttctttctatactgtgttgttgctccactgtctgagaatcatctaccgcgggttccttctaacagccctgtcttcttccgtgaaatggcgggacgctgtcgtgatgagttcacttgccttcagtgtagcacacctctccggtaaaggtttcattcagctgtttgtcattgggtgtaatctagggttaacctattgtcgaactggaactttggtggcttctttcaccatccattcttgt

SEQ ID NO: 54852 - DNA, 249 bp, Setaria italica
  Peptide Sequence Number=SeqID_120826
aataggcttcaccattatgatgaccttggtatggatcacatccatcttacctgacaaggtggtaggacctgaggatgcatatgatcctatattaaaaggaatcctttctgacagtccaacctctaagctactgtgtttctttctatactgtgttgttgctccactgtctgaagaaatcatctaccgcgggttccttctaacagccctgtcttcttccgtgaaatgggcgggacgctgtcgtgatgagtt

SEQ ID NO: 54853 - DNA, 408 bp, Setaria italica
  Peptide Sequence Number=SeqID_120827
cccagcagctgtagaagctggtacgtcctcactgtcagccatgctcaaagtcacagagctatattctccattgttgtacaaaatggccatgcaactcttccaaaatttgtaaaacagtacacctcgcagctttgtgaggtcagaacgaacatcgcttgaaggccttctcgttctagcatcagcattgattggacatgcaactgtactgcagcatacagctgcttctctgccattaagttttcgatccgagcaggaaccttggcaacatcctcaacctgatccaaaagagagaggacatggcgtagtgtgagggaccggtaccacagctggccgaggtgcttattcttcctgccaagcagcttcttggcctctgccatctctcccttaagtccagtaatgctatccgca

SEQ ID NO: 54854 - DNA, 424 bp, Setaria italica
  misc_feature (89)..(89): n is a, c, g, or t
  misc_feature (140)..(140): n is a, c, g, or t
  Peptide Sequence Number=SeqID_120828
aatacaaaaggaataaaatagtagaagataaaaaaatgaaaacaagtaaaaaaagaacaaagataagctaaagctacacaacactgccntaaaacagtggggctccaattggtatccaaagccgatataaggcatttacngaaaaaaaaaaggcaatacaaggcatcttgaatcgaaaatagtactatcatgtttgaagttgatctagtgacccaaaatctgtgagatgcgtcgttcagcatccataggtatctccctaccgggcacattgaccttcagaacactcaagtatctgcgcaattaacatttttgacccaaatgaatacagtgcaagtgttcaactataaacaatgatgtagtaaagtgaaaattatttggcaggcttactcttttgcggaaaataaatattcattgtttcggtcgt

SEQ ID NO: 54855 - DNA, 425 bp, Setaria italica
  Peptide Sequence Number=SeqID_120829
acttcgactgcctctgcatcagtaacattgttatcaggctgactagtagaaatttttgcaaataaaatgttttgctggttccaggcgcattaaactttcaacatcattccttgaaagaagaatataactttgcttttcaaggacagcctccatatatgatgcacgacatctttcatgagtacgttctaaaaaatgtgcgtacatactccacaagctcagtcgcatagtttggcattaattgaacccatccaagaacctctttagctataatatcaactgctagaagcccttgtagcacaggacgtccaagttccaccaatgaatcatatactgaggttgcatgtacacgtggtctaaatgctgctgggctggattattggccttgtcttgtaactactatttttcggttaattcttactaaatta

SEQ ID NO: 54856 - DNA, 238 bp, Setaria italica
  Peptide Sequence Number=SeqID_120830
tccactcagccgacctcaccgtcgaccagatcacgccctcccagtacctcaagtgcaaggagatgctatacgatcaccaatgggcgcaggacgacaactccctggaggtggactttggtgccctggacgacctctccacgcctcgcctcacgctgccttcctccatcggcaacgggatgcacttcgtctccaggttcatgtcttccaagctcgccggcaccaccatgagcatgaagcc

SEQ ID NO: 54857 - DNA, 497 bp, Setaria italica
  Peptide Sequence Number=SeqID_120831
tagagtaatggctgacagaatatagttgttccttgcgactgaccttatcatatcagatagattatttattgcattaatcactggatttcataaattgtgttgatgatacttattttcagtctttgtgtggcgacttttgtatatctttgttcttgtgacaacaacttgcatgtgctagcgatttgctgcattagtaccactacacattgctttcaattccagcaattttgatgttaagtttctcggttgagtgatcgtatggtcagtacccattgccttttcgttttaacttaagttttaagcagaatgcaacttttatttctatagtgcactaatcactgcagtatactggttttaggtcattgagttagtgaaagaggaggaggtatcatgggtatctcatccaagtggattaaatcattggtcggcataaggaagcaagaaaaggggcacaatgcagaaaaacaacaaaaagggacaaaaatgactgaaagcag

SEQ ID NO: 54858 - DNA, 365 bp, Setaria italica
  Peptide Sequence Number=SeqID_120832
caggcatgcgttgagaagaagtacggaggaattgcacccaagaagcctttgatatccaaggtaccgaccgtgcacttcactagtaccatctgtagaaacaagctagctaacagctttgatcattacattcaccgcgttcttgcttgctaagcaggaccacgagcgcgcctacttcgattcagcagactgggtgctcggcaaggtaagagaagaagagaacaaaaatgctcacaccaatattcaggcgtggcactttgcaccgtcagagctcaagctgtatctaaccctggttcttggaacgcctcttgcagcaagctgcaaatagcagcacaagggctgctgttgagtctctgaagcccaagctg

SEQ ID NO: 54859 - DNA, 259 bp, Setaria italica
  Peptide Sequence Number=SeqID_120833
ctgtcgtgcgtcctcgcctgctgcggcggcttcctcttcggctacgacctcggcatctccggtggtgttacctcaatgaactccttcctgaagaggttcttcccggaggtgtaccgccagaagcaggacagcaaagatcagtgttcggtggtgcagctgttaatgttcctatgctgctcctcaaccgaattttactcggaataggtctcggattcactaaccagtcaatcccattgtacctgtcagaaatggcgccacc

SEQ ID NO: 54860 - DNA, 256 bp, Setaria italica
  Peptide Sequence Number=SeqID_120834
atcgaggatgctgctgctccggcggccggccgggtggagtacggcggccgcgtgacgccgttcctggtgctgtcgtgcgtcctcgcctgctgcggcggcttcctcttcggctacgacctcggcatctccggtggtgttacctcaatgaactccttcctgaagaggttcttcccggaggtgtaccgccagaagcaggacagcaaagtgagtcactactgccagttcaacagcgagctcctcaccctgttcacgtccg

SEQ ID NO: 54861 - DNA, 446 bp, Setaria italica
  Peptide Sequence Number=SeqID_120835
ctttttttcccactagcctttgcaaccgggataaaaggtcccggttggtgagcccccaccagtgaccgagttttagtcccggttggtgaaccttttgtcccgggccaactttaaccggtacaaaagggggcgtatggaaagccaattctctactagtgtgacttgagctaggacaggcgcgcactggtagagaactgagtattaatcccgattggtagggcgtaaatctcccgaaaaaccatccgggattaatcaatcgagacaaaaggaggtgtcttttatcccgggtccctcgaccgggactaaagcaacatttatcccggttggtattcccaaccgggataaaacagttttccaaaaaaataaaaaaagcaccggcgagcatccgcccgcctcggctcccacgccacccctctgcttcacccgcaccgcctatatgccccgcc

SEQ ID NO: 54862 - DNA, 428 bp, Setaria italica
  Peptide Sequence Number=SeqID_120836
cctgaaaatccatccgggataaaccaaccgggacaaagggggctcttgacccttttatcccggttggtgttaccaactgggataaagggggggtcttttatcccggttggtgtttcaaaccgggataaaaggtctctcagagtctttttttcccactagcctttgcaaccgggataaaaggtcccggttggtgagcccccaccagtgaccgagttttagtcccggttggtgaaccttttatcccgggccaactttaaaccgggataaaagggggcgcatagaaatccaattctctactagtccaacttcaacatgcaacacgacgaaaaaaatgttcaaagaaaacattccggtgctagctctgctagagtgctagtgctgcacgtagacgtcgatctcgacgatgccgccgcgggcgaggtcgtagt

SEQ ID NO: 54863 - DNA, 315 bp, Setaria italica
  Peptide Sequence Number=SeqID_120837
cgacccttttatcccggttggtggtaccaaccaggataaaatgggatcttttatcccggttggtgtttcaaaccgggataaaaggcctctcagggtctttttttccactagcctttgcaaccgggataaaaggtcccggttggtgagccccccaccagtgaccaagctttagtcccggttggtgaaccttttgtcccaggccaactttaaaccgggacaaaatggggcgcatgaaagctcaagtaataattttaacaacaactcgacatgatacagttgcaaaggcaattggagtggaacacatgcatcgagtcg

SEQ ID NO: 54864 - DNA, 365 bp, Setaria italica
  Peptide Sequence Number=SeqID_120838
taggtcctgaagggcaatcaaattatggcagtggctacggcagtgtgcaacccagggttgctcagtaaagagaggctattagagtgtctttgaaatgaaccagcacatctgggcattctatgtattgttttgttactctggcctcgattgttctcagcctcctgaagatcacccatttgctggttaaatcagtatttctccgggttgaatcggatgacattcctttttagtgatgcccagacgagggctactaaatcaaccattcaaaaaggcaggtgaaatacaccgtgtttacatgatgagctgttggaaagtttccatctcggagagctgacagagtgcaagatgccagcttgagtgcttcg

SEQ ID NO: 54865 - DNA, 388 bp, Setaria italica
  Peptide Sequence Number=SeqID_120839
ctgtagtgcaagtgtttttacgtagctggaatggtacatccttcaagtatatcatgaagctatgaattccatccatttggccgtagatttcgatattttccaagcagcagtaagcttattagcagcaagattgtagcgccaagtttctaaggttgaatcggatgacattcctttttagtgatgcccagacgagggctactaaatcaaccattcaaaaaggcaggtgaaatacaccgtgtttacatgatgagctgttggaaagtttccatctcggagagctgacagagtgcaagatgccagcttgagtgcttcgtttctgaagggtcttgtgggctgtgctacaagatagtgagtgcacgatgaggtaactgaaggcaatgccgctgtg

SEQ ID NO: 54866 - DNA, 420 bp, Setaria italica
  misc_feature (299)..(299): n is a, c, g, or t
  Peptide Sequence Number=SeqID_120840
gcttgtcagctactggtgattttcgcgacatttctctgtaaccttcagcaccaatatatggcccgtattttgactctaaggatctcagctcctctgccttcttctcgaattctttgaatgcagactctgacttttttcttcatcttctcttcctcgtcttcttctgcttcgcttcctcttcttctccaccagtgtcctccgaaaccacgactctgagttctccctcgccgccaccaccctttggcccggcaacgcaggtctcctcgtcgtcggtcagtcggagtcgctgtccatgctcnccatccctttcaggccccggtgcttctgttgcttcttggggcacttcttctcgcgcacctcgtacctgctcctcgtcacgtccgtcagccatgtcccccgggcagatgaaattgaccgcca

SEQ ID NO: 54867 - DNA, 467 bp, Setaria italica
  Peptide Sequence Number=SeqID_120841
tttttttattccttaaagttacttttactttgttttccttctttgtcttgtagtacttatttgtagttcttggtttgttccgacagtatgcacaacccaccaccaagacggcgggcaagaccaggtaaaccaccgaatgtcaacccaaaaagaaagagaaaaggaaaagaaagacgccggctaggacctcactacccagatatacaaaatggaatcgaggcaattagcacggcgcctctatgattaacctgaaaaaaggaaaaaaaaaagtttttttttgcttttttttttgcctcagaccagcgctgacaaagagagcctgcttgttgaacacgctctcctctcgtcttcctttgctcttctcgtccccttcttctgctttcacttcatcttctcttcctcgtcttcttctgcttcgcttcctcttcttctccaccagtgtcctccgaaccacgactctgagttct

SEQ ID NO: 54868 - DNA, 390 bp, Setaria italica
  Peptide Sequence Number=SeqID_120842
gcgccctaacagctggatcacacgtgttagccgtgtagcagatatttgaagcatcacgcctaaaaaaaaagttagccctaacaactttcccttctatcaatgtgtgctacattcctctttgtacaaacgggcatcgctgccataatataatatgtaactactatacagttagtgtacaacaccgtcagatgatatcggaacgttctgttggagcgatcgcagaactcgtcgctgtcgcaaattcttaccagcagtgcaatgaggagcattcagtggtggtacctcactgtcagccgggaaggcgattatctgctttctctttcgaggccctctcttcctgtatttcttccagttcatcttcatcacttcgcttgcctgcttgctccttcc

SEQ ID NO: 54869 - DNA, 154 bp, Setaria italica
  misc_feature (149)..(149): n is a, c, g, or t
  Peptide Sequence Number=SeqID_120843
cacacattgatagaagggaaagttgtgctactattcctctttgtacaaacgggcatcgctgccataatataatatgtaactactatacagttagtgtacaacaccgtcagatgatattatggcaaaagcgatgcccgtttgtacaaagnggaat

SEQ ID NO: 54870 - DNA, 372 bp, Setaria italica
  Peptide Sequence Number=SeqID_120844
ttccctttgttcttttcgtttttctaaacttgtaaagtattattgtaagtaactacctagcaacttcgcatttttaaagaaaacagctgtattgctgctaccaaattgcatgatgtctcttagctctgcagaatgtagatattccttgggaaccgggcggaaaaagtgaacccctcgtttgttgattcccaaaatgattttttccaggtagcaatcctattggatcatcaatcttccgaacactgaagaaaactgagttcccatatggaagattccttaagattctgagaaattgttgccgtgcatcgtcctttgacaagtgttccattaactgatagcgtgaaatgatgtcaagctcccagtctcgctttg

SEQ ID NO: 54871 - DNA, 387 bp, Setaria italica
  misc_feature (194)..(194): n is a, c, g, or t
  Peptide Sequence Number=SeqID_120845
tctagttgttgtagttagttttctagttttacggtctatttccttcttgcattaaaccttttccattgtgcttttctcttcactcttcattctttcaagcctttgaaccttctggtcaagaagatttttttctgacattaacttctttgagacttcttttgatgcatcaagctctttctggcatgattttaacncctccttaagctttgtaagcatctcaatgtcactgttcacactgcctacagttgtcaaagtatctctctcacggctctggccacttgttaatctggtctcaagtctaccttttccatcagggcagcctgcaaagcattctctttctcatcacatagagattttatcttatccagttcactttttacttctttc

SEQ ID NO: 54872 - DNA, 291 bp, Setaria italica
  Peptide Sequence Number=SeqID_120846
cttgaaatgctcacaactgtcgcattttcaacagtaacaacacccttagaatctttctttatctctaattttttgctgctttgcatttttgggcaacaataggtccacaagattatcttgataaagctccaccatatacgccttcaaagaaaatgagtatttattgccatctcgctttatcaccctaaaaagctcagatgtagcccttggagtaagaccaggattgttatctagaaaccaataaaattagtagaaaagtactttaccaagaaaccaagtttaggaccaata

SEQ ID NO: 54873 - DNA, 471 bp, Setaria italica
  Peptide Sequence Number=SeqID_120847
caagtctctttgtgaacaaaattaagttcaagggcaaatcatgataaaactgcatgaagttgataactgttgccaatgctaaattgaagaaggttactaacaataatatgcatgcgtcctccaagatgaccttgtccaacttgcaagcaagatatatgctgagataaataagcctgctgctggttttggggttatctgacaaatgtggggcgctcgtacattgatgaacgggagggaactgggtacaatgttgtacttgctgaatggtatcatcctccgattgatggaaaaggtgtaaataaggttgattttctagctgttcaatatgtctctttgatgttgactggtgctgattttgtatctggaacacatcaagctatgtattagccagtgagttgagttagattggtagataaacaagaacgatctaccaatactagtctctttgagtgttggactggtgctgatttt

SEQ ID NO: 54874 - DNA, 343 bp, Setaria italica
  Peptide Sequence Number=SeqID_120848
ataaataagcctgctgctggtttgggggttatctgacaaatgtggggcgctcgtacattgatgaacgggagggaactgggtacaatgttgtacttgctgaatggtatcatcctccgattgatggaaaaggtgtaaataaggttgattttctagctgttcaatatgtctctttgatgttgactggtgctgattttgtatcatgagtgaagtaaaaacataaagttagctcatttggtgggcggaatcctgatgaacaaaccaatggagaattctcattctctgccaaagcacttgtctcagggatgtcaaatgctgcctgcggagagcgcctgaactttatgcc

SEQ ID NO: 54875 - DNA, 236 bp, Setaria italica
  Peptide Sequence Number=SeqID_120849
tgaggtgctgctgctttctaagtttccgtgttactaattttgtccattgagcacaattgagccccaagccccccaaactggagcaccatacacacatgacacatggacatgggagtactgttaagatgagagcttacggtgagatatagctcttggcaagcaggaagtatatcctccagaactgcttatccttcatgtggcgagggcacagatcgtaccgaatcttggagagttcc

SEQ ID NO: 54876 - DNA, 267 bp, Setaria italica
  Peptide Sequence Number=SeqID_120850
ggaagatacggcagtctagtggatagtggaaggaattcaggaaaatacataaagtacaccccagaggacttggaaaatcatttgtctgatctatttgaggggtcactaggttctgccaaccattccaggagaagatgagaatttcctatgaagggatttggctacagatccacaaacaaagtttagtgtggttggactgcaggctactatgtaggaacggtggtctttaatctcttaataccataccacctcctttcatatgaggtg

SEQ ID NO: 54877 - DNA, 187 bp, Setaria italica
  Peptide Sequence Number=SeqID_120851
ctcagtgtgagtagtcggagcgaggcgtccagatgctgcaggctctggctgatccacccacccgggagacgtcgccccggtaggtggatcagccagagcctgcagcatctggacgcctcgctccgccggctagggcaggaaagctcgtcacgcggaggtcggacgacgccgtcgtcgcgctgctcca

SEQ ID NO: 54878 - DNA, 272 bp, Setaria italica
  Peptide Sequence Number=SeqID_120852
ggggggggagggaacttggcaccgggagggtggggagtgtatttataagctcgagaagctttttttagtagagaggagaagagtggtggtagaggaagagagagacgggggaagagaggagagaggtgcgcaagccggagcagctcctcggcctcgactcgctcatcatccccggcggcgagagcaccaccatggccaagctcgccaactaccacaacctgtttcctgcacttcgagagtttgtcagtggtggaaagcctgtctggggaaca

SEQ ID NO: 54879 - DNA, 191 bp, Setaria italica
  Peptide Sequence Number=SeqID_120853
ttgtacgcaattctttcagataaaagtgctgtggagattgtaacctgactgtgcaaagaagctgctcagttgaatatatgatatttcccccattttttctacagatgaccagagactaacgtctccatcttgtagaccatggtggtaccccttcccccccctccaattagcaagctacttgatggaacttg

SEQ ID NO: 54880 - DNA, 220 bp, Setaria italica
  Peptide Sequence Number=SeqID_120854
tcaccgcataaccatgaaaggctcataacttcagggccatcactttggcgcaggccctgcactacaactctgtaaactgcatttaagctgtgattggatgagtagatgacataacagcatacggtcaccagctatgggtcattttgtcgcctctccatctgtattgaacggaaaatccgtgctgctgactctgaagcagtctgcgcattatgtgggacaa

SEQ ID NO: 54881 - DNA, 434 bp, Setaria italica
  Peptide Sequence Number=SeqID_120855
ggagactatttgttctgaatttcttgaatctgtcctggcttgctttgtagtttcattaatcatatattttctacatggcttgaagtttctttagcctgctggttgtattggacccccagactatctaatgaacttctatgcaccaaaatcatctccctttttcacctcaggatgttgcttcaaaaataatggccttttcacaacaaggcccacgcactacatgtataatttcagcaaatggtgctctctgcacagcaacactccgtcaaccagcaacctctggtggcatagtgacatatgagggccacttcgatatactctctctgtcgggctcattcctgcttgcagaggatggtgacactcgcagcagaacaggtggttgagtgtggcactgctggaagcgatgggcgcatagttggaggttgtgtcgctgg

SEQ ID NO: 54882 - DNA, 358 bp, Setaria italica
  Peptide Sequence Number=SeqID_120856
taactttgtcttggtaaagtcgtattgggtcgtctattagtttggtaggtttgttgttcgctggaatgctgatggcggcgacacctgtacaggttgtagttggcagtttcatcgctgaaggtaaaaagccaaaggaagagcagcaaccaaaacgtgagccaacttctgtgccactgcacgcgcccggctttggggccacctcgactgccagtcccccatctgacggaacatcaagcgagcactctgatgatccagggagcccccatgggacctaacggcagcacgttcgctaacacggggcatccccctgcattaccaacaatttagactaccggttaggctggtcactgtccggcaa

SEQ ID NO: 54883 - DNA, 199 bp, Setaria italica
  Peptide Sequence Number=SeqID_120857
tttttaagggtaattaacgttaactaagggtaactaattactattttacttcccctactataataaccgtgaagcctaacgaggatgttgcttcaaaaataatggccttttcacaacaaggcccacgcactacatgtataatttcagcaaatggtgctctctgcacagcaacactccgtcaaccagcaacctctggtgg

SEQ ID NO: 54884 - DNA, 335 bp, Setaria italica
  Peptide Sequence Number=SeqID_120858
attgagatggatgatatgaagctgtcaccatagttgcaaattgatgaaatccagtctctgttagcatctgaaggcagtgcgtggtaggagtgaacaagtaaacatggtggccatcagctccctgcagcagctgtgtatccttggtgatctcaagagcgttccagaccaaatagtagaaggaaactaatagaagaacccttaggaaggaagtacaaaaataacgaacctaaaaccaaacaaacccggtaaattaaacaaaccaaaaaggaaaccgaaactaaacaaaaccgggaaaaccgttaaactaaaacctaaaacgaaaactaaaaagaaaa

SEQ ID NO: 54885 - DNA, 477 bp, Setaria italica
  Peptide Sequence Number=SeqID_120859
ttagtactacttaacgtactaaagtctatttactaattctttgtcttttgtttctaaggttttcttatggatttatctgctcagataccctcatttactagtgagctgaagtttgctgaagaggtttttgtgcttggaagagatgagggtcgatatctgacaatagatcatggaaatgtggcatatgagggcccaagcaggttgcaacgccaccattatatgtttatcacccgtagaataaataagcttggtattggtggacccgtcatcaaccacggtggacaagttgctgggatgtatagtcatccaggactggcatttacaccctcttctattatattgaggtgcctgcaaatgtggaagagtttcaactgcatactgcggctgcacgttgggatgaagttttcagctattagcctcctcgaccttcctcatagagaggtcatcgcctgcaagtgtgatatcgatgatggtctc

SEQ ID NO: 54886 - DNA, 383 bp, Setaria italica
  Peptide Sequence Number=SeqID_120860
aaggatcgattgctgagaaacttggtgttaggcatggtgatattattaaatcttggaatggagagaacatatctacgacgattgagattggtatctttcatacgcggaaaggcaaacatggcactatcaagatgacagtaaatgtatcagatgatgttgaagtgattgcagaaggcacctatcctgtcactactgcggattgtacctcgggagatgacgatgattctggtataattcaaggtgagtgcttgtttgctttcagttgctaaacatcaaattgtcattttatatattttgtgaagaactcctataaggaatcttagctgttctaaattgttgtcattatccagtatttccctatctgattgcattgattgacatct

SEQ ID NO: 54887 - DNA, 194 bp, Setaria italica
  Peptide Sequence Number=SeqID_120861
tcctgatgatgaagatggtgacatggaaagtattttttctgagcatggtactctgcgatgatgaagttggcgatgactacggtttagtcgaccacttgatttcgtagttgcactagaaccaaagtgatcttttgtgtaaactaaccaattgtgcattgtctaagtacttaaaccgttttgtttagtttctttta

SEQ ID NO: 54888 - DNA, 149 bp, Setaria italica
  Peptide Sequence Number=SeqID_120862
tgatggtctcattgttacacaggtgtctgaaggaaccaatgctgtttcctttgtggatttatcaattggtatctttcatacgcggaaaggcaaacatggcactatcaagatgacagtaaatgtatcagatgatgttgaagtgattgcag

SEQ ID NO: 54889 - DNA, 275 bp, Setaria italica
  Peptide Sequence Number=SeqID_120863
tgttatttattttctaagtcttcttcttggttagtctattcgttatttttgtcttactagttgagaagaggaaacgtgagcagaaatcggttgctacatcatggttgctagttcaaccaagcaggctattcataatcgctgtttctttcttgaaacaactgagaactgaacttagtgatactacagcaaataatctgatcgtacagaatcttgcatattcgatctgcaacctgcatatgtcaattaggcaatcgacctcgacacatcagttttgg

SEQ ID NO: 54890 - DNA, 215 bp, Setaria italica
  Peptide Sequence Number=SeqID_120864
tacctgaagtatgtagaatagcatgagtagcctaacttgtcatttcatgtatgcgaccaccacctgcagcttcagaagttccagttgatgtcttcatcttggaggattgccctcacgactggttatttcctcgctgtgctgcagtggtgcatcatggtggagcaggtactacagccgcagggctgatagctgggtgtcctaccacggtggtgcca

SEQ ID NO: 54891 - DNA, 329 bp, Setaria italica
  Peptide Sequence Number=SeqID_120865
tttaaccaataggaacgcggtctctgcatgttttcctaactgctagcatttgtagacaggccaactgatgaatttccacatccattggcacgaatgcctcagagtgcaacctacaggctatcatatcttattctggatttaataatctggtggggcaccaggggattcataaatgatttcaggaagaaattaaatttgcccctattgcttacttcagcacataccatggatctatatctcacttacctactggatacatgtggagccctcaacttatgccaaagccaaaagactggggccctctagtagatgttgtgggatattgcttc

SEQ ID NO: 54892 - DNA, 287 bp, Setaria italica
  Peptide Sequence Number=SeqID_120866
ttttggttttaacccttttagttttacttttatttttccctttttcttttacgttttatttttgtttaacttattgtacgtcaacggaggtgctttaacttggcaagtttgcttgcaaaatgggatctgtgccgcagttctgtttgaaatagacgcaatgatttgaactctcaacaagctcttccactgtatttagaagatctatgttctcttccacaataaaaaattttttgacaataataatggtacgcagattttccaaaaaagaattttcttcatctttccga

SEQ ID NO: 54893 - DNA, 201 bp, Setaria italica
  Peptide Sequence Number=SeqID_120867
catcttttccgttaggaaaattaggaattaattcaacacgaacgtgtcgaactgtgctcggcacattctcaaggctgccaccatcaaccatgcgtaaacattctccaaatgaaacattcgttgctaaatcatgcattaagtcatgcaatgaacaataagtaataccaagaattactactagtacttacttagaaccaaaca

SEQ ID NO: 54894 - DNA, 418 bp, Setaria italica
  Peptide Sequence Number=SeqID_120868
aaaactccaccattttaattacgagttacccatccagtgtcacgctagcacgcacaacagttttaattaccactactagctcatcacagtcacagtctttgccacgacagattagttgctgatcatcgcgtcgatcacgggccttggacgatcatcagaggagcctgggggctggtgtaggggccgttgaggatgctggagcacggcgttgtggtgctgcgcgaattcgttgtacgtcttgaggcagccggcggcgtcgtagtcgctgccgttccggccggggtgcagggtcaggtacgccgacgagcagcccatcggcaggttccccggcaccaccaggtgcgtcgcgccggctttgatcagcctctcagtggcatcggtgaccgcgccggcgaccgtgggaacgtaagttttggcg

SEQ ID NO: 54895 - DNA, 391 bp, Setaria italica
  Peptide Sequence Number=SeqID_120869
ctctccgaccaggaacagggacttgctgaagtactccttgcacttctttggcgagctgcagagcgacggcttgagctgctcgaaccacccgagctggacgctgagggacaggttggtccagagcttgtcggaggcgccgatctcctggaagaagggcggatccatggcggtggcgccgccgacggcgaagttgacaccccggcggaggtccttgcccttggactgcaggtacggcggcagcagcggcaggccgaacgcttgcgctaggaagtcgacgacgaggcggccgtcggaagacaagacggaccggtaggggacggtaggaaagtaaggtagaatagaccgtaaggggtaagacggaccgaacgaatagtaggttaggaagaagaca

SEQ ID NO: 54896 - DNA, 200 bp, Setaria italica
  misc_feature (179)..(179): n is a, c, g, or t
  misc_feature (184)..(184): n is a, c, g, or t
  Peptide Sequence Number=SeqID_120870
ccctgtagtagagcaccaggcatatctcctgtagtaggttgtgtcattgtgtgtgtcatccagatgcagttgcttccggcttctttgttgtcgccttgcgttgggcgtcatcagctgcctctttccatggaaagaatcactggttcctgatgccctgtcacctttagcagccgaaaagntggtnaagttgtggacgtcca

SEQ ID NO: 54897 - DNA, 316 bp, Setaria italica
  misc_feature (82)..(82): n is a, c, g, or t
  Peptide Sequence Number=SeqID_120871
aggcaggatcgaaactcagatccttaaggctctactcagacatagcattgaattactatttacatggtgagtttgtgcggtnttgggggtgcgtccagatgctggagatgcagtgcggctacaagcccctgccatgtttccccagggcgagctgatgtcttcagttccacaatttttctctgttgcttgtagtagtcttccagcagcttggtctgcttagcataagtacgcattcctcttcctaacctttgtagttctttcgtaggtcctaagtaactactttagttcttaggttctttctttacctttgttagtt

SEQ ID NO: 54898 - DNA, 395 bp, Setaria italica
  Peptide Sequence Number=SeqID_120872
ttcttttcgttggtcgtccttgtattttcgggggttgtcggttttattccttcctaggtaaatttttggggggttttggtttcggtcttgaaccccctatggcccaggcgaagtctgctcccggaaagaaggaggtgggccggggacggtcgccggagccgctcgatttcttcatctggactgtcgaggatgttggattatggctggaagaaataaatcttggtggctacagacaagtatttgaagaaaatggtgtcgatggagaatatctggaaagcttgtctatgtttactactgagcagattctgcggtttatcaggcgaatgccatatgaaatggggagactttatcacactgtgcaaagagttgaggcgcattaaagtcgcctgcctgaa

SEQ ID NO: 54899 - DNA, 302 bp, Setaria italica
  misc_feature (210)..(210): n is a, c, g, or t
  Peptide Sequence Number=SeqID_120873
tggttcggtcctattggttgggtcgtcctagtctattgttcttcttccgttggttgtttgtgagggcggccaagcagaacaggaagtctcgggtcgtctccttgaagctggaaccctgatgcttgtaaagcgccttgagtccctgcctgcactcttctcctccagctccatgggaggtagcctgcgcacacaccatcgtgcgctagttanaagtggtctgagagctgttttgctatgagagtagtatgctcctactatgtacaactagtctcttatcctttactagatctgttgttttactt

SEQ ID NO: 54900 - DNA, 330 bp, Setaria italica
  Peptide Sequence Number=SeqID_120874
cttgttattgatttgctcggaccaagaatattttcatcaccatcaatgccgcaccatttgatgttgatgaaaatattcttgttattgatttgctcggaccaagccttgaagatcttcttgtttattgtggccggagattctcactgaagacggtcttgatgctagcagatcagatgataacaagaatagaatttatgcattctaaaggctatctgcacagagatatcaagcctgataacttcctcatgggccttggtagaaaagactaaccaggtttatgtcattgacttcggcttgcaaagacgataatcgtgactcaactaccaaacc

SEQ ID NO: 54901 - DNA, 267 bp, Setaria italica
  Peptide Sequence Number=SeqID_120875
ggacaagcaccaagttagtgttgcacgcccggttgcttgcccctgcatcttgagagcatcccagaaggcgaaggctcaacaaggatgctctcaagatgcaggggcaagcagccgtccagttgcaacgaacgtggacaagcaccaagttagtgttgcacgcccggttgaagctgcaggtctgcttgatgcagagcaacgcccggcaatcagaatgcaattcaagtccagtgctgaaaatagccgttcaatctatcaggatgcagatta

SEQ ID NO: 54902 - DNA, 232 bp, Setaria italica
  Peptide Sequence Number=SeqID_120876
aaacatcaaatggtgcggcattgatggtgatgaaaatattcttgttattgatttgctcggaccaagccttgaagatcttcttgtttattgtggccggagattctcactgaagacggtcttgatgctagcagatcagatgtgacatgatgcagcacactaaattggaggaaccactccaaggtgctggtaggtagaccaagatttatgattggaacatcaagttctattcata

SEQ ID NO: 54903 - DNA, 250 bp, Setaria italica
  Peptide Sequence Number=SeqID_120877
caatgcttttattcttgatgcatgaagccattgctgaaaatagctgtcgggtttttatgggggcatctgtattgcctgaggggccagctacagagggacagtgtgtgttctacccggcttgcgacttacaacttgtttaacttaaagtggcttgatatccaatttggattggctgcagcttccaatgtgtttgataccaaatcacactatgcaaagattacgaagagcacaagggctcaagattaaacgg

SEQ ID NO: 54904 - DNA, 213 bp, Setaria italica
  Peptide Sequence Number=SeqID_120878
tatatccgacttcaagagctacatactgcagcacaagggctcaagataaaggttcctgcatctcagtccacaacaatctgttcgagaggaggcaaaacatcaacggtgtacaggctcatttacatgcagatcgttccccccacgagccaatgaaacaaagaaacaaaaacagttactgtgacattgctactccagttccacggtgggctctgt

SEQ ID NO: 54905 - DNA, 240 bp, Setaria italica
  Peptide Sequence Number=SeqID_120879
aatcttggacaaacttcaatgcttttattcttgatgcatgaagccattgctgaaaatagctgtcgggtttttatgggggcatctgtattgcttgagaaagtggcttgatatccaatttggattggctgcagcttccaatgtgtttgataccaaatcacactatgcaaagattacgaagaggtatcttagaagtttgtgattttgttagcatgtttcaactgctctcaccagtttgcctat

SEQ ID NO: 54906 - DNA, 243 bp, Setaria italica
  Peptide Sequence Number=SeqID_120880
agatgcccccataaaaacccgacagctattttgcttgaggtgattactaccaaccagaaatattggttgatgctggttatgaattcagcatcggttagctgttctggtttattattattcttttccatctgtggataatatggaaacttgcttaggaatgtcagcaatctattttgtgctctactcgagtggatacattgtaactcctcatccatctgggctcgttgattcagggtcctttcc

SEQ ID NO: 54907 - DNA, 271 bp, Setaria italica
  Peptide Sequence Number=SeqID_120881
aacaccttgaggaaagttgaagaagtgctttcaaggtttgctaaagatggggtacctctgttggatccggaagaggatatgaaagtacaatgaaattacaactggttctccacgctctttcagaggaacaatcttcattgctttctttccgctgctgtccttacttacagaacacctggtaaggacatcaactgtatagtcagaatcttcaggcctcctatcttcaccatgggatttcactttttcaaagtttataataattccccatgtg

SEQ ID NO: 54908 - DNA, 257 bp, Setaria italica
  Peptide Sequence Number=SeqID_120882
aggatgtccgtgatattgtcctctctccaaaacatgttctgcctttcttgcaacctggaaggcttgtccgtcttgaatatagtacagatgagccagctaccttctccattgatgaaaatatcacatggggaattattataaactttgaaaaagtgaaatcccatggtgaaggtgttctgtaagtaaggacagcagcggaaagaaagcaatgaagattgttcctctgaaagagcgtggagaaccagttgtaatttcta

SEQ ID NO: 54909 - DNA, 322 bp, Setaria italica
  Peptide Sequence Number=SeqID_120883
tataatcaaagtattggcttagaacattcacataactttatctaatccaagtatttgcttagaactttcagataacattacccattgtattagcaaccttgtagcttgcaaggcatgcatcgatatggtgttttgcacatccatatccatagatgactgagttgttagtaaaatatgctaggaatgtgctcagttcagtcagttgaaccctctaagctgagatgctaaagcagcagcaaatgatctgtataaatatttttttcttgatttcttccattatcttcccaactaatgaaccaacataagcagaaattttctactt

SEQ ID NO: 54910 - DNA, 211 bp, Setaria italica
  Peptide Sequence Number=SeqID_120884
ttatctctgataaagatcttgaaggggatattaaagtcaatgatgtttccaagtatgttgtgcctgatgtagtgaacccacagtttgcgcaaaatttgcatgacttacttttgccgtgtttgagcaactagcaaccatcctgcactttctttatcatgaatgttacgactattttgatcaggtaataaatcagcaggaagcaatgcaccac

SEQ ID NO: 54911 - DNA, 135 bp, Setaria italica
  Peptide Sequence Number=SeqID_120885
ttgggtgtgcagaagatgacaggggcaacagaaaaaagacaacatgtccatggaactcactactcacttctcatttgatggttcattacgtagtacctcaggtgccatccactctggtgttccagcagttgactt

SEQ ID NO: 54912 - DNA, 409 bp, Setaria italica
  Peptide Sequence Number=SeqID_120886
gaaagtgatggcactcttccaataaatgatggagaagacacttccattttgataacaagacttttcttgtacatcaaggaaacatactcaacgcagttggcatttgaattcctcagcaatgtgagtgaaccaattgaggtcccagttaataattgaaataaggagccagttcttcaagataatttctagctgcttgttgataatattttgtgtcctttggttatttcaatgcttgtttctgtgtccagtagttctgtattctaggttaatttgatgcctgtaaagttgagctttacatataagtcaacttggttttagcataagatgcttatctttgcgttggtatttttcccttctggcccttctctcatttttttttatcactggaaataaaaagttcatatgtaaa

SEQ ID NO: 54913 - DNA, 370 bp, Setaria italica
  misc_feature (14)..(14): n is a, c, g, or t
  Peptide Sequence Number=SeqID_120887
ggagaaggtaagcngttccatcaaggctgcatatacgccacatcacaatggaatctaatcatctatgcttaaatcctgtcctggactctagctgaggccaaagagagcagctcctgacaatctcgctccagagaacaacaacaaacagcccagggggccctgtcgccgatgttggaagccagtcaaacgcaagaagctgaatacagctggtgcttgtcctcccctgcgtctctcaatgccgtgtgcaacctgcatgctgcatgccagctgaagccctggtcctcttgatccaaagagctacgctcatttactattgtctattgtaatttgtttacttatttaacttaacctttcccccctttttcccttt

SEQ ID NO: 54914 - DNA, 313 bp, Setaria italica
  Peptide Sequence Number=SeqID_120888
tttctttaatttcttatttcttattgtcttaaatcctgtcctggactctagctgaggccaaagagagcagctcctgacaatctcgctccagagaacaacaacaaacagcccaggggccctgtcgccgatgttggaagccagtcaaacgcaagaagctgaatacagctggtgcttgtcctcccctgcgtctctcaatgccgtgtgcaacctgcatgctgcatgccagctgaagccctggtctcttgatccaaagagctacgctcattacatgcatgaatgtacataacaacctcccctccttccacatgttgtt

SEQ ID NO: 54915 - DNA, 197 bp, Setaria italica
  Peptide Sequence Number=SeqID_120889
acttgcaatctggtgagccactgactccaaagattctgagatggaccttcaaccacattcttggcaattctgcggagcatggacacagatcaggactttgataacatgaatgtataagtcaggaagagaatatgacaataaataaaagtactcagttcattgatcatacatacacgaacgcagttacctgtaaatat

SEQ ID NO: 54916 - DNA, 449 bp, Setaria italica
  misc_feature (435)..(435): n is a, c, g, or t
  Peptide Sequence Number=SeqID_120890
tttctttaatttattttgtttcctttatttttcgtttgttaattttggttattggttaagtaattggtattggtagggtttgtagtcttgttctaacctaaagtcttggtggtggacgtggccgggaccgtaatggttctgatatgaagtgctatgagtgtggtgaaactggtcactttgctcgcgaatgtcgcttacggattggttccggaggcttgggtactggaaggcgccgcagccgaagtcctagatatcgcagtcgtagccgcagccgcagccgcagcccaagatatcggaggagcccaagctacggcagaaggagctacagcccacgggatcgttctcctaggaggcggagtgacagcaggtctccaccgccacctcgtgcacggagtctcagcaggtcgcctccaccagctcgagcgcgcagctacngcaagtcgccacct

SEQ ID NO: 54917 - DNA, 346 bp, Setaria italica
  Peptide Sequence Number=SeqID_120891
actacgaagacgcgcaagctacagctggtggaggcgacctgctgagactccgtgcacgaggtggcggtggagacctgctgtcactccgcctccaccagctcgagcgcgcagctacagcaagtcgccacctccaccacctccgcggaacaacagcagatcgccaccgccagcccgtgacctgagcaggtcgccaccaccacctcctgccaggaggagctatagcaggtccccgggccagcagccccagcgcgatgagtccccatacggcaatggcaatgatgcgtgagatccttagctgctccaagatgctgggaaaaatgttagggcccagcatgttttgcccggg

SEQ ID NO: 54918 - DNA, 191 bp, Setaria italica
  Peptide Sequence Number=SeqID_120892
aaatttgggggtttcctcggtggagcttagtggttgctgctgcgccttggagcggatttgagagattttttgttgaaatttctttgcccctgcagggtttcgctcatggctcgcgtctacgtggggaacctggatccgcgcgtcacggcgcgggagatcgaggacgagttccgcacgttcgggttctgagg

SEQ ID NO: 54919 - DNA, 124 bp, Setaria italica
  Peptide Sequence Number=SeqID_120893
aaagaaccgaacaagaaccgaacaagaccgacaagacccaaagaataatacggaaggaagcccaagctacggcagaaggagctacagcccacgggatcgttctcctaggaggcggagtgacagc

SEQ ID NO: 54920 - DNA, 435 bp, Setaria italica
  Peptide Sequence Number=SeqID_120894
tttttattgccactccatctaattaatgtcagaaactgtcatataactatatcatcaccacattttcttggaaagaaactccttagcatgaaagtaatctgtgtatgtaatgtagaaaaattactaggccgcgtgcttcattccacatctgtaactaaattttccttgaagaaatgcataagtaattggcacatcttctcattctagtttctttgtttttctggtttcttctcttcaccaagagtttattccaatttattaatttcgttttcaaccaattttatgcagtgaggatgacattgaagacatacaaaaggagatatctgttttgtcacaatgccggtgcccttatataactgattattacggctcttatcttcaccagactaagctatggatagtgatggaatacatggctggtggttctgtggccga

SEQ ID NO: 54921 - DNA, 447 bp, Setaria italica
  misc_feature (22)..(22): n is a, c, g, or t
  Peptide Sequence Number=SeqID_120895
atagctgtgcgatgttcatacncgaaatgatgggaactgtgtctctgaccattcatcaggcgcttattaagagtagccaattatgtatccaataccagggaaatagagcagcaagtcttataggtgctgagatgtgaatgttcgccaacagggccggcatctaaccctggagcccaatgataccacaagcaacacggccaccagcatttccagtgctcttgctaagctcatgtccacccttgccaaggtcatcaggatcagcatggacaactacagctcggccaatgattgagtgtggcccagtgaggggaatctggcagtcagtaatattgacattagcaacaccatcttctccagctgtcacattcccaagatcaccggcatggtgcaccggaagatgagaaccgccatgccggtgatcttctccagctgtcacattcccaagat

SEQ ID NO: 54922 - DNA, 328 bp, Setaria italica
  Peptide Sequence Number=SeqID_120896
taataaagaacttgctgctctatttccctggtattggatacataattggctactcttataggtgctgagatgtgaatgttcgccaacagggccggcatcctaaccctggagcccaatgataccacaagcaacacggccaccagcatttccagtgctcttgctaagctcatgtccacccttgccaaggtcatcaggatcagcatggacaactacagctcggccaatgattgagtgtggcccagtggaggggaatctggcagtcagtaatattgacattagcaacaccatcttctccagctgtcacacttcccaagatcaccggcatggc

SEQ ID NO: 54923 - DNA, 374 bp, Setaria italica
  Peptide Sequence Number=SeqID_120897
ggactagacaaggaaacttaggaaagaaacggaacgtaagaataggacgaagaagggtacaatcgtaccctgacggtggcctggatggtggaggtggtgaccgtggtgtcgagcgtgacggtgtctgcctcggtctgcgcttcgtaggtgtagtccttcttggcaacgctggtgctggcgagcgtggtcaccttgcctttattggacttgaggaactgcatggagtagtagtccggcacggcgtggtagagcaggatggccgtcttggccttggccgtcaggttcttgaactttggcatgaaggcggccacggcggcgtcgacagggcagaagagcgtgagcgcagtgtccttggttccgttgatggtatcgaa

SEQ ID NO: 54924 - DNA, 187 bp, Setaria italica
  Peptide Sequence Number=SeqID_120898
ctcagtagggagcacctctgaatcgagctcaggtcagaacgccatgccgcaggccgagttggtgtccccagggagcatgagggccgactctgggcagcaacaggaggttctgagccaatcgcctttcagtctttgcgtctaacagcttgccatcttttcttgtggatccttgcttcctcttgtcctg

SEQ ID NO: 54925 - DNA, 254 bp, Setaria italica
  Peptide Sequence Number=SeqID_120899
ccaaagataggagcagggatgatagtgtgacgaaggctgcagttgctgtccttggggatcttgcagacacacttggcgcgagctcaaaggatctgttccagacccacctcttccatgttgagttcttgagggagtgccttgacttggatgatgaagttcaggagactgcatcatgggcccagggtatgataaaccaagcggtggtctcttaatgtgagatggtttcgttcacctgtggcaaatggacttggcac

SEQ ID NO: 54926 - DNA, 194 bp, Setaria italica
  Peptide Sequence Number=SeqID_120900
tagttagttaggttagttaacttgtctaggttctattctattcctagtaaacttgtagtctagtctactagtatttctaaagttccataatcacccagactgctgaccagctgatgcttttgtttctgcgtgtctttgcctgccacagttctacggtgcatgaagaagcaatgcttgcaattggtgctcttgca

SEQ ID NO: 54927 - DNA, 313 bp, Setaria italica
  misc_feature (292)..(313): n is a, c, g, or t
  Peptide Sequence Number=SeqID_120901
aacaagtagtaattagaaaataaaccttacgacaaggaatacaaaagacagctgctcaatgatgagtataaagaaagctatttatcttttcttttagtttttttgttcggctgaaaggagaggggggtgtttgtagtgttgtacaaaggtcatcaggttcagggaagctttgtgttctaacagggtcgaagagctattatctaatcttcggtaacttatttgtgtgtaattcgacttcatctgtaaatgtatatttatgagtatgtgctccccagtctcttgcataaatttnnnnnnnnnnnnnnnnnnnnnn

SEQ ID NO: 54928 - DNA, 345 bp, Setaria italica
  Peptide Sequence Number=SeqID_120902
cacgaccatactttacttcagcaggtaatgcttgtggttgggttggagaatatgagcctccattaccatctattctggttgtgaatgatcaatctagatatctgaagcattccttcgcacatttgcctcagagctcttcagatatctagattgatcattcacaaccagaatagatggtaatggaggctcaatctagatatctgaagagctctgaggcaaatgtgcgaaggaatgcttcgctgcctaggataatgacaggctcagaccgacagaagtaacaatccaaaggatatgagtttgagtcttaaccgaataaccactagcactaatgtagttggagtgcct

SEQ ID NO: 54929 - DNA, 405 bp, Setaria italica
  misc_feature (24)..(24): n is a, c, g, or t
  Peptide Sequence Number=SeqID_120903
tcggtgctgttcccaatcttaggnaacctgttcaggtagttagagaaagcccagttcaaaacaacggtttggtaatatttccccagttggtccagccagatttcatgagatcgcagggccaaccccaatggcaagggctggtcccccacatgcaacagaagccgagcaaggacgtactccgcccagacttgaacattgggttcccatctccaggttcgccaccagctcgacagtcatctggcatcaatttggaggcacaacagccagaccttgcgttgcagctatgagctgggaacagacaatgagtacatgcgactgctaggttgtgtgtcacaaacactgtagtctattcttaaaggtctattgtttggttagtttcttttacttttaaggttttacgtttta

SEQ ID NO: 54930 - DNA, 317 bp, Setaria italica
  misc_feature (60)..(60): n is a, c, g, or t
  misc_feature (103)..(103): n is a, c, g, or t
  Peptide Sequence Number=SeqID_120904
tttggtttctttattttgttttggtttagtttcttttcttaggttcgttcgttaaacttntttgtcctagtaaactagtctaattggggacatccattaaatntactggcaagaattgaccgggatgaggagctcaaatgtaagcaccgttgcaacttcatcaacacatcccgccgctgaacaaagatatcaaaaaaatggatggatgaacactgcttggaatcaatcatgtctactgggggcattttgatgggaactccgaatccagcatttgtacaaatgctttggtggcacatatgtaggtagcatactggtat

SEQ ID NO: 54931 - DNA, 269 bp, Setaria italica
  Peptide Sequence Number=SeqID_120905
gcggagggagacgttcccggcgacgacggacgcgcagaagacggcgccgagcacggcgaccctggcgagctggccccgggagcggcggcgggaggtggaggtggaggaggaagggcccgcggcgtgggcgagggtggagaggagcgcgcaggcggacatgtggcaggcggtgaggaagacggggaagcggaagccgtagacggagaggaggtacttgttgaggaggagcacgccgatgttggaggcgtaccacgccgccaccagccccg

SEQ ID NO: 54932 - DNA, 202 bp, Setaria italica
  Peptide Sequence Number=SeqID_120906
ctggttgaaggagacggggaggtagcggagggagacgttcccggcgacgacggacgcgcagaagacggcgccgagcacggcgaccctggcgagctggcgtcgcacccgctgccgcccaaggcggtggtgcaggtgctccgggacaacggcatcaagaaggtgaagctcttcgacaccgacttcgcggccatgagcgcgctcg

SEQ ID NO: 54933 - DNA, 366 bp, Setaria italica
  Peptide Sequence Number=SeqID_120907
caacaatgttctgtgtaattagataaaaggagaagcaataaacagtttgtttcatttatctatagccagatgaaaaggatgaggaagacggcaaggacatccctccacatcctgcagaagccctgccttctcgtagtattcaatgctatcagacaatgtttcctctattgtccttggtttccagcccagattcttcagtttctccgacgtaattcgtgtgattatagatttaagatccgaatcattgtcacagtttacgcagttgtagtttagggttgagttttctttctaaaattgtttctagttagtattctttttgttgtctaactcgatctggtgcacagaggtatctcccagatgattccg

SEQ ID NO: 54934 - DNA, 423 bp, Setaria italica
  misc_feature (42)..(42): n is a, c, g, or t
  Peptide Sequence Number=SeqID_120908
gagacattctttgctggtgagccttgtgaaatatttcattgngtttttggaaagcaagtcattcctggaaaagatgactgtgattgagcacaccttaccttctttctgcccatacgcgaattggaaagtgatctcctgtcatctaatgccattaaatttattgatcaccttgaagaaattttacaggcttatattgacaggagagaacaggttcggcttatcaaggagctctatgggaaccaaattggcgaactgttccacagtcttccttacaatgtgatagagtttgtcttggaggattttgagtggtaaggacaataactgctaataatgctaggatttgcaccagtcaagttctgttctgtttcgagtacagctttgtagaatatgtacaactagaagtctttcatttttcttttgtct

SEQ ID NO: 54935 - DNA, 116 bp, Setaria italica
  Peptide Sequence Number=SeqID_120909
aaagaatttgaggctgctcgagctgctcaaactgaagaaatttcaatagatgatgatgattggaatgatggttagccatggccttcctgtcagcctccatatggaccttctcacgg

SEQ ID NO: 54936 - DNA, 196 bp, Setaria italica
  Peptide Sequence Number=SeqID_120910
tgcaacaccacctggccaactgcagtttcatcatcgaacattcatgaacttggtcagaaggacagcatgccccaaccaaacctgcgtgcaaatgggtcggcagaagaagagtgcatgcgaccaaggtgttgctggttgcttggctcaagagactgtaatggcaagttattcgttggaaccaatgctgtgctgtttg

SEQ ID NO: 54937 - DNA, 405 bp, Setaria italica
  Peptide Sequence Number=SeqID_120911
tttagttaacaaataattctcccttcacaacagtagatatacacaactcgagcattccattgccacaataacactataaaaacagcagatatccagtgaaagatatcaacaattgcgacatcatatctatcgtcttattgcaacactcaattatgtcgagttgtgtatatctactgttgtgaaggggagattctttgttacaaatattcttgataataagctttagtttccatagtccctctggtctgagttgcattcctatcttttgatccgctgcatttttgttctttaggtacaagaagtcaacagacttgctgctaatcttcaatcctacttggagcaaaggggagcaaaactgcctgacgggcatataatcggaagagttgtctacccaatcccaactgc

SEQ ID NO: 54938 - DNA, 287 bp, Setaria italica
  Peptide Sequence Number=SeqID_120912
atctcgaagggggagggcccaggcgagatcgaagccgccacccgccttcacctccgggaccggggaaaagggcggcggcgatgtgggtggagatcctgtgcggcctggtggcctacaaggtcatccgccgcttcttcttcgacgatgacgacgcttcctacctcgccgacctcgactcctcccactccgacctctgcttcgtccgttcgtccttcctaggtttagtagtaagtcttcttacgtccggtccgtattgtctttcgtcggccttccgtctattccccgta

SEQ ID NO: 54939 - DNA, 179 bp, Setaria italica
  Peptide Sequence Number=SeqID_120913
ctgatgacccgtccgcaatctccaaggaccgtgtgaagggctcgcttaaggtgacaagagcgttcggagctggtttcttgaaacaggttagcctttgcttgattatgtcagttttgcaaagaatggatttggttgatgattttgattatgcaattggcatagttacgagtgtttccccc

SEQ ID NO: 54940 - DNA, 431 bp, Setaria italica
  Peptide Sequence Number=SeqID_120914
ctaaacagactccatagcctaagattaggataggcttcattcagccgctgttggcagaagcagaaccactgaaaaccactcttctgatggtacaacgtgttgactaggcaacgcggggtgctggtacaagttcctttcagctgccagcgcgttaatcctgccgggccggccggccagctagatcacaagaaccatgaaaaatgaacgtcccagtcaatgtctgacaagtaattgtggactccatttattcctccgagggcggcggtgaaagtggacagagggcgtaccgatgcgggtacgacgacgagacctgttcgcggctggtcgcagcccctccctaggcggcggcggaggggagtcgtctgggcaccgtcgggtcgcggcgggcgccgtcgccggcgggtggaggttggggggtacttagttgtcgt

SEQ ID NO: 54941 - DNA, 405 bp, Setaria italica
  Peptide Sequence Number=SeqID_120915
aattaataaataatcaacaaagaatggaatgatactaaaaataagatttaaggaagtagcagcgatcgaggtatgtcaggataattatcatgcaatcaacctctaaaaatatacctggttgtaatgccactccggtctaatttctgcataagaagtgctctggaactagcattcagtgccaagcctccaccttcatcatcatccaaatctccagtagttgctccactaacttgcatacccgcttggtcagtcacagctgaaaccttaattactctccctgcaatatcaagttgtccatttaaactctgagccgcttttgcatcttcaaggcgtgcaaactgcacaaaccaaaacctttgcatagcccagtcagtgggtctaacggcagctggacaagctcacttg

SEQ ID NO: 54942 - DNA, 358 bp, Setaria italica
  Peptide Sequence Number=SeqID_120916
tttctttattttagtttcttttgtttcttttgtttttattttgtttctttatttcttaaaccgttaaggtttacttacttaaaacctttgtcttagtttattttttgttcttactaaaaattgttgtcttttaatttggccaaacttggaacattcgtcctgaacatcatccctaatatccaaatcaaaatcaggatccgtctctacagctggatcaaacatattcttcagcaataagcattcactaggtggagccaactcaatagacgggggtagaaattggaagagttgccccaggaattgaaccaagccaggcacggtagggtgcaggaacaggagctgtagctggagcagcacc

SEQ ID NO: 54943 - DNA, 290 bp, Setaria italica
  Peptide Sequence Number=SeqID_120917
actgacacttcagatttatgtaccatgatcgcaagaaaactagcagtgcaacatgctgaagagttgagcaaactggaattttaggcgcagagtagcaggtttatttaaaaatgagcatgctggcttacttgtctacaaaaatgtgctttaattggccaaacttggaacattcgtcctgaacatcatccctaatatccaaatcaaaatcaggatccgtctctacagctggatcaaacatattcttcagcaataagcattcactaggtggagccaacttcaattagacgggt

SEQ ID NO: 54944 - DNA, 340 bp, Setaria italica
  Peptide Sequence Number=SeqID_120918
cgcgagccgatctgtctcgccctcgccacctcccttctcgcatccgcgaggcgcgaaaccctagtcacgcgacgccatggcgaaggaccagaacggctcgccccgtgatggtcgaggcgaggaggaggaggaggaggcccgcagcggcagcaagtcggtagaagccgacagggacgagcgctcgaaggggagtcgggaccggggccaccgcggcaagtcgaagcgtcgggaggaggaggagggaggaggggagtgagagctccggtgaggactcaggcgagcagaggaggcggaggaggaaggagaaggagagggcggaagaggaaggagaaggaaaagg

SEQ ID NO: 54945 - DNA, 217 bp, Setaria italica
  Peptide Sequence Number=SeqID_120919
cagccatggagttctggctgccaggctgctccagcacgcgctcctagcggatgcgttcctcgtggaggcgacactggaggccggactgcggccgagactccggcaatgtagcgagcggccgaactctagcaaaggtgtttgacgaaatgcctcctcagcagtcgacaagacaacaatcaggaacacgccatgagatccaggtgatactcctcttcgt

SEQ ID NO: 54946 - DNA, 328 bp, Setaria italica
  Peptide Sequence Number=SeqID_120920
ttttaggaaccaaataggtacaacgccaatcgaagacacggatctgcgagtcggcagaggtgaccagcacttcggcagggttccccggagcaaactggaatccggtgatctttttcgcttgcgccttgcgcttcttgatctggatatcgatctgtgcctccgcactaagcttgcagcctgttgtcttgtacaaccggcagctccctttgtagcgagccgatgatcgcgcccttcaattcagccatcggcatcaatggccacgggtcagaaatgaacataagcttgagaaatgttggcagcgatcaatgctgaggtgtgcgtgtggtga

SEQ ID NO: 54947 - DNA, 431 bp, Setaria italica
  Peptide Sequence Number=SeqID_120921
ctctacaagtggttcgaagggcatccggatttccttgcgaaccctttctatgttggaggggattcctacgggggaaagattgtaccatatcttgtgcagaagattacggaagatattgaagcacaagtcaggcctgctcttaaccttaaggtaccaattcataccagaaaattcgtctcatttttttcatttaaaaattcatagcagaatctctcatttactatcgataccacgaacatagcttttaaaagggtacacaaatcagctaatgatattagtagctaaagttcttatggtgtatttttctagttagctgtttaagcttgaaatatttttttaatattggttgtttgatagtctcaagctctttacacaatatttgttataatgactgaatcagggctacctagtaggaaaccctgctacaggtg

SEQ ID NO: 54948 - DNA, 451 bp, Setaria italica
  misc_feature (31)..(31): n is a, c, g, or t
  misc_feature (322)..(322): n is a, c, g, or t
  Peptide Sequence Number=SeqID_120922
aggtatatatgttatcgatgtgcgagcatanaattttttaaggccacactggagcaactgtaaaggagagagctatagcaacccgacaaatatgatttgtgatcaattgctaaagagagtccacgaagtaagttgacaagtctaatttcttttaggttccttcttcgctcttgtggtcctcgagagctttcacttttccttgtaacatgacaattttctaatgctttctccaatgtttattttgttatttcgtttttggtgtaattccttatttaactgtgggcagcttctgggtgaatgttcaaaagccacacattttgtntaaaaaatgcttttatgtttctcctggacaaaacgatgaatctccaaggagaatcatactgaagaaggagatcgaaggattaaaacgtccaccacctcgccctccaatggattgccagaactacgtaaa

SEQ ID NO: 54949 - DNA, 267 bp, Setaria italica
  Peptide Sequence Number=SeqID_120923
caacgtatgtgcttgttttctgaattttcattgcacaaaatttcacatatatggagtgataaggttgtccgtaccagttcgtcagcagggcttccatgagacactctctcatgagcatagcagtcttttccaaacaattgttcaaatgactcttttccattcttatatattaaattatttaagataagcaaatgtaatcttagaagcaaacagttattcaagaataactttccagccacgtatgaacaagaactaaaaaaaaaaaaa

SEQ ID NO: 54950 - DNA, 322 bp, Setaria italica
  Peptide Sequence Number=SeqID_120924
aagagtttgaaggacatctggagcgttcctccccacaaccttggcaacctgcaggatcttcagcgcctccacgcctcgatccagatccagcggctgaaagatggatgcgaacaggcgccagagtggaattcagcagttgttggctgcagagcaagaggctcagcagattgtaaatgcagctagagctggtaatacgtactatcttattttggcacaaattattacagatcaagttagtgttcaagagcaagtaccgtgtgcttaagagcttcctccttgtatttgatatatcaattaatcttatggacatattcaatggtgg

SEQ ID NO: 54951 - DNA, 143 bp, Setaria italica
  Peptide Sequence Number=SeqID_120925
gcccaagtcgcccatgcttggctttgtcatatgtatgtttcctgatgatcaaataaaaacgagtgaagaataggagtccttacatacatatataaataaacagatagatagaaggagctaccttgggcactttattttacata

SEQ ID NO: 54952 - DNA, 402 bp, Setaria italica
  misc_feature (401)..(401): n is a, c, g, or t
  Peptide Sequence Number=SeqID_120926
ccgaagtttgcactttcgatggatcacctgtcggctatacttcatcccctatagaaatagtaaatttttctgaactttccaaaacaagctaaatagtatatgctaaattgtcaaagctcacattctagaaaagctcattgtgttttctgatttgcaaggcctgattggacaagttattgtctttgtcttgcttactaaactctgctcaaaactataattacttaaatgcaccactatttcttccatttcagatcaactatgcttctgctcatgacaatgaaacgctatttgatattattagtctaaaggtatggagcatacccagaaactaactgctattgcattctctttatccattatcagtctgcaaatcaatcatttcttttttcttcttcaaattnt

SEQ ID NO: 54953 - DNA, 318 bp, Setaria italica
  Peptide Sequence Number=SeqID_120927
gccgaggccgcccatggcgacggggcaggagagcgccggcgtcgccgaggctacccaggagttcgtgtcagacgcaagagcttactgggtcacgagctccctgattgcctgggatgtcagcaaccaagaaacctccctgtacttgtatgcaagcagaagtgctacaatgcacatgtcaaatggggttattgaaggttatgattccaaagttcagctgcaaccagaacatggtggccttccagccagtgtgacccagaaattccctttcatcagctcctatagagccttccgcattccaagctccgttgatgttgccag

SEQ ID NO: 54954 - DNA, 374 bp, Setaria italica
  Peptide Sequence Number=SeqID_120928
ttgttaaaagttactttaattttggtttctttaaacttttaaattttgtttaattttatttttcttttttatttggttaatttctttcttaccttctagtctctatctacaagatgagagcaaaatctgctcttcagagccttacaatggatgaacatggagtggatggttcaaagatatacttgtatggtgaaggatgggactttggtgaagtcgcacaaaataaacgtgggataaatggatcccagcttaatatgagtggcacagggattggtagtttcaatgatagaatccgtgatgctattaatgggggagtccttttggcaatccactacagcaaggtttttcactggtctattcttagagccaaatgg

SEQ ID NO: 54955 - DNA, 338 bp, Setaria italica
  Peptide Sequence Number=SeqID_120929
ggggagttccgaaaggaagctatgcaagtaacccagatggtccaaatcgtattatcgaataccgacagatggtccaggtgtccttaatttaaccagctctgtgtggataacaggtaactttctgataaattttgattgcaggcactgaatcgtttaggtcttcgtgttgtcatggatgttgtatacaatcatttatactcaagtggcccatctgccatcacttccgtgcttgacaagattgtacctggatactaccttagaagggatactaatggtcagattgagaacagtgcggcggtgaacaatacagcaagcgagcatttatggttgatagatta

SEQ ID NO: 54956 - DNA, 482 bp, Setaria italica
  Peptide Sequence Number=SeqID_120930
taaccttaactaaaagtaattctagtaatttctttgtcttgtcctttaaactaatttttgtttgtactattccttgaagattagatactcatcgccgctctttcgtctaactacagcgagtgacgttgagcaacgggttcacttccacaacacaggcccatccttggttccaggagttattgtcatgagcattcaagatgcaaggaatgatgcgcatgagatgtcccagttagatgaaaacttctcttgtgttgtgacagtcttcaatgcatgtccacacgaagtatctatagaaatccctgatctcgcgacaaataagcttcagttgcatcctgtgcaggtgaactcatcagatgctttagtccggcaatctgcatacgaggccaccacaggtcaattcacagtacccagaagaacaacagcagtgttcgttgaacccaggtgctgatgcctttgcgaacaaatgcattttggcatcgaag

SEQ ID NO: 54957 - DNA, 244 bp, Setaria italica
  misc_feature (220)..(220): n is a, c, g, or t
  misc_feature (224)..(224): n is a, c, g, or t
  Peptide Sequence Number=SeqID_120931
ggctgcactcgttgtgaccctaaaactttgtcagcaagtacaattttaaggtacgtgaacattgcggcaggcaaagtatcacatcacccttgacacatcatgagttgtacaagcagattggtattgatcctccaagaggtgtgcttctgtatggtcctccaggtactggcaaaaccatgcttgccaaagcagtggcacatcacactactgctgcttttanaagngtcgtcggttcggagttcgt

SEQ ID NO: 54958 - DNA, 188 bp, Setaria italica
  Peptide Sequence Number=SeqID_120932
gtaccagataaggtacacgacaatttagggtcacaacgagtgcagccactaatactttgtcagcaagtacaattttaaggtacgtgaacattgcggcaggcaaagtatcacatcaccattgagaaacaacatgaattgtgacaactgagacacgcaacagaggataggcaaggcacacaggggatagg

SEQ ID NO: 54959 - DNA, 420 bp, Setaria italica
  Peptide Sequence Number=SeqID_120933
ccgatgacgagcggcacggactggatccgcttgacctcctccctgcgcgcggagcagctcgcgctttaggttcttctgctcatccttgacgtattcctccctggatctcaacgaactccatgtgtcgctggagcgacttgaggcggccgtagaggtcgtcgtcgtcctcggcggacgcagtggtggaggcggaggccgcggatgaggccgggtaggatggcgggggcgccatcggggtggccgcagggggggccggagcggtggtggcagccgccatacgacaaaggaaggaacgaactaaggttaaaagggtttaaacgaaaagaaaaggtaaagggttaaacgaaaagtttaaaagaaaacggaaaaacggaaaaataaaacggaaaaaggaaaaacgaaaagaaaaggttaaacgaa

SEQ ID NO: 54960 - DNA, 313 bp, Setaria italica
  Peptide Sequence Number=SeqID_120934
tttggggtaggtattgtactattaccggttttttacggtactagtctattgtctattgtcctagtctttctttgacagatagcagcaatatcagcagcactgatcttgtcaggtctggaaacataatcttccaaatcaacctcatcactcaagttcattttggcagtgcagacctggaaaacaagcctcttctgacgtcggtcaggaagagggaactcaattttcctgtcaagtctaccaggacgcagcagtgcaggatctagagtatctgctcggttagttgccattataactttcacattcactgtttgat

SEQ ID NO: 54961 - DNA, 161 bp, Setaria italica
  Peptide Sequence Number=SeqID_120935
cctatcccctgtgtgccttgcctatctcctgttgcgtgtctcagacaataggcaacaatccagaatttcaaccctgatgctaaaggatacaagtgataaacatgaaacagttcaacactcatgttgcctcatttgtagaaatcgaagtctgtctctggctt

SEQ ID NO: 54962 - DNA, 241 bp, Setaria italica
  Peptide Sequence Number=SeqID_120936
tgcagatgcatagagtgcaatgatgtaatgtatacgaaaaggctttacgatatgctaagcctatactgcacgattaactgctggttggaggagaggtcgggcggtggggctgctgaggtgcaggtcgctaaggctctcctggcgatggagttcgatagttctacacatgctgtctgcctcacctgcagcatggcgttctcaagctctgaggcaagtgatcatgctgaacatgacgatggag

SEQ ID NO: 54963 - DNA, 209 bp, Setaria italica
  Peptide Sequence Number=SeqID_120937
gcatctgcacaccctttctcctgcacacgccagaagaatgttgcagatgcatagagtgcaatgatgtaatgtatacgaaaaggctttacgatatgctaagcctatactgcacgattaactgctgggtgagctgatctgtttgacacattacgccgagttatgttaaaatttctgctaattgatatactacgtttatgcttgcaagttgg

SEQ ID NO: 54964 - DNA, 279 bp, Setaria italica
  Peptide Sequence Number=SeqID_120938
acaaccccgttttcacggtttaggctgctcccatttcgctcgccgctactacgggaatcgcgacgacgacgaggaggccaaggaccgacccctaatcctctcctccgcgccccgccatgacgacgccgccgccgctaagcccgccgacctcgacctcctccccgactccaaggaccagaagcaggagcaaccgcccgtgccgcccgtatgaatgaatcgcttgcttcttgtcacctctatcccctagttccttcgtactactactactagttctatgct

SEQ ID NO: 54965 - DNA, 322 bp, Setaria italica
  Peptide Sequence Number=SeqID_120939
acgatctgatgcaattgaatctagtcacacgctcattatcatgggaggatatgagctctccttcacctttacttggtatgcaaagttgacccatctctctagtggggacaatgatgaactagaatgtgttgcctttgtacaaaggattgtatcatcttctgggttaggcgatctgcagttgggtacggttttcactggctggcacttgcctgattgccctctggaccctgcattgtgcgacaagttattggaccggaaagaggaggctgccaagtcgagggagcgaagggaagtttgcagtgaacgagaacgacgacgctgg

SEQ ID NO: 54966 - DNA, 270 bp, Setaria italica
  Peptide Sequence Number=SeqID_120940
cttggctgtgtctgcgccttcctctaccccgacggcatcttccgcccttctgcctctgcctccactggtccagccacgtactgctcttcttttttctttcttgtttcttacctgccctgcatcttggttagaaagaacggagatcttggtggttattgtgctcgtcgtgacgcctgagtgataagtgatttgggaattcgtttcaaaaaaaataagtgattgggaatcactgccttcgatgaaccaggaacgatgttaagggacctaaag

SEQ ID NO: 54967 - DNA, 363 bp, Setaria italica
  Peptide Sequence Number=SeqID_120941
caggatcctgaaagtcttgtgcccactccatgattgtaccatctctagcaactttcactggtgggagatttggcagtgccttttttattctctgaaccacattagtgtccgatttccctaaaatcatctggagcaataaaataatgttctggagaagtagaaggattggtttccaaatattccctgtgtccctcaattaaccaatccaacaaaaatgaagctgatccttccaatagtggatatgctgttttctctaaaaattgtttgtccaatgtaaaactgtagtgctcccaaaggtgagtggcaagccatggcccacccattggccatagagcccacacaggatcaccagcatccggtgat

SEQ ID NO: 54968 - DNA, 366 bp, Setaria italica
  Peptide Sequence Number=SeqID_120942
agaaataaaataactaattagttacaagaaggtttgagaataaatactattgttcgcattatgatactgtatgatggcatctattggctagcctgctattattcagaggttcgatttcttttttcattttcaggtcgagtccctatcttcagagaaggcagctctgttaatgagaattgaggcagtctctagattgctcgacagcagtgcctcatcgatggcttcctcaagctcatcaagaatggacatcgaagccggtgcatggcaagaatcacattcaccaaaatttcgtgacaggattcaggctggacagcagcaactgggatccgcaatcagacagcttgattcaatcttctcggctgggca

SEQ ID NO: 54969 - DNA, 243 bp, Setaria italica
  Peptide Sequence Number=SeqID_120943
gccggtgcatggcaagaatcacattcttgatgagcttgaggaagccatcgatgaggcactgctgtcgagcaatctagatgagcttgacagcagtgcctcatcgatggcttcctcgaagctcatcaagaatggacatcgaagccggtgcatggcaagaatcacattcaccaaaatttcgtgacaggattcaggctggacagcagcaactgggatccgcaatcagacagcttgattcaatcttct

SEQ ID NO: 54970 - DNA, 316 bp, Setaria italica
  Peptide Sequence Number=SeqID_120944
agaggtatatcctgtctacaggctctgtcccccaaccccccttgccattcttacgtgttactttgcaaacagtgcggtatatgtagccactggcttttgtgatggagctggagcatagtttttttttcccctgtcacatgtcttattaatgctcttaccgaaggatttctcaggtcccaaacgcggagcttgcaaaatcgtttgccagggaacaatggaatctggaagttcaagtagatcaagttgcacagcttcgagaggaggttgaaatgaagacacttgctcaagataaatacaaaagaaagctagctaagat

SEQ ID NO: 54971 - DNA, 245 bp, Setaria italica
  Peptide Sequence Number=SeqID_120945
gaggaatcggatgggtcggggcagcgacgattcggaggattcggaggaggagaggcggagggaggaggagaggaggcggcggcgggctgagcggcttgcggccatggctgcacgcgctatcgccgagcgagaggaggctgttgcgaggctcgagggggagaaggccggactcgagaagctgctagccgagcgtgagaaggagcaagcacaggaggcttcggagttgcagactagtatgattgaaa

SEQ ID NO: 54972 - DNA, 244 bp, Setaria italica
  Peptide Sequence Number=SeqID_120946
ctttcaaaaagttacttttggtatgatctgcatctttctgctatctaaagcataaacttgtcttcaggtgtaacgagaaggcccttgaagattccctttgccagcgagttattgtaacacctgatggaaatatcacgaaaccccttgatccagattctgctgcactaagtcgtgatgctttagcaaagacggtatactcaagactgtttgactggtaagaatgaagacatcatgttcataaatg

SEQ ID NO: 54973 - DNA, 358 bp, Setaria italica
  Peptide Sequence Number=SeqID_120947
tccccgtaatcgcctacaccgagaaggtccgccatcccgccagcccccctcccttccacccccagacgcgttcttagttcgtcaatggttctagtgtttcctgggttctggggggttcttgattgtgatcgggtgacttatacgcaggtcatttggaggagcagctgcagctgaagaagtaagccgttcccctgctccccctaatctttgaatctcttgtgcgaaattgtggatctacattagcccttttcatttatgtggatataaattttgtgcatttgcaaatcaatgggtgtacacgagttgaaatttcagctgtatgtgtgagaatgcagctatacgaaaaggatagatcaga

SEQ ID NO: 54974 - DNA, 393 bp, Setaria italica
  Peptide Sequence Number=SeqID_120948
ggggaaagaacagtagaggtctgatcatcttcacatgagaaagacattataactgtggtttccaaactaacagaaagtgcaatatgtgcatataggaaacagaaacacaaatgtagaaacatgcggtacagacacacgtccattattcatagtgtttaaagtttaaaaggcaatagcataatgattgtattcatctgatcataatgtttcttcttaatacaaaataggcacctctgctgtgtgtttgacaaaaaaactgctccaatttcattcacctaaaaaactgcttcaaatgcacataaattccacatatgagatttattgaaacctccatacagcactaatattacagtttgcctaaaagtgctatttcagcaacaacaaatttgctta

SEQ ID NO: 54975 - DNA, 332 bp, Setaria italica
  misc_feature (109)..(109): n is a, c, g, or t
  misc_feature (122)..(122): n is a, c, g, or t
  Peptide Sequence Number=SeqID_120949
tttgaggaaatgattgaaatatcaacagagaaaatacgtttagccaaggtgaaagaggaacaggcaaagaaggcctgggaagccgctgcacaagttgttaaagacgaanaggatgctaagcngaaactgtgtgatgatctgaaccatctggtccaggagagtgctgctacccaatatacaaaattagaggaactgaagaagcgtttagaatctctaaatcccagcagggcttctgtcgaagtttcacatgctaccacaaattcagtatctcagccgcccatgtcacaaaatcctgccactccaactggccctttggataatggtatagagcc

SEQ ID NO: 54976 - DNA, 246 bp, Setaria italica
  Peptide Sequence Number=SeqID_120950
caatatgtgcatataggaaacagaaacacaaatgtagaaacatgcggtacagacacacgtccattattcatagtgtttaaagtttaaaaaggcaatagcataatgattgtattcatctgatcataatgtttcttcttaatacaaaataggcacctgtgctgtgtctcttacaattttactatgtcttctcagatacattcaggagaattattccaaaattcgtgatgtagaaaaggagttagagaa

SEQ ID NO: 54977 - DNA, 489 bp, Setaria italica
  Peptide Sequence Number=SeqID_120951
gaatctgtgcatacgtgcagtatccatgcattccaacttcattttctgtccagactgacttatacagttcaaatcttgggcactagcttcatcatgaagttgtattgtactcctttagcaatcttaggttctggccatttagctccttccggtacacggatgcatttgaaaccttgatttttgtacaggcgcagggcagctatgttgtttacatcacagtgcaatgccatggtccggcaccccccaactccttgctcgcgcctctgcttcttggaccaacattttagcaattcctttccgacgttcctcctttcgcactgcgacatttgctatataagcaatacctgttcttctctgcttcaggggtccccttctcggaagatagtctgccactgtgtcaactgtaagaatgccagctatggagcctctactgagatttgttattttcttgtaaatttcggtctttcttcttaagtattcttcttgcac

SEQ ID NO: 54978 - DNA, 166 bp, Setaria italica
  Peptide Sequence Number=SeqID_120952
caaatggcgagttggcgattggaatgggaggtgaaagctggcagtctctggtcggtaggattgatcccatttctaccctgcttcgttttattttagtggcagcagtgggtagttctcatggtgttttttagtgccgggcattgtgtcaatgccctaaacgaaaaac

SEQ ID NO: 54979 - DNA, 189 bp, Setaria italica
  Peptide Sequence Number=SeqID_120953
taactaaattaagtaggttaactaggacaaaccaaacttacttagacaagaagtatgataaaagccgagttcctgaagaaagattggtggtattggtcctccttcacagcagctatcaagacgacaaccgtatcagcgcttgcactcaggatctacacccttgacgactgcatcatgtacacaaaggat

SEQ ID NO: 54980 - DNA, 320 bp, Setaria italica
  misc_feature (276)..(276): n is a, c, g, or t
  Peptide Sequence Number=SeqID_120954
aaaaaacaaaaagaaaggtaaaactaactaagaaaaatagacaatacgtagtaaataataagaagaataacctcttgttttccagaagaggctccacaaggttcacttgttttgatgggtttgattcaccttcagcaggtttcttcagaattccagtaggctgctgtccttggcgattctgcgctcctgcagccttttgacccgttaatctcctaacagatggagcccttgcaacagatgatgcagcagcagcagcagccactcggatccttttangaacatcaacatattcatcagtctcatccactatctcctcctgc

SEQ ID NO: 54981 - DNA, 363 bp, Setaria italica
  misc_feature (258)..(258): n is a, c, g, or t
  Peptide Sequence Number=SeqID_120955
tagtaacgaaatacaagaaagacaataataattaagttagactaactagaccaagtaaataataaatagattcaaaagtaggctaatctactttcgacgtccataaccaaaaaggggaggaactccacactaggttcatgacagcggaagcacatcgctccagtcgaaatttacaacaattgagtacacccgtatttacctcttgctgaacatagcaagaaccgtaggctctgctggcatggttccgtgcatttttanctctatattacacgatgcatttcagagttacctcttgttttccagaagaggctccacaaggttcacttgttttgattgggtttgattcaccttcagcaggtttct

SEQ ID NO: 54982 - DNA, 172 bp, Setaria italica
  Peptide Sequence Number=SeqID_120956
gtaggtccatccgtaaatccaggggcatcgcatctttatccatttggcaaaaacgctagttttgaaccaaaagaacggaaccgaaaagcaagttaaaagaaaggctttaccgatcatttcagcattaagtctacaagctgtttcatattttgcagattttaattgtcttgta

SEQ ID NO: 54983 - DNA, 329 bp, Setaria italica
  Peptide Sequence Number=SeqID_120957
tctgctggggcatcaatggcacattcacacagccagatgctggggactccctttgtccctccctctgttaaatctcggcttaactgcatgaaggaggtttttgacaaatcagggaattgcagcctttgtgagattaggtccaaagatatcctgatcagtgagacgcccaatttttctgccattgttccttttgcagcatcatatccatttgagatatggattattcctcgacaacatctttcttattttcatgaaattgatcagaataaggcaactaggaatactttaggggtactactagttagaaagaacaaatagactagacaaaa

SEQ ID NO: 54984 - DNA, 334 bp, Setaria italica
  misc_feature (48)..(48): n is a, c, g, or t
  Peptide Sequence Number=SeqID_120958
caaggacaacagtaaccagcaattctcctacttgccagatttcaccgnaccctggcatcttgaagaccttctaacacggtcacaacttgatccatgccaggtctgcatcgcgcatccattgacaagcattgcagtgctagggccgcagtcttctgcgccgcaggaagggaatactgggaacccaaccgcgagtccaggacatggatcactctcctcttgttggtgatgtaaggcctagcccattctaccaggtttgtgctggccaggcgggcggttcttgttccagagtctacgtcttgtccctagtacttagttcttaactttctttaagtta

SEQ ID NO: 54985 - DNA, 248 bp, Setaria italica
  Peptide Sequence Number=SeqID_120959
tcggcactgcacggcctgcagccagggatcacgcagtgcggcagttcttttcacttgggtcgaagggacaccagctgcactgtcaattgagacggggggagttaagacgaccagttcggaatggcacgactcggcaaatgttgcggtaattgattccctgcaatagttgctacaaacttcatccaagactaataattctgaagctttgcttgtgaagagttctatctgcagaacgagtttcacaagaa

SEQ ID NO: 54986 - DNA, 262 bp, Setaria italica
  Peptide Sequence Number=SeqID_120960
gcagtacaatgcacccgatacaatttacttcagacaggtatacagtccctaaaatgtttgtggtcctacaataccataattcgactattggcgttgaacattttcatgctacacttgttcatgtaggcccattccatacaagagctggcaagaaagaagtttcaggaactgagggatgagggcatacctatagaaaatcaccacataaagattgaacagaaagctagaccaaactcctgcaatagagaaccaattaaaaacg

SEQ ID NO: 54987 - DNA, 342 bp, Setaria italica
  misc_feature (16)..(16): n is a, c, g, or t
  Peptide Sequence Number=SeqID_120961
gcagctgattgctaanaaggctaactgtgagcctgatgaaatatgcgactttgaactgcaactctgtgatactcaaccaagcgctgtagcaggtgccatgaaagagttcattttttcaggacggcttgacaacctttgcatgtcattttgttcattgaaggtttgccttactattctgtttacctacagctacctcattactgttttagctaccacatcttgtgactttttgtgtttccattgttccatgtaagtctcagtttagagctagctacttacaccagtggtatgattctaggtctaatttttctatttttttcttacggggttggggggttctta

SEQ ID NO: 54988 - DNA, 344 bp, Setaria italica
  Peptide Sequence Number=SeqID_120962
aaaatggcccaaaggagtcatcggagaataagaacacaaagcaccatccattgctattgcagctgattgctaaagaggctaactgtgagcctgatgaaatatgcgactttgaactgcaactctgtgatactcaaccaagcgctgtagcaggtgccatgaaagagttcattttttcaggacggcttgacaacctttgcatgtcattttgttcattgaaggcgctaatcgactcaacttctgctgaacactcacttgatcattgaatcttggttgttgtcgtaattggttagtcttcttattttgtaccttatttgttaggttaagtttggggtttctttaagtta

SEQ ID NO: 54989 - DNA, 273 bp, Setaria italica
  Peptide Sequence Number=SeqID_120963
cgaaacccccgacgcgacggaagcgaggaaaccctcgcgagtctctcacccccgccccccacagccgcccgccgccgcctcgaatccgcccggattcgcgcggcgccggacccctgcggatcggatcccggagtgcacctgaggaggacagagggatggtggcgatggagggaaagggggatgcgtcagtgacgccggtgaggaccagtgaccggctccggcagcggccgaagtactatgctcgtggctatatgtattacaagccagcaatgg

SEQ ID NO: 54990 - DNA, 265 bp, Setaria italica
  Peptide Sequence Number=SeqID_120964
tgtctacttctagtcgtcttactaccatgtaccagtagcatcatcctcagctcctccactctcacccttgtagttgaattgctgctgcttccgatgacaatggatgattgcaacatggagcgaggagcgaagttggggagctagcactcagtttggttggacactgcaggagggtgcagcgacagcagcagcagctgcagctgcagctgcagctttcctgtgccatccatgatactacagctactccatccatctatccatcact

SEQ ID NO: 54991 - DNA, 212 bp, Setaria italica
  Peptide Sequence Number=SeqID_120965
gtgtgctctgggtctcttggtcatttcctgcatagatatgttatgcaaccctttgccgaagaaacctgcctcttaactgaaaatttcaggttagagattgtttgaagcaaaatgaagagcttcgttctcacttggaataaactaagacttgagcaagctagcctgttagaaagtaagcaatatcaactacccaatcagactggacaaaaatg

SEQ ID NO: 54992 - DNA, 429 bp, Setaria italica
  Peptide Sequence Number=SeqID_120966
taattaagagccttgactcctttttgtttgagaagacaggcctgtgctgatatttggcactatgtaactcgtatttgttgtatggtttcttctaggcaagacaatcactcattgtttttcctgatgcttgttgatccacggcatccagctgagtctaccagcgctgcaaatgagtcagttctgaaggtttatcttgaccacggcaaagcctctggtgtgatgaatttccatgattgtgtcgttgttcggcagatagcaggagagtcattggttgtgaagatcttgagctggatgactggacacgtctactagggcattgtttgccgatttttgtctagggtgaaacttagtggcctttgcaaataaggagttttctatgatgccatcccaggattttgtcttagcaatgtaaactacctatgatgtatg

SEQ ID NO: 54993 - DNA, 386 bp, Setaria italica
  Peptide Sequence Number=SeqID_120967
taaagaactttttaaagaataaattacaaattaaccaaccaacttactagtacaaaccacgaggaagcagaaggtgtaaaaacacaactaactcagcaggtaaaagtgctctatttctatgatcaacatctgaatccgtagagaaaatgcaatccaatgaagccaaatttatctctatctgattagcttgtctcatgtgatctgaactattagcttcttcgtttacaaaaaaatacgtgcaagctgacatttggaatctggtgttacttcagatgacttcataagtgtatctagtaaaacaataaagttggctccaacaactcaacaagtgcctcatttgctgctttcaattgtggcttcttgctgagtaaatgcttgcggatgtg

SEQ ID NO: 54994 - DNA, 244 bp, Setaria italica
  Peptide Sequence Number=SeqID_120968
aaaacaggtgcagccctagcgatatccggtgcagctccatgaattttcttgttgtcaactattgagctttccgtcagacttagcaactctgaaataaaatcaccggtagtgtgcaccatatctacagtaatgcatttcgccgcggaaggaaggagcttgatcgagatatttaaggtcattgaaattatctctgggagaattctggagtgttcttcctcttggacctcttcagattcctcaatag

SEQ ID NO: 54995 - DNA, 160 bp, Setaria italica
  Peptide Sequence Number=SeqID_120969
tcagtcgtatctatacatgagcacttcagagcaacctgcaaaattgacttgtgtagcacgcagtgcaatacacctgaacatccagaatcatcccaagatacagtaagactgtcaagtattaggctcagatcatctggagaatactcaaaggaactctcga

SEQ ID NO: 54996 - DNA, 178 bp, Setaria italica
  Peptide Sequence Number=SeqID_120970
aagcatggagctggacaagaggggagaggatctggaccggaccagctgctcaggcatgttctggagtcgaagaagctgccacagggagcagcagtgtgatgatccatgtggtgctacagaggcacaggatggttccgaagtccaatctccatgcttgcgctgtgcgagggccgtggag

SEQ ID NO: 54997 - DNA, 298 bp, Setaria italica
  misc_feature (268)..(268): n is a, c, g, or t
  Peptide Sequence Number=SeqID_120971
ttggtcccttttggttcgtaagtctaggtttctagtatttgttggtacaaggatctctatgactgcctgaagcaggagctgcgcccagaactgcacaagcacctgcttctttcttgcagttacagcagcaaggtaattacatttttttttttacctgcaatcaccggtagtgtaatcactgctccagcctgtccttgcaagttgcatgtccagtaactctcggatctaagcatttgcaggtctggctcgtcggcgacgggctgacggntgaagagcagaggaaggcccaggcgggcgt

SEQ ID NO: 54998 - DNA, 388 bp, Setaria italica
  Peptide Sequence Number=SeqID_120972
gattgagaccacaaggttcaaatctggacggcattaacaatatatcgcagcctgcagttattcggtgggaaaccggaacactaaatccaacccatccacgaaatttatccctgaagttcgactctgtagatctcatccagtcttcaagctctgggtcaccagaaccaagcatggcctacattaaataagataagaatattttttcattggtcaactctagttgtgggcacaaagagggcaactcaaaacttctaaaaccacctcaacccctattcttcatcagccttcagttcaaagtaaaaaaaaagcaaagaattcgcgagaagaatatggacatggttctagtttccacaacccacagctacggctgagactactcacactgagt

SEQ ID NO: 54999 - DNA, 352 bp, Setaria italica
  Peptide Sequence Number=SeqID_120973
ttaatgagatcaattcctttctgataatccaatcttccaatgaagccaatcagaggaacatcaggccttataggtaaacccagctccttctgcaattcagctttacatttggcctaaagcaacaatgacatgctttccagagaggtcatcagcagaataatgacaagggatatgtttgtctgtggcagggttccaatcattaatgtcaattccatttacaattccgtttaatacacttttcctggaacttaacagctcatcgaggccttgtccaccttcagcagtagtgacctcccacgaataacccttactgacagtcacgattcgatctgctgtcacaactgcaccttta

SEQ ID NO: 55000 - DNA, 270 bp, Setaria italica
  Peptide Sequence Number=SeqID_120974
ttgctccgcggcatggtcccatgtgaagtcttttgacatgccccgcttcatgagttccctcccaggaagatttgtgttcccgatatgtcgaaattgcagttcgcaatgtccacagcatgttttctgttgttaggggtgcgaacgcccaccctgtaccttgctccccgttatcaccaaaagggttgaagttctccacggtgtctctaagcccttttggtgataacggggagcaatgtccacagcatgttttctgttgttaggggtgcgaac

SEQ ID NO: 55001 - DNA, 254 bp, Setaria italica
  Peptide Sequence Number=SeqID_120975
tagtaattagtttagtacttactaattgtaactaattgtttgtcctttgctccgtaagggttcatcacttttgacccttacgggagcaaaggacaacatgtcatgagcaacatcttaaggaaacagcgaatggtataacggaagcagaatccagttgattgcatatgtaccattgcgaggctgcctgcgcgggaccgcttccagcatcctccttatctcgaaactgcattcatctggacttggcactgcatcac

SEQ ID NO: 55002 - DNA, 195 bp, Setaria italica
  Peptide Sequence Number=SeqID_120976
cataatttagcacatcaggatatgtactaaattatgtattactagaatgctgcgggagtctttataaacaccatatggtctatattttgcagcaagaacgattggcatgccagccttgtgccagtccttcttgctgcaaaatatagaccatattatgtattactagaatgctgcgggagtctttataaacaccat

SEQ ID NO: 55003 - DNA, 206 bp, Setaria italica
  Peptide Sequence Number=SeqID_120977
gagtcaaggtgatcattgttcatcgcagaacctcgctgaatgttcagttccacttctctgaaaccattgcgtttctgcctgtcgttcaggtgaagctggcggaggacatggtggcacgcggcgcgctgacatgcgggctgggcagcctcgggctgtcgccggtgctcaacccgcggcaggcgtgccggggccccgacgtgctgtcc

SEQ ID NO: 55004 - DNA, 221 bp, Setaria italica
  Peptide Sequence Number=SeqID_120978
ttcatcatgcacctgatacttgggcaatgacaaccttctttcctccattgacattgcttcatcatcccacaccagatagacctcatttgtagctggctggttaccggatgctttgttattggatactgcgggtgaagatccaacagctagacctccaatttggcctactccaccagcacaagcttggtatccacaacaagtagcatacccacaacaaccag

SEQ ID NO: 55005 - DNA, 251 bp, Setaria italica
  misc_feature (239)..(239): n is a, c, g, or t
  Peptide Sequence Number=SeqID_120979
gtagtgagcagccaatacatgtgcagggattccttgcattccaaagatctcaatgtctgtggactccctatcaggcttcgcattaggaaccttggtgacggactccttgtggacctggaggacgtgtatggccatgccggaggcggtggagagcttcttgtggcagacgtggcacttgaagtgttagtctttagaagttatttggtcttgtttttttattttaccctcaaccggaaatntgttgatgatga

SEQ ID NO: 55006 - DNA, 328 bp, Setaria italica
  Peptide Sequence Number=SeqID_120980
tgaataatggaattcaggggtgtcagtgctgaagaagattaaacccgtaagctataagttgcaataggtttatataaatatttggtattctgaccaggattgatttctttttatttacttctataagcccgttgtgatttgatcttctaaatgtccataggttttaggtggatttgacgcatcaaattatgtaacagaaaggagatgggctgctgctgccgatcactcagatcccgatgcccgttctgtacagaaagatcttgtgaagcttgatcgctcagacccaatgctgctatatggctatggctcctacgaggtggcagcgaag

SEQ ID NO: 55007 - DNA, 496 bp, Setaria italica
  Peptide Sequence Number=SeqID_120981
gctgggagtccaggtcacctgatagtatgcatcataggcctggtagtatgagagcaatttttcataattgatattagaatatagattcatgtctgctcagattcctacactttactgaatttaatatgacaaagtaaaatctaatgttgttgaattctactacttaaaatttccttctcttttccatgcagtttggacttttggagattttcttaaactacctgttgggtaagcaacctaaaatggacaaccatattgctgtatatgagcgtgagaatgacctacccaaagtaaccgtatatcggctacctgctattggagagtcaattggacaacttcagggaggtcgaacaattgattttattgatccaacatatgctgtggatcctgaggagtctgagtttcattcatctgttattcgttttcattatagctcaatgaggaccccgccctctgtttacgactatgatatggattcaggggtgtcagtgctgaa

SEQ ID NO: 55008 - DNA, 259 bp, Setaria italica
  Peptide Sequence Number=SeqID_120982
taattgatattagaatatagattcatgtctgctcagattcctacactttactgaatttaatatgacaaagtaaaatctaatgttgttgaattctactacttaaaatttccttctcttttccatgcagtttggacttttggagattttcttaaactacctgttgggttttaggtggatttgacgcatcaaattatgtaacagaaaggagatgggctgctgctgccgatcactcagatcccgatgcccgttctgtacagaa

SEQ ID NO: 55009 - DNA, 264 bp, Setaria italica
  Peptide Sequence Number=SeqID_120983
cctccagcaccacagtcgccggcgttgccaccctcctcggggttgatcatgtagaaggcctccgagtccttggacccgactacgcgctcgacgcgggcgcgcacgtacgtgagctcgccgtcgggccccgcgggcacgccgccctccttctcgggcgccgccgggagcacgccagcgcccatggacacgccgcgcagcaggcgcagaacgtggcgctcgtcatcggaggcctccttcctccggatggccgtacccggcttgcgg

SEQ ID NO: 55010 - DNA, 215 bp, Setaria italica
  Peptide Sequence Number=SeqID_120984
ctttttggtcgtgcagaacacaagctgaaattagactggccaacaaggtacaacatctgccttggaactgcgaaagcctaaaatatcagattttggcttggctaaactgaatgatgactctggtcctgtgagcactcggatcgctggaacagttggttatatggctcctgaatatgccacaagaggttgcttgacacgtaaagcggacatctaca

SEQ ID NO: 55011 - DNA, 386 bp, Setaria italica
  Peptide Sequence Number=SeqID_120985
aaaaaactgaaatttggtttcctcatcttggactaaaatttatatgactgcttcttcatcttggactaaaattgttggtttccttgactgcttctttatcttggattaaaattgtttctttctgaccttttcactcttaggactgtggtgctcataaagtctgacaaagataaccgctatggattggattctgttgtcactcatgacggtacaaagatggcgtgctgggccttatcagagctgtcaagtttccatgacaaattgggaatggaggcctatgataaggttcagtcaaacacattgtctcttaatttgcatgcctatatcctatactatgaactctactgccatgcatatatttgaataattcagattgatgcttcaag

SEQ ID NO: 55012 - DNA, 239 bp, Setaria italica
  Peptide Sequence Number=SeqID_120986
gcgctatctgcagatgttctacaatcttcagttcaggaatctggcaaagaccgtaccaagagtattcgaacatcctccgcaaaccccagcaggcgcagggcctagtacagtggcagtagtaagaccgaaagaaaggcaagtgtgcccactcttaagaactttactgaagagagaccggggaagcaactgactgacccatttgttgtttcacaaatccaaatttggatgctgcagaaagc

SEQ ID NO: 55013 - DNA, 191 bp, Setaria italica
  Peptide Sequence Number=SeqID_120987
gtgggtgtggaagacggtgatgtcgaagccgcgcgcgtggaggatgccggcgagccggaacatggggttgatgtggccctggtacgggagcgggaacaggagcacgtgccggcgaagatggcgtccgccgtggacggcggcttcaccgttgctctccgcggccatggctggcgccggcggtggcgtcatgg

SEQ ID NO: 55014 - DNA, 274 bp, Setaria italica
  Peptide Sequence Number=SeqID_120988
tttttaaaccgcagacttcccacttttttaaaaaaatgaggaaaagttccacttctgcatactgctactaactcgcaatcaccaacacaaaagcaccagcctcgtgcgttaaaaatacaatacgtcaataccacatttgttgcattgtctgtggcttccgatttgacacacctttcttggcagccgcataaataaatcctccctccatttcataaggccagtcccgtaccaagcttttgaggtatggcagagtcattatcttcatcaaggaagg

SEQ ID NO: 55015 - DNA, 369 bp, Setaria italica
  Peptide Sequence Number=SeqID_120989
cgttaactatacatctatgggagaatctggtcacgtgacaagatcatcgacttcagagttaaacacaaagcttgggaatgttgttgttatgtccttgaggtatggcagagtcattatcttcatcaaggaaggatttcttgtgcaaaattctcccactctgctctatcatttttccatcctgattcgcatcagcatccgaaaatgtcttgtccaggattgtctcaatgatctcatcagataacctcatctctgattcccctagaagagcaattaacatctgcttaacctccttccgttcaagctatatgatatggatggcacagggtttattgaacgagaaatcaattttttcttccattggtatgtttg

SEQ ID NO: 55016 - DNA, 252 bp, Setaria italica
  Peptide Sequence Number=SeqID_120990
gcacagacatcaaagatacccctacgtatcctacaccgatatgtaaacagaaacactcgacatttctaatcagattccaaccacagcgatcattcagaaatgaaatcaaaggttgaacaagaacacgcgagtagctcgcacgcatagggaccgggatgggaacggcgtactcacaggcggtctgggaggcgaggtgcacggggtcctcgtagccagggtgctgaccgacttacgaccgtaggaaataggaaa

SEQ ID NO: 55017 - DNA, 212 bp, Setaria italica
  Peptide Sequence Number=SeqID_120991
caaaatacaatgactccccttttcctttgacatcgaaaaggtacaaatatcttgttgatcaggccatcatcgatgaccgaaccacttatgctcttgaacagctcaaacagggcctcaacttcactaacgctgaaggcggtctgggaggcgaggtgcacggggtcctcgtagccagggtgctgccgcttcgccgtggaatggaagcaccccat

SEQ ID NO: 55018 - DNA, 417 bp, Setaria italica
  Peptide Sequence Number=SeqID_120992
atccagggtgcgcgacctctcgagaaggccaaggccaaggcgccctgcattgtcttcatcgatgagattgatgccgtcgggaggcagcgtggtgctgggctcggtggtggtaacgacgagagggagcagaccattaaccagctcttgactgagatggatggctttgccggcaacagtggtgtcatcgtcctcgctgcgaccaacaggcctgatgtgctggactctgcgcttctgcgtccaggaaggtttgatcggcaggtcactgttgacaggccagatgttgctgggcgcgtcaagattcttgaggttcactcccgaggaaaagcattggctaaagatgttgactttgaagatcagctccagtgaaaccaggggttcttctagcaattttctcaaagtcaacatctttagccaatg

SEQ ID NO: 55019 - DNA, 353 bp, Setaria italica
  Peptide Sequence Number=SeqID_120993
gtgtgagtagttctcagtatttctctcgctaattcagaggaactaagtaagtcataatttgacaaattttcacattggtgtcgcagatgtccagccaaaaggactactccatggctacagcggacattgtggatgctgaggtgagggaactcgtggagagggcctactcgagagcaacacagatcatcacgacgcacatcgacatcctccacaagctcgcacagcttctgatcgagaaggagacggtggatggggaggagttcatgagcctgttcatcgacggccaggccgagctttttgtgcttgaggcagcaaagcagcaggcagatagctggcctggcgtgttgtattga

SEQ ID NO: 55020 - DNA, 284 bp, Setaria italica
  misc_feature (200)..(200): n is a, c, g, or t
  misc_feature (274)..(274): n is a, c, g, or t
  misc_feature (277)..(277): n is a, c, g, or t
  Peptide Sequence Number=SeqID_120994
taaaattaaactaaaattaaaactaaaacgtaaaacgtaactaaactaaattaacgtaactaattaccttacctaacaaagtacttacgcaacagcttctgatcgagaaggagacggtggatggggaggagttcatgagcctgttcatcgacggccaggccgagctttttgttgcttgaggcagcaaagcagcaggcagntagctggccttggcgtgttgtattgatctatgcgcttttgtacgggtattcgtgtaacgggaaaaaaaatgganagntaagctt

SEQ ID NO: 55021 - DNA, 249 bp, Setaria italica
  Peptide Sequence Number=SeqID_120995
accattaaccagctcttgactgagatggatggctttgccggcaacagtggtgtcatcgtcctcgctgcgaccaacaggcctgatgtgctggactctgcgcttctgcgtccaggaaggtttgatcggcaggtcactgttgacaggccagatgttgctgggcgcgtcaagattcttgaggttcactcccgaaggaaaagacaatttaggactaaaaagaatagttagaactttagaagaaaaattagacta

SEQ ID NO: 55022 - DNA, 236 bp, Setaria italica
  Peptide Sequence Number=SeqID_120996
taattgttccgtcttgttagtcctattggtagttagttcctttttggtctacagcggacattgtggatgctgaggtgagggaactcgtggagagggcctactcgagagcaacacagatcatcacgacgcacatcgacatcctccacaagctcgcacagcttctgatcgagaaggagacggtggatggggaggagttcatgagcctgttcatcgacggccaggccgagctttttgtg

SEQ ID NO: 55023 - DNA, 177 bp, Setaria italica
  misc_feature (142)..(177): n is a, c, g, or t
  Peptide Sequence Number=SeqID_120997
acgggaaatggatagctaagcttgtaggtaccacattgatgtagccaagatgcttttgcatacttgtatagtctgttccttgtaaagcattgactgacacatttgagcaagtaaatgcttctgcttactgttatagcaaccnnnnnnnnnnnnnnnnnnnnnnnnnnnnnnnnnnnn

SEQ ID NO: 55024 - DNA, 197 bp, Setaria italica
  misc_feature (150)..(150): n is a, c, g, or t
  Peptide Sequence Number=SeqID_120998
ccaagaccaaaaaggaactaactaccaataggactaacaagcggacattgtggatgctgaggtgagggaactcgtggagagggcctactcgagagcaacacagatcatcacgacgcacatcgacatcctccacaagctcgcacagcttcngatcgagaaggagacggtggatgggggaggagttcatgagcctgttc

SEQ ID NO: 55025 - DNA, 449 bp, Setaria italica
  Peptide Sequence Number=SeqID_120999
cctccccaaaatcagtaccccacagtcctcaacctataagattaaattcctaacattccagctgcttctcacgtctgtccctgcaccaaattagccatgggcttccttgaacaagcgacaaaagctacacagattttgttcgagaagcatgcacagagcaacaatttgatgcgtacagcatttactgcaacccagcaagcaaagaggaattcatcatttcgaccatgggtctcatttgtgagcagttttgcagcaagtcgaaacgcctaacaaggccagcaagcactaaacgagctattagcatgctcgatatggggacagcaagagaaccgtcatcgttcgacttaagcagccgtgaggtgatgaagagggcagattggtcatggccattaccttggggccgtttggaaccattgccggttactatttagccttgctaagcaaggata

SEQ ID NO: 55026 - DNA, 254 bp, Setaria italica
  Peptide Sequence Number=SeqID_121000
catctcggcctggaggacggtgcagtagtgcccaaacgtctccggcgacacgttgaggtcgaacccgacggcgaacaggaagtccacctccaggtagttcatctccggcaggctgatgccgccgaccctggcgaagtaggcgttgttgtggcgcacgtcatccatgaacttgacggcggcgagcacggcggtgatgaggaggcggtggacgctgtacgagtccacggcgagcgcgccgcgcccgcgccggccgc

SEQ ID NO: 55027 - DNA, 392 bp, Setaria italica
  misc_feature (26)..(26): n is a, c, g, or t
  Peptide Sequence Number=SeqID_121001
gtttcaggacatgcaggtttatcagngaaaactcatggtctaacaaacatttcacagggaagttactagttacttacgacataagctctcttattgcaagatagcatctccagagcaactctcagttatacaaactcttaataacgatagctctaaaagcttcaactcagccgcaacttgcttcactcaatcctcagtagaactccgttcatcggtgctgcttccttatccctcttcactggttgcacctccaagtgcaatagcataagaacttggaaatacatcggtatttacagacataggtgcagaaccatctcatttgcaggacacacagcagcaataatacgggaccaactaagttaaaagaaatactaccaacttactaccaagga

SEQ ID NO: 55028 - DNA, 294 bp, Setaria italica
  misc_feature (239)..(239): n is a, c, g, or t
  Peptide Sequence Number=SeqID_121002
tcaagtgtgagtagtatatgaactccatcttttgagttgaaggaaaaccatgcagggatatgtatgttacattcctcaagaagttcaacatatgcctgagcttccagtttgttggggatcgtttcaaaagcaatcaaatcaggggctgcttcagcaagaacctgaagcctgtactcagagccatcagcaagataagccccataacttccatagaagccgcaaccagaataggtttttgngtaggagtggattgctccaatgtccttcaggacatctcacgcgcttccagtgcaa

SEQ ID NO: 55029 - DNA, 177 bp, Setaria italica
  Peptide Sequence Number=SeqID_121003
cttggaggtgtgcaatttatcccaaccgcaccaacctttgcacacttgtcagcaatagtagcacattcgatcaatgagtctccgctcacgatatgaactccatcttttgaagttagaaaggaaaaaccaatagacaagggaataatagtaatagttaacaattacctcaagaagtta

SEQ ID NO: 55030 - DNA, 450 bp, Setaria italica
  Peptide Sequence Number=SeqID_121004
gcactgctggaattgatgtcatcacgggcgaccgttggggacgatgcagaaactgggaattcaagagtcggttcaaggtgaagcaggccatccttcctgtccgcgacagaggcggcggagatgatcctcagggtcgacgagatcataacctgtgccccgcgcagaagagaggacaggatgtgattcgcccgcacgcgtatctttgaattagggtgtgcgtgttttccccagttgcagggggttactatgatggttcacgggtgtctgattttattacgtttggggtggcaactgggaactgtttttttgtgcgacaatgcgaatgttacaacctacaacagtcttctatctagtatctaggccttttgttttcaaatcccctagtgatgtattcccttggtagctaaggtcgacaggcacttgccattccacattaacaccaggagcagc

SEQ ID NO: 55031 - DNA, 401 bp, Setaria italica
  misc_feature (372)..(372): n is a, c, g, or t
  Peptide Sequence Number=SeqID_121005
taccttagacaatagaatagaccctaatagacgtagctgtcacagacagtaaacgacacccgcgtcttgtttgggggtggatggcctgaaatggtgatggccaaagaagtcgatgagcttgcaaggaagacccctgggaagaaatctcatgctatcgatgctttctctcgtgccctgcaagccatcccaacaaccatagctgacaatgctggtttggatagtgccgagatgatctctcagctccgagctgagcaccacaaggagaactgcactgctggaattgatgtcatcacgggcaccgttggggacatgcagaaactgggaattcaagagtcgttcaaggtgaagcaggccatccttctgtccgcgacngaggcggcggagatgatcctcagggtcga

SEQ ID NO: 55032 - DNA, 356 bp, Setaria italica
  Peptide Sequence Number=SeqID_121006
ttcgggtttcttaccgttttggggtactattgtctagtaaacttgggtaatttctaagtagttcgtttcgtaaggttgaagcaggccatccttctgtccgcgacagaggcggcggagatgatcctcagggtcgacgagatcataacctgtgccccgcgcagaagagaggacaggatgtgattcgcccgcacgacgtaaaatactttgaattagggtgtgcgtgttttccccagttggcagggggttactatgatggttcacgggtgtctgattttattacgtttggggtggcaactgggaactgtttttgtgcgacaatgcgaatgttacaacctacaacagtcttctatctagta

SEQ ID NO: 55033 - DNA, 285 bp, Setaria italica
  misc_feature (265)..(265): n is a, c, g, or t
  Peptide Sequence Number=SeqID_121007
tagaagatcattggtcatgggatcaactgttttgtcaacaggcaattaatctataacttccctgaagaactctttgctgatgctggcatactcgcaattgagcatgactagaactttagaagggcaattgaacggctagctctcgtcactggtggtgagattgcatcaacttttgataatccggagtctgttaagcttgggcactgcaaggttattgaagagattatgattggtgaggataggctaattcatttctctggggttnagatggggcaggcctgcacc

SEQ ID NO: 55034 - DNA, 268 bp, Setaria italica
  Peptide Sequence Number=SeqID_121008
ggccatcaccatttcaggccatccaccccaacaagacgcgggtgtcgtttactgtctgtgacagcacgcatagggcatcatgcaaggaagacccctgggaagaaatctcatgctatcgatgctttctctcgtgccctgcaagccatcccaacaaccatagctgacaatgctggtttggatagtgccgagatgatctctcagctccgagctgagcaccacaaggagaactgcactgctggaattgatgtcatcacgggcaccgttgggg

SEQ ID NO: 55035 - DNA, 232 bp, Setaria italica
  Peptide Sequence Number=SeqID_121009
aaggttgcagatattgaagctgctgaaaagcagaaaatgagagagaaggtgcagaagatcattggtcatgggatcaactgttttgtcaacaggcaattaatctataacttccctgaagaactctttgctgatgctggcatactcgacaaattagaagacaatagactagaactttagaagggacaattagaaacggactaagactacttacgtactaacttaggttaggtta

SEQ ID NO: 55036 - DNA, 195 bp, Setaria italica
  Peptide Sequence Number=SeqID_121010
aaaagaagaaaacccttagaccctactacccccgaactacccagacgtacgaccgaccggacttacaagccgccgccgctccggatctgcgcccactcacgctccatctgatggagagggtgctgaaggatgacgccgtcgaggagaagggcgagcgcgcccggatggcttcttttattggagccatgggcgatt

SEQ ID NO: 55037 - DNA, 499 bp, Setaria italica
  misc_feature (417)..(499): n is a, c, g, or t
  Peptide Sequence Number=SeqID_121011
cttcaggagggacttttgcttctttcacccttttccttggtaactattctacttcatcaaaagaaaaaggaactaatctcaatttagtcattgacacctcattttcctttttgtttgcttgcagctttcatggactctagtatacagtttggctcacttttgagaagctcctttgctgcacatagcattcgacctttgctcaccgtgccagccagaagagactcaccagaacagtgtagattaaggagcattttagaacaagcattgtatcagttcagagttgtaatgttatttcccaaaccctaattttggtactatgggtttagctcagtgcgaggtagaacactgcctatggaatctttgatcggaggggaaaatgaattgatctgagtttgcagtaaaaaatattcaattagnnnnnnnnnnnnnnnnnnnnnnnnnnnnnnnnnnnnnnnnnnnnnnnnnnnnnnnnnnnnnnnnnnnnnnnnnnnnnnnnnnn

SEQ ID NO: 55038 - DNA, 310 bp, Setaria italica
  Peptide Sequence Number=SeqID_121012
taacgaaacaacaaataaggactagacggaacaacctttaagaaatagaccaaaggaccttagttgacatcctcccgcatgagcctgcggcggagatccttgcagtacatgaggcgcagcgtctcggcgtagacctcgatgtcgtcgcagtcggagatctcgacgatgtgcgggagtgtgcgctgctgcttggaccagcggtcggagagcttggcggcgaagaacctgctgtgcgcgacgagtatgtggcggtggacgcagagcgtgacggagaggccgtccttggaggtgagggtgaggcggacgtcgt

SEQ ID NO: 55039 - DNA, 237 bp, Setaria italica
  Peptide Sequence Number=SeqID_121013
catcacctgcaaaaacattgaggcgtcacaagcgcagaacaggctgctagtctgtgatgttcttgaagaagtttcagacaactcagatggcaccaaacgtgcttcagcaattaacaagctgaagccgtagaaaaggattcagcattggatgttaataaggttcagagcacttccaagagttcagttccccaaccagcaacagcaacgcgagcatgatacatccagtgagacctgtgg

SEQ ID NO: 55040 - DNA, 190 bp, Setaria italica
  Peptide Sequence Number=SeqID_121014
agatactgacctccctcttcacttcttctgttctcctcactctctcccttgctcgctgtccactcgcacccaccccagcaaggaagaatggagtacgagaggattcatcagaaggcacaggctggtgccctttctccaacaaagctaaggatgaagattatgggagcccacaatcgagtgagagttatca

SEQ ID NO: 55041 - DNA, 254 bp, Setaria italica
  Peptide Sequence Number=SeqID_121015
tggccacccactgcacccatgtacgtgacttgtagtcgtatagtctaaattaaacccagagcgcgccggcgttaatgagcatgggcttgagctcgccggcgaggtggagggacatgatcctgttggtgccgccgacgagcttaccgccgatgaagacggcggggacggcggggcccctaccgccgagcatcttgagcagggcgcgctccatctccttgcccctgggatcactgtccagctcgtgaaccagggcg

SEQ ID NO: 55042 - DNA, 237 bp, Setaria italica
  Peptide Sequence Number=SeqID_121016
tcttgtgtttgacgaaccacggctcatacatcaccctcatgctttcaccttccatgtagtgatagttgtagctattgtaccatggagcgtgcatgagaacgatcaaccagggtgatgtatgagccgtggttcgtcaagtacaaagttgatcttgtgtgtccgctcataggcgtgcacatgtcctgcaaacacaagatcaactttgtacttgcaggacatgtgcacgcctatgagcgg

SEQ ID NO: 55043 - DNA, 266 bp, Setaria italica
  Peptide Sequence Number=SeqID_121017
gtctaccatccggaccctcgagtgggtggacgtcctcaaacccgacctcgtcttccccgatgccatcctgccggagggccacccgggcgcccacgcgcgcgtcatgaaggggtggtacctcatctacacctccagcgacgagctgcccaacctccgcgcgctgcacgtcaggaacaagcccgacctgatcccgctgtacccgagcggcctgctgggctacgccaacgtcggcgacgtcctgcccgtggactcgaagagtcgccgta

SEQ ID NO: 55044 - DNA, 451 bp, Setaria italica
  misc_feature (5)..(5): n is a, c, g, or t
  misc_feature (396)..(396): n is a, c, g, or t
  Peptide Sequence Number=SeqID_121018
accanacctacaaggtagttagtagttagaaggaccaaggacttacaatttaacggtaaaaggaaagtaaacggctttgagataccgctcgacactgtcggacaaccattagagaagctactttcctcggttgaaaatttcaccaaaccgttgagctcgctgcctgcttctgacctagtccttgcaccccccgtgagcgtggatgatgtcgcctacgccgtgatcaacggggtcatagatgacagcttctttggggtgttcacgatcgagcaaatcaaggaagccgcagccaacgtaagggtgtgaacctggagtcttttttcgctgtatgtgaaggtatcgaagatggaaatgcttctaaactcagcactaacgaaatgatccctgcatttttcnctctccctgaatctttgaccatagccaatagttcaaaaatcaagcacaacaaaaa

SEQ ID NO: 55045 - DNA, 248 bp, Setaria italica
  Peptide Sequence Number=SeqID_121019
agtccttgcaccccccgtcgagcgtggatgatgtcgcctacgccgtgatcaacggggtcatagatgacagcttctttgggtgttcacgatcgagcaaatcaaggaagccgcagccaacgtaagggtgtgaacctggagtcttttttcgctgtatgtgaagggcacgggcctcaggatgcaatctttgctccggaatgtctgccgagccggaagccgtggagctgctgcgaggctccgggaatttgctg

SEQ ID NO: 55046 - DNA, 230 bp, Setaria italica
  Peptide Sequence Number=SeqID_121020
ccgggcagttgatccccgggaacgccggctcgtgcgggatggaggcgtcgtcgaagagcagccactccagctgcgccatgtccatgtccagctcctcgcactgcaaccaaaaggaatcattgccacgtcagaacagaaccagaatctgaatcttgcgccactcccatcagcgccgacaccgacactgccgactctggagcaacttcgcattcagctttactgcagctatc

SEQ ID NO: 55047 - DNA, 475 bp, Setaria italica
  Peptide Sequence Number=SeqID_121021
aaaccaataacttgcttgatactggagataccgcaatttaatggacatgaatgcaggtcttggtagcttcgctgctgcactggaatcccaaagttgtgggtcatgaatgtcattccaacaattgcaaatacttccactttaggtgtaatctacgaacgtggattaataggaatgtatcatgactggtatgtagtacgattctgtgtcgcctcctgggttacccaatttttgttcgttctgttctattttctcacttcaattctgaaatcattttacggaagttacattgtgatatggataacttttccttttgctgttaaaagtgtattctctttgaggattatattcatttaacggtctatatgaaaaccgagggataaaaattgaactttagctatgtcagtatcagttggagctgtttaaggtgaagttgtaatagaattcacatggtaaccttggcaacaagtttttttct

SEQ ID NO: 55048 - DNA, 254 bp, Setaria italica
  Peptide Sequence Number=SeqID_121022
gacgaaccgcccgccgcaccgcgcctcctcctcgccggaggaggaccccgccgccgcgccgccgcaggcgccgccagcctccatgtcgtcggccacgccgccgccgctaagcgtcatctacacccaagaacaccgcgcgcggcgagctagctgcttcctaagttagcagtggacggagaagactctagctagtagctagctagctagctcttgccgtcgtcgtccttccggcgagctataatataatcaagcta

SEQ ID NO: 55049 - DNA, 251 bp, Setaria italica
  Peptide Sequence Number=SeqID_121023
gcgcctcctcctcgccggaggaggaccccgccgccgcgccgccgcaggcgccgccagcctccatgtcgtcggccacgccgccgccgctaagcgtcatctacacccaagaacaccgcgcgcggcgagctagctgcttcctgcacacacatagttaaagaaaaatcaaaggaaaaataaacgcagcagagttgctcacacgcaagtcgtgatgcggcggagagctcgcagttcgttacgtacgtctggctcga

SEQ ID NO: 55050 - DNA, 208 bp, Setaria italica
  Peptide Sequence Number=SeqID_121024
acttagctcttcctgtgaacttgtccaacctgatgatgttttgcgaacatctccagcccttgaagaatggcgtaaacggaagatggagcgtgcaagacaacgagcgatagaaaagaatgggacatccagtgcgaaaacacgatgagacgtgagaattgttgttcagcacaagggatttttctttcgtgaggtttggagttgctgtggt

SEQ ID NO: 55051 - DNA, 494 bp, Setaria italica
  Peptide Sequence Number=SeqID_121025
gagaaggtagtgggcacagcaacagcgacgaaggatcaacaagaaaataaggtggtttggagcttatcaactggatatatactcacggtaaatttgggtgatgagctcagctttcagcttaaaagtgagagcttagaagaagaggtatgatccatacattttaattggtaccagagttcatatcgattgtcttgtagtaaaaatgaagctccaccataactgttcgtggctaaaacatctggcagcaaaagaatatatagttgatttgtgcagtaaacaaggttttcaataaagttaatatacaaaatagtgtacgctgcagagttcatcatttttctttaaaaaatgtaatacgactgtggcaatctcttagaagagaaatatataagagccataaatgacatgaatttacatcagtatgtctgtttctgtaactctttcctgaagtgctgttacttttagaattctgtatccatatgtttctaacaagatgt

SEQ ID NO: 55052 - DNA, 447 bp, Setaria italica
  Peptide Sequence Number=SeqID_121026
ctggatgctttaattccatcattttactctcttcatttttgttcattaggtagcttacttggttctcgctcaatttcaccagtttcatgttgttccatccagtgcatattgcatcccaggtaataacgagctggtatgtagattttaagtagctaagtttttcatttattcgatgtgcaaaggtatcttttttgaaaccagtggactcacctgaacttctacgctgctgcctttctgccttaatgggttcatcagcaaccccacaaggcaagaatttcggtcaaacactggagcaccttccataccagggagacattggatgtcagccatcagcaacgagcacctcacagcgcatggaggaaggaaatttgcaacagcaccaactgatatgctgttgtaagtaaattggtaagggttgtattaggtaggtccgtaatttggttagtt

SEQ ID NO: 55053 - DNA, 236 bp, Setaria italica
  Peptide Sequence Number=SeqID_121027
agcaccttccataccttagtcaattaagagattatcaatagctaatgtcataatatatgagaaaagaaatacggagtgacatttaccagggagacattggatgtcagccatcagcaacgagcacctcacagcgcatggaggaaggaaatttgccaacagcaccaactgatatgctgttgaagaaatggaagggtgataggaggccgaatggagatcctgctatcagcaaagggtcc

SEQ ID NO: 55054 - DNA, 313 bp, Setaria italica
  Peptide Sequence Number=SeqID_121028
aatacctgaagcccaagatgaatcaccaaccgtgacaagaacaactgcggatatagcctctctgattgaaggggatgaaatgcaatactggttaattttgttgactgtagaagagacaaacctcccatagttatctggatgctttaattccatcattttactctcttcatttttgtcattaggtagcttacttggttctcgctcaatttccaccagtttcatgttgttccatccagtgcatattgcatcccaggtaataacgagctgaacttctacgctgctgcctttctgccttaatgggttcatcagacaa

SEQ ID NO: 55055 - DNA, 199 bp, Setaria italica
  Peptide Sequence Number=SeqID_121029
cgtcgccaagtcttcggccgcgcggggcgtcctctccttcatctccgccgtccccgacgcgcagcggcctggtatgcatcagctaccttcgcttcctacctgcatatgcctgcctgttcatgatatgcaaagctgatcatccctgtgaccctcgcagcgctgttccagtcgctgctgtacgaggcggcggggcgtacca

SEQ ID NO: 55056 - DNA, 322 bp, Setaria italica
  Peptide Sequence Number=SeqID_121030
agacggggaaccataatcaaaatttgtgagggctgttctcaacaaaggaaatgattgcttgcaacgtagcagaaaagccggctagtttgttgagaacagcggggaccatatcaaatttgtgagggctggcaaacatcagattgttttccttgtgaagggtccaatctatttagtctgtataagctgcacggaagagtcatatgagggattgagggggcaactagagctcatgtatggccagttattgcttattttgacaaaagtcggtcaataggtgctttgagaagaatcccaaattcgatatggcaccgttgctcggtgg

SEQ ID NO: 55057 - DNA, 369 bp, Setaria italica
  Peptide Sequence Number=SeqID_121031
accgagcaacggtgccatatcgaattgggatctctcaaagcacctattgaccgactttgtcaaaataagcaataactggccatacatgagctctagttgccccctcaatccctcatatgactctccgtgcagcttatacagactaaatagattggaccctcacaaggaaaacaatctgatgtttgccagccctcacaaatttgatatggtccccgctgttctcaacaaaggaaatgattgcttgcaacgtagcagaaaagccggctagtttgtgctcatccccatacctggaatatatcggcttcccagaattgctcaagatgaagaaatgcttcttcctcttcctccacgaagatgatgcatcatcca

SEQ ID NO: 55058 - DNA, 268 bp, Setaria italica
  Peptide Sequence Number=SeqID_121032
taatatccttccaaaccgcagacatcaaaaatgaaaacatcccaattcaagggggaaaagaaaacgaatacctcttctgagaaaatgtgacaaaacccagtccctcatatacctccccaacaatgatggtactgccaggaaagggcgctttccccgtatacgaatatctcattttctaaatccctcacccattggcatactctattgcacatcttgatcgcttgggtcttatcagccagtggattaaaagctgcatacagctacaaaa

SEQ ID NO: 55059 - DNA, 262 bp, Setaria italica
  Peptide Sequence Number=SeqID_121033
ccccaaggcgaggaagaagttcgacgccaccgaggtgcggcgttcctcgagggcgaaggccacggtttcctacaaagatgatgtgagttcttcgttggcctgttgtatgccgtactgatcaaagtatgcagttttcgtgaaaacggtaactgtcagtgttccctgtttgaagatccctattgaattttattcctgcgattcttgaatatgccatatacttgattttaattgtgtggctcagaaacctcatggtttgagtgcg

SEQ ID NO: 55060 - DNA, 412 bp, Setaria italica
  Peptide Sequence Number=SeqID_121034
tctccgactcagtcgcactagtgaaactcctttgcaggtacggttgaatggagtagcaacattcataggtatcgtagggctttctgttgctgctatggtcctcatagtcctctttgcaagatatttttcaggacataccacaaattcagatggctctgttcagtttgttaaggggcgcacaagtgcgaaatctgcaatatttgggtcaataaagatactaactgttgcggtgaccattgttgttgtcgctgtacctgagggcttaccactggctgtcacactaactctggcttattccatgcggaaaatgatggctgaacaagcctacggttgggtcggacggggacggtttccttttcgcgtccgttggtaaacgaaaaactaacttcgtaggaacgtacgtccgaaccgg

SEQ ID NO: 55061 - DNA, 363 bp, Setaria italica
  Peptide Sequence Number=SeqID_121035
cgtgctgggttgcagtggctgtgagagattcagatattcatgtacactggaaaggagctgctgaaattgtcttgacttatgcaaaagttggattgatgtggatggctcaaatcatgaaatgacacctgataaggctaatcaactcaagaaatttatagaagatatggcagaacaaagtcttcgatgtattgcttttgcttatcgaaatcttgatctggaggatgttccaagtgaggaacaacgaatcagctggcaactgccagatgatgacctgactcttattggaatcgcagggatgaaggatccttgccgccctgtaagttaagtagtaagtcttgtttgtaatttgttgtctaaaaaggt

SEQ ID NO: 55062 - DNA, 111 bp, Setaria italica
  Peptide Sequence Number=SeqID_121036
caaacaccaagatgttgctcgagaagcatggggatagcatcagggagaagggaattttggttgttgatacttcaaacaccagcattctgcacataagcaacatcatccggg

SEQ ID NO: 55063 - DNA, 225 bp, Setaria italica
  Peptide Sequence Number=SeqID_121037
cgggaaagtggtcaagcaaccatcatcggcagtttctatggaactaatatggctttagacctaaaatgaccatgttcgctgcagtgttggatgctcattgctctgataataacatttttcatggaagtaagcactgcaaacaggaataattccacacaaatgtaatggaacttccattttcccaatgtggcataaatttgtcagttcaattagaactactcgtaa

SEQ ID NO: 55064 - DNA, 182 bp, Setaria italica
  Peptide Sequence Number=SeqID_121038
ggcggaaagtggtcaagcaaccatcatcggcagtttctatggaactaatatggctttagacctaaaatgaccatgttcgctgcagtgttggatgctcattgctctgataataacattttccatgggagtacggaatgctacaatcatcttcaaattgcatggtatcataattaaaagatata

SEQ ID NO: 55065 - DNA, 383 bp, Setaria italica
  Peptide Sequence Number=SeqID_121039
cctctcagcagcagtcaagggcggctgctcgatgctttagcgagaaaagctgcagaagatgttggatgaaatgaatgatgaaagtgatggccgttcggcaccaattgtgaagcttggggatgcttctatggcttcacctttcacagcaaagcatgcctctgttgctcccactcttgacatcatccgccaggggagaagcaccctagtcaccacacttcaaatgttcaagattcttggactcaactgccttgcaacagcatacgttctcagtgtcatgtacctggatggtgtcaaactcggcgatgttcaggctacaataagtggtgttttcactgcagccttcttcctcttcatctcccatgctcggccacttcaaacgtctt

SEQ ID NO: 55066 - DNA, 290 bp, Setaria italica
  misc_feature (199)..(199): n is a, c, g, or t
  Peptide Sequence Number=SeqID_121040
tttagttaactttaacttattttacttaaaagttgtttgggtaggtattgtactacttgtattgttgtggagatggaaccaatgatgttggtgcactgaagcaggcacatgttggtatagctcttttgaatgctgaaccagttcagaaagccgactcaaaatccaaaagctgaaagtaaatctgggaattgaaaaaacngaaggctgctaatgaagcatcatcacaagtgactccagcaactaacagtcccgctaaagcatcgagcagccgccccttgactgctgctgag

SEQ ID NO: 55067 - DNA, 277 bp, Setaria italica
  Peptide Sequence Number=SeqID_121041
tgccagcatgggagaagcgtcagaaacaggcagttgcaaacctggagaaaaagcacgactagagttttctcttccttattggttctctgcacaattcattcaaccagagcatctccgagaacaagcccttcaagtatgctttgtacggagcggttgctttcttcacagtgatcacgtcggatatgttcagggatctgaatgactacatgaaactggaacccttgccagaaggaagtagaggggcgaaactagatgctgtgggcgaatgcttatgttc

SEQ ID NO: 55068 - DNA, 318 bp, Setaria italica
  Peptide Sequence Number=SeqID_121042
ttaaacttcggtcgtattgtttctaggtcttactaattaagttggttgtttttcactgcagccttcttcctcttcatctcccatgctcggccacttcaaacgctgtccgcagagcggcctcaccctaacatattctgtgcatatgtgttgctctccattcttggccagtttgccatgcacatactcttcctgatcacagccgtcaatgaagcatccaagcacatgccggaggaatgcattgagcctgactcggacttccatccaaaccttgtgaacacagtttcatatatggtgaacatgatgatccaggtggcaacc

SEQ ID NO: 55069 - DNA, 248 bp, Setaria italica
  Peptide Sequence Number=SeqID_121043
cgaaaggactgctataaagggacgatagactggatctacacatctgatgagaaggccatgtctaaaaagaccaggtggtcaacctgtacagattgtgcacaggttccattttgcttctcacttgaagagaatgtctgttgtcgtccgtattcaggataagttttatgctttcattaagggtgcaccagagaccatccaagagagattagtttatatgcaagagccaagactcgagaaccctgccgcgt

SEQ ID NO: 55070 - DNA, 223 bp, Setaria italica
  Peptide Sequence Number=SeqID_121044
agcgtttgaagtggccgagcatgggagatgaagaggaagaaggctgcagtgaaaacaccacttattgtagcctgaacatcgccgagtttgacaccatccaggtacatgacacttcaaatgttcaagattcttggactcaactgccttgcaacagcatacgttctcagtgtcatgtacctggatggtgttgcaaaggcagttgagtccaagaatcttgaacatt

SEQ ID NO: 55071 - DNA, 145 bp, Setaria italica
  Peptide Sequence Number=SeqID_121045
gaaactggaacccttgccagaaggaatgaggggcaaactgatgctgtgggcaatgcttatgttctgcggttgctacggatgggaacgcccatcgtagaagccgctcccatccgtagcaaccgcagaacataagcattgcccacag

SEQ ID NO: 55072 - DNA, 131 bp, Setaria italica
  Peptide Sequence Number=SeqID_121046
gccatctaatatttgcatacacatatatagtacctgaaatttactgatacagggtcagcactttacatacttgtcaggatcagaaatttcaggtactatatatgtgtatgcaaatattcatgccatctaat

SEQ ID NO: 55073 - DNA, 242 bp, Setaria italica
  Peptide Sequence Number=SeqID_121047
ccttagcagcagcgctggtagcatggtgatatatgctgggtcgaggtctccccaccccttggtggccaccctgtgggcagtgtgcagcaccgcaggcgccaggaccaggtacttgaagctgcccatccattgccatggccattcggtcaaagggcctggccgtgttgccatggtgatgggaaggggaccttccttcttcctgggataagcagctccctccgaccctctctgagctagctctg

SEQ ID NO: 55074 - DNA, 237 bp, Setaria italica
  Peptide Sequence Number=SeqID_121048
tcaccatactctgaagccgtgcaatgcattggagattgtgcggaatttatcatcacaatggaagtccatgctaccggtgcctctttccaagtccaccacctgtggcagcctgccagagatgctcagacagtggtgttcttggggttggtaggtgactctctaagcgcccttcatgacaataacaaacactttgcagcattcaaagtatggatttgaagaaggttgaacaaaaaatat

SEQ ID NO: 55075 - DNA, 422 bp, Setaria italica
  Peptide Sequence Number=SeqID_121049
gatgcaactgacaaccttcctactaggtatatgatcagtgattgttgtgttctgctgaacaagccacttatatccggtgcggcattaggtttggaagggcaggcaaatatcttcctttccaaagatattttgacagtttatcatcacaatggaagtccatgctaccggtgcctctttccaagtccaccacctgtggcagcctgccagagatgctcagacagtggtgttcttgggttgttcctggagtgattggctgtctacaagctctggaggctataaaggttgcgactgccgttggtgaacccctatgcggaaggatgctactttttgacgcactctctgctcgtattagaattgttaagcttcgtggaagcttgccagattgcaccacaaagggtgcaatctggcaagcttccacgaag

SEQ ID NO: 55076 - DNA, 162 bp, Setaria italica
  Peptide Sequence Number=SeqID_121050
gaatgatcttgagttttttgtttgtcctcatctactgttacatttactgcagacagcaccgagtgtgaaactgctccccgagaacgcccgaatcactagtagagattacaaaagattggttgataatggtgaacctcatctgttattggacgtacgacccac

SEQ ID NO: 55077 - DNA, 456 bp, Setaria italica
  Peptide Sequence Number=SeqID_121051
ttttcgtttttagtttttctttttgttttcttttactttttgtttattttaagttatttggttccgtattgtctgcaagcctgccacattatggtgcagttaaacaggtggatgctgtggtggacgaggccatcaagacggcaaacgccggcgacggaaagacggtagacgaagcccagttcaagaaatttctcacagataccctcggggcaatcatgcggcaactgaacagcaaccccgtcttcgtctccaccaacaccgtcgtgcacgagccattgtcctccggtgcatcctccgccctgttctcctcgccgcagctggtgacgtcatcgccaagtaaataaagttacatacatggcagttacatggagggaacagaatttcagtattcgagcggggcctgtggtgttgctttttgtctgatcacaggcaccgcggcagcatgttatgctgcct

SEQ ID NO: 55078 - DNA, 392 bp, Setaria italica
  Peptide Sequence Number=SeqID_121052
gctggagcaggtccagcgggcggtcgagatgctgcgcgatgccgacgctgatctcggcacgtccctctcggaggacaccgcagcggcgccgccggagggtgaggaccgcaaggccggtgtcggtgacgatgcagatgacgcggcgtcgtcgtcggtggcgagtgactccgactacgagacgacccaggtgagcaggacaggaggcgtcgtgatctctaacgagtcacgagttcttgacaggttgaggattccgggaactagtataggatttggatttccgaattataagtcgttgcaacaggcgtaactaatggtaatggaaaattgcgatgagctaactgaattagctactatttagacactacaaactgaaaccaacacttcataactat

SEQ ID NO: 55079 - DNA, 240 bp, Setaria italica
  Peptide Sequence Number=SeqID_121053
gggatcatgtgtgctcaccgagttgcagcagatgttggactagagcacacatgatccctgagaatgctacagcaatgacaccttgcccaggaaaacagctgtcgccaacacagtaaaggccatctattgatgtagtgttaaaaggcattgccagtaagccctttggtttaccccgtggcatcggtccatatgtaccatcatttcgagcaagaaatcttcggtgagtttttggtgagccta

SEQ ID NO: 55080 - DNA, 246 bp, Setaria italica
  misc_feature (158)..(158): n is a, c, g, or t
  Peptide Sequence Number=SeqID_121054
ctactcagatggttgagaacacttgcatagtagcccaagaagaccagcatctagaactggagatttttgctctagtccaacatctgctgcaactcggtgagcacacatgatccctgagaatgctctagtccaacatctgctgcaactcggtgagcacncatgatccctgagaatgctacagcaatgacaccttgcccaggaaaacagctgtcgccaacacagtaaaggccatctattgatgtagtg

SEQ ID NO: 55081 - DNA, 152 bp, Setaria italica
  Peptide Sequence Number=SeqID_121055
tagggtattctatgtgtgctcaccgagttgcagcagcaatgacaccttgcccaggaaaacagctgtcgccaacacagtaaaggccatctattgatgtagtgttaaaaggtattgcgacatccctggcagatggccttgtacggattacgact

SEQ ID NO: 55082 - DNA, 388 bp, Setaria italica
  misc_feature (216)..(216): n is a, c, g, or t
  misc_feature (342)..(342): n is a, c, g, or t
  Peptide Sequence Number=SeqID_121056
taaccaatacccctccaatcgagcccttcaaccggctggtgaggctggcggcgcgcgccttctacgacgacatctccatgaaaggcgacaaccagcccaagacctcccgcggggacaaccgcggcatggccgtcgtcgtcctagacgcgctcaccaggtactaccgagtcatttctgttgaacctttttgtcttctcaatgaaatcttgttgggtntgcacgccaagttcgtttgcaatatgttcggcgctgtaggtggttgccttgaaggcttgaacaaatgatttgctgctagtcttcttgtttgcatgcacaccctgcctttcaggttccatcaaaacntctcgcctgcccgtcagtggcactgctctcatgctatctcttttga

SEQ ID NO: 55083 - DNA, 294 bp, Setaria italica
  Peptide Sequence Number=SeqID_121057
aggaaatgggtgatggcgatgacaatgttagaaagcgtaggcgtgagaaattgaaggacatgcaacaaagaattgaagagcaattgaagccattggttgcacaacttgatagagtgaagaatttacctccgcctgagtttgggagtctacagacatgggaaagagcaaatgttggcgcttttgcaaatggtgaccctagtgcagctgattcatctaggaacttctactaagggtctagttattggttactaccttaatttgttccgtttacttatttgggtttgttagttaaca

SEQ ID NO: 55084 - DNA, 235 bp, Setaria italica
  Peptide Sequence Number=SeqID_121058
atgccctgcaactggtaagctacacggatgagtacttccattgtgaaaattgcaacggtgaactggttgcagagagtgacaagctcgcttctgaggaaatgggtgatggcgatgacaatgttagaaagcgtaggcgtgagaaattgaaggacatgcaacaaagaattgaagttgaagttgagatagctgatggtgtgaaagaagaaggtgctgaatcaggtaaaaacggttcaga

SEQ ID NO: 55085 - DNA, 241 bp, Setaria italica
  misc_feature (32)..(32): n is a, c, g, or t
  Peptide Sequence Number=SeqID_121059
gaatcaggtatctcaacttcaacctttgtctnacccatgtacgccattggttgcacaacttgatagagtgaagaatttacctcgcctgagtttgggagtctacagacatgggaaagagcaaatgttggcgcttttgcaaatggtgaccctagtgcagctgattcatctaggaactcacaagggcagtatggtacaccaatgccgtacatgggtgagacaaaggttgaagttgagatagctg

SEQ ID NO: 55086 - DNA, 252 bp, Setaria italica
  Peptide Sequence Number=SeqID_121060
agaatgtaatccctgtagtagaggagctccggaggcgcttagcaccatcaagtgccacacaacatgatggaaaggagaacttaagtggccagcatgatgtggaaggggcagaagaagatggtgagttgggcattgccactctttatcaaatgcttgtggtagaagtacacttctatatttgtgtaatgtagttactttgtttaacatctgtccctcttgtattccattttcctttgatgcctaccccaactt

SEQ ID NO: 55087 - DNA, 296 bp, Setaria italica
  Peptide Sequence Number=SeqID_121061
agattgaggacgatggcgcgcatataaaggcgatcatcacttccgaggagtagaggagctccggaggcgcttagcaccatcaagtgccacacaacatgatggaaaggagaacttaagtggccagcatgatgtggaaggggcagaagaagatgaatctccatttgagttccgtgcactggaggttactctggaagcaatctgcagtttccttgaatgacaacgacaactaactagaagacttagaagaactagaatagacttaacccaagactttaggaatagaaattagaacaata

SEQ ID NO: 55088 - DNA, 363 bp, Setaria italica
  Peptide Sequence Number=SeqID_121062
aatgatgtggaagagctagagatgttgctagaggcatatttctcatttccatgtacaatatcaagagcaagcagagccagtgttgctactgtacatggaaatgagaatgatgtggaagagctagagatgttgctagaggcatatttcatgcaaattgatggcactttaaacaaattgacaacgctgagagagtacattgatgacacagaagattatatcaatatccagcttgataaccaccgtaatcagttgattcagctagagttattcttgagttctgggactgtctgcctgtcgctgtactcgttggttgctggagtctttggtattaacataccttacacctgatacgagaaccaccca

SEQ ID NO: 55089 - DNA, 360 bp, Setaria italica
  Peptide Sequence Number=SeqID_121063
ttaggggtagcggaaagttaaaaagtaggcatgacaagattgacagcaagggttcagaaggtgagagacgagcttgaacaattattggatgatgacgatgacatggctgatctttacttgtctagaaagttggctgggggcatcttcccctgtcagtggttctggaggaccaaattggttccctgcatccccaactattggttcaaaaatatcaagagcaagcagagccagtgttgctactgtacatggaaatgagaatgatgtggaagagctagagatgttgctagaggcatatttcatgcaaatttgtattggtctacttttaaactaaattttgttacttaacgttctttgttagtt

SEQ ID NO: 55090 - DNA, 249 bp, Setaria italica
  Peptide Sequence Number=SeqID_121064
acgatatctcgtgcatcgtcatccggttccgatgctgagtctcgcaccatccatctcactactggtgaactctggatctgtgggcagctcaggaccgaagatgtgggcaggttcttgaccaaaggaaaaactgttgggttgggtgtttgcagcctgttcaggcttgttttcttttatgtgcatatatgtatacacgttagaagcaaatatatactgttgggccggagacaagaaaataactgcccgaag

SEQ ID NO: 55091 - DNA, 328 bp, Setaria italica
  Peptide Sequence Number=SeqID_121065
taaggaaaggaactaaggaaaggtaaggaaaaataagacaagaaaggtaccaagacaaggactactgctagaaatacgaggaggagcagagtaagcagaaagacttccaaaagccctgcagcggcgatccaaagtgcagctcgtagagtacctctatggtcgaaggcgggacagtcgcaaacagcgaagctcgccctgtggttgcatgagagcgaaaaccatcgacgactaactcgccttccacgccgcttcttttttaaaaggcgcaagggaaggtcaatcttgtcagcttcagaatcgcatcaaattgtctattttgttcatgttc

SEQ ID NO: 55092 - DNA, 420 bp, Setaria italica
  Peptide Sequence Number=SeqID_121066
catcttttacgacaacgcctccttgctcatcgctgagacccaggatcacaatgactctagacacctggaactaggctgctacatcccgacaggcaacgccacctccaagttcggtcgtctgttctcgatcagccccctcaatcagaatctcatcttctacaattgcatcaagccgctgccgccatccgtggggcttgcagagacgatgtgccgcaacaacacgtatgttcgcgtcgctgccgagcgttacgatggtcatggcagctacttcttggagggctgcaactattccgtcaagccggtgcttggaaggtctgtgaagatcgacgctggcaactacgaggaactcatgagggacggcttcctcgtgacatggcaggtggccaccgtcaggaggaagcaataggaagataatgatag

SEQ ID NO: 55093 - DNA, 155 bp, Setaria italica
  Peptide Sequence Number=SeqID_121067
aattagaaaatagaaattaatagaaacaaatgctaaaagacatacaacttgacctcatccaaacttcttcgggccgtagaagtttgaattatgaacaaatgctaaaagacatacaacttgacctcatccaaacttctacggcccgaagaagtttg

SEQ ID NO: 55094 - DNA, 290 bp, Setaria italica
  Peptide Sequence Number=SeqID_121068
aagaaccaatacttacaataggaaccaacgtagcaatcaagaaacggggcctgacatggcctgtaaggatgaacattgccatagaaacagctgaagcacttgcatacctccatgcagttgaaatcatacaccgtgatgttaagaccaacaacatattgctggacaacagcttccatgtcaaagttgctgacttcgggttgtcacgtctgtaccctcttgaagtcacccatgtctcaactgtcccacagggcacaccaggctatgtcgacccggtgtaccaccagtgctac

SEQ ID NO: 55095 - DNA, 294 bp, Setaria italica
  Peptide Sequence Number=SeqID_121069
atgatgcagaagcggcgtcattgagcttcgctacaaaccatggtagaacatgttccagtagctttagtggccatgacacatagactcttatataaaagtctaatgtgtcattgagcttcgctacaaaccatggtagaacatgttccagtagctttagtggcatgacacatagactcttatataaaagtttcctttgtttctctggagagaaatttatcctagctttaggaagtacctttgcttcctcatcactgaagtggctctcaattttctgcataatttcgtcagcttgtg

SEQ ID NO: 55096 - DNA, 248 bp, Setaria italica
  Peptide Sequence Number=SeqID_121070
ctatccaacggctggtcatgagattctggatcagataggccttcctccttggatcaagagtagaatcttgagagacctttcgtatctcagcctcaagctcactctggttcattcggaagatgtccttccaaccaggcctaaacatctggtcattctgttcaagattctcctgaagatgactttcttctgaaggagcaagaaagaccaataatactagaatagaagtaacaaagaaataagaaaagtaa

SEQ ID NO: 55097 - DNA, 186 bp, Setaria italica
  Peptide Sequence Number=SeqID_121071
gagaagtatagcatctcgcgtactgtgagagagtcaatgagtacatcatctcgatcaacatagccatatgagccgtagggcaagcgagacttggcaccgttgacaaagacctcgccgtacatcctctacggtaggaacaaaccgaaagaacctaaccctaaggtaaggaaagtaaagaaaaggaaa

SEQ ID NO: 55098 - DNA, 522 bp, Setaria italica
  Peptide Sequence Number=SeqID_121072
tcgggggacgctggtgaggagtgcaactggtcgaggggaaggtgggtgtacgacaacgtgtcccggccattgtactccgggctcaagtgcgccttcatcttccctgaggtggcttgcgacaaatatggaaggaaggatgtcatgtaccagcactggagatggcagcctcagggatgcgaccttccaaggtatgatgattataagattttgccaggtagtttcggttcaatttttgttcttgtcaatccgagagttccagaatatctgaaggtgcagttttagaaacaacaagcactgtcagtatcgtagtcaagaattttgcaaggataatatattttcgttgttttaaggaagcagttaaacactcaataaatctacaactgaaacaaaagaaaggataggactacggcgaaaaaacaacaacttactttaagattgaaaaactgatctgattatggtcgttagccagaggcaacaagaaaccaaacttgcaagaaaactaaatgacagtgaaagatcaga

SEQ ID NO: 55099 - DNA, 322 bp, Setaria italica
  Peptide Sequence Number=SeqID_121073
aaaggtatacatgttcagatactgaacatcacagagctgtctgactaccgcaaggacgggcatcctacagtgttcaggagacaatttgttcctctaacgaaagagcagattgcgaacccagccagctacgcggattgcacgcattggtgcctcccgggcgttcctgatgtctggaacgagtttttatacggctacctcatgtacaaatgatacttgacatcccaatataaaatgtacaaatggcatactgcatctagattaggctactttgcttttgtttttattgtctagttagttaatttgtttactttggtttcccttt

SEQ ID NO: 55100 - DNA, 227 bp, Setaria italica
  Peptide Sequence Number=SeqID_121074
catgcgaccttcctagattcaatgccactaggctgcttgaaaagctgagaaacaagagatcggtgtttgtgcatgtcaacagattcaatgccactcaacaggaaccaatgggtttccctggtgtgtatggtgaaggcctctatacctgatgacaggctcaagatgcgtgtcttcaatggctcactcatctccttcaaggcatttgaatacaatgcaacaatagaatt

SEQ ID NO: 55101 - DNA, 470 bp, Setaria italica
  misc_feature (102)..(102): n is a, c, g, or t
  Peptide Sequence Number=SeqID_121075
tctctcagagtgtcgtaactgcttctccttccttccatccctcttccccctctccccagcttccctgagcttctgaaggttatcggccatggaaggcctcancccgttcatctacagggccgtcgtgcagtacaggaaggaagggcaggtctccttcactgacctcatcttcgacgagccgtcgccgacgtcctacttccgcctcccgggggactccggccggtaccaggtgacggcgagcgatctcttctcccggtcggctgtggactccggttcggccggcgctatgcggcagtgtccggcgaggctcccgatgcagcgccggcgtcccctggaccgtgaataaatggaaagtgcaatcctgggaactagggaagaccaaagaaaaagaaaaaagacaaagacgaaaggaataggttacgtaagacaaagacaagtagggggtaagtaagtagaagaatacaagaata

SEQ ID NO: 55102 - DNA, 345 bp, Setaria italica
  Peptide Sequence Number=SeqID_121076
gtgaactcgaatggtagaattgaaatttcatccttgcccctgcctcgcagatggcactacaaataacacatgtcaatacgcaagcaagctcagctatgttttcttaagacatgaatggtatcatccggcgtgaaatgccgatgcagtacatgaaagacatacaaggaagacatcatgatgagacattttcaaataagcaacccagttagcatgtggtaacatcaagtagccagaaatgctaggattctacctgcatatggaaatggggaactcaaattaggtgggtaatgaacatcctcagataacttcttcaatatcaaatctattgcattcatctggttatcg

SEQ ID NO: 55103 - DNA, 359 bp, Setaria italica
  misc_feature (230)..(230): n is a, c, g, or t
  Peptide Sequence Number=SeqID_121077
ggatagacttcagatgttccagtaatcgtcactttcctgtcagatgtcccagatatgaagtctcccctatctgatatcttgatccttgcaccactagcctgaatgatctctgttatgttccttccagcacgacctacaacagcacccaatgtgttcatcggccacaccaatggtgagagattcttgggcatcattatttgcaggtgatctcataggtgtgctgggctgcngaattcgcagcagatctttagaactcaaatccaacaatgtagatatgtcaaagatatagaaacaattaaattgtaagattgggtgaaagttactttcacgcctttcaccaatagccatacttttcaaga

SEQ ID NO: 55104 - DNA, 411 bp, Setaria italica
  Peptide Sequence Number=SeqID_121078
aatgcaatttcagctttctttaatgctatttactttgtgtatcatcatttcctaagtggagaagagaacagaaaattacagcatcaggaccaacttgagttgctttagcatcatttgttggcatggagacgctaacataggcaggtttctttgataaatcagctcctaaattttcttctcactcttcggtatcaccatagagaaaccaggagcaattcgaggattggttggaatctgtattttgctttcactggaggtatttgttgtcacggaaccctgcaaatttggttgaaaattttcagaaacatggttcgacagagtattggagcttcgacctataggctctacagtcctctgttgattcttcagggtttgctttagcggcgcacgattcgagttcatggtcttctg

SEQ ID NO: 55105 - DNA, 287 bp, Setaria italica
  Peptide Sequence Number=SeqID_121079
atacaaaagttccaaaacaactttcaataaaatcgcatcaatcaatacattattacattaaggtttcaacagcaccaaattgccagcgtccagaaactttatttgatttcaagaaagggcattgataagaagcatgcacaccttgcctccgtcatgccaacaacactttctggcaaaggaagtagtggttcagtatcccaattcttagtaagaagggttccatcagcgatagcttttcttgtgatctctagcattatactttggcaggctgccctttgtgcatcatc

SEQ ID NO: 55106 - DNA, 345 bp, Setaria italica
  Peptide Sequence Number=SeqID_121080
cctgcttttcacacgtttccttggagtagctgttgatgagaagggatttgaatgatttgcacttgcctccgtcatgccaacaacactttctggcaaaggaagtagtggttcagtatcccaattcttagtaagaagggttccatcagcgatagcttttcttgtgatctctagcattatactttggcaggctgccctttgtgcatcatctttgcaacgattgaggttccttatagtataatttcggagggaaaacgggatagatctctaaacaggagaaatgaaaatgcatgattaatatgcgagtaccaaaaacatcctatttactttgataggtaatacagacat

SEQ ID NO: 55107 - DNA, 239 bp, Setaria italica
  Peptide Sequence Number=SeqID_121081
ccgtgtgcctgctatcccctcgtgtgcctatcccctcgttgcgtgtctcagaggcgtagatatcttttctcaatttcctgacatgttcccttgattgtcagtgcatcccaatccatatcctccacagccctagtgccatcttcataagttctattaagttgagacgaaatagcccttcttctatgcatattagccattgcatctttatttgcagaagagtttctcgattttaatgatga

SEQ ID NO: 55108 - DNA, 224 bp, Setaria italica
  Peptide Sequence Number=SeqID_121082
tcgaggaccaatgctccatcttggaaaaggtacgctttgaattgaaagatttctcttggatcttcatcttgaagactacgtagctcgaacggaacgatttgctcatggagtgttttattggatttctgaatacttcatcttgcaggaggccgtcaacgtgtcccttgagaacctcaagacctacccgttcgtcaaggaagggctggagaaggggaacctcaagc

SEQ ID NO: 55109 - DNA, 473 bp, Setaria italica
  Peptide Sequence Number=SeqID_121083
gcattcggcgatcaacgccgcataccgcaacgctccgttcatcttcagttcaggcacgatcctctcgtcctgaggaccctgcgttatcagttccttgatccacgctatcgtgcgcctcaccgcctcaccgcccatctctgcgaagacatgcagcaacgacgccattgtaccagtgaacactcagtactgtactgaactagtgttaattaagtgtaactgtgtaagcatgctgtcacgacgtattaccttcatggcgaatgtcacccgcatctccgtcaacatccacggtgtcgagatcatcggaaactgccgcaacgttcaggtcgatggccaccggcgttcgccgcctgggcaggtcctcgtgcgggatcgggaagttgaggcgcgcgctcttcccgcggatccggcgggcctcgcggtcgtacgcccgggcggcctcctcggcggtgcagtaggtgccgagccacgcgcgc

SEQ ID NO: 55110 - DNA, 474 bp, Setaria italica
  Peptide Sequence Number=SeqID_121084
atatagagaagcaccatcatagttccaactcccaagacatgatatgttcataggtttgaaactaacctggaacccaatgcacgagtagttaagcaccagcaatgtatatgcaaaattcagaaagccaggataccgcggaaactgaattgttcactgtttgttgccatctgtatataactcgtgaaccatttatcatcaatgccgattgaacaaagaatatgatatacccaggatacagtccatgccagacggcgctgactgtctgtgtacccaacaactgaaggaaaccaggtttctttcctttctgaatcagcctctcatagacatctgaaacagttgtggaaacataaaagtgagttagtattatgtaatgaataatgtactgtggtatgaatgaatgtaaggaaagtaaattgtttcagtagtggatcctgtatagcacaaaatatggcagataacttagttaaatcttta

SEQ ID NO: 55111 - DNA, 433 bp, Setaria italica
  misc_feature (207)..(207): n is a, c, g, or t
  Peptide Sequence Number=SeqID_121085
tttttgtttggtttacctttttattttatttatttgtttcctttaattttacttaacttatttcttttttcctattaaaattgtcttataattgtcgtcctgtcgacctctgtcctaacttagtaattaggacaacttatccaagtatctgtcttgagagttgagatttgagagtatggtctgaatatcaatccactttttttttgngtgtgtccaaccttgctttgacatgtaggtttacttgcatgggtgtagcatatacactgccaatagctattatctgtttctcatattgtgttttctactgtcccttaaatccttgtgtcatatgcaaagttttgaaaagtgaggtgaatcagtcagctgtggttggagttaggaatggttaccactattgggttcaaaaggggcttcttgtaattggactagtgcg

SEQ ID NO: 55112 - DNA, 151 bp, Setaria italica
  Peptide Sequence Number=SeqID_121086
ccactctcacggtttagtgagcccctttattatgaatggggtttctggcaccggctcttctatcagtacatgtcaggctttactgctcgttggaaatattccacacaaggggcaattgaactgcacttccagctaattcaacacctaatac

SEQ ID NO: 55113 - DNA, 257 bp, Setaria italica
  Peptide Sequence Number=SeqID_121087
taccacatgtctccataacatatggtcaatgcaattattggttgtgacttgtgagggacaaagtgagtcatcagattttgattatggttgaattgttgatgtaattatgtgctatataaaaaaatctgcagaactatcatttttaaatttgccgtgcagaggattactgttggtaccaaagccttgcttacaattccattgtgcaggaaacaagttacttgggtttccacctagtcctgtatttgcaaggttttgtg

SEQ ID NO: 55114 - DNA, 256 bp, Setaria italica
  Peptide Sequence Number=SeqID_121088
ctccgttcctcccctcaccgctctctgcatctccagtccggactccagtcaccactcaccaaccctacgagcagctagagaagcgatggcggggctgctgcagctcataaaggacctttattttggccccccgcctggcaaggtttgccggatcgctcccagaaacggcctcactgccgttcccaaaatccctcttttttgtgtgaaacagttcttcctcaaatctcctctctctttttgtttaccaacaatttcc

SEQ ID NO: 55115 - DNA, 409 bp, Setaria italica
  misc_feature (14)..(14): n is a, c, g, or t
  misc_feature (52)..(52): n is a, c, g, or t
  Peptide Sequence Number=SeqID_121089
tgtagtcgctgccncctcgccgtcctcgggcccggtccgacgtcgacacccncgttgagcctgagcgctcggggaggctcccccgtaggccttgagcaggcgcgcctcgtcgttcatgtacttgagaatgacgtcggccttatcgtcctggtagtcgcggaggccaacgaggacgatgtgcccgccgcgatccagaccttcttgtgcatcttgcccccggatgtggcagaggcggcgcgtgccatcgacgcagatggcctcgcagcggccgttgccgagcatgcgggtcacctgcgcgtactcctgccctattccttcctttgtaagtacgtagtcttcgtcgtctttgttcgttcgttcggtccttcgtttcttttccccttcttttccggttttctttgtacctacc

SEQ ID NO: 55116 - DNA, 341 bp, Setaria italica
  Peptide Sequence Number=SeqID_121090
tgtccccccgccgcgatccacaccttcttgtgcatcttgccccggatgtggcagaggcgcttggtgccgtcgatgcagagcgcctcgcagcggccgttgcccagcatccgcgtcacctgcgcgtactcctgcccgtcctccttgaacaccagcctcccgcttctcgtcgtccgcctcgttcttgccccgcttccggttcttgcctcccttccccttgttcttcggcatcgcgggaaggcgaagaagaccgaagaaggaaaaccctaagacgtaggaattagaatcgggggacaagggtaagggaaagggggtagggggaaatttaggtacgacgaaaaaga

SEQ ID NO: 55117 - DNA, 278 bp, Setaria italica
  Peptide Sequence Number=SeqID_121091
atgtggcagaggcggcgcgtgccatcgacgcagatggcctcgcagcggccgttgccgagcatgcgggtcacctgcgcgtactcctgcccatcctccttgaagacgagctcgcgcttgtcgtcgtcggcctcgttctttcccctcttccggttcttgcctcccttacccttgttcttcggcatcttggcggtggggagcggcgagacgaaaccctaggcgcgcgaagaataggaaggtaggggaaaaggggtagttaagtaagaacggaacttaagaac

SEQ ID NO: 55118 - DNA, 410 bp, Setaria italica
  misc_feature (26)..(26): n is a, c, g, or t
  Peptide Sequence Number=SeqID_121092
gagtctgcactgctctatctagatcnccttccagatttcagtggctactgcagttcagccattgactgacactgccaaggaatccttgccaataaatacaaggaatttgaccaagttccaagatgaagcaatgaccattcctcttgctggaattgaagccattctatggagtaatgaccttcaggtggcatcagaggatgctatctatgattttgtgatcaagtgggcacgtgctcaatacccaaaattggaagaaagacgtgagatcttgggcactcgcttgctgccccttgtccggttctgccatatgacctgtaggaagctgcggaaggttcttgcatgcagtgattcttggtaattactaattagaagacaaggacaaactaaaaatagaacgtaacaaactaaga

SEQ ID NO: 55119 - DNA, 428 bp, Setaria italica
  misc_feature (2)..(2): n is a, c, g, or t
  Peptide Sequence Number=SeqID_121093
cncactagtcagccattgactgacactgccaaggaattccttgccaataaatacaaggatttgaccaagttccaagatgaagcaatgaccattcctcttgctggaattgaagccattctatggagtaatgaccttcaggtggcatcagaggatgctatctatgattttgtgatcaagtgggcacgtgctcaatacccaaaaattggaagaaagacgtgagatcttgggcactcgcttgctgccccttgtccggttctgccatatgacctgtaggaagctgcggaaggttcttgcatgcagtgatctggatcatgagcaggcaactaaatgcgtcactgaggcacttctttacaaagcagatgcaccacacttcggccagcgttgccctttgcagtctagtattgttgtattgtaccttgttaggttaa

SEQ ID NO: 55120 - DNA, 278 bp, Setaria italica
  Peptide Sequence Number=SeqID_121094
taactaaattagaaccgccagcagcagcaagcgctcttaagacagcatctgatgcaattcttatctgagcacttgagctgataagttcacggagcagaagataaagggaagagtgcataaacccactacgtgcgaaatcttgaccaagaacagcacccaagactccaattccttcaagcgtcaccgtgtgcaaagcagtggtatcacggtagaagtgcaatggcaggttcaactctgttaggcatagctcaacattcctttctgttggaagattccca

SEQ ID NO: 55121 - DNA, 304 bp, Setaria italica
  Peptide Sequence Number=SeqID_121095
cttctctgtgtatagcctgaagcacttcccaggctgcgttctccagcacgaccagctctctgatgagcacttgccttggaaattggtgacaccaggagggattccaccctaatccttgggttgtaaactttctgtttggaaaaccctgggtctatcacataaactataccgtctatagttaaggatgtctcagcaatgtttggaaaaccctgggtctatcacataaactataccgtctatagttaaggatgtctcagcaatgtttgtggacacaacgattttccttccaggaggtcctccttcc

SEQ ID NO: 55122 - DNA, 262 bp, Setaria italica
  Peptide Sequence Number=SeqID_121096
gcaaatcctcattaaaactcttctctgtgtatagcctgaagcacttcccaggctgcgttcttccagcacgaccagctctctgatgagcacttgccttggaaattggtgacaccaggagggattccaccctaatccttgggttgtaaactttctgtttggaaaaccctgggtctatcacataaactataccgtctatagttaaggatgtactacaaagaacaaaataagtttaagtaaggaaacaaaacaaaacgaaatttaa

SEQ ID NO: 55123 - DNA, 241 bp, Setaria italica
  Peptide Sequence Number=SeqID_121097
aatgacattgacgttctccatggaaggacactgactgccccagtatcacttatcaaatgcttgagatccatcaaagaatatgcttttgtggcatctccctatcctgttattataacattcgaagaccacctcacacctgatcttcaggcgaaagtagctaaggtaactgtatttctctgaatggttaatgtatggtatgtgattctagtgtagctacttctgaaattttgtatagatggtc

SEQ ID NO: 55124 - DNA, 219 bp, Setaria italica
  Peptide Sequence Number=SeqID_121098
acaccttcagcctcctctggatttggttggtcagctttgttcaacacaaggttaaggatgacaagctggaatgtggatatgcagggtgcatgaaagactgtaagatctagcagcaagcttgagctgcagaacgagttcctgtgggaacaataggaacaaaggatacaatctgtccgacgcatgtcgccgcgatggtgagcacggcgatgatggagccaa

SEQ ID NO: 55125 - DNA, 371 bp, Setaria italica
  Peptide Sequence Number=SeqID_121099
gcatctgcagcgggcaggaacccatcagatcagacgcatcgagtgggggcataaaagctcagctctaccgatcgacgaactcgagcggcgtcgtgcgtgcgtacctgtgacaccgggagggcgtcgcccgcggacttcttcttgccctcgcgcaccgagaagtaggagtagagcgccatgccaaagatggcgacgaggatgcccaggatgttgcgcacggtgaaggggtcgtgcagcagcgtgtaaccgaacgacagcaccaggcacgtcttgaggtggcccagcacctggtacgtcaccggcgacgtcgtcccgatcaccaggaaccgtgctgaagttcaccgacaccgcgatcaggcacgacagcacga

SEQ ID NO: 55126 - DNA, 245 bp, Setaria italica
  Peptide Sequence Number=SeqID_121100
aattatgagaaaaatgccagtttatatctcaaacctgaatctttttcttcaggaagattgtctccaatagcacagtgaagggtatgattgccaattttgtcatctgcagaacatacgaagtttaattatttgctcgtgttttatagagaaaggtcccagatggagcttacctgatagaatccaatggagttgaatcctaaactaaggttgagaaggccaatcgaggtgccgttcagcaacccaag

SEQ ID NO: 55127 - DNA, 221 bp, Setaria italica
  Peptide Sequence Number=SeqID_121101
tgtggacaaaaccttttgttaaatcaaaaggttcacatggatttgtttggcttattttgtacatgactggaacatggatgctcttctttgagattgaatccatgaagcaaacggcaaacaatttcagttttcatttgttaatctttccctgctaaacattgctgcttgtcaatcctaaaatatgactggtggtgcaaacttgcttgatttgaagtctctgg

SEQ ID NO: 55128 - DNA, 210 bp, Setaria italica
  misc_feature (2)..(2): n is a, c, g, or t
  misc_feature (37)..(37): n is a, c, g, or t
  Peptide Sequence Number=SeqID_121102
tnaaggagaactatatgtcactgtattgaagacgtcngaaaaagtttgcagtacactaatccctatgtgcctttgctcacatgctaccagtaacaatcctactactatttcaggtttggttcgcgtttccattcaagtataaaggaagtagtatttggcatggcctttgaataggatcaggacctttaaaacaaagtgttgcagcaatat

SEQ ID NO: 55129 - DNA, 474 bp, Setaria italica
  Peptide Sequence Number=SeqID_121103
tgcgtatcaaaggacgtgccctcctgatctatccaatcggctgatggctgcggtttaacaatgctagctccttgctcatcttgagaagttacaggatgagtcagcacgtcaacatactgaactatcttctggcaatatgacagaggtggaaattggagacattccagacaaaatggggtaatgggaagaaaggatcatgggtcttagttgcctgtgacactgctggggctaatttggaggaaattagtgggattgatgatgaaaattatgttataatcaatgaagatgacatagttgatggtattgccacctttgttgctaggtgcattcttgaagatccaaagtccaaggtacttgcttgtttaaaagttattttgagaggctatcaaggattgatgagcatcctcttcaccactgctatgttgttctaactgttttgtattattttccttcagtcattatcaccagcacagc

SEQ ID NO: 55130 - DNA, 275 bp, Setaria italica
  Peptide Sequence Number=SeqID_121104
cgcgaactggctttatcaattttttatctctcagatgtgaaaatattcagcgtgtcatgtttacatcgattcagcaccatacagatgaattggctccattgctctggcagcacatgagcacttctttatttgcaaactaaccatgaattggggaaatgaacattccaattccatcaccatcctctagtagctgttccggttgcttcaaagaacgtgtccttttgctatcattctcctgcaagaggatggtgatggaaatgaacattccaattcca

SEQ ID NO: 55131 - DNA, 249 bp, Setaria italica
  Peptide Sequence Number=SeqID_121105
tgggaagaaaggatcatgggtcttagttgcctgtgacactgctggggctaatttggaggaaattagtgggattgatgatgaaaattatgttataatcaatgaagatgacatagttgatggtattgccacctttgttgctaggtgcattcttgaagatccaaagtccaagtcattatcaccagcacagctccaaaagggtatgtctatcctccattctgcacccaagttacatgttatacccctaaatag

SEQ ID NO: 55132 - DNA, 243 bp, Setaria italica
  Peptide Sequence Number=SeqID_121106
gttgccggactcgtcgcggttgcactccacgtagggctcgaacccggtgccgtcccggatggcgcccttgatctggtccagcgtgtagtagccgccgtcgggcctgacgccgccggcggcgagcgcccggagcacgccgagccggtcgcggaggcggagcgccgcctggaagttagtccgttgtcttcgttcgtaagtacgttcggttaggttcgttctttaggttttgtttccgttttgttt

SEQ ID NO: 55133 - DNA, 316 bp, Setaria italica
  Peptide Sequence Number=SeqID_121107
ggtgtgtggcgtgaaggtgtatcatgtatgtacgtaggagtggcatgtaaaacactgctagtatcatgtgatgtttgtaaagttgtaaaacacttgtgcatcgatgcaggtcctagcttggacttctagttgaagactgaaggattggtcgtcgcgctgctcacttggacttcaagcacctccagctttcgctccaggatgtcaagcttctcgttcaaagacgccagcttgctcttcgtcgtagcttcgaatctgaggaggaagtcgaagagtcgacggacgttgagggagatgttggagatgaactcgcggttct

SEQ ID NO: 55134 - DNA, 250 bp, Setaria italica
  Peptide Sequence Number=SeqID_121108
tgacttgatgttctgcaaactggaaaactacctttccaagattggaggatcatgattcataaagctagaagtagcctagagtaatttatttagcggtgttatctttgtggtttaaatttgaaataaatacttattgctgcctattctgttgattttgaagatcatccgtttactcagcagcagcttccagcttgcaagcctatacttgcgcctaagacagttattcctgttacttttgttgtggcataat

SEQ ID NO: 55135 - DNA, 240 bp, Setaria italica
  Peptide Sequence Number=SeqID_121109
tgaggtctactatcgatggtttgtgatgtctggctattccttaactgataaaaattatttcacatttctcagttatccggaatccggctgtaagaatgtgcttagatcttcctcccttggaatctcagccagcacctgcacgaatgcaggccctaaacctcgttgacggtcctaagccaagtcctagagttgattctcctattgcagacaaggagtgtgatcaatctagttctgagctaa

SEQ ID NO: 55136 - DNA, 132 bp, Setaria italica
  Peptide Sequence Number=SeqID_121110
cttaacaacagcatgttgtttcatggattaagcatagtgatgctgctctgagtttttcttgtttctacagtcacgatataacctaactagcttaacaacagcatgttgtttcatggattaagcatagtgatg

SEQ ID NO: 55137 - DNA, 370 bp, Setaria italica
  Peptide Sequence Number=SeqID_121111
gcaggaaacccagatgacgcattgacaagctcaactccagatggactcctgcgcatcccatcaaattccgtctcctcgctcaagaaaatgtctattgagtactgcgaagagctaacgttccaggggaacaaggatggcttctctgtattcacctcccttgaggagctaacaattcgtggatgccccaaatgatcccgtctttggtgcagacatctgaagagaaaaaggttaatgcagtagcttatgtccatagtctttaagctaatgagttgcctgaaaccttcgagtgaaatagaagcagggctgcagcgtttcaggggaaccgtcaatctcaagttcgccaagtgaatacgggagaagccatcttccg

SEQ ID NO: 55138 - DNA, 442 bp, Setaria italica
  Peptide Sequence Number=SeqID_121112
caaatctcaaaacttgggctgttgtttatttctaactttttgaggcagttgtgatcttctaggaagcagggctgcagcgtttctggggattcatcgatatcaagttcgccaagtgaatacgggagaagccatcttccgtctcgctggtcgttgaccaaagacgggatcagtttggggcattcgcgaattgttagctcctcaagggaggtgaatacagagaagccatccttgttcccctgaaatgttagctcaccgcacgacaaaatggtcatgttttttgagagaggggatgagatttgatgggatgcgcaggagtccatctggagttgagcttgtcaatgcgtcatctgggtttcctgctgatggagcccgtggagccgaggtgtgatttgatgtactactatctcccacttcgatcaacagtcctgatatctggtcgcaa

SEQ ID NO: 55139 - DNA, 244 bp, Setaria italica
  Peptide Sequence Number=SeqID_121113
tagcttatgtccatagctttaagctaatgagttgcctgaaaccttcgagtgaaatagaagatagtttttggcagcctgctatatgcaatcggctgagggccctcaaattatggaatgacaaaattctgtcatccagctccgtcagcccatcattcttattaatttctctccgagttctgtcatccagctccgtcagccaatcattcttatcaatttctccccaagttctgccatccacgtaccc

SEQ ID NO: 55140 - DNA, 270 bp, Setaria italica
  Peptide Sequence Number=SeqID_121114
gttcggttctattgttctttctattgggttattgtcttcttggttggtggtgggacatctgaagagaaaaggttaatgcagtagcttatgtccatagtctttaagctaatgagttgcctgaaaccttcgagtgaaatagaagcagggctgcagcgtttcaggggaaccgtcaatctcaagttcgccaagtgaatacgggagaagccatcttccgtttcgctggtcgttgttttcatatgtctgcaccaaagacgggatcagtttggggca

SEQ ID NO: 55141 - DNA, 168 bp, Setaria italica
  Peptide Sequence Number=SeqID_121115
tttttagtttccctaagtttgtagtatttgtcttactagtcttgtcgtttcctgcacggcactggaagagttgatggggaaccgtcaatctcaagttcgccaagtgaatacgggagaagccatcttccgtttcgctggtcgttgttttcatatgtctgcaccaaagac

SEQ ID NO: 55142 - DNA, 239 bp, Setaria italica
  Peptide Sequence Number=SeqID_121116
ggaagtggtggagaaggtcaaggacgaggttaagagccttgctcatgctcttcatctgcggaggcatgcctgattgttgaacatttgcaatcatcctttccttgaacaggatctaaagataaagaacctgaggctgaagagaaagcagaggaaggcgaagctgcccagaacgctgacgtcgccgcctctgctgacaagactgaagaatcgaatgtggagcaagcagtagaagaaattcg

SEQ ID NO: 55143 - DNA, 263 bp, Setaria italica
  misc_feature (20)..(20): n is a, c, g, or t
  Peptide Sequence Number=SeqID_121117
tgttacagacctcacgttcngtttaacttactgagaagcccaaataacaaaccatgaaggcacgtaagggacgttttattaacctcctaggcgctcacaattatcgagcttgttaagctatttcatggaatctagcttacatggctcagtacattgcaaacagatacaaggtttcagtattcctggtcaggaagatgagatgttgccgtttgcgtgcttgttagttcctcttaactgatcccgtacttactacaaattaacaa

SEQ ID NO: 55144 - DNA, 184 bp, Setaria italica
  Peptide Sequence Number=SeqID_121118
tggtgccgtccgacaggaagctcggcatctccgtccgcaggtcgcccagcagctcccggacatcatctatcttttgctgctgttcttctgaagacgctggctttttctgcgtcgcgtcactcctacctaggtactaggaaacaagaataaactacaaataaggaacttttaagtaaacggtaaa

SEQ ID NO: 55145 - DNA, 241 bp, Setaria italica
  Peptide Sequence Number=SeqID_121119
tccatcctagctagctatcatgtgatcttcatcgtgcctagggaagtaagctcttgcagctctagcacgtagtacagggcaggcacgtggtcttacactgtgggtaggagtcgcggcgtacggcaggtacgccgccttggactgcgcgaagtcgagctcgatgacgccgccggtcacgctcccgccgcggccgcagatcgcgtccgggaccaggccgacctccgacgacgagccctgctcg

SEQ ID NO: 55146 - DNA, 192 bp, Setaria italica
  Peptide Sequence Number=SeqID_121120
atgagtctgttacttgggaaatgataaatcttcccacttttcttcaggccaaggcacagaagggtgcgattggcggctctggcctgaagaaaagtgggaagaaatgagtctgttacttgggaaatgataaatcttctgcctatatgtgctgtggttcaccaaatgtgattgtaacattactaacacagaacc

SEQ ID NO: 55147 - DNA, 203 bp, Setaria italica
  Peptide Sequence Number=SeqID_121121
acgaaagatgaggaaaaagcgctgaaagaactgaaggccaaggcacagaagggtgcgattggcggctctggcctgaagaaaagtgggaagaaatgagtctgttattatcatagaaccatctgcatcatagccaacatcatcttcggatcaagcaactgactgcaacattactaacacagaacccacttaaaatagtttttgtt

SEQ ID NO: 55148 - DNA, 185 bp, Setaria italica
  Peptide Sequence Number=SeqID_121122
cctttccccacctcccccgtcgccgcggcacccgccagctagggtttcgtgccccgctcgccgatccgccccgtccgccatgtcgaaacaaggagggaaggccaagccgttgaaggcgcccaaggtcgacaagaaggagtacgacgaggcgctgaaagaactgaaggccaaggcacagaagggtg

SEQ ID NO: 55149 - DNA, 386 bp, Setaria italica
  Peptide Sequence Number=SeqID_121123
gtacactacacatgcacatacgcacactgcacaatctacgatatcgatggtgctcagtttaacggctctgttccgtgttcatgccgtcccgttgcgcttgtccttccgccactcccatggtttctgtggcttcgacgacgcccacaagcccttcctgccagtctgtgcctgtttctcccacttggccagctccgggcgttggtcgtaggcggtgtagtgccatgcaaaccccttcttcagcatttgctcctgcacgaatacgccgtcgcagtagatgtctccgacgcatctaccataccggtcctggtcgtacacgtagaccttcaggctctttccctgaacaagcttcagcagcgcctctttggcctccttgccgtacggcatcg

SEQ ID NO: 55150 - DNA, 238 bp, Setaria italica
  Peptide Sequence Number=SeqID_121124
cctgatcctgtacttcttggcgagcacctcttcgcctctggcgttagggactggcctgcattgcagaggtttcagatttagctgtcagaacctgaatcgtatgaagatgtgttctcgagaaggggaacaaggcaacagaaagaagccaactgctactatgatactgtagatcgagaagatgatcgatgtgaagttcaagaaacctgtatcctgcgtccactatgaccttctgcagggc

SEQ ID NO: 55151 - DNA, 148 bp, Setaria italica
  Peptide Sequence Number=SeqID_121125
cgccatcattaattgcactattgtaggccaggtccgtacagtctggataatctccactagcaccattatgcgagataactaagggttcccaccgagatgagacataccatgaccagtctcacttgaattcagattagcgaagccaacc

SEQ ID NO: 55152 - DNA, 221 bp, Setaria italica
  Peptide Sequence Number=SeqID_121126
aattcccatgactttgcatccaacagtggctcttcaatgtgcttggatccaaccactacgagatcagcattagcagacgagaaagttaatgagttgttgcagacttcagcttcacgatggcttaatggtcgacacttgttaaaagggaactttattacctctctcaatgtgcgggaaactgtccttgtttgtggttgtaattagggtaaagtaaactaaaa

SEQ ID NO: 55153 - DNA, 174 bp, Setaria italica
  Peptide Sequence Number=SeqID_121127
tgttgtcggggtctacgttcggtaggtaggtagtcggttcgtcggttcggggggtaacgtccgtccggtccgcaccgacgccgtgagcgccctttagaggagggtaaaagggtttcttctcgcgagattaaattgcataggttcttctttggtgcctgtatgtcagtgaacagt

SEQ ID NO: 55154 - DNA, 223 bp, Setaria italica
  Peptide Sequence Number=SeqID_121128
aggaagtttcttaagtggaaagcaccaggaatagctcgagactgtgtctttggtggtatgttcttttcaacttggcaaatcatattaactgccttccaagtgagcatcgctgtgtgtatgatttgccaagttgaaaagaacataccaccaaagacacagtctcgagctatccctggtctaagccctctccacagtgcaccccatccttctagagtgatatcac

SEQ ID NO: 55155 - DNA, 329 bp, Setaria italica
  Peptide Sequence Number=SeqID_121129
ggatgatctggctgctttgagaccaacagtattcgcaagtgttcctcggttatataaccgaatttatgcagcgtaataaactataccagtaatttagatatttttgtctgtacttcgtgttactacctcttgggttccaaatccagccagcaaccagctggttagttgccattttgagatgaaagaaaacgaaatagaggtgaaatgggactgggattggttcatcaatcgactggaaggtctgggaaattctaagaaacaacttttagaccatatgaggtctcttgtattgaaagcaatcatcacagatcttacaggaaaacaagtgc

SEQ ID NO: 55156 - DNA, 478 bp, Setaria italica
  Peptide Sequence Number=SeqID_121130
agacaaagactaaaagacaataactttagacaaaaagaaaatactacaagaataatgtatgcagagttgcaagaaacggagacagccaggccgaagttgtaattgcttgtgtaataatcagaagtgttaaatacaggcttacaggagattggattccacaattatttcttctagatcatagaataagttgaatcctctgactcgggaaataatggttcctgcaatggtcaggagaagacttgtacgagacggaggcagtgcttgttgcagatggtatctacgccgctgctgatggcaggctagccgcagctcctgtagcggcagccgcagctgcagccagcttgccgagcaggctgaatatagaaaaaacgttctgcacaacgtagcatatgtactacaaatgtaacagtagcactgaagtcagtttattgcaaactgtacaaggaatctctctttggatcgtatagcgaattcagta

SEQ ID NO: 55157 - DNA, 431 bp, Setaria italica
  Peptide Sequence Number=SeqID_121131
tagtaaattaaaaatttattccgttttcaaggtgtaatttttaagttttagtttgacatgtttcaggtcatccatttagcaaagttgattggggcatgtattctggaataaaacttgcctgtttcttgaggaagatgtcaatattctttctcatgatactaatcaaatgatgccccatatccaaagtacttgaagtatgcctttgtgcatttttcttacactttcttaatgtggatcgttctcttgtcatttttcagaggtgaaacttgtggatgtcccagaaatgaattatagttctgatgatcaaccatatcctcgtggagaaatttgtgttagaggacctacaatatttcggggttactacaaagatgaagtccaaacaaaagaagtcattgatgaagatggtggttgcacactggagacataggtct

SEQ ID NO: 55158 - DNA, 254 bp, Setaria italica
  Peptide Sequence Number=SeqID_121132
aactgttccatcttcgcggattcttgttcccaggtatcgacaatccctaaacgtctcgactgcatacaatgccaagaggcaagcagttctcaatggacgaaatccatccccaatgtgggacaaattggtatttaacaaaataaaagctaggcttggtgggcgagtgagactcatgacttcaggtgcttctccattgtcatcagatgtcatggaattcttaaggatatgctttggcggtgaagtttcttagaagg

SEQ ID NO: 55159 - DNA, 429 bp, Setaria italica
  Peptide Sequence Number=SeqID_121133
gatggtcctagtgttgaagatggctatggtgagaaaatgtcctgttggcatcaaactgtccaagagaccatcaatgtaggcacagaaactgcagctgctctgaaagcacagacagagcaaatgagcagagttgttaatgagctggactctatccatttctccattaaaaaggcatctaaattggtgaaagaaatcggtagacaggttgcaactgaccgatgcatcatggccatgcttttctcattgttgctggagtcatagcagtaatcattgttaagattgtaaacccacacaacaaggacattcccaacatcccaggacttgcaccacctgtaagcaggaggctgttgagatagaagacaagtgataattccatacttgtgtaaaaattgatgaggctccttggaaggtccattgtatctacagtct

SEQ ID NO: 55160 - DNA, 240 bp, Setaria italica
  Peptide Sequence Number=SeqID_121134
ggtcaacgaggagctggccgagatcgacggacagatcggcgatatcctccgcgcattgcagtaatctcaaaccattccgcttgctgtgatttggggtgtttgtagtttgcttgcgtcgcccgcgaatggtcgttagatctcagtttgcttgctgcgatttcgcgactggaggacaaatttggagaccaaattattggtctgtagtggggaaaaaaatcgtttttcccctgatgtctgcgg

SEQ ID NO: 55161 - DNA, 253 bp, Setaria italica
  misc_feature (78)..(78): n is a, c, g, or t
  Peptide Sequence Number=SeqID_121135
aaactgcagctgctctgaaagcacagacagagcaaatgagcagagttgttaatgagctggactctatccatttctccnttaaaaaggcatctaaattggtgaaagaaatcggtagacaggttgcaactgaccgatgcatcatggccatgctttttctcattgttgctggagtcatagcagtaatcattgttaagatagaattacaacactatgccacatgactgaaagtacggtacgtaccttacttaactta

SEQ ID NO: 55162 - DNA, 476 bp, Setaria italica
  Peptide Sequence Number=SeqID_121136
cttgatcatgtgaaatattatcatcaaatgtgaagtgcctcaagaaaactgaaattgactgttgtccaggaacgattgcatcccagtatcttaaattggcacacaagtgccagccttgagccattctctatcttgcaggagttaggaaagatagctgagcttctcacagcatatggacccatcaagtctaacttcccaaccaaatatagaaggatgtcaactgaaagctcattaataaatatatcaacctgcaagaaggaagatgagccttctgctttaagtgaaagaagaaacggatgggcatctttccatacttagtaactggatctggggtaaagaacctagatcgaaagaatgtataggaggcgataggagagataaggtcctcccacagatttctccgtgcatcgaagtactgcccccgaagaactttaaaatagaaacttaagaaatacctagaattttaggaatgggaa

SEQ ID NO: 55163 - DNA, 243 bp, Setaria italica
  Peptide Sequence Number=SeqID_121137
ccgaagttgctcatgccacctgggcagcctgatccaagaatgttcggcattaaactagtcaggggcaacatgaaacacccaaagtggcttgcatatattgccacgcactgtgatgcatggcttattcggatctccttcttcctcggtgccaatttggggactcaagcaaggtatgagaataatgagcatactagtaaattttttttctgtcaattagaaaccccgaagatcacaagatattca

SEQ ID NO: 55164 - DNA, 340 bp, Setaria italica
  Peptide Sequence Number=SeqID_121138
ccaaaattagcagaagaacaacaccaactctcaagacaaccaaatgcacgcgtttccagattacaaaaatacaataaaggtacttcttgtgttcctgatcccagtcacgaattcgaagctgacataagtctaagttgctaagcaagaatctgaaagtccaatatctgttcttgacgtggccttctcagatgatcctgttagtccgatgaaatatacactgctggatgatacatcactgaagccaagaattctccatttaaatgatgctgatgtttcagttgacactgatattgtgcaagaaagtgactttggcaacctgaatggcttcgaagtagatcca

SEQ ID NO: 55165 - DNA, 443 bp, Setaria italica
  Peptide Sequence Number=SeqID_121139
tgtggatatgaatgctgaagaaaggcatttattctcagtaggtttcaaaatactattggggcaaagagggcatcatggagaatcatttgttcacttgagcaaaagttgacaagtggtgatcaggctggtgtgatgatagatgcctacaaaaagaaagtagaaggcgaactaaggaaggtttgcaatgaagaaaggggactactatcgttacttggctgaatttagcactggaactgaaaagaaggctgctgctgatcagtcacttatggcataccaggttcagaatcttccaagtattttacatgggctcaaacgaatctttcagaaaaagcctttctcttcctgttgaaataacaaacatttgctgcagcatgccatggttgtcgcctccagtgaactctcacctgctcaccaaatcaggctggccttgccctcaatttttc

SEQ ID NO: 55166 - DNA, 252 bp, Setaria italica
  Peptide Sequence Number=SeqID_121140
tggagaatcatttgttcactgagcaaaagttgacaagtggtgatcaggctggtgtgatgatagatgcctacaaaaagaaagtagaaggcgaactaaggaaggtttgcaatgaagtactgtcaatcatcgctattcattgccttcccttggccagttcgggtgaaaatgttgtgttcttttataagatgtatgtaggttccttgtttcagtgctctgtttcatttgccttctgcttttcttactgttttctga

SEQ ID NO: 55167 - DNA, 266 bp, Setaria italica
  Peptide Sequence Number=SeqID_121141
gtccactatacaaataagcatcttcacttggcagttaaacataatacttacgcaaaaagaagtcaatgaggcactcctcagctgctgggtgcaattacgtaaagcaatataaacagttataggaatccacgatgtgtaaggatggtacttgttgtacgtaagtttgtctagcttgtaaatatattcataccacaaataaccagccaccacagaagtggtaacaatggttcccttgattgacaacctaaccttagtttcagattctt

SEQ ID NO: 55168 - DNA, 238 bp, Setaria italica
  Peptide Sequence Number=SeqID_121142
atccaagtgaccaagcctatacaggagaagagtagcagagttaaaagatcatacagtgaactgatctggtcggcgtttctctgaagcaagaaagcgcagcctcaacttggcgataatttgatactccttcaacaatatatagcaggtccaaaatgtgatggcataagccattaccaagtgagctataaacctctttgacccattaggtatattggatattgaaagtttgtcaatatca

SEQ ID NO: 55169 - DNA, 260 bp, Setaria italica
  Peptide Sequence Number=SeqID_121143
ctaatgcaccaaagaaaacagaactaggaacaatatataaatcctgtcaaataagaagatacattaagaagtataaagctaaggctacaacttacttccttccctatcttctcaatctctgatttgtaatagtcaatagcatcgaccttggagccgaagcatccaagaaagccagtcttggtggtaggcctctctgatggatttctttcatacttgagtcggtaataatcgagccaattttgcatcttcttcttcttttc

SEQ ID NO: 55170 - DNA, 352 bp, Setaria italica
  Peptide Sequence Number=SeqID_121144
ctaggagagaattccaaaagcgagattcgaaggaagttcgaaatgccaatgacacaacgacatagattaattcagtccacttagctagctcatcaagaatcatgtgaagtttgaagagagtaaagagagcaacgtttttgcagtttcatgttgttgcgggtggagacaaacaagacgggagagcagcagcaatggcactcaccgttatccacgacgggactggagaagaaccccggcggcgagctgctgcgccgcggcagcggcgccgccgccgggccgccgtccagctgcttcccctcaacgccgaactggtggtagcgatgatgatgcatcccttgcccgtgccccagcg

SEQ ID NO: 55171 - DNA, 272 bp, Setaria italica
  Peptide Sequence Number=SeqID_121145
ttatatttgatgtggttattagcatacgattcattttgctggtggtagccttttctggatgtatttctccaacagtgaccattaaatcatctgtatcttttgttgtttttttgctaagcagaaactgaaaagtgtaggataatttcctgccgggagttggactgccattcttgcttgctttcctaacgacggtaaggattacatgctttactaatgttggtaaggaaagatatgtattgaggtttcattacaatgcgcacttactttttttg

SEQ ID NO: 55172 - DNA, 388 bp, Setaria italica
  Peptide Sequence Number=SeqID_121146
acttacgtagtaggaacgactacaataggaacaaacttaacgaagtaaggaacgttacgggtaacaaccgtacaaggttacgggactgtaaccacgtggacttcgacacgccggagcggacgcggacccctcggatgtccgcgaggtggtacaggagcttcctcacgggatcctccgccggggccctgacggatgaagcgcagcaggggcggagagcggactcgtgacgcgcgcgtgcgtaaaaatgtcattggtgtggtattaggaacacggtacggggtctgctgcatagcgtggtgttccagaaggcctggaactcactgatgtttgtgtatacgcgaaactgggccggaagaacacggagcatgctgtactactgctcatggtg

SEQ ID NO: 55173 - DNA, 373 bp, Setaria italica
  Peptide Sequence Number=SeqID_121147
atttcatcgggctaaacctctacacggcgatcacgccaaggactgcatccattccccgtgcgacctcagcacctacgaagggaacgccctcgtcttcgccaccggcgaaagggatggagtgatgatcgggggagataccgcgctcggcggcttctatgttgtcccacaagccgtggagcctgctatcatgtatgtcaaccagaggtacaaggacacgcccgtgtacgtcagtgagaacggtgagttttcagtcttgctgcgaggacctggggatctatctgcatttctgtccatgctggtcatgtgttcccggatttttgcttccaggttactcgcagtggagcgatgtgggcagggaggagctgatcaacga

SEQ ID NO: 55174 - DNA, 251 bp, Setaria italica
  Peptide Sequence Number=SeqID_121148
gacgggcggaacggcgacgtggctgacgaccactaccatcgctacatgggagatgtggagatcctgcaatcgctgggcgtcaacgcgtacaggttctccatctcatgggcaaggatcctaccaagtacgccatgacggattgtacataaattagtaggccttttgcactggcaactgttcgatcggttcctgatgatttgggtgggcacaatgcgttctcgtaggaggcaggcttggcggcgtcaacccag

SEQ ID NO: 55175 - DNA, 192 bp, Setaria italica
  Peptide Sequence Number=SeqID_121149
ctttgcctggtagttttccttgtagttgcggacggcggcggcgtgggacatgatgatgttgtgcgccgccgtccgcaactacaaggaaaactaccaggcaaagcaaggcggctcgatcgggattgtgatcgccatgaagtggtatgagccgctgacgaacaccacggaggacattctggcggcacgacgagc

SEQ ID NO: 55176 - DNA, 236 bp, Setaria italica
  Peptide Sequence Number=SeqID_121150
agaacctgcagtttcagtggtacggtcacgagctcacgagcatggtgaaaaattcagggaggagttcgagcactacgcggacgtctgcttccgggcgttcggcgaccgggtgaggttctggacgacgttcaatgagcccaacctgttcaccaagttccagtacatgctgggcgcgtacccgcccagccactgctccgcgccgttcggcacctgcaacagcggcgactcgcaacggg

SEQ ID NO: 55177 - DNA, 206 bp, Setaria italica
  Peptide Sequence Number=SeqID_121151
cgacgttcaatgagcccaacctgttcaccaagttccagtacatgctgcacgagctggaggtccgacacgttggctggctgggcgccggaatccgggaggagttcgagcactacgcggacgtctgcttccgggcgttcggcgaccgggtgaggttctggacgacgttcaatgagcccaacctgttcaccaagttccagtacatgctg

SEQ ID NO: 55178 - DNA, 195 bp, Setaria italica
  Peptide Sequence Number=SeqID_121152
gctaaagtctaaagattacatcttgccttgggattacagtaggaccttctaatcctaaggcaagatgtaatctttagactttagtaatatatttgctggtatgcttctgaaacatgattttactctgtgccatgctgtcaaggatcacagatttaacgtcttttaaggccacagatttaactgtcttagctcaca

SEQ ID NO: 55179 - DNA, 194 bp, Setaria italica
  Peptide Sequence Number=SeqID_121153
tgttttaattcttggtctttggtttgtctaataaagcaggggttgtttattggtctgttattcacaagaaatatttaggattagaaggtcctactgtaatcccaaggcaagatgtaatctttagactttagtaatatatttgcactcatgttttcatgttgccatcatgccactctaaccaagctagcttaggt

SEQ ID NO: 55180 - DNA, 351 bp, Setaria italica
  misc_feature (351)..(351): n is a, c, g, or t
  Peptide Sequence Number=SeqID_121154
actattcgctactggaatgtataataccattaaaatgtttgttgtgagcaatacttacagcgattgtgcacaatgccattgctttaggcatggcctacttttattttttggaatgactcttgtgcacaattagttataagagatatccaatggctgtctgtgttaatttgtgtattctttctgaacaggttctttggccagaatgtggatggcaacctgtatcccttactgatttgatcactgctgctgctgttaagaaagtgtacagaaaagcaacattgtgtatccaccctgacaaggtgcaacaaaagggtgcaaatctccagcagaaatatattgctgagaaggttn

SEQ ID NO: 55181 - DNA, 119 bp, Setaria italica
  Peptide Sequence Number=SeqID_121155
cttgttcctgatgttctctatttctgagctttgcatcacgttctctctctcaaacatgccaaggaagtacgagagagagaacgtgatgcaaagctcagaaatagagaacatcaggaaca

SEQ ID NO: 55182 - DNA, 415 bp, Setaria italica
  Peptide Sequence Number=SeqID_121156
tattcttaaaaagttcggtaaagattgctgatggtgatagtactgacatgaaggcttttaaaaagacatcttctattaccaagaaaaaagcaactcccaaggaggactgcaaagtcaaatcttgtggtatgcttctggatgatttgctatgacttatgcatctgtgcttcttgtctgcaagtggataacacataaaacaaagaaagtatgttcaatattcaagaatgcaccaggagtgttatttgcttgaactgttggtggaactgagtaatgtgactggaaaagacaccttttacaggtccagccattaggtagcccgtagtaaattaacttttttaataatctgtaataaagaaactagagcatgttccacatgctatttcaaagccaagaaaacaatgcctttgaattagaa

SEQ ID NO: 55183 - DNA, 333 bp, Setaria italica
  misc_feature (214)..(214): n is a, c, g, or t
  misc_feature (333)..(333): n is a, c, g, or t
  Peptide Sequence Number=SeqID_121157
tgtaagtattttggtattggtagttattcttcttctagttgtaagttgcctaaattcctacagatgaagcaatgattaccacaccatctaaaaagtcggtaaagattgctgatggtgatagtactgacatgaaggcttttaaaaagacatcttctattaccaagaaaaaagcaactcccaaggaggactgcaaagtcaaatcttgtggtaaacnggagtctaaaggagacacaaaaccacgaaaactgacaatgaaaccaagtaaggatgagctgagagaagctgtctttcttatcttggatactgcagactttgccacgatgacctttggan

SEQ ID NO: 55184 - DNA, 229 bp, Setaria italica
  Peptide Sequence Number=SeqID_121158
gccgtcgtttgatgtcattggctcaagagctaataggaaggaggaacttgtgtcatttctgatggaattcgtgaagggccactgttctggcattgatggcacaaactccgataagaaaatcaagaaaaaaaggcgtacgaaagaagaagaaagtttgtctggtggtaaaccttcaaagaaaaagaaacgagaaggtgaagaggaagctgatgggaggaatggtgtggaa

SEQ ID NO: 55185 - DNA, 369 bp, Setaria italica
  Peptide Sequence Number=SeqID_121159
ttcacgcttcctttgaaaattgaacgcatttcctcctgttatcaaaacattgttcatgaatcatgacctgctaatacagaacttctcttgtcgtatttcaccacagttcaaaaaaagcgtggtcttgtcatagcattttaccattatgcctgtctgacacttgtgcagggtggcaagtttgaccatgctgatcgtctgttccacagcattgatagcgcctacagaaatagcttatcaagtacaagtgatgtcaaagagcttattccagaattcttttacatgcctgagtttcttgaaaattcaaattcatatcatcttggtgttaagcaggatggtgaacctataggcaaatgttagactactacccta

SEQ ID NO: 55186 - DNA, 335 bp, Setaria italica
  Peptide Sequence Number=SeqID_121160
aaaatgatgctaaaagtgttgggtctctcttggtttccctgaggaatgatgctttgttccccaaaggaactagcagagataagaacagtttgatctcctttgttgacagaaaaggttgcacttgaaatggctgagagtgctagagaaagttggagaagaagagaaataagcaactttgagtatcttatgattctcaacactcttgctggacgatcttacaacgatttaactcaatatcctacatttccttggataatagccgactactcctctagtaaaaagtctttgtatttttaactaaattctatttctttacttttttagggtttaccttt

SEQ ID NO: 55187 - DNA, 362 bp, Setaria italica
  misc_feature (68)..(68): n is a, c, g, or t
  Peptide Sequence Number=SeqID_121161
gcttccttaatctctgatagggaaactctgttatgtgcatcatcccctcttcagttgcagtagactcncctttccttgcacgtagcgtttctgtctctctccagcgctttgtcccgctgcaacatcaaatccttgattatacggtcagcatgttcacctctcttctccaggaccattctttgttcacgttccccctgaagttccgcacaaagttcatcaaacccttaactagtagaaggactactacaaaattacttaccaattaattagttagtaaagtttttacttaccaagttacaattacttttagtttacaatttacgacggaaagtaatagaaattttacggtaaggtactttata

SEQ ID NO: 55188 - DNA, 292 bp, Setaria italica
  Peptide Sequence Number=SeqID_121162
acctcgcttgtggccatcagcgcttgaacgatgagtttctacacgctctgctgcagccaatcaacatatgcgtcatgtttcccggtgagctttcttgttctcatgctaaagtttgtgcctttagttggttggtatagaatgggctggattgtgaccaggtttggatctgttcttatgttgatttttgaaggcaggcagggcttacgagaggcgtcggatgcggtgaacggtggatccacaaccccagagcaccggtgaaactcaccccatccccccaccacaccgctcgccg

SEQ ID NO: 55189 - DNA, 246 bp, Setaria italica
  Peptide Sequence Number=SeqID_121163
cggaggaggcgctggtggtggaggagagatcgggagtgagagggcggggagggagtggtggtgcgatcgacataactgcttcacgtcttaactttgcggttgaggcgaccgtggaagtcgccatatcacaagtgcaaagcgatttcagtatgtgcctcagttgttttaccagtgggttacatgaagaaatccggctcttcgatggtgctattgctgagtcatgtggcttaaagaggtcagtgattg

SEQ ID NO: 55190 - DNA, 269 bp, Setaria italica
  Peptide Sequence Number=SeqID_121164
aaagatgggagagaaaatttccgataggaccagcatgtttactttggttatggtgagtatttgtttattttattaatttccaattctaataagatttgtaatttttttatgaagctcgtcaggaggcaatggcgttttcagatccacaggattgtgacaacatcaatggaacctgctggttacattcaactcgtcacatgttgcaaattttttcatttaagttggctaacattcctgtgaagcgtggcccagtagaattgtatggatac

SEQ ID NO: 55191 - DNA, 403 bp, Setaria italica
  Peptide Sequence Number=SeqID_121165
acctagtagtaattaatgttgagatccaaacaccaattgactgtgtctctgctatttacacggtgctatccaggcgacgtggtcatgtaacagctgatgtacccaagccaggaactcctatatacattgtcaaggcatttttacctgttatagagtcttttggatttgagacagatctcagataccacacacaggggcaagcattttgtgtgtctgtattcgatcactgggctattgttcctggtgatcctttagataagagtattgtccttcgccctctggaaccagcacctatacagcaccttgcccgtgagtttatggtaaagaccaggcgaaggaaggggatgagtgacaactttgtcaagcaagcacatcccatcatgctctggaactacatctgaat

SEQ ID NO: 55192 - DNA, 326 bp, Setaria italica
  Peptide Sequence Number=SeqID_121166
cagttgaggtggacaagaacttgctcaatgcgatcaaagattctattgttcaagggttccagtggggtgctagagaaggtcctttgtgtgatgaaccaattaggaatgtgaaattcaagatcttacatgcaaacattgctccagaaccattgcaccgtggtggtggtcagataattcccacagcacgtcgtgttgtctattctgcattccttatggctaatcctcgccttatggaacctgtgtattaatgttgaagaatccaaaacaaccaaattagaactagtagtactactagactaatttaacaacggtagactaataccaag

SEQ ID NO: 55193 - DNA, 356 bp, Setaria italica
  Peptide Sequence Number=SeqID_121167
taaatcaatgttggtgttacagttggtggtgcgaaatgggcattttgaactgaatgttttcaagccaatgattgcagccggattacttcgatcattgagattgttgggggatgcttctgtgtccttcgagaaaaattgtgtcaggggtattcaagcaaaccataagagaatttcacaacttttgcatgaggtaacggtccatctaaaatactaggacacttgcatttattttctatacaaggtgtgttactaatttctctacatttttgtccagtctctgatgttggtgacatctttgaaccctaaaattggctatgacaatgctgcagctgttgcgaagaagctcacaagaagga

SEQ ID NO: 55194 - DNA, 269 bp, Setaria italica
  Peptide Sequence Number=SeqID_121168
aaggtgttcacatctcaggcttcagaaagtgaagagtgggatactaagtggtacggtcatctgtaagactatgactagatatgcatagtttgccaataatttcagattttagttagggtccttgaatctttcaattcagttaatgttcatgaaattaaaaaaaaatacaagtagaaccattatatgcaattttcaatcaagttccagcatactagagaattttggcatgttaactaaatgcaacaaatcggttaaaggtaccagtaaag

SEQ ID NO: 55195 - DNA, 245 bp, Setaria italica
  Peptide Sequence Number=SeqID_121169
tacttcacaaacaggtgctttcgagttcactttcacatgcctatagggacaggctgtgttggtactgtgtcaaggcgataatgttacactgtacatgaagacttgaagaggctgaggcgctgactggagtttgtatctcttgaagactggcttgtacagggcggtcagtttttgcatggttgaaggtttcattttgttcgtcatgtatatctcttaggaaatatatagggttcatatgcagtggt

SEQ ID NO: 55196 - DNA, 197 bp, Setaria italica
  Peptide Sequence Number=SeqID_121170
agaacatttttcttttccatggaagtatacgagggaagaccttcatatgactagttcccacaaaagatttcctccgtggatgctgtccactaagtgtccacacgtgagagaaacttcccacagtatttgttgtcttaagagctctgtgtggtctgtccttggccacagtgttggaggatgcaaacattagagattta

SEQ ID NO: 55197 - DNA, 464 bp, Setaria italica
  Peptide Sequence Number=SeqID_121171
tcaaatggaaccattcattcaccaggtttaataatatctcatatgacatagtggtctttaactaaaagaaacattcagttggctcaaacgtgaaccagctgaccaagagttagcaattactttggtaagcttgaaatcttgatgcaggttctaacatatgctcaacaatcaaaagaaatggctgtaagtgagcaagataagcttgcaaagagaattcaggagttcagaactcaagaggaaatagcaaatgtgagaatggctagcaacgtagacacgtctactagcggtgatggtatccatgttgttggtcttcagtcctacaaaacgattgaggccttgatgcactcaactgccaatggcgaggttcaagttataaacaaggttaccatttaagcgccctcaaaatacccgaggagaatggaagaggagatttttgccttgacagccatgggactctgtactac

SEQ ID NO: 55198 - DNA, 345 bp, Setaria italica
  Peptide Sequence Number=SeqID_121172
attgcatcactactaaactcaccattcccacagcagctgtcatatggtaatccagcaacagaaagtaacagatccacgagttctgttgattctttatctattgaagataacaagagttcagagggacatgatgatatattcaaccttctgaggaatattcctggaaatgatgatatattcaaccttctgaggaatattcctggaaatgacagctgtgcagagtgccgttctccagatcctgattgggcatctctaaacttgggtattctgatttgcattgagtgctctggggctcacaggaatcttggtgtgcacattttcaaaggttcctgtgagccccagagc

SEQ ID NO: 55199 - DNA, 237 bp, Setaria italica
  Peptide Sequence Number=SeqID_121173
catgcacttggaaatgattatgctaattccatttgggaagccctacttccaaaagaagatcaaggaatggacgaatcaaatggagctattcttttcattgaaaagcctaaacctagtgatgctttttcaataaaggagaggtatatacaaacaaaggtaagctccttggtgcttccttttatgtttgatcaacctattgatttctccacaactaatatatttgggaattaatattac

SEQ ID NO: 55200 - DNA, 212 bp, Setaria italica
  Peptide Sequence Number=SeqID_121174
ttttttgttttttttttcgaccaaagacaaccaaaaatcaaaactacatcaggatttgggggtcaactggatccatttgacatcccttatgatacaacttcatcagttgacactgtttcaaacaacgattgagacaacttcatttcaactacgtacagactgatcaacatagagcatctgtatatgtagatcagtctgtacgtagttgaaat

SEQ ID NO: 55201 - DNA, 353 bp, Setaria italica
  Peptide Sequence Number=SeqID_121175
aagggcaacaggacattacaccatggtgataaagcaaactagccaattgcaaaacaaaaggcagggttaggtcaggtaattacaacgaggtgtgagattatctccaacagcaaaaacataatgcccatccttatcatcttctctcagtggaggggaaccatcacgaggctgcccttggttaagctgagaggaaacaataccacccgaagagagacccaacgccactgcacttatggcattcacaacttcttggccacaaagtccaagctgaacctgatgcatctcggcggggccgacgtcccaccccagacgctgccgcttgcgcgggcggcggtccagaggcgcgcgcggca

SEQ ID NO: 55202 - DNA, 316 bp, Setaria italica
  Peptide Sequence Number=SeqID_121176
cctgaacagaagatccacgcaatcgtaaaaaggtaaccaaaaaaagggactcaactaggataagcttttcactagacaagatagatacccagtataacttctggagcccggtaatgcctagtggataccacataactctgatcctgttggtcataggtagtgctaccaaaatcaatcaccttgattgcactagacttgggcagccgtttgtaataggatccctcctttggggatcgggatgaaaacctaagacaaattagaccggaaaaaaacaacaaatacaagtaacaaataataatttactaggtagtaacta

SEQ ID NO: 55203 - DNA, 222 bp, Setaria italica
  Peptide Sequence Number=SeqID_121177
tcaaatcaccggcagactgatccacattttgcatcaccagattctggagcctgggcagtttcatcacagctttcatgctctcccgtgaagtgcaaccctccggccaattcagacgtccttttctgatgtatttctcagattggcgatctgccctctttgccataccatatgcttaagagggcagatcgccaatctgagaaataattcagacgtccttttctg

SEQ ID NO: 55204 - DNA, 363 bp, Setaria italica
  Peptide Sequence Number=SeqID_121178
ccatccaagtcctgaacagaagatccacgcaatcgtaaaaaggtaaccaaaaaagggactcaactaggataagcttttctactagacaagatagatacccagtataacttctggagcccggtaatgcctagtggataccacataactctgatcctgttggtcataggtagtgctaccaaaaatcaatcaccttgattgcactagacttgggcagccgtttgtaataggatccctcctttggggatcgggatgaaactttgtaatcaggcactttaatgtactccggagaaacaagaagaatgttctcaggctttaaatcagtgtgtatgaggcgcaattcattgtctattaacttgtctaact

SEQ ID NO: 55205 - DNA, 139 bp, Setaria italica
  Peptide Sequence Number=SeqID_121179
ggagcaagacgagtccatcagtttggacgaggcgtacgcgctggcccggcggctccgcgcgcaggagctagcctcaccgccgtcaccgttgcggtagcgggagccggtggcggtgacggcggtgaggctagctcctgcg

SEQ ID NO: 55206 - DNA, 390 bp, Setaria italica
  Peptide Sequence Number=SeqID_121180
aggtgttcccggacgccgcgctcgagctcggccacggaactggtgcggaggggcatcaacttggtctacggcggcggcagcatcgggctgatgggcgtgattgcgcggacggttgatgctggtggctgccatgtccttggggtgattcctaaagcgctcatgccaatcgagatttcaggtgaaagtataggagaagtgaaggttgtagctgacatgcatcagaggaaagctgagatggctcgccaatctgaagccttcatcgctcttccaggtgggtatggaacaatggaggagttgttggagatgataacctggtgccagcttggtattcatgacaaaccagtaagtacactgatcaatgtctattgggctgacagatgcattatttgt

SEQ ID NO: 55207 - DNA, 337 bp, Setaria italica
  Peptide Sequence Number=SeqID_121181
caaagctgcttatcgaccatcagagcttctgtgtccagtccgttacgagtgggttcgctatgatttagccaagcctctaatggacaagagtcaatattccattctatctgattatgctacaatgcaagatgaaacccccccagcctcagatctgtggcccttcagatgactcttcagcaaaagttgaccatcacgaatctcccagcgatgaggatgatgaagatttcaacgactatgaatcagaaatgatggttgatgaagagttagttgattacaagaagaaaagacggaataacaaactagaagaagtaagaaattaaccaaagaacaaaataaa

SEQ ID NO: 55208 - DNA, 212 bp, Setaria italica
  Peptide Sequence Number=SeqID_121182
atttggctggacgtagatgaagagaaagtacccaataacaataccagccgagaatccaaagccaaatccagagaaaccaagcactgtgctgactacacccatcttggattctgtccaaaaccttcaggtagacaccagctttcagccaaaagttgcaaaacaaacatagaaaggatatgatcaattgaaatttgcactcacggaaaacaatt

SEQ ID NO: 55209 - DNA, 227 bp, Setaria italica
  Peptide Sequence Number=SeqID_121183
aaagcaagcataagggaattttattggcaagtgttctgttccaaaagaccatcggtgaagcatctgtttttacatggtcttctaatgtcgacactcatgacttgcagctgttatattcccctccctcttgctctcatcctcgtctctccttctgtatctctctgtacagaccgccttctgcctccggtcatcgacatcgctgatccccttgggcagttgcatgaggg

SEQ ID NO: 55210 - DNA, 448 bp, Setaria italica
  Peptide Sequence Number=SeqID_121184
caagtccctaaaatttaaattgcatgtatttgattttgaagtgctctttcagatacatattggaatctggtagctttgaactgttctttgagtatgttgagctgccaaactttgatattgcttctgatgctttgaacaccttcaaggtaaatccatgtgcaaattttatttctctgtaacttaaactcatattgattgttgaagaatcaatattgatggttgttttttgataagattgttgcaggatctgcttaccaagcacgaaattgtagttgcagaattcttgggttcccactatgaccaggtcaccatcttgttctgacacctttattcatgtcaatgaataaaaagacaaaaggcagcagaaaacttttgttgcataaagttccattaaagcatactctaaagggtagcgttgtatgttgtttcactaatgccctattctaaa

SEQ ID NO: 55211 - DNA, 272 bp, Setaria italica
  Peptide Sequence Number=SeqID_121185
ccacgttttcaaggtatttgttgccaatccaaacaagcctcgccctataattgaagctttgctagagaatcgccgagaactgttgaagctactccacaatcttcctacaagtaaaggtgacgatgaacttgatgaggagaaagacctgatcattcagcaaatccagaagttggcatgatcatcaacgcaaaatcttcaagttatcggtcagcaatggcaccattgttccgttttcgtagttgtcttttcagtctattcttgttctaacctaa

SEQ ID NO: 55212 - DNA, 221 bp, Setaria italica
  Peptide Sequence Number=SeqID_121186
aaataaggtaaagaactaaagaagacttttagaattaataccaaaatggaaagtaaatcagacgctctagctaccattccatcgcattctttatgaagctggatgaattcccaacagctctttactacattttcaacacgatgcttctcacattgcttgtgttccatgtgtactgggggaaactcatatgcatgatgataatgagacaattgaataataaa

SEQ ID NO: 55213 - DNA, 152 bp, Setaria italica
  Peptide Sequence Number=SeqID_121187
atcagttctaatcattaacttaatttgttttgttacaatgcagattccgaggacgacgagtaatagggagattcattcttttgacatctgcaacgtgtcatttgttcctgatacttttctatgcctgcttccagaatagtttattttggtct

SEQ ID NO: 55214 - DNA, 316 bp, Setaria italica
  Peptide Sequence Number=SeqID_121188
ttagtactaaaggtacttttggtattcttgtctaactactaagtaagtagtcttgttctattctacttaacggtcgttcttaccttcctatttttgtttagattgacaaatgagatgaggctgctacctgttttctttttcttgtaactttcggggatgaaattttgtttcataccagtttcaaagcgaccattcagcaaattgaggcaccttttcacagcagttaataagcatggggtgtctggttttctggtatccaatcacacactgtaaccacatgggttgtttgaggatacagcatgaatgttctggtgtc

SEQ ID NO: 55215 - DNA, 263 bp, Setaria italica
  Peptide Sequence Number=SeqID_121189
tcaagtcatagtcaacattatggatatgctcaatggggccatttagctctctgaagaacataaatatgtaatttagtaattttttagttttaagtatatgccatttcctttggtgttactctacctgggcatttcttaacactttgatgcgacccaaacatccatgctaaactacgttcttatcctttacaggtatgtgaaatcctcccccctgcagtcagagtcttgtttttttcttgcaagaatgcctgctgatcttgtaa

SEQ ID NO: 55216 - DNA, 258 bp, Setaria italica
  Peptide Sequence Number=SeqID_121190
cccccatccgaaccggcccggactcgaacactgagctggtcgtgtgggcggcgccaatggtgaacaccgggcgcttcgtcatcctcgtcctcgcctaccgcttcctggtacccctcctctcagctgaaccggaccacaccaccaccagagagacttgttgaattatgcatgctgatcaatcgatggtgttggcgattcagtcgtatgtcgtctacatggggagcccgtcgggcggcggcggcggcggcggcctggagg

SEQ ID NO: 55217 - DNA, 326 bp, Setaria italica
  Peptide Sequence Number=SeqID_121191
tctccaagctgcaatctataaaagttccatgattttgttaccagcacagaatgccaccacagtatagatattcctcacagcatcttcaagaaccaagaagctttcctgtgcatctcctggattcccctggaaaagccagaaagccacattttctgtgcaaccgcggaaatgataaggatgggcaaagttgccagtgctacaagagcaacacgccattgtagtaacataccgagaagaagtgcgacaaaaatggctgatgtatcttgaatgaattattagtactagtccttgtttgtcttgtaaagtctagtctacgtaactaaatt

SEQ ID NO: 55218 - DNA, 375 bp, Setaria italica
  Peptide Sequence Number=SeqID_121192
tctgctcatcatcacgagggagtgaattcaaaaagctagaatcgacatcatctgatacccggccagaattccaaggataacaaggagaatgggcacccctcctggaaggaggactcgtgtctcctactcccagttttttgagagtagacacatctggtatcctccaccacctcaggatgagggcgatgaccttgaaaatgggtttttgaaatatgatgatgatgatgatgatgatgacaatgatgtttgtgacgggaagtctttgaagatgttaaccatgattgtggtgatggttctgatgatgatttattagggaccaagggaaaacataatatagctacataaaagagtccttgagaatgctttacatggcca

SEQ ID NO: 55219 - DNA, 301 bp, Setaria italica
  Peptide Sequence Number=SeqID_121193
agcaagtgaataacaaactttagtaggatctgcagatcagtcaaagaattcagcagtctgcatcacctgaacctctcctcgctggtttctgggcagctttcatcgtttaatgctacaggagtagcgcataatcctaaacagtccaatgaagtcagcagtggaaagaatggattgaatgcgccgccgttcatggctcgatcagaagtgccgaatggcagtgggattgctgcgaatggagctcccaagccacgcgtcaagaagactacgaccgaaggaccaaggaccaactagaataccaaca

SEQ ID NO: 55220 - DNA, 293 bp, Setaria italica
  Peptide Sequence Number=SeqID_121194
gattgaagcggagccggagaatgcaatccaagtgcgattatctagtggcaagcaaccactacaagaactcccgcttccggatcaaaaaagaacaaaaaaaagagggaagaaaactccgcacaaactcctccctccccactactactgcaaattccaacggccgccgacgccgcccgacccttccacaagcagcactcgccaggtaagcccaaacaccctgcagatccctggccacccgggcgccggccgttccgaccgccctcgtcgacccaggcgtcgcggacgggcgaagg

SEQ ID NO: 55221 - DNA, 359 bp, Setaria italica
  Peptide Sequence Number=SeqID_121195
taggttttacaaaccaaaaaagaatcatgaagtatgatatatgcctcaatgaaataatcatgtctatgtccagatcgccttcaccctagtggtgttcccatgccttctactggcgtacactgggcaggctgcttacattatcgaccacaaggaccatgtagctgatgctttctatcgctccatcccaggtgccatatactggccagcactcatcatagcaaactcttgcggctgtagttgcaagtcaagcaaccatatctgctacctactcaataaataaaagcaaagctcttgcactgggttgttttccccgtgtcaatgttgtccatacatcaaaagaaatttctgggacagattta

SEQ ID NO: 55222 - DNA, 371 bp, Setaria italica
  Peptide Sequence Number=SeqID_121196
gtgtactatggacaggattttggtgctccactttgcaatatatatctgtgttattctcaatttggcttcatgatggcattccttgtaatacagacattttctgtaacatctgcaattttcctggagttaattcaaagttgaatctgtagagaaggcttataagattcaacaactctttagccgattgtttccctttggtcgaggcctatgccatgcttactgggccccaaacttttgggtattctatataatatttgacaagatccttgcatttcttcttagaagattaggcttcaatattgccatacctgaagcttcatttaccggggggcttgttggtgattcatcttccttttcgtcttgttttcttt

SEQ ID NO: 55223 - DNA, 224 bp, Setaria italica
  Peptide Sequence Number=SeqID_121197
ctgtgttattctcaatttggcttcatgatggcattccttgtaatacagacattttctgtaacatctgcaattttcctggagttaattcaaagttgaatctgtagagaaggcttataaggtagtaataatgcactatgtagcagttttaccaaatttcttatgatgcatgtttaagcttgcgttaaatcccctaatttagctgtgaagtttttctagtaagacca

SEQ ID NO: 55224 - DNA, 214 bp, Setaria italica
  Peptide Sequence Number=SeqID_121198
gaacactcgatcaagcagctgcgactgtgggcggcggcgaccgcagcggcacggctctggccttgagcggccgcttcatgacgacggtgaactcgagcttctcggcgaggtccacctcctcgccgtcagcctcgcgccactcgaactccctcacgaggttggccaacgaaagtaactacgaaggtagacaatacaagacgacgaagacgaccaa

SEQ ID NO: 55225 - DNA, 477 bp, Setaria italica
  Peptide Sequence Number=SeqID_121199
taaactaattcgtttctttttaattcgttgtttctttcttctaaccctattgtcttttctattcagtcactggcttaagaagtggtaccagcactattttgctttcgtgacagcaccatgagattgaagttgatggaatcgggaatgttgtgcatgatgcccttaacgatagatacagcatcctgtagtaaacttttagaagaagaggagccatgctttataggtccatccttcattccatcaagctcattaagtgttccattaacagctacgaaacaaatgtagtgctcttccacaacatcacagagctctgtgacaccatcactggcggccaataggtgagcccttgccatggcatcatccttctcaagaacaaagcacgctcgtgtgggtccatgctagaagttgatttgaagaataagtccaagcatgaattctccactaaattgattcctgaagatgaatttccaacagcgt

SEQ ID NO: 55226 - DNA, 246 bp, Setaria italica
  Peptide Sequence Number=SeqID_121200
ttatttgctccatgtataggaaggaatgggtccaaataaagctcttctgctgtaaacggacaaactacacacgccatcctggctgctcatttcgatcttcttgagacaaatcagcacgtaactgttggttgactcggtgtctttgtgatcatggcaggacggcgactgctggaacgaggcgctgttccacgagacgatgaccaagaccgtgcacgacgcgacctcgttcccctcctcatcctcctg

SEQ ID NO: 55227 - DNA, 335 bp, Setaria italica
  Peptide Sequence Number=SeqID_121201
gaaaattttccagcccaacccagtcgtaaaaacgtacggacaaactctgcaagcccatatatggttataaaaagatgctatcctacgaggcccatacgggcaatatctaacgtccagtgagagattggtggaaatggcaaggcccagtctctggctgtttcaaactcgcgacgcgtcgctgcgggggagagccggaggcggcggccggccgccgccgggggagtccgctccttgctcagctcaaggacgctatggtgaaaacgaactggagaaagccaagaagaagaccaatacgaccaacgaaccccccaagacctacgacaataacaaaggaa

SEQ ID NO: 55228 - DNA, 145 bp, Setaria italica
  Peptide Sequence Number=SeqID_121202
cctgtccatggcggaagcagagatgccgcagcagctgttgatggaggcggcttgtatgagaggaacagagagcaggtcagagcatgagctgctgagctcacgctggagctaaggcaaggtgtgcgcgagctcttttcgatccatc

SEQ ID NO: 55229 - DNA, 410 bp, Setaria italica
  Peptide Sequence Number=SeqID_121203
ccagcagctggctgcaatagggtccttgacacggccaaggaccaacaaatgagtacaacacgggtcaaactactacatgctgctggtgctgggaacctgcggtgccatcttctgatgaaacatcgtgcttcgacgacagcttctgcttccggccgttcctcctcctgctggtgttcgggcctctggtctgcggcacttgcttcgtgtcactcatcttcaaaaaggcaaaataaaatgagcaaccttcagtgccaaagattcgtgaatcagtccagctgaggtggacctttagtgcaacagtcaatatgtcattcgtacaccaaaagcttgtctaagctcagcaacagccaaagaaactggcgccactagttcaattgggttctcaagaaaaagaacaaatattgaacatc

SEQ ID NO: 55230 - DNA, 329 bp, Setaria italica
  Peptide Sequence Number=SeqID_121204
tgaaactcactcaccttagctgttgttcacatgctgattcaatatcattttcatttgcagttaccagccccaatgacacagcacagcaatgcagatctctgttcatgtcaaattaatctccagcttatttgcgccatatattctttcacttcaaatttatcatgagcccaccaagtataagctaatggtctagcagatctttcttgacttttttgggggtacatttttcatgatggtcacatgcaaccatttttgcttcgaagtccaaacatattgtactacttaagattcacagattttcagactgcatgtatacacttggtgaaaat

SEQ ID NO: 55231 - DNA, 367 bp, Setaria italica
  Peptide Sequence Number=SeqID_121205
ggctgttgggtgcgacggattatggagttggcgtcgacttgtggagtgctggatgtatacttgctgaattgctggctgggaagcctattatgcctggacggactgaggtggaacagctgcataaaattttttaagctattgtggctctccaacagaagaatattggaaaaaatcaaagttgcctcatgcaactatattttaagcctcaacagccatacaaaaggcgaatagcggatacattcaaagatttccctcaatcagcactacgactgattgaaacaactaacttgcaaattgaataccaagactagaatacgtttaaacggacaaacaatactagacaattaacaaaagtagaatttactta

SEQ ID NO: 55232 - DNA, 361 bp, Setaria italica
  Peptide Sequence Number=SeqID_121206
caaatgctgaacttcaagcaaatattgataaaagaaggttaataacacatgcaaatgcgaagagcaagagtgaaaagttccctccgccgcatcaggatggtgcacttggagatctcttagtttgtaggaaccgctgcagagtattctttttcagtattgaaggcttctttttgcacttaagctacgacatgatatatcatctagcacgggcagttgaaggttgttttgatgagcggccagacttgtgtttccgcttctggttgcctgctgcagagtcagccaatggtccagaccaggtaggcacggcgccttttcataaggaaataacaagtgctgaaaggaagaaggatctggggctcaa

SEQ ID NO: 55233 - DNA, 294 bp, Setaria italica
  Peptide Sequence Number=SeqID_121207
cttgtgttggagaaaatagctgtggttctcctaggttctcactggtgtgattgtttgttttcagggagacagtgcaatttcttgacggatcaagatgccctacgtcatcaaggagaggtatatagcaggaaaactaaactggcgggcactccaaaaccctcctttcttctccccagttcatcgtacaaactactactcacaaaaccatgcatttcaaatacttgggcttcatatctacctttttcatacaaaaattatctatgttttttctaacgtttacctgaaaattaattt

SEQ ID NO: 55234 - DNA, 341 bp, Setaria italica
  Peptide Sequence Number=SeqID_121208
gcttcacctggtttcaggttcatgtgttgtgcgtgttaccaagagtgtacgcgtcgtgtgatttcagaatgaggatgctatcaaggtcttggagatctgcgtccctctttcctgtcatcgtctttgccttgttgttctcaacttcattcgcaggtttgtgcgactagttctttctttgaagttcttgagctagttttcccttgatttaagccttgaatccccaaacataagattgttcagtagtgaatttcctcttttacctagcctgagaacatgatgcttccagctggtccggcctttgcttatgtgttaagtttcatcaagatacaggagaagtgaat

SEQ ID NO: 55235 - DNA, 259 bp, Setaria italica
  Peptide Sequence Number=SeqID_121209
cagcaggggctgaacagaaggaagcagtagtgccactggtgcatggtcggatgctcaatgtcaagacgaatgattacggcagctatgacccttccccaaccacggacaagccgcacttcaagctcatacccaactgatcaaattacgtatcgagcttgccgcaatggagtggccgatgaggaatttagctgcttacatatgtgtgcctgacgtatagataaaaaggtactaaatgtcattataataattttagcaagcc

SEQ ID NO: 55236 - DNA, 405 bp, Setaria italica
  Peptide Sequence Number=SeqID_121210
aattcctacctttttcctaaaaagaaaccaaagttttctggtactggattcatatggagtgttgcatgtcttcagtctttcaacaacagaagtgggctcaggagctgccagaaaagcaatattctgaaaatatacatacatgccgccttttgagttatgaccatcattttgaaatgtcaacaagaaagggcaatagcttcctgagctctgttttaatctcaaagttgtgagcttacgagtggaaacgtcatctccttcaccacctcccccatgactaccacgcctcactggcataacccacccgtttctattctatttccgtttctttctttttgtctaagtcttcttccttcctgcagccccgacaccttccttcttcccctccttctccttcccactcttcat

SEQ ID NO: 55237 - DNA, 127 bp, Setaria italica
  Peptide Sequence Number=SeqID_121211
cggattattgattgattaataattcgctcttcttgtcaccggaggaggatatgatgagtactgaagcaagctattgatatttgtatatcattagcttgcttcagtactcatcatatcctcctccgtg

SEQ ID NO: 55238 - DNA, 330 bp, Setaria italica
  Peptide Sequence Number=SeqID_121212
ggaattcactttaacttggattacctgatacatccattacttgtacatctagcacaaacccccaagcttctttcagatacatggaacaattgtacaacagattccatgcagacaagtacaggagtcccgcgaattcttcaactacgactaggaatcagaaatgaattcacatgcctctgtatatatacctctacattcatcgcaccgtgtaggtcagccatactgatgtcaattgtcaagggatgctgtacaagtagatactgaccatcatgagacattgtcctggttaatgaaggcaataggactagtaaacaatacaaaacaatagta

SEQ ID NO: 55239 - DNA, 276 bp, Setaria italica
  Peptide Sequence Number=SeqID_121213
aaagcaataaatggggcaataaggacaggggtaacaagtgccgtctcaagaaaaagtgtagagcaggaagagaaggaagaacttgtagttcagtgccccaacacaattcacaacccatacacaatgatgatccatcttaagcacgcatcttccacctgaaatcagttaaaggcataggtataccacaaaaaagaggaatgtgcaattcaagcatgtttgggtgatggccaaactttgccgtgttcgccatagttcgccaataacctactaggaaca

SEQ ID NO: 55240 - DNA, 253 bp, Setaria italica
  Peptide Sequence Number=SeqID_121214
ttttgttcctattcctattatttctttgtaaaacttgtcttgtacctagtctaactaaggtttttgctaagttttgtcttatgtagatgcttgttgtttccctgaaccaatggtgcaagggataacaaaagcaaaacatcctcacagcagaccagaagaagtgaatctgaaccaccattctgtgaaaggtgggaagcatttttcaggtgctttccaactcctggtgcttgctttttgtcaagatcgttgcctt

SEQ ID NO: 55241 - DNA, 270 bp, Setaria italica
  Peptide Sequence Number=SeqID_121215
gcgccgccgctcgccgtagttggccccgccttagccgcgccgagcttccgcaccgccctccccttccgcctacgtccgcggaagatcccctcttggcgccgcgcggccctacccaacgatgaggattactacttgatcgatgcggaggagtccattggggacggcttctccttcagtggagtgaagaaagggcagattgtgcgcgtggacaaggagaagtacctgaacagcatcaactacctgtcagtgggacatccacccttctacaaa

SEQ ID NO: 55242 - DNA, 324 bp, Setaria italica
  misc_feature (1)..(127): n is a, c, g, or t
  Peptide Sequence Number=SeqID_121216
nnnnnnnnnnnnnnnnnnnnnnnnnnnnnnnnnnnnnnnnnnnnnnnnnnnnnnnnnnnnnnnnnnnnnnnnnnnnnnnnnnnnnnnnnnnnnnnnnnnnnnnnnnnnnnnnnnnnnnnnnnnnnnncaaaaaaatatttcatttatacttggcacaaaatgtcgatgcaattacagtcataggataaagcagggccgccggggaggagaagccggctgcggctccgaaggcagccgccgcggccggggatggcgcggcgcccaagaagctcctgaagaagaagccagtctactcgatgaataaagggcagattgtgcgcgtgg

SEQ ID NO: 55243 - DNA, 253 bp, Setaria italica
  Peptide Sequence Number=SeqID_121217
tgtccatgcgcagagaagcatccagtcggatgagttgtttggtgaactgatcgagaacggcgacgtgctagctgtagccgccgccgccggcgaggaagaagcaggggactggatcggttactcacccattgtgccggacgcgtcgccgcctccgtagaacgtggcgtgcgcgctctgccacccgccgtagccgccagccgcggcttcccgggcgaggagactgaagaggaggaagagggcgccggcaacggcc

SEQ ID NO: 55244 - DNA, 351 bp, Setaria italica
  Peptide Sequence Number=SeqID_121218
ccggcgcggtactgcgcgatgtggaggaaggccggctcggccatgtcgaagtgcgggcgcggcgggttgcaccagccgccgtcgtcgctggggaggccgtagttgggcgggcagaagttggtggccgtcacggtgatggagcccggcaggcacgacccgcccgcgttctggcaccgcagctcgtagcatgacccgcacgccgcgccgtcgttgaacagcgccgtgctcagcgccgccgttgtttcgttgtccgttacccgtcttgtcttgtttactaggttttgttccgtttacccgttcttacgttcgttccgttccctttatttttgttttgttccggttacgttcgtt

SEQ ID NO: 55245 - DNA, 465 bp, Setaria italica
  Peptide Sequence Number=SeqID_121219
agagtgaagaaaatagcctaagatagttaatagtacctgatatcttttcagcgcaattgtcagaatatttggtgcctctgatatcatcaacttctttttggcacgctcatatgacatgcatctgatgagaatacataagttcaagaagataggtacatagaagcaaaagaaggatcaactaaggtattgttaggctaaggattagacaaataggcaatgctaagtaatgcaagtgatcaccaaactcaactcctacaacaagtgaagttgctacaagtttagaaaccgacaatactatagttgaagatcagttgctaagttaaggtccttgattcagcattttagctcaagtttccttgactatgcaaggtgatatatccaagcaacatcataaaaatgcaagtgcacagcatgtagataagataaaccataacgtgaaaagttaatctagaaccgacctgctac

SEQ ID NO: 55246 - DNA, 476 bp, Setaria italica
  Peptide Sequence Number=SeqID_121220
agacccccaaataattaactgcaaccaaagaaagttaagaattacttcagctagcttatggacaccattttctttgcttccttcacgctagcagattgcatagtatcaattgcataccttagaaattcatgagcatcttcttctctaccctggccaaagctagtaccaatctcattcagatgagatagtattccagtaggcgatactggagcttttccacacttgccctctgtcatgaccttttccaactcacacatgaagcaccattccattttagaacaatttcgtgaatgatatccttccaaaagatacgctgtaagtggtcgggtaaatgccaaacactgaagaacagcatttgcatagcagctattgccaaggttgcatagaccaaaaggatgcagttccaacttctcgaagttgtagagctcgatgaaatgtttgtatggaaaaagtgaccaattctgttgcataatgtc

SEQ ID NO: 55247 - DNA, 177 bp, Setaria italica
  Peptide Sequence Number=SeqID_121221
tatcatttaattcctccactatgtaatacactgtactaagcaggttcagtcatattatttaccttgctatcatccatctcgtgccactttccctgaggatccttcacataacatacataatgaccagagatggtagtattcataacatcatgatggacaaccacagcatacaagctg

SEQ ID NO: 55248 - DNA, 228 bp, Setaria italica
  Peptide Sequence Number=SeqID_121222
aggcaccttgattaatcattgcttttcttacagagtctgggacacgcggtgaacaccttgcataaagcagcatgtatgcacatttgacaggaccttttgatagcaaggtgaaacctgtttctctcaaaaaggtttcaccttgctatcatccatctcgtgccactttccctgaggatccttcacataacatacataatgaccagagatggtagtattcataacatcatg

SEQ ID NO: 55249 - DNA, 237 bp, Setaria italica
  Peptide Sequence Number=SeqID_121223
aaggatggacataataaaggtagaactacagcaaagataggtacccctttgagaaccactcgttgaattgttcatggctgtcaaatagtgtgggcatgatgaaatgaagaagttgcccataactcagccatattattctgtatcggtgtcccagtgagcagcaaacgatttctacagttaaagctcagcaatgtcttccagcgctggctgcagcagagcgacgctaatttgcaagcg

SEQ ID NO: 55250 - DNA, 234 bp, Setaria italica
  Peptide Sequence Number=SeqID_121224
aatcaatgaatgcatccataatttcatcagtgtagttcctattcaattgcattgctaaaaatgcagtgcaagagttggtcatgaaggggaaacatgtccaggacgatcatttgatgagacaagaggatgttgtttcattacttcttgatgacacacaaattgcacataagttgaaagaaatatccatgcaggcaaaggatcgacaaaagaaaagacgagcgaagggcatcaagg

SEQ ID NO: 55251 - DNA, 207 bp, Setaria italica
  misc_feature (5)..(5): n is a, c, g, or t
  Peptide Sequence Number=SeqID_121225
gaaanattgcaaagagcaaagcagaaaaatgcagtgcaagagttggtcatgaaggggaaacatgtccaggacgatcatttgatgagacaagaggatgttgtttcattacttcttgatgacacacaaattgcacataagttgaaagaaataataccaatagacaaggacaaaaggaatacgaacaaaaagaaaaagaacgaagacgaa

SEQ ID NO: 55252 - DNA, 373 bp, Setaria italica
  misc_feature (99)..(99): n is a, c, g, or t
  Peptide Sequence Number=SeqID_121226
gcagcgacgatcaatcgatcagcttacttctagatcgaccgatgccatcacacaccaccatactatattatagattatagatgccgtatctatgtaccncaaaatcaattgccttattgcagcttacaacaagcaatgccgcgccgatggatcgatcgagcaggcttgaaacaatggcgtgggagaagagaaccccatgggccatggctcgatctcatcctcttgtcactctgtcaggcatcgccgtcgtcgaagttgtgcgcgtagctgaacggaagtacgtaacctaagaaagtaacctaagtaaggaacgaaacggaaacggaaaccttttaaaagtaaacggtaaaccttaaacccgttaaaacgaaaa

SEQ ID NO: 55253 - DNA, 275 bp, Setaria italica
  Peptide Sequence Number=SeqID_121227
tttttttttttttttgatgaagatgagattttttatataaagcctgaatttaaagtcaaggttacatcagtttaaatgaaaaaaaagcagaatacattataatacaacacacggtgtacaactgtacaccatttcagaaacaacagacagggcacatgtgcaacataagaaaatacacagcaagaaggcactaatcaaataccctgcttttgatgcccagatggtagatcttattgttaaatgctattttggcaaggaaccaatgaattttaaca

SEQ ID NO: 55254 - DNA, 247 bp, Setaria italica
  Peptide Sequence Number=SeqID_121228
gtcctggcagacttcatgagactttacacttgacgagggaactctttaatggaggcatttctaagttacacccttagctttgtggagttgtgagtgtggcattcaggcagttggttgtttggttcaccaagacttttgacttgataaggaaaagtttggccttcctgctgtagtatgtcctgctttaggtggttcttggagcaggcttaatagcactaaggtacctggaatattgtattaggggtta

SEQ ID NO: 55255 - DNA, 250 bp, Setaria italica
  Peptide Sequence Number=SeqID_121229
cagcagttgctggatgcttttttgctatcgaaacagtattgaggccacttcaagcagagaactcaccaccatttactactgctatgattatattggcatcagttatatcatcaactgtgtccaatgttttgctaggggaaaaggcagcgtttattgtcccgacgtatgaactaaaatctgctgctggtattttaccttattctgatcatttttggtgttaataagagttgccactctaccttattctagg

SEQ ID NO: 55256 - DNA, 190 bp, Setaria italica
  Peptide Sequence Number=SeqID_121230
aagctcttccctcaagcaccatcctattgaatcatagtgaagaaggccaaggaccttacgcctcccatcatttcttcgacctgcaccccgtttgaccactggaagttgcttaagggaagagcttgaacggtggaaggcaatataccaaagagagaatttccagcagacaacagtcaatgggcactgaaca

SEQ ID NO: 55257 - DNA, 150 bp, Setaria italica
  Peptide Sequence Number=SeqID_121231
tggcatcagttatatcatcaactgtgtccaatgttttgctaggggaaaaggcagcgtttattgtcccgacgtatgaactaaaatctgctgctgagttgccactctaccttattctaggcatgctttgtggagttgtgagtgtggcattca

SEQ ID NO: 55258 - DNA, 368 bp, Setaria italica
  Peptide Sequence Number=SeqID_121232
agagttccctcagaaactgtcgagaccacacaattttgagtttccttattatctttgttaagccattttcttttctgcatctgcttgaactcatggaacattaatatctaaatgttgagaattaccatctgtttctcaatcttttacttgatcaattcataatgagtgttttctgagagtcagtgacaaaacaagctgtgtcctctagtaattccatcaaactgtttgctctagaagctaaccttatataacttcttttgttttgcaggtggctgagagagctctctttctatggaacaatgatcatatcgaaggtttgatcaaacagaacagtaaggtgatactgcccataatctttcctgcgttag

SEQ ID NO: 55259 - DNA, 355 bp, Setaria italica
  Peptide Sequence Number=SeqID_121233
attggcccatcacgaatagctcaaaggaggttatgtttttgggtgagctagaggaggtactggaagctacccagccagcagaattccagaggtgtatggtgccactttttcgtcagattgcccgctgtttatgcagttctcactttcaggtaagaagggtaccagagtgccaattataccacaaacatagaatatttacttgttttgctcatggaacttctcatattcaaaatctggctcattgcttgggacatgactatcatttataagtgaaagtcaaataggctgtagcaagcgataagtcatgcgtgtaaagtgcatactagttcttgcaactaattagtttagtaattaa

SEQ ID NO: 55260 - DNA, 237 bp, Setaria italica
  Peptide Sequence Number=SeqID_121234
ttaaactttctttttattgaaatctcttgataaatctgctgccagctacatattccttccacatcttagtatgcttttgagctgaaactctgcacttttttaacacatgctgaaactgaaactctgaactgactctagacgtttcctgatgaatgtattgatgcagctcgcgcacccaacacgacggtggactgggcgacaaggatgacaatcgccaagggcacagcccgtggcctc

SEQ ID NO: 55261 - DNA, 264 bp, Setaria italica
  misc_feature (260)..(260): n is a, c, g, or t
  Peptide Sequence Number=SeqID_121235
aaaagaataatggcaaatgtctcctttggtgcaataacagaactgatgataaggttggcatactgaaaggtatttcagtataaataacaaatataacttaaatgatctatataccataataagtacaccgatcgaaaggcctaacagctgagctcctacttcccatacttcctcctgaaagtacaacatcgtttcttaaaaagaaattttgcataaatatttgcaagatctcttatacagatatcctgaacaggaaaagntgta

SEQ ID NO: 55262 - DNA, 333 bp, Setaria italica
  Peptide Sequence Number=SeqID_121236
aaccttagtctccaacaatggataacttctcataccttgctttaagaaagggaaagaaacaacttgctatggaaattcgaagcatctgatctacagttatgcaaaccgtacttactggggacaattggaaataaaatagcgtgcaaacatcttaaatggtaatagtttattgatagatttctctcaatggaagacaatgtttcatgcatgacagacacgcttgtcttgacatatggcatcacagcaagcttttccaaactgaattagttgaggagcgattttaagtacagttgatgatgggatggcaaaaaccaacacagacaggaacatctg

SEQ ID NO: 55263 - DNA, 263 bp, Setaria italica
  Peptide Sequence Number=SeqID_121237
gcgccgggccggcaagttccaggccaccgactcgccgcttccgaccgtgccgggctatgacgtggccggcgtcgtcgtcaaggtgggtggccaggtgaagggcttcaaggaaggcgacaaggtgtacggcatgataagcgagaagcccctggaggggcccaagcagtccggctcgctggcggagtacaccgcagtcgaggagaagctgctggcgcgcaagcccaagagcatcgacttcgcgcaggccgccggcctgccggtcg

SEQ ID NO: 55264 - DNA, 136 bp, Setaria italica
  Peptide Sequence Number=SeqID_121238
ttagctcacccaagttattaagtctggaacggaaacaatgtcttacttgattacctgtttgattggtcagtgaatcagtattatagcttttgtttccattgttactgtatttggtgttctgagtgtatcttgctgt

SEQ ID NO: 55265 - DNA, 261 bp, Setaria italica
  Peptide Sequence Number=SeqID_121239
caccttgatgttttccttcttgacaaattacttcgatggtgatgctcagtatctcctgaaggacgaacttggtgacccgacttttgccaagcatctgcaggaggatgctgctgggtatatttgacgttttcccttcaaatggccaacgaatatccatgtagaggaagcaacaaaatgttagaagtttgaattacttggtgaaagcaaatgtaaagagattcttgtaagaaaacacgagcccaaatgtaaagcaagaatgta

SEQ ID NO: 55266 - DNA, 407 bp, Setaria italica
  Peptide Sequence Number=SeqID_121240
cacagattgctccttctatgcacaatgagcccatttccacggttaagctactattgacagcgacaacacattttttccccgggaaggtccatcgcctcttcattgtgttgttccctgacgccaaagccggacccagccactagcttctgcagtttatgtcaatacttagtacactgctatctaactccaatgaacttgttcacacacaagcacatagaaatgcgaaccatctcaactggacctcctattgctcagcctccacgtattgttccaagtactctctgatcatcagcctttcctcatccgtaagatcagggtttgggcccgtcaaacgctcccttagttccttctcttcatcactcgtaccgtcccttgagacctgcacacaagccgcaatctcaactacg

SEQ ID NO: 55267 - DNA, 254 bp, Setaria italica
  Peptide Sequence Number=SeqID_121241
ccctcgggaaggtccatcgcctcttcattgtgttgttccctgacgccaaagccggacccagccactagcttcatctcaactggacctcctattgctcagcctccacgtattgttccaagtactctctgatcatcagcctttcctcatccgtaagatcagggtttgggcccgtcaaacgctcccttagttccttctcttcatcactcgtaccgtccttgagacctgcacacaagccgcaatctcaactacgatat

SEQ ID NO: 55268 - DNA, 268 bp, Setaria italica
  Peptide Sequence Number=SeqID_121242
tatggccactacaccagttcctcaagaggaaacggacttaaactatgccaatgatgttcgcaaaaagttcttagccccaaacttccaaatatgaaataacagtactattgctgtttgggtacctaatttcagcacggcagtgctcaatatctttgaattgtagacaataatcttgaatggcacggatgttgactccaaaatatctgaacaagttggttggtaaaaggaaagaagatatattcccggaacggaagcattatatggcagt

SEQ ID NO: 55269 - DNA, 159 bp, Setaria italica
  Peptide Sequence Number=SeqID_121243
aagctcttttgctctgaagtagctgatgtccttcattaagactgtacccaagaatacaatcactttgaaatgggaagatgatacttcgtcttctgttgaaatttctgggctcgacattggctggggtcagagagttccttctcttcatcactcgtaccg

SEQ ID NO: 55270 - DNA, 247 bp, Setaria italica
  Peptide Sequence Number=SeqID_121244
cccttatgggacattttccaagaagttgtttctgattttgtgtctgcctatgcgtttgataccctcttctactggaatgacagagagagaagaaagagctaggcagtgagctgggtttggactcaattgatcagcttctgttggtagtgtcagccaccgacctgaatgtgcaacacgttcgagagtggatgcttaggtgtggaagcatacgaccaatttggttgttagaagatgttatgtctccatt

SEQ ID NO: 55271 - DNA, 353 bp, Setaria italica
  Peptide Sequence Number=SeqID_121245
ggcaaggactgtgaccattgcgaaggatggcaccattagtgcctcagagttaggtgattctgtgttttgtgtaataattaataaaggagcaggaatatgtcctgtcagtgtcatgactatgttaaccagcaatttgaattctttgacaggttgcaaggaaggcattggaaaaggaacatttctaaaatatggagctggaggtggcgctgggcatggaggccgaggtggcacgggtatttacaatggaatgaaaaagtgatggaggtctagcatatggtaatgctgatcttccatgtgagcttggaagtggtagtggtggttctgctgtgtcagcggatagcactgcgggtggg

SEQ ID NO: 55272 - DNA, 148 bp, Setaria italica
  Peptide Sequence Number=SeqID_121246
ccttgatggaaccttaagtattgatgctagcaatcctacagtacctgtactatcctgaaaatggcagacaaaagttgaacaaacccttcagatgatagacttcgcaacttatttgctaaggactggcctccagcgtcagcatcagcag

SEQ ID NO: 55273 - DNA, 262 bp, Setaria italica
  Peptide Sequence Number=SeqID_121247
tcagtgacaaaagcaaatttaaaattgcctacaaagacagaaggcaacaatcataaggaataagccaaaaacagtacctgcacggaatttaggccaaacatggcaatgtcttggagcacttcccatttaacatattttccaacattgaacatttgtgaagacataagtcagttcctaatgtacagtcaatcactcaccaacttttgtcccaaagttctcagccaagaattcatcaagaagaccataatttggagtagtttct

SEQ ID NO: 55274 - DNA, 422 bp, Setaria italica
  Peptide Sequence Number=SeqID_121248
ctcacgagttattcaggatgggtctaccattcacctctgcttagagtgcatggtgcatatcgaacagtcaaagtgatgtacagacagcattagttgacagcctaaagaaatgcgtaaggagacagatcaaatgtttaccttggcttcctttaagatgccattcgggtcgcacgttgctatccaaccaagacgccaaccaggcacaagccatcttttagatatagatcccagggtgatcacaggaactatatctgcaaagacacccattggtataaaaggcttattcccaaaagccaaatggtcatacacctcgtcggcaatgattattattccaagtttccttgcagtctctgcaattttggccaaatgatcatgtgagtacacactcccacaagggttactgggatttataatgaccatgg

SEQ ID NO: 55275 - DNA, 165 bp, Setaria italica
  Peptide Sequence Number=SeqID_121249
tttgttctttaaacttggtaagtaaggacttgatcctttcaagggcattctcaagagttggtacatccgaagcaaaagtgatacgaagccagtctttcattcctaatgcacttcctggtaacacttttgcttcggatgtaccaactcttgagcatgcctctggca

SEQ ID NO: 55276 - DNA, 164 bp, Setaria italica
  Peptide Sequence Number=SeqID_121250
ggcaaccgtgttctcatcagcaagagcctccatggactctaggtcagcctcccagcctcggtcaggaataaggttgacctagagtccatggaggcccttgcagtctctgcaattttggccaaatgatcatgtgagtacacactcccacaaggttatggatttat

SEQ ID NO: 55277 - DNA, 256 bp, Setaria italica
  Peptide Sequence Number=SeqID_121251
atgccagtctcatcatataatgcctcttctctgcatctccaagaatggaaatcaccttctgcagctgctgaaatttctctttggcttcctcatccccaggattcttatctgggtgaagacgaagagctaatttgtaatatgccttctttatttcttgttgtgaagcggtcttctcaacccctaggatcttcaaaaacaaagaaaggaaaagaaacaacgcattaaattagtaacttctgatctggaaaaagaacaa

SEQ ID NO: 55278 - DNA, 427 bp, Setaria italica
  misc_feature (403)..(403): n is a, c, g, or t
  Peptide Sequence Number=SeqID_121252
ccttagtccatccttcagcttcatggtcggagcccagccaagcttctccttgatgagtgtgttatctgaattccgccctcgcacaccctccggtccaggaatgtggtggatgggcagctgcttgttctcaaagctgaggactatctcagccatctcattcatgctgaccatttcatcacttccaatgtttacaggctcacggaaatcagactttgttaacctgatgcattgacaaaataacagcttatttcaccatataagcataactgcaggcacaattatttcccctagaaccaatagctattccacatcaccattggtatttcctcgttctgaaagacttattttcacattcatttgaaccaaaagagaatttaaattataagttacgtatgtctttttntagaacatgtgtgaagtaatgcaa

SEQ ID NO: 55279 - DNA, 162 bp, Setaria italica
  Peptide Sequence Number=SeqID_121253
cagttgtcatggttcttgtcatcacctacaccactgggtatgcttggtatatcatgctctctgcccaggccttgagtggctgactggctgtggcaaggtcactccttgccacagccagtcagccactcaagaaatggtgtaggtgatgacaagaaccatgac

SEQ ID NO: 55280 - DNA, 199 bp, Setaria italica
  Peptide Sequence Number=SeqID_121254
tgacacgtgctatcatcgtcagcttcaccattttggaaatatagcaagaggcaaactagcataggtaatctaaaagcaccaccatgtggctgcggcgacaaggacaagctggcggacaagctggagagcgaggagaaggagaaggttgaggaggccctcaaggaggccctcgagtggctggacgacaaccagtcggccg

SEQ ID NO: 55281 - DNA, 333 bp, Setaria italica
  Peptide Sequence Number=SeqID_121255
cggttgcccacatttgctttcgtcgattgctctatccgcagtgataacttcatagttttcagtgttgctaatttcaccactagagcgttcacccacaccaggaggaaacggcatcgaccctatctcacttgaaccttgaatctagtccaacactatcattgccaagcgatgatccatacagatttcgtctttctgcagcacggtctctgtactgggattgccctggtgcctcagaaaaccgacgtttaccactcccagaaactccagatgaagtattagagactaaggcagatatatctgttttgtagggtgcaggagttgcaagtgcctcag

SEQ ID NO: 55282 - DNA, 335 bp, Setaria italica
  misc_feature (326)..(326): n is a, c, g, or t
  Peptide Sequence Number=SeqID_121256
atagctgggagcttttatattgtcatgctgatagtactgtattaattatgaattccttgaccccacaaacataataggaatgaaaataacggaaaattacatttctggaccgaccgaatgttgctattggtaaaatctcatgctcaagaaatgatgatgggaaaatgactgtgattgtgcatgatgaaaaattagaaagtgtgttcttacttgaatctagtccaacactatcattgccaagcgatgatccatacagatttcgtctttctgcagcacggtctctgtactgggattgccctggtcgcctcagaaaaccgcgtttaccnctcccagaa

SEQ ID NO: 55283 - DNA, 228 bp, Setaria italica
  Peptide Sequence Number=SeqID_121257
gaactgcggtagcggtcttcaaactcaccatgaaactccgcacgttctctgctcccaatccttttgctcctatcaacaccaaaatcacggcgacttctgtgatctctggcagttgcatattcctcgtcatgattcctccgaggctgagaccacatagcaccaacagaggctggtggtggatacatatttctgactactcaacaactagaaagttaacggtaaagtaaa

SEQ ID NO: 55284 - DNA, 287 bp, Setaria italica
  Peptide Sequence Number=SeqID_121258
ttgcagcccctgcttcttcaggcggaaccccgggctgaggagttactcggaatgctgccaagatatcagtatccttggtttcgtactccggggtgtagtaagtcaatttataatccttaacaccagctttaaatccaacacttgctttagtttctgtttgtggtgacataagtccctccctacaacttatccctttcaacttggataccgtgaggcggaccttggaaagtttttgcataagcagtgggaattcgtagatcctccaaacgtagagcgcgtagggcttt

SEQ ID NO: 55285 - DNA, 232 bp, Setaria italica
  Peptide Sequence Number=SeqID_121259
aatctggtagacctactgcagttacaaacacatgtggattggcttcctatgctttagaagttatcgatggcagctccaagtcttcaaccactgtttgctggaaacaaagacaccgctgccatgtctttttgcagcagcaacagtgattgaagacctggaagcggtgtctttgtttccaggtcttcaatcactgttgaagcagtgcaaccaagccatgtctttttgcagcagc

SEQ ID NO: 55286 - DNA, 199 bp, Setaria italica
  Peptide Sequence Number=SeqID_121260
cgaagttcaatccatatttgatgttatatttggctggtctactaagagttgccggagtacaacaatgtcactggaactgctcttccatgtcaacaaggagataatggatgattttagtgcaaactcagcctggtgcatctcgcataatgttcgaactgagacacgcaacaggggatatgcaaggcacacaggggatagg

SEQ ID NO: 55287 - DNA, 443 bp, Setaria italica
  Peptide Sequence Number=SeqID_121261
caataacaacatacgtctattactatgttacatctgacacatacatactcaacttaccaacagaatatatatatagtttcattcaaatctcgcttccctctgactcatgtggtctttcaagcatatggccgatttcagcaactgcaattccatgtgcatgtcctattacaatcctttctgatcccttcacgccgaatacattatatacccttccaagataacagttcagtatgcccacaagactgaaagaatgtggagcaaaaattgcaatgaaaatatattcatcataatgtaagtgaagaacatcgaacatcgcattaatgtctctatgtagaagtgattggcaaattcatataggaattcacccactcatctcgtcacactcttttcaccaattcattctatgttctttttcacccactcatctcagtaaaagaaaaaga

SEQ ID NO: 55288 - DNA, 248 bp, Setaria italica
  Peptide Sequence Number=SeqID_121262
ttgtacatgagtatagacatctgtattttatattaaaccgttataacgggacatatgaacagctatagacgaaggtttaaaacattaggaatcgatcataagtacaataaagttccctttttgcaaaaagaaatttgctgcgagtggtcacttaccatcctatcgtagtcccatacttcgaatacctcatgtaaagatgccctcaggatccacggctctgttggatgcacacatatggctgcctctgt

SEQ ID NO: 55289 - DNA, 235 bp, Setaria italica
  Peptide Sequence Number=SeqID_121263
tcctgtcatggtccacacattttagggctatgtcgagcagctgttttacttgtttgatatatattttctttagtgacgcatcattcagtgacttctcaaatattttcatccatcttccgcaagctcctgcacatttgcataggtgaggtagagcctataataataaatgacggctggtatagtggtatgcaatgtcttttggttagtctcgctcttactctctgtgaattccata

SEQ ID NO: 55290 - DNA, 257 bp, Setaria italica
  Peptide Sequence Number=SeqID_121264
cctagagtttcaacaagagtccctgtatcgtagtcccatatcgtggacttatattcattgtgatgaacaacgatcaagtattgctttccaccttgaataaagaaatcaaaacacgatacctcgtatgtcgcgggcaacgtagatttacattttggagaatcaatatcccatacctatacttcgaacacaagaacattcaacatatgttaacacggacagcctgcaattatgttcatcaaaacattcatgatagaaaa

SEQ ID NO: 55291 - DNA, 254 bp, Setaria italica
  Peptide Sequence Number=SeqID_121265
gttgggcaaaacagaagtgcaccttttccatcctatcgtagtcccatacttcgaatacctcatgtaaagatgccctcaggatcctagaacatagtcacgaagacttccgttgctgatgtactcgaaacagagcaaacgttgacgtacttctgcaagaatatgttccccgttttgcggcatcgcttcaaactttgtctcggcacagtaaccaataagttgcactattagtttggggtgccgtatcctcattagag

SEQ ID NO: 55292 - DNA, 124 bp, Setaria italica
  Peptide Sequence Number=SeqID_121266
tgaatataagtccacgatatgggactacgatacaggggacttatattcattgtgatgaacaacgatcaagtattactttccacgatacctcgtatgtcgcggggcaacgtagatttacattttg

SEQ ID NO: 55293 - DNA, 203 bp, Setaria italica
  Peptide Sequence Number=SeqID_121267
cttgtgtttggctgtctgtgaccaagtttcctctggtacttcttcttcttcttgtacttgtaaactataactttatcatcccgtccctgtggatcaagttatggggaggaaccagtgttaactaaatgtgtatccgtcatttatgcaacagcatgcagaagacatacctgttcttcgaccactgcatgaacagcagcattggt

SEQ ID NO: 55294 - DNA, 261 bp, Setaria italica
  Peptide Sequence Number=SeqID_121268
acttggtgaggacatccagctgggataaatactgcctcaccaagtttctgttcaaatgtccagggtgaacgaagacaaactagaggttaagaagatagctctttatgcgctgaaccaatccattaaggacatcactgaaaaggattgcgaggaaagcgaaaagaacaaagctgaaggtgaggagcagggtgaacaaaagaggaggagcagcgtaaacaaaaagatggaggaggatgaggagcctcctaaacaagagatgga

SEQ ID NO: 55295 - DNA, 413 bp, Setaria italica
  Peptide Sequence Number=SeqID_121269
aacagaaacttggtgaggcagtatttatcccagctggatgtcctcaccaagtcagaaatttgaagtcatgtataaaggtcgcacttgacttgttctccggaaaatgtgcgagagtgcatcaggttgacagaagaattccgtctgcttccaaaggggcatagggtgaacgaagacaaactagaggttaagaagatagctctttatgcgctgaaccaatccattaaggacatcactgaaaaggattgcgaggaaagcgaaaagaacaaagctgaaggtgaggagcagggtgaacaaaagagcagcagcagcgtaaacaaaaagatggaggaggatgaggagcctcctaaacaagagatggaggaggatgaggaggagcccaaacaagagatggaggagcctaaacaagagctggt

SEQ ID NO: 55296 - DNA, 182 bp, Setaria italica
  Peptide Sequence Number=SeqID_121270
caaaataggaggttcctctggcgaactgtggaagtgatgaacggatatactgcaacaactgcaggacatctattgttgacttccaccgaagctgcaacaaatgttcctatgatatctgacctacaaagaactaaagaaactaaagaaaaccgtaaaagaaaaagaaaacttaaaacgaaaaa

SEQ ID NO: 55297 - DNA, 454 bp, Setaria italica
  misc_feature (5)..(5): n is a, c, g, or t
  Peptide Sequence Number=SeqID_121271
aaaanaatttttactactactaatttacttacttaccgacaagaagtaggtaggtagagagcaaaggggctgatgcgactaaggcagtctagttgttcctttttccttgcagtttatctctgttagattgtaggggatgttagacatgtttagtgcctacatgatctttatataggtttggaagttttgctattggcaactgttgattctaatatgcttgtacagatggaaggcatctgtatcttgctcagggacagtggttgatcatgtggggtcagaaacgtggatacttacctctgctactttggtcagaaaaccctggaactcagtatgaggcgtataaagatggtgaagttaagattaaagtggttctgcataatgaagaaattgctgaaggtaccctagcactgtgccatttgcattataatctcgccatcgtgaagattatatctcc

SEQ ID NO: 55298 - DNA, 138 bp, Setaria italica
  Peptide Sequence Number=SeqID_121272
atcatttagatcatcatttaactgattatgaagatgttctagaagatgaaatatctcctagaaagccagaagctaagcctgtgtatgttaaagatgatttctttgattctccctccattgtcaattgtgttgcacgag

SEQ ID NO: 55299 - DNA, 177 bp, Setaria italica
  Peptide Sequence Number=SeqID_121273
cctatcccctgtgtgccttgcctatccccttttgcgtgtctcagttgtaattttaggaaccttggcgcaggaaactgccatgaccatctttgctccagctttcgcaattccactagcttcagacttcgacccgaccatgaatccagtaatgtttgaaggaatatcaaaggaatatgg

SEQ ID NO: 55300 - DNA, 349 bp, Setaria italica
  Peptide Sequence Number=SeqID_121274
tgcggcgaagccggttccagaagacacaaagtacggtgtattccggatgtaaatggtgtatatgaatacacatccgtgtataataaaacggctttccatgcgcacaatgtgcattggacttctgccctctggaaccggcttcgccgcagcagagaggcagaggctcagaacacgcctggtgtcagcagggtcgatgatcccatcgtcccatagcctagcagtggcgtagtacgggctcgcttctctgtcgtaagcctccgctacctttgctttgaaggcttcttcctcgtccttggtccactccactccttgtctctttttgtgttcttttcttatttgtagagaggac

SEQ ID NO: 55301 - DNA, 267 bp, Setaria italica
  Peptide Sequence Number=SeqID_121275
tatcagtgacaatccaattgtggcaataacaggtgcgagggttcttacctggatgccacccataacagatatcctagcagttggccaaagaaacaaaaagtttgggctatatgcgcgtccgcacattccataattcccagcaccaaaacttccaccaacaattattgtaattttaggaacctgttgagacatattttatatattatttccaagtttcattggtgcaaggtttgttgtttcagttgtcaaaggtctagaaagcttgac

SEQ ID NO: 55302 - DNA, 251 bp, Setaria italica
  Peptide Sequence Number=SeqID_121276
tgggggtggctgatgctctttatcagttcaggaggaaagaaacactctgttggatccttatttgcaaggcagcccttgggcaaagcttctctaacattctgaaaggaattcaaaaaaaaatgtgatccaatcaacatttactaccatattgtgtgtgtggaactgttttgtgacatgcatcctggaatgggatctcttaaaggcgaagtactctgttccatggcaaacctgaaggtggactattccattga

SEQ ID NO: 55303 - DNA, 222 bp, Setaria italica
  Peptide Sequence Number=SeqID_121277
ttcttcctgaatccgtgcagtacatcaatttgtgtggaactgcagttccgaatatctgctttgcaactggaccatgcctgtccaggataggatccatttggcgcaagagcgtttcgtatctgaagagaagaagcagttaggagttttaacctttgacaagtggtaagaaacttaaagattgaaaccactgccaagaatcgtaatcagaattcagaataaatg

SEQ ID NO: 55304 - DNA, 372 bp, Setaria italica
  misc_feature (341)..(341): n is a, c, g, or t
  misc_feature (359)..(359): n is a, c, g, or t
  Peptide Sequence Number=SeqID_121278
ttttgttagttagttcttaaatttatttagttagttcttttcttctactattggtcttctattgttttattgtattttctacaagcctgatcttgcaagtgaatacccggtggttgatggtaaactatcccaaacatgctacttgatggccctagactcatgctacagacagttctgcaacaagtatgagaagattgtggggaaacaattctcaatttctgatgcagaatattttgtgttccattctccttacaacaagcttgtgcagaagagtttttagctcggctttgctataatgacttcatgcgcaactgcagctctattgatgatgatgctaaagngaagctccagccgttttnaaatctgactggt

SEQ ID NO: 55305 - DNA, 234 bp, Setaria italica
  Peptide Sequence Number=SeqID_121279
ggatttctgggttactgatgggtatcagaagcctctccctagagtagatgccatggtcactcatcatgttgacgacgggactgctgcatactatttatctgtttccgaaggtgatcccagggctgccatgatggagtactccgaggacctgaggtgggagcaacaacgctcaggccagtagattcagaacaatatgggatatgtccatgtcatggggcttgatgttaatcatgg

SEQ ID NO: 55306 - DNA, 229 bp, Setaria italica
  Peptide Sequence Number=SeqID_121280
ggttactgatgggtatcagaagcctctccctagagtagatgccatggtcactcatcatgttgttgaaccgtttgatatcagtcacctgcatgcagttcaactagcatgaaattgcggtttgacaatagacaaggaaactgacatttgccaagctccacggtacaacttcttagcatcattaaaagttgcaatctactgagaaattcagcactagtcgctacatgaaatg

SEQ ID NO: 55307 - DNA, 437 bp, Setaria italica
  Peptide Sequence Number=SeqID_121281
cctgatgcgtcgcccaagatgtgctgaaggcgatggagaggctgatgcggcgcgcgacaatgaaggtgcagcctgtgacggtggccatacgtgtcatacgaccgcaggcccatacgaagaagttgccgaagcccgatctgtgctacagtacagaggtgcggtcggcggctgtaatgccgcatggcacgcgcgcgtctgtcaacacgagacatcacaacatccgccccaagacttggcagctggcttatggacgacacctgcgggggcagaatcatcagcgcagattcagatgatgttgatgcagatgttgccagcactaaagtcaacgaaggcggtgttgtcgcgatcgtcgtggtaggggctgtcgtgcctggaggtgctagtggcagcacagtctggagttgcattggtgctgatgcggcaaaggttgcagtcgg

SEQ ID NO: 55308 - DNA, 232 bp, Setaria italica
  Peptide Sequence Number=SeqID_121282
tcatgtgtgaaaacaagttatatttgaagaaagcagtattacagcggcttcatttgcatctgctcagcatccactccaagtctagtcgtttgtatttccgtcctgcgaggataaactctgtgtcccatagatactgatctagatcacattctgacctgaacctgcagaagcttatcgactgaagattgaagctttgaataaaaatcatctaatttctgccctcgaatcatag

SEQ ID NO: 55309 - DNA, 300 bp, Setaria italica
  Peptide Sequence Number=SeqID_121283
gtcccatagatactgatctagatcacattctgacatttacaggtatcgtttcggcgaagaacccaaagcgaagacgtgatttcctctcgtcaagcgaagcctccagaatcaagaaaacataggtattttgaaattagcagtgttctgaatcccgggtccatacaaaattacgaaagagcataattcattttgttttcagtaaacaatggaaacaattgaacagtaccatcattattttgacctttgcaaaagaattaaggtacaagactaattagtttacaatttttaaaacctaaatta

SEQ ID NO: 55310 - DNA, 267 bp, Setaria italica
  Peptide Sequence Number=SeqID_121284
ccggggttggaggcggagttgagacggcagttggagatctcctcgaatgccttcctgctacatttggatgctccatggaatgccttctgggctgtcttcctggcttgagctggggctaggccgcaggcggcgacgaggtagtcctcaagggagaacggggcggcggaggccgaggtgaaggtggagaggaggcatgcgcggtggtagataggggaggggagcggggaggccgcgcggaggagagggaggaggtgcctccgaaggagc

SEQ ID NO: 55311 - DNA, 275 bp, Setaria italica
  Peptide Sequence Number=SeqID_121285
caagctttgggtccttttctagaaactgtgtcacacagtaggtcaactgctggagatacaaaccaactgattttggtttgtgtaaaggaatcaaaactctccaaagaaaatcttgtgttcttccttcaaaggcaatgcaaagccactaatgacactgccaaagacctccagcagctcagcaatcccattgtgccgatcagtctcaaagacaaactggtagaatatattgctcaggatatatgggaagttcaatggtacaccgtcctttcatccgc

SEQ ID NO: 55312 - DNA, 338 bp, Setaria italica
  Peptide Sequence Number=SeqID_121286
ctatcacatattagttttgtccccggtcattgctgttgtcgttgaacttttaaaggtatcgcaaaagcagacacaggattaaccaccaggcgcatcatttcttcttggcggcagccttggtaaccttggcgccggtcgggtccttcttctccacgctcttgatgactcccacagcaactgtctgtctcatgtcacggacagcgaagcgaccaagaggagggtactcagagaaggtctccaccaccatgggcttcgtgggaatcatcttcaccataccagcatcaccgttcttcaggaacttgggctccttctcaagctccttaccggatcgcctgtcg

SEQ ID NO: 55313 - DNA, 375 bp, Setaria italica
  Peptide Sequence Number=SeqID_121287
tttttttttttttttacttaaaaaaccttaacttaacttaaattacctacttcaggagagcaaacaacactaagaaaacaataaaaaaaatgcagaacgaaagactccgacaatacatccaaccaataacgtctcacaaaagggtacacatggtcttggaccattcaagtttagccaaagctaagatggtacctaaacaactgatacatagcacaccgccagcagaccttaacagttcacaggctaacagaagtggcggacaaaacttgtgtgataaagcaaggcacctaggtatcgcaaaagcagatgcaggattaaccaccaggcccatcatttcttcttggcagcagccttaggtaaccttggccgccggtc

SEQ ID NO: 55314 - DNA, 393 bp, Setaria italica
  Peptide Sequence Number=SeqID_121288
ttttttttttttagacaataaaagaataaactaagaacgaactacccaactcgtttaaagatgcccaaaagagcacacataggtattaaagcattcaagttttgcccaagcagatataataagagggtacctaaacaacaaacacatggcacaccgccagcggacctttaaaagttcaacgacaacagcaatgaccggggacaaaactaatatgtgatagtgaaagttatctaggtatcgcaaaagcagacacaggattaaccaccaggcgcatcatttcttcttggcggcagccttggtaaccttggcgccggtcgggtccttcttctccacgctcttgatgactcccacagcaactgtctgtctcatgtcacggacagcgaagcgaccaag

SEQ ID NO: 55315 - DNA, 312 bp, Setaria italica
  Peptide Sequence Number=SeqID_121289
taacctttggtcgtccggttcgggttcctttctttcttcctacgtcttctttgtattgtacttcccacagcaaccgtctgcctcatgtcacggacagcaaagcgacccagaggagggtactcagagaaggtctccaccaccatgggcttggtgggaatcatcttcaccataccagcatcgccgttcttcaggaacttgggctccttctcaagctccttaccggaccgtctgtcgatcttggtaatgagctcagcaaacttgacagcgatgtgggaggtgtggcagtccaggactggggcgtaaccattgccg

SEQ ID NO: 55316 - DNA, 112 bp, Setaria italica
  Peptide Sequence Number=SeqID_121290
ccgaacatgtagatgaggttgtggtccccgaagagcttcttgccgaaggggtggccgatgaggtggaacgcgtcggagctgtcccaccgcgtgttcgccaacgtcccgcccc

SEQ ID NO: 55317 - DNA, 361 bp, Setaria italica
  misc_feature (271)..(271): n is a, c, g, or t
  Peptide Sequence Number=SeqID_121291
atggctaaggaatttggcaatagccaacctgagtggtttggaaatgctagccaagaaacattgccttccactgtcctttcaaagcgcgaggtaaaagttatctgggttacctaggaatctcagtttttttttgccttcagacttaacatggcaatccttttggtggtcaaggatttgttttgcttacatacttaatactctacacgactacgcattaaaaattgattgcaattatccttttcttacttgtatgttttttctttctgggganaatgtgacatcatgtcttcgttgttagcacacttcatctttataatagacaatctatgttttgaatttagcatctgtcatatgtactggt

SEQ ID NO: 55318 - DNA, 378 bp, Setaria italica
  Peptide Sequence Number=SeqID_121292
tgcccgagggtcccgaggcccgggcggtgcagtcgccgaaggcatgcgcaaccaaattccccacccttggtctccccaaggggctgctcttcggtgtggcccgacgagaatgggtgggagaaagccactgccaccaaggcctccaatgttgccgaaagagtttgatgacccggccttctccacggtgacgatccagagagacttgtactatggttatgatacgttgatggagaacgtctctgatccgtctcatatagaatttgctcaccacaaggtaacttattacggagtctttgtttgagaatgtttagatagtgtttggttcgtgcaaaggtaacgtaaacgcaaagggaatcagattacagtgttttggcggcg

SEQ ID NO: 55319 - DNA, 256 bp, Setaria italica
  Peptide Sequence Number=SeqID_121293
ctttgtactgatgctttatatccggtaaaagttacattccctagctaggcggcctaggttacacgttgatggagaacgtctctgatccgtctcatatagaatttgctcaccacaaggttactggacggagagatagggccaggcctctgacattcaagatggaatcaagtggtgcctggggttactcaggggcaaattccggtaatcctcgcatcactgcaactttgaggccccatgctatgcattaaacaaatag

SEQ ID NO: 55320 - DNA, 410 bp, Setaria italica
  Peptide Sequence Number=SeqID_121294
aaggacggaccgtagggacgtagaacgtacgaccggggaaagactaggacggtgccgaagctcctgcactggtacctgctggacttcgccaaggacgtggactcgttcatggactgggtgtgcctgcagctgccggcggagctgcgccaggaggcgatgcggagcgtggaggacggccggcgcgggggcgccgagccccggcgcatccaggtcctgccgtacgagttcaggttcaggtacctgttggcctcctcgtgacgcgtactgtactagcgccagtagtaactgaaggcgtgcgtggtactgtagtctgtacacaggttttgcaataaaggcaagactgtcgagatgcagttcggcctttgtataaaggacagaagtataagagcttctggttgataattctcgtt

SEQ ID NO: 55321 - DNA, 263 bp, Setaria italica
  Peptide Sequence Number=SeqID_121295
agggccgcgacaggaagggccgcgccgtcgtcaggatcgtcggcaactacttcccaggtagggtcagattttccccaaatcacaggcttctgggctccggcggaaattgatggaccatgcctctgtttctatgtgcagcgcgagcgctgggcgggcgggcggaggaggcactgcggggttacctgcgggagcgcatgctcccggcgatcgggggccgggatttcgtggtcgtgtacatgcactcgcgcgtggaccgcgacggc

SEQ ID NO: 55322 - DNA, 196 bp, Setaria italica
  Peptide Sequence Number=SeqID_121296
tcgccagctgggcgcgcgaggagctgctggagatcgacggcgccgcccgccgcctcgcgtacgccatcgtcggcaacagcatggggttcggccgctacgtcgccaccatgaccgtcgccgccgacgatggcgactcctcggcggggtgcaggctggtgtgggcgttcgagtgcgagcccgtgcaggggtggagcct

SEQ ID NO: 55323 - DNA, 196 bp, Setaria italica
  Peptide Sequence Number=SeqID_121297
caagtctcagctgacacgacacgaggtagtacaatgaaactcggcagagatagaaggaagggacactgtgctgttggctcctgatgctcttgtttccttgtgggccctgccaccctgtgggctgtatctgtatgcttcccgattttgcgcaaccaaccagtgggctgcgattcgttttgctactgggccatggaag

SEQ ID NO: 55324 - DNA, 227 bp, Setaria italica
  Peptide Sequence Number=SeqID_121298
gttcggcgccaacagcttgcaaacctcgacatggaaagtaacaacagcactaacatatagtaacacatctccgaaatattagcaggagtcattcacaagctcaggtggcgtcccggttcagatagctttgaggctgaggtgatgtcatggctggctactcccctcaaaaggacaatcaagtttgccgatattaggcctcctgaaaccaacaggccttttgtcacttt

SEQ ID NO: 55325 - DNA, 240 bp, Setaria italica
  Peptide Sequence Number=SeqID_121299
ccttgttccatttccatgcaatgttcagtgcaaacttaattagccaaagttcaatgaaaatgaaccgataatgatggatggattgggtgcagctacttcgacaactacgggatcatccgtgacatcatgcagaaccacctgcttcagatcctggccctgttcgccatggagaccccggtgagcctggacgccgaggacatccgcaacgagaaggtgaaggtgctgcggtcgatgcggccg

SEQ ID NO: 55326 - DNA, 197 bp, Setaria italica
  Peptide Sequence Number=SeqID_121300
atttcttattgtgcctttgggctccgccacatagacttgagtttaaactctttgactcttgtctcatcaggcgtgattgttgcgcacttaacagctacattatacttcaatgtagcctcagcactttcgacggtgaacctacaatacaattaggtaggacgtaaccctaagttagaagaaaataacccaaagaataa

SEQ ID NO: 55327 - DNA, 332 bp, Setaria italica
  Peptide Sequence Number=SeqID_121301
ctccatattctctgctggaacaggaagccacatgctggatgactacagaagctctctccgtcctgagattgtggaggcacttgtctgcacaaaagactggctccagtactcaccagctaccacggaggcaccaacttctgcactggtcaaggctgaagggtcttaggtttgcagtggctactgcttccttgtcgaaccatgaatctatctgtttatcgtatctatgagtgtaggtaaccgtagaggtgtattgtaggctgagattgtgaactgacgagttaacaaagttcgatacaaacaagttccacctctacgagattaaattacctagt

SEQ ID NO: 55328 - DNA, 320 bp, Setaria italica
  misc_feature (2)..(2): n is a, c, g, or t
  Peptide Sequence Number=SeqID_121302
anccatgctgttgttctattggtattcctacgttttctaagtattgtaagtcttggtttgtagtttctagtttacttctaaaaattttattggggtcttgtaggtcttgcaaagtatgttaaggtggtcaatgatgctgtgcatgaactgtacaaggagtatgtggctcagccactcccactgaccccagcctatgttgagcaaggtgaagcgaataatgggccagccaatgcgaataacagtcaaggagctccttccactggtgatgggcttctagactttgatatgtacctttctgagatccagagtagccagcccct

SEQ ID NO: 55329 - DNA, 336 bp, Setaria italica
  Peptide Sequence Number=SeqID_121303
ttaatttatttgttaaggttacttaggtcttatttctacttattctactttggataatgattgctcttcccatgatatttacagtgcaaatctgagggatcacctctccaataagaacaacctcatgcttaagggacagctgtttgttgtgaggtgctatgcacatatcctgaatgtagttgctcaggatgttattgcttcgattcacggtgtgatttacaacatccgtgagagtatcaagttcataaagctctccaagccgtgaggagaggtttgcagagattgctctgcagctggagattcccagtaccaagaccctctgtctagatgttacaa

SEQ ID NO: 55330 - DNA, 242 bp, Setaria italica
  Peptide Sequence Number=SeqID_121304
ctgcttttgatcaagatcgcagttactcgtacctggcaaagatgatcattcagcatgactacccgcttcacattgttcaacagccggcatttgccactttcattgagagtctgcagccacgtttcaagattgtggatgttgatacaatggagtgagaggtgtatgctgtttatcagaaaagaaaaaagaagaaacctaactgacaaagacaattacaaacaactaatagacctaggaaagga

SEQ ID NO: 55331 - DNA, 231 bp, Setaria italica
  Peptide Sequence Number=SeqID_121305
cccgtctcctccagagcgagatctaggttcttcgtccttcttgggccgagccctaatcctgctgcaccgccagccagtccgccaagccgttggtgggtcgcctcgcctccgctgcgcctgctcctcctcctccttcctcctcctccacgccttcttgggttccatcgacaacaaacaagatctagcacactgctcggcctagctcgtacggattctggatcttggccacca

SEQ ID NO: 55332 - DNA, 226 bp, Setaria italica
  Peptide Sequence Number=SeqID_121306
taacaatcagttcacaatctcagcctacaatatgcctctacaggtggtactgacaatgatggtgagggaagtgtggagcggcgaaccaagagacgctacagatatactggttatgctaatgctgcttttgatcaagaccgcagttgctcatacctggcaaagatgatcattcagcatgactacccgcttcatattgttcaacagccgacattcgccacttttattg

SEQ ID NO: 55333 - DNA, 234 bp, Setaria italica
  Peptide Sequence Number=SeqID_121307
ctgcaatctttccagtacttgtcaaacctctcatgcatatccttaatgctgttgcacaagatgtgattgcttcgattcacggtgttgtctacagtatccgtgaaagcataaagttcataaaagcttcttctgcccgtgaagagaggtttgctgagattgctctgcagctggagattcccagtaccaagaccctctgtctggatgttacaacgcagtggaacaccacttatacta

SEQ ID NO: 55334 - DNA, 271 bp, Setaria italica
  Peptide Sequence Number=SeqID_121308
caagggagcctccggtcgagccggtggcgatggctcaaggccgtgtccatggtggcgttcggtggccggccggcatacaagccggtagcagtacgtcccttcaccttagctttaatttgcacatcttttgtatcgggttgccttctccatcatctgtccactgattttcctttaaatcctttcagcgtgtttcttccaaacttttatattctaattcgatcaactcagccaaagtaatcgcaaaatgatggaaatcccacaaggccacaaa

SEQ ID NO: 55335 - DNA, 399 bp, Setaria italica
  Peptide Sequence Number=SeqID_121309
taagtaagtagtcccttactagtctaccgttgtgctatatcttcttcctcactatcgttctagggctctatctaatgctagtcacaacagtgagaattccggaactggtacgtgtgaggtacctcgatgtcctgcttatctgcctgctcgtcggcactatcatctccgccttgatctcgtttctacattttacttgaagacggagcggaagtcctatatgcagccaggtctaggtgtcttggaaacaaattgcacttggtgtgcataaattgtgtactatagtcacgaacaatttgtgtggcctgctgctgcatattgatgtgttgcacctctcactcacatgctacggaaagaataggcaaaatagcccatcggtcatccagatcgtttttgccctga

SEQ ID NO: 55336 - DNA, 428 bp, Setaria italica
  Peptide Sequence Number=SeqID_121310
agtcttttatttatttggttaggacttaggagtacttcaaattcatggataacacctctgcagcaactttgatgttgaaattaatgttgaattaatagaccttgtgtgtatgttctacattgcttttcctcaatatttttctttcctgccaggtgatcatggaaacggtgagcatagctcggaggtggaaactaataaggcatctgttccagttatcattgtagttagtgttcttgcttcagtacttgtcatcattgccttgtttgggggctataagtactggcagaagaagaagagagagcgagaccaggcacgattcctcaagctctttgaagagggagatgaccttgaagacgaactggggcttagcaatgaattctaaatcagtgagtacagtacttactaggtacaggctacagtcaatattt

SEQ ID NO: 55337 - DNA, 382 bp, Setaria italica
  Peptide Sequence Number=SeqID_121311
gaaatcctttggataaagatgatgaaaagcaaatggtgaaaactgaccagccaccaaggaaatctgacaataacgtaagaaggatgagtgtgcaggatgcaattagccttttcgagagcaagcagaaggatcagaaatccagattctcaaaataagaaaagctggcttgtttactactaagtctgtcctgagaaggtggagtgctggaatgggtgattcgttgaatgataaagtcaagaaagaaaagaaatactcaagaattactaacaatactagaagaagtaaaaccgaaacaaacaataggacttaatagaacaacaagaagaaaggaaaaggaaagtaacttaagtaaaaaattaagaaaagaaactaagaaaaccaa

SEQ ID NO: 55338 - DNA, 442 bp, Setaria italica
  Peptide Sequence Number=SeqID_121312
ttaaagttaagtttagttcttttcttaaagttacttaccttagtttcttagttaaaaagttcttttaccttaaaaccttattctacctattctacccgtctaccttgtcgtccttactaactacgttagtttctattggttctaggttggtttcttttgtacaaaagcaactacaacacaaagaactaaaaattctcctgggaccggaatggcttcgacgtctacaccaactagccgaaggaggactccagcaacacccccatcgtctcagctggcttcaaaagtggaaagaaccattcaaccagtgaagaacaagaaggaaactgtgactgctacaaagccagctataaagggacaagaagagaagaggacaaaaaacggcaacaaagacaagcagaataactaaagtttcaccttcgttagaagaaaagtcgagtgtaac

SEQ ID NO: 55339 - DNA, 358 bp, Setaria italica
  Peptide Sequence Number=SeqID_121313
acctttaggaataaaagaatagaatagaaaagacaaataggtagaaaactagaaccaagccaccaaaggaaatctgacaataacgtaagaaggatgagtgtgcaggatgcaattagccttttcgagagcaagcagaaggatcagaatccagattctcaaaataagaaagctggcttgtttactactaagtctgtcctgagaaggtggagtgctggaatgggtgattcgttgaatgataagtcagaagaaagaatctcagattctacatctgagagtaaaccgaacaacatggcttatgacacagagaaggaaggagctgaaatgaagactgaaccagatgaagcaccaaagattttat

SEQ ID NO: 55340 - DNA, 420 bp, Setaria italica
  Peptide Sequence Number=SeqID_121314
tgtcttgttgttttggtattgtagtttgttagttatttgtaaagttggtctaacttatttcacggtttgtgagcgaaatggacaggaaagttgctagcaacgtggagcttgattctgctgtcttccaagtatcctcgcctgacaacaggtatgaggcaattgcttgcagtaaggggaatacagaattgatagcatctggtcctttcgatcagttagttctgcacctggaagatgccaaaaaaattccaatcttgtacatcaagtggcactttttaaactcttattggctggggatggaaaaagggtcttcctggtttaccaagtccaccttacagagattcttgcatatcattaattcaatctgatacctcaaaaatcggtcaatggggtttttagacgagatgtcacagctggaggaaa

SEQ ID NO: 55341 - DNA, 195 bp, Setaria italica
  Peptide Sequence Number=SeqID_121315
ctccagcaacacccccatcgtctcagctggagtcctccttcggctagttggtgtagacgtcgaagccattccggtcccaggaggactccagcaacacccccatcgtctcagctggcttcaaaagtggaaagaaccattcaaccagtgaagaacaagaaggaaactgtgactgctacaaagccagctataaaggga

SEQ ID NO: 55342 - DNA, 243 bp, Setaria italica
  Peptide Sequence Number=SeqID_121316
ggttggatggagaccagctttgaccaatccacatgagattattctgcagatacactgggatcatagcaggaattagcgaagctgaccctatgtggcgtggttcaaagtggaaatgtttgatggtatgctgtattttcatgcaagatatgactccaccagctttcctttctgtgtaaccttttttagtggtaaattgagctatatgtttgaaaataactcatgatagagatatacaaaatttat

SEQ ID NO: 55343 - DNA, 458 bp, Setaria italica
  Peptide Sequence Number=SeqID_121317
taccaaggtagaacctacaagaagacaaataagattctatctggccaagataaggtgtacaagattggtatccgcatatctggccatcccagttgagctaggacggatgaatcctgggtttcaaccatagagtgtatgatagactgtgggtgaatcacaatctcaatgtcatcatattcagcgccaaataaataatgtgcttcgataacttctaggcccttgttaaataaagtagcagaatctactgtgatcttcttccccatattccagtttggatgctttaaagcatcagcgactttaacatctttcaatttgtcaactggccagtccctgtcatgatcaatcgatatgagatggatctgtatgtttccagaagtacataaacacatatgggaatggacttgcctgaaagcaccacctgatgcagttagaatacacgacgaagtgctccttcagac

SEQ ID NO: 55344 - DNA, 382 bp, Setaria italica
  Peptide Sequence Number=SeqID_121318
aaggcatgattacattcacaactccagaataaccaatcgaccatggaaccagggagcagtgggcacatcgcctaccagcccacacttcatcttagagctcccactgtacaccatgatcacagcaacctctataggcatgcatatgtatatctacttatgcagggacagggctcaggccagctgatggttgtaggctcgctgcgtatctcctcgcccacagatcataatggatgatgtcctcaagcgacgggcgcgttaccagctcgttccgatgggcgtcgcatgtacgctccaccaccttgaagatgtccaggtagctaatcttttcatcaatgaacaactccacagccttctcattagcagcactcaggacacctgtcat

SEQ ID NO: 55345 - DNA, 186 bp, Setaria italica
  Peptide Sequence Number=SeqID_121319
tgctccttcagacaaaccttgtatacactggaatattgcagagtgctcagaatcagcaggaagaattttcactttgtgtttgtgtgcaaggggaaggcacgaaagggccacctgcaataagcgtctctttgttcgccaacgctatgtctttaccagcttcaattgcagcaacttcagccctgcaca

SEQ ID NO: 55346 - DNA, 230 bp, Setaria italica
  misc_feature (5)..(5): n is a, c, g, or t
  Peptide Sequence Number=SeqID_121320
tatcnctacccccattcctgtctttgaagcaacaagtgccaaaatcactgggcaacagttgtgcaactggtgattgatgtttcaaccatggacatgatgatctgatctgttaggcaaattatccaggaggtgaagaaatgctaggactgctttcatcttcatggacttttctgtcgtgtagtgtggatagtttcaggttgatgattgggtctgatgaaagatggatggac

SEQ ID NO: 55347 - DNA, 239 bp, Setaria italica
  Peptide Sequence Number=SeqID_121321
tcaatgaacaactccacagctttctcattagcagcactcaggacacctgtcatggtacccccacgcccgccccagcagcataggcaaggtccatcgaagggtattttacattgtcaggagctttgaacgtcagtgaacccaatttgcaaagatccagacggggccaggtgacctcagagcaatagattctatctggccaagataaggtgtacaagattggtatccgcatatctggccat

SEQ ID NO: 55348 - DNA, 238 bp, Setaria italica
  Peptide Sequence Number=SeqID_121322
tagctaatcttttcatcaatgaacaactccacagccttctcattagcagcactcaggacacctgtcatggtacccccagcccgcccagcagcataggcaaggtccatcgaagggtattttacattgtcaggagctttgaacgtcagtgaacccaatttgcaaagatccaggacggggccaggtgacctcagagcaatagattctatctggccaagataaggtgtacaagattggtatc

SEQ ID NO: 55349 - DNA, 185 bp, Setaria italica
  Peptide Sequence Number=SeqID_121323
atgatgatctgatctgttaggcaaattatccaggagggacttttctgtcgtgtagtgtggatagtttcaggttgatgattgggtctgatgaaagatggatggacagaggatgctgatcaaacttgtaccgtagttgtagtgttagagcactttgtatgacaaccttcagtgctccatgttatcag

SEQ ID NO: 55350 - DNA, 215 bp, Setaria italica
  Peptide Sequence Number=SeqID_121324
aatcctgggtttcaaccatagagtgtatgatagactgtgggtgaatcacaatctcaatgtcatcatattacagcgccaaataaataatgtgcttcgataacttctaggcccttgttaaataaagtagcagaatctactgtgatcttcttccccatattccagtttggatgctttaaaagcatcagcgactttaacatctttcaatttgtcaactg

SEQ ID NO: 55351 - DNA, 213 bp, Setaria italica
  Peptide Sequence Number=SeqID_121325
tttttttttcctacactaaagccatcaaaatttatatggaacacatgcaatttattcatgtgaaggcatgatttacattcacaaactccagaataaccaatcgaccatggaaaccagggagcagtgggcacatcgcctaccagcccacacttcatcttagagctcccactgtacaccatgatcacagcaacctctataggcatgcatatgtat

SEQ ID NO: 55352 - DNA, 121 bp, Setaria italica
  Peptide Sequence Number=SeqID_121326
ggtgcttgtggcccccgaaaacgcacatccatgaagttgtgtatgccatttattcaccgcaccaggcaccttttaaccactggatggagtgcatttgtcaacaagaagaagctagtctcag

SEQ ID NO: 55353 - DNA, 193 bp, Setaria italica
  Peptide Sequence Number=SeqID_121327
tgcgtatctcctcgcccacagatcataatggatgatgtcctcaagcgacgggcgcgttaccagctcgttccgatgggcgtcgcatgtacgctccaccaccttgaagatgtccaggtagctaatcttttcatcaatgaacaactccacagccttctcattagcagcactcaggacacctgtcatcggtacccca

SEQ ID NO: 55354 - DNA, 209 bp, Setaria italica
  Peptide Sequence Number=SeqID_121328
ataggcaaggtccatcgaagggtattttacattgtcaggagctttgaacgtcagtgaacccaatctgcattagccagttggaaatcaaatctgagtgactaaaaaattgcgaatatggcatgcttacaattcaagtgacttgtttgctagtttccttttaatttcttctacctttttgttgtttcaacattaccttaaaagaagcatta

SEQ ID NO: 55355 - DNA, 175 bp, Setaria italica
  Peptide Sequence Number=SeqID_121329
tgggcacatcgcctaccagcccacacttcatcttagagctcccactgtacaccatgatcacagcaacctctataggcatgcatatgtataatctacttatgcagggacagggctcaggccagctgatggttgtaggctcgctgcgtatctcctccgcccacagatcataatggat

SEQ ID NO: 55356 - DNA, 328 bp, Setaria italica
  Peptide Sequence Number=SeqID_121330
acctacaactagaaaaactaattaggtaataattagttagaaagggaatgcaatggaaaaggacttgacagtacttgtcaagtctacctttccaactgaaggtactcttccctttctagtgcggacactgggattgacgatgaccttttctgtacgcagtgcaacaggttgcataggatgcagctgttcctcaacaagattatcagcctttttcatatcaattacatgctcttttggcttcactgtgacaaccccaggagcagctgccatcgatgagtctgacttttgcccatctctcgcatcataaacaacatttgaagctgatgtt

SEQ ID NO: 55357 - DNA, 263 bp, Setaria italica
  Peptide Sequence Number=SeqID_121331
gctgcaggaggttgtgcggatggggctatgctggtattgaatgggttcccatccttcttaaagtttggcaagttgagtaacttcacaggcactggaccagagaaaagattgttttctatgttcctgtcgaattaaatcagttgtgataagaaaaccagaaatttcatttcattgaaaggccaattcagatgcccttcgagaaaagataagacataaaaactataattgaatgagcatacaaatcttggaaaggtagatcttga

SEQ ID NO: 55358 - DNA, 248 bp, Setaria italica
  Peptide Sequence Number=SeqID_121332
gcttgtcaaaagtgtaagtgatgacaatgtacttgggaggctaccacttagctggttagctgaaaggaaaaatttctgcattgtgactggtagaccatctggtatggttccgccaatattattgttgctaagatccaaggtgattaatgatgtagtagtaggatattctggccgaggcaagaacgatggaatacagtggcgaggatgcaagaatgcaccgtgcttttataaattgaccagagattcag

SEQ ID NO: 55359 - DNA, 376 bp, Setaria italica
  misc_feature (17)..(17): n is a, c, g, or t
  Peptide Sequence Number=SeqID_121333
ggacaggtcatctcaanattttcaggacagaactgcagcatgcgtctgcgtttagcctgtaaagtttccttcccttcttcaaagtccttgacgatgatatctacattcaatcttaactgtttcagaaaatgcaactaatattgaagcacattttcagtgtttgacaaaaaggccagacgaaatataattaggaaataccaagtggaatccattgctataattaggccacatcctacataattgcatataggacaattttaacacgggttcgaagtaaacatgtgcaagagggaaatgacaaccagctgactttttattttattagtcattctgctttgtatatgtacacttgtggagttacaagttactatggtta

SEQ ID NO: 55360 - DNA, 171 bp, Setaria italica
  Peptide Sequence Number=SeqID_121334
ctgaaagcccaccatcagtaataggacaggtcatctcaatattttcaggacagaactgcagcatgcgtctgcgtttagcctgtaaagtttccttcccttcttcaaagtccttgacgatgatatctcctatatcacagaactgaaattcaaagtctgtacaatgtttaattg

SEQ ID NO: 55361 - DNA, 417 bp, Setaria italica
  Peptide Sequence Number=SeqID_121335
acatatccctttggaatgagtcaattttccttccagtatctgaaaaattgtgctatacccttccatccaagcatatgagataatcatgaaagcactggaacaacagaatgttattgcgtccaacaagatagttgtgcaaggcagtgctccctgtgtagaattacatggaaaaaatcgctcaaacggcaaaggcaatccaattttcttattctactccaggaacaatggtagcagttgtttcaattggtatcccccagttccttgacgaacttatccttcagcaagccgttagagcccgccattcttcgcgacatcaggtcgaattctccgccacttggatcaaacacatggcccccagcttccttgaaggtattctactagtcttccttagttcttagttcttaacttatttccctt

SEQ ID NO: 55362 - DNA, 382 bp, Setaria italica
  Peptide Sequence Number=SeqID_121336
tccctgtgtagaattacatggaaaaaatcgctcaaacggcaaaggcaatctaattttcttattctactccaggaacaatggtagcagttgtttcaattggtatcccccagttccttgacgaacttatccttcagcaagccgttagagcccgccattcttcgcgacatcaggtcgaattctccgccacttggatcaaacacatggcccccagcttcctgaaggatcacagctccagcagcaacatccctagaggaaaattagcaattcgattgagatgcacaggcagatgatataagctactgttattaatttggttaaccgtaccaggggccaccaaatcccatctcgtaacacagatcaagcctaccacaagcaacaccac

SEQ ID NO: 55363 - DNA, 323 bp, Setaria italica
  Peptide Sequence Number=SeqID_121337
tacttcccaattcatcttgatgaatatattctgatcattctgcatcagtccccattttggtaactggctaacaacttgcagttgcatgctcgtccgcagcccaagtgagcatagtgttagtgttcgtcctgtactagccatttacatcagttatacgtcaaaaaattgctgtgcagcagcttatcattgaacatcctacagaagtggctatgttagaaagagaagaaattaaacaaatcctagtgacaagcttactctgcaatatacctcattgctttaactggagatcgcaagcacgtttgcccaataaatcgaacttcaat

SEQ ID NO: 55364 - DNA, 162 bp, Setaria italica
  Peptide Sequence Number=SeqID_121338
aactatctggcactcttaggtatggtataatccatttttcactgactagtggggtaatccaggcatttactgtatgttgatcaaagttattccaggcctaacaacttgcagttgcatgctcgtccgcagcccaagtgagcatagtgttagtgttcgtcctgt

SEQ ID NO: 55365 - DNA, 145 bp, Setaria italica
  Peptide Sequence Number=SeqID_121339
ctttgtatttgttgacaccagacatcaggattgaagaccatcaaagccagtgtacttctttgttgcgtgaagaccatcaaagccagtgtacttctttgttgcgtgaagaacagctcaggacctaaactaaggcgcagtttgtcta

SEQ ID NO: 55366 - DNA, 191 bp, Setaria italica
  Peptide Sequence Number=SeqID_121340
acctttattctgtcttttcgaattctgtactggatagatatgtaaacattcatgagaataatttgctttcagcaagcatgcatactattctggcttcttcaaatttatacaattgtctgtcgcttcattaaacaagacctcaacctgcttcaactccagttcagcagcttcaagttgtttctgaagctcca

SEQ ID NO: 55367 - DNA, 362 bp, Setaria italica
  Peptide Sequence Number=SeqID_121341
tttgctcatactcagagccaagtgaaattttttgagatggttctgttgagctctgtgtttcagtttgggcgctaaaccttgtctcatatagtcacatattctttcgacatctcaggctgttgatggtgaatgagacttcccatttccgagaggatgcagcggcaccttcttgttagtgattgtatgttgttatgccagtgaagtgtacatccgtttactcatctgttatagtgtacatgcgatccagattccagagacactcagactctgcagttacaagtttgtgctgtatgtatgaatactgtatatctttatcagcagtagtagtctgatagcatttgcatagaggtttttttaccttt

SEQ ID NO: 55368 - DNA, 256 bp, Setaria italica
  Peptide Sequence Number=SeqID_121342
ggacataaggatgtggcctctgcttttatgtttagagagtgaggttccatcatggttttggcatgaaaaaatagtattaacacaagaggatacgattttacatgctgaagttacccaaatggactattgcaaccaaaatggtcggaaaagtagttgtcatgtctagctgaatactgactcttaagtcttaatgcagatttaacttttgctatgaatgccaagaagtatatgatattttctgcaaaacacaaatgta

SEQ ID NO: 55369 - DNA, 228 bp, Setaria italica
  Peptide Sequence Number=SeqID_121343
gttgttttacgagtatatcattcaaaaaggtcatttgttgttttgcaagaaaatatcatatacttcttggcattcatagcaaaagttaaatctgcattaagacttaagagtcagtattcagctagacatgacaactactttccgaccattttacatgctgaagttacccaaatggactattgcaaccaaaatggtcggaaaagtagtattcagctagacatgacaact

SEQ ID NO: 55370 - DNA, 186 bp, Setaria italica
  Peptide Sequence Number=SeqID_121344
ggttacatatctgttggttagttgttcgacctagctgtgtgtctctaaaacgtggcatgtcccctgtgttgagtgttgacgtgagcgtctctcttcctagtatgtaaacactggaggtacctctcaactgaccatttcttcactgagacacgcaacaggagataggcaaggcacacaggggatagg

SEQ ID NO: 55371 - DNA, 268 bp, Setaria italica
  Peptide Sequence Number=SeqID_121345
tagtagttgagagagtccgtcgttagacatcagatcagtttgcattggtgcttcatatatcttgattaagttttgttccaaactgctaccataacaactagtggtagaaaaccgcgctacctttgtcgatgacgatcgggcggggggtggcggccttgcggagcttctcgagccccgtctccgggtgaggcccggccaccacgtcgtcccacagcttctccagcatcttcgccttcctccaacaaaggttactaccgcaccaccagcg

SEQ ID NO: 55372 - DNA, 389 bp, Setaria italica
  Peptide Sequence Number=SeqID_121346
gccttcctcgggcgtcaggagccccgagtgcatagtgatgtcggtcttgatgtacccgggatgcacgcaattcacgcgcagcccgggttccttcgcggccaggatcctcgagtacgcattcatggccgccttggccaccttgtatgcggcgaatgctaccggccacccgcgcgcgtccgcctttccggcctcgaagtctttcaggaacgtgtccagcagctcgtccagcctctcctcggtgaggttgccgacgttgttcagctcttgcttcagctcctcgtttctgaaaaacctgagcagcccgaagtcggaggaaacgttaacgattcttccattggaaggaaggacttagacaagaaagaaggactaagttaaaggtactttactta

SEQ ID NO: 55373 - DNA, 225 bp, Setaria italica
  Peptide Sequence Number=SeqID_121347
gtgcatagtgatgtcggtcttgatgtacccgggatgcacgcaattcacgcgcagcccgggttccttcgcggccaggatcctcgagtacgcattcatggccgccttggccaccttgtatgcggcgaatgctaccggccacccaaagctaacagggatgataaatcaagaaaggcagagcaacttcgtagaaaaaaggaaagtggacctgaaattagtcggactgtt

SEQ ID NO: 55374 - DNA, 223 bp, Setaria italica
  Peptide Sequence Number=SeqID_121348
actttaaagatacgctgatagggttaaagtatttagtgtgtgttcacaatgaacctgaacttggtgaaatgcaagaaatcattactgttcgagagttaccaagttcaggttcatgtgaacacacactaaatactttaagatacgctgatagggttaaaagtctttccaaaggtggcaacacaaaaaaggagcagctcactgtgcagtctgtagcatccggcaa

SEQ ID NO: 55375 - DNA, 184 bp, Setaria italica
  Peptide Sequence Number=SeqID_121349
agcgcctcaaggaacaggagattcttagccgtcaaaaaacatcaagatagttgaagctgaagaaaatatggaacagactcaagaaactagacctgttgatggttctaggaagggtgttgacaatttcatttccaattcttccatggaacctgagagaaactcatttagtatgattccaagctat

SEQ ID NO: 55376 - DNA, 309 bp, Setaria italica
  Peptide Sequence Number=SeqID_121350
taggtatttgtagggttgtctagtagtattctaactaagtagtcctttttggtcactcaaggaatgtattagggcactggataatgatcaaatacacattcctttcagaggaagcaagctaacagaggtgctccgtgactcttttgttggtaactctcgaacagtaatgatttcttgcatttcaccaagttcaggttcatgtgaacacacactaaatactttaagatacgctgataggtaatgctctttaactgtatcgatttttttgctgctttaaaataaatctagttatctagttgttaattctta

SEQ ID NO: 55377 - DNA, 164 bp, Setaria italica
  Peptide Sequence Number=SeqID_121351
aaggtaagaactaagaaataaacaaacaagaataaatagaacaaacaaaacgaaaggaattaggagggtgcagagatcaacaagagcctttggcactcaaggaatgtattagggcactggataatgatcaaatacacgattcctttcagaggaagcaagctaac

SEQ ID NO: 55378 - DNA, 282 bp, Setaria italica
  Peptide Sequence Number=SeqID_121352
taggactttagcaggctggttcccctcaatacaaacccagaacctatggaaaacagtgtgtcaaaatcttcatctacaaactttaatgttgtagagaccaccaagatgcgctgattcttcgcaaagaaatactcattgtactgtatataaactgatgcgttgacaagtgaagccacgcttatagagaattagagatgcctcctgataccatcagtcttcaatgattatagagaattagagatgcctcctgataccatcagtcttcaatgatcaagttgaggg

SEQ ID NO: 55379 - DNA, 406 bp, Setaria italica
  Peptide Sequence Number=SeqID_121353
ggaaatacaattttattgaacaaaccctcgtgtcatgatacctgatgactctcaaaatacatcctttgctcatctgacttgctcgctaaagccactgagctaatgagctgttctcagaccttacatttccctcaacctagagactagtctactatttcctaaaattgctccttgcacaagttacaaaggatcgtcacgaaaccaaagaagctgtgatttcactccatcacttaaggaaacgactaattgcacatgaccagcaaattgctcaggtggaatgctcttgttcacccaaagagtgatcggacttttagttaccgactacaaagaaccgaaagaacctaaccctaactaactttaacttaacttaagaacaaactaaccttaagtaaaataacgtaacgaa

SEQ ID NO: 55380 - DNA, 258 bp, Setaria italica
  Peptide Sequence Number=SeqID_121354
tccaaaagaaggattcttggattttttagaattgctcttgcaatggcaattctttgcttctgaccacctgaaagttgtgttccatgttcaccaactgaagtagataaaccctgaaaaatgccaaaacatcaagaaatacagatgttcaaatattctcccttatatagatctgtccaattctgcacattactaatggtatgtcttaggataagcggtcttctgacctggggcattttatctatgaatttggaggcatta

SEQ ID NO: 55381 - DNA, 363 bp, Setaria italica
  Peptide Sequence Number=SeqID_121355
ttgcaaacatgatataggcaggagaaataatattgacgaagaagacctcaaaggtaccgggcatagaactttcctttgctttagcaatggcgtcatcgacttgtttcctgatttctttctccatatccttgagctcagcaggagttgccaggtcatgagccaagatcaactttctaaccctctcaattggatcacgttcctgtctgacaccagaaatctcatccctggtgcggtaagtgcttcctggatctgacatagagtggccatggtacctgtaggtatccatctccaggacaattgggccattggcaacagcatgctcctttgcgaatttgcatgcttgcttcacagcaagaacatcca

SEQ ID NO: 55382 - DNA, 236 bp, Setaria italica
  misc_feature (1)..(85): n is a, c, g, or t
  Peptide Sequence Number=SeqID_121356
nnnnnnnnnnnnnnnnnnnnnnnnnnnnnnnnnnnnnnnnnnnnnnnnnnnnnnnnnnnnnnnnnnnnnnnnnnnnnnnnnnnnnagtaatctcaaccaacacttttctatttcttaggatcacatgagtcggcatgcaaatttatatcgcaacctgagtttccttggagcggaccaatttgccggccaattttctagcttcaatcaataagaagccagccaacagcagttaaact

SEQ ID NO: 55383 - DNA, 248 bp, Setaria italica
  Peptide Sequence Number=SeqID_121357
gtaagttcgtccttcgtccttttcttcatccaggaagttaaatttctcactgaggagcacatgttttagctcggagttcttgtagagagatgccgtcaacagtgtggctgtggcaaactcccgagattattgcacaccttgtgagcgcagattataaccatcctgaaatgatgcatcaaacgcagcggagctgggaagtatctccaaggctggacgatgatcctgatccttcttgaaaccaaaggtag

SEQ ID NO: 55384 - DNA, 334 bp, Setaria italica
  Peptide Sequence Number=SeqID_121358
tcaagtgctatatgcttcccagtgttcactggttcccacaaagatatttgcaatgtctgcctgcatttcaactggataagagtaaatcatggtatcttgtgatctgtcttggtaaagagttctcccagtatgctgagctgtatggatgctatcttttcaagtgcgagtaccttagtgcagaggcggcctgtaggcgatgcttttcagaatggcaaggccaaagagacacagaaccagggagcaccaaggacgatggatgcggctcttcggcacagatgaaggcgcaacgcaatgaggaccgtgccgacaacagcaggcaaatcctgcccctggg

SEQ ID NO: 55385 - DNA, 266 bp, Setaria italica
  Peptide Sequence Number=SeqID_121359
acccaggacgctgctcgcggctgggagatcgtccttgtcaatggcctgcccaactttgctcaacttgtagatgaggtcctgcaagtacccagtctcggtgcctgaggcgctgatgatcccttgcttctccaggcgcttcttcctgtcctccttgacgcgctccagcagctcgatgtcatcgtcctcctcgagcacaagagcccgtcgtcggggttcggtttcggttcggttcgttagttcggggtttagtttaacgtttacgttcc

SEQ ID NO: 55386 - DNA, 407 bp, Setaria italica
  Peptide Sequence Number=SeqID_121360
gcaaaaggtatactgtgagatgggtgcacttgggaagaaaacaagaagtctcagccatggtggcaagttgctgatgttgatggtttggcgtcccttgtcgctgaaagagcaatggaaagcattgtgaacaatgatcttccaagacctactcagacagtacgggttcatggagctgaattgaacagccctggaaacaaggttgattatgagttgccattgccaccttctggtaaagagccagatcctgtgcatgacactatgacatgcagctacagtgtttcaagcaacaccaacgagacaaattcatctgatgggggaggttgggaacagcagcgaagaaataatgtgcctgggtaagtgttcttcagcatcttgtttcacaatcaatcaatcacaaaatcagtttt

SEQ ID NO: 55387 - DNA, 240 bp, Setaria italica
  Peptide Sequence Number=SeqID_121361
cttatgcacatgaaaaatgaatcagtgaaggaagcaagagggtgaagttattcttagaacacattcatgctagtctgttgattcagttaagctgcagtgatgaattcatggtagcttggtaccttatgctggttcctgtatatatagggaggatttggtgtacatattaccagaccacccactgaccccctatgtacagcacacagataaacatcccatccatgctaccaacacgggcac

SEQ ID NO: 55388 - DNA, 173 bp, Setaria italica
  Peptide Sequence Number=SeqID_121362
ttaagtttcttctagtcctattggttggtctaagtttgtcttgattgttgatggtttggcgtcccttgtcgctgaaagagcaaatggaaagcattgtgaacaatgatcttccaagacctactcagacagtacgggttcatggagctgaattgaacagccctggaaacaaggtt

SEQ ID NO: 55389 - DNA, 196 bp, Setaria italica
  Peptide Sequence Number=SeqID_121363
gtgcaaaggaaaatgccaacaactgcgtttatgaggataaagagtttacagagttcaaagctttcgatcctttgtttcccaagcagcagcaaaaggtatactgtgagatgggtgcaccttgggaagaaaacaagaagtctcagccattggttggctaagtttgtcttgtattgtttgtatttggtttttggttctt

SEQ ID NO: 55390 - DNA, 442 bp, Setaria italica
  Peptide Sequence Number=SeqID_121364
agcaccatcagtcagggacgtcgacatgaatgcacaggggaggcacatcctccaatgattttagcttcaatagaagctgatgttgctgccgctgctgcacgcaacactcgacctgctcctgctttctgtaagagaccagcatggtgcacagcatgccgacctcctgggattgtgaactgaagaagggcaaaggcagcacaagcacggagaattagtgagggattccgaagcatggcaacaaatctaccaatctcagcaccactgcatctcaggtgtccagcttcatgtataaacactagttcagcaacctgagacagtgctgccgggctgaggaggtggcagccacagagaacatttgtggatctgagaaagtgagcacaaaggtttctatatgcttaaatgctattcttctagctcctcaacattaacactcttggaactg

SEQ ID NO: 55391 - DNA, 364 bp, Setaria italica
  misc_feature (353)..(353): n is a, c, g, or t
  Peptide Sequence Number=SeqID_121365
caactaacaggttctgaaaatgagggtgtaagacaagaagctgctggtgctttgtggaacctgtcatttgatgacagaaaccgtgaggccattgctgcagtgggtggtgttgaagctctggtttccctagtgcaacagtgtttgaatggttcagaaggccttcaggagagagctgctggcgcattatggggcttatctgtttcagaagctaacagtattgcaattggacagggtggtggggttgcacctttgctcacattggcacgctcagaggttgaagtaagttctgtttgcaatttatattatcaacaagttcgacaaatttctgtttatgtttgtatgcattctatacngaagaaatttg

SEQ ID NO: 55392 - DNA, 319 bp, Setaria italica
  Peptide Sequence Number=SeqID_121366
ggtttccctagtgcaacagtgtttgaatggttcagaaggccttcaggagagagctgctggcgcattatggggcttatctgtttcagaagctaacagtattgcaattggacagggtggtggggttgcacctttgctcacattggcacgctcagaggttgaagatgttcacgaaacagctgcaggggcactgtggaaccttgcattttattctggtaatgctctccgcatagtcgaagaaggtggggtaacctagttacttagtaaagacaatttagactacgtacaatacaagggtacaaaaaataggacccgacttaca

SEQ ID NO: 55393 - DNA, 225 bp, Setaria italica
  misc_feature (20)..(20): n is a, c, g, or t
  Peptide Sequence Number=SeqID_121367
ctttgccaggattgtcctcnggaacttgagcaccatcagtcagggacgtcgacatgaatgcacaggggaggcacatcctccaatgaaggtgcctttgttgatgggctgcatgtggccagtgcagaatctcaacagcttggcttgtgcagacagtgactagaggaaccttctagtcttattagggttagttagttccccttaaagttccgtttgttaagtttgtta

SEQ ID NO: 55394 - DNA, 202 bp, Setaria italica
  Peptide Sequence Number=SeqID_121368
cgatgaataggcttgttgctgaagaggctgctggtggcctttggaatctctctgtgggcgaagaccacaaggcggctattgctttatctggtggtatcaaggccctggttgatctaatatatcgttggtctgctggaacagatggagttcttgtatgaagcctttaattgtcaatttcttgaatttccaatttcacttccta

SEQ ID NO: 55395 - DNA, 216 bp, Setaria italica
  Peptide Sequence Number=SeqID_121369
ggaaaaacctgagtttgcatgctttgcttccagcaacgagctcaggtctgtacaacagttccactcattcactgtgcccctcagcctatgttgttaggcgttagctgccaaaggctaataccacattcgaggtgtacgagatcattactttagaagttaagttagtactaagtacttagttacttaagttactttaaattttagtttagttactta

SEQ ID NO: 55396 - DNA, 244 bp, Setaria italica
  Peptide Sequence Number=SeqID_121370
taaaacgactcgagcaagcggagagccaaaggatcagcatcatggaacttatgagaaaaaggaatagggtgcttcattcgcatgtcaattaaatattgcctggccctgtcactatgaatctgggtgttccaaaaattatgaaggagatcatcatctgaatgccaatgagccaatacaaaacgtttgtacaaagcagaaatcacgaagatataatcatacaggaaataactcgctcatttgtaaa

SEQ ID NO: 55397 - DNA, 390 bp, Setaria italica
  Peptide Sequence Number=SeqID_121371
gtcaaaaggtagaggaggtaggatgggtagttggtcagatctagtatggatcatacatggacgatagttggagtcggcggctctcctaggcttccctcatctgggatccctggggaagaggatcaagttggcccttgcgaatagcttgatggtacaagtctcttatcaattcattaacatctactaatataggggtataagtagatgctatcacacatacagtcatactcaattcgatggaattgttgatcttaaaggggatcttctataattttgcacataaggggttatttcttggtttcgtccagtcattaataacttgattattttttagataatagtagagtaacaagggacattttatatcagaaaatggttgctagatgaaat

SEQ ID NO: 55398 - DNA, 424 bp, Setaria italica
  Peptide Sequence Number=SeqID_121372
taggacttagcggtaaggaaataaacctaaggacaacccaagaagaacgaggaagggcgtagcaagcgacgaaatgcttcggggagttgaaaataagcatagatccggagattcccaaataggtcaaccttttgaactgcctgctgaatccatgagcaggcaagagacaacctggtgaactgaaacatcttagtagccagaggaaaagaaagcaaaagcgattcccgtagtagcggcgagcgaaatgggagcagcctaaaccgtgaaaacggggttgtgggagagcgaatacaagcgttgtgctgctaggcgaagcggttgagtgccgcaccctagatggctaaagtccagtagccgaaagcatcactagcttacgctctgacccgagtagcatgggcacgtggaatcccgtgtgaatcagcaa

SEQ ID NO: 55399 - DNA, 253 bp, Setaria italica
  Peptide Sequence Number=SeqID_121373
cgtcggagaaggggtcgggacgggcgtgggagcaggagtcggtgccggtgtcggagcaggggttggtgctggcgtcggagaaggggtcgggacgggcgtgggagcaggagtcggtgccggcgtcggagctggtgtcggtgcacgagtcggagtcggagctggtgctagcatgggtggattaattgggtcgttgcgattacgggttggctgtctaattgtccaggcggtaatgatagtatcttgtacctgaacc

SEQ ID NO: 55400 - DNA, 252 bp, Setaria italica
  Peptide Sequence Number=SeqID_121374
caaaaataactggatcagttgtgtacaatatttttgttgatggtgtttcagtaaggaaaaataggaactctagtttgatgataattatatcatctggttcagttccacgatttgcaatccttttccaacttgatacaagatgcaattctcagtacaatcataagatgtaacatcccgataaattaaactaaccaccatgcaaggtggcgatgaagggtctgctctcttgggtcaaggccaatctgatcaagg

SEQ ID NO: 55401 - DNA, 275 bp, Setaria italica
  Peptide Sequence Number=SeqID_121375
accaaaaacaaaagtttcatctttgcctgtgcactgaaatgatgtgctaatcttgttaccaaaagcggatgctgctccatcttgatgcaaatgatcagtctttaaagatttatgagctgataacagcggaattgagtcattcgcctttgcgctctcaagtgatttagagcttggtattgctgtacaaaagaattagaacttaggaataagactacaaaagtagaattacctttaagaaattaatacaaataaagtaccaattaaaataggaatta

SEQ ID NO: 55402 - DNA, 261 bp, Setaria italica
  Peptide Sequence Number=SeqID_121376
ttttgcattcaagaatggaaaacgaaatgattatcacataccagaagttacaaagcctcacctggactgcgagttctttactgctgaataaccatcaggggatgatatgtacttatgaactctctctagctcctctatgggattctttgctttgctatttgttacattcacacatttccagaggctctcatcttttgcaacaaatagtggcatatcatgtagtaacttcttcataacaacagcttcatgtcgaatggccag

SEQ ID NO: 55403 - DNA, 226 bp, Setaria italica
  Peptide Sequence Number=SeqID_121377
tgcacaatgttttttgtcttgtggctagggacttccaagtcctcaaagaccaagagctatacaaagaacttggaccagtaaactttaaagcaaacattatgatagcgaataatgaattctatgttaaggacttaaggtccaaacataatgtttgtagactaaaaagttaaaccacacaggaaaacattgcacaaaacatgtattgtcatatgatatactcatatct

SEQ ID NO: 55404 - DNA, 326 bp, Setaria italica
  Peptide Sequence Number=SeqID_121378
cttaagccctagccgccttacttcttttgtcagcttgattgcatggcttcgtggtttaggcccatgcatggtcgcaccaccacgaaactgttatattcttagtttagttgactgaactggcaaccgcgtagtgttccatgccgtgctcttccagttcccttttgcgcataaggctttcttcctgtgccactgacttcactgatagttttagttgagtgtgtcccctgctgtctttttgcaagctgccaccttactactcggtgaacaatatccttcctaattggaacatcaaaaacaatacaaccaattacctaaaaccctaatta

SEQ ID NO: 55405 - DNA, 253 bp, Setaria italica
  Peptide Sequence Number=SeqID_121379
acttccccgggctccgatacgtactggaaccgcggcatctccgcctgcgccgtctgcgacggcgccgccccccatcttccggaacaagcccatcgccgtcataggcggaggcgattccgccatggaggaggccaacttcctcaccaagtatggctcccacgtctacatcatccaccgccggaacaccttccgggctttcctaagtatttattgtctaggtcctagggtcgtcttcgtaaaacccctaaattct

SEQ ID NO: 55406 - DNA, 228 bp, Setaria italica
  Peptide Sequence Number=SeqID_121380
aggtagtacaattacaaggaccaatacctagaaccaacaatttacaaagactaacaaagtagaagttgctcttcacgatgagcaggccaccatcttcgcctatggatacagatagtaagactggaaaggatggaaaggagacggattcttcatggatttatggcccccctctccagctatggggcagtaatggaccatcttgtgacctcatcatttattctctcttca

SEQ ID NO: 55407 - DNA, 231 bp, Setaria italica
  misc_feature (16)..(16): n is a, c, g, or t
  Peptide Sequence Number=SeqID_121381
aatatatcaagagagngaaaaaatggtgctattcaatctttccttgtggcagtatgccctagtcacccagttgttgatatgctattcaatctttccttgttaagcatatcaacaactgggtgactagggcatactgccacaaggttttacgtctttctgctgcaactcaagatttacaccatgtacgttacaaacaacagaccttggtagatctactactcacactgagtc

SEQ ID NO: 55408 - DNA, 429 bp, Setaria italica
  Peptide Sequence Number=SeqID_121382
ttgttaagttaatttccgtttcgttagggttccttttattagtagtattcccaaaattagtgaagaaacattgcctgaacaattaaagggcttgcttgggcaaactgcaggagctctacaacaacttcctagccctataagagatgctgttgcagaggggcttaaattgccgcttagtggaacattccaacgcttattcatgatctcttacctggatgaagaaatactgattatcagagatgctgctggagcacctgatgtcttaaccagattggaggggccacaaccaaatccaattgatggcacagcagatgcagtgatatcagaatatgaaagctaaatgccacagcaccaactgaactccacgcatagcttttgttatggtttttcttcttcggttttgttcattttctgagtcttgcacataca

SEQ ID NO: 55409 - DNA, 247 bp, Setaria italica
  Peptide Sequence Number=SeqID_121383
ctgtggaagccaattaagcagctcctttcaagcatttgcctcgcttccatcctgctaactaagcccagaattagtgaagaaacattgcctgaacaattaaagggcttgcttgggcaaactgcaggagctctacaacaacttcctagccctataagagatgctgttgcagaggggcttaaattgccgcttagtggaacattccaacgcttattcttcatccaggtaagagatcatgaataagcgttgg

SEQ ID NO: 55410 - DNA, 221 bp, Setaria italica
  Peptide Sequence Number=SeqID_121384
aattcgtgcacggcgatcttggacgcacgcaccccagtatcggagccatatttgggtgcagagctgagattttgcaactcgacgtcactgatgttaagatggacttcctccaataggccatgctcaattagcacggatggctctcgcgggtgcccctgcaatctacactaacaggtcgccacccctgcagtcttctgcagataatgaggcaatgcagcatt

SEQ ID NO: 55411 - DNA, 233 bp, Setaria italica
  Peptide Sequence Number=SeqID_121385
cccagatggatgatgatgagcgttataaccgaaaacttgaagctgggctttacacattgcaggtattggcatcgtgacatgatagctttgtatctgatatgttttttcagcaagtgttggtttcattcttgtttaccttgcgatgcttctgaaccaagtctgcatatgtttcagctaattgcgcttattctgggacacatctggcactctgggaattcccagatgagggcaag

SEQ ID NO: 55412 - DNA, 337 bp, Setaria italica
  Peptide Sequence Number=SeqID_121386
ttgtaactatttttctagtcttgtctacgtctattagtcctttcctacttcctttcggtaggttctattcttgttgttccctttggtaattttgtagttttctattccccctatcttgctgaccctgcttcattgattctggtgagcttgaatctagagatgaggacgaaggggtcattgtcaaatgggagatttgccatggctccatggcctcgtgttctttgaactcctcacccccatttagtagaggaacggtgccatcaaacaccgtgtcacacttgcttgcctgatatgggactagcgcacctggatactgatgagggttcgatggatcctg

SEQ ID NO: 55413 - DNA, 335 bp, Setaria italica
  misc_feature (55)..(55): n is a, c, g, or t
  misc_feature (60)..(60): n is a, c, g, or t
  misc_feature (92)..(92): n is a, c, g, or t
  Peptide Sequence Number=SeqID_121387
ggaactactgttgtttgtttgtcagttgtccatgtcacctgaattatctagccanctcancttactaaaactcaagtgatccgagagtgaanatttggaccttttcagaagttaggcctaaaatcagccatcaccacatgcaggaatctaagggtacctaaatttgtgcatcaatccaaatgtaataaatacccatgtaaaataaataacagctactggaaaacacttaacagaagcatagcaaacagatctaaataaaccttagttccaagccgtttgttaaggggcttctttccacaaattagcagcatactctggttgaagcttggtccata

SEQ ID NO: 55414 - DNA, 390 bp, Setaria italica
  Peptide Sequence Number=SeqID_121388
atgggacagaaaggaccgaagctgtcagagcaaggactgcaccatgaatgctagctggcttcctgctcatgtcacgctacttgctcggtttatcagtgagccttccccataaaatcaaccgtcacaaaagctgttgcggagtttaagcgtacccatgccgacacgtggggatccagaaggatgcgttcacggaagacgaactggaggttcttcgtgatacatcatcatcctcgtcatactttgcttagatcaaaattccgattacagggtatgctctaataccgtgcgatgtatatgaatttgtgacagttgagctgccagtgttgctcatatagtataatcttgtatcatatttgcttttctccattattaaggctttggcttcgtaac

SEQ ID NO: 55415 - DNA, 362 bp, Setaria italica
  Peptide Sequence Number=SeqID_121389
aagaaactaacaaagtagtaagaagtaagtactagaacaagcttacggtcctttctgtcccatacgacatgcctagctggcttcctgctcatgtcacgctacttgctcggtttatcagtgagccttcccccataaaatcaaccgtcacaaaagctgttgcggagtttaagcgtacccatgccgacacgtgggggatccagaaggatgcgttcacggaagacgaactggaggttcttcgtgatacatcatcatcctcgtcataccttgcttagatcaaaattccgattacagggtatgctctaataccgtgcgatgtatatgaatttgtgacagttgagctgccagtgttgctcatatagtat

SEQ ID NO: 55416 - DNA, 344 bp, Setaria italica
  misc_feature (344)..(344): n is a, c, g, or t
  Peptide Sequence Number=SeqID_121390
taaaacaaaaataaaactaaaaagaaaacaaaaaccggaaaagttaaagaaacaaataacaagaattacggactagactagaaaatagcatggatcatggagagcaggctgacgctaaaaggatggaaacgatttttcatttcatgatcgcatctttgaagtctgggagatcttctgtgctactggacattattattgagctcttgtacgctgttctctcactacaggaaacctcaaataggacttatcgttgctcgctaaatcagcttttgagttgctgaaatggaggattctacatcggccttttctgaactgctatttcatctattctttcttcagttaan

SEQ ID NO: 55417 - DNA, 251 bp, Setaria italica
  Peptide Sequence Number=SeqID_121391
gcttataagcggaaacaaacagggcctttaacaaacaaaaataaatcagcatttgataattagggaatggaaaagtgtgcaatttgttaagctgatcagtatgttactaactccaatccttttttctatagctctcatcatgaatcgttgaagtgtcagaaagctattactgagctctttgtaatgtataatatatgtttctctggaatatcaaggagttttactttaaaaactctgaaagtcaagtcgac

SEQ ID NO: 55418 - DNA, 222 bp, Setaria italica
  Peptide Sequence Number=SeqID_121392
ggggagcggcggcaataaggaggagtgggaggaggtggaggcggtggcatgggaataagcaggtacttattaaaggaaagaactgatgacagtattctcctagcacttgttgtccgtgtcattgatgctttggtaaactatggcagcttggaatatctagaatggtcaagccatgttcaagcttggaagctagagtctgcttctataattgagcctccatgt

SEQ ID NO: 55419 - DNA, 272 bp, Setaria italica
  Peptide Sequence Number=SeqID_121393
cttcaaaatttggaatcaagtagtccaattaatgaaggataccaaacctccttcatgtcagggacttttcttgttgaggacagttcatattacttttgcatgcttgaaattcttcttggaaagttatcaaaacctttatttaatcaggtatcgcatccttattcaaatgttgctacacttccacgtccttatgaattccctatcatgcacatgtttcctttcttttgcaattgacagtccctgaagagaattaccaagtttgttaatgcaaa

SEQ ID NO: 55420 - DNA, 154 bp, Setaria italica
  Peptide Sequence Number=SeqID_121394
cacgctacttgctcggtttatcagtgagccttcccccataaaatcaaccgtcacaaaagctgttgcggagtctaagcaaagtatgacgaggatgatgatgtatcacgaagaacctccagttcgtcttccgtgaacgcatccttctggatccccc

SEQ ID NO: 55421 - DNA, 260 bp, Setaria italica
  Peptide Sequence Number=SeqID_121395
ggcaatggggaagcttacttcctacacattgcatgtgcccaaaaggcaaatattaggatggccaagccaagtatcttttttgaatctgcacctctcttttttttaatactcgtaactaattattctatggcaatacaaatgataattgtggtgttcatttttaggttgatgacaagaagacagtcgggctaaatgcttttgcacgaatagcaccttcatgcccaataatagctgacttagttactgtccacaatctgttt

SEQ ID NO: 55422 - DNA, 283 bp, Setaria italica
  Peptide Sequence Number=SeqID_121396
agaaccaaaattaagttggaacgcaacatgtgagagtctgctagggagcaaatctaccatttcaccaagaggtattggttgggagaatggcttgttgctccctagcaatacctcttggtgaaatggtagatttgcttgtggacgcttgggagcaagaaggcctgtacgattaggccagtgaagttcattgtttgactcagattaatctcttaattgtattcagaactttagatgcacaaaaaagctctaggttcttgaacgcattacatttcctgagctcgat

SEQ ID NO: 55423 - DNA, 244 bp, Setaria italica
  Peptide Sequence Number=SeqID_121397
ggcggaatcccattccgattcctcccgcccctcgcccttccgggccttccctccccctccccgccgtaggtggggggctagggtttgcgacaccgccggcctcctccgacgcggcagcggccccccggcgcccggatgctatgctgctgagctgcaggtccctcgccacctgggtgcgccgcctcgtcgcttgcatgggaggttgctttggttgctgtgctaagccaactcctataactgccgt

SEQ ID NO: 55424 - DNA, 309 bp, Setaria italica
  Peptide Sequence Number=SeqID_121398
cccggggcgaaagagggagtacccgccgccgtcctggtggtgttggtccctggcgccggcgccgccgccgccgctctccatgaacttcatgagcagctcacggtggctcacctcctcgtgctgctgctcatgaagttcatggagagcgacggcggcagccacggcggcgccggcggctacgacatgaacatgcagagcaccaagtccttcgcggcgcagctcatgagggacttcgtcgcctagctggtagcgtagcagcggtccatgccattaattaatcactccatccatcgattaatcgatttaggg

SEQ ID NO: 55425 - DNA, 244 bp, Setaria italica
  Peptide Sequence Number=SeqID_121399
catgtcgtagccgccggcgccgccgtggctacgacatgaacatgcagagcaccaagtccttcgcggcgcagctcatgagggacttcgtcgcctagctggtagcgtagcagcggtccatgccattaattaatcactccatccatcgattaatcgatttagggcttgatgaataaaggttcaggcctaaacattgctttacataagtttaaaagacaatagacaagttaaagacttaggaactaat

SEQ ID NO: 55426 - DNA, 262 bp, Setaria italica
  misc_feature (17)..(17): n is a, c, g, or t
  Peptide Sequence Number=SeqID_121400
aaggcaggggagacganccgggggcaccgttccacagccgccatgtcgtgcacgtggtggcggcgaggcagcagcacgaggaggtgagccaccgtgagctgctcatgaagttcatggagagcggcggcggcggcgccggcgccagggaccaacaccaccaggacggcggcgggtactccctcttcgccccggggccgtacgggcagttcggctcggagccgttcgcgttcgccgggaacggcggggtgtcgctgactctcgg

SEQ ID NO: 55427 - DNA, 216 bp, Setaria italica
  Peptide Sequence Number=SeqID_121401
cggccgcactgtcggctcccgcctccgctacatcgaccaccagctccggcagcagcgcgcgctccagcagctcggcatgatgcagggcggcgcgtggcggccccagcgcggccttcccgagcgctccgtctccatcctccgcgcatggctcttcgagcacttcctgcacccataccccaaggattcggacaagatcatgctcgccaagcaaaccgg

SEQ ID NO: 55428 - DNA, 398 bp, Setaria italica
  Peptide Sequence Number=SeqID_121402
ttctttcttgtccgtctaactaattggtattgggtctaattctagtctaccccaactactgaacaattcagaagtgatggagtggttatccgtggccaggcttatgggatccgtggtatcagagtagatggcaatgatgctcttgccgtttacagtgcagtccatgctgcccgagaaatggctatagctgaagggagaccgattttagttgaggccctgacttacagagttggccatcactcgacatctgatgattcaaccaagtacaggccagttgatgagatcgagcattggcgaacagcaagggatccgaatttccaggtacagaaaatgggttcaggggaacgactggtggtctgatgctgaagaatctgaactaaggagcagagtgaggaaag

SEQ ID NO: 55429 - DNA, 351 bp, Setaria italica
  misc_feature (336)..(336): n is a, c, g, or t
  Peptide Sequence Number=SeqID_121403
aagaaaataactactggtgaaagtgatttacccagtgtctttttcttggctggaatctgtggagcccaaatgtagtacagggaacctggtgttcttatgtggcgtggtttcacactgcaagagtttgcaaaccaatgctttgggaacaatatggattatggtaaagggaggcaaatgccgattcactatggatcaaaccgccttaactatttcacggtctcatcgcctattgcaacacagctccctcatgctgttggagctgcctactctctgaagatggacaaaaaggcgcatgtgctataacatacttcggagatggcggcacaagtgaggganacttccatgcagctc

SEQ ID NO: 55430 - DNA, 491 bp, Setaria italica
  Peptide Sequence Number=SeqID_121404
tctttgtcctattcctttgtaactaggggtcttggtttgtccgtctattgtacgttctattggccgagaaaggaggcaggttcacgttcttgaacccgcaagctccaccattgtcgtaggggccagcgccggttggcgcaccataccaagttgccctggcagccacccagtaggggtctgcggtgatgtgggaggcattgaagttgacgatcctagtgcatgagccatacaagacaaggaggaggaagatcagtgcaccaagtgcaatcaccttggacgaggcgatcatggatgccatcttactagctagatcgttagctgctagtactaggcaggcatgaagctctctgtttcgatggtcagcgcgagaagcaccttgccaggatatcctttggtaggggggtcacatggctctggagcaaacgcagagcacctgatgtcttttggtggagggttacatggctcggcttggtgctgggtgtcggctgtcc

SEQ ID NO: 55431 - DNA, 366 bp, Setaria italica
  Peptide Sequence Number=SeqID_121405
acgtctctgcgatggctgtctacaaggtgaagcttgtctcaccagaaggggtagagcatgagtttgaggctccagacgacacctacatcctcgacgcagctgagaccgctggagtggagttgccatactcgtgccgtgctggggcttgctccacctgcgctggcaaaattgaggctggctcagtcgaccagtcggatggatcctttcttgacgacgggcagcaggctgagggctaatgcaacagacaagacaaccaccatgcaagtttgatgccagacagttcacacaactggtaggaaggatggagcttgcttgacaacacacttaagacgcattgaccccttggcagactgaaaagacatagcc

SEQ ID NO: 55432 - DNA, 227 bp, Setaria italica
  Peptide Sequence Number=SeqID_121406
agcttcttcagccagggcatgaaggttccaagtctcaaggcctccaagaaacttgacgtctctgcgatggctgtctacaaggtgaagcttgtctcaccagaaggggtagagcatgagtttgaggctccagacgacacctacatcctcgacgcagctgagacgtcaagtctcaaggcctccaagaaacttgacgtctctgcgatggctgtctacaagcttcaccttgt

SEQ ID NO: 55433 - DNA, 225 bp, Setaria italica
  Peptide Sequence Number=SeqID_121407
cagggtgacggaaagcgacgcggcgcaagcgagaggggacgagggccagccaagggtagaccgctccgccgcctccgccgatctccgcgtcgccgccgcctcaggcgcgaggtacctgcctctaccttgctcactcattgtgtcaggtttcaagatgtcgaccagcacatttgcttcttcctgtgcgctcttgggcaatgttagaacacaggcctcccagacagc

SEQ ID NO: 55434 - DNA, 180 bp, Setaria italica
  Peptide Sequence Number=SeqID_121408
agagcatgagtttgaggctccagacgacacctacatcctcgacgcagctgagaccgctggagtggagttgccatactcgtgccgtgctggggcttgctccacctgcgctggcaaaattgaggctggctcagtcgaccctgagacacgcaaaggggataggcaaggcacacaggggatagg

SEQ ID NO: 55435 - DNA, 166 bp, Setaria italica
  Peptide Sequence Number=SeqID_121409
cccaagagcgcacaggaagaagcaaatgtgcaatgttagaacacaggcctcccagacagcagtgaagagcccttcatctctgagcttcttcagccagggcatgaaggttccaagtctcaagccccagcacggcacgagtatggcaactccactccagcggtctcag

SEQ ID NO: 55436 - DNA, 337 bp, Setaria italica
  Peptide Sequence Number=SeqID_121410
tcggtaattatttacgtttggtctatttgtttgtaactattacccttcttttaagtcgtagtactaacttattgaactagtgagtgaggaaatgagccttgatcattctaccaatgttttgtgtgtggctaaggtcaagggcagcatcaacctcatccaatatgtaaagtggtgcaggtttgaaaagaagcagcgccagaataagactaagagcgagaagggatcgttgccctccactaagttcagacagagactgcttccaaactgtcccaaatgctacacgaacttcaagaccatccaagaaagtaccaccttctggaggatcaagtttttgcca

SEQ ID NO: 55437 - DNA, 305 bp, Setaria italica
  Peptide Sequence Number=SeqID_121411
catgcggtttatctgtgagtcgcattccttcagtttcgaacgcccaacattgagctcaccttcagcttgatcatactcttgctttatggcagtaaccttgtccctttgtttttccaaggcttatgaaagtgagagggagaggctgatcatggagaaagatgcggttgctaatgagcttgctacgctagaagagccagttatcaacttcaaaggctcaattacttctctgtctgaaaccttggaaaacaaagggacaaggttactgccataaagcaagagtatgagctcaccttcagcttgatcat

SEQ ID NO: 55438 - DNA, 296 bp, Setaria italica
  misc_feature (81)..(81): n is a, c, g, or t
  Peptide Sequence Number=SeqID_121412
cattctatggtacctaactaaccgtattagataccagacttcaggttcccatcctatactgccttaattcatctgcatacntaattgtatatgctatcaatatctacgtcatctgattgttggaattattatttctttaccagcagggacattggatgctcttcgggaaaggatgaaaagcattcaagccgcagctgtaggtcatttcgatggatcccaggctcggccactggcaagtatgaacggaagtaattattgtcttcctattgcttgggactactaatttggtattggta

SEQ ID NO: 55439 - DNA, 257 bp, Setaria italica
  Peptide Sequence Number=SeqID_121413
ctcggcgcggttcttcaaacttgaatttccttaccaaaacacgtctctcccgctcttccttgtttgaatcccttatgttaaataatgccttggtgacaacaagaagcacatgcgagaatgcacattgactgctctagattcatgggttgctgctgcccaactcgacaagatggttccatatattatagtgactttgggtgatcagaaaacaggttcagaagggcgaaaagacctttttgattggttgtctaagcatg

SEQ ID NO: 55440 - DNA, 438 bp, Setaria italica
  Peptide Sequence Number=SeqID_121414
accctcttagtctttcctatttattccctacgtccttccttcctaattagtctagtctaatttaccttttctttcctaaaattttgcaccttctcctgttcatacaaaatcgattagtggcaaaacagagtctaacgaagatgatgccagcgctgaggcacaacaggccttcagaggagacgattctagattacattctatggaccaacaaaccgatagataccagacttcagcagggacattggatgctcttcgggaaaggatgaaaagcattcaagccgcagctgtaggtcatttcgatggatcccaggctcggccactggcaagtatgaacggaagtaatatgctccatgctgggacacaattggatggtgaaccccaacaacaaagtaatattccgcccattggtattgtaacgtagttctttctttatttctt

SEQ ID NO: 55441 - DNA, 268 bp, Setaria italica
  Peptide Sequence Number=SeqID_121415
cccttttacgtatttcttccattcctagttcttgtaaatagatatgaatgctctgaagaattcgatcaaggtcaacttcatagattgtaccctggacaaccttattacggagttacttctttggcttttggatgaaagagttcctcttatggatgatggcagtcaattactcaaagcactaaatgttttaatgcttaagatcctggataatgctgagcgaacatcctcttttgttgtgctaattactttattgaggcctttggaccct

SEQ ID NO: 55442 - DNA, 268 bp, Setaria italica
  Peptide Sequence Number=SeqID_121416
atgccatgagctaacccaggcggctgaccctgaaagctcagtgcttgaagatctcattaaggaagctgacagattagtttcatgcttggccgttatggttccaaagaccttcaattttagcctgtctggtgcatcttcaagatcttgcaaatatgttttaaatacactcatgcagacgttttctaaattctaaacgttctttgtcttcttatttgtttcttttgttttgttttaaggttttagggtttttacccttttttggttttta

SEQ ID NO: 55443 - DNA, 123 bp, Setaria italica
  Peptide Sequence Number=SeqID_121417
aagagcttgcagctgtcttcaagaaaattggtgataagcagacatgtacaattggtctgtatgaactctatcgaatagcccatctctgatataggttctaaatgcttcacttgcatttcttga

SEQ ID NO: 55444 - DNA, 294 bp, Setaria italica
  Peptide Sequence Number=SeqID_121418
gatcaaagggcacctcactttgtcaaagttgactgggacaaatgggtggatgaagatgatgacggtatgtaatgtgctctttgtagctcctaaattattggatactttaatggcaggtcatttactttgtcattcaggtctagtttcaaatcatacaagtttaagcagctgaacatgaattttgataaacagaaggcacataagaatttagttacttgataaatccgctgcaccttcggacagtgcatgagcagctgtatctagttttgacttaaaaaaatatttcacgagcag

SEQ ID NO: 55445 - DNA, 248 bp, Setaria italica
  Peptide Sequence Number=SeqID_121419
agaaccttgaaaggttgggttcgccattgtcatgggaacatgtcactaatcagattggaatgttctgctacagtggtatgacgcctgaacaagttgatcgattgacaagtgaattccatatctacatgactcgcaatgggagataaggtagggaaatatttgacatagtttctaactctgatttcttaatacatttctctgcaacggctgaatgacttcgacctacattttgttatgtttccttctat

SEQ ID NO: 55446 - DNA, 442 bp, Setaria italica
  Peptide Sequence Number=SeqID_121420
ctcaataataacattgcactacccaggggtactccggtcactaacattgcaggtgcacagcttgatgatgaggatattggggctgcaattcagtttctagaattctgccgcacattcgctgagatttagctggttactgtacccaaggttgtcaggatcccaatccggatattaggatcttacgatagtatgatcctactgagccaaagcgatcctgatcccacctgatttttcaaataaggaaaggacaatcagaaagaattcttcaagatgtagttggaggtcgtgaacttcggttggtatcctcagttgttgctgagtttcacatgaatttgttatctgtcattcaagaaggaaaggggaagaagcctctggcttatacaagagatggagatgcatgggtaattgatgttggcaaatatatcagtgaatcggcatttat

SEQ ID NO: 55447 - DNA, 249 bp, Setaria italica
  Peptide Sequence Number=SeqID_121421
tgtaatagcacaacaatattacttcaaggttttgtttgaagttattgtgcaataacatttaatttacttgttctagcatctgcaatgttacattactgacttgtaatatcacgtttatgtaattatgtcagagtatggtgatcatgagttaatggcaaataaagacaagtggtttatgtttactgaagatgaagagaaagtaatagaagaacatatagcaaggtccagacatcagatgagaaagcgtag

SEQ ID NO: 55448 - DNA, 250 bp, Setaria italica
  Peptide Sequence Number=SeqID_121422
tgcaaaatgatgtagctgctgaaccaatgaatgctgccagagaaaaagcccgcgccgcaaaagaaaaggaaaaagagctaaaggaaaggctaaagggcaacatggataaaacaatgctttcatccaatgaagcagcagcccttagcagtgaagaaaataaggaccttatttcccaaataaaggaggcacaggaagtcaagcgtacagccataaattgtcagaacaatatgactggatatatcgagatctt

SEQ ID NO: 55449 - DNA, 486 bp, Setaria italica
  Peptide Sequence Number=SeqID_121423
ccggtatcaaattcttacttccgaagttaccttgacctatcctatcatacaatactgcatagtccacagcttgccataattaaaaaccagacatttctaatgatggcacttgattggcattctctttgctgagaagcctgattgccataatacttatgtacaagttcattgatgcaatattaaaataccagtatgaacatatgtgcctgcaagtggaacaaccaaaaaacaaaaataacaagcgctaaagaaaaaattcaaggagtaaaaaacaacgcatgtcctcataagtgcagtccaactctatatgacaataaggaattactgcaacaatgaagaatactcacatgtatcactagcacaggacatctcactaatggaattttgtcgatattcttgtatatgtcaaaccagtatgtatgctttacaggatacatcactcttaagccagacaaaattggactatgtagaacaactgctctcaag

SEQ ID NO: 55450 - DNA, 245 bp, Setaria italica
  Peptide Sequence Number=SeqID_121424
cctcaccgacttcatcatgcccccaaacctgtcatacacaacacacacacacccatttcaccacagcagtcacgaaaccaaaaacacctcatccggcatgctattgaaaggaaacatttggtaggttggcagaggtgagctcgtaccggtcgatgcttttcctcggccgatcggactggtcgacgctagcccgcggcttatcggggtggtccacgctcttcctgctcttgtccctcctatccgtg

SEQ ID NO: 55451 - DNA, 162 bp, Setaria italica
  Peptide Sequence Number=SeqID_121425
cggttcgctgtccgtgagaagcgcagggatgcaaagagtgcccttaaaaatattctgctcaatggcagcccgtgtcaggaaagcttttccagttctgcccacgcttatttttgccatatggatttttccctggacaagaatgctggacctttggtctgccac

SEQ ID NO: 55452 - DNA, 173 bp, Setaria italica
  Peptide Sequence Number=SeqID_121426
caaaaaggttcgagtccatcagctgaaaaggcggaagatgatgtgggccctttatgtgatgagagatccttttttcaccagttataccaagtaatgagcaccctgccctaagatgatcattgcttgactgaaattgaacctttttgtgctcatgcctacattgtgtcgtgaca

SEQ ID NO: 55453 - DNA, 385 bp, Setaria italica
  Peptide Sequence Number=SeqID_121427
agatgaaatacctgagtcaccagatgtagctgaattatcagccgatgcttccatgaaagccttatcgttcttggtgtccaattcatcatcagagccttcgctgttggcatcgttgaatattgcaccaatgcctaccttcctattctcttttttggatttctcactggcttgttcataccttttacttgaaactttccgtactgcaactctataccggttagcattttgaggcgtgccctctgtgctgtcacttgacactagaggactcgtcgaaagtccttcacaaggttgcgtgcaggcttaggatttggagccacccttcccttgatagaattctattctattgtctttacttctttagtctattggggctttaatttagaag

SEQ ID NO: 55454 - DNA, 378 bp, Setaria italica
  Peptide Sequence Number=SeqID_121428
cgtcccgcacgcccgacctccccccactcaccggcggcgtttcacttgcggcggcgcggcggacggcggttcctctcctccccgccctcgacgggctgctctactggcagcgggctcaagtggggacgagacccgtccatcctccccttcaatttcgtcggcttatccttattcctttcatcctttgatcctttcctgtcctggtgagtaaccctaactgaccttctttcctaagatgaattcattgtttttcgagtctgcttttgattcatgtgaatgtgccctgcgaatctaatctaatacatccaattagttcttgattttaccaccttttctttctgtttgcaaaatcaaaggacgctcttgttctgttgcggc

SEQ ID NO: 55455 - DNA, 419 bp, Setaria italica
  Peptide Sequence Number=SeqID_121429
aaataacgaatagcatgatgttgtctacgcttagacaaagcattgcaatattttgcatgcacttagttctctctgcactagtacaccgtgctacgccgccttgatgaccctgaaggagtccatgactctcctgaggtcctcctcctcttcctgcatgaacacctgctccggcgtctgcaaccgcagcttgttctcgacgccgaggatcgacaggtagcgcccgtcccactccaggctttgcaccagctcatgttctcatcaaggacgaaggggatgatatctcgactgacatgttcccatcaaggacgaagggttctctgaagaatatgtccgcacccagcttccttgacttggatccagctcttggggtacaggaaggtgtagccgtcgaatgtgtcaatgtattcctgaatgcgccg

SEQ ID NO: 55456 - DNA, 258 bp, Setaria italica
  Peptide Sequence Number=SeqID_121430
ccgcaatcccgcgcgtgggcgatccgggttcgggactggctggttggttgggcgattactcggtcgattggttgatccggtggtgctcgattctcgccgcaggaccgaaccctccgcgcgggcccgcgagatggggcgcgttgagtagcgtgcggaggaggcggcgtgcgggtgggagccggcggcgagggtggggggcaatatcatggtgcagtgcctggacggggtgaggcagctgctcgcggtcctgctcaagtg

SEQ ID NO: 55457 - DNA, 366 bp, Setaria italica
  misc_feature (3)..(3): n is a, c, g, or t
  misc_feature (7)..(7): n is a, c, g, or t
  Peptide Sequence Number=SeqID_121431
ttntttntttagttttagtttttacctttattttggtttaggtttcggtttaacctttattttccgttaatttcttagggtaagtatttgatcaccagcaattagtgttgccatggctccaacttgaagaagaggaacagctttgctgagtgcacgtttggggaatggtggaggataatttttccaacacaacatgaatcccaggaaatgaggtttccagcatccgcttcatggtcattgcagtccccctgtacgagcaggaggcgcaaaatttcaagtcgacggtggtaccggagccaggtacatccacctgcggctccgcctgtgcagaagcgtcggcggcggaggggtcgccgggctggaagg

SEQ ID NO: 55458 - DNA, 385 bp, Setaria italica
  Peptide Sequence Number=SeqID_121432
aaaaatgccgcgatatatattttatattgcttgctacatcattttttatgactccatgttcataaatagagatactccagtactttgcggtctttgtatagttgacctgcgttccgcatgctcctctgaaccaggttactgaaccgagcgagcatactcgttagcaggctgtgcaaactccggtagtctgcagggagttgggcgcaagcctggcatctgcttcagttattacatagacatggtctaaaatgtacataagtgaggaaaataaagcctagagttcatcatctaagaccagatctttttccagattttcctcatcctgaagaaatactaggtaactacgtagtacaaccaaataagaagaactaacctaagaaagaaa

SEQ ID NO: 55459 - DNA, 322 bp, Setaria italica
  Peptide Sequence Number=SeqID_121433
ttgttacttaagtttgttagttagttacctattggtggtcggtaacctatttccgtaattcttaggggtaagtattttgtattctacctagtccatttagttgttgccatggctccaacttgaagaagaggaacagctttgctgagtgcacgtttggggaatggtggaggataattttccaacacaacatgaatcccaggaaatgaggtttccagcatccgcttcatggtcattgcagtccccctgtacgagcaggaggcgcaaaatttcaagtcgacggtggtaccggagccaggtacatccacctgcggctccgcctgtg

SEQ ID NO: 55460 - DNA, 252 bp, Setaria italica
  Peptide Sequence Number=SeqID_121434
caccttcctcgatgactgaaaggaccaagatttctcaatccaagaagatcctagctagcaacacgcacccaagcacagagcaggagcaaggaggggacgaggggggcagaagacctgaactgcgatttggaaagccatggagcgaacgaaactcactagaagcagccggatccttctcagcagccgcattgggtgggtgccgggggtggattggattgggaagccaccgccgctgtcggagtgcaggtcaag

SEQ ID NO: 55461 - DNA, 213 bp, Setaria italica
  misc_feature (179)..(179): n is a, c, g, or t
  Peptide Sequence Number=SeqID_121435
atgaggtgtcctcgagggtctcccagctcgagatacttaagaggcttcagattgagcagataggtcaactagaggagaaacacacagaaactttggagaaacatcgacttctgctagcaacccctttcaggctctggcggagaaccacaagtccagcctcatgatctgaaattttttgngtaactctatcttcaaattccgtcataaatgaca

SEQ ID NO: 55462 - DNA, 272 bp, Setaria italica
  Peptide Sequence Number=SeqID_121436
ccggggatttcactccgggaatatacactgaagattgcttgtttgaggatccgacgataaagttccgtggactgtctaggtactctcagaatctggacctgctggtgccgttcttcgacagcccttcacttgagctcgaaaacattgaaaagggtttgagggttgaaacaaggttcgtcaaagcgacatggaaactaaggacatatttgaggcttccatggaggcccttgattgcgatccgagggaacacaacctatgatcttaacgaagta

SEQ ID NO: 55463 - DNA, 335 bp, Setaria italica
  Peptide Sequence Number=SeqID_121437
tgcaaacttcagaatagctccgttcttgttcatgccagaagggaaactagccactgctataagttacacagttctgtggtacactcttctccagtatgaacatcatgagtgggccacagaactgtgtaacttatagcagtggctcactcatgatgttcatactggagaagagtgtacccgggatttcttgtttggtattggcgaggagaagcaacgttcagctaggcttacagcttggtttcacacaccagagaactactttattcaggaattcaggaagtaccaggaacaacttcaaacaaatagcatttgttcttcaacaaaaactaaagagg

SEQ ID NO: 55464 - DNA, 268 bp, Setaria italica
  Peptide Sequence Number=SeqID_121438
tgttcctagtatttgtcgggtagggtcgttgtctaaattattgtacacacaagctctcgtgggaaaccagaataccatcaagggcagtgattttttcaacagggtgtttggctgcctctttctcgacgagcaaacaaatgtgtcgccgttgtaatcatcacccggaagtccggaaggctgttgtaacttgtaatatcaaggttatcacaacatgacacgtataagctgtacaggcctgttgccaatgcgaaaggatgatggattgtct

SEQ ID NO: 55465 - DNA, 405 bp, Setaria italica
  Peptide Sequence Number=SeqID_121439
attcagatgctgaagcccgattatttaaaatctttgattggcagggaagcctggtctactggactacaaatgggttattttctgtagctcagcaattgtccctgagaaatggtgctgtccgcaagctgttgggattgccagatattagagctcaggttggttacagagcagaaaagtctcctcttgagggccctaagatgatgcagcggtcactgcttgaagatgctgacttgcaaacgaaattggcaccttctgataatggaagtgccagtgagagcgcaactcctatggaaggaaatatatccgagtccagttcacctgaggagctacttgaacaagcattacagtatctgggaactggtcgccgagatcaagctattccactgatcaggacagcagtagaga

SEQ ID NO: 55466 - DNA, 498 bp, Setaria italica
  misc_feature (219)..(219): n is a, c, g, or t
  Peptide Sequence Number=SeqID_121440
aaagatgtgttctaagaatggatcaccactgtatatggattaataactgtgttgggcacgagaactacaaggtctttctaatcttcgttttgtatgctgtgattgcatgcttctattctatggtatgtgccatcgtttattttcttgagcaaccaagtcttctcaaagattgcgcataaagttattcatgtttacatcaggttctgattatagggggtnccgtgcatttgcctaaagatgagcaaccaggcagcgattctcctagaacatctattattatttgcggggttcttctgtgtcctttagctttggcactgatggtcctattgggttggcatgtttacctcatcttacacaataaaactactattgagtaccatgaaggagttagagctatgtggttggctgaaaaggcgggaaatctttatcatcatccttataaccttggagtctatgagaaccttatttcggtgctaggtcctaatgtgttctgctggt

SEQ ID NO: 55467 - DNA, 382 bp, Setaria italica
  Peptide Sequence Number=SeqID_121441
tgtgaaaaaagggaataatctttgtgactgaatttgattagtcggagacttggtgtgctagattatcttcattgtaatactggggactgtgagctagtttaatactgggacatacctttcttatatctgctgtaattcccttttaacttctgattaaaatttgatgtaattgtcattgcagggtggtgatttgagatactgccagaaatgttcccattataagcctcctcgagcgcaccattgccgtgtctgcaaaagatgtgttctaagaatggatcaccactgtatatggattaataactgtgttgggcacgagaaccatagaatagaagcatgcaaatcacagcatacgaaaaacgaagattagaaagaccttgtagtt

SEQ ID NO: 55468 - DNA, 388 bp, Setaria italica
  Peptide Sequence Number=SeqID_121442
gcaccattgccgtgtctgcaaaagatgtgttctaagaatggatcaccactgtatatggattaataactgtgttgggcacgagaactacaaggtctttctaatcttcgttttgtatgctgtgattgcatgcttctattctatgggggtgccgtgcatttgcctaaagatgagcaaccaggcagcgattctcctagaacatctattgtaagtacccctggagggatgtttcagctaccagaatatcaaacactaacagaaattcacatctggagttatgattgaataagtaacacaaatttatatattgtacagattatttgcggggttcttctgtgtcctttagctttggcactgatggtcctattgggttggcatgtttacctcatct

SEQ ID NO: 55469 - DNA, 251 bp, Setaria italica
  Peptide Sequence Number=SeqID_121443
aggtagaacttggaggggcctggctggctgatgtcggggtagaacgggatggaatatgaggaagggcacatggacatgaggcggttcttgaggctcgcccaccggattttgatggtcgatgagcggggcatgacccagaagaccacgaaacaccagtggtcgtcaccgtcaactgccccgaccaggccggcctcggctgcgacctctgccgcaccatcctcgagttcggcctccgcatcacccgcggcgat

SEQ ID NO: 55470 - DNA, 247 bp, Setaria italica
  Peptide Sequence Number=SeqID_121444
tgatctgaatcgcccataaaataatctgaatgttgcagtccttcattgttcttcaagatgttgatctttttgttcaaacaagtagatggcaagaaggttattgatcctgagaaacaggaggttctgaggtcacgcctgaggtctgagatgctccatcctcttagagtgatgatcgtcagccgtggacctgacacagaactccttgttgctaaccccgttgagctatccgggaagggacgaccgcgcg

SEQ ID NO: 55471 - DNA, 244 bp, Setaria italica
  Peptide Sequence Number=SeqID_121445
attcctgatgatattgtcttcataccactaagttataaggtacacaagtgatggcaagttcaactactcagttcaaataatgtagtatgcgaactgaaatgtgtgcaaggaatctgtgctcgtagcctaaggaggggggagggggtgaattaggcaatctaaaaccttaacctatggctggaggtaaacttcctggaagatcctgaaagagtcaactccaaacaaaagtcctctgcaggcaatg

SEQ ID NO: 55472 - DNA, 122 bp, Setaria italica
  Peptide Sequence Number=SeqID_121446
aggaggtgaggttgagcgcggtgaggcggacggaggagacggtgaaggaagggtgctgcgggcggtacaggaggtagaaggcgccgcccgcagcacccttccttcaccgtctcctccgtccg

SEQ ID NO: 55473 - DNA, 277 bp, Setaria italica
  Peptide Sequence Number=SeqID_121447
ggacgggacgggacggcggggggtggggggggcttggccgtcagcgggtccgcgaggtcatggcggctcaagcagacgtctttttttccttttccgggtgagattgcgttggagatgtgtggtggaggcggcggccggtgggaagatgtcgatcctgtgggagaagagcgctgggtggcggtggctggtgcggcggacgcgtgactcgaagcccttcttcttcaccttcgcggcgctgtgcggcgtcgtcccgggcgtgataggctacggcgtgatg

SEQ ID NO: 55474 - DNA, 354 bp, Setaria italica
  Peptide Sequence Number=SeqID_121448
ttatattactgcacacacacacacaccaatgggaacgaagaaacaaagaatattattgtcacgagatctacatgctgtgtactgtgactctggaccggccacaccagagacaccctgctacccggggtgcctggctgcatggcctccgcgaagccctggactctatgtcttccagtcgcccgcctgtacaacgccctttgggtaccgtctaaatctttgtagctacaatgtgagtgagctcatctgagcggcggagccagctgtcaccgcagggagttcttcagcgaccgcaccgtcatcaacgaagactagactagaacgactacgaccctaccaacctaccgacgaaaccga

SEQ ID NO: 55475 - DNA, 204 bp, Setaria italica
  Peptide Sequence Number=SeqID_121449
agtaggaatacctacaatagtagtaatacctacttagacaaaatggaagaatctctctgttcttttgctccactagctcatcaagatctttcacagccagaagcagctcagagttggattcctgcatcttttgcagttgtacacgaagatctgcatttagattcttctcatgactcagctcttgcttcagttcttcaatctgtg

SEQ ID NO: 55476 - DNA, 271 bp, Setaria italica
  Peptide Sequence Number=SeqID_121450
cctcgcccgagtcctccacaggggtccacgccgacggaggccgccccaccagcggtggacctggacgccttcgagaaggagctcctgggcctcaccggcggcttccccggcggcgaggtcggcctcaaggacttcgtcgccaaagaaacccgaccgacctacctacctaccttaccaaagaaaataccgggtacccaaaacccaaagaccggacaatactaccgacgaccgaccgacggaccgaccgttaagtacttacccgtacttagta

SEQ ID NO: 55477 - DNA, 228 bp, Setaria italica
  Peptide Sequence Number=SeqID_121451
tgccagaccattagtatagccacgcatgtcattagatgggacatgatcatcatcaaatctgtgccttccacttgcagaagctcttgatgctacttgcttcctaagacgcccctggaagtgtggaacatgactgttgagtgaatttctgtaacggacatccctattgggcaaaattggctgttcttgagtttgcaaacaaatcattcgacaattacacagtagattctg

SEQ ID NO: 55478 - DNA, 368 bp, Setaria italica
  Peptide Sequence Number=SeqID_121452
ccctcccctaattttcttctttcgctgtaatgttttggtatatcagttcccttgctatctttggacatgttctagagcatcctctggtctatagttctctgatgctgggatcatatcatcatcattgtctctctgtcgcttcccagtttttttgcttcttcacttgctgatagggcaataggtcttttcctcgatgctgaaacatgattttgtctttgatcacttggtgggctcatttcatatggatcttcattggcagtaataccagttgagccttctaccaaggaacaaggttcaactggtattactgccaatgaagatccatatgaaccttgttccttggtagaaggcttcagatattttgaagc

SEQ ID NO: 55479 - DNA, 219 bp, Setaria italica
  Peptide Sequence Number=SeqID_121453
tccccctttccccgtccggccccgggccggtacaagacgaagctgtgcgcgctgtggagggggcgaggggcgggctgctcccgcccccaacctgcggcttcgcccacggcgaggctgagctccggaggccgcctccccgtgcctcgttccagcctcgccctcggcctgggaggcgagattacagagaccaagactttagagtcaggcctgagagaagac

SEQ ID NO: 55480 - DNA, 223 bp, Setaria italica
  Peptide Sequence Number=SeqID_121454
tctcgtccctgcctgcgatttcgctgcggattggagcggcgagggctcacttctccggcgagatctctccggccgcggcctgacgatgccggaggcaaatgcgggtgcgccggcgcatgcggagcagaggaagaagaattcgccagagatggatttcttcagtgaatacggcgatgccaacagatacaaaattcaggaaatcattggcaaaggaagctacggg

SEQ ID NO: 55481 - DNA, 349 bp, Setaria italica
  Peptide Sequence Number=SeqID_121455
aatagtaataattatatattgtgtcatacagactaatgttttctgagaggcagtcatcaatacagattctcatctccacctcatctcctccctcctcgcgcccaccgccgccccgctgctccgagacgccctcgcccgcgctcgcagcgccgcctactccccgcgcctccagctcaaggcgctcgagctctgcttcgccgtctccctcgaccgcctcccctcttcttcttcttcggcatcttcttcccaaaaggaaaagaaaaggaaaatgaatactccgagccccctgtggccaactccctcatggccgccatcaagcgctcccaggccaaccagcgccgcaaccccg

SEQ ID NO: 55482 - DNA, 267 bp, Setaria italica
  Peptide Sequence Number=SeqID_121456
taggtcggtcgagggagacggcgaagcagagctcgagcgccttgagctggaggcgcggggagtaggcggcgctgcgcgcgcgggcgagggcgtcccctcctcctcttcttcttcttcttcttcggcatctccttcccagaaggaaaaggaaaaggacaaggagaatggatgctccgagccccctgtggccaactccctcatggccgccatcaagcgctcccaggccaaccagcgccgcaaccccgacaccttccacttctaccacca

SEQ ID NO: 55483 - DNA, 260 bp, Setaria italica
  Peptide Sequence Number=SeqID_121457
atcgaagaccagcgggtctgcgtccgtgcgttgcacccgcttggtcgccctgcaggcctctgtgtagccctctgtgtgccggcaaacgcatcggtagtaacttctcgggtatttggcgccgaggaagttcttctggccatacttcttccaggagtagccgtcgtcatcaggcttgctcgtctttacattgcccctgatcattgacagtggtacgtaaatccacctgttgtcagcatcattgttccctttcttttttaccg

SEQ ID NO: 55484 - DNA, 331 bp, Setaria italica
  Peptide Sequence Number=SeqID_121458
cagaagaactgggaatgcccatggaagaccacactggaaccaattcacaagcatcatgtttaagctgatcaatatgattctgcaagtcaacacaggcagcctcaatagctatattcttctgacacagctcctgccattccattgtcagggcatggagctgtcctccagtgtttttgctggtggaacttcctctcacgattgacggtctctatcttttcattgtattcgacagctgtcttttgcatcctagacagaactgattccatttgtctgttctggagcttccaaacatcaacaccatatttcagcataagctcaagattctctatca

SEQ ID NO: 55485 - DNA, 322 bp, Setaria italica
  Peptide Sequence Number=SeqID_121459
agggggctttcgccattctttatggccaacatttgaaatgctacataaggtttcagtatcctgaaaagcaggaaggatctgataagattagagaaaggggcttgctctcactataaacagatctatcatgtctaagggggctttcgccattctttatggccaacatttgaaatgctacataagggatcctgaggtaacccttgggagacaaacaggagaggtacatgttgatatcgatttgggaaaggaagggaaggcaaataaaatatcccgtcgacaggcagttattaagctgatacgtttgttaaatggtacttctttg

SEQ ID NO: 55486 - DNA, 355 bp, Setaria italica
  Peptide Sequence Number=SeqID_121460
gtcagttgtctgatgcatttccagatacagaatttgataatcccattggaactatttcaactttgagccaagcagaaggatctgacagtgaaagtagcgttccaaactattttgacctagaagcattgatacttgatcatgacctgattccgtgggatcaagaatctgacttcatccaaccggaaggtaaatgtaaatggacgctgatatttccaaagtccatttttgttaaaaaaattgttaaatttgtcatgttatctgttatgttcttacagacattaaaaccgattcttttatttgtagactaatttaagaaacaaaaagaaaaaataaaaaacaaaaaaagtttaaaaaa

SEQ ID NO: 55487 - DNA, 240 bp, Setaria italica
  Peptide Sequence Number=SeqID_121461
cgcacgtagggttcggcgctagcggctcctgcccaagctggatgaatgaattcagaggagcagaggaggtagcagcggcaggtggaggaggaggaggagcatccataagctctgctgtccagtcgaggcagacctcctgggcctccctagacttcgagcaaccggtaggcgccggcgtgccgccgccggcagaggccagcaccgccgacatctccgcagcgcacgacgccggtgccggtg

SEQ ID NO: 55488 - DNA, 241 bp, Setaria italica
  Peptide Sequence Number=SeqID_121462
atacgaggaaagcctttagaatcccaggttgctatattgtgtgtaaaagttgggcaagctcgggaccaagggtggtagcttttcactctgccattctgtatttaccacgctgtatacactatccatgagaaacattgctctctaatggattgggtggtactgcgtgatccctcgttttggaggcagtttccctgtagaatcgaaaggaaggcgtaagaagttgcaggaggttggctatgtg

SEQ ID NO: 55489 - DNA, 235 bp, Setaria italica
  Peptide Sequence Number=SeqID_121463
caagggttctcaaaatgaaatggtttctatggatccagtatctaactcagatgtggccactgtttgggcatttgtactagtggtggccacatctgagttagataacagagaatcagtgtaaggatgttgatgaaatgaaggtggacaaaagagcctcactcgcatcagaacgggtgttggttctttgaggaatctcaactgattgggcgagagaaagaatataccaaaaattata

SEQ ID NO: 55490 - DNA, 221 bp, Setaria italica
  Peptide Sequence Number=SeqID_121464
caccgtgtggccaagaagatgaaggagctcagggccaaggtcgaggatgtgagccagaggaatgtgcgctaccgcctcatcaagggctctggatccaaggccacagctgccactgagcaatcaagcatcattgctgcagccatattcggtgttgatgatgcaaggcgtgccgacaaaagggaggagagtcagagagtggatctcgtccaatgatcaaacgg

SEQ ID NO: 55491 - DNA, 275 bp, Setaria italica
  Peptide Sequence Number=SeqID_121465
tgtagccgaactggccgtggccgagcaggcgtccgacctcgtagcgcgcctcgaagtccctctcgtagccgaactccacccgcacgggggccgccgccgccgccgccgccttggtcgcgccttcgggggacgcgccgccgcggcgcctcttcttgtcctccttggacgggcggcgctcggcggcgccggcgggggcagcggaggcggaggagaagcaggcgcccatgggtccggggctgggagctgagcatatggatgtgcgcggtgggggggcg

SEQ ID NO: 55492 - DNA, 248 bp, Setaria italica
  Peptide Sequence Number=SeqID_121466
ccggtccagtagttcaccaccctcacatagttccatcacaatatacacgtacgaatcatcctcaaatgcgttgtagaagtgaacaatattctcatgtcctttaagtgctttaagaatcttcacttctcttttcacatcctccacagcaacaggacgggtcatctgttacagaaaatcataatcttaattgccagaaaagacatgctctaacttctaaagatgatgtcaagtagacaatatggtgaagg

SEQ ID NO: 55493 - DNA, 236 bp, Setaria italica
  Peptide Sequence Number=SeqID_121467
ggacccacttttatcaatatcaattgcgtcaaactgatccttcagatctgctagctcttcctcattgagcgtactcgctaaagccctaagtgcaaactgcttaaaacggctgtacttgacaaactgacgcatgttggataacacagattattgttcgtactagggtattcttcggtattgtctttctttcctttcctttctttcttttaaccctttattttggtttattttgttta

SEQ ID NO: 55494 - DNA, 231 bp, Setaria italica
  Peptide Sequence Number=SeqID_121468
atggagcaaggatcatgtaaatcactcatagacatgaagcaacaagaaaacaaaataggaatagaaaattaccattctaagctcctctggcgtgatgtatccatcaccatccagatcaaatttgctgaaagcagcttggcaacgaatgccccacctttcattgtcgagctcggccatctgatgtatatggagagttgctgcaacgactctttgaagtccacaagccatcgg

SEQ ID NO: 55495 - DNA, 386 bp, Setaria italica
  Peptide Sequence Number=SeqID_121469
ttttactaagttaatactgtgtacttccttgcgaaagggcgaggcggcaatctttccctgcggtttgattctcttccgggttgctaatggctacggcagctgcggagcttctttccggccggcgaggtgtgcgttgccggcggcggattggtacctcttttcttcttgtcgacggaatcgctgatgttctttcaacggaatagaagcgttgtggtgccacggcatgggctgatgcagcagaaccaaagctttggagttcctcgataaggtggaaggaggtgatggccggactccggcgactgtctggaggtgccagcgacgaagatggagttgaggacattctggggtgtgtgcgtcatatatctttgaccagggtgtgcctcatc

SEQ ID NO: 55496 - DNA, 253 bp, Setaria italica
  Peptide Sequence Number=SeqID_121470
gtgatgacagagataacaatgttgacttgatgctctctaagtcctcaactgtatgtgttcggtggggaagctttgttcctagggaccttctcttcttacgcacattccagatataaagggttatcgcagctactacagcgacaaacactattggcaatataattccaagaagtttgccagctgaattgtttttacctccagcagtggccggcacaacatccgttgacggcgctggagcggccgcctcgccgtt

SEQ ID NO: 55497 - DNA, 423 bp, Setaria italica
  Peptide Sequence Number=SeqID_121471
cgtccccgcctcccaattcgcccatcgacgagcaggccggcggcaccggtgagatgtcccgccgaggaagatccgcagcgcaggttggcggcggccctgcgaaggttggcggcagcagtacttctcccgcagctccatctccggcggcagcgccaccgcagccccctgttttcccgtcggaattcacctgcagatgcagcaccgctgccggcgccaacgcagtggggctcgtcgtactcggaatctccaccaacagcaggtttgtggcctggatctagagaaagcagcggcccaagtcattccccacatggaaatcaatccgcaaatccatggtaagtttgccgaattaattttgtatgagtaggaactctgttgactatgcgatctgaactctgttcgtggtgatgaattggcatgcctttc

SEQ ID NO: 55498 - DNA, 443 bp, Setaria italica
  Peptide Sequence Number=SeqID_121472
cgtttatttcgttacttatttattttgttaggtttttagggttacttaatttacttttaaactaattaaattgggcatttcagttaaattgtaacatcacaactaaagtcgattcatacaataaatgtgtggaactgaaaagaaaaatcagtaacattgatcactactacagtagtacggaggaggtgttgacaacctgagcatggcagcaatgaatggaatgcagaattgaaaattgatgacatagttctagaatgtgttcataggtcactcaggagctaaaagtacatatttgaaatgtcagaagaattgttttcccaatatggtcccattaatctgtcacaactccatattgtactgtaccattgcatatcaagttaacaactagttgctgttttttccttgcccaactttaaccctgtccagagccagataagtccttg

SEQ ID NO: 55499 - DNA, 227 bp, Setaria italica
  Peptide Sequence Number=SeqID_121473
agtcgaaacacgtccaggtacttgatgagccagttcagcgccaacgtttgccagggccttggtgaggtaacaggacatcctgtcctcgagcttatccaatgcattgcactcaccatctgccagtgcagtatctatcgcactcttgaacttggtattacgggaagacccaagacgaatacccgaagacaagacaagacgaaggaagactacgaccgtaggaccgacca

SEQ ID NO: 55500 - DNA, 388 bp, Setaria italica
  misc_feature (204)..(204): n is a, c, g, or t
  Peptide Sequence Number=SeqID_121474
gggaagaggatgcaggcaactccggcgaggaacagcaccagctcgaacaccaggatggctgccatctggtggcagctccgcagcatgccgacggcgaccagagggcaaacaacccgccgattttgccgatggcggtcgcgatcccgacccccgtcgagcgaacggacgttggatacacctgcacagagaagtgcagaatttaanctcgcgagaaatactctgctgcatgagagtgagttgacttgtgtctataagactataactgctaaagcgtgttcagaaatacttccctgacctatcctctgctcctaggctaagtgttacttggaaactttcaacctgaaaactctgacctagaactaatattcaactcaaacagcttgcactt

SEQ ID NO: 55501 - DNA, 258 bp, Setaria italica
  Peptide Sequence Number=SeqID_121475
gcatggaagggcgggtaaatgccagtagccacctccaattcagtaccggtaatacaacccatgcaagtgaagcctccaatattgtgccaagggtccagaaaagggacaagacaatcatacaagtgccacgatttcgtgcaggaacaaattccaaaaaccaagatgtaaaaacatggctgccacccactcctgcgtccatatttgtcggaaacaaagccccaagaacaggcacctagcagcatgccagcaaagacaaca

SEQ ID NO: 55502 - DNA, 245 bp, Setaria italica
  Peptide Sequence Number=SeqID_121476
ctaaaagaagatcttgaatgatggatattcaaaagtacaagttgaacacacattggctgtgtgaatatattatctaaatttacttcaatgcctgatatatatggtatttgcaacagataacaaagaatgtgatattaaattaatctataacataagaagttgagacgaacctctggagcatacaaacataaaactgtagtgccacctgtgccacaggcacgagctccgaatagaagtgtagtagt

SEQ ID NO: 55503 - DNA, 242 bp, Setaria italica
  Peptide Sequence Number=SeqID_121477
aacaattactaattttagtaacaacaaaaggtagacgcggagactcaggtgtaagtccaaagaaaggaagcaagaggaagcatggaagggcggtaaatgccagtagccacctccaattcagtaccggtaatacaaccaaatccaaaatttactgaaaattcaattattttacttgctgcagaaagttcaagaatttagaccatgcaagtgaagcctccaatattgtgccaagggtccagaaa

SEQ ID NO: 55504 - DNA, 231 bp, Setaria italica
  Peptide Sequence Number=SeqID_121478
accatgaacgaagacgtcgctgctgctgtctgcgggtttattccgatctgaagaagaacagggttgagaagcagtccccctccaatgccgaagaggccactcagagccccagtgactaaagccgccagcgggagtgtaagtgacggcagagtctccattgtagctgtagctcccacgagctctgcctgctttggccatgtgatgtcacgctcagtccatgccgcttcaagc

SEQ ID NO: 55505 - DNA, 242 bp, Setaria italica
  Peptide Sequence Number=SeqID_121479
gccttgccatcctcttggctacagacaacgcgtttcttcctcttggcgtatatgatataccctgtgaaagccacggcggcgggtagctgggacgaagtgatgagccagtaggtgacgccgcagggttttatcctgatcacaccctgggaagataaggtcgagttcatcgacctgttcgaatcagccaaaataagcagtagcggctgttcagccagtctttttttttttactctctctgattt

SEQ ID NO: 55506 - DNA, 328 bp, Setaria italica
  Peptide Sequence Number=SeqID_121480
agacaaacaacttcctttcatgcattaaacttaccttcccaagtgcagtcttcattgccagattattagacgttgaaatgaagaggtttgctcaaaatgctctcagtaaaggttaatagcttatacaggtcttatttgttgctaggtagttggtaatgagaaggaaataaagagggcgttcataggttacatgggtttatgtagaaggcgactgcaccttttgtggtgagtgagcttgcatatgggaaacccatccatgaacagagcattataggttcattgtgtaaataaagaagcaacgcgtgttatgatatatttgtttttttac

SEQ ID NO: 55507 - DNA, 247 bp, Setaria italica
  Peptide Sequence Number=SeqID_121481
gcaatgttggtcgtgatggtcgcgaggccgatgccgaagatggcaagaaacgtcgtcaccggccctccgatgcgcccgaggagctcgatcgggtcggagacaacgtggccgaagatggcctcggtggcggaggtgatggcgagcccggcgaaggtgaacattcccatgaacactggcagcccggcctggccatcacactgcaggccatgcttatcttgatgaccacgtctctcttcatttcctttgg

SEQ ID NO: 55508 - DNA, 273 bp, Setaria italica
  Peptide Sequence Number=SeqID_121482
cgcagacggagtcgttccacgacgccatgtaccactccgccatcgcgtcccgcctcgcgcgctccgcctagggccagtaggccgccgccgcggggacgaggaactcgccggcgccgcgtgtacatagtagtagtagacaggtagtggtagtcgttgtcgaggaggagcgggacggggttccggttttagcgcgcgaccccgttctggtccatctccgactccgcattttaccgtggatgtacagatggtgctgtgatctcggcctaatgttgg

SEQ ID NO: 55509 - DNA, 150 bp, Setaria italica
  Peptide Sequence Number=SeqID_121483
cagatctacggcgatgtcggcgggtcgctctcgtcgtcgtctccacggccttaggcggaggagacgacgacgagagcgacccgccgacatcgccgtagatctggcgctccgtccgtgtgcgcctacaggcatatcatatacacatgtagg

SEQ ID NO: 55510 - DNA, 209 bp, Setaria italica
  Peptide Sequence Number=SeqID_121484
tggctcgagccccaggcgccggagctgcagacggacggcgaccccgagaactgcttcgccgtcctcgtcccatgctaccgccacggccgccaagagcagcctgggaggcgcgagggcaggtttctgggcgccggagccctggccgacggtggcctctctggtgagcacgctgatctgaaatgtcaattcaaatgtgctttcttcaaagt

SEQ ID NO: 55511 - DNA, 312 bp, Setaria italica
  Peptide Sequence Number=SeqID_121485
aaatggcacacattattcaacaacagatagaatttcacgaagagagactagctattgggacagatggcaggtgcaaaatcagaatattgaaattttctattcaactcctattccatcccagcttgccaagaaactccacgatgttgttatcggagctgccaccttcactcacagctcgtttagccttctccttccatccagtagcattctgctgatactccatgctcctctcgccatccatcacctcccttcacactaccttcttctaaccttccttcctttccttgtactaacgtccctttcctttcgttt

SEQ ID NO: 55512 - DNA, 380 bp, Setaria italica
  Peptide Sequence Number=SeqID_121486
caatggtgcaagagccaaggcaagagctgttcaatcaagtggctttcagtaaccacatgtgctctttccagtagaaagagagaatgagggagaaaccaagtagaggaccctacgcgatgacgacaggtaatgcagcaaagtttagtggagccatgtttgaagttctagctatgttccaagataactaggacacatatcctgcagaatttatatatctttctcaaaattcattttgaataattgtgtttgtttgcttgttttccgcatctgcaggaggaataatgctgtgatcgacggaggtagaaggtagcaccagatgagtttgtgatgttggacgtaatccatcccttgtctggtggttgtacggacctgcagtagct

SEQ ID NO: 55513 - DNA, 373 bp, Setaria italica
  Peptide Sequence Number=SeqID_121487
gcaagcaggagggcgaagagcgaagaggggaagaggcccacaaggaggctgaggagaagagcaccactgatgatgaggccccaaggggtacatccatgtgagggcaaggaggggtcaggcaacagacagccacagccttgcagagagggtgaggagagagaggatcagtgagaggatgagaatgctgcaagcactggtccctggttgtgacaaggttactggaaaggccttgattttggatgagatcatcaactatgtgcagtccttgcagaaccaagttgagttcctttccatgaggattgcctccatgagcccagttttgtatgggtttggactggacagtgatggcctccatgaccatgcacaaaagatg

SEQ ID NO: 55514 - DNA, 261 bp, Setaria italica
  Peptide Sequence Number=SeqID_121488
tcgccggcaagcagctggaggatggccgcaccttggcggattacaacatacagaaggagtccaccctccacctggtgctccgtctccgtggtggccagtaagtcttggggctgtcgagctgctgtcattcctgggttcacaagtctggtgcctgccttgtctctccaatggagattgtctgcgtgtcctgttgttgtgtcatggcaggcaccagacttgtgaacccaggaatgacagcagctcgacagccccaagacttac

SEQ ID NO: 55515 - DNA, 399 bp, Setaria italica
  Peptide Sequence Number=SeqID_121489
agaaggagtccaccctccacctgtatgttgtaatccgccaaggtgcggccatcctccagctgcttgccggcgaagatgagacgctgctggaggatggccgcaccttggcggattacaacatacagaaggagtccaccctccacctggtgctccgtctccgtggtggccagtaagtcttggggctgtcgagctgctgtcattcctgggttcacaagtctggtgcctgccttgtctctccaatggagattgtctgcgtgtcctgttgttgtgtcatggtcgagtcgtgcccgtctgatgtgcgtcttatgtcgtctggtggtgttttgtgaacacttgctgctgtgcagcagtttggttgaactatgtgatgaataagtgaaccctgaaattgctgtgtac

SEQ ID NO: 55516 - DNA, 226 bp, Setaria italica
  Peptide Sequence Number=SeqID_121490
cgaagatccaggataaggagggcatccccccagaccagcagcgtctcatcttcgccggcaagcagctggaggatggccgcaccttggcggattacaacatacagaaggagtccaccctccacctggtgctccgtctccgtggtggccagtaagtcttggggctgtcgagctgctgtcattcctgggttcacaaggcaggcaccagacttgtgaacccaggaatgac

SEQ ID NO: 55517 - DNA, 431 bp, Setaria italica
  Peptide Sequence Number=SeqID_121491
taatagacaagttagaccggtaccggaaggaagaataccttagaagacctacttactactttctgcacacaatttcaggctccagggtcatgacactggtacttctactcgtactgtagcaaatcatagcttttgccggcactatgttaggcacttaccttctgtaacgcggcatggatgtgcgccataagatcatgatctgaagggtcctgaagctccacgtgggtgctcgacaagcccttgatcactgatgtcggtgtcgtctcgactttgtcggccttgatgaactcccacaggatgtgcatcgcctcctccatgatttcctccagctcctcactggtgatgacatagttccccttgcgctgatcctccatcctgtccttcaagctgtcctcttttattacgggtacttgcaggagattgcggaggac

SEQ ID NO: 55518 - DNA, 398 bp, Setaria italica
  Peptide Sequence Number=SeqID_121492
taacagggagaggatgaggaagtttagaacatattgtgctaccagaagatgtatgcaatagatttcctacagctcagagggcctccattggggcctttggtgtctctgactcctccaggatcgtgggcagcccgattgaccgcaccttcttcagctcaagcttcagctgctctatcaggtcctggtgctcccacagtgactccagttcatcctcctcttcttctgtcaaatccttccacttgacttccggatcctctccttcctcttcatatatcttcgccttcccagtaactgaaatataggcttgtcgagcggcatcgtccatataatcatttgcactggcttgttcctcatcttctccggtctctgaaatgttcttggcttcatgaactactcca

SEQ ID NO: 55519 - DNA, 386 bp, Setaria italica
  misc_feature (310)..(310): n is a, c, g, or t
  Peptide Sequence Number=SeqID_121493
agacacatcatgttgcagcggctcgtcagcttgcttccagtaatgatttgtctggagcaaatgaagcaagcggagaggccaagtcttttgtatggggtgcaattccgaactcatcaactaacatatcctttgatgtcaataacaagaagccatactgcagacggcttgacaatgtgccccctaatgctgaaacaatggtttacagagaatctattcaaaataggcatgtcattgatctcaatataccacaaatgccttctgattatgagtcaactgtgagctacattgccctctccatctgacaaaaatntgcaaaccatggctaggcctccacgttcttcaggaactgaggaggtggctgaccaacttccagacatggatgcctc

SEQ ID NO: 55520 - DNA, 205 bp, Setaria italica
  Peptide Sequence Number=SeqID_121494
atattcaatgagggaacatctacttttgtagcagtttattttgtaccttaaggtccacagttggtgctcaagttcttgtacaggcagttggaattggcaagggaaagtatgacttgactggatttgcattagatcctagcagaaatcatggtatctcaacccgtccggaaatcccagttggcaaggcttgctcagcgctttcatc

SEQ ID NO: 55521 - DNA, 239 bp, Setaria italica
  misc_feature (10)..(10): n is a, c, g, or t
  Peptide Sequence Number=SeqID_121495
ttcctctganctttttctgacgcatggcgagccttttgttccctttgctgcttgctttcctgcatggaagtgtctgagctttctgagatagggctacctgccatctcctttgccttgctctgttgtctggtgaaccctcttctcctgctgctgcgttcgtattccaatgtttgaagaagagaagacgactgatgcgtccaggcaagagagctccgagcaaggcacatacgaaaaagaaa

SEQ ID NO: 55522 - DNA, 242 bp, Setaria italica
  Peptide Sequence Number=SeqID_121496
tcgtaggttggtctaaaaacgtaactactaatttttcggtagtctaactaaaagtattgtattgtaacaagtttgattcggccacatgactttcatttatcagatgtggtgtctagaagcattggaaactcaaatagaactgagatcatatgctacgtcagacgcaaacacaaaagaaagaaggattcacagtcaaatactgatagttcacaaagtcttgggaattttatccgctccccgtg

SEQ ID NO: 55523 - DNA, 271 bp, Setaria italica
  Peptide Sequence Number=SeqID_121497
acacataaatcaatgagatccaactgcaaaatgaaattattaagatcaaatcacggattttgtcctgcaaacggtcaatgatgatcgaaaaccatcagccacctcaacatagcgacgccggagcaagctgtagaaaagttgccctttttatgcaccctggacggttactttcttccagttcggtctagggcggggcggcggcggtccggcgaaaggccggcgccggcggcgagcaaggagactttggattggaaacggcggacgaggccag

SEQ ID NO: 55524 - DNA, 252 bp, Setaria italica
  Peptide Sequence Number=SeqID_121498
catttacatactcttcagctatgctcaggaggtcctccacagtaagctctacatcatcatcaactgatactggtgatgatgtttctgatttgatattctctagtttgcgtttcctgttattctttggagcagctccttcgctcacttttcttcctttcttaataggtacatccccacagcatcaaccaaagccagaggatttccttcctcccccaacaaatccctaaacccctcctcctcgatccccaccgc

SEQ ID NO: 55525 - DNA, 304 bp, Setaria italica
  Peptide Sequence Number=SeqID_121499
gggcagttctccattcagcaaggagaacttgagttgtttatttgatctatttaacactgtactttctaagttacccataactcagactgagggattgtggcacatggtatgtcccttagaatttcctatgatgatagtatctgcagttttgttttatctctctaattttactgtctgaaattttcataacgcatttcaggccatgaaattgttttctaatgagaagatctattttgagaagctggtgaagtgtgcgatgctatcattaagtttggcaggtgggagtgatttgggtgcgtcggtt

SEQ ID NO: 55526 - DNA, 248 bp, Setaria italica
  Peptide Sequence Number=SeqID_121500
caactatcatacacttgcaccattttgttagtactcgtgtatttggtgtgtttgttacatttctttttttgaagtgccatgtatgatacaatcgatgctcctttattttgctattgtttatttctatgttgactttgcatctcttatttttgcaggctggttctcagcaaccgttcaatgctgcatctgctgtagtgccatcttctgttcccgtgtcttcaaaggtatcttcgattaccaccaaacaa

SEQ ID NO: 55527 - DNA, 209 bp, Setaria italica
  Peptide Sequence Number=SeqID_121501
gtttaattggtagatttacagagcggtgccgcacaaaatgctggttctcagcaaccgttcaatgctgcatctgctgtagtgccatcttctgttcccgtgtcttcaaagatggaagtgcaatctcagctgctggcaaaagtagtaacctatctcttgatgctttagccaaagctaaaaaagctttgcaactgaagaaggaactgtcagag

SEQ ID NO: 55528 - DNA, 243 bp, Setaria italica
  Peptide Sequence Number=SeqID_121502
atgactcgtcatgtttcaatgatctcaatttccttatcgcctaaggagcttaacaagaattcacctgggtatttcgtttgtctcgcttcctttcccagaactagattgtttctatgagcacagcaatgtttagtgtatttcaaagtaatgttgttgctaatttgcaggtatcaagctcctctgcattctgaacaagttaagccacaaagataccagcaacctcagcaatatcaacagcaccag

SEQ ID NO: 55529 - DNA, 495 bp, Setaria italica
  Peptide Sequence Number=SeqID_121503
ggaagtctaattatcggtatgagtatgacaaatgaaaaatgagtaaaattatgctgttcccttttaaagatttggtccttgcttgcatgaaacctcacctgtaactaagtaaaactgaggtggctttgtgcatgagccaatgaatcggacaatattgggatgatcaacttccctgaaaagaagtgtggaaggtgaaggctaggtatatatatggtgcttgcaacagacaagctggttgaggtaatcgcatgcccaattatgctattgttttctgaccatagtatagtcaggatgtataacttcaagaagtgcacataacaatcataaccgaacaagtcttatcatagaaatgtggaataccttaatatgtagatttcttgcttaaattcactccatgcattttggtccaaattctcaggattaaggattttaacagcaacctcctcaccaccataagtcccaagaaacatagccccacaagatccagaagcaacc

SEQ ID NO: 55530 - DNA, 265 bp, Setaria italica
  Peptide Sequence Number=SeqID_121504
atgatgactacaatcaggtgagtaccgctgaattgttttgctggggtttctgttaggtagaacaggggatcttggtttgtggcttcagaaatatgcataattcctttttatatcactttgatacctcataccttgaacttcaacctgtagaatattgagtttgacgacgacgacgatgattggaaccaagcggaagaagcacatgaagactactatgattaagtacggatggccagattttgctttttttcttttcttttcattt

SEQ ID NO: 55531 - DNA, 214 bp, Setaria italica
  misc_feature (214)..(214): n is a, c, g, or t
  Peptide Sequence Number=SeqID_121505
aattacgcaccattagctgatgtgtaaagtttccttcaaatatatgtgccaagagagcagcatgcattgtcctcgttgtgctgttgtgctatgtacttgtcgaattcccatgggtcagagactcactttgcctgtaaagaactttctcactcatggaaagggaaaggtttatatgtttaagcataataacttaataatttgaagaaaaaaaaan

SEQ ID NO: 55532 - DNA, 336 bp, Setaria italica
  Peptide Sequence Number=SeqID_121506
gtttctagaacatagtcaaatcatacagggctgagaatgattgaagatattaattcttttctaccttaatgaaatgacacgcagctctcctgcgtaattcagaaaaaatattttatatggaaagcttgactgtttgaacctgccatttggtagttccaagagcagtaatcacatctctctcatactgtatcggagcatgaaactttgcatctgaagtaccatcctgcataactttcctttcatgcaagagcaggcggtagacgccctccatcctgtcggcggagtcctgcacgcactcggcggcggggaagagcggatccgcctcccaccgtccct

SEQ ID NO: 55533 - DNA, 204 bp, Setaria italica
  Peptide Sequence Number=SeqID_121507
tccgctatagctctaatgaattgtctaaattttaagattgcattttctctcgactttgacttgtcagagaatgcagctgcattcacctccctctcaaattgctccaacttaatgaaatgacacgcagctctcctgcgtaattcaagaaaaaatattttatatggaaagcttgactgtttgaacctgccatttggtagttccaag

SEQ ID NO: 55534 - DNA, 292 bp, Setaria italica
  misc_feature (292)..(292): n is a, c, g, or t
  Peptide Sequence Number=SeqID_121508
ttcaatcctgcaatgctgctattgtgagacgaatgcaaacaagcagcttttcaatcctgcaatgctgcttgtttgcattcgtctcacaatagccagactagtacatctgagtgtaccaaatgttgatcagtttatcaatcttttgctttctatccctgcccagggatatggcaattcacttgtttaatattatgtcagcatggtcagagctacaaggtgaaattcagggagcctaccaaataaaggtaactacaactgcattagctcttctcatatcaactcgtcatcctgn

SEQ ID NO: 55535 - DNA, 366 bp, Setaria italica
  Peptide Sequence Number=SeqID_121509
ccgtgtgatagcactgtctctgctacctccaggagtggaactctcagggccaggagcctttcactcctgggttcgacatcccagagtcagcagataccgcattgctattcgcaggctgcaccagcttgggctcggtagaattcccagcaggcacttcattcacttcaaagtaactgtcgattccagcgtcatcgaagagttgctctgtttgaatatgagaggtaccaaataattcttcataattttcgaatgcaaggtcaacatcatccacacaaaaaatcttcatatatgctgtccttgctgaacatatctttatctggcgtatagggcaccttaggtgttgttgaatccacagatccacttgct

SEQ ID NO: 55536 - DNA, 318 bp, Setaria italica
  Peptide Sequence Number=SeqID_121510
gccaagctggagccattccacaggctgacatgggagcaagttggtcttattgttgaaaaggcttgttagacaatgttttgagcgactacctgtgggcgaaagcggtccttctcacaacaactacagtcgctacagctggcctcacaattcaagtcccaattgctgcagttgtcgacacgctcactggtcatgctccgcatctgctgaactacgtcggagctgctagactaagtaaactaaggttaaaggttttaaagaaaactaaaagggaaaaaataaaaacaaaaaaacaaaaaaataaaaaccaaaaattaaaaa

SEQ ID NO: 55537 - DNA, 283 bp, Setaria italica
  misc_feature (13)..(13): n is a, c, g, or t
  misc_feature (28)..(28): n is a, c, g, or t
  misc_feature (178)..(178): n is a, c, g, or t
  Peptide Sequence Number=SeqID_121511
cttagtttttttnttttttttttttttntttttttttttttttttggtaaatggcgatgaaattgaaaccccgccaacagagctttgcttgagcacgtacagctctttattacagaaacagtataggatacgaacgatgtgccatcaagcataaagcagcaacacttatttcttttcncaaagcaagcaagaacagaactggtcatcaaagaagttgacgggattcattcattcagatggccgccgcggtcggtgtgcagcggcgcttgcaagaaagttaaga

SEQ ID NO: 55538 - DNA, 256 bp, Setaria italica
  Peptide Sequence Number=SeqID_121512
cgtcgtcagcgaccgccgctcctccctcctccccgctccctgcggccaccaaagattagtcgacgcatccagttgagttgagttgagtgtcaaactgttaatttctcacctttgctgaggagtggcagagttgcgaggacggcgaggacagccagtgtgacgagcaacacctgtggtctcatgctttgtttctcttggtatgtaggaatacagggtgttgccaggtttgttgtggttggacttccttcctactgat

SEQ ID NO: 55539 - DNA, 485 bp, Setaria italica
  Peptide Sequence Number=SeqID_121513
catattcgcggcgacagttatttgacaagtgagttgaactagtaattatgtataaaaagggtgcatgcatgcttattattaacctttacttgtgagtggcgatggtggtaaccttgtttcttataaaatttcaattttttactatctcccttgttattgcacttgtgccattcttcgttaataatggtttatgattttcgaattgtggttcactcttgttcactgaacactagaaaatgtgttcttttgttaattgttcttatagaagactcatagcactcctactagggtaaatgagctgattgctggtgtgaaatctgtgaatggccaaatatttggagacccaaagggtttggagctgagcctgcatgatctccatccagcctcttggtctgttgtatgctctctacttatattggtgcgtgctattatcttgttgctttgcttgtatgtagatgtgtaaaactcgtcttgaattccaggta

SEQ ID NO: 55540 - DNA, 202 bp, Setaria italica
  Peptide Sequence Number=SeqID_121514
cccctccctcagcagccagcagccaagcatcaatctatcggtaccgtgaaaggaagaactcgtttgtacatatgaccgatccttttgtaagataacaactactagtgtagttagtgttgactgttggctaccttgaggctttgttatggtgcaagtgcaagcgctggatgatgatgatgatgaagcccaaatgcagatgatc

SEQ ID NO: 55541 - DNA, 228 bp, Setaria italica
  Peptide Sequence Number=SeqID_121515
ccccaacgtctgtgctcttcagcttcatggtgtgaagcatgggctacctcgagagactctcagaagcgtttcttgccggattcgcagatctacatacctacaccaacgtggtccaaccatcacaatatttggagggatgctcaagtgccacagaagacattcacatactaccatccagagtcgagagggcttgatttttcaggattgatgaatgatatcaagaatgct

SEQ ID NO: 55542 - DNA, 212 bp, Setaria italica
  misc_feature (95)..(95): n is a, c, g, or t
  Peptide Sequence Number=SeqID_121516
ttttgttcatttcttttccttttatccatcttctcatgacaattctcaaactagctgcaaaatggctgtagcatgatttaaggtgttaataaaanaaaagcggtggaattgagaactaaatcagatcgaactctatggttctcattcttgtgaaattctccgttggacagccccaacaggctcaacttatctcgaagaatgataatgttaat

SEQ ID NO: 55543 - DNA, 222 bp, Setaria italica
  Peptide Sequence Number=SeqID_121517
gaatgctccagatggttcattctttttgctccatgcatgtgctcataaccctactggtgtagatcctacagaggaacaatggagagaaatatcgcatcagtcctgaaaaatcaagccctctcgactctggatggtagtatgtgaatgtcttaagtgccttccgcattccaatgatacgatcagccatacccttgacctcttttaaccataaactcttcagct

SEQ ID NO: 55544 - DNA, 119 bp, Setaria italica
  Peptide Sequence Number=SeqID_121518
gcttccaagcagcttttttggttcctgacatattaacattatcattctgattagtaatgtgctcccacgacaaaggtgaacctaggttttcaagattttccttaagtgccttccgcatt

SEQ ID NO: 55545 - DNA, 404 bp, Setaria italica
  Peptide Sequence Number=SeqID_121519
aagctttgtttagggaaaaattcctaaagcagagcattgaataacttacagactcaacaaaatcttctgcgatgtccataagaacatcttcaacttcaggatccagcttttcgttaggatcaatctgtcaagtattgaatggtgtaaaatcaacccaacaaatgtctattgttcactattcgcaacattaactactatttactaaccactgtacttccacatatgttcaagtatcattgaggcaaaaatttagtgcaggtcatcagaagcacacgaatataatgtgaattatgaagtgaaatcacagccagttacggtaaaatgaattctactttgtcctataagatgatgaagcaggatatgctgcgataaagtatactttaagtttgctcctgtaaccatat

SEQ ID NO: 55546 - DNA, 406 bp, Setaria italica
  Peptide Sequence Number=SeqID_121520
taaaattctttcttgtcgtattgttcctattaagtaactattctttctaactttcaggatccagcttttcgttaggatcaatctgtgcaactaattcatgtatgcttctcttgttgagtagtcgagtgccagtttcactaccatctgcatcagttgcagctgtatccgcagattgcaaaaacagtagcttttgctatagcaggcgaatcaggcttctgtgccattgtcactggagtacgagcagcttgctgctgagaatgctgttgctgattttttgggtgttgtattctgttgagtttgttgcgaggaactttgctgctgttgctttgctgctgctgctgcaaagctgattgtgtggtagttgctgctgctgtgctgaaattatgttctgttgatgtggagtcac

SEQ ID NO: 55547 - DNA, 358 bp, Setaria italica
  Peptide Sequence Number=SeqID_121521
ctaattcatgtatgcttctcttgttgagtagtcgagtgccagtttcactaccatctgcatcagttgcagctgtatccgcagattgcaaaacagtagcttttgctatagcaggcgaatcaggcttctgtgccattgtcactggagtacgagcagcttgctgctgagaatgctgttgctgatttttgggtgttgtattctgttgagtttgttgcgaggaactttgctgctgttgcttttgctgcaactaccacacaatcagcttttgcagcagcagcagcaaaagctgattgtgtggtagttgctgctgctgtgctgaaattatgttctgttgatgtggagtcacaggtgaagattgttg

SEQ ID NO: 55548 - DNA, 291 bp, Setaria italica
  misc_feature (222)..(222): n is a, c, g, or t
  Peptide Sequence Number=SeqID_121522
tttaaaagcatggggaggggggtttctttgtgatccgggcatttggcttccagatggaattggagttgttgatgatggaaggccaggtcttggctgctgcggaccagatattattccctggtcgcatctgggatgtgactaaagggatccaaaccatcccaatattttgaattccaggggaagcaaatgcccggatcacaaagaccccctccatgctttaangaggccgatgtctgtgagttctccttctccttcccctgctttacagcaaactccacaaaattcatcaac

SEQ ID NO: 55549 - DNA, 356 bp, Setaria italica
  misc_feature (303)..(356): n is a, c, g, or t
  Peptide Sequence Number=SeqID_121523
tgggtagtcgtcgtcttgtctaggttcgtccttgtaaagtcttcttagttgttggttgtattggtcttacgttacttcgttacggtttggtgagcttagtagcctaatttggcgcatgtttctttattggtgatcaggtgatgtggtgtatgatgatgcgccatactgtgatcagtttgagaagttttctgtattggatgatgctcacgtaataagttgttccgattagcttatgcaagaatgtaccaagattttacacaggatactttgaaaaataatagtttgagagttgagacagaaacnnnnnnnnnnnnnnnnnnnnnnnnnnnnnnnnnnnnnnnnnnnnnnnnnnnnnn

SEQ ID NO: 55550 - DNA, 102 bp, Setaria italica
  Peptide Sequence Number=SeqID_121524
ttttaactcttctctgtctacagaattcagtttgtttctaaaattacctgctctaaatctccaacttactatcttggttacagaaaattcacctgcactacc

SEQ ID NO: 55551 - DNA, 258 bp, Setaria italica
  Peptide Sequence Number=SeqID_121525
tgggaaacagcaagtgttcttgcagagtgagtcggagccacctgcagtaatacaagcaaaacaacagaagacccaactctagcttggatagacggggaggttgttagcataaaaacaatgaagtacatgtgcagacatcgaatgggaaaaaggttaccacggacagatcaaaagtttttcctaaggatatggaagctccacctggaggagttgatgatatgacaagactgtcgtacttacatgaacctggtgttcttc

SEQ ID NO: 55552 - DNA, 356 bp, Setaria italica
  misc_feature (330)..(330): n is a, c, g, or t
  Peptide Sequence Number=SeqID_121526
caaatgcagaagaaactcctggtttcacagtatatctgaatcgaaggccagcaagcttggttgaggccatgaaggatattgactgtcagtttctgggaatatgtgatgctgctcgggaagtctcagtgatgttggagcaaagatgctgaacccagttgcacttttgcgctctgcatcatcgcgatcatcgtcttcccgttccttctggcttcttctagctcaatagatgatctctttgacaatgagacaagcagctgttactccgaagaatcttgtagtacaatgtctggaagtcatcagtctaccttggatagattgtatacatggganaagaaattatacaaagaagtaaaggt

SEQ ID NO: 55553 - DNA, 280 bp, Setaria italica
  misc_feature (236)..(236): n is a, c, g, or t
  Peptide Sequence Number=SeqID_121527
gtaacacttatggtcgtgtacggaaaccacgacctgagaaggtggcagccttccaatatttaccacacatcctagagctaaatatccaggtggtggcacaggaatccagatggatatttagctctaggatgtgtggtaaatattggaaggctaccaccttcaaaccatgtagtgtactgccttcgttccgatcttgtgacttctgcaacattctcagattgtatacatacaccctnacatgctaccggaataatgtctggatttagtatctggcgtgtgg

SEQ ID NO: 55554 - DNA, 358 bp, Setaria italica
  Peptide Sequence Number=SeqID_121528
atgcagctggacaggagagatttaggaccttgaccagctcatactacagaggggcacagggaatcattatgggtattattcgtaacccttgatcagtgaatctgtacttttgtttgcattgtttatggagtctttactgtgttttgcttttttcttctgtcccttttgccatacacccatacatcggatcaaattactgtcatgtcactgagtggagtcttgaatgtctttcaatgaaatttgagtttgaactcaatcttcagttaattttgattcaaagtttctgctagatgcactctatgtaaggacttgttaatgttgttttttgtaagtctttgtaatttgtttaaacggggga

SEQ ID NO: 55555 - DNA, 230 bp, Setaria italica
  Peptide Sequence Number=SeqID_121529
ggatcctcgaagccgctgtcaacaacttcatgtagttgagggaattcctccattgcatatagaattggggccgtaatgattccctgcatcatgaataccatcacttgatagaaaacataaacatgataatgaatgagagaatcactatgcatgtggtccatgttaaatatcacagttgtaacttagtgttgaaacaacaactcttgcttaaccattacatgtaatttcag

SEQ ID NO: 55556 - DNA, 247 bp, Setaria italica
  Peptide Sequence Number=SeqID_121530
aatcaactggaacgctaaaccctgcatggatttcaaattagctaagctgctgatattttcagaattagcttagaaggaaattatttcaggaaaaaatgaagggaaatgtaaaatgttacaaaccaagtttcgtccatattcgtatgcaagcatcgagacctcagcagtgtgccctgcaagaatagcaacagccttgcagctatttgatatcagtgatgctgttttgagtacgtcttctgcaagttag

SEQ ID NO: 55557 - DNA, 441 bp, Setaria italica
  misc_feature (87)..(87): n is a, c, g, or t
  Peptide Sequence Number=SeqID_121531
agttttaatggtaaactatccaccattagcatttccttggaaaaaagtgatatactcctgttgcacaggggcaactgatctgaaacngattgtctgagattgagtttgtttttggtttatgttttttgcctttctgtttattttttatttacaatcctcacatatcttatcaaataatttttgttgctggtctatttacagggagagagttagacaacgattggctttgtaccaaggtgtatgtccagttcaaatggaattttctgatgatgctgagaagacatttggtgatgctttgtcctatttgctgaaacatggtatggttagggacggcgaggaggttgcactggttcaaagtggcaaacagcccatctggagatcacaatcaacacacaacattcaggtcaggaaggtttgatgctgagcgcattgcggtattct

SEQ ID NO: 55558 - DNA, 360 bp, Setaria italica
  Peptide Sequence Number=SeqID_121532
gtacttctctgtttttattttcaatgtaaaaatgacaaaagaatcacaggaacagcccatctggagatcacaatcaacacacaacattcaggtcaggaaggtttgatgctgagcgcattgcggtattctgattgtcacggacatcaaccaagaaattgatgtcttgtggcaaagttgaaggcctgattataataataccacgcaggtattgctagttttccattagcttggttagcttgtgtgtagggtatgtactgagagcctgtccctgtgattccttttggtcatttgctgtgtacttctctgtttttattttcatgtaaaatggcgtatggccaatccttttgttcattccggttt

SEQ ID NO: 55559 - DNA, 249 bp, Setaria italica
  Peptide Sequence Number=SeqID_121533
actgaattgcttgccccttctgtttgcttctatggaatatggaatatactgtttaattgtgttcccagcatatcaaatctgaactctttaatgtcatagattctttcagtttcctttgatgttttaggcatttgggataattcaattgaacttacaatggactgcctggtttgatggcatcttggttattcaaagaaataacttagatttcccttgaaagctgttaaggtcatgcacacagttgccctg

SEQ ID NO: 55560 - DNA, 399 bp, Setaria italica
  Peptide Sequence Number=SeqID_121534
tcccaaggatgatggatccaacgacacaattcgatacagctagggggacggacagctgtttttgcctaaacaacagtaaatatgaactacatacatatccgtcctgcacccgcggcgcacactggaccagagcatctccgagtagcatcaaccttgggccatcaatttcgtagcatttctgttcttcaatgtcaagagcgctgcttcagcaaaggcctgtgcagcttgggcctctgcttcagcaacctctgcctctcttgcagctgcttcagcttctgccatgatagcctctgcctctgcaactgcacgagcagcagcagcagcagcagcctccggggtcatagttgcgatgcgagccaattctgcatcaacttgtgatcttgtaaggtcttttactag

SEQ ID NO: 55561 - DNA, 393 bp, Setaria italica
  misc_feature (54)..(54): n is a, c, g, or t
  Peptide Sequence Number=SeqID_121535
gaatgcctatgagatctaatttgtaaattttgacttgacttctaatgcagttancctcccgaagaagcgtcaaaaatagctgtttctactgcacaacaattttcagatgatatcaaagaggtgcattttgttctgtttttcggatgatctgtatgagatttggcgcaagactgctcaggagatgctttcacaatttgagaaatgaatggtcttatagtttatgatggctgctatcctgtgtaacaatacaactatatgattgtaatcgaaacgaacaattttaaatactttaaaccaatagtacttagacaacttagtaggtaataaacgtaccaaatagaaataaaggtttaggacgaaaattagaagaaagacgactttacaaattaaaaa

SEQ ID NO: 55562 - DNA, 369 bp, Setaria italica
  Peptide Sequence Number=SeqID_121536
cgttgcccgactggagtaatcctagcttctccagtcgggcaacgaactcctggtttgacctctggagaagctaggattactccagctttcaagcttcctgtgtcccgagtgattcacactgttgggcccatatatgacatggacaagcatcctgaggtgtcactaaagaatgcctatgaaaatagtttgaagcttgctaaagagaatggcattcagtatattgcattccctgctatatcttgtggtattttccgttatcctcccgaagaagcgtcaaaaatagctgtttctactgcacaacaattttcagatgatatcaaagaggtgcattttgttctgttttcggatgatctgtatgagattttggcg

SEQ ID NO: 55563 - DNA, 242 bp, Setaria italica
  Peptide Sequence Number=SeqID_121537
aacaaattgtgctgctactttgaagaatgaccttccatttttgtttattaaaagcatgatgctattgttgttgttttttgtctctatttcatccctatatgtaatcggaaaatgagggagataactggcatttattttgcaggttaatgctgctaatgagcgtatgctaggaggtggaggtgttgatggagctatacatcgagctgctggatcagaattagtagaagcatgccgcaaaagtt

SEQ ID NO: 55564 - DNA, 269 bp, Setaria italica
  Peptide Sequence Number=SeqID_121538
gacgacccggacgagcgggaccagccgatggtcaagcgggaggcggcggcggaccacgacgagttggtcgagaagcagcagcaggactccggcggcggcggggcggtcgagagcggggagagcaaagggcagcagcacccgcgctgccggagccggaacaccaagttctgctacttcaacaactacaacgtcaaccagccgcgccacttctgcaaggattgccaccgctactggaccgcgggcggcgcgctccgcaacgtccccgtcgg

SEQ ID NO: 55565 - DNA, 225 bp, Setaria italica
  Peptide Sequence Number=SeqID_121539
ccgcctgcaagcgacaaggaagcccgtcagcaacagaggcctgtctatgtcggtggcggcaacgacggaatcaatcaagcggccctcacatgttcttggatcagccggtccatctcgttcctgtgctgatcgcgctgcgcggcgagctcgtcggagaggaggcacgacgccgaggccgaggatgtggacgacacgtgctccgagccctcgtcgagtcgagcctga

SEQ ID NO: 55566 - DNA, 402 bp, Setaria italica
  Peptide Sequence Number=SeqID_121540
agtgagattagaagctgtttgctttcagctgaatggaggcaaaacaaccaacatgattcatagatcattcactatggctttcttaatgtagtgtacagatagaaaccattctcttccatattgtgggtttaaaattacctcagatcgtgacttacaaccagtattgtgtggtgtttctttaggtccttcaggagattcacaacatcagcccgagccttccaatctgacatttaaatagtaaattagtaaacacctccactacaagatataaatttcagcatagtatttggctcttgacatcaatcctggcaacagcaccagagatagtactgtacacaagcaaacatgcactaaccagcagagatgaatgaattaacaaaaagcaattcaatgactggtttg

SEQ ID NO: 55567 - DNA, 457 bp, Setaria italica
  misc_feature (69)..(69): n is a, c, g, or t
  Peptide Sequence Number=SeqID_121541
aaggtgtctaccacagggaccttaagctttattcttctttactctactattacagccagagaacgttcncgttgatcggaaaggcaacatcaagatctccgactttggtcttagcgctttacctcaacatctcgggaatgatggacttctgcacacaacatgtggcagccccaattacatcgctcctgaggttttgcaaaatagaggttacgatggctccttgtcagatatctggtcttgtggagtaatcctatatgtaatgcttgttggttcccttcccttcgatgataggaatcttgttgttctctatcagaagattttcaagggggactgtcagatcccgagatggctttcacctgctgcacaggaccttcttaggaagattcttgaaccaaatccgatgaaaaggattgacattcacgggttatcaaacagcatgagtggtttcagaaggact

SEQ ID NO: 55568 - DNA, 266 bp, Setaria italica
  Peptide Sequence Number=SeqID_121542
gggagggcaacttcggcaaggtgaagcacgcgcggcaccacgcctccggcgcccacttcgccatcaagatcctcgaccgcagcaagatcctctcgctccgcttcgccgaccagataaggagggagatcgggacattgaagctgctcaagcacccgaatgtcgtccgcttgcacgaggttgctgctagcaaaacgaagatttacatggtgcttgaagttacgtacaaacggacggaacgaaagtaactttttaagaaaacaaaagaa

SEQ ID NO: 55569 - DNA, 403 bp, Setaria italica
  Peptide Sequence Number=SeqID_121543
gggaaaactgtctgagaatgagggaaggaggcttttccagcagctgattgatggcgtgagctattgccatgataaaggtgtctaccacagggaccttaagccagagaacgttctcgttgatcggaaaggcaacatcaagatctccgactttggtcttagcgctttacctcaacatctcggggtaagatgatatgatttgatcagctgtactctgtacataattatggctctattgcataatttactgaacgacgtgcacttcacaactttcagaatgatggacttctgcacacaacatgtggcagccccaattacatcgctcctgaggttttgcaaaatagaggttacgatggctccttgtcagatatctggtcttgtggagtaatcctatatgtaatgcttg

SEQ ID NO: 55570 - DNA, 365 bp, Setaria italica
  Peptide Sequence Number=SeqID_121544
agaatttaggttacaaagaaatcttcctaagaaggtcctgtgcagcaggtgaaaaggattgacatcacgggtatcaaacagcatgagtggtttcagaaggactacattcctgctgttccatacgatgacgatgaagatgtacttcctggttagttctcccaatcaaagagcaaattgatgaaccagcacaagaaaagcgaactcatatcaatgcttttcagttgatcggaatggcttcgtcccttgatctttctggtttcttcgaggaagaggatgtggctcaaagaaagattcggttcacatcaatgcatccacccaaagatttatttgacaagattgagaatgtcgtgacagagatgggattc

SEQ ID NO: 55571 - DNA, 223 bp, Setaria italica
  Peptide Sequence Number=SeqID_121545
tttacaagttagaatacggaaataggacttacgtacccttagaatactttactaggtttacttcgaaggaagaggatgtggctcaaagaaagattcggttcacatcaatgcatccacccaaagatttatttgacaagattgagaatgtcgtgacagagatgggattcaaagttcataggggaccgagcaagctcaaagtattgaaaaattgcaaaggttccaa

SEQ ID NO: 55572 - DNA, 399 bp, Setaria italica
  Peptide Sequence Number=SeqID_121546
actaagagaataggtaatacattgcttaataattaacctatggattgcacaaaaggcgtgacagacagacctcattgtggaagtagaccaaaaaggcacgaattgtttccctgtatggacgagagactccatcccataacgagtggtctccttctacgatctggtaccattccagctttgcttctgaaggatcaataggcaagcgatgcccaagcaatttccgaacagaaagggcttctgaagtactttcatcagacaatctcaaacatcttgatcttatgtctcccacagcaggtccaccaagcacacgtacaatctcagccgtgcttccaccatcatcagaaacagggagctactattagtactaacttaaacttaacgttaaagtttaaagtttaa

SEQ ID NO: 55573 - DNA, 186 bp, Setaria italica
  Peptide Sequence Number=SeqID_121547
agctagtactaatgttgcaattctacactacttgataaaatagaaatagaagcactagcaacatggatcggttggcaaaacaataaattggtaagagtggtatatacatatcatgtttgtacctgaaacctcaacttacaaatttattgttttgccaaccgatccatgttgctagtactagctaaa

SEQ ID NO: 55574 - DNA, 414 bp, Setaria italica
  Peptide Sequence Number=SeqID_121548
gacccaagacaaaaaagaaaatttaccgaatagacttaagaaagaaatacaacctagaccgttaggtagaaagcaaaacatttcagctgaccgtcgaagtatctcattgtggaagtagaccaaaaaaggcacgaattgtttccctgtatggacgagagactccatcccataacgagtggtctccttctacgatctggtaccattccagctttgcttctgaaggatcaataggcaagcgatgcccaagcaatttccgaacagaaagggcttctgaagtactttcatcagacaatctcaaacatcttgatcttatgtctcccacagcaggtccaccaagcacacgtacaatctcagccgtgcttccaccatcatcagaaacagggagcacatgcacaactcgagtagtgactttct

SEQ ID NO: 55575 - DNA, 296 bp, Setaria italica
  misc_feature (225)..(296): n is a, c, g, or t
  Peptide Sequence Number=SeqID_121549
tggttctgtggatcctggtctgccagccttggggatttctaccggttgtcaattaatttcctcatgttttgagctcttcattcatctcagtgcagtggtatcggttgagcttgagcgttattttaactgctggagtggcttttttctgtcttcgcctcgttggcatcattgtaactgtgttgtgggatggagtatggtctggcaatgggagcacttcaggtttcnnnnnnnnnnnnnnnnnnnnnnnnnnnnnnnnnnnnnnnnnnnnnnnnnnnnnnnnnnnnnnnnnnnnnnnn

SEQ ID NO: 55576 - DNA, 243 bp, Setaria italica
  Peptide Sequence Number=SeqID_121550
cgagttgtgaaggtgctatttactcgtgcagaagcgcccatcaaaacggcctgacctgaaggcaatcacgaagatgcaagaaaccaatgccgtgctttatccggagaagaggataggacatctaccagggatcgatgttggagatcaattttattctcgtgcagaaatggttgtgttaggcgtccacagccatttctgcagaaaagagcgcaggctgcgctacaagaaattgaggcaaagggt

SEQ ID NO: 55577 - DNA, 175 bp, Setaria italica
  Peptide Sequence Number=SeqID_121551
tccttttctccagtatttacatcgaaaagatcaagaaatggggtgcttccttttggtgtggcaccccttcccttcagtaagatgtagcttccttcacagtttctcttaattcttgcaatgacagtagtacctgccggagttctgcacatcactggagatcctggatttgagtagg

SEQ ID NO: 55578 - DNA, 437 bp, Setaria italica
  Peptide Sequence Number=SeqID_121552
ttataataactctcttcgaatgttaatctgttatccacaacattgttatctcgtgaacggcgattcttcacttcctgtcatcagctgccttggtgtcttccgcttcaggaacttcgtcgggagtggcacctcgctcgggtccggcgacttcaggaacgccgggccagcgtagtactgcaccgtcaccggctctactgcatcctcgggcttcgccttcttctcgctccgatcgacctccaccgacggcgctcggctcaaggtcctcttcttgggcccgaccggatcctccctcgacgaggatcgccccacacgctcggtctcctccttccgctgggccttgtcctttgtccaatcctggctcagggacgcgcggcttggaacgctcgacgaggcggttggttacgggtcgtagtttagttctttttattttctttttt

SEQ ID NO: 55579 - DNA, 361 bp, Setaria italica
  Peptide Sequence Number=SeqID_121553
ttgtataaacaagtaaaatatggtttaacataggtaataaccataacacaacttttggagtacttgaaacgaaataataaccaatcatggtagttctgaagcataaataattgctgtattgttgactatatggactctgcgctcaacataaaatcatactaccatttgtcttcctcaaatcttgcaacaattatttacagatggcaatcatggggggatggtgttcaatctacatttcttcgtcaattcttcactttctctttctcattgcagtcactgaagattgtgcagatgcttaagacaatccaaatataattgtagcaattgctactttaccacttgtctgtttgtcatccagcta

SEQ ID NO: 55580 - DNA, 251 bp, Setaria italica
  Peptide Sequence Number=SeqID_121554
tttgtttatgaagcataaataaattgctgtattgttgactatatggactctgcgctcaacataaaatcatactaccatttgtcttcctcaaatcttgcaacaattatttacagatggcaatcatggggggatggtgttcaatctatatttcttcgtcaattcttcactttctctttctcattgcagtcactgaaggtagacatccagttataagtgaatgtatatggagacctttattttctttcttttcg

SEQ ID NO: 55581 - DNA, 194 bp, Setaria italica
  Peptide Sequence Number=SeqID_121555
cctatcccctgtgtgccttgcctacccctgttgcgtgtctcagatcatcggttacatatgttttgcttccagagttattgagagaagaaatatggtgagaggtgacattagctctaggagaagtcggaagcactctcatagacactgacaccgtggaaattgtagttttgctatagtggaacagatttgtgtat

SEQ ID NO: 55582 - DNA, 363 bp, Setaria italica
  Peptide Sequence Number=SeqID_121556
tagtttagaattagtacggacaataggcaatacaatgatttgcatcttctaaccacactcatgtttgcgccttcacttgttgcttggctacagaggattggtatggggcagaattttccctggttcatagattcagctatttgcgttggtgttatactgcatggactatttggatcccaaccgaatgtcagctgctgcatatctttcaagctacctggaaggagaaggcgcgaagttggtctgagcttcctctacctcctggctggctattattccttcgtaagctccatggctttggcgccatatagagccttgtatgccatggcaatcatcggttacatatgttttgcttccagagttatt

SEQ ID NO: 55583 - DNA, 347 bp, Setaria italica
  Peptide Sequence Number=SeqID_121557
atatctcgctttgaaccgctgatggaatttttatcagtgttctgaacttcagtatccagacaatttcaggtaggcctcccccggccagcctctatggcagtgggacagttcttcaatccagaggaaggggcaagcgcactttctattggcaggattattggctccagttttgctcctgaagaaatattttctgtcagaggatcacccgttggctcttaacttgtcattttctgcaagtctcggtcttctaccagtaacattatcactgaaaactgctggatgtggaataaaagatgctggtgaccaaatggaagccgagagaaattaattcttttgttaagtttgtc

SEQ ID NO: 55584 - DNA, 193 bp, Setaria italica
  Peptide Sequence Number=SeqID_121558
tggagataaataacgaggcttctcgactgtatgtcctaccaaatcatccaaaccagattggccagcaacacctggaacaattatggtactacggtttctgaggcctccgtcaacagaaatcgtagtaccataattgttccggctggcagctctaggttgaagtaaggtttgggtaagtctattttcttaggtt

SEQ ID NO: 55585 - DNA, 180 bp, Setaria italica
  Peptide Sequence Number=SeqID_121559
aaaaaaacaagcatgaaaacagggctaacattgcggcaacgaccaacttataccaccccacgaacaatatactgctgttatgcctcctgtaggtgtgtcgtggtgtgtggtaatgtagatcacgcagtattatttcatctggtgggaataataatgtctctcctctttctttcccgaatt

SEQ ID NO: 55586 - DNA, 423 bp, Setaria italica
  Peptide Sequence Number=SeqID_121560
ggcgtcgcctcggttcctcgacctcttcgactactacatccgcaccgacgagcgcgacgccttcagcaaggagctacggctccagaccaaggtgttctatttcgatatcgggagaacaagagaggccgattcctcaaggtttctgaggcctccgtcaacagaaatcgtagtaccataattgttccggctggcagctcaggtgaagaaggttgggaagcattcaggaatgtactattggagataaataacgaggcttctcgactgtatttcctaccaaatcatccaaaccagcaacacctggaaccaccagagcgccttccgggcctctctgatgatgtgggtgctggttttatagctggacatggtagccagtctgcgtctgggcccgaggtagatgttgaacgctttggtttgtattcttgt

SEQ ID NO: 55587 - DNA, 426 bp, Setaria italica
  misc_feature (426)..(426): n is a, c, g, or t
  Peptide Sequence Number=SeqID_121561
taaatacttaaccgactactactaggtttagaaagacaagttaccaatagaaaatggttaggtcactttgtagatataatgaaggatagacttgaaggaatgagcagcgccaacgtgcgcactgtcgagcccagccagagatgattaccttgaccgtggcctcaaggcgagactgctgttatgcctcctgtaggtgtgtcgtggtgtgtggtaatgtagatcacgcagtattatttcatctggtgggaataataatgtctctcctctttcttttcccgaattcaatggtgaggattgatttgtttgggacctttttttctttctttcagttggaggaataataagcagtatattgttcgtggggtggtataagttggtcgttgccgcaatgttagccctgttttcatgcttgtttttgttagggtn

SEQ ID NO: 55588 - DNA, 270 bp, Setaria italica
  Peptide Sequence Number=SeqID_121562
ctttgcaatcactaggaaatccttttaaagaaccagaatcgattgaccggaatacctgaacatgccaattttcacgatcttcttcttttgaaacccacaaactaggatgatcatttggaacattacgtgaagggcttagtatccatgagatacgctccagcttaattaaagcatcatctttccaatgagatactcttctcaatcgcccgcccgccttgtgttcgccgcctccacctccacccccaagcctcctccctcccacgccacccc

SEQ ID NO: 55589 - DNA, 321 bp, Setaria italica
  Peptide Sequence Number=SeqID_121563
catcaatcagatatctagccctatagccgccacagcttgaaggaaggctgggtcatttggactaacatgtgttcttgcgttgtccctgttggatgtaaaatagtctcatgaatagcatcctgcggccacactgatttgattgctgcaacaaccacctaactccctagacataaatgtactagacctaagtttcttcagatccctccagtctttaactgattccagaaaccctacaactattgaagagctaattcaaggtgtggaggaagagtatgaagcatatgatgtggaaaatctaaatagagtgttctaagtctccag

SEQ ID NO: 55590 - DNA, 349 bp, Setaria italica
  Peptide Sequence Number=SeqID_121564
catcgagcaagttacagttcatgttgtacttgcaccttcagcgagagcattggcttctacatcttgagcaggaacaatgctttcatcctaagccatagcatcaatttcctcatcaactacatcctcgacttctccaggttaaaaaacaaatactccgagtatgcaaagttgtatctgcacctttagcaggagcaacaccttgattctgagccatagtgttgccttcttcaccagccacaacttcagtgcctcctgattatcaaagtgggcaatcaagggatgctctaaatctctagttgcacatattgctactctaaatggagtgtggagcttgtacctacagcttcag

SEQ ID NO: 55591 - DNA, 253 bp, Setaria italica
  Peptide Sequence Number=SeqID_121565
ctccaccgtgcagacctcgaggccgtcgtcgtccaccagtggtgtcttgggcccttctccatcgagcagttacagcgagagcattggcttctacatcttgagcaggaacaatgctttcatcctaagccatagcatcaatttcctcatcaactacatcctcgacttctccaggtatgatttcaccaactagttctgctgggggagtagagttgatgtccagaagaaacctacttccagatgaacacctacaagg

SEQ ID NO: 55592 - DNA, 241 bp, Setaria italica
  Peptide Sequence Number=SeqID_121566
tggacgacgacggcctcgaggtctgcacggtggagcttatcctatcgccggcagaggaggtagtagatcacgggcccttctccatcgagcagttacagcgagagcattggcttctacatcttgagcaggaacaatgctttcatcctaagccatagcatcaatttcctcatcaactacatcctcgacttctccaggttaaaaaacaaatactccgagtatgcaaagttgtatctgcaccttt

SEQ ID NO: 55593 - DNA, 409 bp, Setaria italica
  Peptide Sequence Number=SeqID_121567
ttacgtcgtattgtaagtaaagggtaaaagtactaaaagtattaacgtttgtaactagtagtcttgtattccttactacttgacgtccgacgcctccagcggttcaaccggtacagtataaggcgagtaccaatccgcatcgaagacatcctgcagctgcgagacgatggaggggttgtatgttccgaagctcactcccgccgtggtgtagaagtaatcccagatgaggttgctggtaccgatgttcgccctctcgtcgctgacagcgtacttgccatggttcacccgggtgaagcccagggtaacggttgcctgtcgcggcgccgtcctgcgacaatgcaggtccggtctcgttgtaccccaggaacccgtgtagtatttgatctcgaccttgccgccgcagtggttg

SEQ ID NO: 55594 - DNA, 429 bp, Setaria italica
  Peptide Sequence Number=SeqID_121568
ggaatgacatcgacctctaccttttcttcctggccaagttaatttgcaatgagtgatacctcatgagaaacgatttgaatctttggttcataaaaataattgcaaattccgtgctgttagttatggcgatggagtcccaagcagaggcacttggtcagttagcaaccgatgatctagaaggaaagtttgcattgctggagacttcatctgttgatgatgatcttgcgcaaatgaaaagagaactatccggaagttcatcgaaaggggagcttcctccgggtagaacagcagtgagcaactcaggtgcggctcgccctttccccgacctagagatcgagagtgagctaaatgagctgcggaggaaggccaaagagtactagattccaccactcgtgtcgattcagcaggcctgacaaaaaatctcgcccc

SEQ ID NO: 55595 - DNA, 243 bp, Setaria italica
  Peptide Sequence Number=SeqID_121569
cacggggtagatggtttgcactagatacgttcccatttaatataacccaactgatgagacaataatcctgttattgctaaaaggtataaataatgctatagatgtgaagatctatcatctatatctagctcagtttatgatagcatggtgcttatgcaataaaaagttacaattccggaggaaggccaaagagtactagattccaccactcgtgtcgattcagcaggcctgacaaaaatctcg

SEQ ID NO: 55596 - DNA, 175 bp, Setaria italica
  Peptide Sequence Number=SeqID_121570
taatgctatagatgtgaagatctatcatctatatctagctcagtttatgatagcatggtgcttatgcaataaaaagttacaattccggagaagaaatcaggagaaaactagtagaaattttagacactgccacatgaaaactggcaacagcaacaggaaaatgttaaaatccgat

SEQ ID NO: 55597 - DNA, 260 bp, Setaria italica
  Peptide Sequence Number=SeqID_121571
cgtgtgcgccttcgccagccgccgaagatggggctcggggcgtttttaacttgagcaggcgtatgctttgcggggacgctttgattagtcggggggttgacgcttgagctctgatgacaaataattaatggctggtggctgtggtgatgagcagaaattagcgggctcgtcacccgcgccgtgtaccacgtgattgcatctctgcttgcttgaatcaatggattgtgtttgggagtttagcttaaagtaaaaaaaaaaaa

SEQ ID NO: 55598 - DNA, 211 bp, Setaria italica
  Peptide Sequence Number=SeqID_121572
ctgattggtgtccactgaacgactaggctcctgtgctcagagcaaggtgactggctgtggtcttacccaatgacctttgtgtatgtgacgacttgaaatgttaatgggaaccctttatgtactggtccttctggtccagagcaaaaccaacccttactggccgctgcctggccatttaacgtgcttcttccgcagtggtgtggtactatgt

SEQ ID NO: 55599 - DNA, 192 bp, Setaria italica
  Peptide Sequence Number=SeqID_121573
tagatgttatgttcttactgttatgtaatttgttgagctgtgttggacagctatgacatctatccttgctcttaaaaaaacatttgtatggaaggtatactgctactgcgaatatcttaagcatcacgatggttagtgatggacaaaaaaacacaagacgccatagacatctgggggcttatctcgagatgt

SEQ ID NO: 55600 - DNA, 245 bp, Setaria italica
  Peptide Sequence Number=SeqID_121574
actgcgcgcgggccatgtagtcgacgccgccgtccccgccgtcgctcggatcggccggcgccgccgcggccgcgttagcctcgacgtcgaggatgacgaccgccgccggtggaagcacgccgcggtggcgtggacgtgggagctgagctgagggtccatgggatgggatggatccgagcaggcgagcggaggcggctggaggccgaggagtgtgcagaggactgcgtgcggctgtggagatcgat

SEQ ID NO: 55601 - DNA, 380 bp, Setaria italica
  Peptide Sequence Number=SeqID_121575
agttgcagcttaagaacaaatgggataagtttaagagtgattacatcacttggaagaagctgcttgtagtgggggcgggtttaccctgggatgcggcaaggggaacatttgctgctgacgatgaatggtggaagaagacaaataaggtttgtgatacttactctgggtctataatttttactgtgtgaaccattttaatcttgtcacaccctttccttttgctactggtaggagctgccaggtgcaaggcgataccgcaatcttggtctgcaacatgaggataaagttgaaaaataatgtttgactacatcaccagtaaatggtgtgggactccttcgctacatgctccaagaaacgaccaaaagaagtggtggtggatc

SEQ ID NO: 55602 - DNA, 418 bp, Setaria italica
  Peptide Sequence Number=SeqID_121576
tgcaaaatataattgataactccaaatataattcctaggtttcagtttttttaactgttatatcatttttggtgtatcctttccacaacaaatttgtaacggagcagacttgcacaggttcatgcccttgttgagtatgaagcagtggaggctgctgagaaggctgtgagttgttgatcacctatctaataatagatttggtaaagtatcattagctgtaagtctagaataatcaactttaattggtttatgtgttcttctaatgttaggttactaccttaagtgatgagagcaactggagaactgggatgaaagttaggcttatctcaaagggatcagcaaagcatagcaaatcttcaaaagaaaatcaggatacagtttccaaaaagaacaatcagaatcagcattcaaaaagaag

SEQ ID NO: 55603 - DNA, 244 bp, Setaria italica
  Peptide Sequence Number=SeqID_121577
agtttcttcatccttctaaaagatgcgatagtctcaataggaacaaagcccttcttgttcttcttcacatatttcaacaggaactcatcggtaggaagattctcatcacgaaacctggttgtaagtccagatgggaaaagggtcaggaggttacatccattgccacagaatgaattaaaagatccaaagaaaagcacagttttggtggaaaatctacctccagacttctccatggagagtatac

SEQ ID NO: 55604 - DNA, 197 bp, Setaria italica
  Peptide Sequence Number=SeqID_121578
gtctacggtaagaaagggaatgacttgtacattctcatgcgaggttttttttttttttaaggttttaactgtcatttcattcacaattaaaagatccaaagaaaagcacagttttggtggaaaatctacctccagacttctccatggagagtatacaggaaaaatttggtagagtcggcaaagttgtgaacataaca

SEQ ID NO: 55605 - DNA, 251 bp, Setaria italica
  Peptide Sequence Number=SeqID_121579
tctcctcatccgaaccgtcgaaactggcggtgacttgcaaccttgcccagccgattgtttcgtcgtcaccttggagcaatttcagaacctggattgcataataagtacatcggcatcggatttctggaacgagcgatgttgtttttgatgaaattgcgggtgttctttccatgtaactcgtgttcttaccagtgacatttctggtcgagaatgagaagatgtccttgtgcacaacgaagcggcaagcgtca

SEQ ID NO: 55606 - DNA, 409 bp, Setaria italica
  Peptide Sequence Number=SeqID_121580
agagaatcaaactttgggacatcaggaaaatgtcttctgctgtgagagcgcgcccagtcaaaatggtggactgggactataggtggatgccattcccatcagaagcccatcattttaagcatccagatgaccagtctctggctacatacagaggtcattcagtttggaaaacacttatccgttgctacttctcccctatgcacaggtcaggagggaatggcagattttctttattgttgattttgtcaccagcatactgaaattttccattatttgctttagaaaggttacatgcataagtggaatgttgaccatcgagtgagtctggattgtgggatctaccatattatacttttgaactattgacgtatgataatctgtatactagtatgcagattgagatcacaca

SEQ ID NO: 55607 - DNA, 236 bp, Setaria italica
  Peptide Sequence Number=SeqID_121581
tcaccggctgactgctgggccccagctgatgacgaaaatcaggtcagagaagcacaactcaattgggtacgcggcatataaaaatctaacgaaaacaaagctttggacggttggaccgtgcctgcacgactgtacctgtgcgtatccccttcaaggcggctcgcgagagttcgaccgtttcaatacccgatccctgagacacgcaaaggggataggcaaggcacacaggggatagg

SEQ ID NO: 55608 - DNA, 186 bp, Setaria italica
  Peptide Sequence Number=SeqID_121582
cgagcctgcacgactgtacctgtgcgtatccccttcaaggcggctcgcgagagttcgaccgtttcaatacccgatccacgatccttcaccaataaggctgcttcgcttcatcctcgtcccctttttgtctttgacgacaaccaaaagaagaaaattcatcgctccaagataccacctgatctccta

SEQ ID NO: 55609 - DNA, 349 bp, Setaria italica
  misc_feature (149)..(149): n is a, c, g, or t
  Peptide Sequence Number=SeqID_121583
actttctctcttatcattacattgttcagatgcttggacatccagtgtacttgtacttgcttcaacagaatctgacctattctcttcaattatggcttcatctatttcaataggatcaaatccttccagtgctctgtttgacaagatcnctaaaactatctgcttttcaacaggacagatgggtgctacagaagcggcatccacaatagtagggagagagtaattaggttcccatgtctcgtctaatgatccataggcaataaaagggttatagtgattaacttggttggatgctccattcttcaatggagaagcagctcatcaggattcatttaatggttgtcattga

SEQ ID NO: 55610 - DNA, 476 bp, Setaria italica
  Peptide Sequence Number=SeqID_121584
caattgatgctttggactgtccaactaggttacactatgaatctagtggtctcctaagggaagtaaacaaggctctttgtggatttcttgatcaatcaaaaacttcagctttatgtgaagcttttccaggattctaataacaaggataactgtccaagtatcagctccgatgaatatatagggggtttcaactggaaactggggttgcggtgcttttggtggaaatcctgaaatcaagagcatgattcagtggattgctgcttcacaggcaaataaaattgtgtgcctattttttgcaagtgaaatctgtatattgtgcaggcactccggccttttgttaattactacacttttggggatgcgtctctggaaagattaggggaggtgatccagtggatactacgtcatggttggacagtcggcgaattgtggcacatgctgatcggagtactcatcccagaggttaagaggagaaa

SEQ ID NO: 55611 - DNA, 309 bp, Setaria italica
  Peptide Sequence Number=SeqID_121585
cagatgatggaatgccatccgtcgccagctaatgacgtggttcaacgaacggcgtgaagcaagcatgcagtggacaacaatccttgtgcccctggctgagcgccgtgtccaagaggccattgagcgtgcgcggggctaccaggtggcccgagccaatgaggcggaattcgaggtcatctcggctcacgagggaacaaatatcgtggacatccgcaacagatgctgcttgtgccggggatggcagctctacggggtaccctgttgtcttctattggttgttggttcggttcgtcttaccttaaaactaaa

SEQ ID NO: 55612 - DNA, 464 bp, Setaria italica
  misc_feature (188)..(188): n is a, c, g, or t
  Peptide Sequence Number=SeqID_121586
tactaccgcttgttgatgccaatttatcttctactagtgccttacttccaacagaaaagggagttgaaagttgtggctgtccagaagagttattgtaggtaccactatgcctgctgctctgtaattacagaagaatgagcatcaatgttatagctcccaaaggtgatatttggatgctcgtttttagngatagaaatagctaacgacaaaaagaggcatgccagagcttagtatagaaatcgattgcaatatagatcaatatacaaccttaatagatctctgaaatacagagccactataaggcgtgcgagaaagaggctgaggcagagcccttccttattgctttgtggtgtaagataattgggataacctcggacaactgaaccaggccagcatactgaagaatcagtagctactttggggaacactttgatgtggaattatcagcctcgactccatgactc

SEQ ID NO: 55613 - DNA, 378 bp, Setaria italica
  Peptide Sequence Number=SeqID_121587
ttaaaagggacattgatagcttcacgggctgagccagagtttgaaagtacgccgagaagcatataacagggacatgaaaaacctcattgatttatttgaaaaagtacaaggtgtgcaaaaaactgtggtattactctctttgagggattagattccctggcgctaaaagacagcgctgaaattgagcaccccagtttggctgttgagagagatcatcgttccttgaatgctgacacatcagctccagatacaggaacacttgttaattcaggtggccgcttgtctttgttacaaaagtgttcgaggctgttacaaagttactactacctaataaaaaaagggtagaagacaagaccaaacaagaagaaacaattaaca

SEQ ID NO: 55614 - DNA, 254 bp, Setaria italica
  Peptide Sequence Number=SeqID_121588
cttgtgccttcttacggtttgcctctgcaagtttagcatctgcagcatgaagttttccctcaatctccaaggatttttcctccaaactagcctcaagagactgagcgtccgttatctttttctcagacgtaaatttgacctcagctatctctgcaggaatgggaagaaaaagctgaaggaaagtcagaacagacttgttgatttgcagaggtctataaatgatcttgaaaagctggtcattcttgttagctctc

SEQ ID NO: 55615 - DNA, 354 bp, Setaria italica
  Peptide Sequence Number=SeqID_121589
acaaaatactttaggaagtactaaagactttactaaaaactgagcaggcattgaatgacaaaaagaaaacagtggaaggttggcagaatgatcttgatgccaaatccaaagctctgaagaggtgggaggaatcattgaaaaatgatgagaagaggttattggaagaaaagcagcatatggatcaggaaaaacagcaagttgaggtttcaaaatcagagcttgaaaggatcaaatccagacttgaagctgaaaaggaagaatattagaagcgcagaataatctagaaactcacagaggaagagaggcaggagcatagcgtgctgacagaaagacttaagaaggagattgaggaat

SEQ ID NO: 55616 - DNA, 406 bp, Setaria italica
  Peptide Sequence Number=SeqID_121590
tctaactttaaggtagtctaggtaggtaattctacttgtctaggtaattgggagaaaaagctgaaggaaagtcagaacagacttgttgatttgcagaggtctataaatgatcgagaggagagagctaacaagaatgaccagcttttcaagatcaaacatgatgaattggaggaagcaagaaagtcagtggaggcaactaaacttactctaaaaagctaaagagaatgatattaacaaaaaactaatgaattacattcaaaaggaaaaggatgctgactcaaagcgcaaggagctgggaagaacgagaaaagaaactgattgagagagaggagaaggctagtattagggaaaaagaggggacttcagaagcttcttgaggatcatcaggtcgagcttaaatccaaaa

SEQ ID NO: 55617 - DNA, 325 bp, Setaria italica
  Peptide Sequence Number=SeqID_121591
actgagcgtccgttatctttttctcagacgtaaatttgacctcagctatctctgcacgtatttcacgcaacgctttttccagatcaattacacattgtttctcaacacccaatgcttttcgcatgctctcctcccgtctttcatattctgatatagcattcaagtgcgcagcttgttcccgcttcaatatctcctctttttgtttcagcctttgactgatttcctcgagtttttctgcccattctttcttctcaagcaagagcagccccatattgtacatgaatatcagtacaatatggggctgctctttcttctcaagcaaaga

SEQ ID NO: 55618 - DNA, 227 bp, Setaria italica
  Peptide Sequence Number=SeqID_121592
gtttcacttggagggcagcgtcgcaagaggcggcaaactgctggagcagtcacagagaccccaggagaaaagcgttacaatttgagacgcagcacagtgtaagtattgatctctagttcatgtctacttggttttttctgtttcctgaaccaatacttttgcattgtatttttccaaagtgcaaacgccaccgctgcaaccgcccaaactgacaaaagaaagctgcg

SEQ ID NO: 55619 - DNA, 129 bp, Setaria italica
  Peptide Sequence Number=SeqID_121593
cacgtcatatagttccgatatgacgtggagagcaaatgagctgcatccctccagggatgaaaatttgctgtctgaaaactcatcttttcatccctggagggatgcagctcatcttttcatccctaagaa

SEQ ID NO: 55620 - DNA, 183 bp, Setaria italica
  Peptide Sequence Number=SeqID_121594
aactgtagccacttcaatggaaatatgcagataatgaatgacataacagcgagagatgatggcagcagagttccactttcactgatccagggacgctgaggcttggccttcagatggatggtggagaaccaattcaatatctgcaaacaccaaatggaacagtccattcttttggtgttgttg

SEQ ID NO: 55621 - DNA, 311 bp, Setaria italica
  Peptide Sequence Number=SeqID_121595
cgtattgatatgcggagttgtgacttaaaagtgtccctggaaatctgattgtctgttacatttgatcttatgcagatatgggatgcaacccgctgtaaaagaataagaacgatggaaagccatcgcatgcgtgtaggtgctcttgcgtggagttcctcattgctttcttctggaagtcgcgacaagagcatcctccaccatgatatccgtgctcaagaagattacgttagcaagcttaccgggcataaatctgaggtttgtgggctcaagtggtcttacgacaatcgccagcttgcatctgttgtcattgc

SEQ ID NO: 55622 - DNA, 317 bp, Setaria italica
  Peptide Sequence Number=SeqID_121596
cttagctttcgtacaatttttgagctgataaaaatggatgcaagtccggatacatttgaagtctcatgttcatatctggaagtctacaatgaggttatctacgatttgcttgagagatcctccggacacctggagcttcgagaagatcctcagcatggcataatggttgctggattgagaagcattaaggtttttaccactttattcaatatcaattttccgtgttaatgagggaatacacgccatcttctagtggaagttgactttgtctttctactcttttttgttatgtttttaaccaccttaagttaaccagc

SEQ ID NO: 55623 - DNA, 217 bp, Setaria italica
  Peptide Sequence Number=SeqID_121597
cctcagctagcagacagtacacgaaaagaacattatcacataaacacatactctggtagttatgtgtgctgcaattaaagtaacagaaaacagaacaaggagcaaagtgccctattcttgcgaagttcactagagagaacctgaatcatgatagcatcaatccatggataccctgtccggctgtctctccatgcaacaaatagctcctcattctcac

SEQ ID NO: 55624 - DNA, 238 bp, Setaria italica
  Peptide Sequence Number=SeqID_121598
attgctgcactcactgtttctgagccctagcgaccatagatgcagtttagctcatgtttccaaatagttgtgaccaatgcaacaacatatcagttaggacaaactacagcgctcaatgaagcctgagtgctgctggaccgaaaacgttaaaataccagcacgcataaacatcatacaggtccttaaccgaacagttttaccagaaggcctgctggcgagcggatgccgcagaatcacg

SEQ ID NO: 55625 - DNA, 247 bp, Setaria italica
  Peptide Sequence Number=SeqID_121599
ggggggggggggagggagcaggaaccagtcgatgacgatgccagtgtgggcacccttgaatctgcctcagtgttgtgttccttgcagccttgctcctgaagcctctggtttcagatcccgatgaacagcaactgaagatggcaaaatgaagcaacacttagaatttggtgaataacaaccttagcagcttgctcagaatatttccacctctagcctaaatcgtgtccagcagttcacctcctttgca

SEQ ID NO: 55626 - DNA, 360 bp, Setaria italica
  misc_feature (67)..(67): n is a, c, g, or t
  Peptide Sequence Number=SeqID_121600
cctccttgtcaataattcatacgcttgccgagcatgttgttcccacgtctctaggccttccatttgntaaacgctaatagccgaagcagagaactcctcgaaaatcaaactttccatatgggatattgcatatctgaggaattcttcatcaaggccgtcttcatattttgcaaggagatatggccactcttgtttggacctaacagtgtaaactgctctctcaggtagaagagttgatctatcgtcagtgtctttgcaagagccctcaatgcagacctccgtagagaagatgaacttatgtaagccctcatgagcctgtagataatcatgtctaaattaatcttaacttcctgagtgcca

SEQ ID NO: 55627 - DNA, 368 bp, Setaria italica
  Peptide Sequence Number=SeqID_121601
tcgtacaaccctagagtctttcattgcatctgtggagttcttcaccaaggcctgtatggacaacttgcctttcagcaattgcaaggtaaaaatgtattgaagtggaaagataaaagtaatcactaaccgatttcaaattttgcaacgagatataaccattcttgtttggacccaacaattcaaactgctctcttacataaaacagttgatttgtgtcaatgtcttggctagagccctcaaagcagacttccgcagtgaagacgaacttatgtaagctctcattagcttgtagattatcatatctaaaggaactttcacttgttgagcattacggatccatggatgactgagagcttgtgaagctgtca

SEQ ID NO: 55628 - DNA, 263 bp, Setaria italica
  Peptide Sequence Number=SeqID_121602
ctaaacattacctctcgttagaaatttaaataacatggagattacagcaattagaatacgaaattagggcatgaagcggcacaacacaaggcaaggcattacctctcaacccattactgagacacacagcaccacacaacgttgacacccacaaaatcagcctcaaatcttttagcccttccattcttccccaaaccaaatctatacattctaacattcttctaaacatcctgagtgcaatgtcgtattcctattgttgtagt

SEQ ID NO: 55629 - DNA, 206 bp, Setaria italica
  Peptide Sequence Number=SeqID_121603
attgcatatctagcacaatggtacaattaatatatggtcatttacccatgccacacaagtatgaaaagaacataagaaacaacagagaagactcactgagttaacaaagtcaacaaccctagaatcattcattgcacctgaggaattcttcatcaaggccgtcttcatatttttgcaaggagatatggccactcttgttttggacc

SEQ ID NO: 55630 - DNA, 278 bp, Setaria italica
  Peptide Sequence Number=SeqID_121604
ttttcttcaaaagatgaatcaatcgtctatgcaggggaggagttgtgccaatttattggctaattcgaattagtatgtagaattcatataattatgactgttgaaatcttaaattcaagtctcttggttcttttcacgctttctcacaaacggattaagaaatatattattatttgttaaagtttggataaaccattgcttcgtctggtgtctacaatacatctaatttatatagtactaatttctatttttaccagatcgtaaaatttttatgttga

SEQ ID NO: 55631 - DNA, 294 bp, Setaria italica
  Peptide Sequence Number=SeqID_121605
ggttggtcagtgctcggccggttatgcggcccagcccaggccaacccaaagagatcaccggcgaagagagcgccgcggcagcggcggggtggcggcggcgcggccatgaggatgagctcgctaccccgaagaggcctgtttggaacttcggataaacccattccctcctgatctgtgtggattggagtgaaaataaggtctgtgcacgcttgtgtttgtggtatgcgataggaaaaataaatgtaataccttctcgccaagagcatcctgaaccacgagggtatcactggacat

SEQ ID NO: 55632 - DNA, 240 bp, Setaria italica
  Peptide Sequence Number=SeqID_121606
ggcctgttgtcaactctgtatcgaagaatgcaatatcttgtctcaggactgcattaaggtataaagaacggatgcgggctgactgcctttctccggccatcgtccagcaagacacctgaaggaaggagacaactgaagctccgatgcccaaatatatgaacttcagaacaaccttgttgacgctgcggacgatgctctgcgtggtgctctcgccgaaggagttgatgacgtcgccgaaga

SEQ ID NO: 55633 - DNA, 167 bp, Setaria italica
  Peptide Sequence Number=SeqID_121607
ttaggttacgttacgttaggttacgttgtctacgtaggtcggtccttgtccgtcgtaggtcgtcttggaggtaggccggggtcaagggcgccatcaacagaaccgcgctggggatgtgggtgttcaggagcaagagcagcccggtgagcggcgacagccccccgggg

SEQ ID NO: 55634 - DNA, 210 bp, Setaria italica
  Peptide Sequence Number=SeqID_121608
tggtgtagttgtggtagccggcggtggggtcgaaccagggcttgaactgcatctccttgttgccgacgccggcggcgtagacgttggtgtggatggtgtagggctgcccggtcacgttgcccaggaactcgtagtcgatctcgtcgtggttgtccccggcgactccgccggcaccgtcacaacctactacatgtcgtcgctcggcgacaa

SEQ ID NO: 55635 - DNA, 304 bp, Setaria italica
  Peptide Sequence Number=SeqID_121609
atttacaggagagccttctggcagctcattctcaatgctgccttctgagcacttccagagtgctcaaaagaagggaagaactagacatagataatctcgggaagcttcagatagaattgatggtcagcttcagatggaccataatcattgctcttgttttgcatcattttccactgtagtataacatcaccttttcttccatggcattgtacttggcttcgaagttctcgcggtcatgttcctagcttcttgtatcctgtgaactactcttattattcctagtctattgagcttcaaaaaaaaa

SEQ ID NO: 55636 - DNA, 150 bp, Setaria italica
  Peptide Sequence Number=SeqID_121610
taatagaaagttcaatcatgatgcccagattttggcgatcacctcgagaaaggagaggaatggaatgaggctcgtgcacgtcccatccttcagtgtgttccagaactgggcatcatgattgaaaacctaaccaccgatgttggcgagatg

SEQ ID NO: 55637 - DNA, 270 bp, Setaria italica
  Peptide Sequence Number=SeqID_121611
ttctaaaagtaataacttgggatgattgttcttcttttgtagaagctccatgtaagccattaatctgcttatcctttttgtaaacttgatcttttattttcaatagaaaaatgaagtcagcaaggaacactttttaaaagttgtaaggaatattgttggcgataaggtgcttaagctagctctttcggaatatcaaatgcaggtaaataatctttccacttcattgtgatctatgtaaaacatagcctggctctccgccatttattaatg

SEQ ID NO: 55638 - DNA, 254 bp, Setaria italica
  Peptide Sequence Number=SeqID_121612
aaggtttcattgccgttagcaccaaacagatggagataggtgagtttttgtgcttagtttgtgctgctatacgtgtgtacttccatcttgggatatttttgtaatcgtgatatgatgttccttctgtagtgagaaaactagctgaggattgttccaaatatggaaacgacaatcatcattttggttttgctcttgctaaggcatctgaggagtttggtaaatctcataaacaaatagagaaagagcgggaggat

SEQ ID NO: 55639 - DNA, 336 bp, Setaria italica
  Peptide Sequence Number=SeqID_121613
aagtgtcagtctgaaatgcatatctcatcgcagcaaatctatctgattgatttagttcaaacaaatttgtgtggtatctgttgaggaatctgaggtaaataggaaaattctgaaaaggtggtggctgaaaacagaacagactggggagctgaggcagttgcctggaatctggaagttgaaaatacaagtgattgaagactttatcaccgagtttggtggttttgacctgattattggtgggaattatacttcttgtaaaggtggtacaacagtaaatacaacaatgggcatggattccaaccgtttctatgaatatgcccgtgttgttaaaagagt

SEQ ID NO: 55640 - DNA, 416 bp, Setaria italica
  Peptide Sequence Number=SeqID_121614
aatatgccgaatcttagtcaacattgtctaataggtatgagtctgagggtaaaaatcccttattaacaaatagtgattttcaagtccttgcaaatgccagtgaaaacttgtcatcttccctcgtttaatgttatcattattttggataagatgtgcagtcatcatctcccacatcgtccatcgcttagcagcttcaatctgaacagtaggatcggatgaagttagccttttgctatatgcagctatgaaacaattcctttcctcctcaggaataaaatctctaaatggttcccatgcatctgggaaaatggctgctgcaccgccctcatagaaccaatcaagctcctttttcctaagcaagaaaattccttctttagtaactaattgtccttagttagaaccttaatacaagggta

SEQ ID NO: 55641 - DNA, 202 bp, Setaria italica
  Peptide Sequence Number=SeqID_121615
ataaaagctttaatatgccgaatcttgtcaacattgtctaataggtatgagtctgagggtaaaatcccttattaacaaaatagtgattttcaatccttgcaaatgccagtgaaaacttgtcatcttcccctcgtttaatgttatcattattttggatactgagacacgcaacagaggataggcaaggcacacaggggatagg

SEQ ID NO: 55642 - DNA, 334 bp, Setaria italica
  Peptide Sequence Number=SeqID_121616
tgtttattctatttatttttggtattaagtattgttgtctagttctattcattcttcccacatcgtccatcgcttagcagcttcaatctgaacagtaggatcggatgaagttagccttttgctatatgcagctatgaaacaattcctttcctcctcaggaataaaatctctaaatggttcccatgcatctgggaaaatggctgctgcaccgccctcatagaaccaatccaagctcctttttcctaagcaagaaaattcctcttagaacaatgccagtgaccttatcagggtgcgtctgactgtaagcaaggccaaggtgcttccccatgaacca

SEQ ID NO: 55643 - DNA, 410 bp, Setaria italica
  Peptide Sequence Number=SeqID_121617
attcataagtagacatgtttaagtacaagagtatctgtgacacctttcctactatttccaccaccggtaataaaccaatattctccaatagtttacacctgcatgccctgctcttggttctggagtaacgccttgctgctctggtcttgaccattccattgtctgtgtgtcaaggagatgtaggtcactgaaacatgtagaatgagaccccccaccaaatatcagaagatatcgctctgcaaagcaagcagcagcatgctctgatcttggagaagggggagtgcctctgaagagcaacagcatagttttaaaacagtcagatattgatcgtggtctcaaattcatcccaagtcatggtctcaagatcaagaatgtgcagatcattcagaagtgatctcccatgaccttcc

SEQ ID NO: 55644 - DNA, 358 bp, Setaria italica
  Peptide Sequence Number=SeqID_121618
tgtagtaaaattggtctaattgtaaattgtaattgtctaacttcttagaaattattcttctctccgatactccagcttaaggagttatccattccacctccagaatcccccaccacggggtggctggtcgctgcctgcagctgctttgttgggcccagagtctatttcaccacgaagcaattcaaactccttttgtaggacatccatcttctgtagccgttcttgaatatctgaaacttcattctcaagtttggaagccctcatttgttcagcagaaagttgatctagaactaggtggatttcctcagtaagctctgcatttctgttctccacggtagctagttcctgcttcaggtgg

SEQ ID NO: 55645 - DNA, 257 bp, Setaria italica
  Peptide Sequence Number=SeqID_121619
ctacttgtgccgaggttttgctggtatctgccctattgccaggcttatctttaagttcctcaatttcaaatatgactttcctgctagaattttctggcatagatatggggtagtgccatttatatccgtttcagttttttgttgaatcgggacacttgatttgagacttgtcttgagggcataaacctaaacaaaaaagaatttctcagctaaatataaggacatatgaaacagtagagtgttcatcgagatgcatg

SEQ ID NO: 55646 - DNA, 323 bp, Setaria italica
  Peptide Sequence Number=SeqID_121620
ctttcctctcaggcttgttgcttgaatagctcagataatgaggagccccggacggaattctgcttacattgactatagaagccagtgtctccttccctccatcacgctagcagtgcggactgcgaactgggatgctgccagaaatataagcttcagggagtgtgtgaggttatacgggctatctcaatcaattggtttgtttgcattgcttgtgcaacttcttgctgaagtgtttagtcaaggggaatcagattgtgtatgcaaggagtttatttgatgtacatgaagagctccggtccttcaccaaatgtctactcttattc

SEQ ID NO: 55647 - DNA, 335 bp, Setaria italica
  misc_feature (313)..(313): n is a, c, g, or t
  Peptide Sequence Number=SeqID_121621
tggagaacatggagaggcaggagagtgaagccagcagagaccatcacttggttagtgcagcatgtagctgaagcgtgacaaagtaactactgaggcaaactttggtgttgcagagttctagctagcattgatcttccacagttcaccgtcgtctaactttccatgcccttcactagttggggaaggaagagacctaaggccatttgaccattcccattcaccaattgcttcctttctggcatgtgggaaggcctttccctggacagtggaaacgaagatcttggacttttgatacgacttcttttttttgggnggtaggatcaaaagtccaagat

SEQ ID NO: 55648 - DNA, 291 bp, Setaria italica
  Peptide Sequence Number=SeqID_121622
tacggacaagacattttgttacaggttgagagtgaagcacacaaacgactaatcctacggactacacccggccgggaaatacaatcagttgaccgtcgtctaactttccatgcccttcactagttggggaaggaagagacctaaggccatttgaccattcccattcaccaattgcttcctttctggcatgtgggaaggcctttccctggacagtggaaacgaagatcttggacttttgatacgactcttttttttgggtggtaggatcgagtaatggctaatgaaacgttg

SEQ ID NO: 55649 - DNA, 236 bp, Setaria italica
  Peptide Sequence Number=SeqID_121623
caccagcagacaggatggtacgttagttgtcaatgccatttatactgcccttcatcttgaggttggattagctagcattactcagttgtaatgacgcatgcgatttcgtcgtgacgaggaggaggatgtgtgttgtcatgagtttataccgctcatgaaggcgatggggaagccggcctgctcgacgaggcgcgcggcgagggcgtcgaagcagcacggcgcctggtgcgcgccgg

SEQ ID NO: 55650 - DNA, 260 bp, Setaria italica
  Peptide Sequence Number=SeqID_121624
gcgcggccatcctgagctggcggcgcgggagactggaaattggatggaggagaggggagctagtgtcagaatatgtgactgactttgggcacaagggaggggaagagggagggggatgatgtggccccctcaaatgccaatgatgcgtgggccaatgatgggagggcgtttccctcccaacatgatcggcgacggctttggtttcggcggtggcttcggcatgcctgatccgttcggcatgccgcgcggtttcccacccg

SEQ ID NO: 55651 - DNA, 385 bp, Setaria italica
  misc_feature (21)..(21): n is a, c, g, or t
  Peptide Sequence Number=SeqID_121625
gaatacaatccaacccaatancttgatattaaagctcccacacttatggtacttaagccatgggcaccttggcagcataaatccatcagaatccacaatggccaaactatggtagattcatgtcgatttgtggctcaggagttgcgtcgtccttcattcctatgaaaaataaaatgtgattaggaaactgcatgttaacatgacgttcattattaaaagagtaagaaaaatgaacattatagctaaccagttggtattgtttgtcttctttgtagtagcggtcgaaccctagagtatccttgatcttcttaaaagatggcatgatggtaggcggaggtacaccgccatctttgattgcatctaaagcatcctgcattgttctagt

SEQ ID NO: 55652 - DNA, 255 bp, Setaria italica
  Peptide Sequence Number=SeqID_121626
caaacggaaaacgggcaaaacaaaagaatacaatccaacccaatatcttgatattaaagctcccacacttatggtacttaagccatgggcaccttggcagcataaatccatcagaatccacaatggccaaactatggtagattcatgtcgatttgtggctcaggagttgcgtcgtccttcattccttccctaatccctaggtgtgtgtggccgattcttccattgcttcagctgctgcagctacctagcaaccac

SEQ ID NO: 55653 - DNA, 267 bp, Setaria italica
  Peptide Sequence Number=SeqID_121627
agagtatccttgatcttcttaaaaagaaataggacaatagaataggtaaggcggaggtaacaccgccatctttgattgcatctaaagcatcctccattgcacggatcgaggcgcccaataaggatacagaatagattacgaggctgtaaccaattttcgcaagctcaggagggctcaatatgggagttttaccaccttctattatgtttaccatctttggaacccccggggcaactgcgcagaattgcttcatctcttccaccgaag

SEQ ID NO: 55654 - DNA, 388 bp, Setaria italica
  Peptide Sequence Number=SeqID_121628
ctttttttttttttattacccaatagacctatttattgaaattggaatcacaaattcaggattattgacaccgcaacagggtagccaacaaaaaacgagcaaaagaaaagactacaagcctcccagatattaaacctgccacatatgttgcactatgcagctatggttacagcttcaacacaaatacaatgggcctgcatcaatttccggtggtacttaagccatgggcaccttggtagcacatccagcagaatccacaaccaccaaactgtggtagattattgtcgatttgcgcctctagagttgtggcatccttcaacttagtaccaagttaggtaattagtttactacttacttttagttaagttaagtacggtttagtaaacta

SEQ ID NO: 55655 - DNA, 156 bp, Setaria italica
  Peptide Sequence Number=SeqID_121629
caaccgctactacaaagaagagaaacaataccaactggacaagtgaaggatgccacaactctagtgtatccttgatctcctggaaagatggcaagatactaggcggaggtacaccaccatcttttattgcaactagagcatccttcattgcacgca

SEQ ID NO: 55656 - DNA, 210 bp, Setaria italica
  Peptide Sequence Number=SeqID_121630
gaaaccttcagccaagaaggggaaacctgaaaaaggtgtgccagacgagtttggtatctgaccaatgatctcaaaacaagccaactcttttgtacttctgttttgtaatttcacaacagaagggttttgatcttgcagaatgatatcagtctacttgtattgtattattctatttcttgttcttaagttccttaactttcttttttgttt

SEQ ID NO: 55657 - DNA, 431 bp, Setaria italica
  misc_feature (210)..(210): n is a, c, g, or t
  Peptide Sequence Number=SeqID_121631
aactaaaggaactttaaccaaagaacaaacaaaagaagttactaggtagtagacgtagaatactaacgtgagaagctatctggaacaatgcacccacagccatcgaatgctgaccctccaaagccaaagccagtatcagaagttgtcaaaatctcaaggcgtgaagctgctgatgaaatgccagcacgccaaagtagaagcatcaaaacngacttcatcgaagaagacatctcagccaaaggctgaaagtccactagacatttttcctgagttcacttggacttgagaagtattcaattaccttccaggcagaggaggttgacatggcagccctaaggcatatgactgacagtgatctgaaggctttgggcattccaatgggtcctcggaagaagattatccttgccttggaatccagagcatagggccgc

SEQ ID NO: 55658 - DNA, 239 bp, Setaria italica
  Peptide Sequence Number=SeqID_121632
gttgtcaaaatctcaaggcgtgaagctgctgatgaaatgccagcacgccaaagtaagaaagcatcaaaacagacttcatcgaagaagacatctcagccaaaggctgaaagtccactagacattttcctgagttcacttggacttgagaagtattcaattaccttccaggcagaggaggtctggctaaatttcggaactgcctaaaattttttcatgttctctatgattgtttttctttt

SEQ ID NO: 55659 - DNA, 436 bp, Setaria italica
  misc_feature (22)..(22): n is a, c, g, or t
  Peptide Sequence Number=SeqID_121633
gaggtcagtgctgtcgcctacngtttcagaataaggtggctcgccaacaacaacaatagcgaatgagaagtcattatgcttcatgaaactctcgtcaggattctcagagtagacaacaggcgttgagtcagcaacagtggactttatggcatcaagaatcgtcgtccctgcagaggatatttaatcacagttgtgatatcaccgctgctccccatccattgaattgaccatcctccacattggtagcccaaattgctagcatggctcccagctacaaggatccttctagctttctttgggagaggtaagaattgctgattgggaggattcccattttttaaaagaacaagtgatttcctgacagcttctctagctaattccctgtgctccttctttccaagctgatctgcaaagctaagatcagctaacgggttct

SEQ ID NO: 55660 - DNA, 391 bp, Setaria italica
  misc_feature (297)..(391): n is a, c, g, or t
  Peptide Sequence Number=SeqID_121634
tagtacgtctttctaacttctagtagtagtaacttagttgtccttcttattgatgtactcgtatgtagtattgactcctatcctactctttatgcagcttgatccaagcttgtgctttgcctatcatgtctcgtctttcagctgtctcgtctttcagctgagatgctagaatggtaaatcagcgtcagaatcttggaaattgtttgactattgtagtcatctagtttttgaggtatttgcctatcagccactgaagtttttgtttagccacaacgcgctggttattatggggctttnnnnnnnnnnnnnnnnnnnnnnnnnnnnnnnnnnnnnnnnnnnnnnnnnnnnnnnnnnnnnnnnnnnnnnnnnnnnnnnnnnnnnnnnnnnnnnn

SEQ ID NO: 55661 - DNA, 359 bp, Setaria italica
  Peptide Sequence Number=SeqID_121635
ggcgtcttcgggtgctgaggcggcgccggcgccggcgccgccaccggtgggaccggcggagggctctgtgattgcgatccacagcctggacgagtggagcatccagatcgaggaggccatcagcaaaaacaagctggtagtgatcgactttaccgcatcatggtgcccgccatgccgcaccatcgctccaattttcgctgacatggccaagaagaactcaaatgttgttttcctgaaggtcgatgttgatgaaatgaaggtcgtagaactgctatcattcgttgcagattaacataatacaatttacttgtttcttcagttgtctgctttcctaacaaggtcaattttcgaagcaagga

SEQ ID NO: 55662 - DNA, 359 bp, Setaria italica
  misc_feature (339)..(339): n is a, c, g, or t
  Peptide Sequence Number=SeqID_121636
taaagaaaaaacaaaacaaaaagaaacggtaaacgaacgaacgaagaacaagaagaataggcgtcttcgggtgctgaggcggcgccggcgccggcgccgccaccggtgggaccggcggagggctctgtgattgcgatccacagcctggacgagtggagcatccagatcgaggaggccatcagcaaaaacaagctggtagtgatcgactttaccgcatcatggtgcccgccatgccgcaccatcgctccaattttcgctgacatggccaagaagaactcaaatgttgttttcctgaaggtcgatgttgatgaaatgaaggccattgctgagcaatttagngttgaggccatgccaacttc

SEQ ID NO: 55663 - DNA, 297 bp, Setaria italica
  Peptide Sequence Number=SeqID_121637
ctcaaattgttgttttcctgaaggtcgatgttgatgaaatgaaggtcgtagaactgctatcattcgttgcagattaacataatacaatttacttgtttcttcagttgtctgctttcctaacaaggtcaattttcgaagcaggccattgctgagcaatttagtgttgaggccatgccaaccttcctgttcatgaaggagggagaagtcaaggacagggttgtcggtgcagcaaaggatgagctggccgtgaagcttgagctccatatggcccagtagaccagtgatgttataatgaag

SEQ ID NO: 55664 - DNA, 254 bp, Setaria italica
  Peptide Sequence Number=SeqID_121638
gtttgcaatcacactcgatgaagtcctacagggcacggttccaaaagtaagacctcactatcaggttatcttcagctagaactagctcttacccaaaactttcaccttccaatcttccatctcactggatcttatgcctgagctttcatattcataccaaatatgaccatgaagtcattgccttcttcaatcttaaaccttacatggatgctaaatgaattgctacagtgactaaagagaataaaggaaatttg

SEQ ID NO: 55665 - DNA, 247 bp, Setaria italica
  Peptide Sequence Number=SeqID_121639
ttaacttttgttcttaggttagttctttaccttttcggttaggttttaggttcggtttctaaagtaagtaattgtcttcttaggtagtacatgatgtcagcaagaggactgacctcgttattgccgtgcataacctagcacatcgaattccacagtatcaacagtccaatacttctcggcctcagcctgctctttcacttctcttggatgaagccaaggctcttggcattccttggattcttgcaat

SEQ ID NO: 55666 - DNA, 243 bp, Setaria italica
  Peptide Sequence Number=SeqID_121640
atggtcctcgccgagtgcgtctacaagaggcctgtttctgagatgatgagatatattaacaagtttaaatctgattttggtggaaccattgtgtccctggagcgtgttcaaccatccttggatcatgtaccacatcggtatctgttggcggaggctggtgacaccctgtttgctacatttattggcacaaaagattacaagaaccatgtttcatgaggagactgctcagggtttcgctcctga

SEQ ID NO: 55667 - DNA, 465 bp, Setaria italica
  Peptide Sequence Number=SeqID_121641
aaaagaacaagatgtcactatcacagctaacgttcaagttttcttgttagtcatgctcttcctttctcaagataatcctcccaactgaatatgctgtcttgatgtgtgctgtttgtatttcctaatctaatgggccagaacggaagatctgaacattggtttctgttggaaaataggggggacacgaacaattgaataagaaatactgatatattcagattatttcactaaaatttgtatcaccagatctgatggcttcggaatgacaagaaactaattatagactgatttgtgattttggcagaaaaacagttggaagaacttattctcatacataggtcctggatttctcgtctcaattgcatatatttgatcctggcaactttgagacagatctacaggctggagcgcagtacaaatatgagcttctttggatcatactggtcgcgtcctgtgctgctctta

SEQ ID NO: 55668 - DNA, 446 bp, Setaria italica
  Peptide Sequence Number=SeqID_121642
attgaggagaggcctcctattgcgtatgtgaagcttgagattttggaaggaactgacatgaagccatctgatataaatggtgagaaaaacctgtgacaacttttgtgttactcttaattggtttaacacatttcatgttctattcacaggactagcggacccttatgtgaaaggtcgtctgggtcctttcaaatttcaaacagagatacagaggaaaacgctatcccctaagtggtttgaagaattcaaaataccaatcacatcatgggaggcatcaaatgaacttgtcatggaagttcgtgataaggaccccatgtttgatgactcacttgggtatgttctgttttctgagctcatgttgctaatgatgccttgatcaggaaatctataggataactcttctactatcttattaacccagtgttgcgattcaactggcttgtgtt

SEQ ID NO: 55669 - DNA, 330 bp, Setaria italica
  Peptide Sequence Number=SeqID_121643
taattaccctaagtcctttaccttaacttaacttaccgggttactacaagaagtagtagacaagagcttgatccaaagctccccaaaacaccacatcccaacctgaaggagcttggtgagaagcggacatcaataaagcttgtagtgaatgaagaagcaagcccagcaagcaaggtgggagacacggataactcaacagaagatgtagcaaaggtgatccaaaaaaatgcaggtgaaccaggcagatcactgacgagcacactgagcaggaatatttctaggaagagagaggaggacaggttatcagatatccaggagcagattgaagct

SEQ ID NO: 55670 - DNA, 407 bp, Setaria italica
  misc_feature (34)..(34): n is a, c, g, or t
  misc_feature (95)..(95): n is a, c, g, or t
  Peptide Sequence Number=SeqID_121644
acaagaacaaaggaaataattataattacagtcntaaatgtgagcataagatttcaacttgtacaggactggccaaacggccattccgcaaggcncaaaaccttacaatatccaaccatcctcatctccgctgctgaaggaaccaatcatatcactctcgtcgtcctccccttcgccatcacccatgatatccagcaagccccctccgccatcaaggtcaccgtcatcgatgaactctggatcatcttcgatttcatctgaactgggaatatcatcgtcgccaccatcatcgctgctgttactgagatcgtcagaatctgaattaccccttacccaagaaacaaggactacaaagacaagaaacaaccaatacaatactagaagttagtacaatacaatacaataca

SEQ ID NO: 55671 - DNA, 251 bp, Setaria italica
  Peptide Sequence Number=SeqID_121645
tacctgcacccctggaagacagcatcaaccatcgagcgttaccagcatggattccttctttcggcccttatctgtaacctttcaaaccttctggtcatcacacctatgatggttgaagtaaaatactttgtttgtggccttgagctttttactacctctcgttttgcatttgccagatgctagtgtgctagttatacagaatatcacaaaattatagtttgagtatgtgataatatcgttactaatgaatg

SEQ ID NO: 55672 - DNA, 189 bp, Setaria italica
  Peptide Sequence Number=SeqID_121646
gatctgtaatatctgtttgcaatgccaatgacacgtgaatatctgattgatatgcacgtgtcattggcattgcaaacagatattacagatccttttcatggtcactgacacgtgcatatcaatcagatattcagattacaagttcatactcatagcatgataggctgctatgtggtatacggagcttct

SEQ ID NO: 55673 - DNA, 411 bp, Setaria italica
  misc_feature (364)..(364): n is a, c, g, or t
  Peptide Sequence Number=SeqID_121647
ttaggttcgttcttagttctttcggtcgttcgtattgttcctaggttacgttacccttcgcgcagcgactcgccgggctggatgggcttctccaggatgaggccgtccctgtcgccgcatacaaaagcaagtaggaagaacgtagcaatgaacatcttgagcctgggacactgcttggcgaagtggcagaggtgcttcacccccatcacgttcacatccaaggaaacatcgtatctttcatagaagtttgtggttgccgcaatgttgacaatggcgtcgatctccttggctaattccttgagcatgggagcctccagcccgaggttctcgtagatgatgtctccggccagagcaacaactttcncttggatcaactgctggaccgtcgctgtgcttctcctcagcaggccg

SEQ ID NO: 55674 - DNA, 441 bp, Setaria italica
  Peptide Sequence Number=SeqID_121648
ttggggtcgaaattgaacatttgatcttcaggggtcttcatcgccatcatgagcctcagccgctccaagttcatgtcatcgaagcttcatcaccaccacagcagggaaggaaatgaaatcagaaattaaatccaccaatttgctgaataattaaagccagaatatgatgagcaacatctctaccatcctttgaagaaggcgaatgggccgtagacgtcaacaagatgcatcacgaacttgtacttgcggttgaggtcgttgtagagccgcgagaagaagccgcagagcagcagattcaccaggtgcaggatctgcgcaacgcatcgcatatcgacgaccaattgatgaggatcatcagcaaacaaaagacacaacagaaaagatctatcgacaagcaggctgacctctagtggtatcttgtatgtgaagatcatgtagagg

SEQ ID NO: 55675 - DNA, 279 bp, Setaria italica
  Peptide Sequence Number=SeqID_121649
acccgggaatagaacgtaccaatagaacgaaggtacgaaggtcggcgaggaagcaggagaggttctgcttggcgtagccgatgatgatggtgtcgatggtgcgggtgccctgcatccacccgggcactgggtcggcccggacactcgtgatgatgctgggccgcatgatcaccaccgggatgtcgccgcggaggtggcccaggagcacctcgcccatggccttggtgaacacgtaggtgttggaccacccgaagtgacgggcccgctggaggccccagg

SEQ ID NO: 55676 - DNA, 250 bp, Setaria italica
  Peptide Sequence Number=SeqID_121650
agaagaaagggacgacgacaaggcggtagccgccaatacaatggacgttacaaccaaccaatagtaccccccgggaatagaacgtccatgacgaggtcgaggtcggcgaggaagcaggagaggttctgctcggcgtagccgatgatgagcgtgtcgatggtgcgggtgccctgcatccacccgcgcgctgggtcggcccggacactcgtgatgatgctgggccgcatgatcaccacgggcatgtcgccac

SEQ ID NO: 55677 - DNA, 132 bp, Setaria italica
  Peptide Sequence Number=SeqID_121651
gtgaatctgctgctctgcggcttcttctcgcggctctagtggtatcttgtatgtgaagatcatgtagaggtggaatcgcgcgatggtggggaagaagtacatctccctcgtggggatggccttgccgtcctt

SEQ ID NO: 55678 - DNA, 385 bp, Setaria italica
  Peptide Sequence Number=SeqID_121652
agattatccgtgtttaatatgatattcaacattcgataacaatatatagttattatctctttgttgatgggaacataactgtagactacgaacagtttctctggacgctgtgtggtatccaatcactgtttttactaacttttggttctttaggcactatgcaaactgagcggctcaatgatgttgctgatggatcatccaatgttagggaggtttggaaattctcattcaaatagattagctctgcctttgcgattgtcggaaaaactgaaaacatgtactggactccatatttggtagagggagccctggtttaggagttccctgattctgctaatgtacttctgactatatcaaaagttgatattttgtttggagtttcgat

SEQ ID NO: 55679 - DNA, 258 bp, Setaria italica
  Peptide Sequence Number=SeqID_121653
tgcgagccaaaaccaccgcctccaccagctcctcaatcccggcggcggcgtcgcctcccgcatccgcgcggcggggcacattgccctctcttcgcccgcgctgctcgacccacgcttctcacccgctgctcctactccaggaaggggaacggcaatcctcgcggtacgccccgtcgcgagagctccagtaccgtgcggtgggtgcccgctatctctgcgttgttaccatttttgtagcgtttgagctggagcagccag

SEQ ID NO: 55680 - DNA, 241 bp, Setaria italica
  Peptide Sequence Number=SeqID_121654
ccgagagctccagtaccgtgcggtgggtgcccgctatctctgcgttgttaccatttttgtagcgtttgagctggagcagccagtgattaatatgtctatgctgggtttcgaagagagcagtgatcagggaacagatttggctagggaacaacgcaagggtgacattatggagctcttcagccaggctcaacggaatatcctgtccctaaacaagcagcggcttctggccatggaggagctg

SEQ ID NO: 55681 - DNA, 385 bp, Setaria italica
  Peptide Sequence Number=SeqID_121655
caatgttgatttgaatggctgtgagaatctcacagatgcagctgttctgccttggtgaaggcacatggtgcttctcttgcacaccttagccttgagggctgcagtaggattactgatgcaagcctgtttgcaatctctgagagctgcagccagcttgctgagcttgatctttcaaactgcatggtcagcgactatggtgttgcagtcttggcggcagcaaagcagctcaagcttcgcatcctctcacttttcttggtttgtctatgaaggtcacccagaagagtgttcctttcttaggcagcatgtcttcatccttggaaggactcaatctccagttcaacttctattcggtctaacctactaactattcgtccttcaacttaga

SEQ ID NO: 55682 - DNA, 230 bp, Setaria italica
  Peptide Sequence Number=SeqID_121656
tacattctccaactgagggcagatcatgcccaccatggccaagctggcatctgtgaaacccgggcaatccttgatggtcagggagcgaagcgacttgcatactggaagctgtgcaggtgcagagcagatgtccttgatcccaatgcatttgaccaaagagagagccttaaacttcagcccaagtttgaagcttgttaacctcaagaagtgcagcaaggtctcagatggtt

SEQ ID NO: 55683 - DNA, 141 bp, Setaria italica
  Peptide Sequence Number=SeqID_121657
ctgtagagcctttgccatgacaaccctgtgcggttgttttctcctccagatatgattttgcaggcaggtgattgtttgatacactgtaacctttgcaaccttctgaagataaataaagcttgtgttaccctttacaaaaaa

SEQ ID NO: 55684 - DNA, 446 bp, Setaria italica
  Peptide Sequence Number=SeqID_121658
atcaaacattgcttagtgtggtgttacaaaactgcacctttaaaatgatacgccactctctgctgatgtggggttttgaaaaattagtctagatttctggtgtgtgggaattgcagtacttgttctttgtattaatcatcatgcatcgattttgtttctgttttattttgttgtagggatcatgtttcaagacatcacgacgttgctccttgatccgaaggcgttccgcgacacgatcgacctctttgttgagcggtacaaggaccaagggatcaccgttgttgctggtgttgaagctaggggttttatctttggccctcctattgctttagctataggtgcaaaatttgtacctttgagaaagccaaaaaagttgccaggtgaggtgatctctgaagaatattctttggaatacgggaccgacaaaatagaaatgcacgtcggag

SEQ ID NO: 55685 - DNA, 393 bp, Setaria italica
  Peptide Sequence Number=SeqID_121659
ttagtaaattgtctacgttcggtagtcttgttggtaggtcctaattgtattcgtagtcacttgttgtcgatgatcttattgctactggtggaacactttgtgcagctgtcaaacttcttgaacgtgttggagcaaaggtggttgagtgtgcttgtgtcattgaattgccagaattaaagggccgggacaagctaggggacaggcccgtttttgtccttgtgaaagcagactgagcaggatggaatacaagtacacaacttaggacttctcagagttggccctgttgatgctccctctccagaaccattctggaggcaacaaagtatcccattttacagcattggctaattcctagctgatgcataataaagttttatctttgaatttgtgagg

SEQ ID NO: 55686 - DNA, 268 bp, Setaria italica
  Peptide Sequence Number=SeqID_121660
tggtggaacactttgtgcagctgtcaaacttcttgaacgtgttggagcaaaggtggttgagtgtgcttgtgtcattgaattgccagaattaaagggccgggacaagctaggggacaggcccgtttttgtccttgtgaaagcagactgagcaggatggaatacaagtacacaacttaggacttctcagagttggccctgttgatgctccctctccagaaccattctggaggcaacaacagggccaactctgagaagtcctaagttgtgt

SEQ ID NO: 55687 - DNA, 336 bp, Setaria italica
  Peptide Sequence Number=SeqID_121661
ttgttaacctttaggttattttcttttctttccgttctttggttatttcttagttagttctaggttgtcttctcctggacccctctggagcagaccgatcatcattccggttgcgtttccgttggtaatctcctctgtcattcctgtatgagtctccatatcctctcttgcgttcacctctctcatatggaggtggcgcattcggttgaaaggctccaccatagtcaactaattctctttgtgcttctagctccttctgaaccatcttaccataaccacctcttcctggatcataatctgtacggtactcatctctgacttgtccaccacctccgt

SEQ ID NO: 55688 - DNA, 258 bp, Setaria italica
  Peptide Sequence Number=SeqID_121662
gagcagaccgatcatcattccggttgcgtttccgttggtaatctcctctgtcattcctgtatgagtctccatatcctctcttgcgttcacctctctcatatggaggtggcgcattcggttgaaaggctccaccatagtcaactaattctctttgtgcttctagctccttctgaaccatcttaccataaccacctcttcgtttgattaattaaggaagcttgggaatacttgaagttgttgaaaaaaggaacatgtaag

SEQ ID NO: 55689 - DNA, 241 bp, Setaria italica
  Peptide Sequence Number=SeqID_121663
agtcgtcgtcttcctcatcagagtcgcccttctctcggaacctaggattcttctccgctggatcagagtcaggtgctctcctggacccctctggagaagaccgatcatcattccggttgcgtttccgttggtaatctggtgacagccataagttatattagaaaaaaaacatacaagagaataagtttgatttgtgttacctcctctgtcattcctgtatgagtctccatatcctctcttg

SEQ ID NO: 55690 - DNA, 407 bp, Setaria italica
  Peptide Sequence Number=SeqID_121664
caagctgacgtttaaagagcagtctttccttgatcgaaatcctcgccaggagttgtcaaggatgctgatggaaccaaggttgcaaccttgaccggaaagtgggatgaaagcgtgcattgtgtcatcagtgatgatgcctctaaggtgaaatcccatggttcacatcatagtgctggcgccactttgctgtggaagaaaaaatgagccttcagcgaatcctactcggtacaatctgtcctcatttgcaataacattaaatgagctgacaccggagctcaaggtagacatggaacatacatataacccatcatttgagtcctgttagctctgaacctaaatgcctaaatcactttttcccttctcttgttaaggagaagctttcaccattggccttctcgtgctcccat

SEQ ID NO: 55691 - DNA, 302 bp, Setaria italica
  Peptide Sequence Number=SeqID_121665
cccactttccggtcaaggttgcaaccttggttccatcagcatcctttgacaactccttgaacctggcgaggatttcgatcaaggaaagactgctctttaaacgtcagcttgcatgaatattgtctatttccacttatgttcattgtcccatggtgatggcaatagagtcgaccaaggataaggttattaattgttgttgtaaccttgctccactggaaagtttctccatcatcaaattctggggacaatccattcaagtggatcctgatggtgtgttaacattagagtttgatgattaggaa

SEQ ID NO: 55692 - DNA, 260 bp, Setaria italica
  Peptide Sequence Number=SeqID_121666
tatcaggtgaccagaatgatacatccccattcaaagaatattcacttcttgcagtgacaagcgcttcaatccaagaagtgaatattctttgaatggggatttatcaggtgaccagaatgatacatcattttccacagaaaagctcagaaatcgcctgcatactgaaggtgttggcgaggcaattattaaagactgcgagcagattgttcattcagaatttttcgcagtaccaaacacagatgaaacagcgttgtgaagag

SEQ ID NO: 55693 - DNA, 255 bp, Setaria italica
  Peptide Sequence Number=SeqID_121667
cttacacatcggtacaatttaaacactagaggatcactgaactggatcatacctactgctttatggatactatcacgtcagttctccagtggacgtatcttgcccagaaccccagccaaactagaaaacacacagccaaatgaaatccgatgagttcgttccatccatctatcatctatgcattatttgttcatccaaactaatcggagcatccaaattggatcccgagtagttcgaaggccggcccttccccga

SEQ ID NO: 55694 - DNA, 243 bp, Setaria italica
  Peptide Sequence Number=SeqID_121668
ttccctaggtcctattagcaagtttgcgttgagctcatgagatgagaattcccttacgctcagtttcatgccagggaagtcgtgcgctctctccacaaactccaacgcctgcttctccccctcggcgtcgacctgcatctcatctcggtcgtcgtcgctgtcgtcagcgccgtggaagagggaggcggcggagaagagagcggtgtccatgagtagactcttgctgttgagggagttcactcg

SEQ ID NO: 55695 - DNA, 247 bp, Setaria italica
  Peptide Sequence Number=SeqID_121669
ggatactatcacgtcagttctccagtggacgtatcttgcccagaaccccagccaaacatgccagggaagtcgtgcgctctctccacaaactccaacgcctgcttctccccctcggcgtcgacctgcatctcatctcggtcgtcgtcgctgtcgtcagcgccgtggaagagggaggcggcggagaagagagcggtgtccatgagtagactcttgctgttgagggagttcactcgattgggaagggagg

SEQ ID NO: 55696 - DNA, 268 bp, Setaria italica
  Peptide Sequence Number=SeqID_121670
gaatgctttattacatggggttttgaagaagtcaaaaatgagaggtcaaaatcagtcagaacaatgtgtccatcctcttggagtaaaatattttctggttttagatcacgatatataattccaagggaatggagatactcgagaccaattacaacctccgcagcataaaaccttgcagattcttctcggaagagtttcatgggttgcctatcaagcattcaacatcaagacgaagaagatctaaagaatttctgccccaaagtttttg

SEQ ID NO: 55697 - DNA, 255 bp, Setaria italica
  Peptide Sequence Number=SeqID_121671
cgatgaaccttgttgcggttcaacatcactgatttgtccattgccttcattgcaaataattcaccactgcctagcaactccaccaggtgtacactgccagtgtcaccacaacccaaaggttttacaggcttgaagtgctttaagccaatcttctcccagtattgagacattttaaggttgtatgacccgctcctggaaggaacgttattgagcatgtatagtaataagaggcttcatgagctggtagaaggaatt

SEQ ID NO: 55698 - DNA, 226 bp, Setaria italica
  Peptide Sequence Number=SeqID_121672
aaataaattctcctccaggacaaaagtctgttatgagacaaacatgtgttggtgtctggaatgaagtatataatgttgggagaaacggatgatccaacagtgagtatatttctctttcgatacaaactcgatgaaccgtcaaaattcccccttcattctttcagtttactagcttgaaacactacccctcccttcccgcagcaggaggtatgcacatccacccaac

SEQ ID NO: 55699 - DNA, 253 bp, Setaria italica
  Peptide Sequence Number=SeqID_121673
aaagaaaacgaaaccgaaaccgaaaaggaacggaacgtaaaccaaaccaaagttacgaacccggaccaaagtaacaagacccctaggacaagcagcacgaggcggcgaggctccacgacggggtcggcggcgcggcgagcttcccgatccggtcgatgtcgagggacctgccggattcctgcttcgacctcgcccgcagcgcgctggaggacgagttcagcgtcgacttcctctgacccccagccgagaggtc

SEQ ID NO: 55700 - DNA, 437 bp, Setaria italica
  Peptide Sequence Number=SeqID_121674
gaggtcgaagtggtacttggccaccggtagtaattcatgtcggtgatgaccaccgtctgcggcgcgccggagcaggcagggtggttgctcttgaggcatcgaatctggaggaagccaagcacaaggtcaacgggtgcacgtactcctagtcctggcctagctagctgcccatcataaagatgagcaacctgtggcgctgcggacgctaactggcatctttattgaccaaccaaataaaatagaccgggcaccaactgctataatcgtgcatggcgatcggcgccatggcgaaaccggatcagtacgcaacgcacctggtagcatgagccgcagcccttgccgtccttgaagatgggctcgttgccgcaggaagtcatggacgagaaggggtactggttggtgtgcttgaccgcacgcaccgcctggcaaagattcag

SEQ ID NO: 55701 - DNA, 250 bp, Setaria italica
  Peptide Sequence Number=SeqID_121675
cgctcagcagcagccgagcaacgccacggagtccaaggacctgtcctgggactccgtggccgttgctcggctgctgctgagcgcgagcgccataggcgacgagcacggagaggagcgcggcaagcgccacggccttgaaggagagcccagcggccatgcctgcactagctaggaccgaatggaactactagctagctgctgcttggtctacttggtctaccttgttcttgtttactttaggttttagtta

SEQ ID NO: 55702 - DNA, 372 bp, Setaria italica
  misc_feature (326)..(326): n is a, c, g, or t
  Peptide Sequence Number=SeqID_121676
taacctgtccaatacgcattagggttatctgcatatctggtcgaagagaaaatacggtcatgcatggtcaaaaggaataaagtaatgataatcctataaattatgaatgcataataaaaacatacgggaagaaatcattggtcttgagaggccattgctcatttgcagcatattttgcatcagtgtaaatggaaggtgtggaataaagagcattgatgaggccatgctgaggtatggtcaaaaagaacaagcatggtgagtacaaccataattagagtagaaaacttcactgtttcctactattttgtattttgccaaatccaatnttgataagaaattaagaggaaaagagaagcataggaacatataagt

SEQ ID NO: 55703 - DNA, 231 bp, Setaria italica
  Peptide Sequence Number=SeqID_121677
ttcctgaagagtaagcaatgcaacattatcaggcaagctgtaggttggatccattgcagagaattttggaacatgtgaattcgcccagttgcctccatcctgggtaaacaagttggcgcatgttgaacacacaaatagcctgagcaaccatgctgatggcaagtttcaccccatacggccatacctgctctgagaaagcaaggaggagaggtgagtatatttcctggccaa

SEQ ID NO: 55704 - DNA, 374 bp, Setaria italica
  Peptide Sequence Number=SeqID_121678
caatctgccagccaatccgtggaatctgaccaaactcttccttgacgaacttgtgcccgagcgtagtctgatcgatcatgtcgatgtagtgcacagtggcctcatcatgcatgcacatgcccccattgcttcaacagcagaagcaatgtcattcaatccagagcagaaacaactacaaagcgacagcttaggaacttgaaggagcatacatcaattccaaccgtccagagctgatgagacccttcacagtatccttgatcatgtcgttctggttcctccaccatctctggaagaatgcctgttcgacatagacgaacttgcggttctcgtccttgagcagggccgggatgagcgaatccagaacgttctgcacg

SEQ ID NO: 55705 - DNA, 247 bp, Setaria italica
  Peptide Sequence Number=SeqID_121679
ttgtgaagtaacctgtccaatacgcattagggttatctgcatatgggaagaaatcattggtcttgagaggccattgctcatttgcagcatattttgcatcagtgtaaatggaaggtgtggaataaagagcattgatgaggccatgctgaggtatggtcaaaaagaacaagcatggtgagtacaaccataattagagtagaaaacttcacttgtttcctactattttgtattttgccaaatccaatta

SEQ ID NO: 55706 - DNA, 524 bp, Setaria italica
  misc_feature (492)..(492): n is a, c, g, or t
  Peptide Sequence Number=SeqID_121680
aaagtagttaaaaaccaaagaaggacggtaactagaacaacaaggaaaaagacaaagaccaaaaacttgggctttgcacctggtgtagttcctaggtaagccttgacatgttggtcccgtatgttctgtgaggcactagctataggcagaagttgtgattcaatttcttttccttcggaatcatgaaccacaattgaatcactgaaaaccggcacacgaaggacatcttctcgtttccagccaagcgagttgtacacaagaacaaccaagcttttttccttcagaaaagtccatctcggaaggagggcaaaaagtaacatttagaagaagacattgagaaaactttgtcgttggggttgaacaacgtgattttgagcccgatcagtcaagcaagcaagagaagtcgaaacaagctcctgggcttgtgtatatccaattgacaatctcttggcataatcatttgctacatgttgcttctctgttcctgtaacngcatcgtggtgctgagcaagagctagagcatc

SEQ ID NO: 55707 - DNA, 292 bp, Setaria italica
  Peptide Sequence Number=SeqID_121681
gcttgctcgatgatcttgccaaatcttcttgtctgggaatactctcttgaggttgacactcgccagagctgaaagatccttgtgctctccagcctcgtatagatgagcaaaccgaagaagaacagttccatcttcgagttcctgaagagtaagcaatgcaacattatcaggcaagctgtaggttggatccattgcagagaattttggaacatgtggaattcgcccagttgcctccatgatgatgggcgaggcgtcgcagaggcgttaaatgaaactgtctgtgttgataaac

SEQ ID NO: 55708 - DNA, 199 bp, Setaria italica
  Peptide Sequence Number=SeqID_121682
ttcttattgttgtctagtattgggtactaagtaagtagtattctagttgtcttagttgggtactatcattacctcaatagaaccgaagctgcaaatgttgaaaaattgtaacaacatttttaagaagtggtgttgtaccaagccagattggagttatcacaccttatgaaggacaaagggcatacattgtaaattatat

SEQ ID NO: 55709 - DNA, 238 bp, Setaria italica
  misc_feature (218)..(218): n is a, c, g, or t
  Peptide Sequence Number=SeqID_121683
ccttcactgacctgagaagttgtagcagacataactagtattgcgtttttgcagagcatgatgaaccccctatactctcaatcctatgcccattataacacccaaccacagtctcttcaacctcctccgcagtgatagtgaaagcttgtgattggctgaagccgcattttggaagttttgtgggtttcatctttggcccacaggttgtcgcccccttntgcactacggaattgatggt

SEQ ID NO: 55710 - DNA, 193 bp, Setaria italica
  Peptide Sequence Number=SeqID_121684
ctggaaattatatgaaccaaaatgcacatccaggatactcccatattggtacaaccaatgacattgtatctcaggatcacatggcccatggatctcatggaatgtttacacaagcgggatataatgatccctctcaagatgagtcatctcagaagccattccgtaatgcatctgagatgactcatcttgagag

SEQ ID NO: 55711 - DNA, 414 bp, Setaria italica
  Peptide Sequence Number=SeqID_121685
ttttgttcggggtctaggtctttgttactaagtattggtcttattggcttatttgatcaacggccagtgctgatgagcacaaggattgcagcgtatctcatacttgatcgttgtaggtcactacgcaatttgacaacaagaggtgtcattgtgcatcgagagaggttgatggtgctagcctcatccctcacctgtatagaaaggcaatcagggcctatagtggtatgatgtgaatattccagggtttgctgccatcaaaagtcagggtgcagcagttgcatgcctccatggtaccacgaaggcgcctgcagagtggctttgatagaggtgctatagggtggggtggccaaccctttcggatattgcacatggccaagattattttttaccttacatttaaaactatatcgaatg

SEQ ID NO: 55712 - DNA, 382 bp, Setaria italica
  misc_feature (346)..(346): n is a, c, g, or t
  misc_feature (353)..(353): n is a, c, g, or t
  misc_feature (368)..(368): n is a, c, g, or t
  Peptide Sequence Number=SeqID_121686
atatgcaattccaacccggggattgcatgggcccattggagctgttccgccggtgcctcaacctggaagttgaaatttttgggggcacctcgttccaacacgggtggtcctattggtggtcatcttgctcatcaacagaactctcagcaggctatgggtggcatggggtcaattttaactatgctggcttggagaatccttagtctagttctagccttctggtggagcccaaatagtacccaaaactaaggaattaaaataagaaacaaacaaaagaaaataaagaaaacctaaaaagtaaaaaccaaaaaaaggaaaaaaactaaaaaacaaaaaaagtaaaaanaaaaaanaaaataaaactaaanaaaataaagttaaa

SEQ ID NO: 55713 - DNA, 295 bp, Setaria italica
  Peptide Sequence Number=SeqID_121687
ctccagcgaaacaagcatcataggaatgacaggcatagctggagaagcttgtttatgctcttatgatcatctccagcgaaacaagcatctataggaatgacaggcatagctggagaagcacaagcaggagcatcaagaggaagttgcttccgagccgctgcagcctccatgagaaggcagagtcaacctcgatcatgataccgaatctgcatgtcccagtgctggggtcttggcccgtggtcgtcgcgaggttttgaaacccacaggcctactattacgttactttaggttacta

SEQ ID NO: 55714 - DNA, 240 bp, Setaria italica
  Peptide Sequence Number=SeqID_121688
tgtcccaagattcagttggtactttggctggccatcataagtaaagatcccccagtgccgctcgaaatttcctggttgtatgctcttctcatcctcatcaattagactgaataagtaagcatcaacaggtccaggccgcatcggtgtccctcgcccagaagcaatatgagtcatgaagccttggttgaagcgctgactgagacacgcaacaggggaaaggcaaggcacacaggggatagg

SEQ ID NO: 55715 - DNA, 325 bp, Setaria italica
  Peptide Sequence Number=SeqID_121689
taaaaaaaataaaaaggtaaaaacaaaaaacaaaatttaaaccccaaagggaaaggaacaaaatacaatagacaactacaaaagaaacactggagaggtcgtatgaaaggaaaactgaattattatttagcctcaggacggctcgaagaaattacagacctgaaagaagatatatcagttccagagagcagtcagtcagatattccaaaggacagccagggttcatctgagagaaatcgaccaccatcatctttaccccccaagacccaaatctaaaaactgacctctccagaacttgatgaaaatgcagatacatcagaagagg

SEQ ID NO: 55716 - DNA, 367 bp, Setaria italica
  misc_feature (336)..(336): n is a, c, g, or t
  misc_feature (356)..(356): n is a, c, g, or t
  Peptide Sequence Number=SeqID_121690
tgtacctacctattgtctaagtaaaaattggtcttacttgtctttcaaggagggaagtagtttgaaaaattctgaaacgaccaaaggaagatggttagcagaggaaagttgttatcaaccataattttttattaaccatgtcagcttgggtttgttccatcatgcctactgagaaaacgaaattgtattttattccaggaagataaaattctcactaaaatggttaccaaacatgggctgaaaaactggcaaactatcgcatctgctatacctagccgaaatgcacaacagtgccgaataagatggacacgcagtcttgacccagcaataacaagngattggctgaagaggagganctaaaatgatt

SEQ ID NO: 55717 - DNA, 237 bp, Setaria italica
  Peptide Sequence Number=SeqID_121691
atgaaccctggctgtcctttggaatatctgactgactgctctctggaactgatatatcttctttcaggtctgtaatttcttcgagccgtcctgaggaagataaaattctcactaaaatggttaccaaacatgggctgaaaaactggcaaactatcgcatctgctatacctagccgaaatgcacaacagtgccgaataagatggacacgcagtcttgacccagcaataaacaaagagg

SEQ ID NO: 55718 - DNA, 241 bp, Setaria italica
  Peptide Sequence Number=SeqID_121692
tttaaatttaaatttaaaaagtaaactttaaagtaaacttaaagttaagtaaagactttagtttactaggtacttacttttaataacggtaagtgggggcacagacagacaaaagcacagggcgtctttaagtttcttctaggcactgtagtcttgataatctgagtgttttcttttccttttgtattatggagccattgagcaactttgtgttatgtgcttacatagtattcccatttta

SEQ ID NO: 55719 - DNA, 258 bp, Setaria italica
  Peptide Sequence Number=SeqID_121693
tgatgttaatctccttgctacttctaattgtttcatatctggtatcttaccacttcacattactcatttcagcttttggggactgagcctggggacttttctgtcaactgggagagctctaaaggcccaggacggaagggcctttcggctccagaaaagctagcaaaacattgggaatccattggaaagaaatcatcttccaagaaacaggtctcctttgccgagcgtcctgtatcttttgtttcgtgtggcaccatg

SEQ ID NO: 55720 - DNA, 243 bp, Setaria italica
  Peptide Sequence Number=SeqID_121694
cgcagagggagggagatggggagtgggaacgctggaaagcctggaagtccggaacaggtgacggggagagatttgagaatgatgatggcgaaagtgacgaggaaggtagtgaggatgaggaggggggctcggagatcgatggtgaatcattagggtcagattcagatgaggatttgagcattggggattcctcttcagttgatgatgaggttgtcgctgattacatggaggggatcggtggga

SEQ ID NO: 55721 - DNA, 238 bp, Setaria italica
  Peptide Sequence Number=SeqID_121695
gccaagtaaaagtgaggccagagctgaggcggaatgtgcgggcactggagactagtggtgttggctcagcctcactgttgaattctacaccgagtccaagagatttgggacgatggatggcttgtattggctgcactataccttggccatctttgccaaggccagtgccctcaatgaatcccatttttgccatcattttcgaaccaaagcccttggtgtgcacctcaaaggagcccag

SEQ ID NO: 55722 - DNA, 256 bp, Setaria italica
  Peptide Sequence Number=SeqID_121696
ccgtgcttggtcaaggtcctgaattattctgttccgtccttccaaatacagtctgattaacatttgcctgtgatgaggtcatcagatgttccgcctctgcaagtttcaactgacagtttgtttgccttgccagattgtcgtggggagcttcctgccaagctatcagctggagcagaagaacaagaagccgcgggtggacccggcacccaccctcccccagacccctcccgccattccaatctcaagcgtggacacc

SEQ ID NO: 55723 - DNA, 246 bp, Setaria italica
  Peptide Sequence Number=SeqID_121697
ctttcacctgcgcacgcacgtcggcgatcactacctaatagtccaccgtcctgctgatcactcacgggccgttgtcgtcgtcgacatctatgcagatgtggggcgaggtctcggaggcggtgaagggcgtgctgcgggagtaccccaagctgcggctgacgctagggcggatggtgctggaggtgcggcccaccatcaagtgggacaagggcaaggccctcgagttcctgctcgagtcgctcggct

SEQ ID NO: 55724 - DNA, 255 bp, Setaria italica
  Peptide Sequence Number=SeqID_121698
tgcggatggccgtgcgcagcgtcgccaagcacttcccgacggcgatcgtgagcggccggtgccgagacaaggtgtttgagttcgtgaagctggcggagctgtactacgccggcagccacggcatggacataaagggcccggccaaggcctcttcccggcacgcaaaggccaaggtgaccactcgctccatctatcccttgttgacaacctttcgctgcctcatcagccggttgatctaaagccgctttttttgcc

SEQ ID NO: 55725 - DNA, 181 bp, Setaria italica
  Peptide Sequence Number=SeqID_121699
ccggtggagtacgtagatgactcctgctgtcatcgctgacacggtttcgttgccgcgcacgtcgcaaacaaaacaagaatccggtgatgagttcctcgcgatttccttctgcaggtgtgccgcgcgctgacggccacgacggcggcgatccccggcgcgagggtggagaacaacaagttct

SEQ ID NO: 55726 - DNA, 211 bp, Setaria italica
  Peptide Sequence Number=SeqID_121700
gcagagaccgggaaatctcccaacaaggaggatcttgcaacggcgacatctgatcaagaactcgatgctggaaattctggtgtggcattgttacttcactgcttcatgtcacagcctgagggaattagctaatttgaagttctgaatctcgtgagttggtgaaatgtacctacagtgggcgaaagggagggacagcaaaggcagtgccggc

SEQ ID NO: 55727 - DNA, 338 bp, Setaria italica
  Peptide Sequence Number=SeqID_121701
cacgtccaccagagtgtatattccagcaaaaggagccccgcagcaccagcagtagccaaagtgtagcttatcgtgtatagtggtttattcatgcgcattccaacgaagtccattaagaaggctactgctagcatgctgaaggaagggatcagccaattggtgattcttccccggtgtttctcaaaatggataattatatgcccaaattgcagaccaatcaagcaagtgacaattgccatgacagagctcaggaggccttcaggatcaaatggcgcctggcaccattgtattggtagtctattcttggttggttagtcggttccttattttctttcttt

SEQ ID NO: 55728 - DNA, 246 bp, Setaria italica
  Peptide Sequence Number=SeqID_121702
ccctttcagaagggtgccacggggacctgatgctctcagtgatgacatatccagtccatgttccttgataagtaacttagctgccggactgattcggctcactactgtaaatggaaggatgtggatgtcgtgttttgaagaattcttttggcaatgctgctcaagaaaagagaacattgagatgcaactcggggctcagttgcttgatcgacagcccatacaaaagtaccaattttgtaataattt

SEQ ID NO: 55729 - DNA, 415 bp, Setaria italica
  Peptide Sequence Number=SeqID_121703
gtcagaggttgagggtgatactacggctgaacatgctgcagtggaaccagaccaaagtccggtagcacaatcaggaactgctgattcaccaagcagagctgctgacgcatctcccgcacgtgaaccttcccctaatccagtccaagctggagcattttctcgaccacagaataccagcactacaacagaggcacgtgaaccttcctctaacccagcccaagctggtgcatcttctgaaccacggaataccagtactgtaacagaggctactgaaactcgttcctagtaactaattctaactttaacttgttagtagggttccttagttacttaaaatttaggttctaaaccaggttacaacaacgtgcactaactaacccgccaacttagtaccaaggggttacgtagggaacaa

SEQ ID NO: 55730 - DNA, 367 bp, Setaria italica
  Peptide Sequence Number=SeqID_121704
actgaaagtagagctagctccttcgaatgaattcccctcttgcgattctgtctgtgtctaattttatttgggaggccagtttagcacgaagccattgcatgaaaccagggattgggctaagtgttgcaaaaaatctgtactgaaggcatatctcgtctcaacatgtcaatcacacgcttgagaagaaacttccccagattaatacctgataagccaggctgggtagacgatattgaataaaacagtgcacagctggcttcagattcaggagtcggggggtcatcccacaagacctcctggtattgcttggtattggtaagttagtcctaaagtctaacggtcgttaccttaacttacccttaattta

SEQ ID NO: 55731 - DNA, 233 bp, Setaria italica
  Peptide Sequence Number=SeqID_121705
gtgtaaggaaaatggctatgaaattataaaactgtatatgagttacttggaacttggaagactaggcagtaatactctagaagtgcagcaagccacaaatagcaaccaaacagtcagtctgacattctgacctggtattgctggatggaagtagccaaagcaacggcgaccaacacccaatcttctcttcaagtctatcaggtttctgattggatgcactgcctcatatgcca

SEQ ID NO: 55732 - DNA, 304 bp, Setaria italica
  Peptide Sequence Number=SeqID_121706
tgggctaagtgttgcaaaaatctgtactgaaggcatatctcgtctcaacatgtcaatcacacgcttgagaagaaacttccccagattaatacctgataagccaggctgggtagacgatattgaataaaacaagtgcacagctggcttcagattcaggagtcgggggtcgatcccacaagacctcctagtatgagaaaagaagaacataaggtgctgtgcagtagaatactaatttagtcaatataactacgacggtctaataacctgtatagatgcagccatatctttgtgtaaagcaacttcg

SEQ ID NO: 55733 - DNA, 516 bp, Setaria italica
  misc_feature (286)..(286): n is a, c, g, or t
  misc_feature (360)..(360): n is a, c, g, or t
  Peptide Sequence Number=SeqID_121707
attgttttgctagtcaggaaagaaaaagactgctgacaaagttagttatttcaattttttcttaataagtcctttactaatatagttgcaccagttgtagaattgcaatgtaactgaaaatctctactttattagtgaagtcaccttgaatttccttgacatagcaatttagtattctctaaggctttcatgctctggaagtttagcttaccctatagtcattttaaatttctgtcatgattcaatatttgtacctctttctgataatttatttaccctggaaacngaaatgtagagaataatatgttctctgggccaattcctcaaaatctgctgaacataccaaatttcaaaaatgangggaatccatttaataccagcacaactccctctacttcaccctcttcgacacctactcggctctacaccaacatcaacaccaacacaaacaccaatcatcctcttcaggagctcctccaccatctagtacagcgtcaaactccagtggatctactg

SEQ ID NO: 55734 - DNA, 238 bp, Setaria italica
  Peptide Sequence Number=SeqID_121708
tgtgattagatgatggatcatttttgttccttgctgccgcagctttctctcagataaccaactcactggaagcatcccaatgtcattatcaaacctccgcagtctaacagccatgtcactgaatggtaaccatctagatggaaaattgccagatgcatttgattcactaacgggacttgtaaatctggatatttcttccaacaacttcagtggtccattaccaccttcagttggggag

SEQ ID NO: 55735 - DNA, 468 bp, Setaria italica
  Peptide Sequence Number=SeqID_121709
cccgtaattccaaggtaagctccaactgcgcccgctcctggggcttttgcaccaatgtaagcaaagccaacatctgggaacaggccaataccattttcaggcatggctaggagcgtcttctcagtaataatgcggtagcgaccatgtcctgatagaccaattccaaatcccatcgtcactccatccatcaagcatatataaggttttgcatactcatgtatcttgcaaatcaaagagtattctgctgtgaagacctgaaaagtgatcagagtactacttagtgactgtaaactaatttcagccatcaatgccagagtttaaggtctaggtagctgttggaattgtaattttgttcaaactctaatattttttctcctaactaattcatcttgataggagcttgaattcactatgtttgtatatggcacaattaattgttgaaattcaattatagattgaaactcagtt

SEQ ID NO: 55736 - DNA, 255 bp, Setaria italica
  Peptide Sequence Number=SeqID_121710
tggtgtgcttttgtccttttgtatttccgcggcaacacccttaatatccatcccagctgagaaggcacggggagagctgctttccacaagaatacacttgatgcttggatttgtttcccattcatcaagaagtgccttgtatctaacatccatttcgaagttcatggcgttgagggccttggggcggtcgagcgtgaagcaagaactggtggtactcttgagggtataccgcccaggcgcaggggtgacggtcag

SEQ ID NO: 55737 - DNA, 225 bp, Setaria italica
  misc_feature (216)..(216): n is a, c, g, or t
  Peptide Sequence Number=SeqID_121711
agcgtcttctcagtaataatgcggtagcgaccatgtcctgatagaccaattccaaatcccatcgtcactccatccatcaagcatatataaggttttgcatactcatgtatcttgcaaatcaaagagtattctgctgtgaagacctctaatatctctggaattgtgcactcattagcaagtctcttcacatccccacagctgagaaggcacgggganagctgcttt

SEQ ID NO: 55738 - DNA, 212 bp, Setaria italica
  Peptide Sequence Number=SeqID_121712
gccttgcttctttgcttgcgtgcttctaagggaagtgaatcaggaatcatttgcatgggcattgcagaaaagctccacagatgatattgactgatcaaaatatgtgtctcaaggaagcaattgaaaaggaatttcctagcacaaagcatgccctttgcatatggctaattgcagccaggttcccatcttggttgaatgtaaatcttggggag

SEQ ID NO: 55739 - DNA, 142 bp, Setaria italica
  Peptide Sequence Number=SeqID_121713
caggccgagttttcacagtgacggcatgcacaccttatctaagtacgaggtgtgcatgccgtcactgtgaaaactcggcctgccgttatacttcgtatctctcgagcatatagcctcagaaggtatcgctcctcagtaaatt

SEQ ID NO: 55740 - DNA, 389 bp, Setaria italica
  Peptide Sequence Number=SeqID_121714
aagaccctgcaaaagaccgtttgtgatgtttgtaaaactttttctaaacaattgcttcatatccagagatatcaaatgcgccaatatattggttcatgcaaatggatctgtgaagcttgcggattttggactggcaaaggagatgtcaaaaattaatatgctaagatcatgcaaaggaagtgtttactggatggcacctgaggttattaatcctaaaaagatgtatgggccttcagctgatatatggagccttggctgcactgtattggaaatgctaacccgtcaaataccatttcctaatgtcgagtgggtatgtcatgtttcaattttaaaattcgtagttatataatattttgttgaccatatctttttttcaaatatttgaaact

SEQ ID NO: 55741 - DNA, 352 bp, Setaria italica
  Peptide Sequence Number=SeqID_121715
ggactggcaaaggagatgtcaaaaatccgcaagcttcacagatccatttgcatgaaccaatatattggcgcatttgatatctctgtggacaacatattggttcatgcaaatggatctgtgaagcttgcggattttggactggcaaaggagatgtcaaaaattaatatgctaagatcatgcaaaggaagtgtttactggatggcacctgaggttattaatcctaaaaagatgtatgggccttcagctgatatatggagccttggctgcactgtattggaaatgctaacccgtcaaataccatttcctaatgtcgagtggacaaatgctttcttcattgtatttggtaagtagt

SEQ ID NO: 55742 - DNA, 424 bp, Setaria italica
  Peptide Sequence Number=SeqID_121716
tagtgtaagaagttgatccagagaaccggccttctgcgttacaacttttggagcacccatttgttaacaggccgctgagagcttcattcgactcttcgtctccccctgccatccgcttgtagtactgatgggtgggtgcttgtctttgtgaagccaatgcttaagtcatctaccgatcttcatgatttccacttctggtgccagaaaggagctacgtggccttgtttaggatatactacagtttagtatgtgtagtcagttggatagtgagcttcagtattgaatgtgttccattgtattctttgggtattcttcgttaagcgaagggttttccattcagttagggttttttttgtactacttgctaggtaaaaggggtggaattttctgtgatagtgatctagacttggccgatgtctgtaaa

SEQ ID NO: 55743 - DNA, 242 bp, Setaria italica
  Peptide Sequence Number=SeqID_121717
cctatccccaactacctgtcaaaagaagcacaagatttcattggccaatgtgtaagagttgatccagagaaccggccttctgcgttacaacttttggagcacccatttgttaacaggccgctgagagcttcattcgactcttcgtctccccctgccatccgcttgtagtactgattgggttgggttgtctttgttcttttgttgtaagtcctaattgttcctttgttagttactttgttctt

SEQ ID NO: 55744 - DNA, 237 bp, Setaria italica
  Peptide Sequence Number=SeqID_121718
tatgccatttgtcagtatatgcggaccttactaccttagtaatattattcaactcatgtgatgtgtttatgtttcaatgcaggaagaatcgaaactctatatctttattgagcttgtcactcaaggatctctttcatccctctatcaaaagtataaactacgagaatcgcaagtctctgcatacactaggcagattcttaatggattgctttacctccacgagcgaaatgttgtcca

SEQ ID NO: 55745 - DNA, 406 bp, Setaria italica
  Peptide Sequence Number=SeqID_121719
tcagcttgattcagcattatttgagaaatgatgtggacaatgacgttacaaagcacgtcattgttcttgttgcacccatccgtgctactataaatatacttcgagtggctcttctccaggagcttgataatatgctcctccagatcctcatccttactgcaccttcggatggtactcctctcaccgtttgagacgatgacgacctcctctttgtacgttgcaagcagattggccaccaccacgttcatcttgtacttgttcagagccatttctgctttctgaatgaggatatctgaatctgtctccagcttgaaagatatgcaaaaggccaagggggcccattggtttcgaagaactgaaagcatttttgggacctgacttagcttcattattgctaaaaggtcct

SEQ ID NO: 55746 - DNA, 282 bp, Setaria italica
  misc_feature (4)..(4): n is a, c, g, or t
  Peptide Sequence Number=SeqID_121720
aaanaataaaggtaaaacaaaataaaagtaaaagtaaaggaaatttaagaataaattaagaaaataagaaacaataatagaacaatccattgtacctcgtgactggatcgatgaaggtagaaaggaaagtgtagaaaccaagcatcagaaaatggcctgaccagtcaaggatgactccaagtccaacctggaaggaagaagaataaatgcgctactaaactccaattgtcaggcctccatgcgaggatttgccaaggcattgcagcttgtatgaatcaaatg

SEQ ID NO: 55747 - DNA, 329 bp, Setaria italica
  misc_feature (137)..(137): n is a, c, g, or t
  Peptide Sequence Number=SeqID_121721
gcttgactgtatgttgtatttgcagatgcatgcagatgcatcggcattgtatagcagttatttgatacagggactctaatggagtgaggtgcaacacaatggacaatatggtagcaaagtgaaagtctgtcgaactnccggggacaaagtgaattttatccaactacttgtatgttgttttctgattgaaaccattaaggaattatgaataagctagaagatcactcatacgacgaatgcatgtaatggtcgccgcatttggcgtcaccgtgtgcaaatgatgtataatatttgtacctcacagttacaatgatacaacacatggtaca

SEQ ID NO: 55748 - DNA, 255 bp, Setaria italica
  misc_feature (2)..(2): n is a, c, g, or t
  Peptide Sequence Number=SeqID_121722
cngtttacatagctgttggcatcatccatggtcatgcatggcactatgccactagcatgacacgcttgaactgtatgttgtattgcagatgcatgcagtatgcatcggcattgtatagcagttatttgatacagggactctaatggagtgaggtgcaacacaacatacaagtagttggataaaattcactttgtccccggcagttcgacagactttcactttgctaccataattgtaccaattagtagttagaca

SEQ ID NO: 55749 - DNA, 171 bp, Setaria italica
  Peptide Sequence Number=SeqID_121723
cccgtggtcgtcaacatcctcagggccatgacctccatcatacccacctggaagatcgtgcccaccaacgacgtcatcgacgccgcatacaggacgcaggagaagagggacgagatcaggggcaacccctggtgcaggaggtttgcctccacatccaagctgaccttgagc

SEQ ID NO: 55750 - DNA, 334 bp, Setaria italica
  Peptide Sequence Number=SeqID_121724
cttttttttttttttagttacctagaaaacttctgaggtaatttatgctgcaccataaggtttcctttacaagaaagctatctgaaatgtctatatgtagctaggatgctgatgctacatcgtctggaacatgggcactctctaggaggacataactgcaaagttttactgccttcttgcaaaacatgggcaaagactaaagaagttgcataaagatcagctcttgttttcagtagtttctgctgaagtagaggatatgttattgttgatgaaaagttgccaagatttgtggtccctgacttgactgatttcaagctgaagccatatgtgtcac

SEQ ID NO: 55751 - DNA, 243 bp, Setaria italica
  Peptide Sequence Number=SeqID_121725
tcgtctggaacatgggcactctctaggaggacataactgcaaagtttttacttgtcctttctttgtctaaaactatgggcaaagactaaagaagttgcataaagatcagctcttgttttcagtagtttctgctgaagtagaggatgcggtggatgctgtgaggtccctggcgctttgtgacacatatggcttcagctgcaacaattcacacaagacatttatcaaagtcatagtactccctcc

SEQ ID NO: 55752 - DNA, 272 bp, Setaria italica
  misc_feature (43)..(43): n is a, c, g, or t
  Peptide Sequence Number=SeqID_121726
ctttagagttgagcaaagagaccatgaagacagtgaacaaaanctttggtgggctttcctgtataacatcgttggactccccattgctgctggagcattgcttccagttacagggacgatcttgactccatcaatagctggagcgctaatgggttttagttccgttggtgtgatggccaactcgttgcttttgagggtaagactgagttcaaggacaagaaagaccaaagacaagaccaaggactagaagaaccaaggaaaaagaaagaaac

SEQ ID NO: 55753 - DNA, 391 bp, Setaria italica
  Peptide Sequence Number=SeqID_121727
gtaataaatgcatcctcccattgctttgatgcacccaaatcaggtgagcacttaggtatgtcaggaatttctggcatataaggtgtttgctcctttctagctccatttaaatctaccttggcaaccttcactctaggaatttgtttagcctcccacattaaatccccagttcttgtaactcaggcaactgctgtagggatgacagattgatagccaaatcagcatgtcactgacacgccgaagatactcaaaaccatcaagaggctctccagactcaaaatcagggtccccatcaactgcaaatgcaggtttcagaatgccatcatagtcatcatcgctgtcagattcatactccacatcttcaccctgatcagatggctcttgaaccact

SEQ ID NO: 55754 - DNA, 343 bp, Setaria italica
  Peptide Sequence Number=SeqID_121728
gatgtgttgcttggtcaacaggtatggagaaatgctataaacaaaatgatgtgttgcttcataatactgagtactagaatagtgtataccacacgcatatgatacctgacacgccgaagatactcaaaaccatcaagaggctctccagactcaaaatcagggtccccatcaactgcaaatgcaggtttcagaatgccatcatagtcatcatcgctgtcagattcatactccacatcttcaccctgatcagatggctcttgaaccactccacacgccacaccagggccatggacagcagcctcgaagcagtgttcatgagaaacccccaaatccccatttctcc

SEQ ID NO: 55755 - DNA, 256 bp, Setaria italica
  Peptide Sequence Number=SeqID_121729
aattagttgacaggagggaacaacctataggataccttaacagcaaaatctctagttgcaaccttcttcccaagctccttcgaagcatcactcagctttacacctaaaggttcaggaaagattggtagatcagaagttcagaaccactgcaaagcataacatcgtcctgtgtgtttagattacaactgcaaccagacatacttgctagaaggtaatagatggattatgggctaaccctagagggtagctatataga

SEQ ID NO: 55756 - DNA, 443 bp, Setaria italica
  Peptide Sequence Number=SeqID_121730
aatcaacctacaagaacgtgtgaacagggttgacttggtgggcaactggtatgaaacttgtcacgcaaattacacgcaactatgcaagacacagagagggacacacatgactggctagattttggtacctgtttgatccatatttatggtatgtgcgcacaaacactagggtaaagatcatgtgagatgagaatatcagatcaccacaaccaaaaagcactccatgaggaaagttaataaggagcacttcgagtgcattgtttggtggtggaagagtggcaagttttgagccctcacgacagtgataatttggaccaggaagttgagtggagtagaatgtgataatccgtaaaaactgcgaagctactaaaaatgccagcacccttcgccacagaagaacagtgtagaaacgtttgctatgataaataaagggtgaaactcca

SEQ ID NO: 55757 - DNA, 435 bp, Setaria italica
  Peptide Sequence Number=SeqID_121731
cattgtttggtggtggaagagtggcaagtttttgagccctcacgacagtgataatttggaccaggaagttgagtggagtagaatgtgataatccgtaaaaaactgcgaagcctgtacaggaaattatgatcgcttgttgaacacggatataaatctgaacaccatcaaagtaagacagccacacttactactaaaaatgccagcacccttcgccacagaagaacagtgtagaaacgtttgctatgataaataaaagggtgaaaactccactgcaataccatagacaaatggtcaaggctgaatagcttgtaatcctagcatatgatcgatcactatagaaaataagcattaaacaattcagaaagtatgcaatgcatgaaagagcagattacagaaacaggtccaaaaggttaatttgcacaaattctttatttt

SEQ ID NO: 55758 - DNA, 423 bp, Setaria italica
  Peptide Sequence Number=SeqID_121732
aacaatgatttggttctgttctgctgtcactaccaattgcagcctaagctccttgattaactgcttggcagcggcagccactcgtccactttcatttttctttgtggttcaatttttcgcttctcgtctgatttgaatttctctacttgctggtcagcaacagtagcaacctagtggctttgacgttctgtaccattttgattgcagcaacagcttggcttttctctctctgattttcagccacggtatcaggttgaccacggcaagcatgttcagctatcagcttgtgcatgtaagtagcacagaagcagggagcggcgaggtttcaagtctcagatagttgttccgccggccgctgggtttaggaaggcgcaaatttggcagattggtcaactaaaagccagcagtcaacactacatacag

SEQ ID NO: 55759 - DNA, 209 bp, Setaria italica
  Peptide Sequence Number=SeqID_121733
aggttgaccacggcaagcatgttcagctatcagcttgtgcatgtaagtagcacagaagcagggagcggcgaggtttcaagtctcaggcaaaaatatgcttgcattcattcatcctggatggggaaacaacgtacttgcatgcttggttaataaaggagcttgttcttgaacacagatagttgttccgccggccgctgggtttaggaagg

SEQ ID NO: 55760 - DNA, 289 bp, Setaria italica
  Peptide Sequence Number=SeqID_121734
tcattctgtgcattgtttctaggaaggccagccctgtgctctgctgtggttccgcttgattttagttcaatctagttcaatcggctgtcactatcttctgcctgtgctgctcggttttttagccactgcctttgggttactgcagctcttcaacaatgatttggttctgttctgctgtcactaccaattgcagcctaagctccttgattaactgcttggcagcggcagccactcgtccactttcatttttctttgtggttcaattttcgcttctcgtctgatttgaatt

SEQ ID NO: 55761 - DNA, 187 bp, Setaria italica
  Peptide Sequence Number=SeqID_121735
cgatgctaatgtgttgtgttatagctgtgattttaaagcgtttgcgggtttaatttttacaggcaaaaatatgcttgcattcattcatcctggatggggaaacaacgtacttgcatgcttggttaataaaggagcttgttcttgaacacagatagttgttccgccggccgctgggtttaggaaggcg

SEQ ID NO: 55762 - DNA, 142 bp, Setaria italica
  Peptide Sequence Number=SeqID_121736
ttgattgttgtaaagtttcaatttgaacacttcatatttctagataggcgggcaccactacaattgccccattcgaacaaaccaattgaagtggtgcccgcctatctagaaatatgaagtgttcaaattgattgttgtaaag

SEQ ID NO: 55763 - DNA, 243 bp, Setaria italica
  Peptide Sequence Number=SeqID_121737
cggaagagaaaatcgagtgaaaaggaaggggaaagaggaaaccgcagaggaagcgtcttccttccacgcttgtagggtttccggatcggaggagccagccccgcccaggtcgccgcagccatggttcgcggatcgctcgggaagcttgcgtcccgcgcccctgggcacgttgatcccatacttccccatcaacttcgcgccctggtactcgtggatgttgaggcggcggagctgctggtgctg

SEQ ID NO: 55764 - DNA, 274 bp, Setaria italica
  Peptide Sequence Number=SeqID_121738
atgataaatattttatccttttttattgtatgatgtataattggaatttggaagtatttttcaccaacatggtccttgagttcaccaattcatttttcttcacatttttcagcgtgttccttgagtttaagggtcttgttaattagtgctctgcgctatatatacctcttgtatcaagcaccactattcattttcctatcccttatcaggttgacctgaaggttcctgttgttgttcggctagaaggcactaacgtcgaccaaggaaagaggat

SEQ ID NO: 55765 - DNA, 235 bp, Setaria italica
  Peptide Sequence Number=SeqID_121739
ggaagaggattctagccgaacaacaacaggaaccttcaggtcaacctgtttagcagatttgaactacattggtcttgatggagagattggttgcatggtgaatggagcaggattggccatggctaccatggacattatcaagttgcatggtggcacacctgccaatttccttgattgttggtggaagtgcatcagagggtcaggttgtggaagcatttaagatactgacttcaga

SEQ ID NO: 55766 - DNA, 403 bp, Setaria italica
  Peptide Sequence Number=SeqID_121740
ggggtcctggatggaccagctgccgcatcattattcactggcctcgcctctctccctgcctcctcggatgtacccattgtcaccccatctcctgttaccaatacgaaagcttggggacctgctcatgtaataagtttcctcgtcaagatcatcttcatcgtcatcatattggtactggtggtaaaactcgtcttcttcaagagcctcttcatgaggctctacgatcagaggttcaaaccaagcggccctcaggagaaggcaaacgctctcctcaaacaggtagtcatgtaggctgaagaaaagaagaaagccatcaagaacacagtctacctgaaacaactaagcccccacattgcagatgaacaaaaggggttaaccaagaccaatacaaagaagaaaacaa

SEQ ID NO: 55767 - DNA, 278 bp, Setaria italica
  Peptide Sequence Number=SeqID_121741
gacgggtccaagtccaattcgattgctagagctagacatcatcagccaagacaatgaaaacaccaaaaataaccggaatcgcaattccaccgtgaaacgaagtgcgggtaatttgggggaaaggggaaggttgggggattttgcaacggaccagtaggcgtggtcgcatcccttgacgagggccgtctcctggagcgcgatcttatcgaggcaaatcgcgcacaccccgcaatccaccacccggtcgccaccgctaccagaggccgaagccgccgccg

SEQ ID NO: 55768 - DNA, 237 bp, Setaria italica
  Peptide Sequence Number=SeqID_121742
aaccatgaatgggaaagatggtaaaattgagtcaacagctaatggtgccttcaatacattgagtgggtttgaagcggcagacagacgaaataattggcaatattttaagctgctgctctctgacaaggagtcgcttttggatgatcttgatggtgaaaattctaatcaaaatgattctgaccgcgtcacattggcaataagcattgaggacactggtgttgggataccattgcaggc

SEQ ID NO: 55769 - DNA, 237 bp, Setaria italica
  Peptide Sequence Number=SeqID_121743
ttaaggtacttacctttacggttcgggtctacctagtccttctagtccctattgtagggtccgggttgcatggtggtaacttcatgcccatgcttgatggcggcgtgagcctaggaaagaagcccaccaacaatgttgatgctggttctagtacctccgcagctcgcagctggaaatcatcaggtgacattgaaaaagcctagcagctcagcacggcgcagctggctgtaatgccag

SEQ ID NO: 55770 - DNA, 235 bp, Setaria italica
  Peptide Sequence Number=SeqID_121744
aagaattgttagctgctcggaaaagggcaaaagcagatttaaaggaagcaaaggacccactcgaaagggctgttcttgatggtcgtcagcttgcattgaaaataagtgcaaactcagtttatggtttcactggtgcaactgttgtgaatttatcttcgacaagcttttttgtatgttcaatcatctgtcgaccatagctggtcacacttgaagaaatctccaaacaaggtaattg

SEQ ID NO: 55771 - DNA, 402 bp, Setaria italica
  Peptide Sequence Number=SeqID_121745
tacttaaattttaggtttacttctaaggttagttatttgtaggtattcttatgggtatgttattgtccaaaacatagattggatcttctgacttctcatatgcctttgccccttttgctgctttaattataacataaggaacacgatcaccaacagtaggtgcagtagcaggatccctctttcgcattctctcagcaagctctacatgagcagcttttaccgcataatcttctcctgttttagtcaaaccctttgttataacaagaagagacaagtccacacgattcattaatagatcagatatggtgttcttgacatattgaacttttgcatccattttgtcaaatttctcaggattcgtccagtacaaaccagcatatctcttcttgctgatcagcaggt

SEQ ID NO: 55772 - DNA, 296 bp, Setaria italica
  Peptide Sequence Number=SeqID_121746
gagaattctcatgaagctacagcgcagtcagaagaaaaggtaaacttcatgtgatgccattgctgcttatcatttgatgcaattgtttgttatttcaaaatcacaatgcaaatgggaattatgccgaataatataacttgaactgatctcttcagccagtggagtcaaaaagcggagacggtgatggccctgctgattaatctatgacaactgctcggttgtacaaaagccttctgaggtctgtaatgccatttgtgttgcagtctgtggctctaggggtccttctgatgtcaggc

SEQ ID NO: 55773 - DNA, 202 bp, Setaria italica
  Peptide Sequence Number=SeqID_121747
gttgcgtgtctcagcttatcttttttcctaatgtactttgcaagcagaagaaaagaccaggaaagtgaagccaatcacaactgtctgccagttccacccatgatgaaccgaaccccaaacagactccataacagaaactatatccgagagagaattctgagatggttgacagatgaagaagagacagtccatctgccttgac

SEQ ID NO: 55774 - DNA, 286 bp, Setaria italica
  Peptide Sequence Number=SeqID_121748
taacttactagttgtaacgttattgttcctaaccgtaggtattgtctagtatttctaagtaacccttcttattgttagcaatgttcactttgctgcgaccaaggactcattatctcgccatttcaacaagtttggtgcagtactgaaagtagtcattgtcactaatgctgcaacgggtcagccaacaggatctgcctatgtagagtttttacacaaagaatcagctgaacgagctctgtcattgaatggcacatcatttatgacgcgtattctcaaggtcgtccgg

SEQ ID NO: 55775 - DNA, 206 bp, Setaria italica
  Peptide Sequence Number=SeqID_121749
ggaagccatgctgggcccggcagctaaactcaagcataagcatggcttcctcccgtactgcttctgcctgctgccactcctcccatctcgtcaagtccatttccttcaagcatcctcaccacctcagatgtcggaggtggtgaggatgcttgaaggaaatggacttgacgagatgggaggagtctgagacacgcaacgaggggaaa

SEQ ID NO: 55776 - DNA, 348 bp, Setaria italica
  misc_feature (234)..(234): n is a, c, g, or t
  Peptide Sequence Number=SeqID_121750
tggtttttgtcttcttcttcctaattccgtattcctaccttcgtctagtccgtccgtattggggtaaggacttcgaagccgaaggacgcgaaggggaagggcaaggccggatcctccggcggcgacgacgccggcggcaaggggggcaagggcaagggaggcaagtccgcagatggcctcggcacatgcacctacgtcaaagctaggcacgtattgtgtgagaagcaggggaanatcaatgaggcttataagaagttgcaggatggatggttggacagtggggacaaggtccctcctgctgagtttgctaaggtagcccaggagttttctgaatgcccatcagggaag

SEQ ID NO: 55777 - DNA, 485 bp, Setaria italica
  misc_feature (469)..(469): n is a, c, g, or t
  Peptide Sequence Number=SeqID_121751
aagacttagttagaccaagggcatggtaaacatctctctccagagaacagctgtaattatgttggctcgggtctcaggaatgtttctttaacccgacaagaactactactaaggttacttacctactaagaagttttggaagacatgaaatgggtgaagatgaagagactagaaggaagattgaagatgttgtccatcactgttctcgtagactctttacagacagtgataaaattgggaagaatttcttcacatcaaataacaatgattccatgtgtaatgatcctgaacagagcagtgtcttgaatggtgaaaattttgagtcactaatatctgatgctgtgatggacacacctagaaatggcagtaggttacctgatgttttcttggaggatattgagccatcccatgaatttcctcgaattccatactcatgtccacttcccatcatagattcagctgctaaagngattggcaccactagc

SEQ ID NO: 55778 - DNA, 409 bp, Setaria italica
  misc_feature (32)..(32): n is a, c, g, or t
  misc_feature (52)..(52): n is a, c, g, or t
  Peptide Sequence Number=SeqID_121752
atctgaacatttaaacctctcactgatgaggnggaaaaggaagttcatgacngtttccatgctagaggtccaagtagcaaagtcctagtgctgcatgaaccatcgaacattgaggttagcaaagagaaattccagtgcttgatacccggtcgctggttaaatgatgaggttattaacctctatcttgaattgttgaaggagagggaaaaaagagagccgaaaagcttgcttgcggaaaaaatggttatgactacaaatctgtcaaaaggtggactacccgtaggaagttgggatatgacctcattgaatgcaataaaatctttgtccctgtgcataaagatgtgcactggtgtttagcaattattaaacattgtaagtaaaaattacttatttttcttagtttaccttt

SEQ ID NO: 55779 - DNA, 486 bp, Setaria italica
  Peptide Sequence Number=SeqID_121753
tcgcctaccgaccgcgcccttcctcgccaccaccggtccaccggaggcgccgccatgtctcagaacaaccctcccagctcctcccctcaggtgcgcgacggaagagcctcgcttttacatcgagcggtggctcgcgattcgcttgtctatgcattcaccttttcgctttcgggttcgagttcctgaatcggaagctccttttgcatgacgtgcgcggctgcctccgtgcgcggattggtgcggtgagcagagctgatcgaccggtgcattgggtccaagatctgggtcatcatgaagggggacaaggagctcgtcggaaccctctgcggcttcgatgtctacgtcaacatggtgctggaggacgtcaccgagtatgaatacacggctgaagggcgtcgcattacaaaacttgaccaaatcctcctgaatggcaacaacatagccattttggttcctggtggttcaccgcctgatgtgtaatgacct

SEQ ID NO: 55780 - DNA, 314 bp, Setaria italica
  misc_feature (277)..(277): n is a, c, g, or t
  Peptide Sequence Number=SeqID_121754
tggggttgttagtaacgtttgtattcttgttcgttactttgtttctagtaggttgtctatttctagtcttctaaaaccgtctttggggtctaaagttcttgggtttcgccagaaaccatttgccatatgccaccaggtcagtgtaaccctcggacactgccttgttgccttcttccctgttgtatcctccagcaacaatgaaagtcccagcaaatgccttcctgaaatgcagcagcttgtaggggatctgcaccttaccatccactttgaccccctnaggctcaaccatgctgcagtagaggacgcccagcttg

SEQ ID NO: 55781 - DNA, 310 bp, Setaria italica
  Peptide Sequence Number=SeqID_121755
gctgccaagaaagatgaaagtgttttctcggacccaacctataatgtcaatgttctttttacccttgacgtctaacgagagggatcgatgctgcacagggaagtgagcaccggattgcgcagagttcattggcacctccatctacccaatcagcagagcttatagatcctcctcctgaatccaatagatgcaggtcgtcttctcccccaaggatgctctcaacccttacagatccgagccttgttgattcgattgatgtaggtattctcctctgcaagcccctcacggatcttgcctttcacgaagaacc

SEQ ID NO: 55782 - DNA, 233 bp, Setaria italica
  Peptide Sequence Number=SeqID_121756
caatttgtgtcacaatcaccagaaaggtatcttcatatttactgataacaatgtctgtcttattacccttgacgtctaacgagagggatcgatgctgcacagggaagtgagcaccggattgcgcagagttcattggcacctccatctacccaatcagcagagtcttgctcatgacggccaaaagcgttgtggcctagcactcgaagcgggaatgaggctaggcacgggaagga

SEQ ID NO: 55783 - DNA, 272 bp, Setaria italica
  Peptide Sequence Number=SeqID_121757
ccaagtcaataacaaccatcaccaaagacgattctcaatcacagctgcaattatatccttcagtgttccctgagaatgatctttcagaccaagagagatcaccatcgaccgtgctgagccactgccacttatgtgctcaataagttggtgtgcacaagcaagtaggaggggcttatagatcctcctccttgtaatccaatagatgcaggtcgtcttctcccccaaggatgctctcaacccttacagatccgagtcctttgtttgtatttcgt

SEQ ID NO: 55784 - DNA, 136 bp, Setaria italica
  Peptide Sequence Number=SeqID_121758
gggttactgatgctgcacagggaagtgtagcaccggattgcgcagagtttattggcacctccatctacccaatcagcagcaggggcacgcccgataatgtttagaaaaaaaatcgaagctgtcggatgctcgtcgc

SEQ ID NO: 55785 - DNA, 180 bp, Setaria italica
  misc_feature (133)..(133): n is a, c, g, or t
  Peptide Sequence Number=SeqID_121759
acggcggccaccagcgagctcggcggggtgatgaaggcgaccaaggcggtggccatgttccaggcgctcgccgtcaggaagggcgccgtcgtcagggaccggacggaggtggttgacatcgccaagccaggtnagcacgcgcgcgcacctcgtgcgctactgtcttcttcctcctcccac

SEQ ID NO: 55786 - DNA, 111 bp, Setaria italica
  Peptide Sequence Number=SeqID_121760
cgccaagccagcggatggatcaatcttggtgaggacagcgagtggcgaggaattccatggcgccaaccgttacgatgcacttggcgccatggaattcctcgccactcgctg

SEQ ID NO: 55787 - DNA, 260 bp, Setaria italica
  Peptide Sequence Number=SeqID_121761
cccgacatccagttcctccgtctccatgtcatcctccttcaccttcttctttttctttttccgatcgatctcttcatacccaacattcagttcctccgtctccatgtcatccttcttcaccttcttcttcttctttacgtaatcaggttcctccatctccatgccatccttcttcactcgtccacagccaaaatccgcctacccaatccccatccatccagcgccccaccaacactcccaagccaccaccagccatccca

SEQ ID NO: 55788 - DNA, 407 bp, Setaria italica
  Peptide Sequence Number=SeqID_121762
agaagatatctacagccgtgatttctctgaacctactgggaagataagatggataagagcatccttcccaaggtcatgcaagttaaacactttgggcgcagtggaagaacgaagtggacacatcttgttaacgaggatactacagattggaatgcaccatgggctacaaatgggcctctccgagcaaaatataacgcaaaaatggcaggcatgaatgcacctattgctaaaccaaagggaagtaagaagctgaaggactgggatgaaaaatgagatactagcttgatctggtactactctctatgccttactgccatacaagcgctacctacccaagaactgcaaacagtgcttatgtagatgcttttctttttcattttaaatgcaagcacacattaggtcacatt

SEQ ID NO: 55789 - DNA, 306 bp, Setaria italica
  Peptide Sequence Number=SeqID_121763
ttgaatgatgtgctgatgccagtcaataagtttgtgtttcagtgggcttgtgcttctaggtggatcctgaatgcaatgggatgggcgagcggtctagttgaagccgaacaagggaacaacgactgcttccttgatctgaggctgcaagttgctcctttctgtgcctgagccggactgcgggagcagaccggtgagccaaacaatgccactgtcaaccccattaggtccatggtatagaatacttctggatctatacaggttctttgtaatggaaatatgtgccattacaaagaacctgtatagatc

SEQ ID NO: 55790 - DNA, 493 bp, Setaria italica
  Peptide Sequence Number=SeqID_121764
gggggccagtggcggagcacactctaaattttaggtggggcgtgtacccatgccacacattctcattgaaatcacacaaataagagtacaaacgattaataaattatgtttaaatattgaagatggtacctcctataaaaaggtagcaaagtctttaatgccataaaaattcattaattcaacacaaaccaggatccaagagctaaacgaaccaaacctttcgatttcaaagacaaataagttaattcctattttcctgttgctaaaataaatcatcacatgacaaaaaggtgaaggagaaaggcgtgcccgccatgatgcgcagcttcgacacgaaaataaatcaaggagtttactaacgcctgcacatgcaacatttggggcgacggcatccacagtccagattcaatgaactggatgcccctgccaccgccggcaatggcgccgccggttgtcgtccgccacccgcggcacctcacctcgccaccctcga

SEQ ID NO: 55791 - DNA, 264 bp, Setaria italica
  misc_feature (237)..(237): n is a, c, g, or t
  Peptide Sequence Number=SeqID_121765
gaaagcgaaagcgcatcaggcactcgaagcatcgcaatggcagagcacactctaaattttaggtggggcaaacatgtgagacaaaactcgtagtaaaaaaagatcatgtacacatgccatacattctcattgaaatcacacaaataagagtacaaacgattaataaattatgtttaaatattgaagatggtacctccaataaaaaggtagtaaagtctttaatgccataaaaatttnttaattcaacacaaaccaggatgcaag

SEQ ID NO: 55792 - DNA, 497 bp, Setaria italica
  Peptide Sequence Number=SeqID_121766
gtccttctaaaaagctaaattccagatgtatcatgtattttatctttcaaaagaaaaaacataaacactaatttatagaactcgactttgggaaatctatcaatgttttcttgaattggaatctaatcaatgtaatagcaacaccaacaaaaaaaaggtttgtctgctggaatctatcagctctactgagtgttgagcaagtggagaaaaaaaaattcccctcgtgattgtagcagaagaattgcactcagaaaaaagtactataaaaaagaactaagtttaagagaaaccactgaaatacctaaaaaaagtgaaagatttcattactaaaacacgaacctgagaagttcttacaggaaaaggcatcaaagtgaagagataggtaccatttctcagatattctggaggtgtatatgctaggttagtgctatagctttccatccctgctgttttcatcagaccaaagcatgaaagacgaggtcaccactctcatcaaa

SEQ ID NO: 55793 - DNA, 372 bp, Setaria italica
  Peptide Sequence Number=SeqID_121767
ttcatatgggtaaatcaattgaatgttttaatttaaaaccacatgtcaagatgtaacatttacctcccaaatggtgacacaggttgaatgtctcacagctctacaagttctgttcagtacctaggtggtcatgtaactttgggtcgagcacctgaataatagaagcaagatgctgaagctggtttggtatccagatgtgttaaaatatttagatcaaagcacagagcagggagcacgtgaagcaatattcagatcagagtagacagacatgtaaatcctagattgatacatgtatgctctatttatgatatcatttggtcaagctatcaggttaacatttcaatacactatcatctctactagaagttcatg

SEQ ID NO: 55794 - DNA, 471 bp, Setaria italica
  misc_feature (23)..(23): n is a, c, g, or t
  misc_feature (262)..(262): n is a, c, g, or t
  Peptide Sequence Number=SeqID_121768
ctaccactctctttgctctttanaacccccggcctgtggttgttgggcttgtggcaatcccatatacagcctctcaccacctgatgttaggttttctttccctgcaacttttttgaggtacttcttgtgaagcttcagtgcaacagcacaagccctttgtgcatccaagtccccgttaatattgttcaatatctgagttacacaaaaaaagaaagcaagagttacatgatgctaaatccacatcaaactttaaatgttttcnccttttttcaggtctgggacaattcccttgcaatgtccagtgttccccttttcctgctcatatgagtctttgcatatgtcattctactccttcacagtgtgaaatagtgatgcagccttatgtgtttcttttgtaaagcaagaacggaaaagagagattctaaggaaaggaatggcttgatccagcttaccctgataacgtcatcgaaa

SEQ ID NO: 55795 - DNA, 281 bp, Setaria italica
  Peptide Sequence Number=SeqID_121769
cgtattccagagcccacatcatctcccagaggtataaggagtctccaaatgatacttcacgccgaaatagtaccatgaacatacggaacgcaaaaaggtagtcacctccaccgagagtttctgagtgaaggactcaaaacagttaaaaactgttggtaaaactggaaaaaagaagatggatttttgacaatttcatgatacccattttttacctaaatggtcatgtagctttgggtcaagaacctgaataatagacgcaaggtgttgaagttggttggcaa

SEQ ID NO: 55796 - DNA, 185 bp, Setaria italica
  Peptide Sequence Number=SeqID_121770
caagagttacattgtagatgtacaacccggtcatagattgaagttgtcatttgccaactacaggtggaaagaatgatcaaattttggaaagaaaggaatagataggttgtgcctctcaccctgataagatcatccagtcctctagcttcttgtaacagcttttctctcttttccttcagaaacgc

SEQ ID NO: 55797 - DNA, 226 bp, Setaria italica
  Peptide Sequence Number=SeqID_121771
atgggacttgccacaagccacaaccacagccggggtgtaaagagcaagagagtggtaggttttcttttccctgcaactttttgaggtacttcttgtgaagcttcagtgcaacagcacaagccctttgtgcatccaagtccccgttaatattgttcaatatcctgataacgtcatcgatccctcgagcttcttgcttggctgctatgaccccgagagcaccttcgat

SEQ ID NO: 55798 - DNA, 125 bp, Setaria italica
  Peptide Sequence Number=SeqID_121772
cgattgactccttgtacacagaaggcaaagtagcaatggacgtcaagaaacagtctgaactctaaagcaatatctccatccacaacagccttcctcgtctgaactctaaagcaatatctccatcc

SEQ ID NO: 55799 - DNA, 166 bp, Setaria italica
  Peptide Sequence Number=SeqID_121773
aggaattacaatactaatggataatggattatggggtggcgaagaactgaagaggaaggtcatgacgagctgatccgcatcaagagtctgacgctttcttggaaccgccatggatcaagcttgctagcttcactctgggcttggagtactcgccactcattgcaag

SEQ ID NO: 55800 - DNA, 166 bp, Setaria italica
  Peptide Sequence Number=SeqID_121774
acgacatgcggttccacctcaaggacgctaccatcgtgtacacagacatgttcgccatcaagtacgacttcgtcgcccggttgacgctggcgaggcagccgtgcgcgtcgtgctcgcctttctcctgcaccactaatgccggcaggcatcccagggcgccggtgcc

SEQ ID NO: 55801 - DNA, 204 bp, Setaria italica
  Peptide Sequence Number=SeqID_121775
gcttcgccatcctgcccgacggtcctggtgcgggcggcggcgggtctctcctgaccgtggcgttccagatccttgtggactccgtgcccaccgccaagctctccctgggctccgtcgccaccgtcaacagcctcatcgcctgcaccgtcgagcgtatcaaggccaccacgtccacgggagcatagatcacgtaggaacctgtct

SEQ ID NO: 55802 - DNA, 261 bp, Setaria italica
  Peptide Sequence Number=SeqID_121776
ggggacccagactacgtggcgctgctgccatcgggcttcgccatcctgcccgacggtcctggtgcgggcggcggcgggtctctcctgaccgtggcgttccagatccttgtggactccgtgcccaccgccaagctctccctgggctccgtcgccaccgtcaacagcctcatcgcctgcaaccgtacgaagacgtaatacaaaggaccgaaccctaacgaactaagtaaccgtaaactaaaaactaaaacttaagtaacctaa

SEQ ID NO: 55803 - DNA, 195 bp, Setaria italica
  Peptide Sequence Number=SeqID_121777
cctcatttccccgtggcatggggtaagaattgcgccaatgtttgcgcatgcgtcatggtcaagctttaatgagctgtcgatggaagaaaggagcgccttgtttgcaacatctatatcgtcgtacttctttgtaagatatagatgttgcaaacaaggcgctcctttcttccatggtcaagctttaatgagctgtcg

SEQ ID NO: 55804 - DNA, 306 bp, Setaria italica
  Peptide Sequence Number=SeqID_121778
ttgcttatttgcaaatgggctagtctttcttcttgtttcgctaggctgcactggatctcatttaacaagttatctgcttccaaagcaattcctccaaacatttttctagggctgatgtgtgtgattgtacttgtgaatttagtctctcgaatgttgtccgagaattcatgtcaatttctccagctaaaccatccaaagcagtaatacctgaaccatgcaggactctgagttttttgtaactacttctttccctttgagcccttgtgctgcctaaaaatgggtaactcatctttcgaagacacaaaa

SEQ ID NO: 55805 - DNA, 240 bp, Setaria italica
  Peptide Sequence Number=SeqID_121779
tccgccatatattattcctcctctcttctactacatactagattattcattcattcaaaacatattcatgtgcaatagtttcattttcatggcacagctaacaccgacctgtcatccctctctggccattatataaatcatttggtgctattaattaatgcgcaggacatgttcgtcgccggcacggacacgacgttcgcgacgctggagtgggtgatgacggagctggtccggcacccg

SEQ ID NO: 55806 - DNA, 357 bp, Setaria italica
  Peptide Sequence Number=SeqID_121780
cgcccccacctcctgtcgggccagttcctgtcgttcgggtgctccgacgtcacgttcgcccccgcgggcgcctaccaccgcatggcgcgccgtgtggtcgtctccgagctcctctcggcgcgccgcgtcgcgacgtacggcgccgtccgcgtcaaggaactccgccgcctcctcgcgcacctaacgaagaacacaccccggggagccccgtcgacctgagcgagtgcttcctcaacctggccaacgacgtgctctgccgcgtcgcgttcggcaggcggctcccgcacggcaagggagacaagctcggcgccgtgctcgccgaggcgcaagacctcttcgccgggactactcacactg

SEQ ID NO: 55807 - DNA, 437 bp, Setaria italica
  Peptide Sequence Number=SeqID_121781
cgccggcgagcgatcaggagctgttgacctggttgcactgcttcctgatctggccgttggtgccggtgagcacctcgacgcggcccatcttcttcatggacatggagaaggcggcgtagaacttgaaagggggttggtgaggtcctgcaccatctgcgccgcggcggcgttctgcgtcagcgccgcgtcggaggccagcgtgccctgcttgttgagcacgttggtgtagtagctgctgtcgaacttgaccgccgtgcggccgtcgaggttgacggtgcccgacgccgacgaggacgggcacgagttcatgagcgtcttggcgtaggccgagtcgaggagcgggtcgacgttggtggcgttcccgttgtaacaagccggggcgtagaacgactaggaagacaagactaggacgaaacttaactacaacaactagaaga

SEQ ID NO: 55808 - DNA, 109 bp, Setaria italica
  Peptide Sequence Number=SeqID_121782
gcacgcaagaatcgtatacagtatgttgctgattcttgcgtgcactcggttacaatcgatcgcacgcaagaatcagcaacatactgtatacgatttcaaggtttaaaaa

SEQ ID NO: 55809 - DNA, 307 bp, Setaria italica
  Peptide Sequence Number=SeqID_121783
cagtctggaactttcagtaatgtgctgctccttctcttcaggaccaacctgaattacatgaatggcatcccatgaaccaatctgcatgtaccctcttgttccttgtccatctttcttaattaagaagcatgcaataaaaccaccattatcttcatcctcccaaatgtacacagatgagatcccaccttcatagtacctatttgttaacagaagatcttgttacttgctttacatccacatgataaatatcatcattcatatactaaattgaggaaccatgccatgctactatgggtctattagcctt

SEQ ID NO: 55810 - DNA, 267 bp, Setaria italica
  Peptide Sequence Number=SeqID_121784
tgaacacaaagcaatcaaaggagacgcgcgcccggcggagcatccaattcccacgagcgacctccgagacgacgaaatcaaatgcgccggcgcccaatcctaaccgaaccgaggagccggcggggacggcgtgaggggtacctggagcgggaggtcgacctgggagaggaggtcgagggagtggtcggggaggagggagagcagcgcgttgagcgccgtctccgcgctgcccggcggcatccgccgcatcagatccatcgccgcctt

SEQ ID NO: 55811 - DNA, 385 bp, Setaria italica
  Peptide Sequence Number=SeqID_121785
acagactagaaactatataagtacaaacaaagaagggaaaaagacacaaactgaccatgcctacgaataatagtgaagacatgatatctttctttgttaaattgacacttctatgcactgcttcaactgtcaggtagtctcatattaagcacttctggtggtggccgaagagtgcaaaccatttccctcgtcttcccgaaatagacctggtccagtgaatttctcagcttcccctccatttcttctatcattttccccatattaacgaggtgcccatctgctacagcaagagtcatgctcatctgccgtctaaattgaataccaagaacaaaattagaaaagttaccaagaactagacttagttagtactaatacgtagaaccaa

SEQ ID NO: 55812 - DNA, 240 bp, Setaria italica
  Peptide Sequence Number=SeqID_121786
ttgtgttgcttcgctggttttgtagtcatgccaaaagtgcaggcacaggtgcaggtggagataccatccattaatggattaacaattctcaagatttccttatttgtatgattctttagcatcacctgaatctgagtccgagtcactagcattgtaacctgggcgtttattgctaactttccagactgtagatcggaacaaggataagaaggttggagagagactagtgtcagtggaaga

SEQ ID NO: 55813 - DNA, 369 bp, Setaria italica
  Peptide Sequence Number=SeqID_121787
agggtcccgccgtatgagagacctcagggatatcggatccaagactgttcccccaatggactccccccatgctgctacttgttcaagcagctcatcaggcacttcaaccttggattcttcattggagacgaccagctgccatcgccgcgccgcattcaaaacagatcaagcaaagggcaccgagatatcctgcatgagcaggctattcactgatgattttcatcatagggatgattttgtcgaaactccacttgctggaagaagcatcttggaaccagatcatttgcagaaatatcaaccttgtggtttggcaaagcaccctacctggaaacataataagcaagctaatggctgcagcaaagttgtgaa

SEQ ID NO: 55814 - DNA, 418 bp, Setaria italica
  misc_feature (329)..(329): n is a, c, g, or t
  Peptide Sequence Number=SeqID_121788
ccttttttagttatcttttaactaatctggtactaagtaacctaccgaatttttttagcgagtcatggtcgctaagtaacaaataatgcatactgctcatgtttgacaattgacaggattgcggtggtcaccggcgggaacaaagggatcggactagaggtgtgccggcagctggccgccgccggcatcaccgtcgtcttaacagccagggacgagaagcgaggcgtggccgctgtagagaagctgagagaagcagggctctccgatgtcatttttcatcagctggagatcaccgatgctccgagcatctctcggttgactgatttccngaagactcgttttgggaagctagacatcctggtaaataatgctgcaattggtggtgttgagtacgtgcaagatcctgttgatagctcac

SEQ ID NO: 55815 - DNA, 349 bp, Setaria italica
  misc_feature (1)..(1): n is a, c, g, or t
  Peptide Sequence Number=SeqID_121789
naccctgagctgcgcatcaactgcgcgcatcctggctacgtgaagactgacatgaccttacaatccgggctcctgacgcccgaggaaggcgcgagcaacctggtgaatgtggtgctgctgccggaaggcggcccgaccggcacattcttcgcgctgggccaggaggctccgttcgtgtgacgctgcttggccgggcacggctgatcgccactggtccggttgttcacgcgccgttctccaactgccagttatcaacgttattattatttgcgggcgtgccagttattaggatttgtttattactactattaaattaaattaaattctacttacttacttagtccgttct

SEQ ID NO: 55816 - DNA, 368 bp, Setaria italica
  Peptide Sequence Number=SeqID_121790
gcttgttgccactggattttggattttgattccgctgttttggtgcacagcagaaaactgaggcaatggcatggagctgaagcacaaaggaacacatgcagcttgtggtgagaggatccttgtgtatttggaagatgcaactggctgtttatgtttgcttctatgtccactgcgtatcataaactgggtccatcagcaggctgcttcccgtttagagtttcatattggagtcctagatcatcggagtctttgtcggtttgcttgtgagatgttcaatgtagagtacacttccagtgggttggagctgtcttatggtttacggatgctttattgtcttgggtacttacccgtaaattacttaattacta

SEQ ID NO: 55817 - DNA, 186 bp, Setaria italica
  Peptide Sequence Number=SeqID_121791
ctccctccccaaccctagcgccggcgccgccgacgacgacggcgactccgaggccgccgcgcgccggatggaggacgactacgacgccttcacggcctccaaggccgacgacctcgccaggccgctcaaggacgccggcatcccctacaagatccacatcgtcaaggaccacgacatgaaggagcg

SEQ ID NO: 55818 - DNA, 449 bp, Setaria italica
  Peptide Sequence Number=SeqID_121792
aagaataaggaaataaggaaaggtaacaaattaagaaagaactaaccaaggactaacaacaacctagaagagaagctaaaaatagccatgaaacatctcataccaagggtattagagcagcatggcttgagttcgacatatcttcagattcctgaggctatggtcaaactaatcgtcgagagatacacgagagaagctggtgtacgtaatcttgagcggaacctagctgcattggcccgagcagctgctgtcaaggttgcagagcaagttaacactcttagacttggcaaggaaatacaaccaattactacaactctgctggattcgagacttgctgatggtggtgaagttgaaatggagttattcctatgggccatgatatatcaaatacttatgaaaatccatctcctatgattgttgatgaagccatgctagaaaaagtgcttggg

SEQ ID NO: 55819 - DNA, 492 bp, Setaria italica
  Peptide Sequence Number=SeqID_121793
aaagaaatactactacttaggtaaggtaagtaagaaaaggaatagaaagctgatatcaggggtcaccgaaggacctacattggaagcatgccagggagacttattgatggactaaagagagtatctgtcagcaacccagtgatgcttcttgacgaaattgacaagactggttctgatgtacgtggggatccagcatcagctctactagaagttcttgatcctgagtagaacaaaacattcaacgatcactatttgaatgttccgttcgacctgtcaaaggtcatatttgttgcaactgccaacaggatgcaacctattccccctcctctgttagataggatggaggtcattgagctaccaggctacacacctgaagagaagctaaaaaatagccatgaaacatctcataccaagggtattagagcagcatggcttgagttcgacatatcttcagattcctgaggctatggtcaaactaatcgtcgagagata

SEQ ID NO: 55820 - DNA, 270 bp, Setaria italica
  Peptide Sequence Number=SeqID_121794
ttgatatgggtattttcttttgtgaatcatcatcgtcacagtacagatatccacggacgagcaatgctatgagacagtgagggcttagctctctggccagcgcaagatcctggcacgcccttgtcagttaagcttcagatctgggatgtgtatactgacaagatcctggcacgcccttgtcagttaagcttcagatctgggatgtgtatactgatcaaaattcagagagcagtcgggagtatatgctggcacttccattgggtttccctg

SEQ ID NO: 55821 - DNA, 224 bp, Setaria italica
  Peptide Sequence Number=SeqID_121795
cggccacgcccgcctccgctgccgtccggctccacgtgcctggttcgaaccatccatttcgcgttcgagtagccgccgccaccgcagcaagcatcacgcgccggtggcgccgccatggcgacgcgcacgaccttggtgttgagcctgatggcgtcggcgagcccgaacgcggcgcagaagtccttgaggtagtggtacacctcacggtggacggggaagcgccg

SEQ ID NO: 55822 - DNA, 368 bp, Setaria italica
  misc_feature (291)..(291): n is a, c, g, or t
  Peptide Sequence Number=SeqID_121796
ctcttgcacaaatgtatcatacatgtacaacattaatgttctctctctctatttttctctgctcccttctgtggaactgctcttatgtacagtctcaacacattgtcacgtggcacaaggacagagcatctgctgaaatctaatcttatactgctatgagctcagcagcatctgcactcggcagctccgtattttgccgtgcggctgctagctactggatcagcacgccaagcgaacgtacgtgccgagtgtcaacgaaaggaaaaaaaaaccttactctcctaaccaccncagggggacaattctcaagaagactaggaaagtagaatactaatagaatagtagactagtaatacaacgtaccgaca

SEQ ID NO: 55823 - DNA, 309 bp, Setaria italica
  Peptide Sequence Number=SeqID_121797
ttaaattagtaagtacttactaagtactaagtactaattacttgtctaacttcggcagctccgtattttgccgtgcggctgctaagctactggatcagcacgccaagcgaacgtacgtgccgagtgtcaacgaggaaaaaaaaaaccttctctcctaccaccgccaggggggacattctcagagctggaagtgaatctaatgatgtgctgtatcacgtccgctccatcgttcatgaacgcgtacttcacctggataatgctgtgcgctgcgaagctcgttatgctcgactggaagctgacatccacctt

SEQ ID NO: 55824 - DNA, 247 bp, Setaria italica
  Peptide Sequence Number=SeqID_121798
tgtcgtaacctattctagttctaactaactaagtattcttgttgtattggtaagtctattattctttggtaaaagttggtaaattgtattttcgagtacagagggaatgagaagttaaaggatgatttgaccgatgcatacctgacaaacgtgaaccaacccaagaagaaagaatcagccatatcgaagctctggaagtcatcacgcccaaagaacagtgagatatgtaagaaagatgccgtgaaac

SEQ ID NO: 55825 - DNA, 161 bp, Setaria italica
  Peptide Sequence Number=SeqID_121799
ctgatgagtttggagtatgtggcttatgccagagcttataatacggatcatcaatccagcagaagcctggattgatgatccgtattataagctctggcataagccacattctccaacacatcagcaccattcagtccaaacctgtcagcgatctgcaggag

SEQ ID NO: 55826 - DNA, 208 bp, Setaria italica
  Peptide Sequence Number=SeqID_121800
tgaagactgatgatgaaatgtgccagagtcatgggcttataagagcagtagaggatcatgccacaactcagatctggtcgcactgcgtgggcgcgaaggagaacttctggttctgcacgtcgaagagcacgtgcatgttctgctgctggaggttgccgaggaccggttgcgtaatccaacgccgatcacaaggcacacaggggatagg

SEQ ID NO: 55827 - DNA, 255 bp, Setaria italica
  Peptide Sequence Number=SeqID_121801
gaataacacaccgtacgaatacatgaaatcaggaatgaatctcacagaggagtcgtggtgtgtccacgaagcacagcgggatgacaatcatgtacaacacagaaatgtcaatcttgcacaacaatcgatttgtactgtcctccactagacagaaataccagaagacttttagcttccggggagatacagaaatggctacacggtgataattgtctaattccttctctgttacgcagttaacaactaattaaaccg

SEQ ID NO: 55828 - DNA, 263 bp, Setaria italica
  Peptide Sequence Number=SeqID_121802
aagcttgaataaaaaaggtaatttgacatctatctgtttatgcattctccagtgaagaccgcgccgtcgatgtccgacgcggcgatggggaagctgagcctgggcgcgaaggccctgtcggagggcggcttcgacaagctgtacaagcagaccttctcctcgggtcccgaggagcacctcaagaagaccttcgcgtgctacctgtcgacggcgacgggccccgtcgccggcacgctctacctgaccaacatgaacgtggcctt

SEQ ID NO: 55829 - DNA, 305 bp, Setaria italica
  misc_feature (256)..(305): n is a, c, g, or t
  Peptide Sequence Number=SeqID_121803
ggggcggaggaccgggagaggtgggggagggagttgtaggtgaggatgccgtaggtggaggatgtgagggagacgatgtggtggtgggagatgatgcagagtttaattttgtttctttgaaagataagagagaactaaattttgcaagttgatgtcataaatcttggtgtatattttttccacagaactcatgatcacatgatggcatttcatatacaaagggactaacttgaaatgttaatggagcttgtctacnnnnnnnnnnnnnnnnnnnnnnnnnnnnnnnnnnnnnnnnnnnnnnnnnn

SEQ ID NO: 55830 - DNA, 305 bp, Setaria italica
  Peptide Sequence Number=SeqID_121804
actttaatcagaggtatacctgaagagatgtttaaggtctgcaaactggcaaacgaaaaggaagctgcagatagatggtccaattgcccaaggaagctctactacggtatcaatagtttgagtaggtgtgcacatcatgattcagatatcgaagcatgcatcaactcgaggtgataatatgcatgcagcatgcgctcctgcaatttttgattgtttaccatcatgattggctatcttattgttgatctatttcattaagaaggaacagtatagcatgtttagtagtttaaagaaaaaataataga

SEQ ID NO: 55831 - DNA, 233 bp, Setaria italica
  Peptide Sequence Number=SeqID_121805
ccgtctctggtggcgctactctccacctcgagcggcgcaagatccggtcgaacagcggctggccatggcgatccccctcatgcttgttgtgctccccctcggcctgctcatccaggtgttcttgcaggaagctattgtgatatctccaaagctggttttgaaggtgatggaatgcagatatgttgtggtgagaaaggttgtcatctctgcttctgctgtggaagaataatttg

SEQ ID NO: 55832 - DNA, 208 bp, Setaria italica
  Peptide Sequence Number=SeqID_121806
gtaggatgtgttgacctccttaatttcctgcattgctgcagtttgacacaattgtcacaaacaacatttttggtgacatattatctgatgaagcatcaatgattacgggaagcattggaatgctcccgtctgccagtgttggtgaatcgggacctggtcttttgaacctattcatggctctgcccctgatattgctgggcaggacaag

SEQ ID NO: 55833 - DNA, 173 bp, Setaria italica
  Peptide Sequence Number=SeqID_121807
aaacaaccccgccagcccagcacggagctggagcaacccccgtcctcaggcttgaggtgcttctcattgttatcccacttataccctcctatggcgctagatgccaccggcgtgccgctccccgacgaaaccctcgcggcagcgaaggattctgacgccgtcctcctcggcgc

SEQ ID NO: 55834 - DNA, 153 bp, Setaria italica
  Peptide Sequence Number=SeqID_121808
cggtggaaccagcacggcttgggcggcgacaacgtgttcggcagctgccgcccaagccgtgctggttccaccggtggtcgacggcctcaatctcgccggcgaagacgagcaaggaacgggggcaaggagccgagctcgtagattctcttctct

SEQ ID NO: 55835 - DNA, 124 bp, Setaria italica
  Peptide Sequence Number=SeqID_121809
tgttttaaaaatattagcttggttacgatgctatttactcgagtaaattcttacaacatttcttctcccagataaacctgatcttcaagaattgcaatatttcttagagtttcaagtgcctcta

SEQ ID NO: 55836 - DNA, 280 bp, Setaria italica
  Peptide Sequence Number=SeqID_121810
aagacaaaaggactacttacaagtaacctaaagaaacaaacaaataaccttaaggggtaagttacaacaagaagaataataaaaacctgcaaatattttgctagacaaagacctccatccacatctagcagattttggcttagccatgtttcagaaggatattaagtgtgtctcagttgagaactggaaatcatctggcaagcccactggtggtttccataaaaggaatatggttgggacactaatttacatggcaccagaaattttgagaaaggatata

SEQ ID NO: 55837 - DNA, 247 bp, Setaria italica
  Peptide Sequence Number=SeqID_121811
ttcaattggaagaggacaccccttacagctacgagattttccacatagtgtttgcaatgggagctatgtattttgcaatgctgttcattagctgggaactgaaccatccagcaagaaagtaaggcatcctaccataccgcagttagatattcctttgattttaagtagcaagatacatacttattcatggaattattctaaatttacatttcttgtcatcattgacacgcaacatgatattcctttg

SEQ ID NO: 55838 - DNA, 214 bp, Setaria italica
  misc_feature (2)..(2): n is a, c, g, or t
  Peptide Sequence Number=SeqID_121812
gnttaaccctgtaacttgcagcatatactgaataactgttagggaatagcatgacacagtaaaagccgccacagttgcaaaacccaaagatagccaccatatattagccttttagcttctcatgcccgttctaatccttccttgcggagcttttcaagtgatggaagaacatgacagagaacagtgcatgacaatagatgctgaaatttgatga

SEQ ID NO: 55839 - DNA, 241 bp, Setaria italica
  Peptide Sequence Number=SeqID_121813
ccaccatctaaacacaaataaagggattcaaactagatgaaatgatatgtcaaaagccaataatttccaggaaaacaaaatcggtctcactgttcaagatagacaactagacacacatatagccttttagcttctcatgcccgtctaatccttcccttgcggagcttttcaagtgatggaagaacatgacagagaacctgcatgacaatagatgctgaaatttgatgactgatcccgagct

SEQ ID NO: 55840 - DNA, 118 bp, Setaria italica
  Peptide Sequence Number=SeqID_121814
tcaagattgaccgcgttgtgactgtggatggtgattcagatgatgctctgaacctttcatccacagtcacaacgcggtcaatcttgacacacacatacaatagactaactaaaggtaa

SEQ ID NO: 55841 - DNA, 373 bp, Setaria italica
  Peptide Sequence Number=SeqID_121815
agtaactaggtagtaattcttctactaggtcttgttctaacccttcctatttcccttcttcttttgtatttccactgcacggatgcaccagcttgagtaatacaagtcaactcttcgaggtttgttacaccgtgggatggatgagcatggtataccctttgtgacacaatagtaggcgccacccaatttccatatccgacgaccaattatgtactctctgtcactgcaaaagaaggggaactttcggacccaatgcactttcatcgttccggttgtctggcactcctccagcgtcttatgatagataagcatatcatcccacttgttggacatccggaactcatcatctccaaagaagtccctcacttcctct

SEQ ID NO: 55842 - DNA, 442 bp, Setaria italica
  Peptide Sequence Number=SeqID_121816
ttaatttacgttaaatttcgttcctttcttttccctttccgttcttcctaggtatggcgaatcagggcgagtccaataagcgcattggccaagcggggggacaccgagagagaccagagatgctacaacgtcttcctctgccccacgaatttcctcgcgacgccaaagatgagagccttcgtcaggagcccttgatcaagggtacaagccagagccaccgcgccaccaagtacaaggaacctcgccacattgtttcttgccggtttctcttctgcttccacgatttctgattcctggctgttggactccagggaccgaacaaagttgtcaccaaccttagtgttgatccgggccatcaaggcactctttgacgctggctccccagcagccctggcctcctgataggcccggagtccaggctcaattttcttacacatcccca

SEQ ID NO: 55843 - DNA, 365 bp, Setaria italica
  Peptide Sequence Number=SeqID_121817
acccaaagactttagacaaatctcatacgggatacccatgtcctacaatggtggaacaggagaatctcacaggctgtcaaccctccattccctctctttgattccactgttccaatatcagtcaagaaaaaattctgaattagaaaagtgcccacagaaacaggaaaaaaaaggatcaccttgcattcagttctaattttctgttatgcaacttctattgtttcccagtttcaagcataagcaaggaaatgattacctgcacggatgcaccagcttgagtaatacaagtcaactcttcgaggtttgttacaccgtgggatggatgagcatggtataccctgcatcacgttaccaatacatcaata

SEQ ID NO: 55844 - DNA, 282 bp, Setaria italica
  Peptide Sequence Number=SeqID_121818
aaaacctaaaaggaaaaaataaacgaaaaataacgaacctaacttaccctaccgactaccaggatggcgaatcagggcgagtccaataagcgcattggccaagcgggggacaccgagagagaccagagatgctacaacgtcttcctctgccccacgaatttcctcgcgacgccaaagatgagagccttcgtcaggagcccttgatcaagggtacaagccagagccaccgcgccaccaagtacaaggaacctcgccacattgtttctgccggtttctcttctg

SEQ ID NO: 55845 - DNA, 230 bp, Setaria italica
  Peptide Sequence Number=SeqID_121819
tcgtccttcgtcaagtaaaatgttagagcatgcacatgcacatgcacatgcacgacggcagagtcgttctctcgagtccttcctgtcctgacgcattttttccttgtatgatcacagtttcgaccgcgactgttgctggaggtcagggatcaagctgctgccgatcgagtgccacagctccaacggcttcgcgctcaccagggaggcgctcgtgtcggcgtacgagggcg

SEQ ID NO: 55846 - DNA, 267 bp, Setaria italica
  Peptide Sequence Number=SeqID_121820
ccggaggatcgccaacttccaggactaccacggcctgccggagttcagagaggcgatggccaagttcatggggcaggtgaggggcgggaaggtgacgttcgaccccgaccgcgtcgtgatgagcggcggagcaaccggcgcgcaggacacgctcgccttctgcctcgcggaccccggcgacgcctacctcgtgccgacgccgtactacgcagcgtatgtcctcgtgtccgtgccaaaattaagtttgatagcaacctctcatgtcgt

SEQ ID NO: 55847 - DNA, 253 bp, Setaria italica
  Peptide Sequence Number=SeqID_121821
gctgcgcccgggcggcggcagcgggggcaaggggccggaggcgtcagggtcgacgtccacaacggcgacgacgcagcagcggccgcagtgctccggcgagggcgcggcttccgcgtcggcgagccacagcggcggcgcggccgcgaacacggccgcgcataccccggagtgctcgacggagaccagcaagatggcaagcagcggcgcggcgggcgccggcgccgggccggcgttctcgatgctggagagctgg

SEQ ID NO: 55848 - DNA, 245 bp, Setaria italica
  misc_feature (77)..(77): n is a, c, g, or t
  Peptide Sequence Number=SeqID_121822
ctttgaattctcggcgatttagatcgagttgggtgtcgatctagtctgtttaatccccttttttatttcttttcgcngtttttttctctgatgttagagtttggaactgatcatgtaagcttatactaatgacaggttcctaaatggaccatccatgaggctggcagaaagaaagaagtagtaacaatcttaaaaaatactaaaataatttaagaatagttaataagaatagactacaaaaaaaa

SEQ ID NO: 55849 - DNA, 301 bp, Setaria italica
  Peptide Sequence Number=SeqID_121823
taagaataaccaatacgaacgacctaagggactaggggggcgaacaggacagggggaacaagcaactgacctcgcgaggcgggtgtagaagagctgcttggagagctcctggcacttctggatggtgggcgggtcgacgacgtagtgcttgttcttctccatgagcgtcttgtggtacgcgcagccgtgcttggccgcgaacctcgtcgcctcgcacgccttggactgcagctgcgccagcttcgaccccagcgccgccatggggatctgctcacggttcgagacgggccaatgcggtcag

SEQ ID NO: 55850 - DNA, 290 bp, Setaria italica
  Peptide Sequence Number=SeqID_121824
aggaccaagcatacaactcgatgccaaacaacgccgcgacgccagcatcctcaaccttcagactgcttcgtttttccacaagagcttcgcgctgtcaagctccttcccagaatgactcgtaacgggcaggaaggctcgcgaggcgggtgtagaagagctgcttggagagctcctggcacttctggatggtgggcgggtcgacgacgtagtgcttgttcttctccatgagcgtcttgtggtacgcgcagccgtgacttaggaccgacgaaacctacgtacgacctacgaca

SEQ ID NO: 55851 - DNA, 321 bp, Setaria italica
  Peptide Sequence Number=SeqID_121825
ttaagaaaggaataaaacaagatcagacactgaaaatgaatgtgctgggagcagccctccaaggtagttctttgcaacaggatacatcttcttaagtgactccttagcatggaggagcatcgttgaacataagcgaattaacaaagcaagcgcttgaaatcaatttgtagtcttgtaagtctttcaccagaccatcaatccgtcacatctggtcattagcagagcaaagacaaatctgaggtctgagcaagcctaactaagctaataataatgagcaggctgatatatgcatcatgcacacaaggttaacagccaacgact

SEQ ID NO: 55852 - DNA, 269 bp, Setaria italica
  Peptide Sequence Number=SeqID_121826
cgtcggcccagtggcagagcgcggtgaggccggcgatctccttgagcccctcgccggcgtacctggcgaagagctcctccttctcggcgaagaaggcgtccagcctggcctggtcccagtccgggaagaggaagcggccgatctgctcgttgctccggccggccatgtgcttcatgccgaactccggcgtgatggggacgccgttgttgtaaccgaccttgaggagcatctcggaggtggccggtggtggaaggggtcggagatcccca

SEQ ID NO: 55853 - DNA, 246 bp, Setaria italica
  Peptide Sequence Number=SeqID_121827
caccagtgaggttgttgcactcctcacggcgtgctagtgcttccaaatcgacatcagatgagatgggcttgcttcgagcatgcgcttttaatattgagactctctcgtccgcaccaggtaaaggtacataatgttttttcccaaatctaccaggccgcagaacaagcaatcaatactaatacaacaatacaaattactagtttagtaagactacctaatacaacaataagaacaaccttaggacga

SEQ ID NO: 55854 - DNA, 241 bp, Setaria italica
  Peptide Sequence Number=SeqID_121828
cctatcccctgtgtgccttgcctaccccctgttgcgtgtctcagcactgcttttgctattagtgttttcccgcaacctggaggtccaaacagcaggaagccagcttgcatattcactccaaatacctcgtaatcttcagggtgcttgatacatcggataatgcagcggtcaaactctttccttaatgaattaagacctccaacatcatcccatgtgacatcagggacagatgaaaatcctt

SEQ ID NO: 55855 - DNA, 171 bp, Setaria italica
  Peptide Sequence Number=SeqID_121829
gcaatcggcagggtggctcctctggaagccgtcctgttcgacatcgacgggacgatggggatctccgaccccttccaccaccgggccacctccgagatgctcctcaaggtcggttacaactccggcgtgatggggacgccgttgttgtaaccgaccttgaggagcatctcg

SEQ ID NO: 55856 - DNA, 395 bp, Setaria italica
  Peptide Sequence Number=SeqID_121830
agtacccctaaggacccgtactactaccgatcaatcggcgggagagatgccacgcgaccgcgacgagccgcccgccgtgcgcgtctacactgtctgcgacgagtccaagtacttggtcgtgcgcaacgtgccgtcactcgggatgcggcgacgacctggccaatctcttcgggacgtacggcccggtggaggagtgcaagcccatggatgccgaggattgtgaaccctacaccgacgtcttcttcatcaagttctcacaggtcagcaacgccaggtttgcaaagaggaagctcgatgagtctgtatttcttggcaaccaggctccaggttgacctatgcacctcattttgagagccttcttgataccaaggagaaactggaagttaggagaaaag

SEQ ID NO: 55857 - DNA, 254 bp, Setaria italica
  Peptide Sequence Number=SeqID_121831
agacactaaccctacctacttccttccccttcttcttctccgcgtgatccagctgcttggtcccgcaggtacttggtcgtgcgcaacgtgccgtcactcggatgcggcgacgacctggccaatctcttcgggacgtacggcccggtggaggagtgcaagcccatggatgccgaggattgtgaaccctacaccgacgtcttcttcatcaagttctcacaggtcagcaacgccaggtttgcaaagaggaagctcga

SEQ ID NO: 55858 - DNA, 237 bp, Setaria italica
  Peptide Sequence Number=SeqID_121832
ccgcagtaggcctgcacctgcgcgcagatgggcagccacccggcgtgcgcgttgccgttcttccccacgtccgatatcgctccggtggcagccaccgcgcctgtgagaagcatccccacgatctgcaccatgcgttccatgcattcagttcatggacaaccactggagccacaccaagactacactacatggtttgtaaattgtaactgcttaccacgtcggtcaggagcactagtc

SEQ ID NO: 55859 - DNA, 209 bp, Setaria italica
  Peptide Sequence Number=SeqID_121833
gtccatttcaccgtcaaactagttgatcagttggggcgtacgcccacgtaagcaactctagcagtacgatgccaaagctgtagacatcactcttctctgtcgcctttagagaatacgcaagttctgcatattgatttaagatgacatgaggctgaaatcttcagactaatatctttaaattacatgcatctgacagttatatagttgtt

SEQ ID NO: 55860 - DNA, 388 bp, Setaria italica
  Peptide Sequence Number=SeqID_121834
ttagttcttattatttaatttgttacttatttaaactttccttaagggttttactttcttaaatttactttaattttagttaagttcgtctactaggttgttaccatctaacaaataagagtataaataaagcaaaagttattgctatgaaatcagcatttcgaataaattcatgaaacaatcacaaaatggtgagctgacgaataaaaatcagttgtcccaaaggtaaaactttcatcattcaaaaaggtatactagatgccaaagaaaacagaggtgtccattggtctattgtccaagcaatgttaaaaatcaaagctcaaaaaatattaataaaccagtttgcaagtttggatatcttccagaacataattttcagctcgttgac

SEQ ID NO: 55861 - DNA, 507 bp, Setaria italica
  Peptide Sequence Number=SeqID_121835
ggagcgacaacccataatttgagagggaggtcaaaaaagcagaggctcctggtacaattgttctgatagcacaagtacactgcgacgttggaatgatcccatatttttttatacatgaaaaagaactaaacacgctaagaaaacaaatccaagttttctcaagacgctatctagtagtttctgtaactcatccagtctcctccctacagttattaacacctgaaaggggccccgagtcttgcccttaaactcgcagcaacagttttacatctgaacagagattatgatgggggttatccagatcaccagccttactacttcaaggagactatccatgttatgcaagggatgtgttgaaggtacaaaccagactgaaaatggatgactaccaataagtaaccttacccttaactagacaaggttagaccaaccccttaaaacaaatactaggaacccaaggttaggtagtagtacaagaaccttaggaacctagacaaattagtacca

SEQ ID NO: 55862 - DNA, 239 bp, Setaria italica
  Peptide Sequence Number=SeqID_121836
ctacctgcagtttattacaagatgatgccacagcagcaagaccgtggtcctcattaaatccatcacctgaaaattgcagctttgacatttagaagagaatcttcaagaatatgtatgctgctctaaaacaaagagaagcaattcatcaaatagcactttgagaatgaactgaatcactgtagaaaaccttctatggcatattaattactgtgttgtcaaacaaggttcatgtttcacaa

SEQ ID NO: 55863 - DNA, 337 bp, Setaria italica
  Peptide Sequence Number=SeqID_121837
ccactagtaccttcccttactgcaggttgccgaccccctttaaaaccaaatcctggacccaggttggtgtgtcagaccttggacctgcaattgtccggtagacatacatcgtctcggcggggctctcatctgtaagtgagtccaaggggcatgcacgtcgaggatcattcatgacctccacactaaggcgaggcatcttgcgtgcaagctgtcggcatgcgcccagggtcagtgagcacgacgacatccaaagggatcgcattgtctccagctggagatcagggactgcccattcggtgataagcccttgctggcaaatgctgccaagctggagaca

SEQ ID NO: 55864 - DNA, 264 bp, Setaria italica
  Peptide Sequence Number=SeqID_121838
caacgcgccgccggccgccgccctacatccgtcgtcgccggttgggtggccagaaatggatattatgctgccttttaaagttggagacagagcagagtcaaggtccttctctcttggtttcaggggtgcatggttccgcagtaagagaagacatggactcggctatacaaagttccaccaggtagccgtaagcggaaatcaagtgagagtaggatgatcatggtaagacctacctttccacagtggtacctggagcatgaaaaa

SEQ ID NO: 55865 - DNA, 238 bp, Setaria italica
  Peptide Sequence Number=SeqID_121839
gtggactagtagttgggcaatcagatatatactacagtaccagctgctgaattgggcagagacatagttcagctttacgaagatgcatcacctgtacttcatcattggataaaacagacggggtgcaaacctgactgcaacctgcgagcttctcggtgtactacgctatatcagcgccgccaaagcgcctccgcattctctcctccttcgaccaagtcggtgacctggtgttgctcgt

SEQ ID NO: 55866 - DNA, 240 bp, Setaria italica
  Peptide Sequence Number=SeqID_121840
agcgaggggctggtgactccggcggcgtagaaggcggcgatgcctgtggggttgaagctggcgccgccgagcgcgtcgcagaggatgttgaagacgaagagcaggacggagacgagggagacggtgatcaggagcgcgtactggacgccctgcaacttcaggtaggacgtcaccgccgccgtcgaggcccccagcgtcagtttcgatctacttccgctgctcctgcacacaacaacgcaa

SEQ ID NO: 55867 - DNA, 436 bp, Setaria italica
  Peptide Sequence Number=SeqID_121841
ttgtaaggtactaggtattggtattaaaaagtctactttgttagtttggtgggatggcccatgtctttttgaagttctggatcgcattgaagttcctttacgtgaccccaaaggtccagtaagaatgccaataattgataaatataaagatatggggcactgttgtaatgggaaagatggagtcaggcacgatcagagagggtgacagtttgttggttatgccaaacaagtcccatgtaaaagtcattggtataagcctggatgagagcaaagtgcgtcgtgctggaccggccgagaatgttcgtgtcaagttgtcaggaatttgaagaggaggatataatggctggttttgtacttttcaagtgttggtaatccggttggtgctgttactgaattcaacgctcagttgcagattctagagttgcttgacaatgct

SEQ ID NO: 55868 - DNA, 208 bp, Setaria italica
  Peptide Sequence Number=SeqID_121842
ttgcccacttggggtcatccaatgtttaacttcacacgaaaacttggttagtttacaacatttttaggcgcagaagtttggtacactcatccttgctgattttacaaactcgcatataaccataaaattatgcaacccatctaaatatagacggctatgcctaaatcattgatgatttcaacccatctaaatataaccataaaattat

SEQ ID NO: 55869 - DNA, 444 bp, Setaria italica
  misc_feature (169)..(169): n is a, c, g, or t
  Peptide Sequence Number=SeqID_121843
gaagttctctgatttcctcagcttggaaggtttacacttcgaactgaggaaagacagtagctgtgggaaagttgttgaagttcctcctgctggcagcccaacattctgagcataagccaattttgaataggatggataaccatgaagcggcggtgcgatctcttgaganacttttttttggagaagcgagattggttgtataattttatggttatatttagatgggttgaaatcatcaatgatttaggcatagccgtctatatttagatgggttgcataattttatggttatatgcgagtttgtaaaatcagcaaggatgagtgtaccaaacttctgcgcctaaaatgttgtaactaccaagttttcgtgtgaaagttaaaacaattaggaatagaaccccaaagtagggacaaagtaacaattaaacttaaaaaaaaaaaaaa

SEQ ID NO: 55870 - DNA, 143 bp, Setaria italica
  misc_feature (57)..(57): n is a, c, g, or t
  Peptide Sequence Number=SeqID_121844
gttcctcctgctggcagcccaacattctgagcataagccaattttgaataggatggntaaccatgaagcggcggtgcgatctcttgagatctgcttctttctttttcttcatgtcgatttcctctatgagctcaacgatctca

SEQ ID NO: 55871 - DNA, 380 bp, Setaria italica
  Peptide Sequence Number=SeqID_121845
accgagaactccagatgattttgagaagttggtcaggagctcaccgaatagtagttttgtctggataaaatatatggcgtgtttgttagatcttgcagatgttgagaaagcacgtgcaatagcagagaggtctgtctgcagtccaaagcattatttttaatactgtttaaaatattctttggtgataggaagcagttttcttgtatcatcttggtagtgtgatttgcttttgtttctgttggtttcgtttgcaaaggatgtagactttccttgttaaactttcttttggaacacttctgtttactgtggatttatatggtctaatatttttccttctctgttggttcaaactttttgactgcatcagtttgcatctttta

SEQ ID NO: 55872 - DNA, 242 bp, Setaria italica
  Peptide Sequence Number=SeqID_121846
cttctaactcctaccaccagtgtcatggtgcagtggatgcacttctacaaatctagcgaccgacagtgcaatctgtggctaatgacttgactgaacagttatcaaaatttgtccatcctctcctccggaagaaggcctagctagtttttgacaaagccaaatctgctgaaaccagcatatagtcgccatattgatcgatcctaagaacaaggcccaagaacgaagagtgtacaaatacaaca

SEQ ID NO: 55873 - DNA, 274 bp, Setaria italica
  Peptide Sequence Number=SeqID_121847
gtttgtattttctttactttggtattggtagtttaattttacgttgctcactgctcaagtagacgtcctctctgcacgcacacgcatgtagagaggacgtctacttgaagtagtatgggaggtcgagcacgtagaggaggaagtaggcccgctcatcgcctggtacctctccaacctcccggcctaccgcaccgccgtgagcccgctgctccgcggcatcgaggtcgggcttgcgcacggctacctcctcgtgggccccttcgccctcacccgg

SEQ ID NO: 55874 - DNA, 254 bp, Setaria italica
  Peptide Sequence Number=SeqID_121848
atttacttggggataaaattaactccatccaagtaagaaatcaacagttcaagttccaagttacttgaagtacatttatacacgtgctcactgctcaatcaacgacctcatcgcctacccatgcacgcacacgcatgtagagaggacgtctacttgaagtagtatgggaggtcgagatggctaccgcgtacgctcccatggcgagccaggtgatgaagagcggcttggtgcactcgaggcccaggggcctttcg

SEQ ID NO: 55875 - DNA, 267 bp, Setaria italica
  Peptide Sequence Number=SeqID_121849
ttcgtccgtttgtatgggctgcaccacctggtacgttgtcttctccagcccgctcatcgcctggtacctctccaacctcccggcctaccgcaccgccgtgagcccgctgctccgcggcatcgaggtcgggcttgcgcacggctacctcctcgtgggccccttcgccctcaccggcccgctccgcaacacgcccgtgcacggccaggcgggcgccctgggcgccgccgggctcgtcaccatcctcagcgtctgcctcaccatgtacgg

SEQ ID NO: 55876 - DNA, 194 bp, Setaria italica
  misc_feature (15)..(15): n is a, c, g, or t
  misc_feature (31)..(31): n is a, c, g, or t
  misc_feature (49)..(49): n is a, c, g, or t
  Peptide Sequence Number=SeqID_121850
ttttgtttttttttntttttttttttttttntttttttttttttttttnttttttttttttttagtcgccatattgatcgatcctaagaacacggcccaagaacgaagagtgtacaaatacaacacctagtcattaattttatccccaagtaaattaactccatccaagtaagaaatcaacagttcaagttcca

SEQ ID NO: 55877 - DNA, 246 bp, Setaria italica
  Peptide Sequence Number=SeqID_121851
aacgcaagacaaaactaccatcgggaagcttgatgaagaagccagcgatgcaggctgcagatatgatgagtccttggctaaggctaatctcaactacaccgcacaagcactcatcatatctgcagcctgcatcgctggcttcttcatcactgctgcaaaaccattctacggaacgcaagacaaaacaccatcgggaagcttgacaagtcaaccgtcacagctacagatctgcattctaagtttgta

SEQ ID NO: 55878 - DNA, 200 bp, Setaria italica
  Peptide Sequence Number=SeqID_121852
agctaggactagaagagcccaggggagaagccatggccggcaggagcttcttgatccggtcccccaaggaggaggagtccgacgccgccgtcagagttgatcggctgccgtgtccttccttgggctaaggctaatctcaactacaccgcacaagcactcatcatatctgcagcctgcatcgctggcttcttcatcactgc

SEQ ID NO: 55879 - DNA, 443 bp, Setaria italica
  Peptide Sequence Number=SeqID_121853
taaaggaaaaaaagtaaacaaaattttaaaggaaaaggaactaagaacaaaattacttaacaagacaagtaggtaggtagaatacaagacttaaactgcttaacactttctgggctgcaaagaggggccacgacttcaacttccttggacccttcctgtttgctgctctcatggtgctcatggtgttttcactagtccagatctttttcccactgggcaagatctctgtgatgatatatggtggactggcgtcgcttatcttcagtggctacatcatctatgacacggacaatatcatcaagcgctacacatatgatgaatacatatgggctgcagtttcactctacctcgacgtcatcaacctgttcctgtctctgctgcaagtgctgagggcagcggatagttgagcttgccaagctttctcttgagaacgtacatttgtg

SEQ ID NO: 55880 - DNA, 247 bp, Setaria italica
  Peptide Sequence Number=SeqID_121854
aattgattgcagtatgttatgtgtacaggaaaagtcattttggaggctgcaattcttacagcagtggtggtgatcagcttaactgcttacactttctgggctgcaaagaggggccacacttcaacttccttggacccttcctgtttgctgctctcatggtgctcatggtgttttcactagtccaggttggatggctgaaccttgtttcccttgaatactgtatctttattatgccattttttttccg

SEQ ID NO: 55881 - DNA, 328 bp, Setaria italica
  Peptide Sequence Number=SeqID_121855
tgatccgtagttcgctggataccatgctccaaccaaattatatccttattacagggcctttgtacagacctctcgcaacaacaaagccatcggggggctgatggtcctccaactcctccaaccagacaacttgtgagctatcaggttggttgattcactagagacttccggaagtaagaacaatgccgcccgtcctcagcagagtatggtggagaaaggacatcgaagagagcacaaggtgtgatggctctgaaagtatggatgttaccccctctattagggtaaagaatgctcgtctctggtgcagtcatttctacgtattcttctt

SEQ ID NO: 55882 - DNA, 223 bp, Setaria italica
  Peptide Sequence Number=SeqID_121856
ggctgatggtcctccaactcctccaaccagacaacttgtgagctatctatctcagcaggcaaaacaacaggtggttgattcactagagacttccggaagtaagaacaatgccgcccgtcctcagcagagtatgtctgtcaaactcgatgttctgtacagttgatcatcaactacttttacaatgcaataagccaatagtgaacttaaaaaaaaaaaaaaaaaa

SEQ ID NO: 55883 - DNA, 304 bp, Setaria italica
  Peptide Sequence Number=SeqID_121857
tgagcaacatcatggaggccatcgccgagaacctccccaacaagaagtcggtcaagttcgacgacggcgagggctccatctccgaccaggccaggaagctgttcggcggcggcggcggcggccagggcaacaagaagtctctccaccacttctttggcggcgggaagtgtacgctccgatccttaacagcatcagagtcgtattaaaccatctcgaatttctcgatcgatctgccatggctgatggctcatccatatgcaatatgcatccatgtcgtttgtggcagccgccgacgtgctgctgt

SEQ ID NO: 55884 - DNA, 259 bp, Setaria italica
  Peptide Sequence Number=SeqID_121858
ccgccggcgcccaggtgaacaaggccctgggcatgctccaggacatttcctgtgggagagacctgaggcggttcctcatagtaagtgcactttgctgaactgaacatgtctgaatttcttcggtgagagcgtttgcagtgtgacagctagtgtcaggctgagcttacaatctcccttccttttcaggtgatcgccgcgctcttcgcggccgcgatcgtacgggaagacttactagacaaactttaactaagaaaccgaa

SEQ ID NO: 55885 - DNA, 244 bp, Setaria italica
  Peptide Sequence Number=SeqID_121859
tggcgaactggttagccccattacgtcctcgtctcccatttgatgagcgtgttgaactattccaattgcgtgcaatttgtgcttcattatctaggccaacatctaaaggccttatctcctctgcgaaaaggaacatcagtgacacttatgtcttatgtctgccaatgttttgatctcatagaaccaatcagaactcaaatgttgaactgaaatgaagtatatagcagcaattcaaaacaaaatt

SEQ ID NO: 55886 - DNA, 159 bp, Setaria italica
  Peptide Sequence Number=SeqID_121860
atatacttgtatacaaatcgaatcgaactagtcgctcttcctgaacttgcccttgcagatcgcctcatggcatgtaatctggcataattccagcatctcagcactgatttcctcagcagagagtgtctgtcaaactcgatgttctgtacagttgatgat

SEQ ID NO: 55887 - DNA, 120 bp, Setaria italica
  Peptide Sequence Number=SeqID_121861
tgaagtggaataactgaagaaggtggcatacaaaatatacccatagagaaactttcagagccatcacacttgtgctctcttcgatgtcctttcttccaccatactctgctgaggaggcgg

SEQ ID NO: 55888 - DNA, 264 bp, Setaria italica
  Peptide Sequence Number=SeqID_121862
ttttttacacttctgtaacataaattctttttgcatgttgttcatatatctaataatcaagctccttcgaagaaatggaaagtctgttgaactacttgatgtttctagtgagctgcctgaattggtccggcgtcctgggcttagcacttggaaggtttgtgtgcttatatctatatcatggttgttctcttggttactttctgttttatgtgttttatccaataaggttgttcattcttaattaaattttgatgccccctgtgt

SEQ ID NO: 55889 - DNA, 374 bp, Setaria italica
  Peptide Sequence Number=SeqID_121863
aagtggaactcaggcatggggaaccaacttcatcttctgcaagtaaatattgctatgcgtggtattgcattacttaaagtgggtggaaggatggtctattcaacctgttcaatgaatcctgttgaaaatgaagctgtcatagctgagctccttcgaagaaatggaaagtctgttgaactacttgatgtttctagtgagctgcctgaattggtccggcgtcctgggcttagcacttggaaggtacaagatcgaggatcttggtttcagactcatgatgatagttaccaacaaataagaaattaaaaggtaaaaagtaaaaattaaagttaaaagttaaaatttaaagtaaaccgtaaaagtaaacaaataagtaa

SEQ ID NO: 55890 - DNA, 277 bp, Setaria italica
  Peptide Sequence Number=SeqID_121864
agaatgtagtattgccgagcatgtttccttcaagtaatatcactgagaaaagccatgctgtatgtggttatgttgaaataaatacagataataggggcagcttctcaagaaattgcgacatcgaagaaacaagcaacattaatcatgatatggatggagtttctaccgatcccactaggaatctagattgcacatctaaacattgatcatgatatggatggagtttctaccgatcccactaggaatctagattgcacatctaaaaattttgaattca

SEQ ID NO: 55891 - DNA, 443 bp, Setaria italica
  Peptide Sequence Number=SeqID_121865
gtatgatgcgactatccacacgcttcaacctcattagagactccacgtgtgctctcagtgcatgcctttctcccaacctggtgatctcggcgcgccacctcgcctgatctacgatctgagagaacggcattgagctgctgagaagatgatcagagaacgccctttgctgaacatctctccgggaaagcgcccacctggactcctggtcctccttcctgaagtcgctcttccttgtaaatgcagtcttcctgtcgatcagcaagttccatgctttgccactaagaatgtaccggacggcgatcttgatcaggtcaagtggcacatagaaaaccaggctgtacagccatatgacaccggcccagcgccatccgatcgcactgatcgatgcgaagccgatggtcgcatagacggtgacaaggggtagccaccagttgtgctacgac

SEQ ID NO: 55892 - DNA, 366 bp, Setaria italica
  Peptide Sequence Number=SeqID_121866
ttagtttggtaatttcttcgttgttctaagtattcgtctacttcggctctgcccgtgcactagagtatcttcatgaatatgttctccatccatcatccataagaatttcaagtcatcaaacattttgctggactcggaattcaatccacatgtttcagatgctggacttgcaagctttattcctgatgctgaattccaggcagcagaacaaagtgcgggatacactgcccccagaggtggacatgaccggtcagtacaccctcaaaagtgatgtctacagctttggagttgtcatgcttgagctattgacgggacggagaccatttgacagctctagacccaggtcagagcagtcacttgtgcggt

SEQ ID NO: 55893 - DNA, 425 bp, Setaria italica
  misc_feature (52)..(52): n is a, c, g, or t
  Peptide Sequence Number=SeqID_121867
aggatcgtaattcagtcggatttggaggcgccgagtacacaagggagctccncccggtttcgctaggggggaggaccggaggagagcattgccgcgcgagatggcgaggaggaggagggggaggcggtggcgggacggtgggcgcgccatggctggtgctgctgctcctgggatgctgcggcggcggcatttggccacgcggacggatcttcgctgctgccgacacggaccccagcgatcttaatgtcctcaatacactctttactagtctgaattctcctgggcagctcaatggttggcaggcaaatggtggtgatccttgtggccagtcatggaagggcatcacttgctcaggaatacaaggggtacaactaaaaataacctaaattaagtaacgaaaacttaaagggaaactaactaaccaa

SEQ ID NO: 55894 - DNA, 332 bp, Setaria italica
  Peptide Sequence Number=SeqID_121868
aggttaatggttaaaggtttaaatacttaagattagtcattgtcgaaatcgagtagggtaaatttccagcctttatagtttgacagatgtggatctctcctttaattctcttacgggtgatcttccacaaagtttcactggattgtcaagcctgaaacatttatattttgcagaacaatcaatttactggttatatcaatgtcctagcgaatctccccccttgaagctctgaatgttgcgaacaaccgtttcactggttggattcctagtcaacttaagaagataaacagtatacagactgacggaaattcttggagcacaggaccagcgcc

SEQ ID NO: 55895 - DNA, 223 bp, Setaria italica
  misc_feature (26)..(26): n is a, c, g, or t
  Peptide Sequence Number=SeqID_121869
tctaggtatgcatcagctatgcagtnttacccagtttttctagactctggctcactaaccatctttgtaatgtttaccgccaaataaatttgtgcaggcagcagaacaaagtgcgggatacactgccccagaggtggacatgaccggtcagtacaccctcaaaagtgatgtctacagctttggagttgtcatgcttgagctattgacgggacggagaccattt

SEQ ID NO: 55896 - DNA, 214 bp, Setaria italica
  Peptide Sequence Number=SeqID_121870
catcagaaattagacagcactgtgatgccattccaatcatctgatgactttgctgaactggtctctaatatcaaagatgcatgcgtcggtaatttaagaaatattgtcctcccaaatgatcatgtatgtgctcatcttctgtcgtatgtgcaacaatgcacaagtactatagcttgtatgaccttgccaatcaataaaatcatcttgcagttta

SEQ ID NO: 55897 - DNA, 441 bp, Setaria italica
  Peptide Sequence Number=SeqID_121871
gtgagctggagtttaaaggctcactctattgggatgacttccagtcatattgaaggttattgaagctggagtttaaaggctcgcatctgatatgatacaagttatcctcactgggttcatcactgacaacagaaaagttacatcgccataacccgcccccctcggaggcggcgggctctttactgatggtgcatgctacatgttacagcaaaaggaaacattagcggtgatgggttacgtgttacagcaactgtctgtatggctgtgttcctttgtatttcgcctgtggaatttatgtctgcttaggcgatcctaccacaagaatgagagcctgccttcacttgctctcatcagggctgagtgtttggcggattccaaactgggtggaagatgagagcgtctttccctgtttttcggttggatgacatgtagttttctctt

SEQ ID NO: 55898 - DNA, 267 bp, Setaria italica
  Peptide Sequence Number=SeqID_121872
ttaaggttaacttaaccttaacctaaaggtacttactaaattaaaatttgcagacaagaacatccaacaagcagtggcaacggtttgtataatggtggaaacaatgctgcagttgctaaggcgaactcaacaaattcaatgcaatcaaatccacaagcatcgtttccttcaccagtgccctcagcatcaaatggcacatgatgcctgcaccccagcattcaagccagatgaactcgccgaccatgccctcaaacctacctcctatgc

SEQ ID NO: 55899 - DNA, 181 bp, Setaria italica
  Peptide Sequence Number=SeqID_121873
cctatcccctgtgtgccttgccttcccctgttgcgtgtctcaggtgagctggagtttaaaggctcgcatctgatatgatacaagttatcctcactgggttcatcactgacaacagaaaagttacatcgccataacccgccccccctcggaggcggcgggctctttactgatggtgcatgct

SEQ ID NO: 55900 - DNA, 253 bp, Setaria italica
  Peptide Sequence Number=SeqID_121874
tggttgaggtgacactctggctgtgttgggttgtcttggttgagatgttgatctcttggtagtgacttttttgttaatatcctttgtagatgagttggatatttcatttctcatgtcatgttcgagtgacttcagcctccttttgagtttgtcattaagttgggcttcaatctttgcagatttctctgctattgttatcttgtcacgcagttcgtttgttattcttcttcccttgtcttaagttagttccttt

SEQ ID NO: 55901 - DNA, 293 bp, Setaria italica
  Peptide Sequence Number=SeqID_121875
cctagtcttctctgcagattctgcttctgaattaggttgcttcaacactttccctgctattgacggccttggttgagatattggccttctcctatcaatggcttcaggtgaggatggttgaggtgacaacccaacacagccagagtgtcacctcaaccatcctctcctatcaatggcttcaggtgaggatggttgaggtgacactctggctgtgttgggttgttttggtgagatgttgatctcttggtagttgacttttttgttaatatcctttgtagatgagttggatattt

SEQ ID NO: 55902 - DNA, 190 bp, Setaria italica
  Peptide Sequence Number=SeqID_121876
cgacacaactgctggctttgttgttcaaacaacctcccaaatggaataaattacaccacagctggcacacgctttttaaaataagtcacatgttgcatctgtaagaaacaaagaaaaacgaacgatgtcagctgaaaataatgtaggtgtaattaggtttagtgcaaaatgtttggaagcaactgttcac

SEQ ID NO: 55903 - DNA, 225 bp, Setaria italica
  Peptide Sequence Number=SeqID_121877
accttgaacttcttctgtattgtatttgtcataatttgagcaatacaggttgtgatgattgccagcagggacagtacagatacggtacacgggagctttcattgatttttctctctcggtcatttaaatcaacttaattgtttattttcacttgcgagggtgtttagcacgtcgttctgaaaagccaatttagagacagctaaattaattgatataagaggagaa

SEQ ID NO: 55904 - DNA, 275 bp, Setaria italica
  Peptide Sequence Number=SeqID_121878
cggggcacctcaagggcgaggtgcagctgctgatcaccaactacaagccgtggtgggtgcagaagtacacgccgctgctccagaagctctccaactacgacccgatcaacttcgacgaggacgacggcgtgcactgcttcccggcggggttcgtcggcctgtaccgggaccgcgacctgatcctctccccgcacccgacccgcaacccgcgcaactacaccataggttacgaacttacaaaccggttacgtaccgacggacgactactaggacga

SEQ ID NO: 55905 - DNA, 240 bp, Setaria italica
  Peptide Sequence Number=SeqID_121879
aggggacggttactagaacgaagacccggacttagaccggaaggacgactaagcagaaagggcgacggcgagaatgcggcggcggcctcggagccaaagccatctcccaagaaagaggaaggggagcagaggcccaatggcggcgcggcagctgcagcggcagcgtcgtcgggcgaaggcaagatgacttgcgacgagaatggcgtggacgaggggttccccgtagcgcggccgaccgtg

SEQ ID NO: 55906 - DNA, 199 bp, Setaria italica
  Peptide Sequence Number=SeqID_121880
ttttcacttgcgagggtgtttagcacgtgaaaataaacaattaagttgatttaaatgaccgagagagaaaaatcaacttaattgtttattttcacttgcgagggtgtttagcacgtcgttctgaaaagccaatttagagacagctaaattaattgatataagaggagaaattgttttctttcctttaacaccgttgccg

SEQ ID NO: 55907 - DNA, 416 bp, Setaria italica
  Peptide Sequence Number=SeqID_121881
tttacattcaatacaacctgaactcatttttcgcctgtctttgctaggtattgtatgcgtgggtggtgatggaattgtaaacgaggttctcaacggtcttctgtgcagagatgatcaaaatgtgtctgcctctgttccaattggtattatacctgctggatctgataactcacttgtttggacagtcttgggtgtcaaggatccaatatctgcagcattgtcaattgtcaggggaggtcttacacctattgatgttttttctgttgaatggattcaaagtgggattatgcattatggcacaaccgtatcatattttggtttgttagtgatgttctggcactctcagagaaataccagaagcgttttggacctctccgttactttgtagctggttttctcaaattcctgtgtttacc

SEQ ID NO: 55908 - DNA, 373 bp, Setaria italica
  misc_feature (330)..(330): n is a, c, g, or t
  misc_feature (372)..(372): n is a, c, g, or t
  Peptide Sequence Number=SeqID_121882
ttggttactattcttacttccctagtcttggtcgttagtattcctaaattctaaagttctaaggtacttgtaaaaggtctattggtccaggcttgactagtacgaacgatgcaaaatcctctaaggttaacacggcacatgacaaagaggacacatcgtcaacaatttctgatcctggacctgtgtgggattcaggaccaaagtgggacgcagagcctaaatgggataatcagcctaactgggaacctgagacttcaattgaactccatagtcctcaagaggacattgagcttggtctgactaaggagcttgtaccaagcttagatgagngatggacaggttaggaaaggacgttatcttggtgtactggtnt

SEQ ID NO: 55909 - DNA, 332 bp, Setaria italica
  Peptide Sequence Number=SeqID_121883
ctgaatatgatgacaattgtttggacttgctgttggttggtggaagtggaagactcagattactgagattttttgtgcttttgcagtttggaaagcatatatctcttccaaatgtagaatatgtaaaggtgaagtctgtgaggctcaaggcaggcccaaatacacatgacggatgtggtattgatggtgaactactccatgtcaaggggcaagttcgctgtagtttgttgcctcaacaatgtcaattgatcggcaggccagccaaaaaccctagtaacaagtaagactagtaaaataacaattaactactaagaacaaagaaacttaacaaa

SEQ ID NO: 55910 - DNA, 314 bp, Setaria italica
  Peptide Sequence Number=SeqID_121884
taagaaattacaaataaatagtactaacaaggaatacaatagtactaggggacaagaagactggaggtttgtagtcctcgtgcaaacaacgaaccttctgagcttgttcgtgcgcttgacccaaaatcaaagcgcctatcattaggtagagcgagtacatttaaagaaccagaagaagtgctccatccccagtctcatggtacatctactcccagctggcgtagatccaaatcaaagtcaaggactgaaaggcatggccaggcttgactagtacgaacgatgcaaaatcctctaaggttaacacggcacatgac

SEQ ID NO: 55911 - DNA, 162 bp, Setaria italica
  Peptide Sequence Number=SeqID_121885
ggaattgtaaacgaaggttctcaacggtcttctgtgcaggtactaaaatctcttgtatcaactattgattttagtacctgtccaggatggtattgtatgcgtgggtggtgatggaattgtaaacgaggttctcaacggtcatctctgcacagaagaccgttg

SEQ ID NO: 55912 - DNA, 376 bp, Setaria italica
  misc_feature (19)..(19): n is a, c, g, or t
  Peptide Sequence Number=SeqID_121886
cttcccttgataatgtagngtttttgctgagcctgcgtcaaatgcactgttgatgattcgttggtaacttaaataacatccgtatattaactttcgttaattcattggacttcctacatgatctaatagcatgtgtattctgcttttcagcaacaatacaaattctgctatcaggtgattgctgatgagctgaaatatctgctaaactcagaccattgaggtgggtcacataacgacgcttacggcaacataactgcagaagcatttattgtgtattccttttacacatttacatgcatggcaaaacttttgagtctcactttatgttctttccctgtaggaagaaccaagcgctctgttttcatccgtggacctc

SEQ ID NO: 55913 - DNA, 233 bp, Setaria italica
  Peptide Sequence Number=SeqID_121887
gatcgcatttagttctcatgtaacaaaacaggtgtggccatccatcacctcttttgatgtttgcacttattgtatttctccatggtggtcaaataattaatcttgtattgcttattagccctgtacatctataggcatttcatgatgaaagctattctgattgctaatttcataatatagtcaggcaaggtccattctgtactccatatagaatatcctgattggcccgacca

SEQ ID NO: 55914 - DNA, 405 bp, Setaria italica
  Peptide Sequence Number=SeqID_121888
gctcccgatcccccccttccctctctagagcggcaagatctttattctctcctcttcttgcaaactctctctctctctctaccttattcttcttgcaagcactttctctctcttctccgtctccttttttttaattaaactgttgcagataagaatattcagacattcagtcgtataaccttttagcatggcacagccaacctaagcagcaggcaggtcttattaacaggaatatcaacactttgctaacgttctgaatattaacttgacatcagaagttccagctgtcaactacccattcaaattctcataggctgttattttaaagattcattagaaggcataaggctgttatttagcattttgtacctagcagaagatgcataaaaaacagaacaaattaag

SEQ ID NO: 55915 - DNA, 267 bp, Setaria italica
  Peptide Sequence Number=SeqID_121889
cagactgcctacatacgtataagtttggtgctgcatcatttactggcctccaaccaggaacaagattcgctaccaaaaggtcgataaaatacagacaatagaaaagtaaacaatacgacaagtactagactaaactaccaaattagttacaaaccaatttactagacggactaacaagaacaataagactagtaatacaagaaataccaaggtaagaaagaagaaaataggaataattaccttagtactaattagtaacctaagtaa

SEQ ID NO: 55916 - DNA, 257 bp, Setaria italica
  Peptide Sequence Number=SeqID_121890
ttctccgtgatttccattaacaaaaatgttatcacacttcaggtctctgtggatgattggaggttggtggctatgcaggtaatccaacccatgaagaatctgcctcgcccaattctttattgccttcaagttaacacgtgggtgtttctgacggtaactaaaaatgcacaaagttgtaggcatcatttttaatatgcatggaagcagcaacaaagaatgattattagtactggttacttactgcctgagacttccag

SEQ ID NO: 55917 - DNA, 253 bp, Setaria italica
  Peptide Sequence Number=SeqID_121891
aataaaaacttcattacatttccatgcttgagagacttcagaagatggacttccgtgtagagcctatcaaggttatctggacattgcattacctcatctatgttgatctgattccatgcaacctctatgccttcaacctcatcaaatgccttgtaactacaaggtatatgaaattttagacgtaccccaagtttgtattctaaagagttgaagacagtataaaaaatcataataaatcagttgtcattattta

SEQ ID NO: 55918 - DNA, 184 bp, Setaria italica
  Peptide Sequence Number=SeqID_121892
cgctaaacctaaataaaatcattatttatccggcaaccactttttccgagctccttcaatagcctcttcccgcatccttgtcaactcatcaaccaaatgtttgtactgagcttcaatcaataagctagagttcagccatgttttgggtgatgggtcgaggtcgattttccatatagatcaagca

SEQ ID NO: 55919 - DNA, 478 bp, Setaria italica
  Peptide Sequence Number=SeqID_121893
cagatttgacaagatcatcaaaaggaaataccatctactgtggtttatgaagatgagaaggtattctgtggtatttcttttctctattttcaattagattgaaagcactgcaataattctgttgcctgcttttattgaatacgtgcttatgtttaggacaaggtagtacggaaattactgtactgatatctgataagcatgtgatgtttgcaattgtgagaaggttgttgtcaactagtgttaaaatgctgtacatgcccatgtgttgaatttatatgctcgaaataatagttattgtctatgaatgtagccaagaaattagagatgtaattgggctagcccgcaaaccagcatataggcttaagtaagtgggttgccggctagccacttgcatccctacaaacaatccctttaacttgcgatatgatgcagtaagaatattctattattaggaggactatgcacatatgctttagaa

SEQ ID NO: 55920 - DNA, 437 bp, Setaria italica
  Peptide Sequence Number=SeqID_121894
ccaacacacatcctaatcattccaaagtcaaggatggattaactggcctttcgaaggcagaagagaggcatgttgagatacttggctatctcctctatgttgccaaagtaattgcgaagcaggaaggactcgaagatggctaccgtgttgtcatcaatgatggccctaaaggatgtcaatctgtttaccacatccacgttcatctccttggaggcaggcagatgaactggcccgcaggctaaagaatctcttgctgatcagtccccgctggctaatgatatggcaaggattgacgtttcgtctctatcgaataattcctgtaatccccataagatttagcgtgttgaactttcaactagtaatttagtaggaaattaactaaggaaaaccaaataacctaagaactaagtaaagaaaatttaaaataagggaacaaa

SEQ ID NO: 55921 - DNA, 334 bp, Setaria italica
  misc_feature (307)..(307): n is a, c, g, or t
  Peptide Sequence Number=SeqID_121895
tctgtttaccacatccacgttcatctccttggaggcaggcagatgaactggcccgcaggctaaagaatctcttgctgatcagtccccgctggctaatgatatggcaaggattgacgtttcgtctctatcgaataattcctgtaatccccataagatttagcgtgttgaactttcactgtatttgtggaattactggaaccatcctgctgtgatttatgggcaggaaacttggatgttggaatcatggattggcctgcccttgttgatcagctcattgagattgtctttgcccttgatgatctgcgcncagtgctatcgtttcgctaaaaaaaaa

SEQ ID NO: 55922 - DNA, 167 bp, Setaria italica
  Peptide Sequence Number=SeqID_121896
tcaatgacaaatctgcccgtaacgctactatcaatcgcccacacaaaaccttcgtgtttcagctgcttgtcaaaaattcctgaatatgtgcaaaccattagttagttagaaatgatttcaagaaaggtttgttagttagaaataagtgacgtttggtgtcgtcattg

SEQ ID NO: 55923 - DNA, 429 bp, Setaria italica
  Peptide Sequence Number=SeqID_121897
atcatcaatggtaatgtgatgggaatggttaagatacttatgaaacctgatgcttgtggctgggcatttggtatgaatgtgctcgatcttattgaatggaggaacaagaatgtgacaggtatatatcattattggcaggagcgcaatgctgatcataccctatggaagcttggatctttgccacctgggcttcttgctttctatggtttggttgaagcactggatcccaaatggcatgtcttgggacttggctacactactgtggatcctgctactatcaaggaaggggcagtactgcattacaatggaaatatgaagccatggctcaaaattggaatggagaagtacaagggcttttgggatagctatgtggactattcacaccctttgattcagcaatgcttcatgcgttgattgctgtgtatcaac

SEQ ID NO: 55924 - DNA, 231 bp, Setaria italica
  Peptide Sequence Number=SeqID_121898
tttatccgttcaatatccatataacgtgatgattttcctttgtgcttcaggttcattagttgcctaatttgttttcattttccagatatgggacgaatctgcgggtgaaagcttgctacagattcaattgctaacagctctgagaacttttgtttcttcgcttggattccagtcacctctttcttaccacgtgcttattcctatcctccaaagtggtattaattatttgta

SEQ ID NO: 55925 - DNA, 279 bp, Setaria italica
  Peptide Sequence Number=SeqID_121899
gcggactggtcggtcaaggcgctggctatgggggtcacaaaggaggctagccctcgcagggagtaccgggggatccccggggacggcggcgacatgggggatgttggggtcaccaacccggccccgtccttgcctccgcggaacagggcagatgaccccaagctgcacaacccgctgctccgtctcgagcggatgggctgtgggtggctcggcgtcatcttcgagtgggagggggctgagacacgcaacaggggaaaggcaaggcacacaggggatagg

SEQ ID NO: 55926 - DNA, 283 bp, Setaria italica
  Peptide Sequence Number=SeqID_121900
ttccctttcggttcgttcggttacgttcggttcggtttgttcgggttgttcgtccgtaggtccggtacgacgtgggggaggaggtggagcggatccgggcggcgttgggcggcgcggagatcgacgtgaccctggactgcgccgggttcagcaagacggtggcgacggcgctgggggcgacgcgccccggggggaaggtgtgcctggtggggatggggcacaacgagatgacggtgccactgacgtcggcggcggtccgggaggtggacgtggtgggcgtgtt

SEQ ID NO: 55927 - DNA, 278 bp, Setaria italica
  Peptide Sequence Number=SeqID_121901
tcggttgtcgggttgttcgtccgtaggtccggtacgtacgttgggggtaggtaggttggtagtcggtattccgggtcggtcgtttgggtcggtcgcggagatcgacgtgaccctggactgcgccgggttcagcaagacggtggcgacggcgctgggggcgacgcgccccggggggaaggtgtgcctggtggggatggggcacaacgagatgacggtgccactgacgtcggcggcggtccgggaggtggacgtggtgggcgtgttccggtacaaggaca

SEQ ID NO: 55928 - DNA, 231 bp, Setaria italica
  Peptide Sequence Number=SeqID_121902
cgtgcgttgttcatcgatccatggatggatggagtttaagaaaaaggaaatcagattgcattcgtaacatggatgtcacttcctgaatcatcgcaggagatgcgcatcgcgcacttcgtggtgaaggagccgatggtgatcgggcacgagtgcgcgggcgtgatcgaggaggttggcgctggcgtgaagcacctgtccgccggcgaccgcgtggcgctggagcccggcgtg

SEQ ID NO: 55929 - DNA, 242 bp, Setaria italica
  Peptide Sequence Number=SeqID_121903
ggtgcttgcggccgcggacggtgcggcggcgttgctgctggccggcgccgcctcctctttggtcgccttgctgatctgcttgctgctcgccttgaagcagctcttccggtaggacctcaccggtggccaacctacgacgggggccctgcaagagtagacatgtagcttgtaagaaccggagctccaagagacagttcttagcatgtgaactgagagcctgatgaaggctactactcacttgg

SEQ ID NO: 55930 - DNA, 209 bp, Setaria italica
  Peptide Sequence Number=SeqID_121904
gcttgatcgaaaagaacaggacaagggaactgtgtttcctgcagaatgttcaacgctcatgtttgatcacttaactggttatcttttctgaattttgcagccatgctgcctggacctgctattcccatactatcccagtcattcctggtgtggcagcttatcttctctgccatgctcttgggaaggacctacactgtgagacaaataat

SEQ ID NO: 55931 - DNA, 183 bp, Setaria italica
  Peptide Sequence Number=SeqID_121905
cctgattcgagctgcagcctctcctgtcttccagtggttttcaaatgaccagcgagactgaggggcctaaaattacagaaatttacaagagatgtaggcagaatgccagctccgaaccttatattactgaaaagagagacgatgccatactcgagaagttcacttgtgactgtctgtatgttg

SEQ ID NO: 55932 - DNA, 170 bp, Setaria italica
  misc_feature (149)..(149): n is a, c, g, or t
  Peptide Sequence Number=SeqID_121906
ttagttagttttgtcttggtaaattggttgtcgtcgttgtttgtaagtattgtccttactagtttcttttttgttgcttctggtgggcagcagcaaggcaaaagctcgtacaggtttctgatcttgagatactgcaatgcgtaggggancacttggccaggcacaccaac

SEQ ID NO: 55933 - DNA, 413 bp, Setaria italica
  Peptide Sequence Number=SeqID_121907
tcaacaatagcagcaaccttcagcatatcttcacattcagcaataaaatagtctggagatagtttagccttctccaagaaacgttcctgcagcacaacgaaaagaaactagcacgcattttcttaccagaaaaaatatctgtaaatagaaagaaagcacagtatacatttaatgggataaaactaaatatgataacaagctattcaagagaaatggatagacaaaaaccaactctacttaaattattctgaacaagccaactcaagctgaacagcagaagtctgagcaagtgcacagatacctcaaaagaagtaaaactgcaccaaaggaaattcatgccaatgcaaaagatgatgaggacataattcattgaaccaaccatttgtacaactgtgatgtagctatattgctag

SEQ ID NO: 55934 - DNA, 379 bp, Setaria italica
  Peptide Sequence Number=SeqID_121908
accgcgggctccatctcctcctcatttctcgcttgtcaaatccgcagttccgttactctagtttttcaattgttgcaaaatgcctccttcaaaaaaaaattgttgcaaaatctaagcccaattcgtagtgtttccttatttggtgcgccgcccactgctcgaagtagatttaggtaggtgaaggattgctgttggatagacgtgtgggattaatgaggttcactgttcaagtggcatgtttgcaggcaagacctagtgtttgcgtgtaaattgtaataggggcaaatgccttctctaaagcagagtttgctcagacgtgtaactaaagtgtatttcccctgttattgtggaacagctgacgcgctggtgtcgacgggac

SEQ ID NO: 55935 - DNA, 258 bp, Setaria italica
  Peptide Sequence Number=SeqID_121909
atcagtgttccactccgccttgtttcccaacctggggagtacatacaaagtggaacactgatggtgtttattgccgtaatatatactgggataaagcgtgctgtcgtccagccttcacccgttcccatcaaattgaagctacactgacggccggagagaaaatgtacatcttggtgtcatgcacctcaacttgagcgccaaaagttccaataacatttttctgagagagtttcgtgcttccacagatctctgacggaa

SEQ ID NO: 55936 - DNA, 235 bp, Setaria italica
  Peptide Sequence Number=SeqID_121910
cagcaatgtctgtcatgcttttccatgtatccgttatgacaactgctacaatttgggaataaagcctcagaagagatatcctcctatgcgggatgctcttaattcaactggccgccaaatattctactctttgtgtgagtggggtgagtatgatccagcactgtgggctggaaaagttggcaatagttggcgtacaacaggtgacataacggatacatggaaaagcatgacagac

SEQ ID NO: 55937 - DNA, 138 bp, Setaria italica
  Peptide Sequence Number=SeqID_121911
aactatgctaaactgtatttaaacttgaagctattgtactaatacatgaatacggaaattatttttgttcagggtgttgactacctgaagtatgacaactgctacaatttgggaataaagcctcagaagagatatcct

SEQ ID NO: 55938 - DNA, 261 bp, Setaria italica
  Peptide Sequence Number=SeqID_121912
gtttttccgttttcgtttttgttttccggttttagtttcttttccctttactttagtttctttaacggttcggttcggttccgttcgtttgtcttgttccgtcccgcgcctgagcgcgaggcggtgacggaggagctccggtaagccggggcgccgccggacccaggggggaagacctcgaatcttgtacagttttcgccggcagaccgtcttgttcgttagcttactactacgctacgtgtgttttgtggtatatacagc

SEQ ID NO: 55939 - DNA, 311 bp, Setaria italica
  misc_feature (276)..(276): n is a, c, g, or t
  Peptide Sequence Number=SeqID_121913
taaactaagaacaagaacgaacaaggaaataagtagtcaagaaaggttactaccaaacaatactgaaaagcgcttggaaacaaatgcttcatcaggaaagtacggaaacagctcgaatacttcacaagtggtgggtagtcagcccaaaggcaacgtggataatgagaactggaacagaaataactctcagcaaaactcaagttctggtggttatggtcaaagcaacaactatcagcatcactcacaatctcatggggcacaatcttggcctagtgntactgcaaatactggtacttggaacacaggctact

SEQ ID NO: 55940 - DNA, 364 bp, Setaria italica
  Peptide Sequence Number=SeqID_121914
aaagcccggagggacatcatcagttacatcttcctcttcgcggtgatggcgctggttgggaaagcctggcggcgcaccatatgagttaggaggcagatgtaactgatgatgtccctccgggctttggccctggtgttgctagggatgaggacgatcttcctgaatttaattttgttaactcgtcacacccctgctgctaatgtaaccgcgcatgcctacaagtccccggcagcatgtgccacctccccccctctgctcgcccagcagagcagatgagggagctggttcagaagtatggtaaaagatcatctgttcaagcccaccgctgggatgacgacgatgacgatgacataccagagtggaa

SEQ ID NO: 55941 - DNA, 211 bp, Setaria italica
  Peptide Sequence Number=SeqID_121915
cctggcggcgcaccatatgagttaggaggcagggagggcctagcggccgggtttgtaacctgtggtttccttaggattgactgcctcctaactcatatggtgcgccgccaggctttcccaaccagcgccatcaccgcgaagaggaagatgtaactgatgatgtccctccgggctttggccctggtgttgctagggatgaggacgatcttcc

SEQ ID NO: 55942 - DNA, 390 bp, Setaria italica
  misc_feature (174)..(174): n is a, c, g, or t
  Peptide Sequence Number=SeqID_121916
tggtttcttccggtagtagttggttcgtcctaactattattccttgcagactatcgatgcatatgtttcagatgaaagagtaggattagctgaacctgcagaaggaatagagctgtacctgtgccctcctcacgggaaaactgtggagattctctctcggcacttgccaaaggngcaccaggagggccttgctgttccaggatcatccttcatcggagtcgtcgtgtggcggaggcccaacgttcctagggtgccaacctcccaccacaggcatgatggttccaggaggcagtcaatcctaaggaaccacaggttacaaacccggccgctaggccctccctgcctcctaactcatatggtgccgccgcccgaggccttttccccaaccag

SEQ ID NO: 55943 - DNA, 269 bp, Setaria italica
  Peptide Sequence Number=SeqID_121917
ttcatatgattttgtaccacatttgttaaacatttgtcacttttcatgttttgtactatttatgtgaatgttaattgcctgcaaactgatgactgcatggaaatgtgtaaatgtatttattctttctggactgctgctaacatgtcttgaaaattttaccttttcagtggtgaaaagccattattaaaagattggcgtagttttgttgagatcaaggggagagttaaacttaatgcttttcaagagtttgttgaacagcttcccaaatc

SEQ ID NO: 55944 - DNA, 353 bp, Setaria italica
  Peptide Sequence Number=SeqID_121918
tgtgggaaccaatgttactcgtaagcagagaaatatagctttcctctttgtattttggtggagatgtattgtggttcccacatacttcttcatatactttcgaacaagcggtgagaatgaatacatttgaagatacatgagaaaatacaaatatctgttcaatagcaagaataatctggatactttgtacggcagaacgctacaccacacgacgagcagccaaagatgtctctgtggtgaaaggggatgatcgatattctctcaatacagtccagaggagagtttccgtggataacagacttaacagtaacctctggactgtattgagagaatatcgatcatcccctttcacc

SEQ ID NO: 55945 - DNA, 237 bp, Setaria italica
  Peptide Sequence Number=SeqID_121919
ttggcttgaaccaacttcgagagtatgttgcggtaaacatcgaggtccctgtccacacttcttttgttgacgtttaatgcagcgcaaagcttgtctagtattgttggctccgttgcatttgcaagctcaagcaaacggaacaagccaactgcaaagaaccgactgtagctgaagtttcccttacccttggccctgagacacgaaacaggggataggcaaggcacacgaggggatagg

SEQ ID NO: 55946 - DNA, 234 bp, Setaria italica
  misc_feature (206)..(206): n is a, c, g, or t
  Peptide Sequence Number=SeqID_121920
caaagaaccgactgtagctgaagtttcccttacccttggccctttctgatatatctttcagaatggcctctatttctccatctctatattgatcaggatcttcatttaacgctgttatatatgccttgaagatggaatccctgtcctcgttgctgggataaccatccatgagctgatcatagacagtgacaaaaccagagcaaacncaggatcatactgataggttcttttgat

SEQ ID NO: 55947 - DNA, 352 bp, Setaria italica
  Peptide Sequence Number=SeqID_121921
ttacttagttcttacgttcgtcttggtcggtccgttctaccggtagtagtaggtaacgggtcttccccgttcggacctccaacagcgatgccgacgttctacgttgtccctgaagggatagagaagattgtcacctacatcatgaagagatacaacaatctgcccatgttcatcaccgaaaatggttacgcacaaggcggagatggctatgcccatgtcgaagactggcttgacgaccagggcaggatagagtaccttgatggttacctcacaaaacttgccaaagttatcagggatggagctgatgtccgtggctacttcgtctggtctctcatcgactaatttcgaatgg

SEQ ID NO: 55948 - DNA, 381 bp, Setaria italica
  Peptide Sequence Number=SeqID_121922
taactaaccaaataagggaacttaacggaacgaaataaccaaaccggaagacgaacttacccggtagtactttacctacttacggacaaccgaccaacttacctacgtaaccaagaatcgaaggcgcgtaccttgagggcaacaaaagtttaagcaactgggatgtgttcactcatgcaccaggaagaatcaaagatggaagcgccggggatatcgcggatgatcactaccaccgttacgatgaagatgttgagctcatgaattctctgggctaaacgcctacaggttctcgatatcatgggccagagttcttccagaagggaggttcggcagggtcaacccattaggcatcgagttctacaacaagctcatcgattcact

SEQ ID NO: 55949 - DNA, 313 bp, Setaria italica
  Peptide Sequence Number=SeqID_121923
taagagaagattgtcacctacatcatgaagagatacaacaatctgcccatgttcatcaccgaaaatggttacgcacaaggcggagatggctatgcccatgtcgaagactggcttgacgaccagggcaggatagagtaccttgatggttacctcacaaaacttgccaaagttatcaggtcagttgcatttcaaatttcacaactttgttcaattacatgagcgaactgtgttcccagctaacatggatttgagccaaattgttcctagggatggagctgatgtccggtggctacttcgtctggtctctcatcga

SEQ ID NO: 55950 - DNA, 230 bp, Setaria italica
  Peptide Sequence Number=SeqID_121924
gcacaaagggatagaaccattcgtgcaggagtgaatcgatgagttcgtcgtagaacgcgatgcctgctaggttcactcctgcacaaagggatagaaccattcgtgacgctgacccactacgacatcccgcagagctggaggacaggtacgggtcgtggctcagcgacgagatccagcgagacttcggctacttcgccgacgtgtgcttcgcggcgttcggcgaccgcgtc

SEQ ID NO: 55951 - DNA, 418 bp, Setaria italica
  misc_feature (229)..(229): n is a, c, g, or t
  misc_feature (275)..(275): n is a, c, g, or t
  misc_feature (378)..(378): n is a, c, g, or t
  Peptide Sequence Number=SeqID_121925
gcgaatccaccggagcgaacttcccggtgtctttcctcttcggcaccgccacttcctcgtaccagatcgaaggcgcgtaccttgagggcaacaaaagtttaagcaactgggatgtgttcactcatgcaccagtttcaggaagaatcaaagatggaagcgccggggatatcgcggatgatcactaccaccgttacgatgtgcgccatattacactaagacagcgtactgngaatgttttttcgcgtaaacctcaactgcccaaccttgttctgacnggaagatgttgagctcatgaattctctgggcgtaaacgcctacaggttctcgatatcatgggccagagttcttccagaagggaggttcggcagggtcaacccnttaggcatcgagttctacaacaagctcatcgattcactcc

SEQ ID NO: 55952 - DNA, 402 bp, Setaria italica
  Peptide Sequence Number=SeqID_121926
attatattcagacaaatctccagactgaatagctaaacgtgcatgggtttcataaacctgaaacaagaagtccaaaagttataagggaaacaattatgcaaggttcaaatggtgtcctcaagaaaaatcaaatggaggacatgattcaacattaaaattaattttttcagataaattctaaacaatggagtagataaaataagcaatacaatatatcctatttttaaggaaaatagtaagggagctccatactctacataatatgcatctcattattaaacaccatgacacagtatacagcaaacaagggtcaagggctatggccttgacagtcagctcattctgaattctctgaacagtaaggtcttgacgaatagacttcagttgatcacatttgtaaag

SEQ ID NO: 55953 - DNA, 145 bp, Setaria italica
  Peptide Sequence Number=SeqID_121927
cctccatataacctctttagctgagattggcactgattatattcagacaaatctccagactgaatagctaaacgtgcatgggtttcataaactctacataatatgcatctcattattaaacaccatgacacagtatacagcaaac

SEQ ID NO: 55954 - DNA, 330 bp, Setaria italica
  misc_feature (286)..(286): n is a, c, g, or t
  misc_feature (294)..(294): n is a, c, g, or t
  Peptide Sequence Number=SeqID_121928
tcggttcctcttcaaaatccattattcctccagattcagagagaaagtcgtcatgcccccgtaagtcgatgtctgcctgcttaaattgttcaacttctgccatcaagtaagaaacatggttcggcaacactatttaataaactagttgccattacaacacgcaagaaatataataatagaaatctaaacagagagaggatgggtgaaaggaagaacggaaatgaggataacaatgcgtggcatcatcacaagaagatgcaaatttataccctttttattcaatttntttaacanaaaaagtaataacaaatacttcagtataatccagct

SEQ ID NO: 55955 - DNA, 355 bp, Setaria italica
  Peptide Sequence Number=SeqID_121929
gtcgtcatgccccgtaagtcgatgtctgccttgattgatttttttggcttcttccactctgtcttcaaattctttctggtgcttcttgttcacctcactcattgtgtcagcccactttgatttttctcctgaatttgatgcaacaggctatctgatgttcccagccagtcagacaaggtgctttgaggtacaattcgcagctgggagagatcttacacctgatcagctgaccaacatgatagacaccttgtctgactggctgggaacatcagataaggtgtctatcatgttggtcacctgatcagctgaccaacatgatagacaccttgtctgactggctgggaacacctgatca

SEQ ID NO: 55956 - DNA, 190 bp, Setaria italica
  Peptide Sequence Number=SeqID_121930
attacaaatataatggagggcctggtggacaccattatttagtgtacatgctaaatcattctgctactatgatctgcatctttctgcttgcggctgtccatgttccccagagaaatatacttgccttatacattcaaagcagctttgctcatgtgactggggtaaaagatttttcctattccgttatgat

SEQ ID NO: 55957 - DNA, 255 bp, Setaria italica
  misc_feature (239)..(239): n is a, c, g, or t
  Peptide Sequence Number=SeqID_121931
cgtgaacaatctcggaaaataactatctccccatgataagctattgcttggggctgcaagagaagcaataagagctcagtgggacatcctattttctcaagcggaactctgctgagaacttgaggtggaagagcatatgtggacctgatagcaccatatgcaagtcgctgaaggcacgaattgagatggagttaagacaacaaaagaaaaacaataataatagactactaccaatatanaatataagaaaaataa

SEQ ID NO: 55958 - DNA, 364 bp, Setaria italica
  Peptide Sequence Number=SeqID_121932
agatgaaggtggtttgattatgaaggcccacattgttactttggaacctgtgtctggtcaaggtgagaaggattactggagtgcaattcgaggtggtcaagataaatataaagacagccgaagcaacaggggacgggactggaagaataacagaggtggaaggcactttggtggtgggaagcgggggcgccactttgactcccgtgatagggcctccaataaagctcagaaagtttagctttaggctctatattaataggaaggaaaacatatatgctgatgctgcgatgctttggtctgtaccagtatcgagcttttgccgtgctcatttcatttctcctcattgtcaacatggttcattcat

SEQ ID NO: 55959 - DNA, 249 bp, Setaria italica
  Peptide Sequence Number=SeqID_121933
tattgtattgtctctggctgtaagctttcttgatggtattctactaattgacaaagcaaataggtatttgctaattgtatctaccttttacatgaacaaaaattcagatgtcaccagctgaaggagcaccagaagaatttgaccagacaattttccctgtcaaccataaccgttctattggtccagcagaaggccttgccatcaatttagtgaaggaggcgcagaggaagaggagctatactgacactg

SEQ ID NO: 55960 - DNA, 235 bp, Setaria italica
  Peptide Sequence Number=SeqID_121934
tccaatatatacactcagcttcttcaatttgtccagcctggtcaactctgctacccgacaattgtaattaccagtggaaccaccaatgacaaaccctttgagcacttgaagttcagtaagcaagctaatacccctcggcatgccttccagcaagtaacactctgacacatcaaggtgggtgagcatttgaagagacgtgatgcttgcagtcagcctctcaaggttatgacaagaa

SEQ ID NO: 55961 - DNA, 238 bp, Setaria italica
  Peptide Sequence Number=SeqID_121935
gctgctatttgcatcgcatatatcatgatcatgtcttgtgccatctcctccagcggcgacgacgtagaagaaatgtctcacagccacatgacaggctgggggtcaaaatcaatttcagaaggagaataggtgaaggcaagtatgttaaaactgaagctgcacttcaacagacataagaagtacaactggttatgacccgcattttaccctggtggcattttttatggcactcggtgaa

SEQ ID NO: 55962 - DNA, 240 bp, Setaria italica
  Peptide Sequence Number=SeqID_121936
ataggtgcgctgttgtgatgtcactatgttttcgcacctgtaatgtgctgccttgtttgcataggtacatatctaatcatgtgctgaaatgcctgcaggtggtgagggtgaaggtacatggctgttgccagatgttttggtcaatgtgttgaggggaggcgacgatggtcccggtgtcgtcagggaagtacttggggacggatcttgccgagttgcactcgggtcgtcaggcaacggcga

SEQ ID NO: 55963 - DNA, 260 bp, Setaria italica
  Peptide Sequence Number=SeqID_121937
tgtacctacctaggtagttacccggtaagtattacgtctagtcagtaattttgggaatggatataatgtcccccataataggtggtgagggtgaaggtacatggctgttgccagatgttttggtcaatgtgttgagggaggcgacgatggtcccggtgtcgtcagggaagtacttggggacggatcttgccgagttgcactcgggtcgtcagggcaacggcgacatggtgactgtccttccgaacgagctcgaggtcatc

SEQ ID NO: 55964 - DNA, 245 bp, Setaria italica
  Peptide Sequence Number=SeqID_121938
ccaggaactccaccagctcggccatacgaagcccctacaccaggatcagggtgggcaaacactccaggagttagtttcaatgatgctccaactcctagagagaactatgcaaatgctccgagtccatacgtgccttccactcctggtggtcagccaatgactccaggcaatgtgggatggatataatgtcccccataataggtggtgagggtgaaggtacatggctgttgccagatgttttggtc

SEQ ID NO: 55965 - DNA, 221 bp, Setaria italica
  misc_feature (130)..(130): n is a, c, g, or t
  Peptide Sequence Number=SeqID_121939
atctactctttggcgtacattgtcaacatcaacaaccttagcaaggtcacatttgtctgatgcaaaagtacattgataggtcagatcttcagataaagtctgtcgtggcgttggatcatctaaaaaattntatttatgttgaagcagaaaggaagcccatgtcaaagaggcttgtaaaggtctacgaaatatttatgcttcagcaaaataacattagttcc

SEQ ID NO: 55966 - DNA, 389 bp, Setaria italica
  misc_feature (320)..(320): n is a, c, g, or t
  Peptide Sequence Number=SeqID_121940
ttttttttaagttacaaacatttaagcaggtaacatcagatacttgcagcacatagttctggagttgcaacaggaatcctggaaggtgctggagcagtaaatttagtaaccacgtttcaactcagcattagaagctgtatctaacggagcaagctgtattacagtatgtagtagcagaaacaagtgaccattcacattcagtggtctagtataacaaagctggtaagaaaacaatgacaacgctctgaaatttacatgacactatagtgattatgaccctctgttttgatctagtgcatcgacgaaaaagatcatctatntataggacaagcagcaaaagattacgtgtgagaagcgatcacacagcctggagcttctgctcatccact

SEQ ID NO: 55967 - DNA, 270 bp, Setaria italica
  Peptide Sequence Number=SeqID_121941
ctgtgaccattcggattcactttgcatttcaacatattctatatccccggagaaactaaagaactctgttatctctcttttcacagcatttaacgaaaggttgctaacttttactgttcgcatctccatcgcggggacgggatctcgcggcgacgcggagcgcggcggtgaatccgaggcgggcgcggggcgagcagccgcacgagccggcgtgtggcgtcgctcggggtttgtgggcttgggggtggggggatttgcaccgtgtcggcg

SEQ ID NO: 55968 - DNA, 252 bp, Setaria italica
  misc_feature (223)..(223): n is a, c, g, or t
  misc_feature (247)..(247): n is a, c, g, or t
  Peptide Sequence Number=SeqID_121942
tcttccctactattgtattggtcttttccttcttccttccttctagtcccttcttcttacctttgttcttttcgtccatcgaggtcatgtcacctgccgccttagttaccataccaaatgcgctggttaaccaggaggcaccagctgagacatattggttactcaagatggcagagcctgcaatgctggctttctgctcagcagcagccaaagcagatttagngagttctgagacctggtaccgttnatcca

SEQ ID NO: 55969 - DNA, 519 bp, Setaria italica
  Peptide Sequence Number=SeqID_121943
ctattatggcatggtaagcaatagtttgaatatgcattagttgtacctctcagtgtacaaccattgcaatggtgtacatttattacttattgtttactaaatgcacaggtaagtatttacaaattcacagttaatttggtagcatttgagatctcttaaacatttctgaagaataacccttctctctgtaaaaactcaacttgtaggttcaaggctgacgaatttcgtggggattcttagccaaggactaaggatcgcacctccggaggctcctgttacaggctatatgtttggcaaaggcctctactttgcagatttagtaagcaagagtgcacaatactgttatgtggataggggcaatccagttggtttgatgcttctttctgaggttgctttaggagacatgtatgaactaaagaaagctacgtccatggacaaacctccaagagggaagcactccaccaagggcttgggcaaaactgtgccgctggagtcggagtttgtgaactggagggatga

SEQ ID NO: 55970 - DNA, 339 bp, Setaria italica
  Peptide Sequence Number=SeqID_121944
tcgttaatttttcgtttggggttattctttagccaaggactaaggatcgcacctccggaggctcctgttacaggctatatgtttggcaaggactaaggatcgcacctccggaggctcctgttacaggctatatgtttggcaaaggcctctactttgcagatttagtaagcaagagtgcacaatactgttatgtggataggggcaatccagttggttgatgcttctttctgaggttgctttaggagacatgtatgaactaaagaaagctacgtccatggacaaacctccaagagggaagcactccagcggcacagttttgcccaagcccttggtggagtg

SEQ ID NO: 55971 - DNA, 257 bp, Setaria italica
  Peptide Sequence Number=SeqID_121945
cctactcacaaggactggtcactggaactagaggaagttttttcacttgatcgagatggagaacttaataagtactcaagatacaaaataatctgcataataagatgctattatggcatggtaagcaatagtttgaatatgcattagttgtacctctcagtgtacaaccattgcaatggtgtacatttattacttattgtttactaaatgcacaggttcaaggctgacgaatttcgtggggattcttagccaaggac

SEQ ID NO: 55972 - DNA, 274 bp, Setaria italica
  Peptide Sequence Number=SeqID_121946
aacatttctgaagaataacccttctctctgtaaactcaacttgtaggttcaaggctgacgaagccaactagcttgaagctctgcaggatattgaaattgcttctaagctagttggcttcgacagtgataatgatgaatctcttgatgataagtacatgaagcttcactgcaacattgccccactgcctcatgatagtgaagattacaagctagttgagcgttatctcctcaacacacatgctcctagttccagtgaccagtccttgtgagtagg

SEQ ID NO: 55973 - DNA, 188 bp, Setaria italica
  Peptide Sequence Number=SeqID_121947
catatttatattctggtaggtatgcttcgacttgctttgatataaaaaacatctttttgcagaaattgttgtctcagggggcatgtcaatgcctcaagtgttatcaatcctggaaagcgagccaaatcagttgagcaggatcagatccacccgaagctgagatgactttatatttgtaattctgtgtt

SEQ ID NO: 55974 - DNA, 403 bp, Setaria italica
  Peptide Sequence Number=SeqID_121948
tgtgccggttctgtatgagaagcatgaggataaggttgatgcttttggagagaagaccatggtcgagttgaagaaatactacgccatctttgacgagaaatgcctatcaaagattccgaagggcccgtcaagagacaagaagcagcattagaagagtagaatcagggaagggtctgtgcgctgatttatcatctctgtcaatcactacatgtgggttttgaaggatggttttagttccatgtctccatgtgatggtaaatacctacatgttcctgttctagtgtggtcagtagttgcgatgtgctaaattatacaatggcaacccacatcactgtctcatcaactctcaatccctatctcccctctcacacgcacgcacgcacggactagtgcgactgagtcg

SEQ ID NO: 55975 - DNA, 265 bp, Setaria italica
  misc_feature (222)..(265): n is a, c, g, or t
  Peptide Sequence Number=SeqID_121949
aagaaagaagtaagaatcagggaagggtctgtgcgctgatttatcatctctgtcaatcactacatgtgggttttgaaggatggttttagttccatgtctccatgtgatggtaaatacctacatgttcctgttctagtgtggtcagtagttgcgttgtgctaagaaagaaaacacaaaaacagtttggtccaatcacgtgaatgcatgcagtgtttgttactnnnnnnnnnnnnnnnnnnnnnnnnnnnnnnnnnnnnnnnnnnnn

SEQ ID NO: 55976 - DNA, 200 bp, Setaria italica
  Peptide Sequence Number=SeqID_121950
gaatcagggaagggtctgtgcgctgatttatcatctctgtcaatcactacatgtgggttttgaaggatggttttagttccatgtctccatgtgatggtaaatacctacatgtgggttttgaaggatggttttagttccatgtctccatgtgatggtaaatacctacatgttcctgttctagtgtggtcagtaggtattta

SEQ ID NO: 55977 - DNA, 173 bp, Setaria italica
  Peptide Sequence Number=SeqID_121951
cttgcttaatgcatctaatgtgcatctttctattcatctattatcaggtggttgcaggactgtggatcctttccgttcttgggagctgctgcaatttcctcaccttgtcctatataggtgattgttgtttgttgttaacagtttccttctaatgtgtacatatttcagcaacg

SEQ ID NO: 55978 - DNA, 353 bp, Setaria italica
  Peptide Sequence Number=SeqID_121952
tttcttttagggtttttatttatttttttgtttttgttttttgttttcttttatttttgtttactttctttcgttcttattctattggttgaacgggccagcagtgagaccacttacatagatgcactgaaatcagcttggcggaatggggatacaatgcctttatttttgacacggtgtgggacctgataaaacttggagaccaccttagcgagagggaggatgtcgatccctgtaggattgggattaccggtgaatctcttggaggaatgcatagacaataggtttagctgcttttgtggacacacgatatagtgtcattgttcctataattggtgttcagggattccgat

SEQ ID NO: 55979 - DNA, 191 bp, Setaria italica
  Peptide Sequence Number=SeqID_121953
cgcttccttcaccatgtttactgtcattcgatgcgacaagcaattgtcacctcatcctctaccacacttcatgaagggagggataggacagtccaataccacaaagtaccccctaataatttccctccttctaaatggtgctgaagaccctcgatgcccaattgctggtttagaagagcctagttcaagag

SEQ ID NO: 55980 - DNA, 229 bp, Setaria italica
  Peptide Sequence Number=SeqID_121954
acaaccgcaagtaatccaagcatatgtacacactcatattgaacatttggcttgagagaccattgagaagaaactcaaaaagattatctgatcagctgttcttatccaaagctggtgttgccttacttgatgatgtcgatgctttggtcttgtcgtatcgaaaatcctcaatgtcaggtacaataccagcctgcttcttaggatgctccccattttcttcaagctcttg

SEQ ID NO: 55981 - DNA, 448 bp, Setaria italica
  Peptide Sequence Number=SeqID_121955
atacatcgaagttgaagtaagaagactgacatggttgcaacaacacttgctgaggtcggtgatgcaagccctgcagctggtgatgacactgcagtttcgcttgtctccagtatcaaggcattgaggaatgagcgggaattcttgcaagaaggatggggtcaaggctaacagatgaagagcgggagcgcctcttcattaaatggcaggtccccctcgacgctaagcagagaaagctgcagcttgtgaacaagctctggactgacccgaacgatcaggtgcacatcgaggagagcgcggatctggtggcccggctggttggattctgtgagggtggcaacatcagcaaagagatgtttgagctcaactttgcagtccccacaagttaggtaagtccgttggtcttggttgggtcttggtctaacttacttctacttactttgttagttct

SEQ ID NO: 55982 - DNA, 478 bp, Setaria italica
  Peptide Sequence Number=SeqID_121956
tactattcttcctaaccgtacttgtcttcttaggtaactactatttcttctatttgtccgtaattcctaaaattcttgagttgctcgagtagccagactctgtctttattgttgctccattgtgtccattaaactgcccaacggttgaattatgtgctgctagcaggcttgatgaagcatccatgccactaggaaggccatgaacaactttactgggatacataaattggtcacttgaagaggcaccatttactataccattagaacctccattatgcaacaagctatcttgcattgcagcactggggatagtgtctggcagaaaggacacattttggttcaatgtgctagagtttgagccattaggagcagtaggaggcatagaaggtactccagaaggatgatctttactcataatctgatactgctgctcaaggagcttattgaaggccactatttgattcataagcattagcct

SEQ ID NO: 55983 - DNA, 297 bp, Setaria italica
  misc_feature (175)..(175): n is a, c, g, or t
  Peptide Sequence Number=SeqID_121957
ttcttacctttaattttgtttggtttccttattttcttaactttcttagttagtctgctaaaggatcctcctgatacatctccaaccgactgctctaggaacacattctcattgccgaatccaaaatctgagttgctcgagtagccagactctgtctttattgttgctccattgngtccattaaactgcccaacggttgaattatgtgctgctagcaggcttgatgaagcatccatgccactaggaaggccatgaacaacttactgggatacataaattggtcacttcgaagaggca

SEQ ID NO: 55984 - DNA, 210 bp, Setaria italica
  Peptide Sequence Number=SeqID_121958
cctatcccctgtgtgccttgcctatcccctttgcgtgtctcaggggaaaacatgcccttcaagacttggtttagcttctgctgttatcccaaatactgtatcacttgtaccaaggctaatggcaagatcaccaggagtattcagagttaaacctgcaaggctattaggattgtctccagaccactgaatcaccaaacagttcttatcaaa

SEQ ID NO: 55985 - DNA, 283 bp, Setaria italica
  Peptide Sequence Number=SeqID_121959
tggactctgacgccaaatccaaggtaaaccttcgccatgctgtgttgtttggattccttgtacagttttgatttatcatcaagtgctcgaatttcttttgtgttctctactagttaggattatcaagaggttttcgatttttattgaaatagactgtttatacgtgtttatttgcagtccgagaaagagaaacggagtgagatgacctcgccggagcccaagttgctcggtagccccatgccgatacgggctgttccggcggtcggccccccccgccgccacc

SEQ ID NO: 55986 - DNA, 249 bp, Setaria italica
  Peptide Sequence Number=SeqID_121960
cctccgcgacgtggttagctgatgcggtgtgcgtgcgcggtgcagtgatcgaggagttgaaggacgaggccgcgaagagaggcgaggatttggagttggagatgaaggcggacgacggcgacaagaagaaatggatgagcaccgcgcagctctgggtggactctgacgccaaatccaagtccgagaaagagaaacggagtgagatgacctcgccggagcccaagttgctcggtagccccatgccgatac

SEQ ID NO: 55987 - DNA, 345 bp, Setaria italica
  Peptide Sequence Number=SeqID_121961
tagggattgtacttcagccgaggcacgcttgtcctatttgttagggtctccctgatgaatttgactgggccaatctcaaaggcgaggccactgaagacggtacagtggtcgccgccggtgagccagaggaggagcgggtcacggcggggatcatcctccgactcgatgaagtagtagaacagctccgccccattcttctcgtccacgttcacgtacctagttaattcacacaagccacatctgttatagattgtagtagaagaaatgatgatatacctgagagtagccgcataggccatggaagagcggagcaggagggaaggattattgatgcgctcacggacc

SEQ ID NO: 55988 - DNA, 284 bp, Setaria italica
  Peptide Sequence Number=SeqID_121962
gtacgatgggaaggtgacgtagcgagggcagtagcttctgctgttcgttgccttgtcggtctcgaacgtgcaatcacgaggctgataatccttgtggaagcagagcctaagttcttgaactgagccattcttacaaacaagtgatggcattgccccaaatgcgtactcaatcacagcaacaatatgtccaacagcgtatcttctgctgcttgcaggatgaatatgactacttctccacagcactttatctctacagcaaattactaattgttacgtaaagtcct

SEQ ID NO: 55989 - DNA, 254 bp, Setaria italica
  Peptide Sequence Number=SeqID_121963
cccggatcttgtccgggtcgactgcggcggcgcgccgctgagccccgcggcggcgtcggcgttccacgaaaggttccccgacgtcgagctgtcattggcattgggctcaaccgagggtggtctgatatcaaacatggctggtcatcaagaatgtcatcgtataaaatcaactggtcgactatgtagcggtgttgaagccaaagttgttgacatcgatagtggcgaactcctaccaatcaatgagcaaggagtag

SEQ ID NO: 55990 - DNA, 497 bp, Setaria italica
  misc_feature (28)..(28): n is a, c, g, or t
  Peptide Sequence Number=SeqID_121964
atgtgctcactgaacgtttgcaactgtntctgctgatggagagattcctaatcttcgcgctggagatcaaaatgaaattttgcagcccgagatcttgaaacagcaacaatggagatagacaaatgaaaatggagcagataaaaaataagtgaaccaaatgggcaaaacacaaaagatggctacaatgttggagagctcgagcaatggtgcctttgtacactgggttatctcaagtcattttcccgccaatatgcaactgagatttggtctcacatagcaatgttggacgaggaggtcttcattggggacattcaccctcttatccggaaagctgctttctctggtttgtgcagatttaccaacgaagggtctcagctttgatttttgacccctccttccaaaaatggagtgtagttaaccttgtattgtactactattctagtactaagtttttaaccgtttgtttttaaactttaaatttacttaagtttacctta

SEQ ID NO: 55991 - DNA, 427 bp, Setaria italica
  Peptide Sequence Number=SeqID_121965
gtttgatgtgctcactgaacgtttgccaactgtctctgctgatggagagattcctaatcttcgcgctggagatcaaaatgaaattttgcagcccgagatcttgaaacagcaacaatggagatagacaatgaaaatggagcagataaaaatagtgaaccaaatgggcaaaaacacaaaagatggctacaatgttggagagctcgagcaatggtgcctttgtacactgggttatctcaagtcattttcccgccaatatgcaactgagatttggtctcacatagcaatgttggacgaggaggtcttcattggggacattcaccctcttatccggaaagctgctttctctgctatggttttgaatctgctggtgtgggaatggttcttcctgattggtggttccatcggacggtcgagcacacgttctaat

SEQ ID NO: 55992 - DNA, 295 bp, Setaria italica
  Peptide Sequence Number=SeqID_121966
aaaatattaaaaggacaggaaaaacatgaagctgatctgaagtatcctcaaaggcttcgtagactccatatctttccgacaaataaagctgagaacatgcagcctgtagatcgttttgttgttgaagaatgcatattggatgtgctactttcttcaatggctgtcggaaagaatgtgcgttttatctggtcagcctacctgtgtcttttcgatatggtttcagccatcaggtactcatatcgaaaagacacaggtaggctgaccagataaacgcacattctactagtgcgactga

SEQ ID NO: 55993 - DNA, 181 bp, Setaria italica
  Peptide Sequence Number=SeqID_121967
agcccgagatctttgtaaacagcaacaatggagatagacaatgaaaatggagcagataaaataggtcagtttcatattaagcctgcaccactgttatcagcttaactgcttgtctgctttaactgcctcggtactgtacatgttgcctatgttgctttgctatcttgctcatagacgcagt

SEQ ID NO: 55994 - DNA, 326 bp, Setaria italica
  Peptide Sequence Number=SeqID_121968
tatattgaacttattattacttgattcacctcttgctacgttgtcttggacctgcagctactaactaatgtcatggaatggacaccttgaaaaagcaccggaccttgaggctctcaagacttgctctctttcaagatgttgcctcttgaaaatgagcctggccactgaattttcttgattagtcttgcaaggagttaagtgaggggaattaacgataattagaagagttatgggagttgtgcctctgggtttcttgggccagttaattaaacgacgagcttctttgcggtggaagcaagcgggaagagcatcttaccgctgcagct

SEQ ID NO: 55995 - DNA, 404 bp, Setaria italica
  Peptide Sequence Number=SeqID_121969
agaattagggtacaaaagttagaatacaacaaaacaaaggtttttgttggccttgcactggttggagatctcctcgagctgccgccttttcgaccagcactgcgatcctcctttgtccactcaactctgattctccttcctttcctgccaaaatcaactccatcaagtctattgatagcatcttcagcatcacgttcatcttccatgtagacaaatgcaaaccctccacttctctccagccggccatgagattggcatggttggattggcgaggaaatggtgatcagggcggggggaggagggtgcaatgttgatcgtaaatgtaagacatcggtcacgaggtggtcgtttccaagtgaacagatgccatggtggactgtgaactcctggagatggacaagaca

SEQ ID NO: 55996 - DNA, 397 bp, Setaria italica
  Peptide Sequence Number=SeqID_121970
aaaggttttaccgtacggacaagaaaggttagaatacaaggctagtaaaggaggctgtgtcaagagtgttgtccatggtagactctactgaagcaaggatgcagtatcgtcgaatgcttgaagaatttcgccatgcaacagctgaattgggtggatcacatgaagtaacatcaatatttgacagtgacttagagttattagggatcaacaacttcatgctctgaaatgcacaagatgtaagaagcctttcagtttcgaaagctagggtgtgaagtatttaggagatgcgttcaacttgctactgactaggacctcatggtggtcagtttgtacagtgtttgcctggctgttgtagactgctgcttctatgtatttttactccctaaattatttggaa

SEQ ID NO: 55997 - DNA, 206 bp, Setaria italica
  Peptide Sequence Number=SeqID_121971
atggtctacgtggcttccgagctgagcagcaaccaatggttggagcagtagaggatgatgacgaggaagacgatgacttttatgatgatgaagcggtcaaggttttccgtcggcagaaggttgatcaggctgtaaaggaggctgttgttctaagtagttgtttgttcctattggttagttacttcttacttgtcttattcctttgt

SEQ ID NO: 55998 - DNA, 219 bp, Setaria italica
  Peptide Sequence Number=SeqID_121972
tactagtacaactaaggactaaatagaagtagggacaactagtacttacaagttactcagtgctggggttggtttaaactttcgtgattcgaatggatggactgcacttcattgggctgcttattttggaagggaaaagatggttgctgcacttctcgctgctggtgcatctgcgacggcagtcaccgatcccagtgcgcaagacccagttggcaaaac

SEQ ID NO: 55999 - DNA, 158 bp, Setaria italica
  Peptide Sequence Number=SeqID_121973
atcttgtgcatttcagagcatgaagttgttgatccctaataactctaagtaacatcaatatttgacagtgaccttagagttattagggatcaacaacttcatgctctgaaatgcacaagatgtaagaagttgttgatccctaataactctaagtcact

SEQ ID NO: 56000 - DNA, 424 bp, Setaria italica
  misc_feature (153)..(153): n is a, c, g, or t
  Peptide Sequence Number=SeqID_121974
caaaactcatcctgtctgggttaatagtctttctgaagttctcaaaacgtcgatggccttgtacagcttttgccatatttccgtcataagtataaataaagacatcactctggagagccacaatgtagtcaagaccagcaagcatattctganggtttttgaagggtgcaagtccttttctgttgccagtgtagaatgagaataaatattgggaaaatcattccaacagagccttcatgcttccattgccaaaagcttcaccagcaactaagtaaattctggtgcttcgtgtgaaacccaatcctttgagtaaaagtgaagtttcccttggagtcaaaggacagccaccaagacttcttcgctcaagtaagacaattagaatttactttactactttaccaagtagaactttaaccttactaaa

SEQ ID NO: 56001 - DNA, 243 bp, Setaria italica
  Peptide Sequence Number=SeqID_121975
ttgggaaaatcatccaacagagccttcatgcttccattgccaaaagcttcaccagcaactaagtaaattctggtgcttcgtgtgaaacccaatcctttgagtaaaagtgaagtttcccttggagtcaaaggacagccaccaagacttcttcgctcagtagcattgattcctttctctctctctctcctcccccccgcatccattcccaattcccccacccctcctcgccgccgccgccccacc

SEQ ID NO: 56002 - DNA, 258 bp, Setaria italica
  Peptide Sequence Number=SeqID_121976
atggagagcaagataagggcctccatcttgacgcatccttgaaaccaaggtagtaccaagatcttcaattgtatgagaatatttcaaagatctgtagttaactcggcatcttaatttttgaatataactcggaatgccattgttagccaggcgagaatctgtatgtgtgaagtaaatgactttgtgtttcttcaaaagagggaggatttttgtgaacctggtagatgaatttgatgaaggaagagtgccctgggatta

SEQ ID NO: 56003 - DNA, 230 bp, Setaria italica
  Peptide Sequence Number=SeqID_121977
gcatttgtgaagatcgcacaagcagtttcgtcacggccggatgttattccgcctgcataccttgatgagctctcactgcttcaggaccgcatagcaccattttcaaccgatgctgcttttaacattatagaaaaagagcttgggctgccactggatatgattttctctgagatatcaccagagccagttgctgctgcatctcttgggcaggtttaccaggctaggcttcg

SEQ ID NO: 56004 - DNA, 145 bp, Setaria italica
  Peptide Sequence Number=SeqID_121978
cttttttctataatgttaaagcagcatcggttgaaaatggtgctatgcggtcctgcataccttgatgagctctcactgcttcaggaaccgcatagcaccattttcaaccgatgctcttttttctataatgttaaaagcagcattc

SEQ ID NO: 56005 - DNA, 371 bp, Setaria italica
  misc_feature (160)..(160): n is a, c, g, or t
  Peptide Sequence Number=SeqID_121979
ttgtttcctttcttagttccttgtctaactttcttgtctagtattgtcctatacaggtgtgagtctttgcgcttgataatctctgagacaatcttcaactgccttcttattccaacctcatcaagcctgaagttgtgccttgctttcctcatgaaacccncgaagcaccaaaatgcttcttcaatcctcctccatcactgcaatgataggtgataagagatcactcataccttggcagtagccaatctctggatcatagactgcgtatgcttcaagcagtccgactaatcgagcagcatgataaatcatactgggctctaagtgatcataatctttcaatccaacagatgctgcagactgcattgctcgct

SEQ ID NO: 56006 - DNA, 245 bp, Setaria italica
  Peptide Sequence Number=SeqID_121980
ccttacgaacaaccttcagaataaggtgactctggtccttcagccccatcagaaaagtcctcattcatgaactcatttataacattaagcccatttcctttgtaacaattcagaatgcgatggcactgtcgtctcagcttttcatattctttcctgcaccagaagttgcagcaatccatatcagtaaataaagtatcattgtgaacaccacaggtattctagtgatgttatcttcagataacagt

SEQ ID NO: 56007 - DNA, 247 bp, Setaria italica
  Peptide Sequence Number=SeqID_121981
tgcagttacactaagggaataatagcaagaagaattcaacataattcatgcccattgagatcagaaatctgaaggaagcataatggtaggctttaaagaataaagatcatatgagaacttacattgtaatctcctttatagtcctggatagtctgatcttttacttcaataacccggttaacaatttgttttacgaagtaacgatcatgagaaactgttatcacagtacctgtatactctgatattg

SEQ ID NO: 56008 - DNA, 201 bp, Setaria italica
  Peptide Sequence Number=SeqID_121982
aagaagccagaaagaagcagaaggtgcaggcctttactttgggggctttctcctcgagctcttcctcacgggcaagttccctttctctggcttcaaggttcctttcaaggtaataattgtaatctcctttatagtcctggatagtctgatcttttacttcaataacccggttaacaatttgttttacgaagtaacgatcat

SEQ ID NO: 56009 - DNA, 408 bp, Setaria italica
  Peptide Sequence Number=SeqID_121983
caaacgcatctactgaaccaaattccaatgatgaagatatgggttctaagcaagacatgcaggatttgctattgagtgttggcattgtgtctcctgtgacgaaagaaactgctggtgctttgtatcatcagcagttgtcactacagctagcagacttcgtaagaataccgctggagaaagcaggtggtatgatggcactagtcgatgtatattgtctcttcaaccgtgctaggggaacagagttaatctcaccagaggatcttttgcaagcatgttcgctctgggagaaagttgatgtatgttgatttgtaatgagcagcccagtcatgctcaggaaatttgatagtggggtgaaggtgatccagaccaagacacatagtgatgaagaggtatttgcaagaatctcaa

SEQ ID NO: 56010 - DNA, 148 bp, Setaria italica
  Peptide Sequence Number=SeqID_121984
gtttacttaatgttgcaaatagttggataaagctagcatcgtatcatatagaagatgcccaaagaattgccctgtttggagggaactaatctgtcttgcaaatagttggataaagctagcatgtatcatatagaagatgcccaaaaga

SEQ ID NO: 56011 - DNA, 499 bp, Setaria italica
  misc_feature (40)..(40): n is a, c, g, or t
  misc_feature (208)..(208): n is a, c, g, or t
  Peptide Sequence Number=SeqID_121985
caatgacagccaggcaagcctagaatacaaagccgattcngaaaattgagcgcaaccgtacactcacaaaactaagaggagaaccagcaagctagcatttattttgtaatcgttcaccggcgggtaccaattcatttcagttttacacacttgccgtcttgaggctattgcccttctcctgcaggctcacaagtaggctgtcaaagcnctttttgaacgagtctacgccttccagctcaagctgcttcccgacctcatcccagtcgatgccaagcttctccagggcactgtacacaccttccgcctcagacacattcgcatcaactgtcctagaaacagtgccatggtcaatgaatgcctgcagcgcttggtcgggcattgtgttgaccgtgtcgggtccaatcagactgtccacataaagggtgtcaaggaataaagacaagggttacttagaacgaccaagtaggaatagacccaacaaacaaacctactgtttcta

SEQ ID NO: 56012 - DNA, 215 bp, Setaria italica
  Peptide Sequence Number=SeqID_121986
acctgaaagcagaagggaataactcatgtttagcatcactctaaggccacactttgcatgatgatagaaagagaacctatctacgattcaaacaaattcgatctaggatgctcatcgtgcaaacacaccgtgtcgggtccaatcagactgtccacataaagggtgtcaggataagcagggttcttgacgccagtggatgcccacaacaacctctg

SEQ ID NO: 56013 - DNA, 232 bp, Setaria italica
  Peptide Sequence Number=SeqID_121987
tgagatgaccaccactgccaagtgtcgaccatccttgtaactgagtagctttctgcaacaccacaggaggctgctatgggaacagcagacgaggagacccgctggttgttcatctccaacctcctcctcaggttgtagcgtcggagtacgcaggtgatggatcagttgatatcaacaaacaacctgctctcaagcgcagcacagggaaatggagggcatgctatctcattcg

SEQ ID NO: 56014 - DNA, 226 bp, Setaria italica
  Peptide Sequence Number=SeqID_121988
ctgcaatctcgacgaatttagtgacctatctcaccactgtgctgggaaattttgactggaagccgtcctttctctgcagtctggatagagtagctttctgcaacaccacaggaggctgctatgggaacagcagacgaggagaccccgctggttgttcatctccaacctcctcctcaggttgtagcgtcggagtacgcaggtgatggatcagttgatatcaacaaac

SEQ ID NO: 56015 - DNA, 245 bp, Setaria italica
  Peptide Sequence Number=SeqID_121989
aaactgccatgagtggcaccttttgtgtttcagcattccttattagctttggtaggcgctctccatggcaaacttcaacacggaacccccttgatctgttctctatacaggaagatgctggcggtggtttagtattttggcatccaaaaggtgctatcatcagacatattttagaagactcatggaaacatattcatttgcaacatggttatgatctactatacactcctcatgttgcaaaggcc

SEQ ID NO: 56016 - DNA, 303 bp, Setaria italica
  Peptide Sequence Number=SeqID_121990
catagttgtcaccacaggtcacagcatctctcttacagaaatccaacatactactctgaactctgtacattttgactgcaagggatgcttagttaacacgtccaggtcgtgatcactgccacgagtaccattgcttggtccgcctccacccgatgattgtgatgctaattttcgtgcatcttttttacagttaggtcatcctcgggttcaaaggattctacatttcaaagacctacagatatgtttgaactttgaataaaaagtgtgcaagacacggtggagcaatgatgctcatcgtgctac

SEQ ID NO: 56017 - DNA, 187 bp, Setaria italica
  Peptide Sequence Number=SeqID_121991
gaagagatgttttttagatcagatagaagtttgccttagtatcatttatgaaatcatgacatcttggtttcatattttcagttgcaatactgtaatgaggtggcctcagaactcaaatcaagagggttccgtgttgaagtttgccatggagagcgacctaaccaaaagactaaataaaggaaataga

SEQ ID NO: 56018 - DNA, 233 bp, Setaria italica
  Peptide Sequence Number=SeqID_121992
gtatacaagagaaaactgcattcatacagggattttcctatcagagtggcagagcttggaactgtttacagatatgaactatctggtagtctgcacgggctattccgtgtaagagggtttacgctagttttttttggccaatcactagataacatgaacaatggatgatgcccatattattttgtctggaggatcagatacaagatgaaatcagaggttgttcttgatctaac

SEQ ID NO: 56019 - DNA, 117 bp, Setaria italica
  Peptide Sequence Number=SeqID_121993
agttgtcaccacaggtcacagcatctctcttacagaaatccaacatactactctgaactctgtacgagagatgctgtgacctgtggtgacaactatgcacaaaaattgttggatctg

SEQ ID NO: 56020 - DNA, 391 bp, Setaria italica
  Peptide Sequence Number=SeqID_121994
tacttctagttgttgtagttagttaacccgtattgtctagtctagtattccttggttcttgttggagattgtggggtagcatgctggttcaacttgcaagggttccaagcatatgctgctaccgtgcacgtgtgaagagtaggaagagtagtttagcagtagggtggggtggtagcattcgattgtttccgctgttgttgccatggttggtttagttctgcccggtgacagtagttggttaaccatctcaggtcaaatttggtactaggttagatgtggctgtgggttatttgtggattggcacttctccagaagtgatgtatcgaagggcttaaccaatgtaattaccggcagcattgagataaccctattgaaaattgggccattgggc

SEQ ID NO: 56021 - DNA, 377 bp, Setaria italica
  misc_feature (4)..(4): n is a, c, g, or t
  Peptide Sequence Number=SeqID_121995
atgntaaaaaaccagtttgtttacacttgttgaccacttgacctgtatggtataacaactattctataccttttgaagtacatcagtctgagttctactgcatcctatacccattatattatgtcttcaaataacagaagttaatgttgaattacaggtttcactcttcctggtggtagcaattatcttgactggagctggttttggctattggatggtcaggaaatttatcctttcaaaggatggaagtgtggatgctgggatagcacaatttgtgaagtgggccatgcgtgttgttgctacattctttgttatgcagagcacacttgatcctcgtctagcaatggttgctcttgcttcttgctggtcggtttgcg

SEQ ID NO: 56022 - DNA, 390 bp, Setaria italica
  Peptide Sequence Number=SeqID_121996
ctttcttaatgagatgacactcagttctcctacgttgttcaaaatgtacaaaggtgaagacatttgttgccctaccagcaaccttgcttcattggaagatatggtgatgaagtatttgccggtatgcaggtatcagcagacctataaaacctaccaagtggtgggaaattggatacaaaaccttgttctcgggacctgaatctccaagatgaacctaggaaagaatttcccctactcccaaccttgttcccgggatccaacaactgagggagtgctcttctgctacaaacattacggctgttggggagaaaatggtagccaagcaagtggccaacaagtggaatgacaactgggcatgggaatcagagaactccagccctcccgcttgag

SEQ ID NO: 56023 - DNA, 378 bp, Setaria italica
  Peptide Sequence Number=SeqID_121997
cgatcacagaagccaaatgaagctgggaagcagaaacgtcagggctatggccatcggccaaccgcacgcgctcgggtgagcgggaagacaccgacatgaacgcctccggtgagctcgttcttctataaataccgtagctcgccttccgttctctgcatccagaacacagagttgatcgataaggcgccatggcttccacgaacaccatgtcctccttcgtgctcgtcctggcgttgctgctctcatgcggtggcatgagcaacgcggcgcggcggatgcaggagctcccgaagcctgacctgccgcctcttcccaagcctgaagaaccgaagcctgagcccttgccggtgccgccgcagcccctgcccgaaccctgag

SEQ ID NO: 56024 - DNA, 240 bp, Setaria italica
  Peptide Sequence Number=SeqID_121998
tccagtggaaaggatttgagaaaccagggcacgccaagctgttaacaagacccctgtacttcccatggtcaccaagataaaaggagttggtggaatatgcccagatgtcactgctcggatggcaagtcccaactagcagaagagagagaataaggccatgtttgtttcagattataatccatctagattatataatccatctagacactttagtcagcatcagatattaactatcattaa

SEQ ID NO: 56025 - DNA, 430 bp, Setaria italica
  Peptide Sequence Number=SeqID_121999
aacgagtcgcgtctccaagacaaagattatgtactgatgattcaattgtggtgatggcatgaagcagattaacaatcagtctgaatctgattcctattactaaacagtgcatcacttgattcttacattaacggagcacatttgacttttgcggaagacgattcccagcctgtttttgattttttgctccttcatttgccatattttctggggcttttgacttctaaccgaatgtttgctaggttctcccaccaaagaggtcctcttctgtatcttctcaaaatatgtcacggtatgaaatactgagtaatcttcagaaagaacagaagtccttccatatagaaactgtacctccattgaaacttgcaccaccagctatatatcatgagaagatacagaagaggacctctttgctaggttctcccaccaa

SEQ ID NO: 56026 - DNA, 181 bp, Setaria italica
  Peptide Sequence Number=SeqID_122000
ctcgagcaacatcacgagtactctctggctataatgacatgattatggctcgagtttttgctcaccaggatattctggacttggctaaatatgcatctgtacctgtaataaatggcctctccaacatagacaacctttgtgttttcaatacgaccaatgtgactaaaacaaaaaataaaaa

SEQ ID NO: 56027 - DNA, 166 bp, Setaria italica
  Peptide Sequence Number=SeqID_122001
attttgaagtttcctgaactcctccatagtggcagcgaaatctttggcaagcttgagacaggcaatctttcatcttacaaagcgattctgtggagttcagtattgaagactagatctctgaaaatggttcttgtctatattttttgcacacaacgtgacggttaga

SEQ ID NO: 56028 - DNA, 263 bp, Setaria italica
  Peptide Sequence Number=SeqID_122002
ataggacttacgggttgttaattgagcatgaattacggaatgattacgtctgttatgtattacgaaatgtattacgtctgttatgtcagcccatattgaaattcagggtattgaaatccatagcaataatacctacggtacatgacaaaattctcttggttgcttgtgttgttctaggatgatacccaagagttgcatatctgatttctgttggatggtgatagaaatgatgtgtggtttgttcatacttaaaaaaaaaaaaa

SEQ ID NO: 56029 - DNA, 166 bp, Setaria italica
  Peptide Sequence Number=SeqID_122003
aaataaacgaactaaccttaagtagaattagtaaagtagaaaagcaaagattggcttgggataatagattgattatggtgcaaagcacaggtacagattatataggcaaggatgtcctagggtttatagtaacacccaatcaacggagatccttgcctaatctaat

SEQ ID NO: 56030 - DNA, 378 bp, Setaria italica
  Peptide Sequence Number=SeqID_122004
ctttcttttattcctaaaaaagttgaccaatttactttcaaaagtagacttgggttcatttgctgaagcaggaaaccctgtgatggcactagctgcattttttgcttctgttgtggaacgtgaggatgctgttacttcatgttgtaattcactgagagatatttcagatatagctctcagtgaattacaacatgaagtaacagctatatctgaaatatctcctgctctccaactggcaactgggcactgttttatacttccggatccaccgagtaacctcgaagatcctacttcaatttcagcccttgcacaggtggtgagtgccaaggaggcgttggtggtactcaaaatgtgaatgctactgataaagatagcagt

SEQ ID NO: 56031 - DNA, 211 bp, Setaria italica
  Peptide Sequence Number=SeqID_122005
agctagggtaggctcagcaagcaaactagtgaagatgcgataaccacagctgagtcttccgttgagtatcattgcaactcctgctcagttgattgttctagaaagcgctatcattgtaggactcaggtagactttgatctgtgttctgattgctacaatgtaggaaagtttgatgaaggcatgtcaaatgctgatttcatccttatggaat

SEQ ID NO: 56032 - DNA, 235 bp, Setaria italica
  Peptide Sequence Number=SeqID_122006
gctgcacgctttgcagaacagctcatttgcctgaacatccaatgaacgtaccttactgataatgttgggttggcggctcaagccaacccatacatatgtcttcccatcaaagtaccgcacagttttcattccagcccaaataccaaaccaattgcagatcaatatgtctaggacaatgctatcccaccagcattcattgaaatttggcaacatatgacgaaaagtgagctccatc

SEQ ID NO: 56033 - DNA, 320 bp, Setaria italica
  Peptide Sequence Number=SeqID_122007
ccggatataaaactggtccggcataatggtgtgaccgtaaccaatagcggatgccgtaaccaatggcgtagctgataccaaggtacaacgtccagaccccctgaacaagcagctcaaatggaggacctacgtttccaccttctctatcatcgacagcaactactgcactggtattgatcatgatgatatgaacaagggatgcccatattacaaccaggagcgagtgacttcctggatggcactctgcaatcaaccggacctccgggcggccatcttattgtcttgttggtttaacttagtttacccggttagttacctta

SEQ ID NO: 56034 - DNA, 232 bp, Setaria italica
  Peptide Sequence Number=SeqID_122008
tcaaaggcaccaataattagtaccttgatgtcatttgtgcgagcggcgggaatgacatagctgataccaaggtaaaagatccagacaccctgaacaagcagctcaaatggaggacctacgtttccaccttctcgatcatcgacagcaactactgcactggtattgatcatgatgatctgaacaagggatgcccatattagaatcatgaccgattgtccttttgggccgcagt

SEQ ID NO: 56035 - DNA, 241 bp, Setaria italica
  Peptide Sequence Number=SeqID_122009
gtcgcgccttttcatatgcataatatttcaataccattttggcacacatgagagcaaaaggtgtggcttcaagggtagtaataattagggctttaataattttatcgtataatccggcagtgagcagaaagcatagctgataccaaggtaaaaggtccagacactctgaacaagcagctcaaatggaggacctacgtttccatcttctctatcatcgacagcaactctgcactggtattga

SEQ ID NO: 56036 - DNA, 521 bp, Setaria italica
  misc_feature (106)..(106): n is a, c, g, or t
  misc_feature (146)..(146): n is a, c, g, or t
  misc_feature (273)..(273): n is a, c, g, or t
  Peptide Sequence Number=SeqID_122010
aggataatgtacgtgttgctacccaggctccacgaggttaaatacattttatttttcagtaaagatgtgcccactaaggtgtaagttagtgctctatatttacacngaaatcacgtccatctgatgtgagttggtccctcttttgngtttttcttcgaaactggctacagataccacaagttaaagcaagcgaagctgaagagtctggaagaagataatgtggagaagaaaggaggcagcactgcgttctgcaacgggaaaaaggactgaganatttttgtgcctgaatattggatatacggagattgttactattattaccagccctgatcggaggggagatccacaaataaataatctcaatttactgcagagggtcttgattgatcgacgcacaaatgtacacttgtgtaatctgtctagtgctttgtatattgcaataaacctatgttgtctaattatgtaagaaatattattgttctaactttattcctaaacttaacgtttcgtagtctaaaaaa

SEQ ID NO: 56037 - DNA, 478 bp, Setaria italica
  Peptide Sequence Number=SeqID_122011
tttctaaagttcagcatgatattggtagattcttgctcattggactatctgatcgacagcatatttcctatgtttaggaagcacattgagccagacctgcatcatgcacaaattaggattgacaacagctttgtctgctcattccgagaaccttactacaagctaaagtgcaaaaatgagtcaccagatggcacaaagttctattcttttgatcaaaataaagcagaaactgagaactttattgagatgtaccttaggccaccttttgcttctgaagaaatgaagattgatgattggattaaagtaagacaatgtggaataagatactacctatctcttggagaccagaggattgttgacaaatactttataatccgtccaaaaagctgagtttgaggttggacgaacaactcttggaggattgttggccttgggatacagtgttgttgttagctttaaacgtacaagcacgtctgtt

SEQ ID NO: 56038 - DNA, 260 bp, Setaria italica
  Peptide Sequence Number=SeqID_122012
gcccttgtcgctgcccagtggcgcctccgacaccagcacgcagtcgtcctgcccgtccgggagcaggtgcagccgcagccgcaccgtgtccctgctgctcgccgccggcgccgacgacgacgactcccgccacgcctcgagccggccccacggctgccaactgtccgacgaccccgtggtgccggcgcgcacgatgagccacgcgcccgggttggaccgcgccaccgtgtcgccgcccggcgccggcacgaacggagtgg

SEQ ID NO: 56039 - DNA, 156 bp, Setaria italica
  Peptide Sequence Number=SeqID_122013
cggctgcacctgctcccggacgggcaggacgactgcgtgctggtgtcggaggcgccgacgacgacgactcccgccacgcctcgagccggccccacggctgccaactgtccgacgaccccgtggtgccggcgcgcacgatgagccacgcgccgggtt

SEQ ID NO: 56040 - DNA, 251 bp, Setaria italica
  Peptide Sequence Number=SeqID_122014
cgcaccgggcttgataagcattgtataaccaatgggattccaccgcactgaacaatgactgaagcatttgcaggatcaacacatgagttacatattccaccaatgccaaactcgacaagcctttcatttggctctgtaatgcagtccaagaacaactcaagaacattcagctgagaaaataaaaacagagttattaaacggtaaagctaactgaagatttgtcattaaagaaaatttgctgcaagttgttt

SEQ ID NO: 56041 - DNA, 433 bp, Setaria italica
  Peptide Sequence Number=SeqID_122015
ctgaagcgcggaatcccaaacttcatggctattgttaaggaagctggtgtacatggccttgtggtccctgatgttcctctggaagagacagatgttttgaggagtgaggctgccaagaacaacctagagctggtctactgacaacaccaaccacaccaaatgaaagaatggagaaaattgcagaggtttcagaaggatttatttatcttgtaagcactgttggagttactggtacacgtgcgaatgtaagcagcaaggtggaatctcttcttcaggatatcaagaaggtcacagagaaacccgtggcagttggctttggtgtgtcgactcctgagcatgtgaagcagatcgcaggatggggtgcagattggtgttattcgttcggttagttgtcgtattggtttaggttctttattttgggggttaagttctt

SEQ ID NO: 56042 - DNA, 438 bp, Setaria italica
  misc_feature (256)..(256): n is a, c, g, or t
  misc_feature (353)..(353): n is a, c, g, or t
  Peptide Sequence Number=SeqID_122016
tgtctagtaggtttttctagtaaggtattttattttattctttgttaagtctacttgtttggtagtttacttggttacacgttgcgaatgtaagcagcaaggtggaatctcttcttcaggatatcaagaaggtcacagagaaacccgtggcagttggctttggtgtgtcgactcctgagcatgtgaagcagatcgcaggatgggggtgcagatggtgttatcgtcggtagtgcgatggttaggctattgggggaanctgcttctcctgaagaaggattgaagaagctcgaagagttagccaagaacctgagggctgcactggcatgaaccaaccattttcttgagaaaaaacnccgaatattttttcccagtttaggattgcgggctgttgttttgtagcgaaaatattatgtccttatgttgaatgctcaaatgaat

SEQ ID NO: 56043 - DNA, 384 bp, Setaria italica
  misc_feature (366)..(366): n is a, c, g, or t
  Peptide Sequence Number=SeqID_122017
tttttacttttaagttttacttttaagttacgttaactttccgtaccttctaacacatcatttgtggaagctgtgttatatattaaccaacaaaacacaagatataagatctataaacatgactatagtccatgagtatcaaaaaaagattttataaaagcataggaattttaaaaagatggccacctgtctacgatagttacggcctctgcagttcttgtagtacataagtagcatgcacttgacagccatagcggcttggcgaaccattgtatcattgaccatgatgataaaaattgcatgccagaatggtggtatatcttttggaggaagcatgaacaagggtctgagaagatcatcattccngtaccaccaatagacacc

SEQ ID NO: 56044 - DNA, 474 bp, Setaria italica
  Peptide Sequence Number=SeqID_122018
caagtccaatcctccagcaatcagaacttgcaggtttcagttacatccaggtaaatccacacgtgcaaaaattaccagctttttacatcgagcaaacaggccttcacacatcaggaacgtccagcagaattctacaggctctggaagcaatttgctggaaatattttgcctcatgttgcaactgaacagctctaaactattgcttaacatatagacaaacattacgatccgtgctggcatatgatcatcctgaaccttctcaccttgatctctacactgaggaagattgtctcacatgggcaaagaaaaatgacctccacttgaatattccatatgcaattgcttgtccattgttatgttagaaatttgccatttggagtctaaaacaactggaagaatagactgtgtttcagaatggtttgagcgagaacggacgtgccccttgtgtagagcactggtaaaacctgctgatat

SEQ ID NO: 56045 - DNA, 153 bp, Setaria italica
  Peptide Sequence Number=SeqID_122019
agagcactggtaaaacctgctgatattcgttcatttggtgatggctcaacccattctgaaacacagtcttcgcagaaaatatgtttgcagcaaaggagaacaggcacatgcatcttctcctggcagatggcacacatatcaccagcaacaagt

SEQ ID NO: 56046 - DNA, 266 bp, Setaria italica
  Peptide Sequence Number=SeqID_122020
aacgccacatgctgactgaatcatccttaaccaacagttacagctatcaactcaaaagtaccaacaattcagcatacatctgactcctcgacattgtcgctaaacctatcttcaactgcatctacataacaaaaccatgagttaatctacatcagggcaagttcagccgagcagtggcaccgcaaatgcagcgcaagcacctccacctccaccaccaccggcagcaccatacccgggcacatatgacccagtctaaagtaggtaga

SEQ ID NO: 56047 - DNA, 254 bp, Setaria italica
  Peptide Sequence Number=SeqID_122021
gcttggggcctatcatttggcaagttcctggagctcagcttctcaaatcatatgactgctaaccgagttgctagttgtggccattctctccaaagggattgccttcgtttctatgggtatatagctctttttacctttttatgttcccagcctcatccagtcctgcagtgaagattcaatttgcgtacataatattgcaggtatggaaatatggtggccgcctttcagtatagtcccatggttactctatcccg

SEQ ID NO: 56048 - DNA, 242 bp, Setaria italica
  misc_feature (227)..(227): n is a, c, g, or t
  Peptide Sequence Number=SeqID_122022
gacaaccattgtgaggtttagcagacgagcaactgccaccatgtcacaaatctctgatcgcatctgattcagacccccattacaagatatcttgagataaccattgctcttgtatattcttgggggcggaagcacggacggcggcggcgaaggatcggcgtcgcccgcgatgccgaacacggaggaggaggcggcctacggcgacgagctgcgcgacggaggcccanagcagcacggcggcg

SEQ ID NO: 56049 - DNA, 262 bp, Setaria italica
  Peptide Sequence Number=SeqID_122023
aaccgtatccagctttggaagccctacaatatacaaaccttcgatatttttaagggcgccctttccaatcatcagcagtttgacgttgcagaggttcttcagcacaagtgtcttcagttgtgggaagcatccgtcagacataaccaaggtgtctgcactactaaccctgtttaggcttagataggtgaggtttggcacgtgttgtgcaagcagtggaagtgggtcttcctgaagaccagaccaacttagagctagaaacttg

SEQ ID NO: 56050 - DNA, 211 bp, Setaria italica
  Peptide Sequence Number=SeqID_122024
gcccacgttcccggcgcgccgctcccgccgcacctgggagactgaccagtgctggtgagtggcgacaacgtaaagatctctcccgcgcatgcggccggagcggcctctcgctgtctccgtcgggccgccgaaccttccaattcaagttccatttggacgggaacgcaaagatccccgcagccactgggctagcttgtggccaggctctacg

SEQ ID NO: 56051 - DNA, 440 bp, Setaria italica
  Peptide Sequence Number=SeqID_122025
taagtaaagggtaggtactttattattttgtctagtcttgtctattgtattctttccttccggccgactgaaggtgccaagctgttgctgaggaagtggattgaggagctcaaggagcagccttggtcaaagcagaagaaggcaaatgatcagccaggtttcaactgggctttgaacaagactgctgggcaggttgatgtgtacctgctgcctcagtctgcatttccaactggaggcctatatttcaagaataaaacatgggtcaaggagacgaagggcaagcatgtcattatacataataactacatcacagggtttgagaagaagataaaacggttccgtgatcatgggctgtggctggtagatgagcacagcgatgagtctccacttggcagaatatgagcatatgctgtcaaggctgagcacatttctgcttgcaa

SEQ ID NO: 56052 - DNA, 346 bp, Setaria italica
  Peptide Sequence Number=SeqID_122026
cggaaggggtcagcctgcttcaatttcgcgatctcgaacacgtggcggagagtgagggaagacacattgctgtggccgggcgaatgctggctgtttctattcctgcagccttcttgaggaaccatgatactgagggtgacttgaccacaaactcgaaggtgctatccttgtaatcagttaaggtcacttgcattgccttgtacttctgggtcctggcattgaaatccttgcagaaagccatcaaattgagccaatgaagcagtagctcaaaatgacatcccatttagtgctctgtcctccatttagatgcccagagttctgaaacacactgctttcaaacacatta

SEQ ID NO: 56053 - DNA, 336 bp, Setaria italica
  Peptide Sequence Number=SeqID_122027
gatcaacatcgtggatggttccagagctcattgttgactagcattgctactacaggtatttttcattgtcaaggttattgtctattatatctttttgttattgtttcgtgattcctccatggttgtatcttatcctagagacactttctatgcaggttcaattttatggtgtagcatcttttaacatttttctatgcaaaagggtgcaaaggctgccatccttgtattgtttgattttctatgatatgtctgttgtgtgaaagaataaatgtcctttttctctaacttattttttccatactatatttccactgtctgaattattcttctattttt

SEQ ID NO: 56054 - DNA, 434 bp, Setaria italica
  Peptide Sequence Number=SeqID_122028
gcagttcttctaaacacaaagtacacttttgatcagatattacttctttcttggtgagaaggccaacaaatagagtttttgcttggaagcagcaagatgttgttcaataactccctggcctttttaatcttgtttttgtgtagctttctccattttcttggcatatactcaaatcataagcacatgacatgattgtactatgttgtgtgtttgctgggaattagcacacactgaattaatatagctagtctaatttacatatgttttatgctttatattactgatttattttcctttatatttcagatgcttcaaagatttgctattgttggtttgtccaatttctatttggatgttgcaaaggatcggcttttatgttggaggccgagctagcttcacaaggaaaagttgtcagactgtcctcacagcacatc

SEQ ID NO: 56055 - DNA, 402 bp, Setaria italica
  Peptide Sequence Number=SeqID_122029
tgtattacactggtgatgtgttgattggtcaacaaatcttgcgccagatgtctgacatgtatagaaaactacgaggcacgatgcgatttctgttgtcaaatcttcacgattggaatttgtggcttccatgaaggatggttatgaaaattaccaattctataaagtatatcagatgcttcaaagatttgctattgttggtttgtccaatttctatttggatgttgcaaaggatcggctttatgttggaggccgagctagcttcacaaggaaaagttgtcagactgtcctcacagcacatctgctctaccttgttagggccattgccccgataatgcctcacttagctgaggatatctggcagaacctaccttttcaatacaccttggaggatggatccctcgc

SEQ ID NO: 56056 - DNA, 217 bp, Setaria italica
  misc_feature (194)..(194): n is a, c, g, or t
  Peptide Sequence Number=SeqID_122030
cattaatgtgacgaactcaagatcggtggatcatcgccgagctccaaccaagatcggaggaggaaccacaggaaggcgtatggggaatggagacgaagtagtagtttggagggagatgggggcaatgaggaggagagaggaaggtgaatcaagatgcagcggcggcaggagtagagtggggagggagggaaggnggtgggcgagggaatgaaagaat

SEQ ID NO: 56057 - DNA, 228 bp, Setaria italica
  Peptide Sequence Number=SeqID_122031
atgtgctgtgtgctcccactgtcacttgcctcacccttaactgagagtggaatatcagcaaccagctgcgcaactgcaccagcaccacccagtctgctcatactcaaaacctttacttgaagcctaagaaacttcacataatcaaggatctcatctagcatggctgccctatctgtctgcagagtttgaagcaatacatcaagcttactgttcaactttttggagtta

SEQ ID NO: 56058 - DNA, 173 bp, Setaria italica
  Peptide Sequence Number=SeqID_122032
tgctgtgcgtggaacacctgggtaggcgggctggggcggaggtgggtcggctgcacgccaccgccgaacaccggcgggaagagccccggggagctgcacggcctcccgatcctgcagaggcgagcgagaagcttagcacaaagcacacgcgcgctcgtctggttggtgcaaag

SEQ ID NO: 56059 - DNA, 199 bp, Setaria italica
  misc_feature (158)..(199): n is a, c, g, or t
  Peptide Sequence Number=SeqID_122033
caaagtgtatgatataccgagcgtttcaatgtgctaaccgtgaagtgggaaaggggaggctacatcatataccaatttaactgattcgagaggggatgatgtagcctccctttcctatttgttcaaagcagctttgattgcaaggtatggtaagaacnnnnnnnnnnnnnnnnnnnnnnnnnnnnnnnnnnnnnnnnnn

SEQ ID NO: 56060 - DNA, 249 bp, Setaria italica
  Peptide Sequence Number=SeqID_122034
taaatctgcaaaatcacaagttctaaatattttgttaagtagaaggcatgacaccctgttgtactttggaatactgacttataagattcttgaagttatgcatagtattgcatctttttgccagtttgcctttggagttatcccaaatgttagggctaagggtgtggcatctaccaaagctgcagagttgttgaataatatgcaactagaggatccggtcaacatggatgatatgggcattccggagat

SEQ ID NO: 56061 - DNA, 189 bp, Setaria italica
  Peptide Sequence Number=SeqID_122035
cgacttccttgttgcaacaacaaaggtcgtcaatggtaacacgatactcagaccaaataggtcacctccatatgcaccttagcacaccaatagtgaaccatgaaagtgtttattcgactatgacatagtatgctgctgccattcaaagaaaagggcatttcagacatttgacagccttcaatacaagga

SEQ ID NO: 56062 - DNA, 252 bp, Setaria italica
  Peptide Sequence Number=SeqID_122036
ggcataatatgcagattttctgggtttcttatggcggtgacgacggtgagtgctgtaggaatgtaggcgacaccccagactggtaggaagacttctgggatcatgacggaaacagggatgataatattgtagagaatgaaggcgacagtgggggcgacgactcgtcgcaccaggaagaagctgtagatcatgtagaacttctttaagggcgatacttgcttggcaaccaggaccttccatgccatcttccgg

SEQ ID NO: 56063 - DNA, 338 bp, Setaria italica
  misc_feature (197)..(197): n is a, c, g, or t
  misc_feature (203)..(203): n is a, c, g, or t
  Peptide Sequence Number=SeqID_122037
tagttgttgtagttagttcttgagttcggagacttgctgctagcaaataagctaatgtgaactgcagagtttacgtatatttgtaaagttacagatgatggactgataaaggttagagtgtaccagagcattcattgccccagctttgaagttatggtggtactgaggcctcttctcacgtgccatgtaaaccagtntaggcngtacatttccttcattatcaactgcatctctgtctttcccatctatcagaatctggcaaatgagcaaatttagctctctggaatatcaatatctcttaaattcttcaacaaaaaattatgaaaaatcatttgtcc

SEQ ID NO: 56064 - DNA, 239 bp, Setaria italica
  Peptide Sequence Number=SeqID_122038
cgattttgtatctcctgcagaatggaagccagtgctttgcgaaggcggaggtctcccacagagcatagaaagtgagaatggatccaccgtcgtcggagaggtacacgttcagtttctcaggtgggaaagacagagatgcagttgataatgaaggaaatgtactgcctacactggtttacatggcacgtgagaagaggcctcagtaccaccataacttcaaagctggggcaatgaatgct

SEQ ID NO: 56065 - DNA, 458 bp, Setaria italica
  Peptide Sequence Number=SeqID_122039
ttcttagttttttttgtttgttatttagttattgttccttcgtcctttaagggtctactaccctggaattattccttctagtctaattggttgtcagcttcgcttagacctcttatttgttccaatattcatatacatcatgcacgttgtcatcctttcctaaagcaggatatctggaaagaagctcacccaaatcgtttgttccttggggattattataggcatccttttcaaatatgcttattatcatctcaaaatcttcataagagatatgattccgttgagagctattttgattgaaatctgcatgattcaactggatgagccaccgttcatcctctgagtccatgtcatagatagaatccccgagagagagctcgcacaacttcatcatccaccaccctgatgtagtccggcacagggccgtgagaaaggatctgccacaattccttccatgt

SEQ ID NO: 56066 - DNA, 376 bp, Setaria italica
  misc_feature (109)..(109): n is a, c, g, or t
  Peptide Sequence Number=SeqID_122040
cctcatgtacaccaggaattgggattgtctttccctgggaattgcgctcttggcctacaacatgcaattcttgaataacagccaatcccacttatcagtgaactcaagnttccatgcatcgtcaactgcccaaatgttaggcttgagtatgacgattaatgacatgtaacctcgaatctgaaggcttaagggagtatctagtaacaccttgtatcttcacaactatacaccacttattggtatctgatagttctagcataacttcagcacctttcttcccttcctagtctattcttattctagtctttgtaatttgttattttaaaaggttttttgtttcttttttttgttttcttttttgttttttgttttttaa

SEQ ID NO: 56067 - DNA, 399 bp, Setaria italica
  Peptide Sequence Number=SeqID_122041
aactcttatgtacactgccacatggccaaaagaggtgagaaaaatagcgtcagatttactggttaacccaattcaagttaacattgggaacactgatcagctggttgcaaataagtcaattactcaggtaagaaaatgttttttttcttttttatcaaacaagacattgtttctgtactttgaagtggtttgttgcacactgcagcacgtggaggttatctcacattcggagaaatcaagacgacttgatcagatcttgcgttcacaagagcctgggtcgaaagttataatattttgctccaccaagaggatgtgtgatcagctggctcggaacttatcacgtcagtatggtgcttctgctattcatggtgataatcacaggcggagagggattctgtg

SEQ ID NO: 56068 - DNA, 280 bp, Setaria italica
  Peptide Sequence Number=SeqID_122042
taaaaacaaaaagaaaaactaaaggtaaagaaacaaaataaccaaaagactttacctacccaagactccaagcaacaatcaatctggggatggtctcagctttcatgaaaggttctatggaccacgtggaggggatcaaagcagaacaagcaatgacggattccgtgctaggagcaggagtcctagcaaggctgtgggagtttccaactggtaattgcatcttctaggtgtgacccagtttttccgatggtgacgaaaccagtagatgaagatggtaccc

SEQ ID NO: 56069 - DNA, 433 bp, Setaria italica
  Peptide Sequence Number=SeqID_122043
gctgatcgggcaccatcatgattgctaattgaaactaggccaaaaatacatgtgatgctgctcaagattgacttgaaactgaaaaaagagaacactttctgttaaaatgatgttgcagttaaatcccttttttaccgctgaatctgtgtatattagatcagttattaatataatttgttgaaataagtgtatccttattatcgattaatttttaacagggatattacaacaacatttccaagctttgtattcaactctcaagtagaggatgcatgagatcccaaagactagtgcacaacagaacagattctgcggggtgcacttgtgtgtttttatttccttggaaatgtatattttgtgtggtggcaatgtccttctgagggttctttcttttgtatagtttgagtgcgctgagtatattctacccaaggaa

SEQ ID NO: 56070 - DNA, 163 bp, Setaria italica
  Peptide Sequence Number=SeqID_122044
tgttcgttaatttgtcttgttattgaaatgagtttggagaagtagacattgatggttcactagttgctgcacaaaccgctggagctgaggacataatgatgctaaataacggctgcctttgctgcactgtgcgtggtgacttagtccgtatgattggtgaatt

SEQ ID NO: 56071 - DNA, 236 bp, Setaria italica
  Peptide Sequence Number=SeqID_122045
cttgttaactataattctgtcagcataggcaatttgctgaactgcttcattgactatacccttgggctttacttcatctaaatgcagtctagcatgctttgcgtcaactaaagtaaccacaccatccaacttgacatcattaaaaactacatcctctgcatagaatgtctgctaaataacggctgcctttgctgcactgtgcgtggtgacttagtccgtatgattggtgaattggt

SEQ ID NO: 56072 - DNA, 444 bp, Setaria italica
  Peptide Sequence Number=SeqID_122046
tgattgtggttttgatggtgtgagtgtccaacatagccttgatgttgctaacagtatccagcttctctctgggttcaagttaacaaggacaagagagagttcaccattcatatggattcctcaatgtcagttaagcatggagatcatgcctcgagcctggcaggctttgacatccagacaatcatggaccagcttgcttacactctaagaggggagaccaaagtcaagaacttcaggaaaaacaccacgactggtggtttatccgtgacttttttgggaaataccgtggtgactggagcgaagtttgaagacaagctttcagttggcaacaggttaacactggtagccaacactggtgctgtgtccgtgagttggtgattctgcattattggggttgtaattattggtaggtctaacttcttgtctattgtagtaaagtttatt

SEQ ID NO: 56073 - DNA, 176 bp, Setaria italica
  Peptide Sequence Number=SeqID_122047
gctgaagattgcccttttaggtgtctgttcagcgacaatgtatttgtggaacaagatgcatcctgttgcagatgctaatgcttaagtagcactggttagtaagacaattttgaagcctaacttttgtatcctcttcttgttccttctgttgagtttctacttgttcaatgttaaac

SEQ ID NO: 56074 - DNA, 368 bp, Setaria italica
  Peptide Sequence Number=SeqID_122048
gttgttcctctacactttaccgtggtttataggatccattttcgcagctacagagcacgggctgttgctgctgcggcaggtgagacactgcggtgcagtttcctgatgttggatgtatactaaaaaactgtatgggaacacctactgtcctcgtataggtagagatcggatgttatttatattgtataatgtggtgcacatgatatatttgtgctcagtttctttaccttagcattgtggtttgagtttccaagttcgctcatttcagcccttgtcaatcgcaggctgaacagattctgatggctcggcccaaagcactgctgatatgactgcttttgtgcaaaatcttctgatgcagatgcaaacca

SEQ ID NO: 56075 - DNA, 240 bp, Setaria italica
  Peptide Sequence Number=SeqID_122049
ggacgcctgtggactgaagttgcacttgcaagcctcgctaaaagcacctgtacagcgtgcacttgcaagcctcgctaaaagcacctgtacagcgtgctcttctcttaattgtgaaccaaattgcaatccaggtaaatgctgcaagcaagaggtcacttgcttgatgtgtgacctgcaagctcttgaactcgagccagcagccgctgacagcctttggagtagcttagggtttgatgctct

SEQ ID NO: 56076 - DNA, 242 bp, Setaria italica
  Peptide Sequence Number=SeqID_122050
attccaagttcttcgattaagttgtcctgttctcctagcatcttcttatgagtccagccacattttgcgcaatgtcttgtttggtctccaccgaaacagggggatcaccaatgtacatatcgaagaaagctcctgttcgtaaaggcataatataataagcactaatgatttggaaattctaaatacagatgcatggagaggctcctctgcagtccactgcgtagtgactttgcactgcatgg

SEQ ID NO: 56077 - DNA, 250 bp, Setaria italica
  Peptide Sequence Number=SeqID_122051
gcttccccttcgtcctcgacgtcggcgcgcgccgtcgcgcccgacgcctgggacggaattgggagaaagccggcgaggaccactcccgccgactctcatatcctccccggtgagcctccggccttattctctatcatgttcaacccaccgtttcctgccatgacgtcccctattgcagatcgaacagctcctgaccgttgggaacccggggcgcgaagccgaagccgccgagttcgcagtcaccagcccg

SEQ ID NO: 56078 - DNA, 266 bp, Setaria italica
  Peptide Sequence Number=SeqID_122052
gcgagaggatgggcgtcacggcggtggagagcagcagcagcagcgtgaagaggaacggcgggagcttcttaccgctcgccgccatggctgctggtgggttgtggtggtactagagggcaggacagtttgattgatacaaagacgaccttacaagtagaagaattggaagttaagctggattaagctccttctggtcaagtgtagttacctgcggagaagctttttgcagtaccccagttgtttgacattgttaaaaacttgttttg

SEQ ID NO: 56079 - DNA, 143 bp, Setaria italica
  Peptide Sequence Number=SeqID_122053
ggttgtgtgtcttaactatgtgatgttctagctcatatgcatgtcaaagaaaggcaagggcggcgctccctgaatctcaggaccgtgtattgatcctgagattcagggagcgccgcccttgcctttcttgtactagctcatat

SEQ ID NO: 56080 - DNA, 409 bp, Setaria italica
  misc_feature (13)..(13): n is a, c, g, or t
  Peptide Sequence Number=SeqID_122054
aatgatggcctcncctttcgtcagctcatccagaacctggatagcatactgtggctggatctcctcatcaaaagttttgtaccccagggggaatcccctcttctgctgatccaactcatcatgccatgagccaaagtcaaagctcttctttgatgtgattccttccagaagagtgttcatgccctgcagagcaagcttgacatctgcacagatggacacatgtggctgcttgttcttgccaatctcagccggatcaatatcaatgtgcacaatcttagccctgcttgcaaaagcctcaattttccctgtcacacgatcatcgaaccgcacaaccaaaatagacaaagacaaacaaggtacggaccttaataccaacaagacaattaaattttagtacaattaattaaca

SEQ ID NO: 56081 - DNA, 351 bp, Setaria italica
  Peptide Sequence Number=SeqID_122055
aatctagtgctttgcatcttataatcatgaaaaagtttgtttaatattttttagtctctttggagaatcacctctcattttatagtagattttgatgtttgaggacttttataatctaatggtgaaccttcctcacaggtggattttgtgatggagatcatgtcacgccttgtgagcaagcaggtccttaattgtttttctttttttagttgaagatgactttagctgctgttcttttctacatatttatgaaactggactccatcacttgccatggcagatttggaaatatcctaagttatgggtaggatttctgaagtgtgctatcttgacgaaacctcagtcatatgg

SEQ ID NO: 56082 - DNA, 245 bp, Setaria italica
  Peptide Sequence Number=SeqID_122056
tcaagggtccatggacaaatgagttttgtatccatttccttttatctaatcatgtatcaatatttcccatgacatggcatatgtttattcagttaccagctccgcagcttgagaatgccttgagtaagaatcccacactgaaggcacccttggttgagcacgccgagcagccaaatgtccgatcaactcttccaaggttttctttgttcgctcttatcaatatcaagtggtaggtatgcatctaa

SEQ ID NO: 56083 - DNA, 213 bp, Setaria italica
  Peptide Sequence Number=SeqID_122057
ttgggatcatctcagatccaccaggtgacagccgggacctcctcatgcaggtcttacaaaccctcactgatgctgctgtgccatccaaagaagatcaggagaggagcctattgtgcgtatcagaattggtacttgtcggtgaactgcctgcttggcagcttgcggtaggctaccatatattgcaaatacatgtctgagaagggaatgtttctt

SEQ ID NO: 56084 - DNA, 172 bp, Setaria italica
  Peptide Sequence Number=SeqID_122058
taagttaaaataacttaacctaataggaacaaagtttacaaaacaagaccctttacaacgaatcttgcagggatcatctcggaatggcccttctcttgatccatcagaaattttaattgcaattcatgtaatagatactgataaggaaggaataccactaaaaaaaggttat

SEQ ID NO: 56085 - DNA, 426 bp, Setaria italica
  Peptide Sequence Number=SeqID_122059
cgtgcgtgttggtgatggcggagtagaagaaccctgcgacgtttgacaacgcgcgacgcgacatcaatggtggtgctcgcattgcaacatttgatgagcttattgttgatgacactcaccgacgttgtgatcgtccaaggccggttcaagaaacttgcggcagttgatgagggtcacgacggagtacgtctcctgctgcccgctctccagcggcttcgactgccgcgcggcgagcatagtcgcagcggccatggcggagcagagcctcaccccgttctccttgcactcatcgagcagcctcgttgtctcgtcgcggccgagagtgagccgcagcatctgcgtcgacctctccgttccagtctccacgaacggcagcgtggacgtgcgcagcccgttgatggagtagcccaccatgtccagcccgcg

SEQ ID NO: 56086 - DNA, 235 bp, Setaria italica
  Peptide Sequence Number=SeqID_122060
tgccaacaattttaccgtaaatggcccatcagaccataataagctccgggaatctactaggcacaatcttcaaagccttcatcacttgcatggagcagaatctgcttcaccctgtcaaagatttcctggatctgcttcctggagtgcagaggagaagggtacatgcacgccatctctctccgtctccgatccaaattcgcacgcacactcgcggcgagagcagcggcgcgggcgg

SEQ ID NO: 56087 - DNA, 409 bp, Setaria italica
  Peptide Sequence Number=SeqID_122061
agcctcccatccctgatcgagtcgaacacgccgatcgacgggccgatgccgtgcacggtggcgcagcagacgcagtcctccacgccggcattgccttgcagctcggccatgtcggcgatgaccggctcctcgaacacggagacgagcgccgtccggagcgcccccgccgtcgtcagctgggggttctcgatggcccggcacatgaggaagttgaggtcgctgatgtcagtgaggtgcttcttgttgctcttggcgctggtgtacgagtcgtggcacctcttggcaagctcccacagcccttcctcgccgtggaccgtgtgcgtgttggttgaattaggacggaagttaagaaagaaacccgtaacgtttagttagtaattacgttacctaaaggtaccggtttactaaa

SEQ ID NO: 56088 - DNA, 300 bp, Setaria italica
  Peptide Sequence Number=SeqID_122062
ccagactcatttgtatgcttgaatgttatagcgagagtttcatccttgggattgcctagagcctgtgaccaaggatgaaactctcgctatggcattaccatcatagacttgaatagtagatccagactcatttgtatgcttgaatgttatatgcattgtttacaataagacatgtccttctatgctggtcgtgcttttgagaggagcactgatatattgaaatcagcaacatttaacagcacactgcacatcgttacatctccttcatgtcgagtagcacactgatgatgatgcactaca

SEQ ID NO: 56089 - DNA, 366 bp, Setaria italica
  Peptide Sequence Number=SeqID_122063
tcccctactttctactaattccccctaactaacttggtaagtttgttggttttctttcaggtcttcctcagtcaagaggctgtcttcatcaataagttctgagtcatcatcaatttgaatcttaggaagggcctttgttgctttcttaagggggaaagaagaacccacactccagctggccttctttgccttaacagtaacagactgcacattatccagcgagcttgcagcggatgcttgcacttcaacaaatccccccatcagtagcttgcgctcaatatcagtgtttggcttctggctggaggagggtgcagagctgtgaatcagaactcttccgccagcttgcagcacccggttaatctcagc

SEQ ID NO: 56090 - DNA, 145 bp, Setaria italica
  Peptide Sequence Number=SeqID_122064
gcaaccaactgttccctcaagctttccacatttttaatgacagcaagaacagcaccaactgatccatcatcaaaaggcaacaaccacctctctgccttcgccgccgcctcttctcccaaatcaccgacccacatcccagaccaac

SEQ ID NO: 56091 - DNA, 410 bp, Setaria italica
  misc_feature (364)..(364): n is a, c, g, or t
  Peptide Sequence Number=SeqID_122065
agaccaaggacgaacgaatagtacggaagaaagaatggcctccacgttctcgtcgggctcgccggcggtgaggccgtgccacatccccgggtagagcttgatggtcttgtcgccgctggccgcgcgctcgtacagagcgcggctaacctccgggtccgtcaccgtgtcggcctcgccgtgaaggacgaagaacggcagcttcacctgcgacaagctgtcttctatgtacatgctggttctgagcatctccagcgcagtcttgagccgcggcttgtcctggtagatgagcttgttcctcctgatccgctttccatgacacaagcatcagagcgttccggtcagatatcatcatttacaaagtttntgaaaactaaaagaaagagctggccgatggcgccatcgctgcagct

SEQ ID NO: 56092 - DNA, 232 bp, Setaria italica
  Peptide Sequence Number=SeqID_122066
atagaactggcagcactgataagatgtgcacctgcttgaacaatggcgaataaggaagtggtgatgcgtccggccggcgagcccgcagaggaagcctcggcgctgtctctgaggccgcgcgtgagccggcgctccgccgccgttctcgccatcgacgagcttgccggtcgccagcatcagcttcctcaggcggtcttccatggtccagctgcggctgcgctcgttgagccag

SEQ ID NO: 56093 - DNA, 270 bp, Setaria italica
  misc_feature (1)..(26): n is a, c, g, or t
  misc_feature (30)..(30): n is a, c, g, or t
  misc_feature (33)..(33): n is a, c, g, or t
  Peptide Sequence Number=SeqID_122067
nnnnnnnnnnnnnnnnnnnnnnnnnnacanagnaaccagactgaaccatcatcaactcacgacgagatagcagagtatctacaagggatcactactaaccctagttctttactttacctttacgttactaccggtaggaactcatccatcatcaaccagatccgaccaaaatgccacgacacgaccaacgaagaaaatccatctctacttctactgctgctgctgaatgataataaaatagatctaggcgatggtggtggcagtactgct

SEQ ID NO: 56094 - DNA, 165 bp, Setaria italica
  Peptide Sequence Number=SeqID_122068
gtagatactctgctatctcgtcgtgagttgatgatggttcacacaacccagcacaccacgacaccggtaggaactcatccatcatcaaccagatccgaccaaaatgccacgacacgaccaacgaagaaaatccatctctacttctactgctgctgctgaatgata

SEQ ID NO: 56095 - DNA, 478 bp, Setaria italica
  Peptide Sequence Number=SeqID_122069
tgtcccttccgttcccccggtctattctattgtttccttcttccggtcgggcagttcggaggttggaggcgacgcagaacctcaacgccatgaaccaggggcccaacccgtggcacgtgtccttctcctacgcgcgggcgctgcagaacacctgcctcaagacgtggggcggcgtgccggagaacgtcaaggcggcgcaggacgcgctgctgctgcgcgccaaggccaactcgctggcgcagctcggcaagtacacctccgacggcgaggccgccgaggccaaggagggcatgttcgtcaagaactacagctactaattcatcggctagcaactccgacgatacatactggttacgcaagctaagcacgtcttcgccgtgatgatccatgcatggtgctcatcgatgctttgtgcgtgccgtttagttactactgctagctactgcaagatcgagctcgccattgagatgcaagcttg

SEQ ID NO: 56096 - DNA, 370 bp, Setaria italica
  misc_feature (268)..(268): n is a, c, g, or t
  Peptide Sequence Number=SeqID_122070
tcttcccttcttctttgtctattaaagtctacctttgtttctattaaacttggtcttattaaaaccgcttctagggtttttctttcccttcaaattgtggatatctaaggcaacctttgcatcgcaaccaaccccaaagtagttgttcataaattttggtggtgccataagctttccttggttgtccttaattgtgatcttccatctgtctagaacagtgactgctgcgtgctcaacatcttgcaaaactgagaatagacctcccctnttctcaataacaccaaggccaccaccccaacacagaaccctcgcaagatcattaccagtaccagctggaaggatggctacaggaggcggagcttcaaacttc

SEQ ID NO: 56097 - DNA, 159 bp, Setaria italica
  Peptide Sequence Number=SeqID_122071
ctcgagctgcgccgagcaatggaggtggcggctctggagaagaagggacacagagcttttgccaagcctctgaagtctttcagttcttcagagcacaagcgatccaagagatgctttgcgctcttcagataaaaccatcgttctgcctaagccggaagt

SEQ ID NO: 56098 - DNA, 467 bp, Setaria italica
  Peptide Sequence Number=SeqID_122072
taattagttaacctaactaagtaaacctaaacctaattctactttggttctaaattcattgcacaagaaatgaaggattctttggttgattcacttcgagtggaacagagacctgtctcttcaaatgccaataatcccaaagaaatagcaaatgtaccagaacaaatccagcaatcagaagagacaaaattctctggaagagaaccagagattgagaatctaggcaaagatggttcacaaaatttgccgatatctgtaattggaagtgagcctggaagtagtaaagaagatgccaatgtgttcagtaacacaaggcaagaaccatcaagtagtggcaatgctgatgcagccattgagttttctgagtctactggatctgcaatagctgaacagagtgggaagtctgacgtggaattattgaaggtctacccagcagtatagaacctgtatcagttaccagcatctac

SEQ ID NO: 56099 - DNA, 404 bp, Setaria italica
  Peptide Sequence Number=SeqID_122073
cttatttcgaaggcagaatgatgatcctagtgttccagatatgaaattccacaacccaaaactgtttagaaaggataaaatccattatttcatttgaaataaggtgtcgacaatcctgtgcagagtccagaagaattgttaagagttttgtgagatccagaactaatagaagatggaagtattaccaacaatatagactgtctagacaggctgattttcttcaattttgatagattaagaaaaagagaatcctcttcgattttgatagattaagaaaaagagaatcctcttcgattttttgagctaaattttgggccttgaaacttagtgcgtagattctaatttttgttgcctcgctgcatcccaataattgcctcagattttctttttgagaaactagcgtt

SEQ ID NO: 56100 - DNA, 395 bp, Setaria italica
  Peptide Sequence Number=SeqID_122074
ttcattgaagtaaggtcttaagcctagccgttcggggtacagctactcagttgaccagataagttcttctccagctgaggaaggtactcgattacattggcgaaggaaggagctctgaagatgatagtttcaataaaaggatttgcacactggacatcaaagggaacaggctgaggtggggcttcagtttgcaggcccgtgcatggcgttgtgtctgacagaagagaatcattgcagagtgggtttccttcaagcctttgagagaatgaaataatttgatgagaaatgaatgtactgctgtcaggaaactacgtattgaaataagcagaaatacgcacttgaggttttcaaaatctcctcagttacagtgtacaacagcttcaatgttgaaaacc

SEQ ID NO: 56101 - DNA, 219 bp, Setaria italica
  Peptide Sequence Number=SeqID_122075
gtaaatgactgaagtgtcagctcagagaaaccagatgatgattcctcatgggcagaagatccagtagggctgccaatgttgggtctttttgatggattcttgccatctaaatttctggcagcatccttttcccctgctgctttctcctggcaatacttaactaactacaataatactttaggacttacaacttttaatagtttagactacaaactagga

SEQ ID NO: 56102 - DNA, 313 bp, Setaria italica
  Peptide Sequence Number=SeqID_122076
ttagtaaaaccttacgttagtaatttagttactttaacttaacttttagtaactaaaattggaaattagtgtcaagaagaaagcattgcccgcagtacatcaccctgccaacatatgatccccttgtgctagccaattcaactagagagatcatgacacagttcaacgacttcgaggtgcctgcagctctttacacatcctaagatgcaattgttgcagccgagtattccatggctgggacaaaacaaatgtctttagggccatggacgcatctcttgcgcaattatgatagcaaaaggtggtcgagggagat

SEQ ID NO: 56103 - DNA, 245 bp, Setaria italica
  Peptide Sequence Number=SeqID_122077
ttaattttcttaactttagttagttagttattctattgtacacagttcaacgacttcgaggtgcctgcagctctttacacatcctaagatgcaattgttgcagccgagtattccatggctgggacaaaacaaatgtctttagggccatggacgcatctcttgcgcaattatgatagcaaaaggtggtcgagggagatccagggaaattaacgtctgggatattcgatcattagtacacttgaaag

SEQ ID NO: 56104 - DNA, 173 bp, Setaria italica
  Peptide Sequence Number=SeqID_122078
gtcccagccatggaatactcggctgcaacaattgcatcttaggatgtgtaaagagctgcaggcacctctttacacatcctaagatgcaattgttgcagccgagtattccatggctgggacaaaacaaaatgtctttagggccatggacgctacctttttgtctattctattaa

SEQ ID NO: 56105 - DNA, 168 bp, Setaria italica
  Peptide Sequence Number=SeqID_122079
cacgtaaaatagcagggcatgcggatacttgagatgatagataatctacaaatcaatttacttaccagggctgtaactttcatatcaagaccctgcctctccatagccctactcaattcagccacgacatcttctccaaccgtgccgttgatggaaaagcccttggtc

SEQ ID NO: 56106 - DNA, 312 bp, Setaria italica
  Peptide Sequence Number=SeqID_122080
aaagaaaaataaagaaaccaaaaataaaaataaaaataaaaccaaaagaacaaagaacaagaccaaagacgtagacaacctacgctaccgcgacaaggtcacatacatgaagagtaatgtatcttgcttcgagggaagtatcaggaacccccagaatatccttgagcttggctcccaggtgtttgagatcatgtgaggtgtcatgatgcatggctgacatatccggcgttctcagtacaaaaagttgttccaatttttggcggaacaacatccccaaacaacgatgcgtcatgagcccagtttcagcaggat

SEQ ID NO: 56107 - DNA, 326 bp, Setaria italica
  Peptide Sequence Number=SeqID_122081
ttggttagttctttctttcggttttgttaagggttaagttagggttaggtaaaagttaaaaaggtttactacttaagtaacttcgtattcttcttcgagctcctagaactatgcagcttcagcatactgggagtgtgaggctgcaagaagcgcagctccgattcctgagccatcgttggccaacttgacaacaaccgacgaggcagcctcctcaccgagcagatctgtaagtgtcgcttccaggcaggcactgaacttctgtaatgctcatataagccaccatccatagcgaccacagtcctttgttggctaaagtcatttggcaa

SEQ ID NO: 56108 - DNA, 415 bp, Setaria italica
  misc_feature (252)..(252): n is a, c, g, or t
  Peptide Sequence Number=SeqID_122082
tattacacgagattgttgacacagcattgaagaactggaggccgaggtcggtcctttatctggagctccaaacatgggtcgtggaattgtcagccgacttactgttggtcctgaagttcagaagctttgtgctcaagcaatagatgctatggagtcaatgttctctgatgcagctcctgctaactcaagaattcagcgacctagtatggtaccaccaaacttcataaagtttgaagctataacccaaacatntgtcacaatatttttggatttggatcaatgtcctatgcttgcccaggaggcaacttccttcaatctatggcaccgagtggctgttactgaatcctacctgtcttaattccgtagttggtctattaatttacttttgttctttacctttattttcgttttaaaa

SEQ ID NO: 56109 - DNA, 303 bp, Setaria italica
  misc_feature (40)..(40): n is a, c, g, or t
  Peptide Sequence Number=SeqID_122083
gtggaattgtcagccgacttactgttggtcctgaagttcngaagctttgtgctcaagcaatagatgctatggagtcaatgttctctgatgcagctcctgctaactcaagaattcagcgtatgtttccgtattctctatctttgtcattgcatgtacaaatggaattgactaattgatgcatgtttccatttttaggacctagtatggtaccaccaaacttcataaagtttgaagctataacccaacatctgtcacaatatttttggatttggatcaatgtcctatgcttgcccaggaggcaac

SEQ ID NO: 56110 - DNA, 220 bp, Setaria italica
  Peptide Sequence Number=SeqID_122084
taaataaaattaagaatacctagactaaaatagtacgaactagaatagagtgtggatgaaaagcgagagctcgttcgtgagttatcaaggagcccagaaagtgcccctgacaagctccaggcatggagccggcgggaaatagtagaaattctttgttctgatcttggaagggagaggaaatacactggtttatccaagcagcggatgctagattatctct

SEQ ID NO: 56111 - DNA, 203 bp, Setaria italica
  Peptide Sequence Number=SeqID_122085
cctctcaggctttgaatagccattctgaacaattttatcacaaggtttgggtttgtagcagatcgttgcattgattcttcattgggaatttcattgaagtagttgacttgtacaatcttcattgaaacttcctagttccttcgatgacagtaggtttattttatcgggcaacttcttttctttttccgttttttacttttgcc

SEQ ID NO: 56112 - DNA, 503 bp, Setaria italica
  Peptide Sequence Number=SeqID_122086
taaagttaaaagaaaagaaaagtaagtaaatagttaacaattaagaaaagtactgcaaaatctctgtatgttcttgcatgccattgaagctgtatgcttcagtttcttcacatgaggcttgcttttgagcaccttatgtgagggatgtttcagagaggtagaatatatactcaagggacaacatcaaagaagtcaactgttaaagttttcttttgggttgggggaagattcattttgagaagatgaaaataattcctttgcagatttttacatacaatttggactggaagttttagcagtctaaccagatacatctggatagatattgtaaaagagatacagttgttggatcaatgggccaattttttgagatgttaggaaatgccaattgccagttcagctgtgcagggtcactggtgctgcattctttcatagtatcttgttttatactggtgaagaaggttctttcctctgtataatagctgttttatactcatttagac

SEQ ID NO: 56113 - DNA, 315 bp, Setaria italica
  Peptide Sequence Number=SeqID_122087
acatgcaaggtcacaaggaggccaaatagcaaaattcacagcattattggccactggaaactaccatggtgttgtaggcttcgcaaaagctaaagggccaacagccaagattgcaatacagagggcatatgagaaatgcttccagaatctccactacatggagcgatatgaggatcacacaattgctcatgctatccaggccaaatatgagaaaacaaagatatacctctggcccggaccaatgaagagagctttaatcacattaagtgggttccttgatccaataatctttgacttgacattgctgaaaccagc

SEQ ID NO: 56114 - DNA, 253 bp, Setaria italica
  Peptide Sequence Number=SeqID_122088
tgcatacttgttcatcgattcgttgcttagaactgaaaacgagtggccaaaatcatccggactcttcagttgaacagtgcttgcagcagaaacaaatcaaacaattctttgaaacaaagaaaaatggcaataaatcatgaacacgaagaaccggttgacagcaaacttaccaagtaccctctgaaggccttctggatcacgacggcggcctccacctcgcgctccaggccgcagttgcacggccgcacctgcg

SEQ ID NO: 56115 - DNA, 241 bp, Setaria italica
  Peptide Sequence Number=SeqID_122089
cgcgcaccaccaatccgctcctacgcacaaaaggcgatgaaaattttaaaatttacgtctatcctgtaaaatgtggctgacatttgcaatgttatcgcgtatcaaaattcctcacttgttcaacagatttccgggacgacgccgtcctggcctggagcctcatgagcgcctgcagcctgcgcagcgtcgtggcggcctgcttcctcacgaggtagccacgcaccagagcttgcagcttcac

SEQ ID NO: 56116 - DNA, 178 bp, Setaria italica
  Peptide Sequence Number=SeqID_122090
acgttcttgggcgtgccgctgccctcgaaccgctggatcaccttgcagccggagagcagctccaggagcacgacgccgaagctgtacacgtcgctcttgtccgtcaggtgctgcagccggtagtactccgggtccatgtaccccaccgtccccgccatcaagcacggctcgtcgtcga

SEQ ID NO: 56117 - DNA, 252 bp, Setaria italica
  Peptide Sequence Number=SeqID_122091
ctgcggctgaaaaaaagacccatctctgttggatttgattcagatgaggctttctcaagcatccaatgctggagagtcttcaattgacaacagtggttcagaaccttccaagaagaaagacaataaatctggcgtgtctgcagctggcgaacggctaaaggcttcaaattttcctgcaaatatattgaaaattggtacatgggagtacgtatcacggtatgaaggtgatttggtggccaagtgttactttga

SEQ ID NO: 56118 - DNA, 190 bp, Setaria italica
  Peptide Sequence Number=SeqID_122092
aatggaatcattggcttcatttttagcagacatggatgagccagcacatggtgacagttgccaagccaaagcctgagccaaatgacagtggcggcattggtgtggatgcctcagatggttctgatgaagaattcagttcagcaccaacagggaaaactacagatgctgccgagctgccagccatgtcgaa

SEQ ID NO: 56119 - DNA, 316 bp, Setaria italica
  Peptide Sequence Number=SeqID_122093
gaaagaggttaacagtcatcaccggtacatctaactgtgccccaagacagacagcagcatcaagttgtccaacaagtaccgtacatcaaaagattaaactatacagagtagcccttttttccctaccatattgcaagtcagaaacatctgagaatacattataaagttttgactccaacattccatgagctctttctatctaccacattcaactattgtacatagtcttcagcgccagaagcaatccaaatttatgtaagcgtactgaagatcaaggttaaccaaattcctagcctaaacggagcccccactgctg

SEQ ID NO: 56120 - DNA, 442 bp, Setaria italica
  Peptide Sequence Number=SeqID_122094
gcgagaagtacatcctggcgtgcgaactaccgtggcgctcatggtgcggccgaggttccacgacttcttctcccggggcctggcgccgctgcggcactactggcccgtggtccgcgaccgcggcatcgccatgtgccgctccatcaagttcgccgtggactggggcaacgcccacacggacaaggtatttcatttctctcccggcctgcgccaatccaccaacaaaacacgatcgggttcgggaccgggaccaaacgttgttcttgtctttgccgtgccctgcaggcgagggagatcggcgggaacgcgagccgggttcgtccgggaggacctggcgatggatcgcgtctacgactacatgttccacctcctgtcagagtacgcgaggctgctgcggtacaggcccgcggtgccgcgcggcgccgcggaggtgaccgtcgag

SEQ ID NO: 56121 - DNA, 249 bp, Setaria italica
  misc_feature (6)..(6): n is a, c, g, or t
  Peptide Sequence Number=SeqID_122095
cggtgntcccagacgcagtaccacaaggcctgcatcaccttctgcaacaagtgctgcgccacctgcctctgcgtgccccccgggttctacggcaacaagggcgcctgcccctgctacaacaactggaagaccaaggaaggagggcccaagtgcccctagatcaggatgagattctatttctagtattccccgtccggtctatttgttctttacccgttcttagttctaggccggcttactgatccgtgc

SEQ ID NO: 56122 - DNA, 271 bp, Setaria italica
  Peptide Sequence Number=SeqID_122096
ccaccatggcctcctccgtcgcggcgtccctccgcgccctcgcttccgccagcacctccgcctccttcgagtcctccgtcggcgtcgactacgcggagccggccgccgccgacggggccgagtcggagcaggaggaggcgttcgcgtcgggggaggaggaggaggaggacgctgccgtcgaggaggaggaggaggtcggggagtacgtcgagccgccagaggaggccaaggtctacgtcggcaacctgccctacgacgtcgacagcgagcg

SEQ ID NO: 56123 - DNA, 277 bp, Setaria italica
  Peptide Sequence Number=SeqID_122097
aaggggggcgggagaggcttctccgggagggggaggggaggcgggaggagacaactggagagcgggaggaggcggaggcggaggacgggaaggaggcaggggccggattggaattaaagcagctcctagaggctctcgtgtggaaagagaaagatctcccagacaatttgggccttctttcaggatttatgtgggcaacctgccatggcaagtggatgactctaaattggtgcagttgttcagcgagcatggtaaagtagttgacgcccgagttgta

SEQ ID NO: 56124 - DNA, 353 bp, Setaria italica
  Peptide Sequence Number=SeqID_122098
cgcgttttggccgttgctgcaaccaccgcgatccataatccaagagagagtcgaagagcaaggtttgccatggcgagcgagcacgcggagccgaagcagaagcagagcctgatggataaggccaaggagttcgtggtggacaagatcgcgcacatccccaagccggaggcgtcgctggacagcgtctccttcaagagcatgagccgcgagtgcatcaccctgcacagcaacgtcaacatctccaacccctacgaccaccgcctccccatctgcgaggtcacctacaaccctcaaagtagcgaccggaaaaggtacgttagacgtaccggacaaccaattagacccgaacccca

SEQ ID NO: 56125 - DNA, 289 bp, Setaria italica
  misc_feature (84)..(84): n is a, c, g, or t
  Peptide Sequence Number=SeqID_122099
tcgattaattatcttgcatttgtcaaacctacagtatttatggctgaagcagtggaaggcagacagcataaacagagggatganaaaaggggaggagcaaagttgagcaagagatgacctttttagcacgcttcatatctcccagtagctcgttagtgttcatcttctgatgtccagaaagcacatttgctttgattgtgctaattacattaagtttatggcctgaatttatagacatatcagatgatgggaatcttattctacatcccttcttgtttgatggacttta

SEQ ID NO: 56126 - DNA, 181 bp, Setaria italica
  Peptide Sequence Number=SeqID_122100
ctttgaagcatcttttagactcccagcaaaatacttctgaaggacactcaagctaatattcttctccattgaggtgctcgttttctccccatgtgaagtagtgctaggtttcaactacaaaaagaaaggcgtaccgattagattacttcttaagttggttaaatttcgtacttattattct

SEQ ID NO: 56127 - DNA, 463 bp, Setaria italica
  Peptide Sequence Number=SeqID_122101
gagagagacagtcttctacagatgacatccgactccgaggttgaggttccttgtgcccatgatgtgaaaagttcacactcttgtgaagccagtgcagtggaggaagacttgcaagaagatgcagcttgtgaacagcccgttcttccttcccctgaggcgatcaaggaatctgaaagaaaggttgaggcggagcttaatgttacagacacccacgatacatcctcgacgtgtcctggtacagatggccatcctgatagcagaactgatggggatcggatggaagagaaggaaagcttattgacgaaatgggcatcccagcatgttcccatacttgttaaagaagattcatgtttaaaagctgcagcaagtgatgagctacctcagactcgtggtgaaactgaaccatctcagagcacaaatgaaggcaacactgacccattcagatctcagttcacaatactag

SEQ ID NO: 56128 - DNA, 355 bp, Setaria italica
  Peptide Sequence Number=SeqID_122102
gaaagaaggccatctctaagcactcagattagcatgaacgaagcctacaggcttgccattggcagcaagagtagcttgccatccctaccttgacggatgtgatcctcgggaaggactctacttctagcataacgaagaattaaggttactgttatcacagctctcagcttccaggggggctcgaggcaccatgggtcgatccaggccctagcccccgtgcatatggacgtggtgatgagctggtagtgcagaacattaccaaaagaatttcactggagagagtattgttcttatttccggttttggtaattcttctttagttacggttaagttcttattttgttttagttcgtta

SEQ ID NO: 56129 - DNA, 217 bp, Setaria italica
  Peptide Sequence Number=SeqID_122103
aagactgtctctctcatgagatgtataatcactctggtgataaatatctctaggttccaaagactcatgcacttgaccagctacagaataatccgtgtaaatctttggccagtcttcacagattggagcaaccgttctgaagatttgacccaccattggagatgggtacaagggtgccaatcttacgccgagtatcgagcgcactgtccacagcatt

SEQ ID NO: 56130 - DNA, 184 bp, Setaria italica
  misc_feature (145)..(145): n is a, c, g, or t
  Peptide Sequence Number=SeqID_122104
ctggtcaagtgcatgagtatgttctagttctgcaatctttctatagggaattgatctgcaaaactcacaagtcagagatttcatccttggccttctgccacctccaccagaagcttgcaagcgcccaaagtctgtgcgaagggtnctgtgagaaaacagcgatgatgagatagcagatgagcct

SEQ ID NO: 56131 - DNA, 113 bp, Setaria italica
  Peptide Sequence Number=SeqID_122105
cttgaagaagagaggaatgcctcggccattgctgcgagtcaggcattggctatgatcaccaagttccctgcagagcaggtgtatcgattttcgatcaagatcaacctgtcgtc

SEQ ID NO: 56132 - DNA, 182 bp, Setaria italica
  Peptide Sequence Number=SeqID_122106
caaacatacttgtcgatcctaatggtgatatccctatgcactgtattccgcccttgcatacttgcatgggcggaatacagtgcatagggatattaaaggggcaaacatacttgtcgatcctaatggtgatatccctatgcactgtattccgcccatgcaagtatgcaaggccagaaagaatt

SEQ ID NO: 56133 - DNA, 250 bp, Setaria italica
  misc_feature (19)..(19): n is a, c, g, or t
  Peptide Sequence Number=SeqID_122107
tttaaatttcttatctacncttttctactgaacaggcaccaacaaaaatcttcatgtgacctttcaggttattatgaatagtaatggctacagcctttcagtagatatttggagccttggctgcaccattcttgagatggcaacagccaaacctccttggagtcagtatgaaggggtggctgcaatatttaaaattgggaacagcaaagacatacctgatatcccagatcatctttcttctgaggcgaaa

SEQ ID NO: 56134 - DNA, 224 bp, Setaria italica
  Peptide Sequence Number=SeqID_122108
cgccgtccgcgccggcatcggcctcggcctccgcgtcggcgtcggcttccagcggcggcggctcctcgctggggtcctcggcggcgtccgacgagcagctggatctcggggtttacaggttatcagaaacaagcagcactcttccgggcagagcagtagcaaatgaatctcggaaacagagccatgtgttaacagaagggcgtattttcacaaataatcaggct

SEQ ID NO: 56135 - DNA, 340 bp, Setaria italica
  Peptide Sequence Number=SeqID_122109
cacaacactatgtatatttgttctgaagcaatctcctggttttggtggcaatagtgtggtaagatgtccatgagtacatgtttctctttacctttttccttctatcatattcctttcaataaacttttccaaagcaccttctactcatgtttcatatcacaaattaaaaatcaattaatcttcctataggtagtaacgttgtaacctcttctgaggctctccttccctttgttttcgtgtaatgcacttcatcaactaggatactttagctttgagaaattgtagaagatgctgcaaagcataatctttatcttgtattcttgtgtcatgtaataatgag

SEQ ID NO: 56136 - DNA, 230 bp, Setaria italica
  Peptide Sequence Number=SeqID_122110
tcctggcagctgctgggtgatgggtgctttcctctagtgaacaatgtaacctgatggccctccttgacaaggagcctggacaggaagacaccaatgaacctggttccccccatgacaagaatgttcttggagtccgcagccgccgagacctgaatcctcgcccctctcggctgccatgacctcctgcggcgtgaactggacgtcgatcaggccgtagatgtaacaacgaa

SEQ ID NO: 56137 - DNA, 216 bp, Setaria italica
  Peptide Sequence Number=SeqID_122111
cttgagttgttgctaaaatctccagagtgtcttgtagcggaactggccacaagagaacacgacgctatggagggttcagggcaaatattagaatcatcttcctgggctacattcaggtcgatacacatgcgtccagaaacaccatcctttgctctcacaggtggagaactgtctggagaatcactagaaccagctaaaccagaagtaatatacgga

SEQ ID NO: 56138 - DNA, 418 bp, Setaria italica
  Peptide Sequence Number=SeqID_122112
cggcatttcaggccacgtgattgcggtagcaatgcacaaagtgatgggctggaggcttcagtgggcgatcatgaatcaggtactcagacaaacggggagagactttcagtgtctcgtggaaggaaatgggaagcttgcaaaggggaaaccagcttcttgatgaaagtacaggttgctaacttgatttttatctcattggcatattttgcccgaatggtcaaaattctgctgtaattgtctgaaattctttattgactgaacattttctttactaagtatcacagctgctcaaacttaaggtgtcctaattagctatgcagctagttcacaatttaatatagtccatctatgctagctttccattgacatgtactgagattcctcaatcaatgccataaaaattcattcatatcatcat

SEQ ID NO: 56139 - DNA, 269 bp, Setaria italica
  misc_feature (194)..(194): n is a, c, g, or t
  misc_feature (237)..(237): n is a, c, g, or t
  Peptide Sequence Number=SeqID_122113
ttttttttcttacatcgttttgttagccgatttctacacatggtaaataaaatgtttcatttgattcgttgacagggaaatcgaattctgaacatgatgtcggcagggtggacagatgagaggcacatgttgtatataagctctaatggaggcttctttcgttgatcaactatacaatcacagacaccgtccgnataatacaaatggcaatggcttcaaggttctccgcagggggtntgtgggagtacatcaagtacgagaagactaat

SEQ ID NO: 56140 - DNA, 335 bp, Setaria italica
  Peptide Sequence Number=SeqID_122114
tatccaagaccagtggcacaattattgaactccataaataatactcctttttcagaagatctaacttgttcttcaattatttttttgttctcctatcaccggatttttctgcaaacttggaaacaacattcttcccaccggtagtagtgaaaattcctaacggcctattcacggcttcaatctcttctttgcaggcatcaatcaaatgccttaaaaaagcatcaccccaatctaccttgtcacccattcttcaaccaaccaaaaataaatcataagaattctgtaaagctgtagctgcatgtagtgagtatgtagtgaagagtaatgaagagcgg

SEQ ID NO: 56141 - DNA, 260 bp, Setaria italica
  Peptide Sequence Number=SeqID_122115
ctgtcaccagatttttctgcaaacttggaaataatattcttccaaccggtaatgctgaaaattcccaacaacctattcccaacttcaatctcttctttgcaggcatcaatcaaatgccttaaaaaagcatcaccccaatctgccttgtcacccattgtttaggtaggcttcttgttgacctccatgacaccatggatccatcacggcaacccgtcaccgctggattcggccgtccgagctcgcctacgctccaccgcgcg

SEQ ID NO: 56142 - DNA, 192 bp, Setaria italica
  Peptide Sequence Number=SeqID_122116
tcttagtgttgacattgaacaaaatagttctatcacgagctgcgaaacagtaactgcaagagatgaaacatttcttgatcttagtgttgacattgaacaaaatagttctatcacgagctgcctgaaaaactgcagcatttgtcacagaagaatttatcctctgcatttaaagtctctgtagagcagaagttt

SEQ ID NO: 56143 - DNA, 162 bp, Setaria italica
  Peptide Sequence Number=SeqID_122117
gtgcatttcagagtctggaagacctcctcgacggggatgttctccagatcgacggcctcattcttgatctcctcgagccccgccatctgagctgctgctggcgcaaccgccgccgcagccgcgggagggagggacgacgacgaacgctggaggcagcagtaa

SEQ ID NO: 56144 - DNA, 331 bp, Setaria italica
  Peptide Sequence Number=SeqID_122118
ttgtaggaagtcttgaaattgacaatgtaggaggatggcggtacatgtttggttttggcgctccgcttgcagctatcatggctattggtatgtggactttaccaccttcaccaaaatggttacttctcagggcagttcaaggaaaggggtctatggaggataataaaagaaggcaattcaagcccttagaacgttgaggggccgctcaaacaagtgaaaaggttttagcagatgatgttgaagataccattgtctctattaaggcagtccttattgtctaggtactaggtaaggttgtaagggttaatttattttgggttaggtttatttt

SEQ ID NO: 56145 - DNA, 235 bp, Setaria italica
  Peptide Sequence Number=SeqID_122119
cggcggatggacgccctccgcgtgacgggagccgccgagccgctcctccgcccctccgtcgggggacaccccaggctccgcgtgcggacccatgcgcagggcgagggcgatgccgggcgtggcgccgccgcggagggggacgcggccttctcgtgggcacccgtcatactcccgttcttgttccctgcattgggcggtctccttttcggctatgacattggcgcaacctctggag

SEQ ID NO: 56146 - DNA, 387 bp, Setaria italica
  Peptide Sequence Number=SeqID_122120
atgaagatcaaatttcaatgtaaagctgccaactgaagacttttttagtatcaggtcatgtaagcaatgcattattatttaccgcaataatgtcatcagcagataatcctgcaagctgcatcagctttgcacctttctcacttccaaacttctttgggttgattgaagcataaatcattagcaaacgcaacttattttcacgatttacatccaagcgtgttcgtaagaaattgattagttcttgtgtttggtgatgctgggacaaaagaactaatcaatttcttacgaacacgcttggatgtaagaaattgattagttcttttgtcccagcatcaccaaacacaagatcttgctcaagctgcccaacgtctttaagatgttgttctt

SEQ ID NO: 56147 - DNA, 240 bp, Setaria italica
  Peptide Sequence Number=SeqID_122121
gcagtcgattccctcccttccttccttccttgcaaaacaaactaaccaagataccaagaagaagaagaaaaggagggaatcgactgcacaatcaagtgtagcgatggagcataatcttttattagccgttcgttgttggattattacaagtcgtagcagcagccaccctgcaatagacaggcagacaggcagacacatagagtacattaatcacacctgttacagtgctacgactgtcta

SEQ ID NO: 56148 - DNA, 457 bp, Setaria italica
  Peptide Sequence Number=SeqID_122122
gggcctgaagagcaccaaagaaacaaagtggagaagctgatgtatcttggttttctaaggaatttgcaaggatgcagcttcaatggcaatattccaaaagagataggaaatttaacccagctcaccttcctgtaagaattccctccagcttggatggagatcctcaatggacacggttctgtacataatgcaaattcaattaactaattgtttcatgcagggccctaaactcaaataatttcactggtggaattccagcaacacctggccatctctcaaatcttttcttattgaatttgacagcaaatcagctgtcaggacaaatcccagtttcaacaagttcaacttcagggttggatcaacttgttggcacaaagcatttgtaagttctcaaatgttgtacacctctaggatataaataaataacgaaaaattagatgttcaaatttgactggaa

SEQ ID NO: 56149 - DNA, 186 bp, Setaria italica
  Peptide Sequence Number=SeqID_122123
tagccaaacaaactctcaagatggtaagccttctggatttcaacgggttacaggacgaatgctgcctccctatttggggttatttatttactcattgagtggatgttgctcttcctgtaagaattccctccagcttggatggagatcctcaatggacacggttctgtacataatgcaaattcaatt

SEQ ID NO: 56150 - DNA, 272 bp, Setaria italica
  Peptide Sequence Number=SeqID_122124
ggtggtggagccggcggaggtggcggccttggtggcggtggaggcggaggcatgggtggcggtggaggtggtgggcttggtggcggtaaaggtggaggtctcgagttcttcgacaaccccaccgtgccccgcgaggagaagacccagctcatcgacgagatcgccaagtcgtccgagctgcagccccacgtcgtcaacttcctcaacgtcgtcgtcgacaacttccgcgcggccatcgtgccgcagatcgtcgccgagttcgagaacgtcta

SEQ ID NO: 56151 - DNA, 259 bp, Setaria italica
  Peptide Sequence Number=SeqID_122125
aaaggtttagctttaattatgaactacaatctgtcatatttattgaagtcctgaattttgtatttctttgacatcttccataatgtgtaacaggtaaaattctggtaacacgctagcagttgcatggtagcacctatcagttgtgcataggcttttgacaattaacataagagaaactatcatcgaagcaatgaagttatctcttcagaagttcttcagtggtggaacctcgaggcgaaacagggtctcctgccgcccc

SEQ ID NO: 56152 - DNA, 270 bp, Setaria italica
  Peptide Sequence Number=SeqID_122126
agtttagaatagaaactaagaagaagtttgtagcttctagttcagctttgaatcattcagaggttctttagagttagttctctgactattgcatatactttgcactgacctatcaataggctaaggacagcaaattgaagaatggaatggaggttgaggatagtgaagaagagcacgttcaattgagcactgctgaccgaacctctctggccaaggaccttcctggtgcattgtcattgaaagctcaagctttaatcgaagcattggagg

SEQ ID NO: 56153 - DNA, 240 bp, Setaria italica
  Peptide Sequence Number=SeqID_122127
ttcggtctgatgtgcaatcttcttcctacaggacaaaggcacggtacaagttcatgcttttacttcgtccccgtccaagaagattgttaattgttcaaacatcatgctcatgaacgataaagcatgcatcctatcttaatatttcgtaggcatataataaggcacttcaggcaccaggccgtgctgttggtgctgttatcacactgctgaaggtagttacaagtactctgacttccattt

SEQ ID NO: 56154 - DNA, 232 bp, Setaria italica
  Peptide Sequence Number=SeqID_122128
accaataaaagatgagtttgctgtcttggtatataaatgaagctgcttaacaccaaatatcagctggaatttatgctccgttctaaccttctatgtataattcgtggcagagatttgattcatttatggatgccttaagagatatactggaggaaaggttaacacttaatgtttgctactgtaacccgtatttcttaattatactaaaataaaaaagtaaaaaaagaaaaaa

SEQ ID NO: 56155 - DNA, 204 bp, Setaria italica
  Peptide Sequence Number=SeqID_122129
tctcttgcattttcacagtttggaagagagaaaagcagaactgacccgctgattgtaagaatccttgtttgtactaccgtattcattcctgcactccaggggttctatagtgacccgctgattgtaagaatccttgtttgtactaccgtattcattcctgcactccaggggttctatagtgacaacagaattattcttcattac

SEQ ID NO: 56156 - DNA, 362 bp, Setaria italica
  Peptide Sequence Number=SeqID_122130
gtttgctgtcttggtatataaatgaagctgcttaacaccaaatatcagctggaatttatgctccgttctaaccttctatgtataattcgtggcagagatttgattcatttatggatgccttaagagatatactggaggaaagtggcttgacatttaagaagcttgataaaagattagagaggtcaatgctgcattcctatcgcaaggacttgacagctcaagtttcttcggagaatgatcccgttcctttcttccaaaagtcgttgctttactttttctgcaggcatataataaggcacttcaggcaccaggccgtgctgttggtgctgttatcacactgctgaaggataagctgccagctt

SEQ ID NO: 56157 - DNA, 215 bp, Setaria italica
  Peptide Sequence Number=SeqID_122131
aaaccagggaaaaactaagcaggaaaagaacatcagtacagaataataccactatggttggtgcccagagaaaccaaaaggctgagatagcaaaatggatgcctgcttgagctaataccaggatcagtactcttttgtctgaaacacaataactgtggtcagaaatggaaatggaacatgtaagcactgaaaacttgacctggaacagaagtaac

SEQ ID NO: 56158 - DNA, 392 bp, Setaria italica
  Peptide Sequence Number=SeqID_122132
tgtcttccctatttggtattgttggtcttagtaaaagttttttgtagtaagtaaactaaggtcctaacttttgtattaagtaaggtagagcacaagccctcatcatcctgagtcttagccttctttgagcttgtgctctccttcttatcaaagttggctaagactcaggatgatgagggctctgacaagtcaaagtctgaagttgatgatgaggatggtggcagcgacgaggaaaatgaggaagatgagtaaatagagtctccatggtcatgaggtagcaaatggtgtgttaggtccccgattagcttactggtttgctatctttaatattaagttctctggaacaggtttgtatgatggggatctattagacttgtgtttcattgaggttg

SEQ ID NO: 56159 - DNA, 223 bp, Setaria italica
  Peptide Sequence Number=SeqID_122133
aagactcaggatgatgagggctctccttcttatcaaagttggccttgttcttctcatagtcctgctatgtcagaggaagagaagcaaccatacgtggaccaggctgggcagaagaagcaggactatgagaagaacaaggccaactttgataagaaggagagcacaagctcaaagaaggctaagactcaggatgatggagggctctgacaagtacaaagtctag

SEQ ID NO: 56160 - DNA, 263 bp, Setaria italica
  Peptide Sequence Number=SeqID_122134
tcaaacaaaactacttgaaacataagaagaaactaggtaaggtatcaagctcttgctaagctactaatcatcagcatacctgcttagccttcttaatagccaaatcagaaacgtccaaaccgacaacaaatcgttcagggcatgccagagcaaccacatcgtataccattccacatccaggaaccaaagctcttcctttcgggagtgtccctgatctaacaagatgttctatgactggtgttggcttcccaaatcccacgggg

SEQ ID NO: 56161 - DNA, 405 bp, Setaria italica
  Peptide Sequence Number=SeqID_122135
tctttcagaaatatactcagagctgactactgctattcaatatgtaaactgaataataaaagatgtttatttttctctaacaaatattggaaattagttttagatggtactccagctggtccggtaatataagatagaaaaaatattaagcacataaagtatttagtttttttgaattcttctaaattcgatttaaaataaaagatagacacctgcaacatagaaaccccagcaccaaagctcttcatcctaatttggatcagagcaagaatctgggtatacgtctctattgctttcctaaattgcccctgggcaatctgaattttggctttagtttgcaacagatctccttgagaccacttcccagcctgatctagccgcagcattcacgatgcactcagcatc

SEQ ID NO: 56162 - DNA, 395 bp, Setaria italica
  Peptide Sequence Number=SeqID_122136
cgccagaagacccgagtaccttggcgatttctgctggtttcagggcaccctgaatgtcctgcttgtttgcaaacaccaacaacgaagctccggctagtctctgcaatcaagattacggcacacaagacaagcgcgattgcaagagtcattgatggtgaacagtaagtcaatgaacatcgcatcattttcaggcgactttagacttctgagccaacaaaagtgatcagcgtgaagctaactgttagcatcgctgactagatgatgcacctcttctttcagtagattgtggagctctgctcgacagtcatcaagcctcggatgtcagagctgcaaccaccaaccaggccgtcagtctgctcgaagtaattcctccagtaatgagcggatcgtcttct

SEQ ID NO: 56163 - DNA, 367 bp, Setaria italica
  misc_feature (1)..(27): n is a, c, g, or t
  Peptide Sequence Number=SeqID_122137
nnnnnnnnnnnnnnnnnnnnnnnnnnngtacaaaaacctgtctgcatccatgttatttgtagtgccacaactttgcaacgacatacatatcgactaaacaaaaccgccaaaattgatcagcaacacgctcaagaacaaatttgtttacgagtttactaaccacagcctaacctagttggaggatgtcgatgaaatcttgctggtaaggagaacaagcagggctaccgttgcagcaaagctcagggccaagccgcaccacagaatcgtgtcaacatttaaccctctcctagtttacaaagtttctaccttgtcttgtttccttgttccttaccgtattcgttgttttacttagttcttacttgttctt

SEQ ID NO: 56164 - DNA, 256 bp, Setaria italica
  Peptide Sequence Number=SeqID_122138
aatcgcccgagcaccacagctccgccgccgccgccgccatgggtaaggttcacggatcgctggcccgcgctgggaaggtgcgtgggcagacgccgaaggtggcgaagcaggacaagaagaagaaaccccgcggccgcgcccacaagcgcatgcagtacaaccgccggttcgtcaccgccgtcgtcggattcggcaagaagcgcggccccaactcctccgagaagtagatctagctaggccagccgcctgattcata

SEQ ID NO: 56165 - DNA, 392 bp, Setaria italica
  misc_feature (51)..(51): n is a, c, g, or t
  Peptide Sequence Number=SeqID_122139
tgctgtacaggtgactgagctgttgcagtgtatccaacaggcatgtcattncgattcttgaacatacgtactaaagattcagacgttggattgtcaaaatcatcttctgacaatgcaagatcatcctctccaccattcataggagattttatcaacatctttgagatctggagcttcctccctctccccaggcgccgcataaaatcagaatgagcaggagacttctccaattcctcttcaagctctgggattccctccttctcacgaagacgcctgatatcatcagcattctcaaagtcatgagcaagttccttctcatcatgaaatgagatctggttttcaacctgttgagaaccagatctcatttcatgatgagaaggaacttgctcatg

SEQ ID NO: 56166 - DNA, 241 bp, Setaria italica
  Peptide Sequence Number=SeqID_122140
ttctaatgtcgaaacctctaaatcttgatgctggaacttcatcccctctgctggagtttgcactgtcttgattatgactactaggtgacgctgattctgtttcacagtcacctcttgcctctgcatttagtttatcaatggatggattgaaattttggaatgacattcgaccctttacagctcctggatgtggattgccctccatgataactatgcacttcctagcgacctgagccgaaag

SEQ ID NO: 56167 - DNA, 492 bp, Setaria italica
  Peptide Sequence Number=SeqID_122141
aagtgcaagagcaagcagatcttcaagtgtagttgacaaaacagatgtcaaaagagaagctgacaatccagcaacgcctagtcctccaaatgttccaaaagccacttctcggatttcttcttcaaaaaccttagcagtagaactggcgtcaaagccatccagtgcctttacagtgagtttctctccttcattaacaagtccatttggatctgacaggaccctttcttcctgagcaaccagtgcagcccatcttttgtggaaacattccaaatacaaatttgcttcacgtgtattgcttgaacttagccatgttgaatattcacccagtatattccccttttgaagcaattttggagaactcacatattttgcacatattatcacaaaattacacttttagctaaagctgttaatttggacattgattgacatcctaggccacagcatcatcaaaagctggagtcagaatgtcattctgaacaaatgacgtgg

SEQ ID NO: 56168 - DNA, 414 bp, Setaria italica
  Peptide Sequence Number=SeqID_122142
aagattttggatttcaactttcaaagtttggagcttacgctcaacagcagacagttcaccctgaacaccctgcaaccaatctattttttgctgacatgcttcctggtacggtttgctgataacctcaacaaaacggactaggttattagcactctgtgagatatccttttggatagcttcatcaactttccgagacaattcatcggcagccttgttaaccttctctattgcaagcttccgtcgaccagggaaacttgataaaacaataaacctgaaaaggacaatcagtccttgtatcaatatggatatggtttatggttacacaccactcttcccatttcattgtcaacggactcgctaaagaataaattccaattatcaattaagaattacccgccagctgagcaaagtgca

SEQ ID NO: 56169 - DNA, 376 bp, Setaria italica
  Peptide Sequence Number=SeqID_122143
agcaagaaagaacctgaaatcataactgttatgatccccaagacaacgcatgctaagaatctctgatagtgctctgcattgtgaatctgaatcgcagatgacatggagaagaactctcacctcaaggacctgcaggcacttggccctttggaggtcttccgcgccgacttggatgaagaaggcagctttgacgaggctgtcgccggctgcgactacgccttcctcgtcgccgctccggtgaacatccacacgaagaatcctgaggtgcgcagacgtccacagcacgtgtatggcggttcctcatttgtcttgtacttggtgacacggcatctgttaccttcattcgtctttccttcgtatttgggttaacggtctt

SEQ ID NO: 56170 - DNA, 397 bp, Setaria italica
  Peptide Sequence Number=SeqID_122144
aagacgaacgactacaaaaggaaatacgaagaaggaacctaccggacgacgactagacagctggtccacgtcgacgacctctgccgcgccgaggtgttcgtcgccgaggaggcggcggccgcgggtaggtacgtctgctgcgccctcaacacgaccgtcgtcgagctcgcgcgtttcctggcacggaagtacccgcagtacggcgtgaagacagacttcaccgacgatgatcagctcctggagaagccgagagtgagcgtgtcgtctgccaagctggttagggaagggttcgagttcaagtacaggaccctggacgagatatacgacgacgtcgtcgagtacggcagggcactcggaattctgccctactgatgatgatgatgctctgctcccgaca

SEQ ID NO: 56171 - DNA, 348 bp, Setaria italica
  Peptide Sequence Number=SeqID_122145
gttcgtcgccgaggaggcggcggccgcggggaggtacgtctgctgcgccctcaacacgaccgtcgtcgagctcgcgcgttcctggcacggaagtacccgcagtacggcgtgaagacagacttcaccgacgatgatcagctcctggagaagccgagagtgagcgtgtcgtctgccaagctggttagggaagggttcgagttcaagtacaggaccctggacgagatatacgacgacgtcgtcgagtacggcagggcactcggaattctgccctactgatgatgatgatgctctgctcccgacagattgtactcatgctagtcatgctctacaaaaagattgttcaagatt

SEQ ID NO: 56172 - DNA, 263 bp, Setaria italica
  Peptide Sequence Number=SeqID_122146
tggagaccgggtaaccccagaaagcagtcttgttggctctgaggtactcgacgttggaccaggtgctctcggaggaggcggcgtgcaggttcgcggaggagcacggcatcagcctcgtcaccgtctgccccgtcgtcaccgtcggtgcggcgccgtcgccgaccgcccgcaccagcgtcccgaactgcctctcctttctgtccggcgacgaggcagagttcgccgtgctgagaggcatggagaaggagtccggcacggtgccg

SEQ ID NO: 56173 - DNA, 315 bp, Setaria italica
  Peptide Sequence Number=SeqID_122147
gtagtcgttgttgagcttgggatcaacacactgcttcactttatcttcactcaaccttggagtggcctactcgcgcgattgttaagacattcagagtcatcaggagattggcattctgcatatgagtttcaagaaggggatgaacaaaagatattacccaagtaacaagactttgctgccctttcggcatggtgtgatcgaccggtttccttcctgtcagtagctctaggagaatcacaccaaaaactgtatacatcactcttttggttgatttggcccgtcatagcatattctggggcatggtatccaaacgtt

SEQ ID NO: 56174 - DNA, 258 bp, Setaria italica
  Peptide Sequence Number=SeqID_122148
cagactcacataatcacacttgaacattcacttggcaatcccatcatggctaaccaacatctttatttgtttcttttcttacacgactcaatccgaaccaattcgcttagcggcagcggcagcgtaagcggcgaggagcttattggcgtactgcacggccacgtccacctccggcaccactttcttcacctccgcactttccccgaaccgctccgcccacgctgccaagaggggaaccttgtttgcgctaatgatctc

SEQ ID NO: 56175 - DNA, 192 bp, Setaria italica
  Peptide Sequence Number=SeqID_122149
tcgacatactggtagctgaggcccttaaagccgagtgcgagcttcacccgtagggcgaacgggctcgcccacatcccgagcagcttcagctcatcacctcctccggccattctctgctttgtgtttgaacaatctcttggcttctctgtctgctttgctctcttgattgagagcaagaagactatatacttg

SEQ ID NO: 56176 - DNA, 237 bp, Setaria italica
  Peptide Sequence Number=SeqID_122150
ctggaaaaaaaagaacatacatgctcgccgtcatcaacccgacttggtggccaagagctcatcagccagacaataacacagggcatttaaggcgacagagagggttccagcagatgaaagctcacctctcttgagacggctgcaacgtgccggcgcgcgtggggaagagctgcatggtcctgccgtccgtgtcctcatccttctccgtcgtcgtctccaccagaggcggcagccgga

SEQ ID NO: 56177 - DNA, 384 bp, Setaria italica
  Peptide Sequence Number=SeqID_122151
aataggaagtaaataggaactaaataggactgttgaactaaacaaaaacaactagaattacctaacagttcaaggatccttgcagtaattctctacaacaggtggctaacggatcacaaagttcttatgataatgctggagcatttctcttctaattttcaaagtttggtcaacatcatacaatcatacagaacttatgaacaacaagaacatgaaactaccaagaaaacttccactcctgatattggtaaatgatgctctgctatacttatttttcagtgggtcttgggatcggcttgtagtcgtagctgttgatgtcaaccttttgctgcaaagccttcagttcatcctctagagagagcttcttgggcttataggcccctt

SEQ ID NO: 56178 - DNA, 300 bp, Setaria italica
  Peptide Sequence Number=SeqID_122152
ctcctgccctgtataagatgcgccagcccaactgcaccaaacactgtcaaggaaatgagtggtaacccataacgaacaaatggatgttttcgccccatcttttgaactgtgaggcttgtttgaaaccttagcagatggttccactggatcaactttctgagtagtattcatgatcggctctggctagtaagaaggaagtcaatgaaagggagccaacaaaatgatattgtagatattacagaaggtggatgtcttactgcatagtaagttgcactgtcatagagaaccccacaatcattc

SEQ ID NO: 56179 - DNA, 414 bp, Setaria italica
  Peptide Sequence Number=SeqID_122153
tgactaatcgtgcacattctaggttgtttagcatgtcataacaatctacagtgtaccgctcagaaactcaactgacccataccactactatggaacattaatcaaggtgaagatgcaatctaacaaacaatcacattcaccacacactgacgatttcagcaattagagaacagtggcgactgactccaaaatgacccggcaatttaaaatgtatcagcataaacacgactacaagactgactccaaaatgacccggcaatttaaaatgtatcagcataaacacgactacaagcaaactcatgtaaactacctctggaatatccacacggacaacagaaaggaactttgagaagcgcagcctgtgcaggacattgtcgaagatggccaagtagaccgtgaccgtcttatcgccgc

SEQ ID NO: 56180 - DNA, 249 bp, Setaria italica
  Peptide Sequence Number=SeqID_122154
gtcgctgagctcgtgttcgtgagcgtggcagggggtgtcggggtgtgctcgtggcgcgcgcacgagctggttgtgtttgaggaaatgcctccgagtgcgtggggggacaagggggatgcgcttatgtttttctgcttctctgatttggtgagtactttacttttccagaggcctctgcaaggagttggtcaaagggtggtcatcgctggacagctcctgcttctccatcgagacggtgtctggcggcat

SEQ ID NO: 56181 - DNA, 245 bp, Setaria italica
  Peptide Sequence Number=SeqID_122155
ccgcggtggccgcgggggcgccggcggacgtgcccacgtctgcggcctccgtcgacataaccctgccgctcccggagatgacgcctcgcatcataggcctctgcaaggagttggtcaaagggtggtcatcgctggacagctcctgcttctccatcgagacggtgtctggcggcatcacgaatctattgctgaaggtgtctgtcaaagaagacactgacaatgagttttctgtgactgttcggttg

SEQ ID NO: 56182 - DNA, 256 bp, Setaria italica
  Peptide Sequence Number=SeqID_122156
ccgcgagggaggagctgcggcaggccgtggtgaacaccctggagcggaagctgttctacataccctccttcaagatctaccgcggggtggccggtctctacgactacgggccgcctgggtgccgcgtcaaggccaacgtcctttccttctggcgccagcactttgttttggaagagaacatgttggaggttgactgcccctgtgtcacacctgagatcgtcttgaaggcatcaggccatgttgagaagtttactga

SEQ ID NO: 56183 - DNA, 258 bp, Setaria italica
  misc_feature (222)..(222): n is a, c, g, or t
  misc_feature (239)..(239): n is a, c, g, or t
  Peptide Sequence Number=SeqID_122157
gcggcaggccgtggtgaacaccctggagcggaagctgttctacataccctccttcaagatctaccgcggggtggccggtctctacgactacgggccgcctgggtgccgcgtcaaggccaacgtcctttccttctggcgccagagaacatgttggaggttgactgcccctgtgtcacacctgagatcgtcttgaaggcatcaggccatgttgagaagtttacngacctcatggttaaagntgagaagacaggcacatcg

SEQ ID NO: 56184 - DNA, 177 bp, Setaria italica
  misc_feature (24)..(24): n is a, c, g, or t
  Peptide Sequence Number=SeqID_122158
accggtaccggcccggtccgtggngccgcgtcaaggccaacgtcctttccttctggcgccagcactttgttttggaagagaacatgttggaggttgactgcccctgtcttctcatctttaaccatgaggtcagtaaacttctcaacatggcctgatgccttcaagacgatctcaggt

SEQ ID NO: 56185 - DNA, 380 bp, Setaria italica
  Peptide Sequence Number=SeqID_122159
atacaccatctttgttgacaatatccatatgacgaggagcatagtgaccacctcctatacctagtagaaccttttcactattccctgccaacttccaacagcatttccatcctccagaccaagacctttccgtagaactagagcaattgcctgtgcagcatcttgtctaccccgcacttcctggatatttatagcagtctgaaatattgaagttaacaatttcagatccgacacataagatggtagtgtagaaccaaatggtatgcctattaatgtagctgcaggattggtgcgctgagctatattgagttgagttcgcataaactcaatgcacttttagaaaaggttgatcagatggagtcaaaagactggttgcttgc

SEQ ID NO: 56186 - DNA, 310 bp, Setaria italica
  Peptide Sequence Number=SeqID_122160
ttgtacgtaggtagtctattagttgtacctaccttccttattaccttagttagtaacctttttcacttatttcccctgccaacttccaacagcatttccatcctccagaccaagacctttccgtagaactagagcaattgcctgtgcagcatcttgcctaccccagtattcttccgtacttcctatctcaacaaacatggtgggcgtgcttgtaactggtccatggtgagtagcctcaagcgtaatctcaaactctggaacaagaccttgttctgcagcaatcttttgcatcaaccggagccaaaggggt

SEQ ID NO: 56187 - DNA, 389 bp, Setaria italica
  Peptide Sequence Number=SeqID_122161
cagagcaaacatcatgaaatggaagcaaagttcattgaggaaagagctgcactagaagctaaataccagaaactttatgaaccactctactcaaagcgttatgaaattgtgaccggtgtggttgaggtagatggcatcacaaagaagtggagatgagaccatagctgaacagaaagacaagggtgttccagatttctggcttaatgcaatgaagaacaattgaaattacttggctgaggaaatccaaatgagggatgaggaagctctaaagtaccttaagaacatcaaatggtgcagaattgattgatcctaaagggtttctaagtatttgttagttttttcttatttttgttattttacttttaattttcctttttttttctttaaaa

SEQ ID NO: 56188 - DNA, 356 bp, Setaria italica
  Peptide Sequence Number=SeqID_122162
aaagcacactgaacctatcataaagactgaagactgcgagagcttctttaatttcttcaaccctcctcaagtgcctgatgacgatttcatcgatgaggataccgctgagcaattgcaggaccaaatggagcaagactacgacattggatctactatcagggacaagattattccacatgctgtttcatggttcaccggagaggctcaagatgaagactatgacgacaccattctagaggatgatgaaaataacagtgacgatgatgaaggtgatgaggaagaggaagacaacgaatgacaagtgtaagtacaaaatagatctcgcttggtattacaatgagacctccatacgtcac

SEQ ID NO: 56189 - DNA, 206 bp, Setaria italica
  Peptide Sequence Number=SeqID_122163
cttttttctctatcaacaaaattggtttgaaaacagatttctttagttgaatggctgctttaactgcaggcaggtgatgtttacaaagtttattccatcgtctagagcacatattatcattacggccgggaattatattcatagcaatcttagtacctagtctaaggtccctaaacttctagtattacttgttcttagttccttaa

SEQ ID NO: 56190 - DNA, 227 bp, Setaria italica
  Peptide Sequence Number=SeqID_122164
tgacttcgtccgggcgtgctgcgctacagatcggcgccgagcacgctgctcggcgaggtctgcgaggacttcctccagccgggccgcgcgccggcgccggcgccgcatacccacttcccggacacggccgccttggccacccagcagcagcagcaacagcagatgatgttccactcccagcagcagcagcagcagatggccgccgtcgagtccgggctgtaccgcac

SEQ ID NO: 56191 - DNA, 300 bp, Setaria italica
  Peptide Sequence Number=SeqID_122165
atacgcacaatctcccccactaggtttccttgaatcccttaaatgctgatgaatagcatcacagagttccctgtatgatatatttttgtctttaactaataatatcatcaatcaatccaggtaaattgtgtgaaacactgctatcgatcaaatcatccttggctaaaccactgtcagtgccagttgaacatataccacgaattttctgttctgatgctacattttcagctgtattcttggtactaattagtaagttacctttacgacggaaagaaagacaatagttttagaagactaaga

SEQ ID NO: 56192 - DNA, 230 bp, Setaria italica
  Peptide Sequence Number=SeqID_122166
tgctcaacaactgtgtgctgtgtttcagattttggatgttcacgacatactgaatcatattttaatttggatgaatctctttggacaattgggaaacctgcagtgtcccctagaccttcagaagcaatcaaaccaaacttcaaatatgcaggatgttgctggtgcaccagcaacatcctgcatattttaattggatgaatctctttggacaattgggaaacctgcagtgt

SEQ ID NO: 56193 - DNA, 235 bp, Setaria italica
  Peptide Sequence Number=SeqID_122167
ctgcagggtcagagaggcatagagttcagacacgaggcacacaagcgtgctactgcggctcatctaagctgtgagcgatcgggacaggatggcgtctcagctgggcgcgtacaccggcggcaaccggaggaggggccactgccgccgccgcctctcgctgccgccgtcgccatgggccgaagacctgcgaggtgctaccgccagatcaagaacaagccgtacccaagtcgaggta

SEQ ID NO: 56194 - DNA, 235 bp, Setaria italica
  Peptide Sequence Number=SeqID_122168
gttcgagcccgcgagcgccgcgaccaggtccggctgcggctcgtagaggcggagcttgccgatggacgtggacatgagcaggctggccgtcgacgccgccggcgggaggttgtccgcgatcgtcccgtagttgacgccgatgaacgactgcgacgagttgtacagccgtgagcatcatcatctggcatgcacggacaccacgacatggtggatcacctctgcttcggcgcgcggc

SEQ ID NO: 56195 - DNA, 314 bp, Setaria italica
  Peptide Sequence Number=SeqID_122169
tccgtcgtcccgtcgtctttgtcgtattggtcgtacctaagtcgggtcgtacggagggcgtccccggcgtgggcaaggtggtgcgcaaggtgcccaacgcgctctacgcctccgccatcaccctcggcgtcgtgctggtgcagaaatccaccgagggcgtcgagtgagtccgcaaagcagagcagcggcacaccgttgttgtgtgtgctgtaggctgtagccgaggcaggcgacagcagggtatctaggattgttaagttgctgctttcgaattgttcatgggatgcatattctgatgtgttttattctggttt

SEQ ID NO: 56196 - DNA, 285 bp, Setaria italica
  Peptide Sequence Number=SeqID_122170
ttgtcgtctaaggttgtccctaacgtcgtcttcttacgtccttccgtcctattctacccttcggtcgttcgttgtcttggttgcagaaatccaccgagggcgtcgagtgagtccgcaaagcagagcagcggcacaccgttgttgtgtgtgctgtaggctgtagccgaggcaggcgacagcagggtatctaggattgttaagttgctgctttcgaattgttcatgggatgcatattctgatgtgttttattctggtttgggtttgcagaattgtgtgggttcccgt

SEQ ID NO: 56197 - DNA, 316 bp, Setaria italica
  Peptide Sequence Number=SeqID_122171
ttctttgttagttaacccttaaggttatttgttaacttttggtttcctttaaagttctttgttttcttaggttttactagtaacttgtaaggtaagtcctaagtccctagtcagaaccagcataagcaaagaagatacaatacagagctgcaaagatgggtgcaggtattgatgcaaacacagctccaaatttgcccagaatagaaaagaatatcatgaaaccagctgatatctgcactacccttcggctaccaacacgtgtcaaagctagcaaaccggcattttcaactgatacagaagacccatttccagtccc

SEQ ID NO: 56198 - DNA, 433 bp, Setaria italica
  misc_feature (315)..(315): n is a, c, g, or t
  misc_feature (349)..(349): n is a, c, g, or t
  Peptide Sequence Number=SeqID_122172
aagtatttaatccttaaatgttgatagctctcatagttttctttcttgttgctagcagtaggttttgcccacctgaaatttctcattatttcatttgtacttgttattttacgatgttgagttcagagagcaaattgtggcgactaagaaatttgttaatttttgccacaaataaaagtatgttgatacatctacatttttttattcgtaacaggttacttaattcgttgactcatgcccttcaaagctcgggtgtagatttgtcccaagccagcatctctgtgcagatcaacctgggcaagcgggctgtcaagngacctgctgctggtgtatcctgcaaggaccacgntccagcatctagtgacgaaataggtcagcagctggcaatgttgggtggtggtgccgaagatctctcgcaagcagcaaagcggca

SEQ ID NO: 56199 - DNA, 250 bp, Setaria italica
  Peptide Sequence Number=SeqID_122173
attttgtgccgcctgatgtggatgcatcatccaatatcttcctctgcttgcccttgtttccttcttttgtaacattttgcgcttgtacgcatttcaagggcaggcgatagccagtttcgctgcagctgtacttttcatcattctaaaaagaatgatgtgttattgtcaggccaatacaatggggaaaaaagcaagcaaggaggttggcacaaatggttgtaaactgcgattctgaagtccgaacccaggc

SEQ ID NO: 56200 - DNA, 419 bp, Setaria italica
  Peptide Sequence Number=SeqID_122174
cgtgttggctgtctcatttcatgtcaatgggcatgctagttatagtcacatggctgtcgtcgaggaatactttatcaccattcttggacagcccgtatgatatgcttcttgttatgcctcttccagattgggcttgtcaatactcaatagtcttgttgtggcttggtcgatactcttaggttgtcatcctcgtcgcaaacattatccctggatcccacttagaatttagtgcaagtagcagatattcctctctttttttcagctggtactattgatgattctttgctaataactcctttatcttctgctcaaccaaccttcgatgacagtcctgagatagcttgttctaatgtggagtatgtgtttagtgatggcaagatgaacattgaaaggctaaggaaacttgttgagctggttgg

SEQ ID NO: 56201 - DNA, 195 bp, Setaria italica
  Peptide Sequence Number=SeqID_122175
cctatcccctgtgtgccttgcctatctcctgttgcgtgtctcaggtgctcacatcttggtagtgcagctgcccaaagctgtttattgaagccaagaggaattgtttagtcagaaactggagtttcaacgctttgccatgttccttcagacaatgaatttctgtaccatgtcgattatatatgtaagggtactttt

SEQ ID NO: 56202 - DNA, 306 bp, Setaria italica
  misc_feature (1)..(75): n is a, c, g, or t
  Peptide Sequence Number=SeqID_122176
nnnnnnnnnnnnnnnnnnnnnnnnnnnnnnnnnnnnnnnnnnnnnnnnnnnnnnnnnnnnnnnnnnnnnnnnnnncaacaacaatggaacagcagcaaccttgtttcagctaataacaatgttcccggaagaactacaagcgccattactctgaaaaaaaactactcaacctacaagactacactctcaacactctaacctctccccttgccaagctagtcttagtaatgtaaccgcaataagttagtcgaatagacccgtaccaacctactacaaattagacaagacaagacaaaggaaatagaa

SEQ ID NO: 56203 - DNA, 447 bp, Setaria italica
  Peptide Sequence Number=SeqID_122177
tatttttgggacaatattgaaggacattttagctaccatttggctaactggcccatgatctgccaaaaaagggagtatgggggtaggtgtgcctagtttgagagatttaaatttgtgtcttcttgctgcaagaagcttagatagttaaggtgatcatataatctggatacaacccattgatttcatagtaatgaactgtccacagtaataaatgtcatttgattggcaattctgtagagtatagctagaaatttaatgatggccttctttgcaggtcttgtggtggaggatcttgaatcacagagttggaggagctcgtgtccaaaggatcagaggtcgaggatggagaaaaggagcaggaggttgcggagaaaacggatggagcagagttgccactggacatgctgaagctaaggctgggatagcagggcgatgaagattggaacg

SEQ ID NO: 56204 - DNA, 250 bp, Setaria italica
  Peptide Sequence Number=SeqID_122178
atccaaaagatgtggcagattgcattttggctgatagatctaccctgaaggtaacgactggccagcgcatgacagagagttctgtccttgatgcacactgcacagaggttgatggagaaccgtactggtattacgagtatctagttcggaaatcaccaacagcatctgcaccagaaccaaatttgtttcgacaataaatagtaagacctagacaactagttagaagacgaagaatagggtaacctagtaa

SEQ ID NO: 56205 - DNA, 344 bp, Setaria italica
  misc_feature (1)..(1): n is a, c, g, or t
  Peptide Sequence Number=SeqID_122179
naccatggataatatacaaacggtgagatcttaagtggatagtacttcaatgcttaaccaggaataaatcataaagaaatagagtcattctagattttaggggaaaatgttggtgcaatagtagctcaccttccgagaaacagattgagctaacttggttagagcatgatctttggcacttcctgaatcaaacgtaccatgagaaattgtaatgtcatacacaaataggggccgtacaaggcttcctccaaggatcaggacaactccttcaatgctagaaacttcatcaagtgcttgctgaagagcacatagtaagatagagatgcctttcaatcaaatttaca

SEQ ID NO: 56206 - DNA, 170 bp, Setaria italica
  Peptide Sequence Number=SeqID_122180
cagactgtcaagggaataaccagcaccgaatgtcaattgctgatgccccatgttccacttcagaatcttttctttctgattctatcacccttctagtgacgccttgcctggtaaacctcttattgtatgcttgcactgaaaccagatagaatcagaaagaaaagattctg

SEQ ID NO: 56207 - DNA, 416 bp, Setaria italica
  Peptide Sequence Number=SeqID_122181
tgattgcaggcgatttgtccatccttttagttctaactgcatgttttgacatgccaattacctcgtcagtcaaaacacataaaattatccttgaatgtttcaatcttggttggttgaatttttgaagcaggaaaaagatgccaaaccttttgcagtaaactgcagcaatgtgctcctatcaactagtactcgaaattctagattttggagctcctttcagccattcttccattaactgtcattgtttcagggaaccaaattctctgacagaactccttaaacagcaaatggacccagagctgaatgagatcggtagacagcaagctgttgtggtggctcgtcggctgtcaaaagaagccaaaccagctgccatatattcctctgatttgaagcgtgctgctgagactgcagaaatt

SEQ ID NO: 56208 - DNA, 249 bp, Setaria italica
  Peptide Sequence Number=SeqID_122182
gaatccagatgttttcagaggcttcgatatttttaaaattactgagggctctgatcctgatagtagaaaccaagaaatacctgtaagtttgcagctttatgctaaatggtaacaggtgtgctataatgtcatggaaccagtagcatacatcattgtacgcatttaatcttgtgaaaatggtactgaagatctgctaaatagctttgttccccttttcacttacaaattcaatgcatgatgtatatttat

SEQ ID NO: 56209 - DNA, 209 bp, Setaria italica
  Peptide Sequence Number=SeqID_122183
gccaatgaagccagggaaattggcgccttgcgccatcactcgacaacaagaatcctagtttccacaatcactccactcctctccctgctccccaacacagcaccctggaagcctggtgattggttacctgcaaaggaggaacaaaacagatatcaccaacaagggaaaaaaacacagtattctaaatacagatacagctcaacaagaga

SEQ ID NO: 56210 - DNA, 233 bp, Setaria italica
  Peptide Sequence Number=SeqID_122184
cccaattcccccgtcaaccatcctaatagggattcccagagctctaattctgttaacgccgtccaagcatgaaatgctcaaggcatcggaagatcgtgagctgtctccctctacttcatgatcatgaagaagcttcaggctgctgctgaacccaggaatggtagtctctcagcagctgcctcccccagcatgggaacaagcctgtccaacaggccttgcatcaacaggttgcc

SEQ ID NO: 56211 - DNA, 244 bp, Setaria italica
  Peptide Sequence Number=SeqID_122185
gtactgtataaattccagcaacccctttttgtaactgtattaattcagcaacccaattcccccggtcaaacccatccctaatagggattccccagagctctaattctgttaacgccgtccaagcatgaaatgctcaaggcatcggaagatcgtgagctgtctccctctacttcatgatctattgtaagttaagttcttttctttaggttttctttttgttttcttttttgttttttctttttta

SEQ ID NO: 56212 - DNA, 248 bp, Setaria italica
  Peptide Sequence Number=SeqID_122186
tcggtcgataatttaagggctctcggggaattgccgaatctaagggagctgggcatgtctttcactgatgacagcttccccactacggaaacacataaggatgctctgttttattccatccagaagttactcaatggcaatctgaggcatgtcactgttttcgcattagactactatgatgggtggaactcattgtgcttttcagactgtcgtctcgagcaactccacctgcgattccggtttccaag

SEQ ID NO: 56213 - DNA, 413 bp, Setaria italica
  Peptide Sequence Number=SeqID_122187
aaaaactaaaggtaaaacctaaaagaaacaaaattaaactaagaaagaagtaggacctagtaatgtcctcgaacataaccatcaggatgcaggacccagttctggtcattctagttggagaccacaaataagttcaagaagtggtttttcctggatgcctcgtctagtcacgggccttcgcaggcccctccattcgcaggctccttccaactcatttgacttctcaccaaatcatcagcttcatcagcacttgatcctgctgattgggaccctaattatagtgacgagtcattattgcaagaagatagttcattgtcagctgatctaagtagcagtctccaccttgaagatgcaactcgtcaagcgagtggatctattagatcagccaatttccaaggccatgtctttgcaac

SEQ ID NO: 56214 - DNA, 391 bp, Setaria italica
  Peptide Sequence Number=SeqID_122188
tcttccgtacttctagttgttgtagttagttattccttgtcttgtatttgggtacccttaatttattagttgacgagtcattattgcaagaagatagttcattgtcagctgatctaagtagcagtctccaccttgaagatgcaactcgtcaagcgagtggatctattagatcagccaatttccaaggccatgtctttgcaacatctaaccctgtaccaacaaaccaaagaggagatcaattatttcgtgcctcctatcaaggagggagttctcattccagtgttcccgtcaactatggcggttacaaccctccaagttatcctcagcaaagtctccgtcctcgtcctggacagccaattcttcagcagcgatacaatcagccaacttctgg

SEQ ID NO: 56215 - DNA, 374 bp, Setaria italica
  Peptide Sequence Number=SeqID_122189
taggggtaaaactagcgatggactggctcccagagacataggtcctagactaccagatgcaaatcccagctaattctactgggaagcatggttctggttctcctgcaagtggaagcattcatggttctccattgggaaaagctgctacggcaggcccgtataacatgaggaggaacgtgccaatgccgccacatgattatgtatctcagcatggacaagtgcgatacggagatggtgtcagttttagtcatcctgatggttatgttcgaggacatacaggccactctcagaatgcaggacccagttctggtcattctagttggagaccacaaataagttcaagaagtggttttcctggatgcctcgtctagtca

SEQ ID NO: 56216 - DNA, 266 bp, Setaria italica
  Peptide Sequence Number=SeqID_122190
taaatttagtaattacaacaatcccggaggtggccactggctacattcaggtctttccccgcaggttggaagtgtgaacagatgcctacctctgaataatgcctatcctccaaagatgcccttttcttatgggagtagttatggaagcttcggtagccatggtagctatactggtaatgctggttttgctaacagctatggaagcattggtgatgttaatactagcaatatgtattactcacccttaggttcttctggatttacac

SEQ ID NO: 56217 - DNA, 241 bp, Setaria italica
  Peptide Sequence Number=SeqID_122191
gtgctcgacaagcgcgtcagcctcacctacaccccacttccaccacccctcgccccgccccccggcaacccccccgccgccgcgccgccctcccgcaccgcgctcgactgctccgtcaccttcgatcccgccaacaaggtcaacttcagccacttcctatcggctccggtcggctgccgcgtcaagttactacctttgtttggtcgggtattcgtaaggttgtacggtagtctagttcgta

SEQ ID NO: 56218 - DNA, 263 bp, Setaria italica
  Peptide Sequence Number=SeqID_122192
ggactcacaacaactttcttgaaggacgatttggattatttgattcagtgcctgcagcagccgtttgaggaggcacagaaagttggtctttttccttgctttgagcaagtggaaatgtttgccagccaattcccagacctttctttcaatgacctgttggataaattataaaatacaaccctcctaatgttaaggttcagccccataccaactgcatcacttgctacaagaacatcatactcgttatcctgctcattgaaaag

SEQ ID NO: 56219 - DNA, 350 bp, Setaria italica
  Peptide Sequence Number=SeqID_122193
tttacaacaagactttactcgattcgctgatagtgctccagataatatgaaagcatcgataaggactattgatagatcggtaattctgcagacctacaactcaatctagattgggattcagtacatccttcttttcatatttgtgtttttttttaactatgtagggatcttcatcacatgggcatggtttttactctaagtactggtgattttcccaacccttggctctgaagttaacagtcaacgaggccatagttcgaaagggcgcccaacttctagttctggtaaagaggcaccgcaagtggaacaagtgaagagcctaacagctggaaacgctagaagtgatttcg

SEQ ID NO: 56220 - DNA, 182 bp, Setaria italica
  Peptide Sequence Number=SeqID_122194
gaatcattttccaaatcagaatgacaagttccaccctggacattctcaaagcagaccagacaaacatgaaacggttctgagggagcagctggaacctgataaagtaaatgtgtttcgtcgaggacaacctgggagtttctgagacacgcaacaggggaaaggcaaggcacacaggggatagg

SEQ ID NO: 56221 - DNA, 282 bp, Setaria italica
  Peptide Sequence Number=SeqID_122195
ttaagttggtcttctgatcggggcttcggcttcgggcgatctgaggtccggacatggccgcgccggggtcagcgatcaagcacaccttttcttctcttgtgaagcaaaagccaccaaggactagcccgacaaaatctaggggtactatggctgtttcaatgagggaggtggatcctgtttttcaaggcgcgggtcaaaaagatggattggaaatatggcggattgaaaagttacaggcggttcctgtccccaaggaaacatatgggaaatttttcacaggcg

SEQ ID NO: 56222 - DNA, 315 bp, Setaria italica
  Peptide Sequence Number=SeqID_122196
aaggaaaacttagaattagactgttcttaagcaaggcagcttacacacaagtgatgcatgcaggaaacgagatcatgaggggttggggttctgtcaatgtcagctcaaaggctaattaacatttatgtctcatggctgactagtgaaaaagatagttctagcagctctgtatctgaaggtctcatctatgaacacagccctgttgaccaactggttgttctagtgaagtttactggatgtaaaggaattactgggtcacattgatgttgaccaactggttgttctagtgaaggaattgccgggtcacatcgacat

SEQ ID NO: 56223 - DNA, 142 bp, Setaria italica
  Peptide Sequence Number=SeqID_122197
ctaattgaattaatgaacaaaaagagcgaaatggaagattctctgtgatcttgcccatgataacagagaatctccatttcgctgttatcatgggcaagatcaccggacaggttacttcatcaagatacatgtcttgcgctgg

SEQ ID NO: 56224 - DNA, 371 bp, Setaria italica
  Peptide Sequence Number=SeqID_122198
aacaaaacagaatagatctagcccacatcatctttcctggaaattaattttttacatcaactaatagctggaatctcaaatgttcattcattacatcattgagtgaagcatgggttctggacctctagctaacatgataagggtataataaacatttgatctccagtgattcaagtcttagatttatagcagagtaatgaccctatgtgaaggcaggtgatataccttatttggaatttgttttcttgcatgtggtggacccatatcagttggcttcaggatctgaaatgaacacattaggctctcatctatgctcaatagagcacccacattatcgaattctccacaataatttggagcagaaaagattg

SEQ ID NO: 56225 - DNA, 391 bp, Setaria italica
  Peptide Sequence Number=SeqID_122199
ttcaaggggattggctgatggatgtctaatgccatgccctggtggatccaactatccaaacaacagatcaccccctttgagctgactgacgatgatgatactgaaagtattgaatgctgataaaatgcttcaccctctggctggctgtaaagtggaagacagagtgatgtacttagttagcttgccttcaactcatgcgtctgacagaaagtacattttggtttgaatataaagaagtactagtatcataaagtgctgcttttgttgcagtgatagtttaatcaggatgaaatcatccaatgggggtcaattgttctttgctccttggtgttcactcgtagctatttgatggtcacttgttaactgatctacatagacaaattcagaaagg

SEQ ID NO: 56226 - DNA, 222 bp, Setaria italica
  Peptide Sequence Number=SeqID_122200
tcaccccatccttctccatctgggctaggatcagaccaaagcaaatcacaaaggagaccataatcaggaatctcagcaggcctctcaatatcctttatctgatccaaactcgtcaattcgggtgagagaccaccatgcatgcacagtatcttgtcatcgatgagttgtcttgtcttattaggtctaggtctaagtttagtaaagactaaattaccgtaagta

SEQ ID NO: 56227 - DNA, 441 bp, Setaria italica
  Peptide Sequence Number=SeqID_122201
tgcagggtaggctgctcttgtgacatagagatattgtttataatattcagataaactaattgcaattggttgaatccacttacttttgaattatttctcccatgttgtttatcaactaacacgaggaaaggaccataattctgaaaatttactctggtgaccttgtaaatcctcatgacaaggttcttcctattttaaaaacgagtcaagacaacttcaagagttccatggggtttcatcatggatatcatggcaattgtgttaacaaaagcagaaaagaaaacatagagagatggtatgcataatcgagaacaacagaaatgaaggtcaccaaattaccatgcatataggcagcccttctcctcatgccgcttctgaacatgatcgtagtaggacatgtcctgagcacttggagggttgtacatcttgttttctatatgg

SEQ ID NO: 56228 - DNA, 448 bp, Setaria italica
  Peptide Sequence Number=SeqID_122202
gttctttgtcactgcatagctgttctctttttaccttccaggtgcatgcttgttgtactcatctgcaatgtccttccaaaagcggcatgacttcttcccattgcctgaaattggtcatttgaatttttaaccaacaacttactaggcataggtcatcctcttgattccaaattatacgccctcctttcttttcagcttcatcttcacttgcatcactccactcttctatgtcaacaggatttgaaggcaatgttggtgctgaagttgagaaaatgaggtgattgggctgctctctccgctgcctagaaagaaggccattgatcccaccagagatgctggaccattggccacgaaacctcctacacctcctggcaggtactgcccaatattgactgggaaagggcctccatggtagcttactggtgtgggagacaagctctgatagctt

SEQ ID NO: 56229 - DNA, 380 bp, Setaria italica
  Peptide Sequence Number=SeqID_122203
ataatttgtctagaataatttgaatttctcctgttagtggtctggtatatgtggttatctgaaattgtttcttctgttatagcatgcatgcattgaacatcaataatgatgtgattacttcatttcaggaagctggaatagatgcacggctttgtgatgttggtgctgcaatccaagaagtaatggagtcatatgaggttgaaatcaatggaaaagttttccaaggtaatgtaaagcagtcatatacagcttctgattttacaatctgcgaaaataatgtaaagtgaaaaaggaactgataattcaaactactttgttgcttgtgtgatagtaaaaagtgttcgaaacctcaatggacatagcattgggccatatcaaat

SEQ ID NO: 56230 - DNA, 328 bp, Setaria italica
  Peptide Sequence Number=SeqID_122204
tatttgtatgttcattcttgacttgcaaaaacttaacttatttgttccagggtacattgttgattagtagacaatttaactagttagacaatttaaatcctatgtatgatccattgcttcaagcaacaagagatgccacaaatactgggatcaaggaagctggaatagatgcacggctttgtgatgttggtgctgcaatccaagaagtaatggagtcatatgaggttgaaatcaacgggaagttttccaagtcaaaagtatccggaacctcaacggacatagcattgggccctatcagatacatgctggaaaatcagttccgattgtg

SEQ ID NO: 56231 - DNA, 407 bp, Setaria italica
  Peptide Sequence Number=SeqID_122205
catagacaggtgcgaaaatatatgagaagcattattaagcctggaatgttaatgattgatctatgtgaaacattggaaaatatggtccgtaaacttatttaaggagaatgggctgcaagctggcattgcctttccaacgggatgctccttgaattgggttgcagctcactggactccaaatgcttgtgacaaaactgtgctacaatatgatgatgtgatgaaactagatttcggaacacatatagatggtccgccaatttttgccttgtttatcttatatgtttttattgtgcctacttgtgtgggtttcttgttgcaagtataaattgatgtcatctgactgcaaaaactaacttatttgttccagggtacattgttgattgtgcatttactgttgcatttaatcc

SEQ ID NO: 56232 - DNA, 413 bp, Setaria italica
  misc_feature (402)..(402): n is a, c, g, or t
  Peptide Sequence Number=SeqID_122206
tcgtaagttaccttctattggtcttcttgtaaaaattcttattgttgtacaacaatattgttcagccataccctccattgtgcgacgtgaaagggagctatgtctcgcagttcgagcacaccatcttactccggccaacctgcaaagaggtcatatccaggggcgacgactactgattgtggctgcagaggctcctcttgtaccggttgtttatgcaacgagtacactgtttttgcgcaacctgtgtaccatctgtttacggaaaaataggacatgtcgcaatcggacaaataacttggcactcttggtctaaaatttgagtttcaaatctgtggaatcgtgtatttttcattgagctgaaattgatcccctcgttgtattgtgtttgaaaacctgaaacgnttatctacgtt

SEQ ID NO: 56233 - DNA, 360 bp, Setaria italica
  Peptide Sequence Number=SeqID_122207
gatgatgtgatgaaactagatttcggaacacatatagatgggtacattgttgattgtgcatttactgttgcatttaatcctatgtatgatccattgcttcaagcaacaagagatgccacaaatactgggatcaaggaagctggaatagatgcacggctttgtgatgttggtgctgcaatccaagaagtaatggagtcatatgaggttgaaatcaacgggaaagttttccaagtcaaaagtatccggaacctcaacggacatagcattgggccctatcagatacatgctggaaaatctagtttccgtatttgttgtaaaggttggtagtaacttagttacttaaaaattttggtttagttt

SEQ ID NO: 56234 - DNA, 286 bp, Setaria italica
  Peptide Sequence Number=SeqID_122208
gttcttaatttccttaagtaagttaattggtagttctattattgtaggtttgtaaattcaatggaaaagttttccaagtaaaaagtgttcgaaacctcaatggacatagcattgggccatatcaaatccatgctgggaaatcagttccgatagtgaaaggtggagaacaaacaaaaatggaggagggggagttctatgccattgaaacttttggatctactggaaagggatttgtcagggaggacttggaatgcagccattacatgaagaactttgacgttggaca

SEQ ID NO: 56235 - DNA, 278 bp, Setaria italica
  Peptide Sequence Number=SeqID_122209
ccaatctggaaagttcactatcagtaagatctgatccagtatgatctagagattcatctgaatgaatgataattagttcatccttatctgtaagccctgtagcagcattgtttgcaccttcaatccttgtcttgaaaatgctgccagcttcagatacgaagctatcagctgaggcactggacccagcaatttgcaacgaaggaaaaacaagacgacgacggtactaatacgaaataggaattagggaaagaaagacaactttagtttaaactagaaaa

SEQ ID NO: 56236 - DNA, 378 bp, Setaria italica
  Peptide Sequence Number=SeqID_122210
gaagaagcaagccaaactattgctacagcctctgttgtacttgttcgaaagagtttggcatggattacggggatcatcctgctggtttcaactctcataggggtttgcttgctgatgaatatgccacttaccagggacaccctcctgtattcaaatgtcaagattgattagtttggagggaagggatgctatcgacaaggcaggagcactctgcaacaatcgtttcttcaaccactcctctggcttatttaccggaacccaacaataaaacagccgatacagtttttttttccttcacaaaaaatgaaaaaaaaggtcgttttgtccaacagcaaaagcatacgtctctatccaaaaccaaccataactacacaagcc

SEQ ID NO: 56237 - DNA, 351 bp, Setaria italica
  Peptide Sequence Number=SeqID_122211
ggacatatagcactcttattttgaattcgaaatcacgatttcacagattttattattcatacaaggcaggagcactctgcaacaatcgtttcttcaaccactcctctggcttatttaccggaacccaacaataaaacagccgatacagtttttttttccttcacaaaaaatgaaaaaaaaggtcgttttgtccaacagcaaaagcatacgtctctatccaaaaccaacccataactacacaagccaaagttggccgcaaagaatggccggccccttgtcgatagcatcccttccctccaaactaatcaatcttgacatttgaatacaggagggtgtccctggtaagtggca

SEQ ID NO: 56238 - DNA, 247 bp, Setaria italica
  Peptide Sequence Number=SeqID_122212
ccctttatatgctccatgtagggactgaaacgctttggtgacagctctctgaactatttcggttccctgcttaacaatttccgtggaagcatattcatcctccagagcctacagaaaccatcaaattagcgagtgcatatatcaatactatcaaaaagcaatattcatccttcagagcctacacaaacccatcaaaaccgcaactgcatatcactaacacaggaaactcatattactgactaaagaa

SEQ ID NO: 56239 - DNA, 197 bp, Setaria italica
  Peptide Sequence Number=SeqID_122213
ttatttgaattcgaaatcacgattcacagatttattattcatacaaggcaggagcactctgcaacaatcgtttcttcagccactccttcccaccacttcccagcctccccaccccaccatagcaaaggactagcaatgtcggcgctcggcgccctctccggcggcgccgccggtgtcgctggcctcctcagcctccg

SEQ ID NO: 56240 - DNA, 234 bp, Setaria italica
  Peptide Sequence Number=SeqID_122214
gagtggtgcatcaactccaagattagcaattagggaggagctgaagcttgacgcagccaaggtgaaggcgacaagctggccgaggagtagcacgagcagcagtccccatacatccttcctcttgacctccatgaacctgagcagcgctggccgctggggattcagatgcagaagcaagaggtacagacactgtgtagaacgacgaagacggagctagaagagtgggaggtggag

SEQ ID NO: 56241 - DNA, 152 bp, Setaria italica
  Peptide Sequence Number=SeqID_122215
cgctggtgatgtacgagtattggtaggccttgacaacagcatcataattttcaggatgacaatatgtttagatgctcatcttctgcatagaaaagcatctcactgaaagttatcggtggccttgacaacagcatcataattttcaggatgac

SEQ ID NO: 56242 - DNA, 276 bp, Setaria italica
  Peptide Sequence Number=SeqID_122216
ctcacgtttgcatgggatcacttgaaacatcagtgcttctgagatctacctccatcaaacaggttaagagcataacagcatagcctgcagtcttgagagcactgcatatgttctctatctcggcattgtagttgaccttctgcgtggtcatgacgagctcgacgacgccgaggcatgcccggctgcggggctcgaatatggggaagcgacgaacgactagaccgacggaatagtaacgaaaagtaaaacttaagggtaacgttaaggttaaggtaa

SEQ ID NO: 56243 - DNA, 149 bp, Setaria italica
  misc_feature (57)..(57): n is a, c, g, or t
  Peptide Sequence Number=SeqID_122217
ccgaagggcaatgtcaaacttcttacttcaactagagatgcgatgctttctctgcancctggattggcattgtgaccaattagtacaaggaatagacaagaagaaaagacaatacgacaatactactaagttagaaagttaaagaaaga

SEQ ID NO: 56244 - DNA, 472 bp, Setaria italica
  Peptide Sequence Number=SeqID_122218
tggctccgttgtaactgttgcttccgttggtgattcacgctgcgtccttgaggccgagggatccatctactatttgtcggccgaccatcgttttgactctagtgaagaggaggttggacgtgtaacggaatgtggaggtgaagttggaaggctaaatgtcgtcggtggtgctgagattggtccccttagatgttggccaggtggtctatgcctgtcaagatcaattggtgatcaggacgtaggtgaatatatcattcctgttccttatgtgaagcagatgaagttgtctaattctggagggcgccttattattgcaagcgatggtgtttgggacgctttaactgccgaagtcgcttttagttgtgcacggggactttctccagaggctgcagctgatcaaattgtcaaggaagcagtggaatcaaaaaggattgagagacgataccacttgcattgtcattgacataatacc

SEQ ID NO: 56245 - DNA, 301 bp, Setaria italica
  Peptide Sequence Number=SeqID_122219
cccaccaaagacgctgggtatcaagagtctatcagattgcaactacactccagaactgtataatgccaagagattgttagcgaagcatgtcaacaatggccaatagtcatgtatatcattcatcgtatagaggtgtgagtgacaaatagctgcggttttgtaattctcgactagaattaggtattgagaccctgtaattcatctgagcagacctcaattaaaggtcaacgacagtgtagctcgtcctcgtcgtgtagaatgtatgatgccctaaatcttcttagatgtagtaattacagtg

SEQ ID NO: 56246 - DNA, 257 bp, Setaria italica
  Peptide Sequence Number=SeqID_122220
tggaaaacagcatctgactcattatctcttgctaccaaagataattattccgaaccagattttgtggaggaagtctttgaagatggatgtccatccctttcaaggaggtttgtacccttacctcatctggatgatggatgcataacagttggcaaataattatactatgaacttaaacattccagttaataaattgactatcatttagggagcactctttcactactgttgctaagatgcttgtagttggtaaagaa

SEQ ID NO: 56247 - DNA, 294 bp, Setaria italica
  Peptide Sequence Number=SeqID_122221
gtgcacaaccacacaagggctaatgctagttgcaattggcattatcatggtcctgaaacagatgttggaggcgctgtgcttatatacattgaagaagttatacagttctggagtgtagttgcaatctgatagactcttgatacccagcgtctttggtgggacttctggcagtcgcagacatgtataatgccaagagattgttagcgaagcatgtcaacaatggccaatagttcattgttattattctatttcttattcgttatttagttaggtttgtttgagtgacaaatagct

SEQ ID NO: 56248 - DNA, 264 bp, Setaria italica
  Peptide Sequence Number=SeqID_122222
tgggcttcgatcgcgccgggtacgggcagagcgaccccaaccccaaccgctccgtcaagagcgcggcgctggacgttgaggagctcgcggacgctctgggactcggccccaagttttacgtgatcggcatctccctcggatgccatgccgtctggggcgccctcaagtacatccccgacaggtaagctaagcaaagcaagaacaacagttatgtgcatccaatccaacaagccggttggttgtgcggttgtgcctaacagaaca

SEQ ID NO: 56249 - DNA, 257 bp, Setaria italica
  Peptide Sequence Number=SeqID_122223
gcggccgcggagcccttgaggcagagcagcgcggcgtcgtaggcccgcgccgcggcctcggcggtggagtgggaccccagccatatccgcgtcttctgccccggcgcccgcacctccgacacccacgagccccagctccgcatccgcacgcccttgtacgtcctcttgccgccgtgcgctgccgcggccgcgatgtcatcgctcgcccgcgtcgtcttcaccatagccgctacctcgctctctccctctccctccgg

SEQ ID NO: 56250 - DNA, 295 bp, Setaria italica
  Peptide Sequence Number=SeqID_122224
cagtcttgtatctccttttctcccacaagacctacagcaatagctgtcatctggggccagacagctcaattggctctattatgaaggacgacgagtcatgaggatcctcgtgccttatggagaaactgtaagtgcccccataaggaacaggttccctatgcaactcaatgctgctctcagccagagtgacgttagcttcaagagcgtgtagaacttcggacatcttaggccgcaggattaggtattttgttcttgtcgttactatttggttatttgttattcttacgtttcgtta

SEQ ID NO: 56251 - DNA, 478 bp, Setaria italica
  Peptide Sequence Number=SeqID_122225
ggcgggatcgccggctcgtcgtcatggcggtccacatcgcctgcggctacaggtacggcgcggtgctgctggccttcttcttatcctcgtccaagctcaccaagatcggggaggaccgcaagcgccgtgtcgaggaggagtttaaggagggcggtcaacgcaactggatccaagtactagcaaatagcacaattgccactatactagttgtgatatttgaaataataactggagggcaagatcagtgcttggactcaaatggctcaaagattataactggtattatgggtggtattattggccactactgttgctgcaatggagatacttggtcgtctgaaattggtgtgcttagtaatgaacaaccacggcttattacaactctgaaggtaagtgttcttttccatgcaataggagatactgagttactgatggggtccatatgttctcttcagtcatgattttatatgtaattctc

SEQ ID NO: 56252 - DNA, 262 bp, Setaria italica
  Peptide Sequence Number=SeqID_122226
actttgttgcccttcatttgtactacattgggaaagatgggttatttatacagacggtggtagcattaattatcttgggcaatgaaggaagaaagaaagaaaaaggtgccgagaatttcttggatggcttacatctactaaagaattgagaagcatgtcaggaagggtacaaatggtggagtgaccttacaaggacttcttgctgctaccggaggaggcctgctcattggtctcacattcattattgttggactgttgacag

SEQ ID NO: 56253 - DNA, 243 bp, Setaria italica
  Peptide Sequence Number=SeqID_122227
caaatagcacaattgccactatactagttgtgatatttgaaataataactggagggcaagatcagtgcttggactcaaatggctcaaagattataactggtattatgggtggtattattggccactactgttgctgcaatggagatacttggtcgtctgaaattggtgtgcttagtaatgaacaaccacggcttattacaactctgaagacggtggtagcattaattatcttgggcaatgaag

SEQ ID NO: 56254 - DNA, 187 bp, Setaria italica
  Peptide Sequence Number=SeqID_122228
ctaacaactatacttacagcttttgttgtgcatttacatctttgtaacagtactacccatctctgctgcggctggtttgcttggaagtctaattgattcattgctgggagctacacttcagttcagtggatactgcagtgttcggaagaaggtcgtcagcaaaagtggtcctactgttacaaagatt

SEQ ID NO: 56255 - DNA, 266 bp, Setaria italica
  Peptide Sequence Number=SeqID_122229
ggtatgtcaatgtgtgatcacgatggcctaaatttccacgtgtggtccatcaataaaagggtgattaccgtaattgaccttcacgttctgattcaacgggagcaacagccagaaaactcgatagaatgccgaagcaaaagcccccaccgaatcaacacagctcgttccttctcccagtcacctagtaggaatcggggctccgattcgggtcccctcccacctcccaggcggctttcgtcgacccgggcgaatcaacacagctcgtt

SEQ ID NO: 56256 - DNA, 272 bp, Setaria italica
  Peptide Sequence Number=SeqID_122230
ccgagctggacgactacgccgcactcctgcgcctcaagctccgcctctcggcgcctctccggccggggccggggacgcttccgcgggagccgaggaggccgccgcggcggtgaagacggcgttcgacgtgaagatcgagaagtacgaggccgcggcgaagatcaagatcatcaaggaggtgcgcgcggtgacggacctgggtctgaaggaggcgaaggagctggtggagaaggcgcccgtcgtggttcgcacggggttgcccaaggaggagg

SEQ ID NO: 56257 - DNA, 144 bp, Setaria italica
  Peptide Sequence Number=SeqID_122231
atgctgtccataaaactgctgtcagatgatatggccgagcttgccttccaaatagatttgtttagctgctgtgcttgcttctctgacctggaagcagcagacatagtctagtttttttatcccctttcgagacaaccaaagata

SEQ ID NO: 56258 - DNA, 235 bp, Setaria italica
  Peptide Sequence Number=SeqID_122232
gcttggcgtgatggctgtgtgaatgctgtccataaaactgctgtcagatgatatggccgagcttgccttccaaatagatttgtttagctgctgtgcttgcttctctgacctccttgcaaacctccaggtggttatctcgtcaacggaagggcggcgacggaggagatcgacggcggcgggtgtgcgcttgcgctcggactcgggctgcggcggcgctggagcgcaggggcgcggg

SEQ ID NO: 56259 - DNA, 340 bp, Setaria italica
  Peptide Sequence Number=SeqID_122233
gaggataagaatgcacactttgatatagattaagaacccctaaatgcatctaaattaagcactaatcatcaaaacgtccccatatgaggatacatccaggttacatgcgaaatcatttatctttactacagtatgtaccaccaggtaggccacaactgctggtgtgttctcgttggcatcaaaacttctagcagaggggcaaggtagtagctaggggccatcttcacacaatggtgaacctgataaaaacaatgggagatttttcagctcatgcaaaatgctatccaacaaaaagagaataaccagaaagcacatattccgatacaacaccaagggtaag

SEQ ID NO: 56260 - DNA, 235 bp, Setaria italica
  Peptide Sequence Number=SeqID_122234
aacccagctcatccctcatctcggctccctttattcaagttctcaaactccattcctccaaatgtattacagcgctgtaaggagtgtgtcatttcctcgtcctcgttgccatccccactgtcgtccccaattctccaactcaatagtacctttaccaaccaattaaaccccctacaaaataccaatacaatacctactagaactacctaccgacgtacttacaattagtacaaca

SEQ ID NO: 56261 - DNA, 381 bp, Setaria italica
  Peptide Sequence Number=SeqID_122235
catttttcaagttctcttggtacactttgttgatcatgcaaaaccgctgtcctagcagcccataataccgaagatatgtcctctcttgactgcaacactcaagcagcataatacacagctccatctcttgaccaggctcaagtttaattttcataagcttgtgaccagcttcttcaaaatcaacactggacataatagtcaaatatatagttcttcttagattcacaagatttgtctctgttatatcccttgaagatgacctagaccctgagaccaacctaaatgttttcagggcaaatccaaattttgttgaagatgagaaggcctatgagaacctaaagagaagcatcctgggagcagaatcttctgaagatgaagaag

SEQ ID NO: 56262 - DNA, 247 bp, Setaria italica
  misc_feature (220)..(220): n is a, c, g, or t
  Peptide Sequence Number=SeqID_122236
gcggcgccggcggcggtcatcgggtgaggatcccgactccgagctggcgctgcggcggcggtggcgccggctgtccctctcccggtcgcgcttgccgcggcggtatgaccgaagacgcagggatgacgaccgtggggagcgtcggaggagcccctgagaagaaggaaccgacgccacccttccccacctccgccgctgctgccggagatgatccccgggntgagacacgcaacaggggataggacga

SEQ ID NO: 56263 - DNA, 241 bp, Setaria italica
  Peptide Sequence Number=SeqID_122237
ttagcttgcagcaaccaagttcatagcacacttggtaaatcagatggtggcacatgagcttgtagtgctggagcttcttacggtactccttgaaaatccaactgatgatagtgttgaggtggctgttgggtttgtcaaagagtgtggggccatgctacaggacctatctccacaaggtcttcatggtaagctattcgaggcagtgctttattttgatatgtctttctaaatgtgtcagttt

SEQ ID NO: 56264 - DNA, 239 bp, Setaria italica
  Peptide Sequence Number=SeqID_122238
acgggaggaggacttggggaggtgagggaggaccgccgcggtggcgccggctcggagtcgggatcctcacccgatgaccgccgccggcgccgccaccgccgagatgagggctcgaggcggcgggatgaccgaagacgcagggatgacgaccgtggggagcgtcggaggagccctgagaagaaggaaccgacgccaccccttcccccacctccgccgctgctgccggagatgatccctgg

SEQ ID NO: 56265 - DNA, 130 bp, Setaria italica
  Peptide Sequence Number=SeqID_122239
aataccgaagatattgtcctctcttgactgcaacactcaagcagcataatacacagctccatctcttgtacctaggtcttctaagttttaatttttctattaagtctttgttgtaccaagtcttcttcaa

SEQ ID NO: 56266 - DNA, 206 bp, Setaria italica
  Peptide Sequence Number=SeqID_122240
cctatcccctgtgtgccttgcctttcccctgttgcgtgtctcaggagttgtccgtagtgtgactgtgatggtggcgttggatggatgctatctctggcggtgcaaaagcgagaggaagaagacgatgtcagctaaggttttattagtttgtgtgagacgtcgtgtggtagatatctagggttttacgtgatgtctaccgacgtaag

SEQ ID NO: 56267 - DNA, 269 bp, Setaria italica
  Peptide Sequence Number=SeqID_122241
gcctccccagggggcgtgggctgaatttgaatagcattctgggagttggtgctaatggaggggtgcctccgcagggggcatctggagcactgggtggtagcggtctgccagggatgcaaggtggttatttgggtggctatggtggttctggtgggtatgggagtgcaccgaggggggcctggaaagaaattacatgggccattaggtaagatttggtaggtggatgtaccctaactgccagaagctacagatacttcttatttcagttt

SEQ ID NO: 56268 - DNA, 262 bp, Setaria italica
  Peptide Sequence Number=SeqID_122242
ggcgcgtgaagttgtcggcgatgccctcgatgttgccgccgtcgccgatggtgacgtacaccggcgcgccctggtcccgcaccggcgtggacttgccgttgacgatgtcgtaggcgacgttggacacgcggtggctgcgctcgtaggcgtgtacttgccgtacgccgagtaggaggcgagcacgatgacgtgcgcggaggcgatcttgaccgagtaccagaagggctccgtgctgccggcggcgcggtacggcgtcgggtag

SEQ ID NO: 56269 - DNA, 227 bp, Setaria italica
  Peptide Sequence Number=SeqID_122243
ttgcaggtcgtctggtcactcctagtcctagtcgccatttcgtagtctcttaggtccccaaactgcctaccggtttgggctttaaatggtgtcaagctagtcggtcagtcagtcgtatcctagttgtgttatggtaaaagcaaaacgatgctgtggttaatttgaatgaatctgctgcttattgggtaagaaaaaaaaaaaaaaaaaaaaaaacaaaaaaaaaaaaa

SEQ ID NO: 56270 - DNA, 250 bp, Setaria italica
  Peptide Sequence Number=SeqID_122244
ctcaagaattctacttaggcagcatttcaacagagcataaatggttgaaaccttctcataattcgtcaagcgttccttgaagtcctgcagtccagcttcataatctggcctgcaaaaattttaacagtattcaggctgaaattcatcctaaattggtgggggtgttagggttgagtttgtgtgagtctgggtgtatggttgtaaatgtgtttctttcctcttctttaatgatatgacacaagtttttttt

SEQ ID NO: 56271 - DNA, 251 bp, Setaria italica
  Peptide Sequence Number=SeqID_122245
acatcagcagttaggctttagttacaaaaatactgaaaatttcgtagtttgatgtacagaaaagtcagggaaacatatagatagtttggctgaatgattatgcattataattttaacctctgtatcacgtcgaggtaagactctccacgagggtagcgatatctaagcttgtccttcctgcgtgacctggttgcaacaagggttcatagtggtgacttcagatccagatattaggtactgtaccacagtga

SEQ ID NO: 56272 - DNA, 232 bp, Setaria italica
  Peptide Sequence Number=SeqID_122246
gatccttctgccacctagggatgcaaaattcctaatgttgagtcatgtgttgtacaatatgcaaaggtatggaagagcttacctgtaactgaccaccctgcccctttaccatgtcaatcattttgatgtaagaaccttcccccactggctcatagaccttctcataattcgtcaagcgttccttgaagtcctgcagtccagcttcataatctggctggtcagcatagtcagg

SEQ ID NO: 56273 - DNA, 257 bp, Setaria italica
  Peptide Sequence Number=SeqID_122247
cctgctggcgttctagctcgatgatgacgggttccaacctctgtatcacgtcgaggtaagactctccacgagggtagcgatatctaagcttgtccttcctgcgtgactcatactcctcgggcataattttctttatctcttcatatgtcatcccatcacaaactccagaattgatctcatcaagagcacgccattgtatctttagggaaataccaaataaattaggaacttagactagtacaaaaattagttactac

SEQ ID NO: 56274 - DNA, 237 bp, Setaria italica
  Peptide Sequence Number=SeqID_122248
ttactatctgactgaacaatataatggtgcctgtgtacgtgcaggcgaaggaggagacggtgaacaaggtgattgacatcgtgaagcagcagctggcgctgggcgcggacgcggcgctgacgcccgagtccaagttcacggacctgggcgccgactctctggacacggtggagatcgtcatggcgctcgaggaggagttcatgatcaccgtcgaggaggataacgcccagaacatca

SEQ ID NO: 56275 - DNA, 247 bp, Setaria italica
  Peptide Sequence Number=SeqID_122249
accggcggcatcggaggagagcgggaccaagggcgagatgatgttgtccagggacagggtgacgaggaccgtacagcgacaagcggtcagtatcgccgtgctgcgtgcccaagggtgcggaggtggggcgagccatccctctcactttcctcaacttgccgttgctccacacctggcacgcgagccaaaaggaatcatggcaacaaaaagatgagtgctgctgcagcctgaagagtgaagtatttag

SEQ ID NO: 56276 - DNA, 220 bp, Setaria italica
  Peptide Sequence Number=SeqID_122250
accaggcacagccctctgctcctcaaatccttcttgccctcctcgtcaccaacgtctccctcgtcacttgctacggtgtgttgttgcatggaggagcttccgttgccatggcccaagtacgggaagctgagagcctcaatttgactcaggaggaacctaatgtagccaatagtctcctgtagtacggaggcagtgtcagtctttccaaatggggatacta

SEQ ID NO: 56277 - DNA, 194 bp, Setaria italica
  Peptide Sequence Number=SeqID_122251
aaagtaaacaacttcacaaaaactagatcatgacattcggaggaactgaatgtatgcatgtatctaaattcagaaaggaacagatgaagagaaataatataattggataggattaatggaaggggttggacctcaatttgactcaggaggaacctaatgtagccaatagtctcctgtagtacggaggcagtgtc

SEQ ID NO: 56278 - DNA, 238 bp, Setaria italica
  Peptide Sequence Number=SeqID_122252
tgtgtgccaattatttgttcctgaactaagagtgataagaatacaaaagattaactgctgcagacaagcaaacttatctgtacgactgcatcaaaatatttcactgaagtacaactgtatctaaggtttgctagaaaaaagtgtaacagagctggaacttcagtgctacataccaatctgcagtcatgccatcctcactggtgattgctcttaagacaacagcattggagtgggttcg

SEQ ID NO: 56279 - DNA, 258 bp, Setaria italica
  Peptide Sequence Number=SeqID_122253
ccccaactgtctgtactggcaagaacacagcaaaagcttgccaaattttatcatagaggccagcatctttaatagcttgaacaaatatctcatccacctggcgaagagtgtccaaagcattgccttgtgtaacatcacctaggacacgtacagcaagaccaggcccaggaaatgggtgtcgctttaaaaatgaatctgggacattcaaaatactacccaacctcctctcctcccatcctatctcgtcttctcttctcc

SEQ ID NO: 56280 - DNA, 179 bp, Setaria italica
  Peptide Sequence Number=SeqID_122254
cccaggaaatgggtgtcgctttaaaaaatgctggccaaattttatcatagaggccagcatctttaatagcttgaacaaatatctcatccacctggcgaagagtgtccaaagcatttcctgggcctggtcttgctgtacgtgtcctaggtgatgttaacaacaaggcaatgctttggaca

SEQ ID NO: 56281 - DNA, 180 bp, Setaria italica
  misc_feature (45)..(45): n is a, c, g, or t
  Peptide Sequence Number=SeqID_122255
cccggccaagcacctccgcttcctcgccaggttcctccttgtcgnccctcctcctcgccaggcgcgcccacaccgtccctcgccttgcgaggaggagggcgacaaggaggaacctggcgaggaagcggaggtgcttggccggggtgaggtggtggtcggcgtcgaggaagtaggcccggt

SEQ ID NO: 56282 - DNA, 292 bp, Setaria italica
  misc_feature (288)..(288): n is a, c, g, or t
  Peptide Sequence Number=SeqID_122256
gttggcgagatcgccgcccgcatcgcccatctctactacgcccagtaccagcgaaccgccgacaccgcgctcctctccgaggcgttcgtcttctaccacgccgtcctggaccgggcctacttcctcgacgccgaccaccacctcaccccggccaagcacctccgcttcctcggggaaggtgggcgcccccttggcgtggacggagtggggccctccggagaggacgatggcgcgcgggcggaggccctcgagggcggcgagcggcgccgtgccggaaacgcaaagggngagg

SEQ ID NO: 56283 - DNA, 260 bp, Setaria italica
  Peptide Sequence Number=SeqID_122257
ggggttggagaggggaaggagatggttgctgtcctgatactggtgaaaagattgtgagcaactttagtaagtttgatatatccagtactagtcataccagttcaaaggaagacaaagaaccttgcctatggttaggctgccgagaaactgagggttcaaattgcatataccccggtgatttaatcccatttacaagaagacccctatttttggtgattgacagtagcatcagctatgcattcaaggcagtctattcatgg

SEQ ID NO: 56284 - DNA, 355 bp, Setaria italica
  misc_feature (70)..(70): n is a, c, g, or t
  Peptide Sequence Number=SeqID_122258
cgccgaccaccaccctcaccccggccaagcacctccgcttcctcgccaggttcctccttgtcgccctccncctcgccaggcgcgcccacaccgtccctcgccttgccgcagacatccgcgcgctcctcgacgactccaaaaaagtcattccaagaagccgaatacaaggagtggaagcatgtcgtgcaagagatcttgaggtttcttcgagctgactcgccatttatgaacatgaggccgctcaggtacagctatgcatttgatctgcctccggacaagcttccgaaccgtaaccgacctaactagtacaaagaaagacgaaggtacttagtacttaaagtagaacgaccaataa

SEQ ID NO: 56285 - DNA, 284 bp, Setaria italica
  Peptide Sequence Number=SeqID_122259
ttaacccctaaaagaacaaacggaaattacaactaggaatacctgacgaactaactaggaaagagccacccagacatgatcgttgcagttgttggatcccttggcaacattggcaagacttttggtactgcctgcagtttaattgtcggcaagaagcttgagaatctgcatgatgcactctcaaacaccagaactgatggtgtcggcgccctgatacgtgagggagcagctgcatacctcaactccatcgtgaacaagaaatttccttttaccacccagcaggt

SEQ ID NO: 56286 - DNA, 236 bp, Setaria italica
  Peptide Sequence Number=SeqID_122260
cgctaaaataagccattagaaccttgagtgtcctagcacatgccccacgttcatctgtattagcaatcacatgagtcacattcgagctccaactgttagttactgtaatcccagtttgatgctcaaattgatccaagagttccctctcacggccattgagggcggatccacatatcacccgctcactagtcagaacaggtgaggtgatccaatgttcatccatttgcattggaagg

SEQ ID NO: 56287 - DNA, 359 bp, Setaria italica
  Peptide Sequence Number=SeqID_122261
atctaacttgctcaaacattgtcttgcatgattgttcaaatgctggaacaagcaatgattcaaagctagtgcgtaaagcatcctgaagagcctgttttacagatgtgtggaactgcatttggatttgcctggcaagtgtagcttcaagttttccactaatagacttgtccagctgattgcacaccttgtcacccacccctttctaaaaacaaacgatcaacgaggggaagcatgaccaaattcaacataatgaatacaacaagaaactaacctgaactgaatcagaaacagcagaggctatgcacttctcaatgataggtgtaattgctcgagcaaaccaacaggcccaagtgaagaga

SEQ ID NO: 56288 - DNA, 178 bp, Setaria italica
  Peptide Sequence Number=SeqID_122262
tcggcgatgtttctaatagatcttcaattaccttgtctcctggagagctggataagaacactcctgggtaccaagctccagcttatgttgaacagcccaggcaacagcagacgtaagtaaccaaagaaacaaaaggaaaacaaaaaccaaaaaccaaaaaccgaaaaacaaaaagaaa

SEQ ID NO: 56289 - DNA, 179 bp, Setaria italica
  Peptide Sequence Number=SeqID_122263
aatcagggtggtgggtattatgataatcaaggtgggtatggcagctatgataatcaaggcgggtatggtggtggtggctatgagcaaggcaggggtggtggtggaaggggctatggtggtcgtggaaggggaagaatgggcggccgaggtcgagggaactgagcacaggcgcaaaatcc

SEQ ID NO: 56290 - DNA, 320 bp, Setaria italica
  Peptide Sequence Number=SeqID_122264
aagctggatcaaggcgagcatgaggaaggctcgcgtctcggtgcgcgcgcgctccgaagctccgatcgtaagtcgagatccatcgatgcatgcatctcttctttaaaatctttaataatttgtgtcggaggaatcaatcctccgatgtgcatgtgctgatgatgaattgatgatggaatcggcagatcgccgacggttgccagtggcgcaagtacggccagaagatggccaaggggcaacccctgcccgcgagcctactaccgatgcacccatggccaacgcatgccccgtgcgcaagcaggtaacttgatttctgcgac

SEQ ID NO: 56291 - DNA, 249 bp, Setaria italica
  Peptide Sequence Number=SeqID_122265
ttttttaactttttttaatttttttaaaattttttaactttttagttttaaggtttaattttttcttagttcttaagtttgtattctacgttagtaacttgaatctcgtttcgatgtccattgccttgcttgggcaatgcagcattttcactcttcttgcttcttgaacttcctccttcagttcattcacatcctgcttcctagttcgttgagatacattttcttcctcttcaattgctagttgaactc

SEQ ID NO: 56292 - DNA, 237 bp, Setaria italica
  Peptide Sequence Number=SeqID_122266
agtgcctggcattggcagcaaccgattgatttcagtttagtcgaatctccgggcgagcatgagtgctgagttgcgttctctggttgtttcgaagcccagcacaaaagctgagctcctttctgggttgccaaaagatagcttgcggggcagcatctccgccgcctctaacaccacacagctgaaaacagatggtataaattagatagtacaatggcctgtgcttcagaacaccagcta

SEQ ID NO: 56293 - DNA, 362 bp, Setaria italica
  Peptide Sequence Number=SeqID_122267
aattttagcttcagcatttgccatctcatgaacttgctgcagtttgtctacaggtactggtaggcctaagccatccattttctccctatacaccttcagacagcgatcaaggatggctttattaaaaatttcaacaagggatcctgttgatggaatttcacctttattcaaagcctcaagaatctgctgcaggaaagacacaaagtccttcccattcagatttttcccctgcacgatttttggttttatgatggatgcaacaagctgctttaattgttcccgcctttttacatataatggttcgaagactactttagtacctaccaataagtaacaaactaaattaaaattttagttactta

SEQ ID NO: 56294 - DNA, 470 bp, Setaria italica
  Peptide Sequence Number=SeqID_122268
gttgcggatggcttctagtggctccacggtaagcaagcacgtacttccttcgtttccaaattagtcattccaactcatatattctcttataggcttaggcggacaggtaagtattttttgtggctcgccaaacatacagaaagtcctgaacacaagcacctacgacaacaataggtacgtagttcctgccttcctggacgatgattaggtagcaagtgtcatcgcagacagagaggtgcatcaacaacagttccgctgcctaaatctgcaaaagagatttagtatagtctgttagtgaagtttatgacacggggtaatggtatgtgaaaaactacaggtgtttgtttcaaagttttttagtaactgttatcgatagtatttccatgctttttccttttaggtcacggtcaaaaaggctgatggattcaaagctttcagcatcaggagatcctgcctgatagtgttattag

SEQ ID NO: 56295 - DNA, 191 bp, Setaria italica
  Peptide Sequence Number=SeqID_122269
ctatcacttcaattgactcattgccattattgtcctcctccaaccttgctgcacactgccctccctctgcattagagagatggatcaatcagatgagtactcttcaaatgtcaagatcggtgaaaggcctccttggtgctccgaggtactgcagctgcagtagcatggagcaccaaggaggcctttcaccg

SEQ ID NO: 56296 - DNA, 317 bp, Setaria italica
  misc_feature (1)..(1): n is a, c, g, or t
  Peptide Sequence Number=SeqID_122270
nctttttacagaagccgcctcttagagcacatccctcaatagggagcattgtcatctttggaaaaactgttctggccttttttgctgcagaatcattgttgcatcaaccatacatctctagaaatgccagactgcaattttgaaattattgttactcttctccatgttcacactgaaatatggtactctgcaaagaaatcagataatttcattaagtgtgatcccttccagagaacagggtgcaatgtgaggctaaatagactgttacattgcatcaagctgctttgccacctaatttttttgtttactaaacatgg

SEQ ID NO: 56297 - DNA, 337 bp, Setaria italica
  Peptide Sequence Number=SeqID_122271
atcattgttgcatcaaccatacatctctagaaatgccagactgcaattttgaaattattgttactcttctccatgttcacactgaaatatggtactatgccggggagggaggaagatataatactggccccaagttaaactgggagcgctgcaatccctcttctcagcagaactttatcattaagaagcaaaagatgtaaaagagataaaagattagtcacacaaaactcgttggagcagacgtcaatcagtatgacaggaagaaagagaaaatcgggaagaaacaaatacaggtgaaataggatagggaaaatagagagcagcaactccaatccct

SEQ ID NO: 56298 - DNA, 130 bp, Setaria italica
  misc_feature (119)..(119): n is a, c, g, or t
  Peptide Sequence Number=SeqID_122272
aagtgctgaacacaagcacatacgacaacaataggtacttagttcctgccttcctgtatgtttggtgagccacaaaatacttacctgtccgcctaagcctataagaaatatatggtacnctttatcacag

SEQ ID NO: 56299 - DNA, 290 bp, Setaria italica
  Peptide Sequence Number=SeqID_122273
cgatggtgactgtggaaccacaatgtatagaggagcaacatctattcttgaagatatgaacaagcggtaagttaaaagcatttcaaattattggtgagaactttctaattttattcttgaaatctagataagaaatacaatgattaagctgctgacatgtggtagaataccatatatgaactaccacatgattttactaacttcaatacatttttgggtcctgtccagtggaaatgatacgtgatgatgggtgtcttattggtattattggacttcattgcctaccagtg

SEQ ID NO: 56300 - DNA, 222 bp, Setaria italica
  Peptide Sequence Number=SeqID_122274
aaccaactaaaaacaagaatagacaaagacaaaaggactaggaacggtacaatacaataacaatacgactaccagacctcctggcttcaatccctgatccaggagcaatggctgctgctgcatggtaccgagccgctgcccttgcagtgaagaacaagctgcacggttcgaagagctagtagcatgtgatgtgcttcaatactatactgacaggaaatcgcc

SEQ ID NO: 56301 - DNA, 236 bp, Setaria italica
  Peptide Sequence Number=SeqID_122275
ttgcgtacctgtctcagacacagtaactacactatgtaaaaagtgaactttctactgctagcttgagatgctattaattattcatttggtggccttgcatctttgcaggaaactcagtatcttcctatcacaagggggagcaatgctgttctcctaattaatggattaggagccactcctatcatggaacttatgattgcagcaagaaaagcagttcctgagttacaatttggaca

SEQ ID NO: 56302 - DNA, 188 bp, Setaria italica
  Peptide Sequence Number=SeqID_122276
cccacctagagggatagctggtaggagaagggcacaatcatctccaacaataaccatctccttctaatagtaaagaactacactggtgatagacttaattttggattagctgctgagcaggcaaaatctgaaggctataagatggagatggttattgttggagatgattgtcgccccttcccccacta

SEQ ID NO: 56303 - DNA, 205 bp, Setaria italica
  Peptide Sequence Number=SeqID_122277
tcttattgtattaaggtttgtcttgttctattcttctaggttggttggtaagtcggttctattgtagtccttgtcccattgctggatttgttgggccaggcatgttgaccgctgctgtttctggagatgttttcgcttctccgcctgtggattctattttagctgctattcgagctgtaactcgtcccatgggttgccttctaat

SEQ ID NO: 56304 - DNA, 258 bp, Setaria italica
  Peptide Sequence Number=SeqID_122278
attggtgcagatgcagcagaattttatctgtaagaattaggtactaactccgtgcaattttttacagggcaaattacatgaaagttctacacttcagaaatgggctcagaaggattttacccttcctttccttcacctggactccttgagcaccattgaaacgacgaacatgcccttctccctccactcgtagcttctctcagtctccgactctggggcgcattcgcacactgctccagttgcagtcccgagccgccg

SEQ ID NO: 56305 - DNA, 252 bp, Setaria italica
  Peptide Sequence Number=SeqID_122279
ggaagcactatccttggagctggtgaggatggcaccatctggcgatgggacgaagtggatcatggcagctccaaaaactgaagcaagtgcagctgctctgctaccagtgaaaatgcgggactgataatttggttctgaactggttagtgttatggttgttcaagactgcaacctggttgcgctgtagtcagaatggttggtgtcttgaacaaccataacactaaccagttcagaaccaaattatcagtcccg

SEQ ID NO: 56306 - DNA, 400 bp, Setaria italica
  misc_feature (271)..(271): n is a, c, g, or t
  Peptide Sequence Number=SeqID_122280
aggatccggtcccggtggttcgccgtgctcacggtctcgtcgggtatgtggtgcagctctagggtgaagttgacagcaacggcttcgccagggacgatgccgagatgtccctcttccatttcattgccagagatagcgacagcattgaactgaaaggcaccttgtagaggccagcaatgtgtgacagcctcctgccaaccaactccagaccttccaccatgtaggctcccagcctctcaagtggctcaccggacacagaaaccattttccncagctctggaatcatcaaatcaattgcgaaactgttattctgttccactgctctagcacaagcaatcagcagctccttcaggttgcctttgggcatgctcatcatgtgcacccacttctccggttcaag

SEQ ID NO: 56307 - DNA, 371 bp, Setaria italica
  misc_feature (268)..(268): n is a, c, g, or t
  misc_feature (327)..(327): n is a, c, g, or t
  misc_feature (334)..(334): n is a, c, g, or t
  Peptide Sequence Number=SeqID_122281
tttttgttttcctttttgtttaaggtttagggttagttatttccttacttgtcgtccccttgggcgatatggaaatcaatgatatggatcctgtcttctcccttgacagcctctgcgattgcgccgttggccgacatgtagccaaacttgaagtaggggcaggcctcatacaggaagtgcatgtaggacaggagatcagaactcttgggctccttgcacttcagagctttgtagattgagttgcccgaggaggcgagcctggccaccngacccttccaccatgtaggcctcccagcctctcaagtggctcaccggacacagaaaccnttttccncagctctggaatcatcaaatcaattgacgaaactgtt

SEQ ID NO: 56308 - DNA, 232 bp, Setaria italica
  misc_feature (214)..(214): n is a, c, g, or t
  misc_feature (228)..(228): n is a, c, g, or t
  Peptide Sequence Number=SeqID_122282
cgccatggcgtgggtcgcacgcaacggcggcctgaccactgagtcggactacccgtacgtgggaaggcagggacagtgcaggcgtgacaagcttggtcaccacgcggccacgatccgtggcgtctgggcggtgctagggtaaccaccatggcagccatggtcgttcccccacacgatcgcagtccacgatctcctgctccgacagagacacganacggcctgctttancttg

SEQ ID NO: 56309 - DNA, 473 bp, Setaria italica
  Peptide Sequence Number=SeqID_122283
tacatatacatatggaaagccatattggtattttcagtaaccatatatgggctgtcaccagcaatgttttactcatgcagtattgtactgaaactggacagatatcttgtcaacagattacactgctcagatacacaataattttccttaaggaacatgctaaggagatatatgcagaaattcgtgcggcatatattgataccatgaataaggtgagcgtggtattttaacaagaaatctctagccacatcaacactagcaacgtgatctgaatgactaccacataaccaatgtttaacgcccctgatgaattgtgtacggaagtgttgacagtggagcatgtggcttagtattatagcggcaataggcagtgaggaggatttcacataaatgcttgttgttccaaaaaagtagtgattactaatgcctgagggttcaaacatgttaaatgctggattaactcttggtatagc

SEQ ID NO: 56310 - DNA, 511 bp, Setaria italica
  Peptide Sequence Number=SeqID_122284
agaaaatcagcgttgccgaagttgaaccactggtaaaggatttttgcgagccggtacaaggctgcgattgagcagatgcacaaagatgtgatcacatcttttcagcaactttcctgtgtgggatggagatcttgagagcggcgctcgcgcagctcctactctactacaccaggctcaccgagtgtgtcaagaggatcaatggcggttctgctctcaacaaggacctggtgtccatatcctccatcctgttcgaaatcaagaagtattctaggaccttttagttgctttacccccttccatgtacactaagacgactagttaaggggtagtggtgtatccttacattgtaacgacaaagttggcatgtgctactgcagaggaaacaagagtattttgttgtgatttgtagcttcgtcggtcggagttatttggccccctaccctttcccagcgtaagaaaccgtaaagtaaaacctttaaaaaataaaaaagaaaaaactaaaaaagaaaaa

SEQ ID NO: 56311 - DNA, 258 bp, Setaria italica
  Peptide Sequence Number=SeqID_122285
actgattctttttgtagtaaatccaataatattaggctagaacaccgttattaatgcatccatacttttcttgcagatttttgagtttgtcatccagaagttctatgccttgagaaaaccgaaaactaatattcagattctacagcagagtgtccttcttaaatacaaatacacaataattttccttaaggaacatgctaaggagatatatgcagaaattcgtgcggcatatattgataccatgaataaggtgctaag

SEQ ID NO: 56312 - DNA, 242 bp, Setaria italica
  Peptide Sequence Number=SeqID_122286
aagggctgcagcaggagctcgacgactgcaagaatgatcaggaagtcgcaaacatcctggctaacggcatcaaactgcgcgagtacacaaaaggtgtcgagaataacatacgccaagtcgagcttgattccatacaggattacattaaggaaagtgaaaacctagtttcgctgcatgatcaaattcgcgattgtgacaatattttgtcccaaatggaaatggttctgactggattccagaca

SEQ ID NO: 56313 - DNA, 259 bp, Setaria italica
  Peptide Sequence Number=SeqID_122287
ccgcgctgccgcggcgatcaccgcgtcgctcgacctcaccgaggacaacgtccggctagccctagaagaagccaaatccgaggcaaggaatctgaacttatttcccttctccccaacccccaatcgacatgccgttgcagcctcgagctaatgccgccgctggtcttgtgcaccacagctggggcagctgttcgacacgtcggtgggcatcacaggtgaaggctacccgggccgggtgcttaacctacgtcgcagtgcc

SEQ ID NO: 56314 - DNA, 393 bp, Setaria italica
  misc_feature (334)..(334): n is a, c, g, or t
  misc_feature (357)..(357): n is a, c, g, or t
  Peptide Sequence Number=SeqID_122288
cagagaagaagaagcacgagctctagctaagatgagctatatcgacctcgtcagggatcttgaaggtggcagctgcaccgaacttcttcctcccgtcctcccactcgtcctcgtcctccaggctgttactgtcgtcgtcgtcgtggctgtggcacgacggggaggaggggtcgttgacgctcttcgacctgcagttttcagaggccagcatggccacctggcggaggtgagagatctccacgacgacggtgtcatcctccttgggggagaggctgcttccaatggcttcatgatcttcaccttcgcaagttgtgcaatgttccttgaagaaggntgggttagggaagcagcaaaccntccttgcttaagtccaagcttagcatatgtaccctg

SEQ ID NO: 56315 - DNA, 315 bp, Setaria italica
  misc_feature (1)..(33): n is a, c, g, or t
  Peptide Sequence Number=SeqID_122289
nnnnnnnnnnnnnnnnnnnnnnnnnnnnnnnnnccggtaatctgaacttcccaaaagccaaaaaagggtagcagtatcactaagcagcagtgaacattctgaaatggcttctgaactttccaaccgggtgcccaacccagcacgaacagagaagaagaagcacgagctctagctaagatgagctatatcgacctcgtcagggatcttgaaggtggcagctgcaccgaacttcttctccgttcctcccactcgccgccgccacctcccgagccccaggcgctccagcacccggagctcccccgcttcattcgtcct

SEQ ID NO: 56316 - DNA, 375 bp, Setaria italica
  Peptide Sequence Number=SeqID_122290
accaattaaacaaactaaggttaagaaataacttagggtaactaactaaaccaactgccatagttgccattatgattagcactgcaatacaagtagttgctatcacatccatccttgagatgacagtatgaatgccagcagtcatcttcacgctcaatggttaaaaaagtaccacaaaagtaccgacattatgaccagccagcataaaccatagaagatagtaagcagcaccagcccaagcagtttcaataaaaacaccagctgtccttttcagatctgtagtcacagggaaaatccgtaacaaccttggaatatattggaccaagacaacccacaccaatgcattttttgtagtcagtacatctggaccatctg

SEQ ID NO: 56317 - DNA, 342 bp, Setaria italica
  Peptide Sequence Number=SeqID_122291
ccgcatagcaattggcactggatcaatcacaagctcaccagttccaaatactcgagaagatggagcaacataagcagtgcgaaattgaagaattatgcgtataaaatagatagaatcaataactgtccgtattattgttgatgccactgccaatgttttatctataccaatgcaggttggtttgccatctttggtgatgttgatgatgggtaggaagaagaaaagtggatccaccgtctaactagttcttaatttaattttactttaggttttacgttttagtttttaaaaaaacccttttttaatttttttctttttttattttttttccgttttttttaa

SEQ ID NO: 56318 - DNA, 187 bp, Setaria italica
  Peptide Sequence Number=SeqID_122292
agccccaaactgtcgatcaaaccattatgcaaggaacctatatgatttccactcttatctgatgttccaagaagccaccctgcacgccagaaatgcccagcagtacaggactccaggggactcgccactgttccacttccacaatttggggtgccccaccaatagacggcacagggccacgcctccg

SEQ ID NO: 56319 - DNA, 109 bp, Setaria italica
  Peptide Sequence Number=SeqID_122293
cctggaccaagtattccagacaccagtgcttgctgatagatgccaaagttgaaaggaattaattaaacaagtaaccaattaacaactaggttagaaataaacttaagaa

SEQ ID NO: 56320 - DNA, 231 bp, Setaria italica
  Peptide Sequence Number=SeqID_122294
gcaccgacaattttattaaagagaattgaagaacattgtagcatccttcgcaggaatgtgatatgaataatgtctatgtcctggtttgcaactcagagcatgattaacaatggtgttccaatcatggtctgagatatttttacaagctgcacgcagactgtttgcatccttattgtagaaccgcaaaaaatcgtgcacctgatttatatgcatcttctctagtagcctgtg

SEQ ID NO: 56321 - DNA, 310 bp, Setaria italica
  misc_feature (243)..(243): n is a, c, g, or t
  Peptide Sequence Number=SeqID_122295
aaattttaaacaaatttaagaaaggaagaattaggacaataatgaaaaactagccaaaatttgttatctggtggtagtttgctgttggatgactttgatgaatcctttgtccgttgcccaactcttgaagatccagcaacaagttttggagaactctcttgattagcaggtgccgcatcttcctttgcatcttttctcatggttgaattccgtgaagaggatgcagcagcagcagctgctgcngctagtacagcttgggcttccttatgtcttcttttcttttctccctacgtttcttagcttctctaac

SEQ ID NO: 56322 - DNA, 310 bp, Setaria italica
  Peptide Sequence Number=SeqID_122296
atgaatccatagtgcttagactttcctgtcttgcggttccgggcaatcctaagcctcttaatatccccaaactgcttaagaacccttgcatctgatcctcgtagaagccgtgggggatgtgcccaatgtacactacggtcgcggtgttctccggctcctcgggctgctgcaccttccgcagcctcttcccgggccctccttccagcggcaggaagtccttgccctcgccggggcggggagccgcggtgcgctgcgcgagcacccgtcttcttggtttccgtctttctttattcccgttcttatttccctt

SEQ ID NO: 56323 - DNA, 306 bp, Setaria italica
  misc_feature (160)..(160): n is a, c, g, or t
  Peptide Sequence Number=SeqID_122297
atggtttgagcacaccttgcgagtttcacttgttccgccagagaaagttcatccaaaattatggagaggggtgcgacgggggattcataccaattgatcgagtagcaattgaacggaagagacacaacaaggataaaactacagaagaacacaaaaaganggttgaaggaattgtaaagcgggacgaaaagcgtcgcaaaaggatcaaggctgctggtattgattatgagtgtccagcccttttggggagcatccagccttcagcgaaaacatcaaaacccgagtgcacagttaatggccccctca

SEQ ID NO: 56324 - DNA, 461 bp, Setaria italica
  Peptide Sequence Number=SeqID_122298
catatcaccactgatacacaatgtgtcttgttgtcattacggacagagaaaggaccaagttcaagcatggccccagatccaaaggatgaacagccgggccctgcagatccaacaaatagacctaaaaaagtttataacagcatcttgaagaaagaactaggtgtgtgtttgatggtgtatctcctaacctagctagagctctaatgctcgctggtgaggaattacatgtgtggggtttggccggggccagaggtattccctacctcctcaccccttggaccggattaggtgctggaagtgttggtcatttttttgttttacctaggcgtgctttttcctgtaaaactccgaggtgtgtgtgtgtgtgctgtaagggctcttcccctttttcttcttaatataatgatacgcagctctcctgcgtgttcgaagaaaagaaaaaaaaaaaaaaaactaaagaa

SEQ ID NO: 56325 - DNA, 354 bp, Setaria italica
  Peptide Sequence Number=SeqID_122299
tcccattaaagtcacatttatccttgatggctctgtaagcttttctagaaatcatagcatgcatccaatagtagtcaaacgatgctcttagagtcaaattgtcatccaagtctgcatttccaatctgatcaagttttacagagttaccattggttaggaatttaccgatcttataagttacagaagcagctattgctgaaaacttaccgcaacacctttaagtttgacattagttgcattgctggctctattcttagaaacaatcagattagcaagctctggtatatagtgacccgcatagctctcaccagttatgaagaaatcacggtcccgatactcaggaaatttctctag

SEQ ID NO: 56326 - DNA, 315 bp, Setaria italica
  Peptide Sequence Number=SeqID_122300
tggctctgtaagcttttctagaaatcatagcatgcatccaatagtagtcaaacgatgctcttagagtcaaattgtcatccaagtctgcatttccaatcgcaacacctttaagtttgacattagttgcattgctggctctattcttagaaacaatcagattagcaagctctggtatatagtgacccgcatagctctcaccagttatgaagaaatcacggtcccgatactcaggaaatttctctagccaattgacaataaaggtataagcattcgtcttgttggtttcttttggttcttaccggtttattttattta

SEQ ID NO: 56327 - DNA, 246 bp, Setaria italica
  Peptide Sequence Number=SeqID_122301
cttcttttcttatgctagctacaaaccagagttcactgggctccttgctacactccaaatcgctcaatcaaagcagaattacataattgccttcacctgcgcttggaaattaaactaaagccaagctgcaagtgtagtatactaaggccttatggactgcctatgattccataggctggaagatactgtgcaaatggcaatcacaaaacctgctagcttattggatcagtgcggagggagcttccc

SEQ ID NO: 56328 - DNA, 239 bp, Setaria italica
  Peptide Sequence Number=SeqID_122302
tcgcaacagtcagaggagccgggcacatggtcccatactaccagcctcgcagagcattggcactattctctgcgaggctggtagtatgggaccatgtgcccggctcctctgactgttgcgaagaccaggcctttatacccaatgacgtagccagcaacctgccgtttaatgaaagattagagaaccaatattaattgttcacagctatttctagacgaaataatgcatctatgatgttt

SEQ ID NO: 56329 - DNA, 439 bp, Setaria italica
  Peptide Sequence Number=SeqID_122303
ttttcacctatgatgttaactttgaggtagttccaattcttctacttgccaagttgattgtatacaaccatcccgttattgagacctaggagtcctatggtcggtatttttcattgcaaagtttagatttcctgaccttttctatttttgttcacatgctttctcaatgcaggaaagtgatatcaagtgggcatcacgctgggacacttaccttagcacgcctgacgatcattggttttacattgtgaatactcttatgacagtcctcttcctctctgtgatggttgccatgatcatgctccggactctgtaccgtgacatttccatgtacaaccagctagagaaccaggaggaagcacaggaggagtcgtgggtaggaagcttctccacggcgatgtgttcaggcctcctgtgaatgctgacacgctgtgcgtgtacg

SEQ ID NO: 56330 - DNA, 264 bp, Setaria italica
  Peptide Sequence Number=SeqID_122304
cgtaccacgacgtcgcgcaccaatacgagcgtacagaggggtgcacgcgagcggtggcagggtgaataccttggctatggcgtgcgcgcttacgggaccagggagcataccttttaactcagagtggcgtgaaggcaaacgagagtaaggacgagcaaagcgactccgaggagctgttaccaatcaacataacaggatgtgcaagcagggtgtccatgggaaatatatatagcatttgtatctatgaaggaaaaaaaaaaaaaa

SEQ ID NO: 56331 - DNA, 232 bp, Setaria italica
  Peptide Sequence Number=SeqID_122305
ggagaaagaagaagaaatgggaggcatgctcttgccgcatcatcaagtctctccaaaccctttgcgaaagaccacctctgcagcaccgtttgcgcttcacaaagatgggttgatcttctgtacagctccgcggcaaggttttctgcgcccaccttgcgctctcgtcagcgtcatcagatcagagctcaagtggggctgtgttgccagacgctgtcagaaagcatagcaagga

SEQ ID NO: 56332 - DNA, 242 bp, Setaria italica
  Peptide Sequence Number=SeqID_122306
aggcgcctgcacggtgccggtcccgccgccgccgccactgaaggaccacatgggctgctcggtcggtcgcgccgcggcggccgagctcgcggacacgggcagcatccagaaccctccggatgcccgcgctgtgcgcggcgcgggtgttccagctcacccgcgagctcggccacaagtccgacggcgagaccatcgagtggctgcttcagcaggcggagcccgccatcctcgccgccaccggc

SEQ ID NO: 56333 - DNA, 177 bp, Setaria italica
  Peptide Sequence Number=SeqID_122307
cttaaaaaacgaaaaagaaaacaaaacaaaagaactaaagaacaatttaagaaaacgaagttaacctaagaccaccagtttaggacatgtccaagcccaacagggtctgatggtagcatcaatgtcagccacatgcagattgctccatctagtgctaacactaatactactgcacag

SEQ ID NO: 56334 - DNA, 204 bp, Setaria italica
  Peptide Sequence Number=SeqID_122308
tctcgttcaaaaaaagaacagcagaggtcttttggtatggttggttggtcggctcgtctttccaggccaccctctgcatttggatgcgccgacgccacccaatgcaagcctgacccaccactctcacactgcagctgcatacactggagtatggcaggcaaaatgatatccgtgatccatgcgcggtgccggtgacggtgcttt

SEQ ID NO: 56335 - DNA, 183 bp, Setaria italica
  Peptide Sequence Number=SeqID_122309
ggaaatatagattttgtgacatatgctgcattttgtggtaatttgcttctcttttaagcagcttggttgacatttttcattgccacaggctcaggagctcatgttcttagcccagcagaggatctcttccaagctcagcccctgtggcccgtaaacctgaagctcctattttcgctccagcaa

SEQ ID NO: 56336 - DNA, 344 bp, Setaria italica
  Peptide Sequence Number=SeqID_122310
aacttcagctttgaacaccgaaccttgtcctttcacagcaacggccatctacaattgtaacaaacaagtgtcgctcaaaatcaagtgtaacaaacctccatcaatcatcagtgagacaaaaaagaagtcctgtgcttttattgaaagaacctgttgctgaaggaattgctgcattcgacagaactattctcccatatattcagcatcgcaacaaatttagagttatctctgggtcttcgcatcactgcctgatttcccatacagagaaagaacagtattaacaggaagaaaatatggagattgattagttatccgaactaacctggaggaccattgtcttctcg

SEQ ID NO: 56337 - DNA, 201 bp, Setaria italica
  Peptide Sequence Number=SeqID_122311
ttctttcacgaacatttcaaccttcttatatgtagagcttgaggcatctggtgtgcttttaccggcttgatcaggtgcttgcttcttcggatcatctccaccttcagctatatggcttggtttgtctccttttgggtgtttgctgtttagtgatggtttgtcactggtaagtattttctttcttttagttttggttcttta

SEQ ID NO: 56338 - DNA, 228 bp, Setaria italica
  misc_feature (224)..(224): n is a, c, g, or t
  Peptide Sequence Number=SeqID_122312
cacgaacatttcaaccttcttatatgtagagcttgaggcatctggtgtgcttttaccggcttgatcaggtgcttgcttcttcggatcatctccaccttcaactcttaccaaaaagactgaattaggcagtgatctgatatcacagaaagttgcatctgagaacaatgttagtggcagtgatatggaagatgctctacacagagcagtcgtctctgatctaaagngtag

SEQ ID NO: 56339 - DNA, 388 bp, Setaria italica
  Peptide Sequence Number=SeqID_122313
gggacccaaagtacagcacaggaggcatccataggcatgaacagatagaaatcatacgcaagcgaatcgaacaggcgcagatcgaggaagagcggaagctagggtttaggatgtgctcggtacctgcatgcaggtctcgtcccagtcgtggccgaagcggatgatgacgaggcgctcctcctcggcgaggatggcctggtccaccgcccacccagagtgcagatgcggctagtctaggttacgtactatcttcttccgccgccggccgctcctccttctctcgacttctctcctgcggatctggaggtatacggcggaggcggaggacgcgtctgtggacggcggctggaggcaggtcaggtgctccgctccccggagacgagacgcg

SEQ ID NO: 56340 - DNA, 398 bp, Setaria italica
  Peptide Sequence Number=SeqID_122314
gtaagactagaagactagaattagaataggaaataattaattaagatgtcaaggaagttaaccaacactcagaaccctggagtcggtcaccaagtcgagttgcaacttggccaacatggtaggccagaaattacttacacaacaatagccaacacaaatggctttagtaacggtacttggtggagtagtcctttggagcaatcaccagaccacggcccttccgggcacccctgtacacagtctccacaatgtcaatgaactcctgcttgtccttcaaggcccagttgattttgttgttggttcctgacttcaacacgatgtacgagctgtatgatccctcgaccgtgatgttcttcttccggaacaagcacatcatgattgatcttgggacaggaaac

SEQ ID NO: 56341 - DNA, 382 bp, Setaria italica
  Peptide Sequence Number=SeqID_122315
gttgaagtccgggacctcgatgatgtctacgaggtagatgacagcaaagttctttatggtctcggctactgcagccagcacttcatccatctgcatgcaggtctcgtcccagtcgtggccgaagcggatgatgacgaggcgctcctcctcggcgaggatggcctggtccaccgcccacccagagtgcagatgcggcagcaggtacgacatcttcttccgccgccggccgctcctccttctctcgacttctctcctgcggatctggaggtatacggcggaggcggaggacgcgtctgtggaacggacggactaggaaggacaaggtacaaggtagactaccgactaaccccggtaaagtaaacgtaaagtaaacgtaacgtaa

SEQ ID NO: 56342 - DNA, 346 bp, Setaria italica
  Peptide Sequence Number=SeqID_122316
agctcgtacatggtgttgaagtccgggacctcggtgatgtctacgaggtagatgacagcaaagttctttatggtctcggctactgcagccagcacttcatccatctgcatgcaggtctcgtcccagtcgtggccgaagcggatgatgacgaggcgctcctcctcggcgaggatggcctggtccaccgcccacccagagtgcagatgcggcagcaggtacgacatcttcttccgccgccggccgctcctccttctctcgacttctctcctgcgggcgccgaactgcttacccgcgagaagattcggatcgtgaggagagagcgcctgaactcacctgcggatctgga

SEQ ID NO: 56343 - DNA, 187 bp, Setaria italica
  Peptide Sequence Number=SeqID_122317
ctttatggtctcggctactgcagccagcacttcatccatctgcatgcaggtctcgtcccagtcgtggccgaagcggatgatgacgaggcgctcctcctcggcgaggatggcctggtccaccgcccacccagtagttgtctagtattgtcggttcttagttcttaggtttacgttacttatttactta

SEQ ID NO: 56344 - DNA, 233 bp, Setaria italica
  Peptide Sequence Number=SeqID_122318
gtgctttccatatctgcaggtgtgtgaaatgctgtatctgcatttcttttctgtctttcacttccaatcggggccagatgggcagttgtagtgcttaaattgctcccagtaggggcgacctgcctgatctatgcagttgtctttgcccaatggatgacactcttcactaagcaagcaagtacactagataggtggataggtaccttacaggtaccagctgctacccttcaaag

SEQ ID NO: 56345 - DNA, 467 bp, Setaria italica
  Peptide Sequence Number=SeqID_122319
catccggagccgcttgccgatgacggcggagaggttgcgcacggcgtccttctccccttccctcaggttgtactgcgagatgaacccgcagacggcgatgcggccgtggacgcgcatgttgagcagcacggcgtcgagcatggcgccgcccacgttctcaaagtagatgtcgatgccctccgggaagcaccgcttgagcgcggcggcgaggtcggcctcctccttgtagttgaaggcgtcgtggaacccgaatttcgtcttgaggagctccaccttctccttagaccccgcgctgccgacgacgtggcacccggcgagccgcgcgaactggcccaccagctggcccacggcgccggaggccgcggagacgaagaacggtctcgacccttacttacggacgacgacaagaatactacgtaggaaaccccaacgtaaggacggtagaaggacccggacaatagaccgaa

SEQ ID NO: 56346 - DNA, 292 bp, Setaria italica
  Peptide Sequence Number=SeqID_122320
gcagacggcgatgcggccgtggacgcgcatgttgagcagcacggcgtcgagcatggcgccgcccacgttctcaaagtagatgtcgatgccctccgggaagcaccgcttgagcgcggcggcgaggtcggcctcctccttgtagttgaaggcgtcgtggaacccgaatttcgtcttgaggagctccaccttctccttagaccccgcgctgccgacgacgtggcacccggcgagaccgacgacgaaactaaggaacccaaaccaaagaaactaaaggaaacccaaaacggaaaac

SEQ ID NO: 56347 - DNA, 351 bp, Setaria italica
  Peptide Sequence Number=SeqID_122321
gcttcttccaaaggtccactcctcccagttgggcatatccacgatgaccaacatttcaagcttgggaaagctactgaagacccggtattactacccgtcgcacagctaacaagttcgggtccaatcttggtaactgcagttgctccctgaatacagggactgatatataaggccctaatcagagttctgcatcagaaatcagtatgcggaataccagtttctttttgctcccaacagggtctcctcagaaacagttgctgcttccaacatcaagattctactatctgcatgatcacatgagcattagccaagctaaaggatgcaacagcattagaacgaaagagcacttgc

SEQ ID NO: 56348 - DNA, 465 bp, Setaria italica
  Peptide Sequence Number=SeqID_122322
tagaaataatactgtaagtgttgaaagttgaaatagtttattttgaaggatgtcgcataaagactatgatagatatatggaaatgtgcaacgatctctttgtcatcttgacgatgaattgtctactagtatgaactgtgatggccatttctttatcctctgaaaatatatgcactgcatttcactccttttctgcaatatataaatggtgagaattgcacaattaattttgttcactctgtactgcaggtacccttactttgctgtagtcctgaacttcagtcaatattgggccctatattgtttagtggaatggtacacggctactaaggatgaattggcacatattaaagccattggcaaaattccttccttcaagtcaatagtgtttctgacttggtggcagggtgtgataattgctatcatgtattctttgggcttggttagaagtccattagcacagagc

SEQ ID NO: 56349 - DNA, 419 bp, Setaria italica
  Peptide Sequence Number=SeqID_122323
accagtgtctactgtggcatcttgcgtgatggtctatgaaggcatttgctatgtattgcttttggaagatatattactgcttgtttaggtggtgaagaaaggactattgcatttttgaagagggaaggtggcgaagattccggggaacctcttctgcatcatgcctctgaaaagggagtcattcatcatcattttcctattaattacatattgaaaccatggagacttggtgtgcggttttaccagattatcaaatttggtatatttcaatatgtgattataaagacactcacagctagcttgtctcttattcttcaacctttcggtgtatattgtgatggagaattcaaatggggatgtgggtaacccttaactttagactagtaagtacctagaaacttacaagtacaaattaatta

SEQ ID NO: 56350 - DNA, 252 bp, Setaria italica
  Peptide Sequence Number=SeqID_122324
acggtaagatgctcttcttcgtttgtaatctcgttcttcagctaaaagctcctcctttgtcttggttctagcagattcctggttctctactcgccgtgacagaattccatcatactccataacagttctgtagtttggtctaattcatgtgtgttttggatgagagttggtatgccattgatccatttacttctgtgcctgatcattttacatgagtctgcctcaagggtgtgtggaaatggggatttttcg

SEQ ID NO: 56351 - DNA, 316 bp, Setaria italica
  Peptide Sequence Number=SeqID_122325
agttggatcgcccaatgtgggaaagtcatcattagtccgcatattatcatctggaaagcctgaggtctgcagctatccattcacgacaagagggattctaatgggtcacattgtatccaatcatgagcgttttcaggttacggacactccaggactacttacgaggcatgatgatgacagaaataacatagagagattgacacttgctgtcctgtcttatctaccgatcgctgtcctgtatgttcacgatcttattccgtaagtacttgttggtaaccttctagttagtccgtattctagtacacaacgtacaagc

SEQ ID NO: 56352 - DNA, 334 bp, Setaria italica
  Peptide Sequence Number=SeqID_122326
gtgtttgtaaggcttgtatttgtcaagttatgaatttggaacactaaccaatattgagcatactgattcgtaactttggttgcaatgcaatcgcagaaagatatagatgtccgtttacttcctgtagctatgtatttttaccatatgctttcattatttagtatatgacattataatactcttgtgcttgattgatttaattatgttctaccagctacaagaacttggaaattgcgttgaactgtgggaacatgttacgagaatgcataaaatatcctacacttgcaaatgctctttcagatatatactggagtcaagtagcttcgagttgttt

SEQ ID NO: 56353 - DNA, 319 bp, Setaria italica
  Peptide Sequence Number=SeqID_122327
tacaattttttagactagcaatggaagcaggtatttgttgccaatccaaacaagcctcgtgagattgttcgagttttggttgacaatcacagagaattgttgaagctactccacaatctccccacaagcaaaggtactaatatattgcctacttcctacttaaccctagctctattctctgacaaagcaattgatgccagcaatagagtaaccgagcattttagctggatgtcaatattaatggaaattttccttgttagattgctgagagatgcaaattgggacactaataatgcattctgtttgacaggcgaagatg

SEQ ID NO: 56354 - DNA, 217 bp, Setaria italica
  Peptide Sequence Number=SeqID_122328
ggccgagggcaaggaagagggcaggcttgggggccattggtgattgattgctctacggtttgagcaggaggtggtgttctagtactgtgcactgcgtgttctgtgtttggtcatgaactgcagtttgtctttgatgttcttttgtctggtcttatgaactggttgtatctgtatgtttactgtaaactgttgttgcggtgcagcagtatggcatccg

SEQ ID NO: 56355 - DNA, 267 bp, Setaria italica
  Peptide Sequence Number=SeqID_122329
gcaagcagctggaggatggccgcacccttgcggattataacatccagaaggagtccaccctccacctggtactccgcctccgcggtggtcagtaaagccatctgtcattgaagctgctgctgtacttgtccggtctctgccatgaagggtgtcatctttgaagttatcgtgtggcttgtgttgaaactgtgtttggttttcatgaactggttgtaccccctagtagtagttacaacctagaaaacaagttagttagtacggtacgta

SEQ ID NO: 56356 - DNA, 459 bp, Setaria italica
  Peptide Sequence Number=SeqID_122330
taagaaccatccacgtttcaacgaactgcttgagaacatatacacagtattggatttcttcaatagccgaaaacctcctgacgatgcaatacagcatacacaacctcaggattccgaggcaatgcatatgtaaggattgcattaatgatttccagaacaattcttaagaaatctgtatatatgtgaagctccgtagacatatcatctgcgatgttgtctgcttccatctgatcggatataactttgtgagacttgtcattttttaactcagctagtttggcatacttgcgagaaagcatgtcaaagaggctaaccagcctttgtgatgcataggcactcaacctatgcacatgaggagccatatttgctaatattgcaagacagtttgtgtgaaggtagacatctcttagcttggagaggttgtacttgatggtccggattagtattacaaccatcaaa

SEQ ID NO: 56357 - DNA, 348 bp, Setaria italica
  Peptide Sequence Number=SeqID_122331
aattaagaataggggaaataggtactgtggataaggtgcttgaagtcatctaattgttgcatgtccattcggctattgaagaaatccaatactgtgtatatgttctcaagcagttcgttgaaacgtggatggttcttaaatggctcaaaaacctcctgacgatgcaatacagcatacacaacctcaggattccgaggcaatgcatatgtaaggattgcattaatgatttccagaacaattcttaagaaatctgtatatatgtgaagctccgtagacatatcatctgcgatgttgtctgcttccatctgatcggatataactttgtgagacttgtctattttttaactc

SEQ ID NO: 56358 - DNA, 243 bp, Setaria italica
  Peptide Sequence Number=SeqID_122332
tctagcaccttgcgcaatccctccatcccttcttccattatacaagcattatgaaccaacagaactattaatacaaaagaatgagtacagttcgaccatctggtatatgccgcctatttacaacaagctcttcgccacgatgaaacaaaaagatgtctttatgttcttgttctagtaacttcttaggttttcggttatttcttatttttctttttccttttaaacctttttttctttttcttt

SEQ ID NO: 56359 - DNA, 361 bp, Setaria italica
  Peptide Sequence Number=SeqID_122333
ctatcaccatcctattaccttaaattgcacaaaaccacacctctggtcaaaatcactaacatatagatgactacaacaaacaacaatatgtcaaaagactaggtggcatcactacaattcttccctacagcagccaagaacccaaaccagatgcactccaccagcaacacactgaccattttgctccatttgtgccaaattatgcaaacagtgagaatgacaagcactgatccaactaaaatgaacatgaatcaaaaactacaaacaaaagaagaaactgaactgcaggataacctgtccagtgctctcgtagtattcgttgagtgcccactggtacttggactggtccagcccgaaccat

SEQ ID NO: 56360 - DNA, 308 bp, Setaria italica
  Peptide Sequence Number=SeqID_122334
tagtagatgccggtgactctggtctgcatcttgaatttgatttagggcggaacagagggaggatctttgagtagctggactgagaagattggccaaagtcaagatttccagcggcagaggcagccccctatgtgccagttgggcactaccgcatgccttgccatagcatggctccttcagtcacaatcaggactgctgttcctgtgttctctgctccacctctcccacctccagctgctcgcacgcaacagcagcttcctcctctcatgagccatcccaccaccgattcggatggcatcaccagttcg

SEQ ID NO: 56361 - DNA, 407 bp, Setaria italica
  Peptide Sequence Number=SeqID_122335
agtaaaacgaaaaagggtaaaaccgtaaaaaagaaactaagtttaagaagaataactaccaatcaagtagatgccggtgactctggtctgcatcttgaatttgatttagggcggaacagagggaggatctttgagtagctggactgagaagattggccaaaagaaggcttcctctctggctgcattggaaatttcttggggaatggcgaagcatggggataattagccattgccatcttctccttcaagcgataattgagaagggctcgagcgatcctgatctgctcctgctcatcattgttttccggcttcatttggatgaattagcttcctcacgttaccaattgtttcagtgcagaccatgctgctgaagcagcatttttttcagcctgtttcttattcttagc

SEQ ID NO: 56362 - DNA, 440 bp, Setaria italica
  Peptide Sequence Number=SeqID_122336
atttgcattgcattaagtgaaaaattgagacagcatccatatctaacctaaaagaatacctttacaagccatagagatttaaccaagttgcaatacttcactctacctcaagattattgcagaatgcagataaatatgaataagcactagaactatcccaaaaaaaatgaataagcactagaactacaatttctttcatcaatatgcaataagtaatactctacatttgttttcagtgcagaccatgctgcttgaagcagcatttttttcagcctgtttcttattcttagcaggatcacctgtaaacgtgataccagctagctctactgtgcatgtgaaaaccggcaggtggccaagaccagatcgctcggttgtatatgatggcaacggcgctccaactctctgagctacttcctgcagaaggttcttataaacccctg

SEQ ID NO: 56363 - DNA, 310 bp, Setaria italica
  Peptide Sequence Number=SeqID_122337
gcttccgccttgctgtcgtcaccatccgcagcccttgattgccttgtcggggtaacctctgatgatgtagtgcattccacggcggtggtattgccagcagcagaacatgggacttcactggtaactgccgctgaagcttccttggcttgagcaggagcctcgatcttaaccgaaggcctgattgctggaattggagctgccagtgattcctttggtgcttgggtttgcacatccttcaccttaattgggatcacacctgacaagacgaataacccaaacaaaagaacggaaccggaacgttaagtaagaa

SEQ ID NO: 56364 - DNA, 237 bp, Setaria italica
  Peptide Sequence Number=SeqID_122338
tccatcagtagatgccggtgactctggtctgcatcttgaatttgatttagggcggaacagagggaggatctttgagtagctggactgagaagattggccaaaagaaggcttcctctctggctgcattggaaatttcttggggaatggcgtaagtctattggggtattaatttagtccttatttgttccttatcttctccttcaagcgataattgagtaagggcttcgtagtcgtatt

SEQ ID NO: 56365 - DNA, 257 bp, Setaria italica
  Peptide Sequence Number=SeqID_122339
gtggcgtcggaggtgaacatgccctggtgcgccttgaggttgacgaagtagtggttgtcgaaggagaggctgctgccggggtccatgggcaccaccgtcgtgttgtcgttcgggtcctgcaggttgcgccggcactgcccctgcgcacatgatgtatatatacatatagatatctgttgctaagatgtgccgtcgtttttttttcttttctttgtctttttattgcgaaggaagatgtgtcgttttgcaagcacaag

SEQ ID NO: 56366 - DNA, 464 bp, Setaria italica
  misc_feature (435)..(435): n is a, c, g, or t
  Peptide Sequence Number=SeqID_122340
aacaatactaataatactagttaaacaataaatgtgccaacctaatgttgcatgtaaaatttactacaaaccatatcattttccagcagtgtatcctaaaccatttacggcattaaagctcatctttttaagtacaatacctaaaatttctgtccaatttgcattgctaaagtgcagaatgacattacaatttcaaatactgatatctatcgcagtatgtggcacaagtgtgaaaagtccgtacctgatccaccgccgacaagaaaagccatccccctggcccctaagcttttgtttaaggatcatctctgcaccaatctcaatattccgtggtcgtggctcaactgtactggtgactgacacatcattgactgaacacagaaaagcatctgcatggcaaagagttctccaccaaagtttgctagatctaccggnagtatcctcccaggaaatggtgcagcaat

SEQ ID NO: 56367 - DNA, 266 bp, Setaria italica
  Peptide Sequence Number=SeqID_122341
tagtaagaattaaagaagaaggaaattcacaaactggtgttagaaaccttagccaaaaagcttgatgaaatgtctaaacatctgtaagaattatagatgatacaatcatgacataggccaggaagaagaacatgacaatctggatgaagaacttcgggttgtccctcaaacttgggcccaccactgatctactggcaatccgctgtgagagccgatggaaggggcagactctgaatgaaaacaacacctggtcccgtgagagatgc

SEQ ID NO: 56368 - DNA, 371 bp, Setaria italica
  misc_feature (47)..(47): n is a, c, g, or t
  Peptide Sequence Number=SeqID_122342
cctcatcaagcatcaattgacttggatagcttgatacactgtcaaangtttgctgagctgcttcccaccagcagtgaatacgagtttattgtgatcactcatgctacctccaagtgacagaccacgccgatctcggctacctctaacactgcgaccaccgacagaagccagcccagccatcgttgcagcaacaaatgacattgcacctcgtgaaccaaatgtgcttgcacttcgaaattcagaagaatctggtcccctgctagatgtgtttctagcaatggagccagatgaacggactagacgacctaggactaaaaactaggactagaacccaaatagtttacttactaattactaagtactaattacta

SEQ ID NO: 56369 - DNA, 249 bp, Setaria italica
  Peptide Sequence Number=SeqID_122343
acttgaaggatgctggtgataatcaaaagtaacaccaagttacccccaaagaacagcattggacagaataactatacacatgttccaatagcaaatgtcatgatagatcatggaaagtaccttcctaacaattgtaagcttgggactaagggccgccaaaccaccaggtggaaggcgaggagcaccagttacaaactggcagaacgcatgctgctgctcaggggtgaattccaccataatctcaagcag

SEQ ID NO: 56370 - DNA, 479 bp, Setaria italica
  misc_feature (215)..(215): n is a, c, g, or t
  Peptide Sequence Number=SeqID_122344
gttgcaggttgatccatttcttcatttagttgaagacagtagattacaggtgcttgatagcgtagctaaaccttactatggttcaaaagaggatgacgatcttgctctaaaatcgctctccaacattgacatgaataaagatcagtcaaaagaaacatccgtgtctcttatacttaatagcctggaagatctacccgaggtcctgcacaaaaagntaatggtatatttatgtaactttcttatttaacaatattctgattttcattctctctgcagtcagaattatctaccattagaaaacagctgcttgaggaattttcagcagatgacaattgtcctctgggtgaaacatcttcaaaaatttgcagcacaaaatggaaaaatgcctcaaaaatctatggaggtcatcccgttgggatttgttttgaagatgatacccttgtcgaaccatctgacagcctagcagaacctcagttgcg

SEQ ID NO: 56371 - DNA, 336 bp, Setaria italica
  Peptide Sequence Number=SeqID_122345
cttttcatgatatccttccctttacctaccattctttggctgaataatgtgacaggcgtttgttggtgtagctcataatctaaattcaattgtcgttgcaatcagaggaactcaagagaacaggtgatctagctgcatttgcctctattgttctcagttagactaattctgatttacaggctactgttttcagttaaatgtcatttacttttagatttgatcaaccagtgtacagaattggatcgaggacttgatatggaagcagcttgatctaagctatccaaacatgccgaatgcaaaggttaatgccaacaaaaagtcgctagactgagtcgc

SEQ ID NO: 56372 - DNA, 404 bp, Setaria italica
  Peptide Sequence Number=SeqID_122346
caccatgtggacaagattagccattcagcataaagtgtgaattttgtcaactgctcagcagtcaacttcccagacatgatagctagccctccaatcaccactccgatgacctacgcgaagcttatttgcaggagtacttcatcagtaatgtaaggcaatgtccatatcagactccgactttaacatcaccagatatttttcaagttactatgatattaatcattgccgaacaacaggaacaccggagatacctgagtagaatggtatagatagttcaagcttaggctccagcctccgtaagccactgtctgccgaaagcttacatcatatagcttatcgagccactttgcatacctttaactcctgtctttcttgttccgtacacacgcaccgtcctaaccaaa

SEQ ID NO: 56373 - DNA, 427 bp, Setaria italica
  Peptide Sequence Number=SeqID_122347
ccagatgttgttgctgttccttgccttgccgttgagcaccaggtttcggttccctttgctttcggcaggtcttgtggatccaccatctgtactgtcctctgcttctttgctgcaattgcatcaaactggggtcacaactcaactttttgagaggttgggaacttaggatcatcattgatcaataaatgtaagtgttctaagcagacctacacattggtcatcggcaaaccgtacactattctattttaagattatctcccactgtaagaaattttggtcctgcaaagaactaactaaaattgaagaaaacggcataccattgttgaattcttggtaaccctcttgaagcttacgctttgtagcttcgagcttggcttcctttgcaagctctagctttgctcgaacagaattttcatcctgccgaggc

SEQ ID NO: 56374 - DNA, 240 bp, Setaria italica
  misc_feature (210)..(210): n is a, c, g, or t
  Peptide Sequence Number=SeqID_122348
tgctttgtctgccagttgaatggctcattcggtcgggattgcttcattgcagactgatctagcctccaattctgctctgggtcataccattggcccataggtgattgcttcctgactggctcttggtttggaggattacaccgcgtgcgctccttggcatcacttctaatgtctcagatagctggattgaagtgcatggtgtcgcaaacngggcagcctcgtccattggaggagaaggca

SEQ ID NO: 56375 - DNA, 225 bp, Setaria italica
  Peptide Sequence Number=SeqID_122349
caatgggacctccatcattcacccactcattaactgtagacttccaaccctcaatgagcgatcggatgagttgccgaatctgctttgaggcatgctttctcagcggtttcaccgccattccaatctcagtagcctatatgaccaaccgagagatatgaacaaagaaacaaaggatagttcatgaagcacatgcggcggcagtttcatcacggctcaccatgatgg

SEQ ID NO: 56376 - DNA, 210 bp, Setaria italica
  Peptide Sequence Number=SeqID_122350
atgaacaaagaaacaaaggatagttcatgaagccacatgcggcggcagtttcatcacggctcaccatgatggcgtccaccgtgaattccagctggcgcagcctctgaagcagctcgagcaactcggcctccgacttttcatgggcattggagagagcggccttgacgcggaacgcctcggcgacgacggcgtcattccgcggcgctgaac

SEQ ID NO: 56377 - DNA, 290 bp, Setaria italica
  Peptide Sequence Number=SeqID_122351
atacattggccataggtgattgcttcctgactggctcttggtttggaggattacaccgcgtgcgctccttggcatcacttctaatgtttccatcatcatccatttcatcgaagaacttcgaaaccaaagcaggtttccagcaccaagaaagggtccaagtttgtcagaacaactgtaacaatgctagatgaagtaaaaacaaaacagaagtttctgtgtctggtacctcagatagctggattgaagtgcatggtgtcgcaaacagggcagcctcgtccattggaggagaa

SEQ ID NO: 56378 - DNA, 324 bp, Setaria italica
  Peptide Sequence Number=SeqID_122352
tgtttcgtctttgtactaacttttcttctttgtaaactttctttcccttctacttattattcttaggtagtaattcgtctagttcaaggatggcgacatgctattgtttacaagagcttgtaagatgtcaaatctctgagatgagggcaccattgaaataacctttttcaaagcagcaaatgcttttttacgcatcaatgcctcaggagcagccatcatgacgctttcaatggcctaccaatgtccttgagtgttgcaaaaatcgaggagcataagaggtgaaatctaacatgattaatcagtttcttcaacatgattttcacc

SEQ ID NO: 56379 - DNA, 246 bp, Setaria italica
  Peptide Sequence Number=SeqID_122353
tctgggataggttggatgaagctgagctcaccagggagatattgcagtccattggtggtgtagatgatacaccctatgacgagagtttggaaacattgcaggagaagcttggggaagtggttgcgtcgaagaagttcttcctagttcttgatgatgtttggaatgatgaggggaagaccgagctggagaataggtctgtgtggaacaaagtgttggcacctattagcttctgccgcaatcgggagc

SEQ ID NO: 56380 - DNA, 256 bp, Setaria italica
  Peptide Sequence Number=SeqID_122354
taataccatgttacaaagctattgagtttatgggtttctttctttcaaagctacaccatttaggcaatcatttattagtagtagcagctggtgcacaagtttcatatagtacaatgaaatcaatatgcctttactaaccttttccacgatgatgctgacagcttccaatggaggcggtcccagtaagaccaacatagttgtcgccgttttcgtaagcttagcagcctttctcctcttcgggctcggcggattcttc

SEQ ID NO: 56381 - DNA, 258 bp, Setaria italica
  Peptide Sequence Number=SeqID_122355
catcaagggcggcgacagcggctgcatcatctggagctcgctgctgatagacatcaggcatttcccttccggtggcgaggatctgtacattcgtcttgcggcgtccgatctgccttccaatggaggcggtcccagtaagaccaacatagttgtcgccgttttcgtaagcttagcagcctttctcctcttcgggctcggcggattcttcttctggaacaagtttttcagaaacaaagggacgtctcagagcaacgacaa

SEQ ID NO: 56382 - DNA, 266 bp, Setaria italica
  Peptide Sequence Number=SeqID_122356
aacagattccagcgtttggtggatcattgaggaacagagcatggcttttagatgtagcttcgaatctgtgagatggatggtcaattgtaggactaccatgaacaatggtcaattgtaggactatcatgaacaattctttacaatcattgtacatccgcatcgctagaattgtaaagatgttcatgatagtcctacaattgaccattgtcaattgtaggactaccatgaacaatggtcaattgtaggactatcatgaacaattgcca

SEQ ID NO: 56383 - DNA, 241 bp, Setaria italica
  Peptide Sequence Number=SeqID_122357
tgagtttgccggcgccgccctaattttgcttgctataccaatagaatggacttatcactttatcactgaaccgccatgagttgcttgctataccaatcaatataatggacttatcagttaccactgaaccgtgtcccatgatgcaggttgcagcgagcttcgctgccgaaggtgctgtgatgaacgagctgaagcaatggaacgacctctatggcggaaggggctccaggaagaaacagca

SEQ ID NO: 56384 - DNA, 343 bp, Setaria italica
  Peptide Sequence Number=SeqID_122358
tttattttaccttttagttttcgttttagttttgttttaaattttaggtttagtttgttactatttgatgacattggagccctggctgatatcaaagagtctcttcaggagctggttatgcttcctcttcgacgacccgatcttttcaaaggagggcttctgaagccgtgcagagggattttgctgtttgggccacctggaacagggaagacaatgcttgctaaggctatagcaaatgacgctggtgccagcttcatcaatgtatcgatgtccacgatcacatcgaaatggtttgggaggatgagaaaaatgtccgggcattgttcagtttggctgcgaaggt

SEQ ID NO: 56385 - DNA, 419 bp, Setaria italica
  Peptide Sequence Number=SeqID_122359
atttttgttgatgaggtcgacagtatgttggggcagcgtgctcggtcgggtgaacatgaggcgatgcggaagatcaagaacgagttcatgagtcactgggatggtctgttgtcaaagtcaggtgaaagagttcttgttcttgcggcgacaaatagaccgtttgaccttgatgaagccatcatcaggagatttgagcgcagaatcatggttgggcttcctactcaagagagcagagagctgatcttgaggacactgttgtcaaaagagaaagttgacgaaaatattgatttcaaagaacttgcaaccatgaccgaaggttacagtggcagtgatcttaagaatctttgtgtcaccgctgtctttaaccgtacccggtttaaaggggttaagttactttacctttagttaaagtaaagtta

SEQ ID NO: 56386 - DNA, 213 bp, Setaria italica
  Peptide Sequence Number=SeqID_122360
atcttttatgacatatcctaagaaggatgagcctagagattctgatttgttctggttctgtcgtgcagaatcgttgcatcggcagacaagcaacacggatttaagagcaagaggctctgatggttctaccagtacaccttcacttaggaaaaatgcctctgtatcatctgacatgagcgatcttgcctcacaatgttcaggacattcagtgag

SEQ ID NO: 56387 - DNA, 284 bp, Setaria italica
  Peptide Sequence Number=SeqID_122361
ccgaggtactttttgggaaggtgaggaattttttccccaacccgttgtttccccccccccctcggtgttggttgacgaacaagctgttggtatgcggttagggtgtggggaactgatgcggagctcttgcgcaggaaggttatcgaatcaagtctctcgatcaccatggtgcccagagatagggcgcatggcgccgccgcggcccgacggagaagctcgttcaagggcctatcttgaacaagtgacgaaaagaaggctcccaagaaagtgcataaatctgagag

SEQ ID NO: 56388 - DNA, 235 bp, Setaria italica
  misc_feature (119)..(119): n is a, c, g, or t
  Peptide Sequence Number=SeqID_122362
aatcatttttcctttaccttgttgtataaacccattcttcaacccagcacaaggattcgctgatccacttgtgtcaaatatttgaagcaaaggaacaaaccaaataaacatagtgtgcncaaaaatctgcattggagacctacgtttccagttgcctgatcaatgaagaagggaaaggacagcaaggatgaaccgcgagtttttgtaccgacaactataaagcaaaatttcggca

SEQ ID NO: 56389 - DNA, 183 bp, Setaria italica
  Peptide Sequence Number=SeqID_122363
caaattggagaagataccaagcacggattgtgtactccaccctccttgcatagcttcatgaactcggcacggtcattgtcgcgctcgatgaggtaggcgagcttcatgacgagcttgggcttgaggatggggatgacggactcgcgctcgagccgtatcacctccttgacgaccccgtccctc

SEQ ID NO: 56390 - DNA, 287 bp, Setaria italica
  Peptide Sequence Number=SeqID_122364
ttttttttttaagtatattattcacaaatttactttttattccaatagagctatgggggttacaatttcatgtgttgtattcagtacctgcctcgaaaaagtttcaacaaaacagaggtttacaaggttccacatcagttattttcacaggatttagtgataaacctgcaaaaagcaagagaatcacgaaatagcagtttaccggaaatcacgaaacttctgatttgacaaggcctttaatggtgttgtgtagaagagacgtcttcctctagcaactgttgcgaccg

SEQ ID NO: 56391 - DNA, 214 bp, Setaria italica
  Peptide Sequence Number=SeqID_122365
ccaagtaagtggaaccggacgtttgtttgatgttacaagctctgtcttaccatgaatctgacttatccagccagctaattcatcaggatttgcaacagtggctgacaagcatataagctggacttcctttggacaatatatgacagtttcttcccaaacagtgccgcgtgagatatcacttctaaattaattgtaactttcttatttccttaaa

SEQ ID NO: 56392 - DNA, 397 bp, Setaria italica
  Peptide Sequence Number=SeqID_122366
taacaaaaagaactaacttaagaagacaagacaatacaacgcaagtacttaggaccttcgaacagggccttcttgcgctgcgagagcatgtagccgaacatgtgcgggcttcctggaatgtagatcacgagggcaagaatagatgtgtagagataatcgtacgagaaattccacttgttaggcatcctaaagctgtatttctctgtcgcctgcatgtaaggcaatgcggtgtaataatgaggcctacttcactagagataccagtaggatacaggagcataaaggtgctgtacctaagccacaggagccatgaaggtgcagatccaaacgcctccttcatcccaaagaaggagtatctgatgatctcagtgatcgaccagctgatgaccagtgtagg

SEQ ID NO: 56393 - DNA, 244 bp, Setaria italica
  Peptide Sequence Number=SeqID_122367
gaacatgtgcgggcttcctggaatgtagatcacgagggcaagaatagatgtgtagagataatcgtacgagaaattccacttgttaggcatcctaaagctgtatttctctgtcgcctgcatgtaaggcaatgcggtgtatatgaggcctacttcactagagataccagtaggatacaggagcataaaggtgctgtactacgcggtcctggcgctgcgggagagcgggcacgaggccgtctaccgg

SEQ ID NO: 56394 - DNA, 296 bp, Setaria italica
  misc_feature (1)..(1): n is a, c, g, or t
  Peptide Sequence Number=SeqID_122368
natgagagtctagaagatttttgatggtccgaattcatatgattgtgtattcatattaccgacgaagtactatgctgacttgctggcagagcagcttattcccctgatgttgcaagatgggcattctaaagctgaagataaagttgtgcgtggcacccctcctgctaacctcaataacactaatcaaggaaattttaaccaagaacaaacttaagacaaagtagaacgtagaaagacaaagaagggaaggtagtaaagaccaagacaaacttaaatagactagacaagacccaata

SEQ ID NO: 56395 - DNA, 216 bp, Setaria italica
  Peptide Sequence Number=SeqID_122369
tgctcggcgcctccgccgccgccacggcctcctcgatgttgctcccggcgacgtcgacgacgaagcggtagcggacgtcgttgcgctccagccgctcgagcgcctcgttcacggtgccgtgtgtgcgcgtggaccgtgaggctgtgtcggtctcgtgtgtcgaggtgtgcgtgggctttctgcttccttcagctgcagcggtcactcgcccttcgc

SEQ ID NO: 56396 - DNA, 174 bp, Setaria italica
  Peptide Sequence Number=SeqID_122370
agcatttacaaaatctagacataatatatacatagttatctagcaatgtatctataaaaatatcgattcacgtgcaggttcgtggtgaagatcccggcgggtctggcgccggagcaggcggcgccgctgctatgcgcgggcgtgacggtgtacagcccactaaagcacttcgga

SEQ ID NO: 56397 - DNA, 167 bp, Setaria italica
  misc_feature (139)..(139): n is a, c, g, or t
  Peptide Sequence Number=SeqID_122371
tacagcaccttcaccaccacatcctcagggcctgtcttcctgacggtgtaggtgtacggggagaggtggccggtgaggtagtggaggttgggcccgaggtgagcaggcaccgcgtcggcgatatcgtcggcgtcgggtnatcgtcgggtgctgccgcgagtgccgcc

SEQ ID NO: 56398 - DNA, 234 bp, Setaria italica
  Peptide Sequence Number=SeqID_122372
cgttgtatagcatcaccagaaccttatgtggatcttattttgaattgtgatgctagggacttaaataaaccagaggatgctgttgcagctccaacagttgaggatttggatgatgacttgcaacaagcaatatctgaatactcattgggtgatgatgccaaagcttgttgtgatatgattgaaagcatgctttctgaaaacttaatgagagatttgcagaaaggggaacttcgg

SEQ ID NO: 56399 - DNA, 166 bp, Setaria italica
  Peptide Sequence Number=SeqID_122373
tagtgaaaattgtcggcgagattgttgtaaaattttcacgctagaatcattggtgaactaaggagttatggcctttccagtctctaaatcaacacctgggctattgatgctacgttcaccaatgattctagcgtgaaattgtcggcgagattgttgtaaattttgg

SEQ ID NO: 56400 - DNA, 487 bp, Setaria italica
  Peptide Sequence Number=SeqID_122374
ggagtcttgccctcgtttttcactgccagctcttcctcaatcactgacttgtcaactatttccacttcagtggttgaaatcgggaatttttcagactcgatttctggcgtgatatctgaagtgggttcctcaaacgatgaaatctctgatgtaccagctttatcttggatgcttgaaggttgaatcaccttctcctcagcaggagcagtggatacattcgtgttctctgatgtttcaccagtaaacttggataccctcttattctgagcctgtaaactttgcaataattgctcccttgcttctaggatctgtgtggataagaaggtattaaggtctaatgtatacacaagtggaatttaaaaaatcatagcccccaaaaaataaagctaaggaaagaagcaatatggtattctacagagtgcacaaaaaggctgcaattgcaagccatgctatccattgcaatgcgcatggcgtagaaacccgtagc

SEQ ID NO: 56401 - DNA, 190 bp, Setaria italica
  Peptide Sequence Number=SeqID_122375
gttggcctcccccctgcccgaacggcaggagcgacgaggcgatcttggagatctcggcgacggccaggttgttctgcagcatcgagaagccgctcctcaccctcccgccgatctccgccaggtcgctccggatcccggcgatccgcggggacagcgccgcggcctcctcccgtccccgacctcatcatcc

SEQ ID NO: 56402 - DNA, 270 bp, Setaria italica
  Peptide Sequence Number=SeqID_122376
gtcaaactcattctgggagcgcatctgatgattttggtcttccagctacttctttgggggcctcagatacttctttgggggcctcatcatccttaagctgctgattttgttcttgtgcttgcacataaaggtgcaaatgtaaagaaaggagctccatgtgtttctaggggatgacagtgaagcattcgtttcctggttgtgggagcatctttctttacatttgcaccttttatgtgcaagcacaagaacaaaatcatcatccttaagctg

SEQ ID NO: 56403 - DNA, 286 bp, Setaria italica
  Peptide Sequence Number=SeqID_122377
ccttgcagaactgcagcactatcttcaccacgtcgcgggcctcgatctcgagggtggacgccgacgacgccatcttcggcttctgcgggcggcggccgttctgaggggcgccggggcttggcgccccacagctgggcgggcttgccggccttgttgagcttccggatgatggtgtccggatccagcaagccggacaccgtcaccttcccctgctccgcgtcgatgctgctctaggtaacaacgaacctaaacaaacaaaagaaaaccaaaaaattaaaaccaaaaa

SEQ ID NO: 56404 - DNA, 340 bp, Setaria italica
  Peptide Sequence Number=SeqID_122378
ttgccgccgccggcgtccttggaatggcccttgccgccgacgtccttggtctggcccttgccgccgccgccgccatggtggccgttctgaggggcgccgggcttggcgccccacagctggcgggcttgccggccttgttgagcttccggatgatggtgtccggatccagcaagccggacaccgtcaccttcccctgctccgcgtcgatgctgctctggtacacgccatcgatcttgtggagggtcttcttgaccttcttctcgcacccatcacagtgtatgttgaccctcagcaccagagtctgcaccttgagcacatcctccttgctcatcctggaaac

SEQ ID NO: 56405 - DNA, 239 bp, Setaria italica
  Peptide Sequence Number=SeqID_122379
gtcctgtgatccagatgccagcatttcagaatctctactaaagtcaacacatagcacagcatcatcgtgcatcataaaactttcatcggcttgatattgaagatcctttttaagcttcccgttcaatgattccatccactgagcatgaaacaaggtactgaccatcaggtgaaaatcgagcacattcgggatgagtttttcttcccaaactttatttgatgagataatgtagtagggta

SEQ ID NO: 56406 - DNA, 248 bp, Setaria italica
  Peptide Sequence Number=SeqID_122380
ctccgatgtataagcctgcaaaagtctttctttcaatgagagctctggggagcccctgcaaatgtgcttatgttggcagtccaaggtgtcttcggggattcaaggataccaagactccggtgttttatataggtaactaccaagaaatactatatgttgtgtttctttccccctttttctaggggaaattgtaaaagtcccatttgtcaatctgattttgggatcccaacatatggcgttttgttgca

SEQ ID NO: 56407 - DNA, 235 bp, Setaria italica
  Peptide Sequence Number=SeqID_122381
ttcatttgttggcagaggatatttctaagagtgctatcaagcatcctagctcaggtagctgaatcgtcagataaatacctatttttttttactttcacatatagttatgtatcaattatgtacttgctttatatataattcaggtgttagatttgacttctgatatcattgcaaggaaaattggagcttacatctgtatcatctgccttgatattagctgctggaattggtataa

SEQ ID NO: 56408 - DNA, 225 bp, Setaria italica
  misc_feature (5)..(5): n is a, c, g, or t
  Peptide Sequence Number=SeqID_122382
atgcngaaccttaaggcatgtcatagaatcacctatgcacatgcctgaccttctggagaaatgtcttgtaccctttacttactgcatgaaagcatctgttagttgttgctcacctttagcatatattctgaaaggtgcattggaattggcatcggctggtattggtgtatcgatttttaatattgtgtcaaagatcttcaacataccattgttgagcattgcaac

SEQ ID NO: 56409 - DNA, 278 bp, Setaria italica
  Peptide Sequence Number=SeqID_122383
agacctgacattgcgtagtccatggcgtccaccaagaagtctgcgataaacaacgtttctgtcagtttcgtagtttgtacgcacaatgcagtaactgaaagtttttttaacgactggagaacggttcgaacctgcatcatcctttgaaaagcacattggtggttttattctgaaaacattaccatgcagaccgcctttcccaactagtatcccaagatctagttaacaaaaattacggaaggaaaaactatatttccagatagtaatgtgtccttttc

SEQ ID NO: 56410 - DNA, 173 bp, Setaria italica
  Peptide Sequence Number=SeqID_122384
ggttttattctgaaaacattaccatgcagaccgcctttcccaactagtatcccaagatctttgagtttcccaactagtatcccaagatctttgagtttctcaaacagttcggtagtttccgccttggcaggggtcttctcctttctgtcggtaacgagttccacaccaagcat

SEQ ID NO: 56411 - DNA, 206 bp, Setaria italica
  Peptide Sequence Number=SeqID_122385
ctcactactactagtgcgccaatgatcgagctacagcatcgtgtgccgttgcctttgtttcaactatagctgattgtgcggatacgatgaaacaaattcactcccttcacattgtaggagttaatttgtttcatcgtatccgcacaatcagctatagttgaaacaaattaattcatccatttaatttatttcacgaccaagatagt

SEQ ID NO: 56412 - DNA, 241 bp, Setaria italica
  Peptide Sequence Number=SeqID_122386
taggtatgcaatttgaacacataattgatagagttgtgttaagagcaaataaaaccttgaaccatattgtatcatcataaacagctcattaactttcgaagacacagaaatatgtccttgactgataattccatcttgaagtttagtaagaagcctgtcgaagaatctccaaatagcaaaagatagagcagcaacttgcagcaaaattatgggcagaaaaatagctcgcattgggataaaa

SEQ ID NO: 56413 - DNA, 396 bp, Setaria italica
  misc_feature (275)..(275): n is a, c, g, or t
  Peptide Sequence Number=SeqID_122387
ttagtaaccgtttagtttactaaggtaaccttgtaatttaaatttttctaaactaagggggtcttcctattttttggttgcgattataggcaaaccattcatagcagcctctatcagagtaaccccaaatggagcccctgttgaaattaatcaggtcctgaacaacggtctccttgttgatccacatgatcagaatgccattgcagatgccctctacaaacttctttctgacaaacaactttggtcaaggtgcagagagaatggactgaaaaatnttcaccaattctcatggcctgagcactgcaagaattacctgtcaaggatcttaactcttggcccgaggtctcctgctatcggtgacacagaggagcagagtaatacacctatttcaggaga

SEQ ID NO: 56414 - DNA, 258 bp, Setaria italica
  misc_feature (8)..(8): n is a, c, g, or t
  misc_feature (161)..(161): n is a, c, g, or t
  Peptide Sequence Number=SeqID_122388
tagtcttntaaattattctattcggtcgtttgtagggtcttactacgtaccgtattgtaccttgtaggtttcgtcccttgtctagtcagatgggtatactgacgcaatgacaccattccgagcttctgttcccataccacatgaacgagaaaaccaaaggngacaccgtttccatgcttgatggaaatgcgattttgttgtaggctgtagtagaggtgtttgtgtcactgtgtgcggtggtggtggtctaattcttga

SEQ ID NO: 56415 - DNA, 235 bp, Setaria italica
  Peptide Sequence Number=SeqID_122389
caatgcattgcaacggagagattggataaccacagtgctacaagattatccgttgcaatgcattgtataaccacagtgctacagataatcttgtagcactgtggttatacaatgcattgcaacaagattatctgtagtccctattcacgcatcacgttctcaggctctaaggtacttgtgtttacgttgggggatagaggtacccaatgtggcagtcctcgtcggcgaagtggcg

SEQ ID NO: 56416 - DNA, 253 bp, Setaria italica
  Peptide Sequence Number=SeqID_122390
tcgctatatgcctcgtatggttataattcctccaggtgttgaatttggccacatgattaatgattttgatttgtatggagatgaagatagcccatctccagcctctgaggatccatccatttggtttgaggtcgtgaaatttatcttcagatttgtacatgcaagatctcactttttatttgacttattcaataattgatattaacatgactaatgtattccttttaaccctatgttctttttaaagtttgta

SEQ ID NO: 56417 - DNA, 243 bp, Setaria italica
  Peptide Sequence Number=SeqID_122391
ccatttggtttgagataatgcgattcttcacaaatcctaggaaacctatgattctggctattgcccgtccatatgctgaaaagaatattacaacacttgtgaaggcatttggtgaatgtcatgcattgagggaacttgctaatcttacattgataatgggtaaccgtgaggctatttcctccaggtgttgaatttggccacatgattaatgatttgatttggatggatcctcagaggctggag

SEQ ID NO: 56418 - DNA, 237 bp, Setaria italica
  Peptide Sequence Number=SeqID_122392
cttggcccaagacatcctgcttttggaaacaaagaagaacagaaggtgcctgtgaactgcaggaagcatatccttgttattgctgtagactctgttagcaaggaagatttagtccaaatcatcagaaattctattgaggctacacgcactggtactttgtcaggttcaactaggttttgttgtcttgttcgtactttcttattttgttacgttatttagtttctttagttaacttta

SEQ ID NO: 56419 - DNA, 349 bp, Setaria italica
  Peptide Sequence Number=SeqID_122393
tctcttgatgcgtctgagatcgtcattgcaagcaccaggcaagagatagaagagcagtggaacttgtatgatggttttgaggttatacttgcaagaaagcttcgagcaagagtaaaacgtggtgctaattgttatggccgttttatgcctcgtatggttataattcctcctggagttgaatttggtcacatcattcatgattttgatatggatagtgaagaagagaatccatgccattttgcccttgagagatggtcagatatgctgatgacgttaattactgaagttattgttttgttctggtggaacaactttttgacactacgtgatgtgtgtatgcgtgacttca

SEQ ID NO: 56420 - DNA, 394 bp, Setaria italica
  Peptide Sequence Number=SeqID_122394
tgcttagcaagctccacgacatattgacctggccaccagtatctgaatcacggccaagctccatattctctccacgaatcaggccatggaggctgatcaacactatgtatagcttgtcaaatgaactgatcttaggtgtgttcccagttgtgctgtcgccataggcaacagatggatcgccagcatcctctcccttcactccttcaaagagatcttcagacatatctgcagtagcatcatttcgttgcttctcagtctctagacggcgttttgacaagcgattggcttcctctttctcaaactccttcttcttcctggcgaggttccagatcctccaggtcatgttctccaggcgcgtgttcttctcctgcgggctccgcatcgcgttcgacca

SEQ ID NO: 56421 - DNA, 245 bp, Setaria italica
  Peptide Sequence Number=SeqID_122395
caaaatttggggctaagatttgtcttgttaatagatcaacccggtaaactcccggagatgaacttaatgctttagcaagctccacgacatatttgacctggccaccagtatctgaatcacggccaagctccatattctctccacgaatcaggccatggaggctgatcaacactatgtatagcttgtcaaatgaactgatcttaggtgtgttcccagttgtgctgtcgccataggcaacagatgga

SEQ ID NO: 56422 - DNA, 244 bp, Setaria italica
  Peptide Sequence Number=SeqID_122396
ttcaatttgttgtaggtcattttgtaacaaatatgaatagcatcacattacatgatgagttagtcacatgcaacttaatcaatttgtaacatgtactttacataaaagtattaaaaatatacagtagaaattgttaattaagatactccatacctgatcaacactatgtatagcttgtcaaatgaactgatcttaggtgtgttcccagttgtgctgtcgccataggcaacagatggatcgccag

SEQ ID NO: 56423 - DNA, 246 bp, Setaria italica
  Peptide Sequence Number=SeqID_122397
ttcccaagaaaatgcccgtaaacaccatgggaacattaagtgctccagatagtagggtagcagcaactcctgcactggcataatggccatgaatcacagcaggccacactggacaaccactgccaatttcttcacctattgtttttgacatccgcactacatgacccagtgcaccatcaacaaattcttgaatgaaaggccagatattttctttagctagatgcttgtctttggggccaaatggta

SEQ ID NO: 56424 - DNA, 224 bp, Setaria italica
  Peptide Sequence Number=SeqID_122398
taggcaacagatggatcgccagcatcctctcccttcactccttcaaagagatcttcagacatatctgcagtagcatcatttcgttgcttctcagtctctagacggcgttttgacaagcgattggcttcctctttctcaaactccttcttcttcctggcgaggttccagatcctccaggtcatgttctccaggcgcgtgttcttctcctgcgggctccgcatcgc

SEQ ID NO: 56425 - DNA, 242 bp, Setaria italica
  Peptide Sequence Number=SeqID_122399
tgtttatttgttccctcgtctgtctcccttgcttgagaagcccttccaacttatctttcccaagaaaatgccccgtaaacaccatgggaacattaagtgctccagatagtagggtagcagcaactcctgcactggcataatggccatgaatcacagcaggccacactggacaaccactgccaatttcttcacctattgtttttgacatccgcactacatgacccagtgcaccatcaacaaat

SEQ ID NO: 56426 - DNA, 252 bp, Setaria italica
  Peptide Sequence Number=SeqID_122400
tttatttgttccctcgtctgtctcccttgcttgagaagcccttccaacttatctttcccaagaaaatgccccgtaaacaccatgggaacattaagtgctccagatagtagggtagcagcaactcctgcactggcataatggccatgaatcacagcaggccacactggacaaccactgccaatttcttcacctattgtttttgacatccgcactacatgacccagtgcaccatcaacaaattcttgaatgaaa

SEQ ID NO: 56427 - DNA, 233 bp, Setaria italica
  Peptide Sequence Number=SeqID_122401
cctgcactggcataatggccatgaatcacagcaggccacactggacaaccactgccaatttcttcacctatgtttttgacatccgcactacatgacccagtgcaccatcaacaaattcttgaatgaaaggccagatattttctttagctagatgcttgtctttggggccaaatggtattctgacgatatgtgcaccactgttctctcctcttcacattttaagttcttgaagc

SEQ ID NO: 56428 - DNA, 168 bp, Setaria italica
  Peptide Sequence Number=SeqID_122402
ctagatgcttgtctttggggccaaatggtattctgacgatatgtgcaccactgttctctcctctttcacattttaagttcttgaagcttgtcgaagccagcatctcatctcgttcaccgtagccacgatcaaaatttggggctaagatttgtcttgttaatagatcaa

SEQ ID NO: 56429 - DNA, 161 bp, Setaria italica
  Peptide Sequence Number=SeqID_122403
tgggtcatgtagtgcggatgtcaaaaaacaataggtgaagaaattggcagtggttgtccagtgtggcctgctgtgattcatgaacattaagtgctccagatagtagggtagcagcaactcctgcactggcataatggccatgaatcacagcaggccacact

SEQ ID NO: 56430 - DNA, 132 bp, Setaria italica
  misc_feature (44)..(44): n is a, c, g, or t
  Peptide Sequence Number=SeqID_122404
gatgcttgtctttggggtccaaatggtattctgacgatatgtgnaccactgttctctcctctttcacattttaagttcttgaagcttgtcgaagccagcatctcatctcgttcaccgtagccacgatcaaaa

SEQ ID NO: 56431 - DNA, 381 bp, Setaria italica
  Peptide Sequence Number=SeqID_122405
tgtagtattgtctattttgtttgtctttgggtagtagttggggtaaggggttcttcattgttgcaggcttcaaccttggcttcaacgatgatagggaagacccttcagtaagatgcttcctgtcctctgtaactccatttgtgccagatgaaatttgttttgactcgagacttccagtgattctatccttagtaagggacgccgaccatcgtgatagatgggcatagggaccattttgaatatcttgatctttgcactggttagagcaaaagaaagaagacgatctgcatcctgcctatcaaatgaagacactggtgtgccatttacacaagcgattccaagtgcaaccaagcttctgtaggagatttctggcgcaagatg

SEQ ID NO: 56432 - DNA, 240 bp, Setaria italica
  Peptide Sequence Number=SeqID_122406
gttaccaactgattgtctccaagctcttctgattgtccatgccactgccttccgcagagaagatgctgtcagtctatctttacattcctaacatcattgggtatttcaggatcatcataaatttcattgcatttgctgtttgctattcgaacaagcccctctttgctatcctgtacttcttcagctttgtactggacggtgtcgatggttggttcgcacggaagtttaatcaagcatcaa

SEQ ID NO: 56433 - DNA, 238 bp, Setaria italica
  Peptide Sequence Number=SeqID_122407
tttatgtgtcttctagtatcttcttcaaattttcttccatctggtgcaagccttttgaacatcacactatcagcacccttgctgaaaagtaatatccttccctctgggaagatgacagctgaactgattggaacctggggattttcctggatttatgcttctatgatgtctgtcataggagcttttccagttcagatgatagagcaagattacagtaagtattctcttggcctccttg

SEQ ID NO: 56434 - DNA, 257 bp, Setaria italica
  Peptide Sequence Number=SeqID_122408
cgttttattttgatttaatcaggctctgtaattcaagtcttttgataatattttgggggttgatgtgcagatatgctatttcttctacaagaatgttacttttggtgtcactatctttctgtacgaagcatttgcatctttctccgggaagccagcttacaatgattggttcttgtcactctataatgttttcttcacttcccttcccgtcattgctttgggagtgtttgaccaggatgtgtctgccaggctgtgca

SEQ ID NO: 56435 - DNA, 448 bp, Setaria italica
  Peptide Sequence Number=SeqID_122409
ctgcaagttcatgggccaattcgtcacctaacatttcatcccctcgcctccttgctgccctgcagtgttccaacattttattgacaagggataacaacatcagactcgctgatttcgggctggcgaagctgctcatggaggaccttgcctcgtcggtcgtaggaaccccaaactacatgtgtccagaaatactagcagacataccttatggatacaaatctgacatatggtcacttggttgctgtatgtttgagatttttagcacaccgccctgcattcaaagctacagacatggcagcgttggttaacaaaataaacagatcttcaatatctccaatgcctccaaatgtactcatcagcactgaagcagatagtgaagagcatgctgaggaaaaaatccagaacataaggcccaactgctggagaactattgaggcatcacatctgc

SEQ ID NO: 56436 - DNA, 381 bp, Setaria italica
  Peptide Sequence Number=SeqID_122410
atgtctgtagctttgaatgcagggcggtgtgctaaaatctcaaacatacagcaaccaagtgaccatatgtcagattgtatccataaggtatgtctgctagtatttctggacacatgtagtttggggttcctacgacctaccaggagatgtccctgatggcgagcctcagcaacccctacatcgtcgagtacaaggacggatgggtagacgaggggacatccgtctgcatcgtcaccagccactgcgaaggaggggacatggcggagaggatcaagaaggccaggggcgtcctcttctctgaagagagggtctgccggtggttcacgcaactgctcctcgccctttgacttaccttgtcacttgtctaaccgtcgttgtctt

SEQ ID NO: 56437 - DNA, 244 bp, Setaria italica
  Peptide Sequence Number=SeqID_122411
cgaggggacatccgtctgcccatccgtccttgtactcgacgatgtaggggttgctgaggctcgccatcagggacatctgcggcaggaagcaaggggcggagcaggtatccgtgtcacttgcttcgtctcatagaccggcaaggagctcgggagcgatggagcagtacgaggtggtggagcagatcggccggggcgcctacggctccgcgtacctcgtcctccacaaggccgagcgcaagaggta

SEQ ID NO: 56438 - DNA, 254 bp, Setaria italica
  Peptide Sequence Number=SeqID_122412
ctgaagataaagtgctttcaaacttttcaatgagttgaagctttgtggaatattaccggaaaagttgttgtatgacaaatccctgggaaattgaaaatctgttcaggttcaccactagttttgtggaacaatggtaacaaacaagcatatgcagtcagagaggaagggaaatcactcacattgctgttaagtttgtgagctgattaaacatatcattgatgtttgagagctgattgtgaccaagatttagattt

SEQ ID NO: 56439 - DNA, 322 bp, Setaria italica
  Peptide Sequence Number=SeqID_122413
catctacctccccctactcttccttcttatcttgttatacaaaactctgctagcaacctagcctatttattatccgttgtaaattgccactttactttgttgagcacttaaccactttgtactatcgatcaatgttgtgggttggaccagcacttatcttctcaagtgcaactgctataagtatgcttggctgggacaacaaagtccgatcaatcctctccactagcttttctcgttcagtattaattggtgcattgaacgaccggctgctgcttgtaaatccaacagatataaatccaagacagaaaaagggagtggaaat

SEQ ID NO: 56440 - DNA, 405 bp, Setaria italica
  misc_feature (37)..(37): n is a, c, g, or t
  Peptide Sequence Number=SeqID_122414
tccagacatatgctgtacactacaccttacacttgcngttgacagtacaattaagctaatgggagctggtgcgttcgggtttcatccgaccctggagtggatatttgttggtgatagaggtggtactctcctgggcatgggatgtatcaactgagaggccaagtatgattggcattacacaggctggttcccagcctatcacatctgtatcctggcttcctactctgcggttgcttgttactattgcaaaggatggatcacttcaagtatggaagacacgagttataataaaccctaacagacaacctatggaaactcatttcttcgagcgtgcagctattgaaacaatggatatcacaaagaataactaaactacttacaaaggaaggaagaaagacaagtaga

SEQ ID NO: 56441 - DNA, 308 bp, Setaria italica
  Peptide Sequence Number=SeqID_122415
ttgttttgttatttggtttgttcgttagtttagtttgttattgtaagtattgtagttcttacctcgaagactaaaaagatacatataaggatacgtgataagccggctgcatctgctgttgatgttaacaaattgaaaagaagcaaccaaacagctaggcttgggtcctccactgagtaggacaagatcattatcagggacaccacaagaattcaatcaggctcctacgcagccaggaggtccagcagctgctgtttctccagcaatgccaaatactgcaattgatttgtttggaacaaatactttag

SEQ ID NO: 56442 - DNA, 221 bp, Setaria italica
  Peptide Sequence Number=SeqID_122416
tttcgtttcgtttggtttgttctttcctttgttcttagttcttagtaattgtcttactaagtattggtctcttgctcaccttgagcagaatcagcttaccgatgcactatcttgtttggatgaagcattcttggccctcgcaaaggaccagtcacgtgaagctgatatcaaagcgcaggccaccatttgtgctcagtataatattgcagttgctctgctac

SEQ ID NO: 56443 - DNA, 246 bp, Setaria italica
  Peptide Sequence Number=SeqID_122417
tgcaataccctactagagagactagatgccgatgatgcacgcggctgataatctccacctccgcatggaactcacgttctcccttcccctagcaggttctgagctgagaacccatttgtgatctgatacaattcctcataagtgaagaaccgacagttgcccatactgaactctggcattgaatctttcgattcaggactcccagacaagttagaaagttttagtttttaaagtaacttaagtaaa

SEQ ID NO: 56444 - DNA, 411 bp, Setaria italica
  Peptide Sequence Number=SeqID_122418
cgagcatgcagcctctgttgctttactggtagtgtcattgtcatcctttgctgttatctctttcgggtcaggttttggcgattttttgttaaggcttgacacaaacttcttcaagtgcctaatgtaatcaggatacagctcgagattgcagtggccaccgccacttaaccacagtggtgaatattttactttgcaatgctcccatagctgttttccatgggagcagtcgacaacatcatctgacgtaccctggtatgagaacgatcaggttatgacaatcagagcaacaacattcttcggaagcaactatgatactagataacaaacatgaatcgtgaatgtttcaagatgccagttcttaggcctctaactttgacatatatgactgttcatttttaaatttccatactt

SEQ ID NO: 56445 - DNA, 273 bp, Setaria italica
  Peptide Sequence Number=SeqID_122419
gttcttattactctaccacctctgtactactacagaataaagggaggccgttgaagctcgtccctcggtttgtaaggagaataagttccctatgttgttaaagtgttaaccaaattcggccgggggaaggaaaaaggaataatactgcatgccatgatgttgtgattgaagtctgcgacgtcaatcattcgggcgtggaagaccataccaagcagcatccagaatatcgtgacaatacagtgtgcgatagaggacaaggcaaaaggaataaaa

SEQ ID NO: 56446 - DNA, 415 bp, Setaria italica
  Peptide Sequence Number=SeqID_122420
tcttctaaattgcttccctgtcagcttccaggcatgtagtggatggaaaaggggagataacttcaagaagagaagggaatggaacaccacggttgcgggcacatatgtgccaaaggcacgatggatggtagagatgttgagtgtctcggagcaaagtctacctaggtgattggctaagttctcacattttagttcaagattatatctccagtaattttccataggtcgacaaatatttgataacaattcaatcaagtgttgctctgcaatgactgataacaattcaatcaagtgttactctgcaatgaaggctgaaggttcaatcaagtgttactctgcaatgaattcaatcacgagtctaaagtttaattcgtgtccaattccaaaattgtgcttagaaaaaccttaaagctct

SEQ ID NO: 56447 - DNA, 211 bp, Setaria italica
  Peptide Sequence Number=SeqID_122421
atgatgaagtcagattccaactgagtttgggaacttgagaggtacaatagatcgtatgatgaaagaggggagaggtgcagagtttcatgtgccaagataatgtttcatcgaccaccaatgcagaggtttgttcctgtctttatttgtgccagcattgccctgttcgcaatattgattagaaaagttagatatacactatatcttaactttt

SEQ ID NO: 56448 - DNA, 331 bp, Setaria italica
  misc_feature (213)..(213): n is a, c, g, or t
  misc_feature (322)..(322): n is a, c, g, or t
  Peptide Sequence Number=SeqID_122422
aggcacggtgtggaaaattcttgtctctgtgaatgttttgtactcatcgactcaaatgctccctgtcagcttccaggtgatttttctttgttttggttttcctctatcagcttctattactcatatgtacatctcttggtttgttatgtgtaatggtttttctctttattctgtcacgcatgcgtgaaggcatgtagtggatggaaaaggggngataacttcaagaagagaagggaatggaacaccacggttgcgggcacatatgtgccaaaggcacgatggatggtagagatgttgagtgtctcgtggcttccaatgggancaagtctac

SEQ ID NO: 56449 - DNA, 272 bp, Setaria italica
  Peptide Sequence Number=SeqID_122423
aagataatgtgccttaggttaatcctaaagagaactgcaggtggcttccaatgggagcaaagtctacctaggtgattggctaagttctcacattttagttcaagattatatctccagtaatttccataggtaaaaagagaactatagttgttttaatattctgtttaaccaaaagcagaagatgattatcaccatattaggtgtatctaataattagtttcaagtagcttggcaaaaacatgtttaatgtttggaatcaatcattcaaatta

SEQ ID NO: 56450 - DNA, 242 bp, Setaria italica
  Peptide Sequence Number=SeqID_122424
ctcgtcgtcctcctgctcctcctcctcctcgccgccagagttctcctccacctcctccgcctccggatgcggcggcggcggcgatgaacgccaccgtgggccccgctcctcctcgcatcgcgctgctcttgttcttggctcagtgactgcggcgatggtgtgtgaaggtgaacatggatggagatattatcggaaggaaggtggatctcaatgcccatcgctcatataagacccttgcctca

SEQ ID NO: 56451 - DNA, 241 bp, Setaria italica
  Peptide Sequence Number=SeqID_122425
taaggaaacaagaactacaatacggaaataatacaagactacaacctatgaggaccgggatggggactggatgctcgttggagatgttccctgggagatgtttgtaggttcagtgaagaggctcaagatcatgagggacctcagatgccaacaacggtcttggtccacgattccaaggcgttcacagaagtagacaagacttagacaacaagaggcagagcttgaaaactgccgatggggc

SEQ ID NO: 56452 - DNA, 422 bp, Setaria italica
  Peptide Sequence Number=SeqID_122426
ttgtctaattcttgtctaagtttatttctacttttgtattgtacttattggtctaaactttcttagaacaagatgcggatcctttggtctatttgaaagagcacctgcagctccgccataacctctccaagataagtcacaggttccgcatgttcctcctcctgctcttcatttctgtcacagcaagccagtttgctattcttttcaagacaacagcctacattggcccgatcaatttcaccaatggtggtgacatagctgtttcttcagttgttcaagtcgtgggtctcgtcctctgtttacatgctgctgctaaaatctcccacagggctcaaaacatctcttcaatagctagtcgatggcacgcattagcaacatgctctactgattctaattatgtgaccaccccaaacagctctggg

SEQ ID NO: 56453 - DNA, 374 bp, Setaria italica
  Peptide Sequence Number=SeqID_122427
tctcaaacttgactagaccatcgatcaaagaaaagagtgtatgatccttgcccattccaacattatttccaggatagacctgaaatttccaaaacaaatgtaagagaaactacaaaaatgaaggcagaacatgaacaggtcaaccataaaatgggcttcataaatcaaaatgaaatcctataaagggcccggtggcatgcacctcatattaaccctagtctataaatataacattggcagcaaggtgccaagtgaattaagctgcttaacgagattgcatggtctgtaagattgtaagagggaccttatcaaacctcaagccattagacggtattcaattgtcagccatgttagttcatgcattttccttcttt

SEQ ID NO: 56454 - DNA, 289 bp, Setaria italica
  Peptide Sequence Number=SeqID_122428
gttgagcctcaactggtattagctgttgtagatgaaaactctgaggtcagcgcagactgctgataagattcctgtgtagtatttctctgctcttgccttcttgcgttcacgctgcatgcggaagtactctctctttcttgctctgtaactgtttgggttttcaggctgtttctcatatgggtaaacacttacctttttcttgtctggtccatatgagaaacagcctgaaaacccaaacagctaataccagttgaggctcaacgtatccctctgctcttgccttcttgcg

SEQ ID NO: 56455 - DNA, 251 bp, Setaria italica
  Peptide Sequence Number=SeqID_122429
tctatcctggaaataatgttggaagcacaaagaacggccgctgccccttggagtcacggccgttctttgtgcttccagctcccttcttgtgcgccatttggatcgtcagacgccagcgcggcaccagggtctatcctggaaataatgttggaatgggcaaggatcatacactcttttctttgatcgatggtctagtcaagtttgagaaaatatggaccagacaagaaaaggtagtgttacccatatgagaa

SEQ ID NO: 56456 - DNA, 213 bp, Setaria italica
  Peptide Sequence Number=SeqID_122430
aaggtgcagctgatagaacatatctaaacaacatcgtgtaatatgaccttgtatggatcatgtagtcttacaattcagggaaaaatatcaaacatggattatgaaaaagagaaatactacacaggaatcttatcagcagtatgcgctgacctcagagttttcatctacaacaagctaaataaccaagttagaaggactacaaacgtaatacca

SEQ ID NO: 56457 - DNA, 439 bp, Setaria italica
  Peptide Sequence Number=SeqID_122431
tccgaagctctcgccgccagagcgccgcgccgggtcctctccaccacgcaaccacacctcctccccgccgcagcgctcgctgtggctcctgcaacgctcagcccgtccgcgccgtctactcgcagtcgcagcacgatttggcgagaggagggagtgcggtggagccgtggaggtggccggcgttgtcctggtgcagccgggtctagagccactatcagactcagtacatctaaagcgatcgatttttctccatttccaaattttccaaaattgaggatctggcgatggatggcagtgtcggaggtggcagcgtggaggaggagctcacggcgcagggagacggcgctctacgaccgtcagatccgtgtatggggtgtcgatgcccagaagaggtgcgctgcggtacaagaactaacctttctttatttgttcgtgctcc

SEQ ID NO: 56458 - DNA, 429 bp, Setaria italica
  Peptide Sequence Number=SeqID_122432
tgtagtaatttacgaattatctgaaggacgcagtcctggtgaaacaacgctttctgatatacctgcagttttggctcggaggaaggacatgtgtgataacatggtaaaccagttttttattgtcttagttaagatcatattccttctaattttttacatggtattgtaaactgcagtctttgagtgagtctcaaattcctactgctctcattgaacgactggtagcagctggaaagaaggaacatcctcctgtatgtgccatcctaggtggtattcttggtcaggaggtgattaaatcaatatcctgcaagggtgatccaatcaagaatttcttctattttgatgcggctgacggtaaaggtgtcatcgaggatatcccaccaccaccaccttctgtgaactgacatgctcagctgcctaactacctac

SEQ ID NO: 56459 - DNA, 250 bp, Setaria italica
  Peptide Sequence Number=SeqID_122433
aaatatggaaggtatatacttttgcgtatcaatatgtactgttagtttgttgtgtttggtagccaatgtgtgaggaccaaaatataaatatagcaaatataatctgtccaagtttgtggctgatttgatatgtttcttccgtaggtacatctaaagcgatcgattttctccattccaaatttccaaattgaggatctggcgatggatggcagtgtcggaggtggcagcgtggaggaggagctcacagcgc

SEQ ID NO: 56460 - DNA, 245 bp, Setaria italica
  Peptide Sequence Number=SeqID_122434
ctatctctacaccttggaataatctaccaaggaagatgacaaaattatactttgctatgagagtccttgaacgagtctcaaattcctactgctctcatgaaacgactgctagcagctggaaagaaggaacatcctcctgtatgtgccatcctaggtggtattcttggtcagtaggtgattaaatcaatatcctgcaagggtgatccgatcaagaatttcttctattttgatgcggctgattaggg

SEQ ID NO: 56461 - DNA, 360 bp, Setaria italica
  misc_feature (34)..(34): n is a, c, g, or t
  Peptide Sequence Number=SeqID_122435
cagtgtaatgagaaatgacaggaactctttgtgnttcattaagctgaacatgtcacttggttgttgttccatgccattggttaatatttaaaccaaaccatgttatcaagatagtctctatgcccatcatactccttttttagaagggactatagactggcatccatccccctggagttttcaaatttgagatttgttgtatgtgtggcttgtgtctgccaggtaaaaaatccttttgagatgatcaggttgttggcattacaaactacatcgattttggacttgagttggctgccagggttgataaagacaaagcgactgagaatggcagctccttgtttcagttggctgcaagctggc

SEQ ID NO: 56462 - DNA, 177 bp, Setaria italica
  Peptide Sequence Number=SeqID_122436
tgttacccttttgaatgctgacacatcatttgtcgtttttgtagatggaactaattattcatgtccatcttatgtaggactgctgcttgattcctgagtcacctttctatttggaaggggagggtggactattcgagtatatagataggaggttgaaggagaacaaccacatggtta

SEQ ID NO: 56463 - DNA, 139 bp, Setaria italica
  Peptide Sequence Number=SeqID_122437
tagcgtgccattaatgcagctcatgtggaagcttcaagtgctgaaaatgggattgggttagtgaagcttatgggtcgctatagtggttagttttccggcctatgaactgaatgttcaccctctgtcatagcataatgga

SEQ ID NO: 56464 - DNA, 445 bp, Setaria italica
  Peptide Sequence Number=SeqID_122438
catcaggcagctcaacatctacggattccggaaggtgaatccagatcattgggagttgcacacgaatcctcttagcaggccaaagcatttgctgagaaagatcaagaggcggcgcgctcccaagcctcagatggaagcgcatccaagaaacggagcaagcattgttcaagcaacccaaggattccggtgaggtagagagtttgaagagagaccgtgcagctctcagggcagaagtcctcacgctgaagcagcagtacagcagctgcaaatctcagctcgttgccttggaggagaggatcctgaacaacgagaggaatcagcagaaggccatcgcgttcttcgcaaaggtgctcagcaacccaactttcgtgcagcaaggtacctgctacaaactaatagaccgacgaaacaaaagaagactagtaataagacaactagacgaaaa

SEQ ID NO: 56465 - DNA, 230 bp, Setaria italica
  Peptide Sequence Number=SeqID_122439
ggctgttgcttgctttggaatttggtgggtgggtgcgaggtgaggatgctgctgaagcctgggaaagaaagatgaatgctgatggtggagcaaatgcaatttgtggagcactagaggatgcaaaaatagcttgatcttgagagggatagtggattgttcatattaggactctgccacctgaaatttcgtgtgtacatcagccaacgagcccaattcaagtggcatgtcta

SEQ ID NO: 56466 - DNA, 461 bp, Setaria italica
  Peptide Sequence Number=SeqID_122440
tactaagttctaacctaagtcaggccactccgtgctctcgcggaaacactggaagcaagcaagcagcagagcgaggcgaggaggaggagcaggctgcggcttgctcaaggtggttgtggcgcgcggccgcagcctcgccgtcagggacttcacctccagcgacccgtacgtcatcgtccgcgccgccgacacgactgcaaagcaaaagtcatcaacagttgcctgaatccagtttggaatgaagagatgatattctccatgaaagagccagtaggagtcatcaaatttgaggtgttcgactgggaccgattcaagtacgacgacaagatggggcacgccttcctggacctgcagcctgtggcagtggcgacgaagctgcggcgagcgctgcgactcactgcaggagagaccaagcctccggaaggtacgcccctgaccgccgataactgcctgctctccga

SEQ ID NO: 56467 - DNA, 398 bp, Setaria italica
  Peptide Sequence Number=SeqID_122441
cactggaagcaagcaagcagcagagcgaggcgaggaggaggagcaggccgcgaaggcgagctcgactgatctgatcccttcttccctccagcggcaatcgacgggaggaacggggtcgcggccggccgccatggaggaagcgggggagggggagaggctgcggcttgctcaaggtggttgtggcgcgcggccgcagcctcgccgtcagggacttcacctccagcgacccgtacgtcatcgtccgcgccgccgacacggtaagtcgagttaggagaagcaggggaagagatgagatgacatgagctcctcctctccgtgcttcctgcttccgcgcttgaatcactaactagcaaggcccttctgctttcatcaacacaatcgaagaaacgacgatcacg

SEQ ID NO: 56468 - DNA, 233 bp, Setaria italica
  Peptide Sequence Number=SeqID_122442
ctagctagtaacaagccatgaacaacgcatgattatgctgatcttaccattgccattaccattggcaggaggtgttcgactgggaccgattcaagtacgacgacaagatggggcacgccttcctggacctgcagcctgtggcagtggcgacgaagctgcggcgagcgctgcgactcactgcaggagagaccaagctccggaaggtagcccctgacgccgataactgcctgctc

SEQ ID NO: 56469 - DNA, 247 bp, Setaria italica
  Peptide Sequence Number=SeqID_122443
agatacatgaaaacaggggtatgagtaactgtaggatgatgagcagtggccagtctacacctgtgaattttttactgcagaattgtgtgcatgtcttttactcggtgctaacatctatgccctagctattcactgtaataatgatgctattcacattatttgggtaatacaggtacctcggcttgtccagaaggcaagttttactgcagaaatattggagacacccctcatttgttgttctctttcg

SEQ ID NO: 56470 - DNA, 421 bp, Setaria italica
  Peptide Sequence Number=SeqID_122444
tctccgtcgcgtggcaccttctcaagcatagcccgagggattccgcgtgtctgtggatatctacgacgagaaaggtgtcggggaggcgcgtcgggcgtctcgggagggcttctccatccctactcacctaaagtaaagcttctctggaggggtgctgagttctggaaagagagcatggatctcctccgaagcgcagagcaagcaaatggaacagccggggcagatactactagtcaagacgagagacttatctggagaaggggaattgtgcggccacctaccactgagaaggctgctgacatattgctggagaatgctcagagttgcctcgagagttgcagccttcaagtgcttgactctgacgccgcgcagcgcctgatccctgggttgtgtgttccatttgactttgcagtttacatgc

SEQ ID NO: 56471 - DNA, 240 bp, Setaria italica
  Peptide Sequence Number=SeqID_122445
aggtccgcctctccatcatctcaaacatcacaaattatgtaaagcttctctggaggggtgctgagttctggaaagagagcatggatctcctccgaagcgcagagcaagcaaatggaacagccggggcagatactactagtcaagaacgaagaagaacttaatctggagaagggaattgtgcggccacctaccactgagaaggctgctgacatattgctggaggtactgctgaattaagta

SEQ ID NO: 56472 - DNA, 130 bp, Setaria italica
  Peptide Sequence Number=SeqID_122446
agggattcccgcgtgtctgtggatatctacgacgagaaaggtgtcgggggaggcgcgtcgggcgtctcgggagggcttctccatccctactcacctaaagtaaagcttctctggaggggtgctgagttct

SEQ ID NO: 56473 - DNA, 423 bp, Setaria italica
  Peptide Sequence Number=SeqID_122447
gctggtgtcaattgcagttgacaccatagcctgaccagctggtgtcaattgcagttctgtatcacctccagctggtcaggctatggtagacatatctagtgagccacccagcagccaagaggtaaatgaggctccaatcagtgacgctttgggaaatgatgaaaatataaagacagaaaatactgctgatgctgaacctgcccctggtagtgaaaatacagaactcggcgaagccaacactgaaaggcaagcgaaaccagtgtctgctgtggttatggtagaatcatctagtgagcttcccagccaagagggaaaggaagctgcaaccactgacctgtcaggggatgatgaaaaagcaaagtcagcgagggctgctgttgttgcggaactttttggagatgcaacagaaggcggttcagatca

SEQ ID NO: 56474 - DNA, 421 bp, Setaria italica
  Peptide Sequence Number=SeqID_122448
taaaattactagtaacttcggtcgtaagtcctaactacttgtaaaggtctaagtcgtaaacctagttgttcttgcttgtggttatggtagaatcatctagtgagcttcccagccaagagggaaaggaagctgcaaccactgacctgtcaggggatgatgaaaaagcaaagtcagcgagggctgctgttgttgcggaactttttggagatgcaacagaaggcggttcagatcaaccattaccgtcgcctagaggtgaaggtgaggatgcagatggtgatggaggtgtagagtaaattatgcaaatattgtactaagaactactagaatctgtgtaagtaagaactgctattagtgctttagctgtaacccatggaagctttcactgaaattaatgttagtttacgtggtgctgagattacag

SEQ ID NO: 56475 - DNA, 262 bp, Setaria italica
  misc_feature (226)..(226): n is a, c, g, or t
  misc_feature (242)..(242): n is a, c, g, or t
  Peptide Sequence Number=SeqID_122449
tttactttgttttgttctttgttctttcttaggttactttcttgtagtctaccgtaactattgtcttccttgattggttgtaaacttcaagacttgctggaggtgatacagaactgcaattgacaccagctggtcaggctatggtagacatatctagtgagccacccagcagccaagagggtaaatgaggctccaatcagtgacgctttgggaaatgatgaaaatntaaagacagaaaatcngctgatgctgaacctgcccc

SEQ ID NO: 56476 - DNA, 225 bp, Setaria italica
  Peptide Sequence Number=SeqID_122450
tctatttctagtaagttgtccctactttctagtttgtaactttattcgtcttgcacaatcaactcaagaagctaccatttcaaaccaagaggaaattgttgcccatgaaaaagcaactagtgtagaagggcttactgtagatagccgttcagatgcacctgcatcaatggtatttaggttggtgtggaatcaactcaagaagctatgtcaaaccaagaacaaatt

SEQ ID NO: 56477 - DNA, 254 bp, Setaria italica
  Peptide Sequence Number=SeqID_122451
ccatctccggcggccagatcttcttcaacaagtgggtcttatcctcaaaagagatcaacttcccctatccggtggcactaactctgcttcatatggtcttctcatctgttgtgtgctttgcaattacgaaagtttttaagatcataaagattgaggagggaatgactacagatatgtgagtctcggatcactctaatttctagaattataaacttactttttttctcaataaaattgtctgtgcccattcagcc

SEQ ID NO: 56478 - DNA, 244 bp, Setaria italica
  Peptide Sequence Number=SeqID_122452
ttttttttttagtctcataataatttgtttatttcgacgaaatacacgatagtacgtatgcaaagtaatccattcactttgccgctaacagtgtatatacaccgtatacaattaccatcgactaagcacattaccgctattgttctgtttatcacgctcgtttcgcagagagtatgatcggtataggcgtataccaagaacaacaatagacaatagactagaacgtagacttagaactacgaac

SEQ ID NO: 56479 - DNA, 192 bp, Setaria italica
  Peptide Sequence Number=SeqID_122453
aattgtatacggtgtatataattacccatcgactaagcacattaccgctattgttctgtttatcacgctcgtttcgcagagagtatgatcggtataggcgtataccgatcacgctcgtttcgcagagagtatgatcggtataggcgtataccagacacatgcatgctgacgtgcttgactcgactccacacc

SEQ ID NO: 56480 - DNA, 242 bp, Setaria italica
  Peptide Sequence Number=SeqID_122454
attggatctattgctctaatcaaagagagaagaccagcaccaagctgactcttagaacagtcgatccaagcacgataggggttccttaccacaacggatgaatcaatccaggtccggatcgatcggcgcacctggggcagcagcagcgcgcaggaggcggcgggcagcgacaacaggagcggaattccagccgacgagctcccgtcgcaggatccttcgggaggcgtgcgtcggcgaggtca

SEQ ID NO: 56481 - DNA, 290 bp, Setaria italica
  misc_feature (218)..(218): n is a, c, g, or t
  Peptide Sequence Number=SeqID_122455
caaagttgggaagaacataagtccaaatccaaccataaaaagtacgtaacatccaagagccactaccaagtagatggggagcagccaagtataacttcgaggaatagttgaggtttcaaggagagcaatccagatggatgagatcgctaccagtattgcaacaatcttgaatatgtgcttcatttgggaatggtgtgcttttcctacaatacaaaatntagctgaatgctatggacaatcaattcgttttcctaacacataagcagttgcacagtttaatttgacacatg

SEQ ID NO: 56482 - DNA, 416 bp, Setaria italica
  Peptide Sequence Number=SeqID_122456
ctatttgaacttgtaaacagctcaatataccttttaagttcaatgtaaactaaaggtcaactaaaagttcaccttgaagttgaactgaaagcaagctgacatgttctgctagctccttcccattgtatattttaccaaaaaatgttgacatcaacaagcttaatttgcagacaaagttccgtgtcttctcattggatctcaacaaatgatcatactttattttactgcagggacaatatcataggcattcaagggagtgatgcttgtagaaaactaaataacaagatccaaaatacatgaactcatactcaaggcacacctagtagttgattccttatcaattgcacaagtgtcgcaattttaattacctctgatagacaaataaaaggtcaaatcgtttccacatcgggtgccgg

SEQ ID NO: 56483 - DNA, 196 bp, Setaria italica
  Peptide Sequence Number=SeqID_122457
gttacaaaacactgtatccatttggacaaagttaaagtataagaagcccattttatgtgtaagcaagagagtttagccgtgtctaacttaccaaaaatgttgacatcaacaagcttaatttgcagacaaagttccgtgtcttctcattggatctcaacaaatgatcatactttatttactgcagggacaatatcat

SEQ ID NO: 56484 - DNA, 462 bp, Setaria italica
  Peptide Sequence Number=SeqID_122458
aaaataaaacaatacccaacaaactacttaccaatttaaagtctgccaatgcacctccactgccacacttaggaatagaatgatcgatgaataaatagtgattatgttggtgttcacaaggggctacgtacttcacattaactgccttgcaaatcaaattcattttcatatccctggctagcagacacaagtctagaccatactccaaattggtttccaggggtaaaaatcttcaagttcatgtatccagaaacttcataaaaggcaagatcataatgcttgcttaagtatagtaatttactggttaaggttgagccatcaaataggtgaataacgaccttggcattagaagcatattccttgtcggaccaatcattgaagggtttttcgatgtaattaagcaggcagaagtgagaacaataccacatccttttcgtcatcccactcgacagctatgccagt

SEQ ID NO: 56485 - DNA, 271 bp, Setaria italica
  Peptide Sequence Number=SeqID_122459
aacatatgcaggcaagtttaatgcagccatcaattgtttcaagtttaaggagtaacaacagtagaagaagatccaactttgattatacacttttgttttttatagattgtataaaaaggtgaagtttttccagaggaacattttaccttggcattagaagcatattccttgtcggaccaatcattgaagggttttttcgatgtaattaagcaggcagaagtgagaacaataccacatcctttttcgtcatcccactcgacagctatgccag

SEQ ID NO: 56486 - DNA, 248 bp, Setaria italica
  Peptide Sequence Number=SeqID_122460
cgctctggagagtggtcgctctgttcggctgctcgcggagcagaggaacacggctttgtggctttggcgccgttgggaggggagggaggcggcaaccggggtgcccatcttatagtcggatgaggaagagacggggcaaaaaggtacggggtgactgacacgtgggtccatcagttcaaatgggttcaactgcaatgctgcgagcttaaaggacaggctgcggttgttagctttagcgggcctccggt

SEQ ID NO: 56487 - DNA, 194 bp, Setaria italica
  Peptide Sequence Number=SeqID_122461
acgagaagagaggcagtaaagcctttcaaggatgatgtaccctatgtttccgagtatatacaaccactgcgtgtgaggcaagttggactcgtcgccatggagaagctgaagcatgctgcaaggaggaaacatttggatgcattgcttgaggattattgagtatatacaaccactgcgtggtggggaaccgactc

SEQ ID NO: 56488 - DNA, 247 bp, Setaria italica
  Peptide Sequence Number=SeqID_122462
tgattgtgctggcatatatcttgatctgcctattaattgttacaaatgtacatgtataattatctgcagagtgagtggcagtaaagcctttcaaggatgatgtaccctatgtttccgagtatatacaaccactgcgtgtggggaaccgactcaagtgaaaaacatctcaactcagcatcccatactccatcagcaccttcacaactcgcccctccactccaactccctcccaaccaccttcccttcc

SEQ ID NO: 56489 - DNA, 243 bp, Setaria italica
  Peptide Sequence Number=SeqID_122463
ggtggcaccgggcggaagagcgtggccatcagcccggagctgatgcagagccggaaccgcatctacctccggggcaccgtcagcaaggagctcctcacgcacaagcaggtcgtccagctctccaagaagatcaaagacggcatttggctccagcaccaaagatcaaagtaatttatcatcaattcataatcacttcaaaattgataaccactccaaaaccagagtgtttgcattatcaatata

SEQ ID NO: 56490 - DNA, 236 bp, Setaria italica
  Peptide Sequence Number=SeqID_122464
ctggcatatatcttgatctgcctattaattgttacaaatgtacatgtataattatctgcagagtgagtggcagtaaagcctttcaaggatgatgtaccctatgtttccgagtatatacaaccactgcgtgtggggaaccgactcaactgaaaacatcgcagggtcactcaatatatcagaaaagaaagtaaacaatgctacagaggctgtgaacaaggttctttcactggatcaac

SEQ ID NO: 56491 - DNA, 491 bp, Setaria italica
  misc_feature (461)..(461): n is a, c, g, or t
  Peptide Sequence Number=SeqID_122465
aaaagaaaattaaacttaagaaataaggtaagaaccaaccttacaactagtaacctagacaaggacaagagcattgccattgtcggaactagtggcagtgggaaatcaactattcttaggcttctgttcagattttttgattcaacttcaggatctatacgaattgatgggcaagatatccgaggagtgacactagagagccttcgaaaacatcttggtgttgtacctcaggacacggtactttttaacgacacgattaagcataatatacagtatggacgtttatcagcaaaagatgaggaggtctatgatgctgcccgacgtgctgctattcatgatacaattatgaacttcccagacaagtatgacacagtagtaggagaacgaggattgaagctaagtggtggggagaaacaacgagtgtcgatagctcgcgtattcttgaaggagccctccattcngttatgtgatgaagcaacaagtgctcttga

SEQ ID NO: 56492 - DNA, 415 bp, Setaria italica
  Peptide Sequence Number=SeqID_122466
tactcacgctacattgaaacttcttttcctttatgaaaaagacttacttcagcatttgtcctattgtgatgtaactttggtaatttataagatgcggttcatttgttggatgtgcatctcaaactttccttttaccgaatcctttacttcagcttggttcatagtcaaacaagggcacaattgccacatatcatcgatgtggaataagagggagaacagtgcccttttaatcgggatagataaaacaggttgaactaaaaatatggaagttattacatgaaactttcaactttcttacccgaccttttgtatttgatatgaacaccaggttataaatgttcaagtgcctttcttgtttaagctcgctatcgattggcttgcagcccttggtggtgctgaagcctcactggcatcg

SEQ ID NO: 56493 - DNA, 235 bp, Setaria italica
  Peptide Sequence Number=SeqID_122467
acacggactttttaacgacacgattaagcataatatacagtatggacgtttatcagcaaaagatgaggaggtacctattttcttccaagacattctgaagtgcatatagcatgattatatgttttgttttggaatgatacagtttgtttccatacaggtctatgatgctgcccgacgtgctgctattcatgatacaattatgaacttcccagacaagtatgacacagtagtagga

SEQ ID NO: 56494 - DNA, 181 bp, Setaria italica
  Peptide Sequence Number=SeqID_122468
ctgcacccctcccagaccaaagacggagaatgcagtatcattgaaaggtaagctgaatgtactggacagtaagtggattcaggtcatctttgaggccccagaattgaaggtaggttccttgacctcactctcaccacctgagacacgcaacaggggataggcaaggcacacgagggatagg

SEQ ID NO: 56495 - DNA, 251 bp, Setaria italica
  Peptide Sequence Number=SeqID_122469
ggccggccctgtcgcgcgcgctggccgacggcgactacgacggcgtcgcggacccgaggctgcacggcaactacggccccgtcgagatggcgcggctggtcgccagcgccgcggccgccgtgcgccactcggccaagaagcgccccaagatgagccaggtactcgccacttctttcaccagtacgtgctaagggtagctcaggtgatggcaatgggaatgttgtgtcttggctgcagatcgtgagggcgtt

SEQ ID NO: 56496 - DNA, 183 bp, Setaria italica
  Peptide Sequence Number=SeqID_122470
tttatttcccattcacactaaagcagaagcgcctcacagacttgcacccgcagattgaggagctagtctacagcaaagaggacaatgacgagcacatgtaagtacacacatccaggcttgctttcttttggttttggcaaaatcttgctgatgaatcccaaccatgatatgatgcaaccagag

SEQ ID NO: 56497 - DNA, 299 bp, Setaria italica
  Peptide Sequence Number=SeqID_122471
ccgccggtgacgcaggtctcggatttcggagaggtcgcgcctgtgaggccgctgatcggtcttggaagccacagcggcagcagcgggtttcctgggctatcaccgccgatggtcggcggtggcgacgccagtgccacctggctgctgggcagagctgcaggtgctgcttaccctagccatgctttggacatggttcccataagaacacttgatgtaagattttcaacttcatgtctcgcattacttcgacatgtattcttatggccaatgtggatttattatttctaggttgttgaggg

SEQ ID NO: 56498 - DNA, 372 bp, Setaria italica
  Peptide Sequence Number=SeqID_122472
tttctttgtaggggtattaggtatttccctttgtattgtctactttctactactagtttcacaaactcctcccatgggtcatcaccaagaagtaggatgtcatcctcatgatccttgtagactagcttccagcctattctctgtcggtcctcaagttggccctcaataccaaacatgcgggccaaagcatgcttcaattcttcatatccagcgtaccggccaatgtcaatggaccggccaacagctccacgtttgtagaccttagtgaatgtccgcatctctgtggtggaggtgcagggggccaaggaatttctgtttaacaaggcaccatcgttgattgcagaatcgatagaattaaaggctatatcagac

SEQ ID NO: 56499 - DNA, 263 bp, Setaria italica
  Peptide Sequence Number=SeqID_122473
tttgtactttttttattgctatattagtagcctccactgattgtaacccacattcctaggcacttttacaatatttattctcttgacaaatttttgatagtgaatacaacatttgacttaagcaaatgtagaaatgtaaacttactcccatgggtcatcaccaagaagtaggatgtcatcctcatgatccttgtagactagcttccagcctattctctgtcggtcctcaagttggccctcaataccaaacatgcgggccaaag

SEQ ID NO: 56500 - DNA, 354 bp, Setaria italica
  Peptide Sequence Number=SeqID_122474
aataaaagcctagacgtctactgcaatctgcacaactcttccaggcgataatcttgttgatggctgaacactaatgactttttgcagccatagttctcatctgcccatttatgaatgaattcataattatgaaagccaattcagcaaccaacacagaaatggaaacaaatactgcaagggaacaatgtgcacgtacttgtgatgatcaggtcattcgaattggtcatagaagccgatggaagggttaccagggttctggtcacagcggaggcctccaggcgttcccaccatctgagctgctgcaagcctggttggagaggacagttgttcccaagtcaccatctaagctcatct

SEQ ID NO: 56501 - DNA, 250 bp, Setaria italica
  Peptide Sequence Number=SeqID_122475
gggggaagtagacgacgaggctgcccgccggcggcagcgacaccagcggccccgcgcaggcgtgccacagctccgagttgatcgccggcggcttcttctccccttcgcatccgctcgccgccgctgccgccacggcggcggcctgtggcccgacggagctcgccggctgttgctgctgcttgatcatcttctagactccgaccacccgcccgcaaccgaagcgctagtttcgccggcgagctagggagag

SEQ ID NO: 56502 - DNA, 157 bp, Setaria italica
  Peptide Sequence Number=SeqID_122476
attgtaagaaaggagcagcaattggttcaatctcccacattgaaactctgttcctcctttcaccagctgcagactcatcccagccaacctaccaattaacattaaatctgtgaatcggatagaaacataaaaggaagaatacaaaccaagactgcca

SEQ ID NO: 56503 - DNA, 338 bp, Setaria italica
  Peptide Sequence Number=SeqID_122477
tatttgtgttatgatgtttgctgctgctgctgctgcctgtgcactcgaatgggatcagtattggagaaaatggaacatgcctgtgcataaatggattgttcgtcatatatactttccttgcatgcggaatggtatatcaaaggaagttgctgtttttatatcgttctttgtttctgctgtactccatgagctatgtgttgctgctccatgtcgcatactgaagttctgggctttcctaggaatcatgttgcagattccccttatcatattgacatcatacctacaaaaataattcagagacacaatggttggcaacatgatcttctggtttctttttc

SEQ ID NO: 56504 - DNA, 322 bp, Setaria italica
  Peptide Sequence Number=SeqID_122478
gaaaacctgaacgtcaacttttgctatggaaactattataagttccaaaggtggaataaatttaatgaatggatgataccatgaatacgaatttattcttctgtaatgctctttgttggtccatctattgtatctttgtgactaataatgtccacatttttgcagcctgtgcataaatggattgttcgtcatatatactttccttgcatgcggaatggtatatcaaaggagttgctgtttttatatcgttctttgtttctgctgtactccatgagctatgtgttgctgctccatgtcgcatactgtaagttctgggctttcc

SEQ ID NO: 56505 - DNA, 446 bp, Setaria italica
  Peptide Sequence Number=SeqID_122479
atactgggagagctctacttcctggaagggtgagatctccctgagttgtacattgctcaagcttcagtttgatagaattttagctgaagacactgaccaagaccgatggcttcagaactcttcatgatccttaggcgcttgcatgactcgacaaacatcctgcagggattataattgacaatccaacataagaaactgaagtctgaacatcttgatctcatcctgatcatgggtcagtaaatatgaaagcaggaattataatcgacaaggcacatgagaatgaagaacatactcccacgggacatcgccaacaagcatccagtcaccgtccttgtcttcgtaagtagtgacaacatcggcaccactcactggatcaaccaattccctcattcatgttgttccctgtttcccatgcggccatgccagtggtgattaccagttgtgaa

SEQ ID NO: 56506 - DNA, 344 bp, Setaria italica
  misc_feature (306)..(306): n is a, c, g, or t
  misc_feature (315)..(315): n is a, c, g, or t
  Peptide Sequence Number=SeqID_122480
tatcgtgtgtcccagaatctatctgtgtgtagctggattggtgttatgtgatgtcccctatcgtgtgtcccagaacaccaatccagctacacacagatagattattgcttctggtccatgaacaaattgaacaagacagctccctccactagtaattaaaacacattatatttctaggaaaaccgtagcacactgcaagggcaccattcttatgacacaatgcgcaacatcttaacgctgcatcttgttcagcttttgttcttgcacttgtccttggttcttggtgcaagaccgatggcctaaggntcatgaagngttctgaagcagtcgctagactgagtcgg

SEQ ID NO: 56507 - DNA, 375 bp, Setaria italica
  misc_feature (1)..(27): n is a, c, g, or t
  Peptide Sequence Number=SeqID_122481
nnnnnnnnnnnnnnnnnnnnnnnnnnnaccttattaataataatagtctcattgatgccctttacttaacaatcacacaagcttgattaacaacactggaataaaatcaccaagtagattctgggacacacgataggggacatcacataacaccaatccagctacacacagatagattattgcttctggtccatgaacaaattgaacaagacagctccctccactagtaattaaaacacattatatttctaggaaaaccgtagcacactgcaagggcaacattcttatgacacaatgcgcaacatcttaacgctgcatactttagtttactaagtaatttttagtttactttagtactaactttagttaccttta

SEQ ID NO: 56508 - DNA, 138 bp, Setaria italica
  Peptide Sequence Number=SeqID_122482
gtgccttgggtgcgggtggcttctcggcatcagcggccaccgcctcggcgggcctcttggccttctcggcggccggctccggctttgtccggtcggtcggtctttccttcctattgttccggttcggtttgggttctt

SEQ ID NO: 56509 - DNA, 297 bp, Setaria italica
  Peptide Sequence Number=SeqID_122483
tttttaaagtaacctaaataaataaggaattaagtttaggaagtacaagagggaactcttctgtgcaaggtgagttcttgggtgatccataaactgcagctgatgatgagaacaccaacttcttgcagccatgagcagacataacttctagaagatttatcgtcccaatgacattgttgtcataataaagcaatggcttctgcacactttcacccacggctttcagtccagcgaagtggacaacagcatcaaatcttgttgaagcaaaaaaccatttccagtgctcccttgtcacgg

SEQ ID NO: 56510 - DNA, 177 bp, Setaria italica
  Peptide Sequence Number=SeqID_122484
caccttgcacagaagagttccctctgactccaaacaatccatatggcaaaactaagctgatgatgagaacaccaacttcttgcagccatgagcagacataacttctagaagatttatcgtcccaatgacattgttgtcataataaagcaatgccatattttgctttccagttaagct

SEQ ID NO: 56511 - DNA, 241 bp, Setaria italica
  Peptide Sequence Number=SeqID_122485
catttgttagaagcgataatctctccttagattctcttcttcttgatctcatacaatctcgccatggctagcaacggcaagaccgccaacgctgccaccgcgacgacggtgccgcagccaccgccgtcaaaggggaagctcgtcacgattctgagcatcgacggcggcggcatccgtggtctcatcccggcgaccatcatcgcctgcctcgaggccaagctccagaagctggacggcccgg

SEQ ID NO: 56512 - DNA, 396 bp, Setaria italica
  Peptide Sequence Number=SeqID_122486
gaaacaaagccatgataatcaagtttctccacatgatatttgttaccagtggctcccttctacttactctcaactttaagggaataagccttttgcagttgaaaaatgatgaccgagcacatgcagataaagtgaaaaataccttcatattcaacacatttgttctctgccaggtgttcaacgaattcaatgccgtaaaccagatgagctgaatatattcaagggcattttagggaaccacctctttattggcattatagcaataacagtaatactccaggcacttatcgttgagttccttggcaagtttgcctcaacagtcaagctaagctggcagctgtggttggtttcgataggtcttgctttcttcagctggccgttggctttcgtgggaaa

SEQ ID NO: 56513 - DNA, 242 bp, Setaria italica
  Peptide Sequence Number=SeqID_122487
attcttgcgatttaattttcaagtttctgcatctcttttactagatgcagcagaagggataggttgtcgtttatgtaaatctccatgcattcacttcaaatgcagatactattctagtttttccttgtcatcaccttcagttatttatttgaattgttaggtccgcatggtcactggtgataatcttcaaactgcgagagccattgccctggagtgcgggatacttgatgatcccaatgtgt

SEQ ID NO: 56514 - DNA, 435 bp, Setaria italica
  misc_feature (418)..(418): n is a, c, g, or t
  Peptide Sequence Number=SeqID_122488
tgttctaggtcttgtctaaagtttgtccgtacggtcttattggtctactaattgtcttggttaactagtcttgtttggtaattctaactacttgaatggggtattactaatggcaagcatatctgaagattcgggtgaagagacacctcttcaggttcgtttgaatggtattgctactttcattggaatggttgggctttctgttgcccttgcagttcttattgtacttttggccaggtacttcactgggcatacttataatcctgatggaactgttcagtatgtgaaagggaagatgggcgtaggccagacaataggtggagtagttataatcttcacagtggcggtcactatagtggtcgtggctgttccagaaggactaccattggctgtcacgttgacgctcgccttctcaatncgcaagatgatgaagga

SEQ ID NO: 56515 - DNA, 157 bp, Setaria italica
  Peptide Sequence Number=SeqID_122489
gctcagcctcgtgccaaggccgatgccgacgatggcgagcacggagaggccccgcgtccgcatcggcggcagcgggtagccgtaccggttctgttgggttcaatgccagctccttcgtggggaacaagaacctgtacggctacccgctgccgccgat

SEQ ID NO: 56516 - DNA, 336 bp, Setaria italica
  Peptide Sequence Number=SeqID_122490
aaacaaagtaaatagaagtaagacaaagactaatgacattagacaaagaagaaacccaaagccaaaatacaaatgtaggagagaatataacagaataaaaagtagatcatctattctaatatgaaaaattttgagtgatgactagggtatatcaacgacaaagtctacatgtctctgacatgaatgttgattactttaagtgaggtcaagacaaagatgcacactgataagcaagttgccttttttaacatacatgaatatagttcagttagtagcatacatcttgtgtgtacacactctccaattgctggataagttccttggcagattggccct

SEQ ID NO: 56517 - DNA, 273 bp, Setaria italica
  Peptide Sequence Number=SeqID_122491
cgctcctctccctgccttccctttcactggaaccacgctgctcaacttcccatccagcacgtcctgacccaggaagagtctgcacactttcagtatgctgagatttagcacggaatttctttttgaggttgccaaactcatcatatatctctccatcatcctcctcgacctctttccgacgctttttaacttcctctagttcttcttcatcaagctcgtttttctcccttccgccccggcaaccgtccttctccacctcctcctcctcccccc

SEQ ID NO: 56518 - DNA, 255 bp, Setaria italica
  Peptide Sequence Number=SeqID_122492
agcgctaccacggcctctacccctaccgccaccaccaccaccagctcccccaacaccagcagggcgagcggctccacagcgattacaaacaccacggaaggcaaagtttacattgccacaactgagagaagaaatcacatcagaaagaacggaatacacaattaagaccatactagtcaaactggagaagtgatagagaagttgctcacccatcataacagaccttgtatttggacacatccaatccccatcttg

SEQ ID NO: 56519 - DNA, 251 bp, Setaria italica
  Peptide Sequence Number=SeqID_122493
tgaagcgtcagcgtccaggagcaggagcggcagcgcatcacgatcaagaaccccaccgagaaaaagaaaggcgtccatccgtggtcaaagaaacaatcttccttccatgacacccaccatcaggattcaggaaaccacaaccctttgcgagatccctcgcgctgcggaggaagaagagggggagggttttagtaggagcaggcagagtaggcaaggggggaatgctcttgtgggtggggagcttgaagatg

SEQ ID NO: 56520 - DNA, 149 bp, Setaria italica
  Peptide Sequence Number=SeqID_122494
cccttctttgaatcacctcacacaaaaagcacctgcaagacatgagacgccattgcttgtaagtgccaacaaggaaagaatacgtgtttttttagtactagacggaaaaccaacaaaaaaaggtacaaagaatacaacaaggacgacaa

SEQ ID NO: 56521 - DNA, 246 bp, Setaria italica
  Peptide Sequence Number=SeqID_122495
cttaccatcttcattgattccgagcattgcaataattctgccattgcccactcaactgtacttgaaactgtctcacttcctcctacgaagagatcctgaaatatattgattataggtagagaaaccgatcatggcaatggaacttaaaatatttcaacagtatgatcattgacccttccatttccgaatatttccaccttgagaaatgaagtttaactcacaattggcagagagcatggacgtaca

SEQ ID NO: 56522 - DNA, 468 bp, Setaria italica
  Peptide Sequence Number=SeqID_122496
taggtaccgggacaaggaacaaatctcttcccgacgtcccctcacttctgcgacggaaggtttggtcgtcgtgtcaactttctgttccctgacaggccgtacggtactacgaataactacgtacgaacgaagaatacgaattacctaaccttgtggccatacggagggggatgggaagtggctcaagttctccgaccactgtattccacttccagcagaccaccctgcagttgagagtatgggcttagtgtcatcttacagtcgcctgacccgtggcttcgacagggagcagttggtgttcggaactccagtgttgactaatctctaccatgtgctttttcatttcaatccaaaacttggattaatgaatccagaatgacaaggcaaaggaaggcgctggttcagttgatagtcctattctgtgaagctgtccgcttcaggcgtatgcgagcaaggcttcgtggagat

SEQ ID NO: 56523 - DNA, 322 bp, Setaria italica
  misc_feature (322)..(322): n is a, c, g, or t
  Peptide Sequence Number=SeqID_122497
caagttctccgaccgccctattccacttccagcagaccaccctgcagttgagagtatggacatacagtcatcttacgttcacctgacccgtggcttcatcagggagcagttggtgttcggaactccagtattgactaatctctaccatgtgcttcttcatttcaatccaaatattggattaatgaatcgagaaatgataaggcaaaggaaggcactggttcagttgatagtcctattctgtgaagctgtccgcttcaggcaaatgcgagcaaggcttctggagatcatggaggatggccaaagtgtcactttacctcgagan

SEQ ID NO: 56524 - DNA, 269 bp, Setaria italica
  Peptide Sequence Number=SeqID_122498
tggtaattagttagtttgtctatttgttcgtagttaattgttcttattgttgttgttaactattgttgtcttggtaacaccaggtcgaccgattataattctgctctaacgatttggtcggaaaatgataaatctttggtctttttatgcaatatgcagtggattccttcagtggatatcgacgcaaatggatccgtccctccaggggtacgaacacgtgatgaattggctggcgcagcgggatttggatcgtgccggcccggggcagg

SEQ ID NO: 56525 - DNA, 397 bp, Setaria italica
  Peptide Sequence Number=SeqID_122499
tctaaagtcggtcggggtcgtctacgttatttgtcttggtaaggtaagtattgtagtcctaaggttgtctatttctaaaaaggttgtctttgagaagctagttggtgaaggttacaaccttgctaatccaattgacttgaagaccttttgggccaagcatggcacaaataagtttgtagtaatcaggtaaagcaaaaggcatgctatgtttgtcgctttgtaggttgtagggctgcagttaggcctgatttattgcccgtatgtctatgtgccaatctgcagaaacttaggagtagtttgtagccatattcagtttcattgacttaactgccatgcctatcttcaggttcggatatcgactcgatagaagtcggtttgatccttaactttgcaagtt

SEQ ID NO: 56526 - DNA, 422 bp, Setaria italica
  misc_feature (23)..(23): n is a, c, g, or t
  Peptide Sequence Number=SeqID_122500
cctctagagggacagaaggaganccttgaattgagagaacggctaaaggagcagattaggagaaaggcaaaggctgctgcagccagcgcagccggccgctcgtcttcttcccatgatagaattctaccaaccagggagaacaaatttggctccttcttcggaccatccaagccggtgatttctcgacgagtgattgaagaaagaaaatcattgaaagaactgcatagcacaatctcaagagatccgaggccttctggagtacatagggacatgccatcatcctccaaagtccaaaataaaggaaatggacatctagtctattaaaccctaagtattggtttaattgtaggtttaaagttaagttaaggttcttgttaggtctactttaaggtattaaccgggtatttatttctattttctta

SEQ ID NO: 56527 - DNA, 218 bp, Setaria italica
  Peptide Sequence Number=SeqID_122501
cgcgcttctttttctcttccctctctatagtagcaaaatctgcttccatgtcactatcatcctcatctctgcccgcatatgttcgggtatgatcctagaagatatgcgggcagagatgaggatgatagtgacatggaagcagattttctaggatcatacccgaacatatttctgatcattgcaagggggtcttcctcatcttcatcttctgagactgc

SEQ ID NO: 56528 - DNA, 258 bp, Setaria italica
  Peptide Sequence Number=SeqID_122502
ctcattgtcacgtgaaacagaccttttctctaattttgagaaaaacctcctttctcatttgaatctaccctaccttcagcatgtctttgggttgcaatgtgttcttagatcttccttgactcaaaaggctgatcgtgtggtgatgcactcagcagcaaagagcaaggcaccaacaagtcaacctgcacgattgtcaaatggatatggatctaagaacacattgtcaacccaaagacatgctgaaggtagggtagattc

SEQ ID NO: 56529 - DNA, 138 bp, Setaria italica
  Peptide Sequence Number=SeqID_122503
ccatattgcccgaagataaggcgtggtcgatcagactgccaattggctggcaatactgatgcactgctgcattgctcacctgccggctttcttgatttctctcctgtcaatccttacggcaatgcttgaggttgttcg

SEQ ID NO: 56530 - DNA, 271 bp, Setaria italica
  Peptide Sequence Number=SeqID_122504
ttatggcctcccgccgggcactccacctcctcacggccagccgcgggatctcctcgaccccgcacctcgcctccctcggctggttcgacaagatcaagtccaccttcaccggcaagaagcccgacgcggcctccgaggcagactccttcaccctcatcagtaagtcgccgatgcgcccggccgttgcttcggttccgctctcgtcgggctggtagcggtgcggcggcttgaccggcctctcagattgggttcgattttgcagagttcgcgg

SEQ ID NO: 56531 - DNA, 430 bp, Setaria italica
  Peptide Sequence Number=SeqID_122505
agtccgtatgctgctgcagaaggaagtgaaactgcgagttctgcctcagtagtggccggtggctccacatctgaagggtcgatgtcaagcatcagtcgtgctatatcatccaaggaatatagaaaaaaaaaaggagggatcttcacctcttcagttgttctagagcaccactgctccagttcctgtaagccagcctttaagaactccccattgctaaaagagcagcattcccgacgaagtagcaaactaaacaaaaacaaaaaggtagaggcatggtacagtccagaatcaaccatgtaaattcagtcaagaatagttaagaaatggtacagtatatagtaatacctgttgaagagttgcacattcaaatatgcatatacttgactaaatgttttcttgattatcattggaggtacctacatacaaaatt

SEQ ID NO: 56532 - DNA, 414 bp, Setaria italica
  Peptide Sequence Number=SeqID_122506
ccattcaacattgcatcatattctcttcttacatacatgattgctcaagtttgtggtatgttcttgtatgccttcttgtaagatttttgcttactgtgcatcataatacatacctaattggttgtaccgtatagcagtgtgttaattttgattaatatgaaacatagattttgtgaactttgatttttctcccttttctatttatagttgcaacaaatctttacaagccatgttgtttgtcattccatacattatgctacatgttgttgtaacatgttctgaataattcattcttctgatgcaaggatttgcctgtatgttgtccatttgtttcttttgatgtttctagtatctaactgatagcagtaagctgttttgcaactctaaccctttgtgtcctaatgttgcaaggtc

SEQ ID NO: 56533 - DNA, 398 bp, Setaria italica
  Peptide Sequence Number=SeqID_122507
ccttcaaccgccggttgcgagattttccagtattggttgttcattcatttcacaagtaaaagacctcaatttctggaacctgagtagcaaataagtctttccgctgtagtcagtcccgactggtagcaatggctacagctccagccaatggtgattcagagagtggccctcagaggaactatcaggttgttgtggctgccactcgtgacatgggcattggtaaggatggggtttttgccatggaagcttcttggtgaccttaagttcttcaaggagcttacacttgctacatctgaccctgccaagaaaaatgcagttataatgggaaggaaaacatgggagagcattcctgtttaagttctaaggtcctatttgtccttggttcgttttgttaattt

SEQ ID NO: 56534 - DNA, 284 bp, Setaria italica
  Peptide Sequence Number=SeqID_122508
tattataaagtctggtgctcagaaaaatgacaggacaggaacaggaacgttgtcaaaatttgggtgtcagatgcgattcaacttaaggaaaaattttcctctgttgacaacaaagagggtattttggcgtggtgtcgttgaagaactcctatggttcatcagtggttcaacaaatgcaaaggtacacaaacttaaagtatttattggatctagtgttgcctttagccaaacttacccaatattttggtttaatgtaggcatttataacttagtctatatccaca

SEQ ID NO: 56535 - DNA, 436 bp, Setaria italica
  Peptide Sequence Number=SeqID_122509
ttataggggatgcacatgtctacagaactcatgttcgagctttggaggagcaaattcagaagatgcctaagccattcccagtgaggaattcttaacagaagtatttcaaaataaatacaaaatttgcaggtgaaaatgatcaattctggtgtttgtgcagattttgaagataaatccttcaaagaaggatatagattcttttgtggcatcagacttcaagctggttggctatgatcctcaccagaagatagagatgaaaatggcaatataatggtggctcagctggagccccagtctatgagcttggcgaaattattcggactgctactatattaaaattaaccggacatcgcactagcttgttttggtgatggtgccgaatgttcgcgattgtactctggcttcgtatctgaactctacaaacctgctcccttta

SEQ ID NO: 56536 - DNA, 314 bp, Setaria italica
  Peptide Sequence Number=SeqID_122510
tatacagacatgcatgctgactacactggaaaaggttttgatcagctaatggatgtgatcgacaagatcaagaataatcctgatgatcggcgaataattttgtcggcatggaatccttcagatctcaagaagatggctcttcctccttgccacatgtttgcacaattttacgttgagaatggggagctatcctgccagatgtatcaacgctctgcagacatgggacttggtgttccattcaacattgcatcgtactctcttctcacgtacatgattgctcaagtttgtgatctttctcctggggattttgttct

SEQ ID NO: 56537 - DNA, 411 bp, Setaria italica
  misc_feature (89)..(89): n is a, c, g, or t
  misc_feature (393)..(393): n is a, c, g, or t
  Peptide Sequence Number=SeqID_122511
tttgcactgtagctaaaatagtagctggttctgcaaatctcatgattgtaatattttagattttgcggacactgtatccaacttcttcngttttcaagtcctcattccagttcacaaactctaaccctccaaactgtacttgcttaataccaacatgatctgaacttatggtcgttaaggcattaagtaggatgtccaaaagcaatggctcatgaataccaatgtctaccctgtgcaagtcaataagatgaaggtaaacagtcatgggaaatatcaatgtgattacaacttgaaaaagtatacatttgcgatatttcggtctagaataaatatttgtctgaaagaggttaaagaggaaatatggcacatgaaccaaacataactgagcaaatntggtatggcattgtttca

SEQ ID NO: 56538 - DNA, 380 bp, Setaria italica
  Peptide Sequence Number=SeqID_122512
tccagcgtcgatcatgcttcatcagggatgagctcgcaatgatgcaggcgttcctgagggccgcgcatggtgagagagatgaccatgaggtgctcatgacctgggtgaagcaagtccgtgatgtggcctacgatgcggaggactgccttcaagattttccatccatctcaagaagccatcttggtggcgcctcctagcacgttgctagagcgacaccgcatcgccaagcagatgaaggagttgagggccagagttgaggatgtgagccagaggaacctgcgctaccagctcatcaagagggtggttccaagcctgataccaccgctgtgctatccagcaataaagctgcagcaatatttggcatcgatgaagcacggcgt

SEQ ID NO: 56539 - DNA, 395 bp, Setaria italica
  Peptide Sequence Number=SeqID_122513
acagaatgcaatgaaaataattgacattgatttcctaatgatgtttaccttcaagctcctgcttatccacacgaatctccaatgatttagcataagcaaagaaacccaccataagttgacatggcatagtatttggcccgacaggccacggttgagagctatgatatatgacttgaccaacttcaataccagtctcttcccatgtttcccttctcactgcctcttctaggctttctcctggctctataaaaccagcaagacaactccacatacgaggcacaaatcttgattggcggcttaagagtgcacggtcattttctttatcgatgaccaacatgatcacaactggatcaactcgagggtatatcctcttcttgcaagactcgttgctgcac

SEQ ID NO: 56540 - DNA, 336 bp, Setaria italica
  Peptide Sequence Number=SeqID_122514
caaagctgcctagttccttctcaaatctataagcgtgtacccaacaatagggttcctattgttgggtacacgcttatagatttgagaaggaactaggcagctttggtgctccctcgaaagcccatgccgatattaggtgatgagcaatggcaaagggtccagggacaaacatcggaacaggttcaccactgtctaccttgaagtcatcggtgatgctctgccctttctcagcacccttgcacatttgattgacctttagagcattggttctctgagctttctcatattctgcaaatgtcagagctttcctgatgtcttcacggctgtgccactggg

SEQ ID NO: 56541 - DNA, 219 bp, Setaria italica
  Peptide Sequence Number=SeqID_122515
cacatgtatcgtgccttgcgttcttgtgagtgtagatgtggtactttacctagctagaactcctcttgaccttttattacagttggctatgaaaagtaccacatctacactcacaagaacgcaaggcacgatacatgtgcctcaaaggattccaattcactataccgccttccatcgaatgaatctgaacaataggaaccctattgttgggtacacgct

SEQ ID NO: 56542 - DNA, 180 bp, Setaria italica
  Peptide Sequence Number=SeqID_122516
gggcatcttcgagctcctgcttatccacacgaatctccaatgatttagcataagcaaagaaacccaccataagttgacatggcatagtatttggcccgacaggccacggttgagagctatgatatatgacttgaccctgagacacgcaacaggagataggcaaggcacacaggggatagg

SEQ ID NO: 56543 - DNA, 296 bp, Setaria italica
  Peptide Sequence Number=SeqID_122517
cttatgtaaatagtccaattggtagaaacgaacatacaccttaatatagttcaatttcattcccaaaagagaaagaagtacagtaggatttattcattgaaaaaaaacgtgcagttgattaaaatctggtgctgagaagaagcaaacgtgatacaaggaaaccttctgaaggtagacacaggcagttgatatgccaacagcagccctccaaccaaagacttcttttactggtctaagttcccaccctctttaaggctttaacaaaattccttaaaggttgaaaccatcggtaattt

SEQ ID NO: 56544 - DNA, 252 bp, Setaria italica
  Peptide Sequence Number=SeqID_122518
ctgtatgttgacaacaatctgatacctctttggagcacagaagcaatttagcttttcaccaccagacagatcgtcagaccagagatccgtgtgtgagaaccttagataacagcaaagaattacattaagtgtagcatgggaatatatgtctagcttgagagtcataaaaagttttagaattgaagtatttgtacgaaatagaatatcagctcaaattgaaaggttttgtatttccttaattgctttaataca

SEQ ID NO: 56545 - DNA, 262 bp, Setaria italica
  misc_feature (80)..(80): n is a, c, g, or t
  misc_feature (94)..(94): n is a, c, g, or t
  Peptide Sequence Number=SeqID_122519
acccacaaccaaccgaaccctacatttcaacttccagcgggaagtagctacacaattcaggtcagccaaacaaatccaanacccccattacagngttttgagacacagagcaacagcagcgagaccagaaactcacctgccgtcggttaccgcgtcgaaggtgaaggcgacgaggcggcggtcggggtctgcggcgtcgggctcgagcctgatggtgtccttgtgcaggttgacgtagttcttcaccttctgcgcctgctgg

SEQ ID NO: 56546 - DNA, 391 bp, Setaria italica
  Peptide Sequence Number=SeqID_122520
cctagttgacatgctgacctaccaacaactaatggtatgcaagtatgtgatctctttctactactagataagtttgttaaccattagcaaacagccctaaaaagtcaagcccatgcttgtacttagaacaacaaaaaaaacagagagacatgactgtgttctttacccctcaaacacacatgtttttatttacttattacctcttctatagtgatagttttctgtttgtctgtttagataccttatttcttgcaatgtttcctgttaaggttcattttctatctcatataggtgtatacatttgctgagacagtgctggataccttggtactacttccaaactttattgagttctttcaagatgaaagtaggcgttccagctctcctgggg

SEQ ID NO: 56547 - DNA, 410 bp, Setaria italica
  Peptide Sequence Number=SeqID_122521
ggtgaagttggcagagggggttatctcctcttctggagcaaattgcagggggcccctattcatcgtgttcgtcgaccctttcaacccgaggtatcaacctctacaagttccgctgcttagagttgacgggagacacatgaaagtaccgcagtgggtcaagcaagactttttcaatgtctgcactttagatatcaggctctgcaaactggtgcacgaagacctcgagtttctgaagacgcagatgcccaacctgcaggccctccaactaaggttcgaggtcctcccacgggagccggttgccttcactggtggagggttcaagaagctagagacgttctgcgtcgattgccgtctgccacggctgacctttcaaagcgttgtaaagtcctaattgtccttaaagttcttgt

SEQ ID NO: 56548 - DNA, 286 bp, Setaria italica
  Peptide Sequence Number=SeqID_122522
ccctcgacgtccaaaccctaaccctagttcggttctctcaccccccgcaacgcatcgaaatccctcgttccccgaccgatggggaggaggaaggagcgccgcctggcggccatggccgcggcgggccgcagggtcaagctcgacctcttcctcgatccctcccccgacgcaagtaacagaactatagctggataggttcattaccacaatggaccaaagcacattgaagcattgcaacactgtccttatgtttgaaagtttcaatcacgttttgaattttacatta

SEQ ID NO: 56549 - DNA, 219 bp, Setaria italica
  Peptide Sequence Number=SeqID_122523
cgacgtccaaaccctaaccctagttcggttctctcaccccccgccaacgcatcgaaatccctcgttccccgaccgatggggaggaggaaggagcgccgcctggcggccatggccgcggcgggccgcagggtcaagctcgacctcttcctcgatccctcccctggagaggcatcacagaaagagggaataggaggtgaaataccgtgaccaacagactgt

SEQ ID NO: 56550 - DNA, 326 bp, Setaria italica
  Peptide Sequence Number=SeqID_122524
gaggcggagcgtcacgtacgccgtgcgctcccgagtggcacaggatcaggtggcacgcgctgctcgtcagcaggcacaccatcgcgccggcgaggtacgcgaacagcggccaccgcgtcacgggctcgccggcggcgccagcggcgacgagtgcgtccgtggccgtaccattagtgtcctgcagatgcagtcgttgtcggatctggatctggatgccatgatgaacgtgagaggaggatgtgttgggtggacagctggtagggatctgctgaccatcttcagacaaaccagcctctgcagccgtctagtattggttggtctagtct

SEQ ID NO: 56551 - DNA, 273 bp, Setaria italica
  Peptide Sequence Number=SeqID_122525
accagactagctaggttcagctcagcaagcagtcaagcacccatccggccatggctccgccgccccctgccctcctcctcctcctcctcattgccgtcaccgtcccactctcagacccggcgccggtgttccccgatgaagccctccccaccaagtcggggtacctccccatcccgcccgccaacgcctcgctcttcttcgccttctacgaggccacccaaccgctcaccgcgccggcctccacgccgctcctcctctggctgcagggccggg

SEQ ID NO: 56552 - DNA, 266 bp, Setaria italica
  Peptide Sequence Number=SeqID_122526
gccgccaacttccaccacttccgtaacttcatcttcttcagcaccttctttggatggatcgaagaagacgctcttgtcctcctcctctgttgtggccgccgccgccgccgccaccgccttgaggaggtcgtccatgaccacctcgcctccgttgtcgccgtcgccagaggcagccatcttcttcttcttcatctcccttgtctggaggcccccggaagcggcggcggagtcctcttcttcgcccatggcctggggcggctgcaccg

SEQ ID NO: 56553 - DNA, 211 bp, Setaria italica
  Peptide Sequence Number=SeqID_122527
cttctcatattttgttgagtgagaaagaaaaattgagaatctggtcgttgttatcctacgtttctgaatacttagcactaacctttgtttggcgaatagtaaaatggttcactctgaactaacgattcaatattcctcgtaatttggcaatatccttgatggttgaggatataatctgtgcatggaccactcaagcggtgacgtaccaaaa

SEQ ID NO: 56554 - DNA, 316 bp, Setaria italica
  Peptide Sequence Number=SeqID_122528
tgccagtaagtgtcggatcaacagctctggtaaatcaaagtgccagagcttggctcttctcttgcgaggtctcaactcctcaacatttaccacaggcgcccgctcgatggcagagggagtccacatttttacatcattatcaattccactacttgcaattgtcatatcatgaggatgaggctcaatgcaaatcaacaatggctgcatctggacaagatattgctcaacctgcacctcaggtatatgttggtcatcgcaatcgtgaaaccgtgaagcgcgtgactttcattgggccaaatgatgaatatgttgccag

SEQ ID NO: 56555 - DNA, 472 bp, Setaria italica
  Peptide Sequence Number=SeqID_122529
ggcggcgtcggtgtcggcgtgaaccccggctacggcaagccggcggcaccacggtcggcgtcgggaaggcgggttggcgtcaacgtgaagccccgccgggaagcccgtccacgtcaacgtctctcctttccggtacaactacgccgcaacggagacgcagctgcacgacgaccccagcgtcgcgctcttcttccaggagaaggacctccacgccggcaagaaggtgaccgtccagttcaccggcaccgcgggcgccggcacgaagttcctcccacgaagcgaggccgaggccatcccgttctcctccgagaaggtgcccgagatcctgagccgcttctcggtgaacccggactccgtcgaggcggcggagatggcgcagacgctgcgcgactgcgaggcgcccgcggccaggggcgagaagaaggccttgtcgtcctacgttcgtctacgtagttcctattggttcgtactt

SEQ ID NO: 56556 - DNA, 295 bp, Setaria italica
  Peptide Sequence Number=SeqID_122530
cttctagctggttatgcatgcaagtgccaaagcaagtggcgttcatatgtggttaggaaaaaataaggctgatttagtattgagcttcaactgttacctttagtcatagcatatatagttccgctaaacacacttactactccggcaactgatgatatgaagacaatgctgcctgaaccagacaatttcaaaagaggatgtgcaatttggcacaagtgataggcagattccagatttagttggtcctattctaaaaattgtagttattttcctttctttgcagaaaattcagtgg

SEQ ID NO: 56557 - DNA, 326 bp, Setaria italica
  Peptide Sequence Number=SeqID_122531
ccaacacgcccaagcggagttcgactcacaacttgctccttgaatgagttactctccaatagcttttcagtaagtgaagtcgtgatgtaccacggggcaacagagttggctctgatgttgtctctcgcccattcgcatgctaaggtcttggttaactggttaatggcacctttagtcatagcatatatagttccgctaaacacacttactactccggcaactgatgatatgaagacaatgctgcctgaaccagacaatttcaaaagaggatgtgcaattttggtctactaagttgtattaggtctagttatttccttagttatttt

SEQ ID NO: 56558 - DNA, 243 bp, Setaria italica
  Peptide Sequence Number=SeqID_122532
cttgtgctgcaattactggatgtattatgttatatgatggccagggaaaattccacaaaagcacaacgcatactctgaaatttgttgttagccaggcaaattatactgttgacaaccttaggaacctgtctgatagtttatctgctgcaaagaaggttgaatttcatcaatctgactttgcatatcggaaggcagtaagaatcgcccaatgtcaaccttctttgcagcagataaactatcaga

SEQ ID NO: 56559 - DNA, 255 bp, Setaria italica
  Peptide Sequence Number=SeqID_122533
gtcgagcccgagccgtttgcgccggcgccggcgccaagcctcagcttcaagttccagcaccagatagccgaaattccgcgggaggcggcggcggtttcgagggaaataccagcccaaatagaagcagtggaagaagaagagctgcaggaagagaaggcgccgtcaattcctttggaatcggcgggcaagcacgagcatgaagacgaagcagaggaaacagagctgctattggaagaacatgtggaagagcagagg

SEQ ID NO: 56560 - DNA, 454 bp, Setaria italica
  Peptide Sequence Number=SeqID_122534
agaatagttagtagtaattagctgcgctctaagaggatggctccctttgtccagtgtattagccgtagtcatcaaggcagattttagttgctgaggggctccacttcgggttcttctgctttatcagtgccgcaataccagcaatgtgcggtgcagccatgctagttccggaaaccatggcaaatccttcacctggaaaatgttaccaccagatgagaatttttagtaagctcaaacacaaaccgattgtccttatgaattaccgatcaacaagaaatacacaaggatgtcgtaacttgtaagtgttgcactgaaatgctgagaattgaggagggaaacatttacagacaaagcttaccagcatagtttgattcatctgttccattaggtgcccatgcagcccatataagattgccaggagcaagtatatctggcttaagaacatcagcatctt

SEQ ID NO: 56561 - DNA, 469 bp, Setaria italica
  Peptide Sequence Number=SeqID_122535
cagattctctaactagcaatgaagtgcagataggaaatgctgacaaacacacaatcttatttatgctaatgcctctcatcaatactgttaggttctgactcatttgaagcttattcacagaataccagggtacagaatagcttagaaataaaattattctgatcatcaacatcaactcatttgaagctgtgacctgtaatgacgagataaatagagatactaaaacatctgactgtgtgctctttactcaacatgcctcagaacctaatcctagtaatctataatagtgctttactgccacctaggtaaaaaaatgtttgaaaacccacaaaccctctgattgtaccatttgttatcttgacttgggaacacttcgacaactgcctatggtatactggctagcatttggtgtgatactgaagatcctatactctttcctcctaggatgattcagaaatagttgccatga

SEQ ID NO: 56562 - DNA, 440 bp, Setaria italica
  Peptide Sequence Number=SeqID_122536
cacagatgtgatcagagacctcactaggcttctcctgattgatgaagtggctcactccctccatacaacaacatcctccagttttggtacgcttgccttgaagccacccttgtggatgtaatcctgtacccccggagtgttgtacgtaatatccaggtccccaacaatgaatttgttggaactttatcggagcaccagtccatggtgcagaaagctcccaattcaggtccatgcatctgtagtagttaaatcctccagtaaagcctgtctttgaaaatttttctgcatagtaggaaatatcttcctctgatagccatggagggcatgttccgtctgaatcaagtgagtcaaaagaaagctcttgtaccttgggtaagaaataaagaaggaagactaggacttagacgacaatagaccaaaatagtacttaaattaaaaaa

SEQ ID NO: 56563 - DNA, 204 bp, Setaria italica
  Peptide Sequence Number=SeqID_122537
tattacttgcatcatattgagcgaattcagcttcagcaactccaggttcctggaagcggcacatgtagtggtcttccccgcaggcggccttgatggtctggagcgggctcccctccggccgccgcgggtggtacacgacggtgctgctgaatgcaacgcgacgagggcgcgtacgccccgcctgacgttgatcaaggtatcgtg

SEQ ID NO: 56564 - DNA, 284 bp, Setaria italica
  Peptide Sequence Number=SeqID_122538
cagcatctctatccacttttgacacgctaagtgtcattgtatgtgcccgatctacgattacattctggtcccactagctaggagattcacaggcaatgagaggggctttacggagctgcagaggatgggcattggcctggtaatctccattataactatggcagtagctgcagtcctcgagatcaagcggctggcgatcaccagggaccatggcttggtggaatcaagaaacgtcccaagtacccaactagaagacaataattactaggacaaaatacccgaca

SEQ ID NO: 56565 - DNA, 229 bp, Setaria italica
  Peptide Sequence Number=SeqID_122539
tacttgacaaaaaagactacatgatggcaatgcctcctgctgctagcaatgtgactacatggcaggggacgtgttatctgactccccttattggagcaatcctggctgatgcatactgggggaggtattggacaattgcaacattctccacaatatacttcattggaatgggaatcctgactctttcagcatcggttcctatgctcatgacctccatcctgtgaaggat

SEQ ID NO: 56566 - DNA, 438 bp, Setaria italica
  misc_feature (303)..(303): n is a, c, g, or t
  Peptide Sequence Number=SeqID_122540
tagtactaaagtaaagttacttaattagaaatactagaccaattacgtacttagaacctggatttctcggagctgcattggccctggctgatctgcatgttgcggaaggacgtaatagggaggctgttatgctacttgaaaaatatctacgacaatgggcagatgattctctacacatcaagctggctcaagtatttgcagcaacaaatatgctttctgatgcactttcccattatcaatccgcattaaggataaacccacaaaatgaagctgcaaagaaggattggagcgcttggaaaaacngatgaaggagtagacccagatgcacctgaagaggacgaagacaacgaggctgatgatatcgacgccgaccaagatgaagctgagctgctatagagaaacactctgaactcatcatggcaactcttgcctccaaag

SEQ ID NO: 56567 - DNA, 361 bp, Setaria italica
  Peptide Sequence Number=SeqID_122541
ccgaacattatgacatatatggatgagtatgcaattcttttaaaaacaaaatccgactacatcaaactgaacaagctggtacatgatatgctgcatattgaccctgcaagaccagaaacatgtgttgctcttgcagcaatgtgggaaagaaaagatgaaagaaaagctttgacatatgcagaaaaggtacgtaccttgtagctatgtgttctttcatctaattttcttacaacgttttgttttcatcagagccttcgagttgatgataggcatataactggttatattatgaaggtaatactgcaaaaccttgctcgatgcaaatggaattatattgttatggtaattcctacttagcgtt

SEQ ID NO: 56568 - DNA, 234 bp, Setaria italica
  Peptide Sequence Number=SeqID_122542
ccctgcaagaccagaaacatgtgttgctcttgcagcaatgtgggaaagaaaagatgaaagaaaagctttgacatatgcagaaaagagccttcgagttgatgataggcatataactggttatattatgaagggcaatctgcatctttcattgaaccgaccagatttggcagtgacagacttcagaggagctcaagaattgagggctgatcttcgttcttatcaaggtctagtgcg

SEQ ID NO: 56569 - DNA, 238 bp, Setaria italica
  Peptide Sequence Number=SeqID_122543
gaccagcaaaggttgcttccatcccgccgaacgccagccaacgtcgtcgccgcacagctgttgttgcacctaagcaagggctgccgtcgcaatcaaggtcgtccaccaagctttcagtcaccgccacaaatacccatatgggtgtccactggcacgccgagttggacgctatatcaataccaatcgtcgtgccactgtctgtagagagccattgcccgcctccgcaggttgacaccaa

SEQ ID NO: 56570 - DNA, 281 bp, Setaria italica
  Peptide Sequence Number=SeqID_122544
ttttcttttaagggttttagtttcgtttccttttggttttcgtttagtttcttttctttagttcggtttcttactttgttctagttgttcttgtgtcaccactgaagacccagatcttgaggccagcttcaatgagctccttgtagatgggtatcatggaaacattaggcgtgattgtcgtccagttatcataaatgggattgttgcacatcgtccacgggtactttatcatgccgctgacgttggcgtgcatggcgttctgcacctcggggatgttcagg

SEQ ID NO: 56571 - DNA, 384 bp, Setaria italica
  Peptide Sequence Number=SeqID_122545
caagtcatcacaagaccagcggcacacaaggtatagccggaatgttgccatctgtatcccaagcaagcgcagagtctgtgccgcttctggtgaaagaggttttccttcctcacatactacatgatctgcaattaactctacaacacctctgttcaagcgaactggcagtccttgcttgcgcagaaagggttccatttcatgtgtaaactgttccagagggccttccttaagctccaccgtttctgtggcagtacttcccgtccttgcaaaatcatgctcctcaaattctcgaaacagcctctcaacatcctcccttggaagatttggttaaagtaactaaacctagtagttcttaccttttgttaaggttaacttttggttaaa

SEQ ID NO: 56572 - DNA, 360 bp, Setaria italica
  Peptide Sequence Number=SeqID_122546
ttttagcttcatcagcaggtgaacgccccaacgctatctgcataaccttcttcccagcaagaaatatcctgctagatgctttgtgctgctccctgaggccttgagcttctgatttctcatgttatcgtaggtgaagacataggcactgccgtatttgtcgacagcctcttttatctcggtaactactctgcccttgcgctctaaacctggcttcttcttggtctttgacaaggtcactgggcggttgcgcttagatttcggcatcgcgcgtcggctcctttgctgctgacggcggacggaagggggggaacggaaagacggacggaaggactacctacctactaagggttttaagtaaga

SEQ ID NO: 56573 - DNA, 309 bp, Setaria italica
  misc_feature (60)..(60): n is a, c, g, or t
  misc_feature (127)..(127): n is a, c, g, or t
  Peptide Sequence Number=SeqID_122547
gtacttcccgtccttgcaaaatcatgctcctcaaattctcgaaacagcctctcaacatcncccttggaagattggtaaagacaaaccagagtcaccttgaaggaacttggaaagtttgtggaggccngttttagcttcatcagcaggtgaacgccccaacgctatctgcataaccttctttccagcaagaaatatcctgctagatgctttgtgctgctccctgaggtccttgagcttctgattcctcatgttattcgttaggttgtaagtactattaggtctacttgttccgtttatttttgtttctta

SEQ ID NO: 56574 - DNA, 198 bp, Setaria italica
  Peptide Sequence Number=SeqID_122548
aggtgaacgccccaacgctatctgcataaccttctttccagcaagaaatatcctggaacagaaaatgcagctgctagatgctttgtgctgctccctgaggtccttgagcttctgattcctcatgttatcgtaggtgaagacataggcactgccgtatttgtcgacagcctcttttatctcggtaactactttgccctt

SEQ ID NO: 56575 - DNA, 404 bp, Setaria italica
  misc_feature (14)..(14): n is a, c, g, or t
  Peptide Sequence Number=SeqID_122549
acgcaggcatacanacagaccacagcgaagccgaaacaaaccatgccgtcatcagcagtggccactggtcactgtagagatcaggcaagaactgaactggagcgcaccgaggccggcatttccggccgcggtttccgcaggatcgccgcacagatccgggagctttgctactcccttgcaagaacagaggaggaggatcaataagctctccttacattgcaaggttacaagatactaccacactactaccagtaacattacaactaggcaagaacagcaacggtaacagggagggaacagctactagtctagcacgacacgattattaactcgcttttgttccaactactacttagccgggaaaacttagcatagatccaggggaaaaaaggggtagagagaga

SEQ ID NO: 56576 - DNA, 411 bp, Setaria italica
  Peptide Sequence Number=SeqID_122550
ggttaacagttaaaaggttcttgagttagtcctgacattatggaaagataatctggctgaggaacaaatggaaagatatctgacattatggaaagatacaggtccctttggcctttgctacaaacatgtctaccttctgcaattgtcatagctgcctacctcactttctttcatatcaatgtctacaattttattttcaggagattgggaaaaagcatgcgaagatgagttcagactggacctcacaccatttgatgccccataagaggctcactcaaagaattctcccttggtggttattctcttgaggtccacttggccacctacaccatgtcttcattttgttgaccatgtcctgtagatggtagcaaagaaagttacacaaattgtactgtttagtaaaatacacta

SEQ ID NO: 56577 - DNA, 234 bp, Setaria italica
  Peptide Sequence Number=SeqID_122551
ggatgtgcaaggaagtattccctttcttgcttgaagtttttagatttgacctggtgaatatttttgcatagccacactaatggagggaaatcacaggccaatgcaacacgttttaatatctggaaatcgacaaggtatgtaccatgtactgatgaaattacttatgttagttcatggagctttctaagtgaaatatatcttgaggcttatctgccagatggttggttaacagtt

SEQ ID NO: 56578 - DNA, 337 bp, Setaria italica
  Peptide Sequence Number=SeqID_122552
gcctctctgcgagggcaacacatcgccgttggagaggacctccagttctgctccttgtcgaaagtttccttttagttcttgctgggttacagagctattgatcaggggaggcaattcaatttcgattcttatatgcaggaggaagggagaggcagccaactgcatattaaatgctgttgatttgactcctagcctgttctactcaccaaaggatgtgccaattattattcctcaaaaccgacagggattacaactcctttctcagaccttgtgcaatattggactttttgcacaaactgaatctttctacaagtgtaaaattcatgcagctaacttc

SEQ ID NO: 56579 - DNA, 157 bp, Setaria italica
  Peptide Sequence Number=SeqID_122553
gaggcggcggcacctccaacccctgcagatccagtgagggaagcctctctgcgagggcaacacatcgccgttggagaggacctccaggttggtaggacttgaatctggcttaatcaaatgattccagcggtatcatgatgcggatttggctagttgg

SEQ ID NO: 56580 - DNA, 187 bp, Setaria italica
  Peptide Sequence Number=SeqID_122554
gtcaaagatggagcaccggcactggtaaaaagctttgatataatcatgggtgtctctttttttcccacgtattatcctcaccttcacctctgccttttggtttcaagattcctgcggatcccatttcactaatgaaaagcagtgttctttctacgaaatcaaaggtatattcagctattgaaaacag

SEQ ID NO: 56581 - DNA, 233 bp, Setaria italica
  Peptide Sequence Number=SeqID_122555
cagatcataatcaagccacttatttatttgattgagtattcatatttcttcaggatgaacgtgaattgaagagggagaggcgaaaacaatctaacagggaatctgcaaggagatcaagattacgcaagcagcaagagtgtgaggaattagccaggaaggtagctgacctaacaactgagaacagtgctctcagagctgaacttgacagcctcaagaaggcctgccaagacata

SEQ ID NO: 56582 - DNA, 373 bp, Setaria italica
  Peptide Sequence Number=SeqID_122556
tcaacattcacgatgtgcttatagccatccagtgaacgaatgtgagggctttaagcacatcgtgaatgttgaatactgttcgcctgtttcatcggaaggcccccattttccttccaaggctgccagagctaaagaagctgcacaacggacgccaaacacagaaaatactgaggaataccaccaaatgatggaggaggagatgattcatggcttgcagaaggttggttggaagaaggtggacgtcaacttccattcatcgttctggccttaccttgctcacaacaacatacacgtcaagaacgagtggcttcacaacgctggtgccggtgttatctcgcacgtggcggacagcatcaagcagcaggagtcacgg

SEQ ID NO: 56583 - DNA, 380 bp, Setaria italica
  Peptide Sequence Number=SeqID_122557
tgatctatcaagatattctgtatttttttaaaagatgcatcaagatattctatcaccttgggttattttgtatgtctctaatacaattactaatgttaaggtctgtgtctattgtcacctttccagttcaagcggaaatcctcttcaaacaagtgcatttatcgtagagaacgcatttgcgatagcaattggtgctatcagtctcatactctttgctcagttgattggcaatatgcagacatacctgcagtctatcagtaaaaggcttgaggagtggaggctgaggcaaagggacatggatgagtggatgagacatcatcaactcccagctcatcttcaagaacgtgtccggcggtttgttcaagtttaaaattggcttt

SEQ ID NO: 56584 - DNA, 344 bp, Setaria italica
  Peptide Sequence Number=SeqID_122558
agaatacatacatctctcgcgagggtgatcctgtgaatgagatgctttttattatacgtggcaaactagagagttcaacaaccaatggtggccgcagcaacttcttcaactctatcatcctgcgccctggtgatttcgcaggtgaagaactgctcacatgggccctgcttccgaagaccaacgtccacttcccgctttcaacaaggaccgtgcggagcctcacagaggtggaagcctttgctctgcgagctgaggacctgaagttcgttgcaaaccagttccgaaaggctccaacaagcaaagaaagctaccaagacaacaacaattaccggttactaactaca

SEQ ID NO: 56585 - DNA, 277 bp, Setaria italica
  Peptide Sequence Number=SeqID_122559
aagcctgatgagcctgacttctccgaagaccatttcgattgaacctgatgctttgcagttggaaatacacgttgtacaattacaaccatagtgtaattttatattcttactaaacaagaattctaggtgttgtgaattgtgatagaaaaggtgtatcatgtaatccttagctcgagaatctacccttgttagttgttatagacttcattctttgcagtctatacactaacagggtagattcttcgtagtcttaaggtatttactatttgttaattta

SEQ ID NO: 56586 - DNA, 245 bp, Setaria italica
  Peptide Sequence Number=SeqID_122560
tgcgatgatgaagatggcgaggcacgagagaggcggacatgagcagcttcttgccaaataattttttgtctggtggtggtcttgctcttctcgtcggactgtgcctccctatgctggtggtcgtcttccaccggcacgggcaaaaatgtggtgtaaggtggtagatacgtacgtacatcataaccacatagagcacgacgacggcggacgacacggcggcgaggtcgacggccatctctccggag

SEQ ID NO: 56587 - DNA, 223 bp, Setaria italica
  misc_feature (1)..(1): n is a, c, g, or t
  Peptide Sequence Number=SeqID_122561
ngctcttggccatgcatatgattcatagttgatgcatttcttctttggtcctgcagaaacagattgaaaaaagagagaactcagcatatttcgagtcaactaatctgtgtccccaaggaatcagtgaatggaagccaggactaacctccagcatctgcaaccaatattgctgctgccccctctggaccatgcgaatcagccgcatgacaatgtagaatggaag

SEQ ID NO: 56588 - DNA, 240 bp, Setaria italica
  Peptide Sequence Number=SeqID_122562
gttccaacaaacaggtaaagggagatatcaaacggggtgccagggtagagatggccacacctgggtaatatcagaggcgatgtgttcctgatgcgcagaagcagcttcagtttcaggcgttgacggcgatctcagcagggcagggatccccctcctcccctcctcttcctccatgctttcttgccccaatggtagagcaggagtgttgctcttcactcttcagctagctatgctgcactt

SEQ ID NO: 56589 - DNA, 213 bp, Setaria italica
  Peptide Sequence Number=SeqID_122563
cttgagctgctccactttgtcaagttgtccttgaaagccaagcataggatctgtaacctctgatcaaagcgatgtacgccagacctatccccatattgccgctcgtcggctcgatcagtgttgtggtgccaggtgagatcagccctttcccctctgcatcctcaatcatcctcagagcgctgcggtccttgacggagcagagcggctggtacc

SEQ ID NO: 56590 - DNA, 176 bp, Setaria italica
  Peptide Sequence Number=SeqID_122564
agcagacgtgatcgacagtggatgcgaattatgcacacacgcatgcttgtgatccaagaaccaaccttggacgcgggcttgggcatggcgccgtggagcttgccgtggaggcggtactcgtgcatgacccagccggacttctcgcccttgggcgccctcccggtgtagaagacgag

SEQ ID NO: 56591 - DNA, 409 bp, Setaria italica
  Peptide Sequence Number=SeqID_122565
ctgcgagttgatcgatgtgccctgtgccacactgcttcctaggatgaggagaggagctggaggaggaggaagagactgacatctatagaacccttaatttatagagtttttgcttcttctccagctcctctcctcatcctaggaagcagtgtggcacagggcacatcgatcaactcgcagcgagcaagcaagcatgcatccatggcgtcggggggcgtctagagcttcctcctgcagagcgggcaggacccgtgcttgatcagccagccgtcgatgcacggcacgtggaacacgtgccagcagtctggcaagctccgcaccttctccccgacctggaaatcctggaggcagaccgagcagccggagaggtcgccgacgccgtcgcgcttgtactcctcggtgattccta

SEQ ID NO: 56592 - DNA, 225 bp, Setaria italica
  Peptide Sequence Number=SeqID_122566
ccgttcatctgcaatgccagccactgtcagggatggaacacgaagcattgcacaatcgcattgattcagagaagcacatgatctatggaccaacagacctggctccggaccactcgctgcaccgccgggtcgaccttctcgcggacgagcctgccggtcaggaggctgtagatcacgttcagcacatagaggatgctccagatcccggagcggcgggcctgccag

SEQ ID NO: 56593 - DNA, 367 bp, Setaria italica
  Peptide Sequence Number=SeqID_122567
cctgacacaatataataagatcgatcatttcaaagcatggtatgagatatgttcacaagtggatgatgattctatctatttaatttgaatataacagcaccacgagcacacaatgtttaactccgagaaatacaactaaatactttattgttcaggagaaaaacgccaatgagaaaaagcaactcaaagaccaacacacaacttaatgatagcattaatgcaaatagatcaagtgttgcaacaactgcatgaaagatgaatggttttaaattagaaactacctcgattgtaacgtcatggtctaatatgtctgctggtgctggagtatagtccataggctccaccatacgacttggaataagagttt

SEQ ID NO: 56594 - DNA, 377 bp, Setaria italica
  misc_feature (2)..(2): n is a, c, g, or t
  Peptide Sequence Number=SeqID_122568
anactctcattaactatgtagtttgtgaaatactcctgtatttcctcgattgtaacgtcatggtctaatatgtctgctggtgctggagtatagtccataggctccaccatacgacttggaataagagtttgatcccaagaaacaaaatatatgtccccatcaagatcactccctgaacactcattagggtgcggtctggccatacttcagtgtgcgggtttcatccaagcatcccatcattgcccgtccttgtgggatgaatatccttgactttgttttcaattctagcagcttggatgctctaaaagtttgtagcagcatggaaagatatggttcatgatcaggctggtagccacatgacaacaattcttttaact

SEQ ID NO: 56595 - DNA, 432 bp, Setaria italica
  misc_feature (416)..(416): n is a, c, g, or t
  Peptide Sequence Number=SeqID_122569
gtagcagctatttggttaaagttatttatttggttttcttatttgtattctaggtcttggttagtcctactattgacaacaattctttaactacattagttacttctcccatgggcataagttcaattgcttcactagcagcctgcggttcagttaccattctgtttaactgcctcacagcttcctcctgctttagttcaaagcagtaccactaactccgagtgttgagagaagagtgatcaactgtcgattcaagaagcatggttggtacttgctgtatgcaaggacatccagggtgatattttcggactggaactttgacatactttttctcaaagaaagcttacgatttgatcctggatcaatagcgacaacacctttgtaaccgccataccttatctgaaaaactgaaggancaaagcgtttcaattt

SEQ ID NO: 56596 - DNA, 239 bp, Setaria italica
  Peptide Sequence Number=SeqID_122570
cctctatggcatcttgccaattccatcctcgcccgtgctcatctcattgaaaccatgacctagcttccttcctcaaagatctcacagccattctaattgcatacagcatcactactcttggtgaaattctttgccatcttaagaatacatccgctaattatctcagcttcacttcttatggaccacttgaaatcatacatttccgaggctatagagtttaaggaagagtatgtatttca

SEQ ID NO: 56597 - DNA, 209 bp, Setaria italica
  Peptide Sequence Number=SeqID_122571
acatattctctgatggaattggaaagatctcagctaactttgcatttcgtgccatctgttataacagttatatcaggaatttcttccacctcatacctgtgtacctttaaagtttctgttgaggaactaaaagattgaccaagccttgcagcttcatcgcccccctgcttatttgtcacagacaaagttccttttgtttcaggttcagg

SEQ ID NO: 56598 - DNA, 477 bp, Setaria italica
  Peptide Sequence Number=SeqID_122572
taaaaggaaaacgaaacctaaaggaaacaaaaaagaacaataattagtttacaattagacaatttacgagaacccaaatttagaggagctcgaggtcttggacttgcccacattagttgcctacataagctatgcaaggaagtatattcagccacagttatctgatgaagctgcagaagagttgactcgtggctatgttgagatgaggaaaagagggaatagccctgggagcagaaagaaggtcataactgcaacagctagacaaatcgagagcttgattcgtctcagtgaagcattggcccgaatgcggttctctgaagtggtcgaagtgcgagatgttgtggaggctttcaggcttcttgaagttgccatgcagcagtctgcaacagatcatgcaacagggacgattgacatggatctaatcatgacgggaatatctgcaagcgaaaggcagagacgggagaacctcgttgcagc

SEQ ID NO: 56599 - DNA, 253 bp, Setaria italica
  Peptide Sequence Number=SeqID_122573
tctcgcgcgggggcacgggaggcccgggaactagggtttggtgtggcctggctccgggcgcggcgcgggcggaggaagagggggtggagccgtggaggtggaggagcaattgactggagggggtttgatgccgatacgcaccatctgccgcattgatgtggactggtctacaattcatccacggattgccaagaattgatgaaatgtagagctgagccatgcagaatgctaactttggtctgaagtctaaact

SEQ ID NO: 56600 - DNA, 199 bp, Setaria italica
  Peptide Sequence Number=SeqID_122574
cttcatcagataaatgtggctgaatatacttccttgcatagcttatgtaggcaactaatgtgggcaaggaagtatattcagccacatttatctgatgaagctgcagaagagttgactcgtggctatgttgagatgaggaaaagagggaatagccctgggagcagaaagaaggtcataactgcaacagctagacaaatcg

SEQ ID NO: 56601 - DNA, 421 bp, Setaria italica
  Peptide Sequence Number=SeqID_122575
agagagaagtcgacgaaatactacattcactacattcactggagcgacatctcaaactacagcatgctgaaaacttctcctaacgttctgttctgtattgacacaaaggacagtaggacaccccaaggtaggatctggcagcttccggcccaagtgtaactttttaaacaatagcccagaatttcttcctgcaaatcagaactttctctgtcctattttcctcattttccaacatatgtgtgctaacatcccaaaggaacttcggtgctagatcaatgattcttgaaagagtgttcttctcatctctaataatgatggaaccctggggccgaatgatgcggtccatttctaacatgatatcttccaacaaacaatctcattatgaaggtcgcaatgaagattgtttgttggaagatatcat

SEQ ID NO: 56602 - DNA, 240 bp, Setaria italica
  Peptide Sequence Number=SeqID_122576
cctatcccctcgtgtgccttgcctatctcctgttgcgtgtctcagaggtaggatctggcagcttccggcccaagtgtaacttttaaacaatagcccagaatttcttcctgcaaatacagaaactttctctgtcctattttcctcattttccaacatatgtgtgctaacatcccaaaggaacttcggtgctagatcaatgattcttgaaagagtgttcttctcatctctaataatgatgga

SEQ ID NO: 56603 - DNA, 391 bp, Setaria italica
  Peptide Sequence Number=SeqID_122577
caaatttagtatctggagctgaagtctctccattttgtcaactgggcttagatgtttgctttgactttacttgacatgcctatgtgcttgccttctacaaatagttaagttgttcctaggttgtaagtgggtaacctgtacctatacttcaacgccgggatcattttatactctcaaccatcaatactgtagtactgtcttcaaggtgatactttcctctataacttttagtcacagttgtccttaatcttgtgcagatacaatggtgcgccaaactgctatgattgtcaaatgtttgctgctgatgtactacaagaacagcagaggccgaagctatcgtaggcagggttctaaattgtttgtactaatttgttggtaattatttttcttt

SEQ ID NO: 56604 - DNA, 242 bp, Setaria italica
  Peptide Sequence Number=SeqID_122578
tattatttgttgttcacgtatctggattttattggtgttacaagaatggggaccttataagacctctcctgatgcttcctcctaaagaaataccaccattttggcatgcgatattcatcatcttggtgaatggtatggtgcttgaacatatttacatctggcatcgttgcaaagttatactgctggcatcatttgaagtcataccgcctgaacaaatttagtatctggagctgaagtctctc

SEQ ID NO: 56605 - DNA, 257 bp, Setaria italica
  misc_feature (251)..(251): n is a, c, g, or t
  Peptide Sequence Number=SeqID_122579
ttgggggaagatgttgatctttggaagattgcagagtgcaccgagctgttcactggtgctgatcttgaaggcctttgcagggaagctggaatggcagcattgagggaagatctttctgcaagttcgatacacaacacccacttccaagaaccgacaacgaaagttacaattagaagaaccctactacttaacaaaaagacaaggaagttagaacaaagtaactacgaaatagactagaccaatacaaatanaataca

SEQ ID NO: 56606 - DNA, 259 bp, Setaria italica
  Peptide Sequence Number=SeqID_122580
gttgattcttatcaagacattgttatccgatgataccgtctcgaatacacatactctgcaactgcaagtttacagggaaaagtagaagctacaaaacgaaagaaagccagtgccaactgctggtacatggttgggcaatagtcgcctgtcatcaaggactcctccacaaacgaatggacaaagggaacctttaattggtgaggtcactacagcacaatctgcaccaccttcaagaacgaaaaatgccttctcagtggta

SEQ ID NO: 56607 - DNA, 338 bp, Setaria italica
  Peptide Sequence Number=SeqID_122581
ctgatatagtaagtactacaaagcagaagaattgccagaagcatttccacgtgatgctcgctcagagtcaccctccacgcaccaacttctgaaacaataccccagaaaatgccttttgagttcttccgtgtaacaaatgaacgctagcgcatcccggaaatgctgggccactggcaggtgcattcaagtcttttgctctgaagaaggaaaggaatttatcttgctgttgattaagctttatctgccttggcttgtagatgctggaggatgcgtcatcttggattcttttattattcttcagttcctttattttcatagtatagactgagttcggtaga

SEQ ID NO: 56608 - DNA, 248 bp, Setaria italica
  Peptide Sequence Number=SeqID_122582
tccagggcaactagcaagcctcagaagtatccccacgctgatgcttctgaggcttgctagttgccctggatttcttggctttaagacggtggtagatgtgtcatcttggattcttttattattcttcagttcctttgtttccggtaatgaaataaaggaactgaagaataataaaagaatccaagatgacgcatcctccagcatctacaagccaaggcagatttggtctaagttttgaccattccagg

SEQ ID NO: 56609 - DNA, 358 bp, Setaria italica
  Peptide Sequence Number=SeqID_122583
tgttatttagtcttaaccttgtaagtctagtcttgtactaacgtattcatccagtcacaacagtatatctctactgattagtttgacccagatacagttttggagttcttagtgtgttcagtccggacgcagttggtgctactttttaactagcacctttttcttcttgacccccccaccatttgacacacaagagtcagtatgtttctgtgctgatgcgttcactgtaaatgaggaattcattaaagtagttggtgtaaaacgttgtcacttccagttgtacaggaaggatatggatgataaacaagatactgtactacggaggaagaagagaggtgttcatgcccccctggtttcc

SEQ ID NO: 56610 - DNA, 226 bp, Setaria italica
  Peptide Sequence Number=SeqID_122584
cctatcccctgtgtgccttgcctaccccctcgttgcgtgtctcagctttagttgagccatcatctatgacctcagttgtgagttctgtctcaccgagcacaagcatgagaacaatggaattccctctgtttttcgatggccaggagactacaagatcagcatatgcaatatttttgttgaacaaggatatcgaacaactcctgaactacattggcgcagaaagcct

SEQ ID NO: 56611 - DNA, 255 bp, Setaria italica
  Peptide Sequence Number=SeqID_122585
agcgcatgcatggaggggcgttggcatctctggtcgacctggttgggtcggccgtgttcttcgccggcggctcgccgacgacgggggtgtccctggagatcaccatctcgtacctaaacgctgcccgtgcaaacgtgcgtgaggcgacgatccatgcactaacagtgctttaattcaacccattagtcaagtctttttaatgataatacacgtacacgtgtgtacgtacgcgtcctgtgcctgcagggagagatc

SEQ ID NO: 56612 - DNA, 386 bp, Setaria italica
  Peptide Sequence Number=SeqID_122586
cttatcagcaaagcaagctacgagaatgtatcaagaaggcaataatcttgcactgctcacttacctcgccccctcatttgatagaatcctattcactttagcttctctacttgcatttcttgcaatgacctgtgcacgtctctttttccagtggattcctgaattaaggcactatgctcctggcgtgcccataattcttgtcgggaccaagcttgatctgcgggatgataagcagttttttgctgatcaccctggtgctgttccgatttccacggcccagggtgaagagctgaggaagctaattggagcggctgcctacatcgaattcagttcaaaaacccaacaaaacatcaaagcagtgtttgacgcggccattaaggtggttc

SEQ ID NO: 56613 - DNA, 178 bp, Setaria italica
  misc_feature (15)..(15): n is a, c, g, or t
  Peptide Sequence Number=SeqID_122587
gaggtgatgatgctnatcctatgtgttgtatggacacgaaataaaagtgttcttttgtttcgtgtccatacaacacatagaggtgatgatgcccatcctatgtgttgtatggacacgaaacaaaagaacacttttatcggtgagtttgcaatatactacgtagcaggttgctgaaact

SEQ ID NO: 56614 - DNA, 200 bp, Setaria italica
  Peptide Sequence Number=SeqID_122588
ggagctgatgtttttcctttctggccttctcactgatcagtaaggctagttatgagaatgtttcaaagaagtggatacctgaactgaagcattatgcacccggtgtgccaataattctcgtggggacaaagcttgatcttcgagatgacaagcagtctgagacacgcaacaggggaaaggcaaggcacacaggggatagg

SEQ ID NO: 56615 - DNA, 191 bp, Setaria italica
  Peptide Sequence Number=SeqID_122589
caaggcaggaaggaggaatgaacaaacggatcgctcaatgcctcgacaaagagaagaacttgcttagaaggtatttcccgtgtttgagcaaaaaaatatcttgttatctctgttccataagtagacatgatgtaatcgtactaagtttatttttacttatttcacttcaatggaaaattatgcttcccttc

SEQ ID NO: 56616 - DNA, 412 bp, Setaria italica
  Peptide Sequence Number=SeqID_122590
cccgttgagctaccgtggtgctgatgttttctgctcgcctttctcttatcagcaaagcaagctacgagaatgtatcaaagaagtggattcctgaattaaggcactatgctcctggcgtgcccataattcttgtcgggaccaagcttgatctgcgggatgataagcagttttttgctgatcaccctggtgctgttccgatttccacggcccagggtgaagagctgaggaagctaattggagcggctgcctacatcgaatgcagttcaaaaacccaacaaaacatcaaagcagtgtttgacgcggccattaaggtggttctccagcctccaaaagcaaaaagaggaggaggaggaaggcgcagaaaggatgcaccattttgtaactaaacggtagatcgtctttgcagtctctg

SEQ ID NO: 56617 - DNA, 278 bp, Setaria italica
  Peptide Sequence Number=SeqID_122591
agaggatgaggaaggccaggaactattgttactcctaccaagaaaataaaacaaaacaagaaaaaagaaagctcaagctttgagtggagctgcgggatgaggaggaagaagaagcaggaggcctgcctctcccccccctgcaccggtaccaagaggaggagggagggcggaagaggatgagcgcgtccaggttcataaagtgcgtcacggtcggggacggcgccgtcggcaagacctgcatgctcatctcctacacctccaacaccttccccaccgac

SEQ ID NO: 56618 - DNA, 229 bp, Setaria italica
  Peptide Sequence Number=SeqID_122592
atcggcaccggcaggggcgacaccaccggagctcgggcttccggtcggagcacgtcgcagtctactaccgggagctcacctcgaagcggggggcgtcctgagctccgaccagacgctgttcgagtcgcccgagaccaaggagatggtcagcatgttcgccatgaacccggactacttcttctacgcgttccagcaggggatgctcaagatggggcagatcaacctcaag

SEQ ID NO: 56619 - DNA, 227 bp, Setaria italica
  Peptide Sequence Number=SeqID_122593
caaaacttttaaaaagggggaaggatcgtgcgtgcaaaaattcctccaactttgcccttttctgtctattctttatgtagaaagaatcacataaacggatggctacaccttacggatcgcagcactgaactagcaactgaagtagccacttgtcgtcttaaattcatcaggagatgatcttcagaggaactgacgccatggcggtgctcatggagtggaccctagcc

SEQ ID NO: 56620 - DNA, 236 bp, Setaria italica
  Peptide Sequence Number=SeqID_122594
caaacacaccacgccatatatattgcctctaagatgtacatagttatatgtactacaatatatgactgtcctatattatacctggtatcatactattattctctaaaaccttggatattattacatattcaattataggtgctggacttatggtgtatcaactattcatctacagaccagtccacaaatttctgggatgcgtcaattcatgccgtgcttcatctgccctatccata

SEQ ID NO: 56621 - DNA, 159 bp, Setaria italica
  Peptide Sequence Number=SeqID_122595
taagcttttctatctaaagaagttggccaacttcttgcagttgctgaccagtccacaaatttctgggatgcgtcaattcatgccgtgcttcatctgccctatccataccacttcttgctgtgtttcctttcatgacacacctatcagggtatagacttg

SEQ ID NO: 56622 - DNA, 220 bp, Setaria italica
  Peptide Sequence Number=SeqID_122596
cgacgtcgggcctcgccaacctgacatcggcggtgggatgctgttgttggctccactgaagctcgccgtcatcgagtccctcctccgacgtcgggcctcgccaacctgacatccctcttcgccgcgcagggactctcccaaaaggacatggtcgcgctctctggtgctcacaccataggcctagcacgttgcaccaacttcagagcccacgtatacaatg

SEQ ID NO: 56623 - DNA, 316 bp, Setaria italica
  Peptide Sequence Number=SeqID_122597
taaaaaactttaaaaaagaaactaaaggtaactaaggaacaaaataaacaaaggaactaagaaccctaaagacaacctacaaggtaacaaggtagaacaaacaaacttggcacctctggaccttcaaaccccgaccgtcttcgagaacaactactacaagaaccttgttagcaagaagggacttctgcactccgatcaggagctcttcaacggtggagccaccgacgcgcaggtccaatcgtatgttagtagccaaagcgcatttttcgcagatttttgtgacaggcatgatcaagatgggtgacattacaccttt

SEQ ID NO: 56624 - DNA, 223 bp, Setaria italica
  misc_feature (160)..(160): n is a, c, g, or t
  Peptide Sequence Number=SeqID_122598
attgatcgatcaatcgatgatcatggctactcgtgcagcatcagctgcaaggtgcagcagcagcgtcatcgccctcctactcctgctcgtcgtgatggccggcacctcgtcgtcgtcggcgcagctgtccaccggcttctactcctactcgtgccccggngtgtacgacgccgtcaagtcagtggtgcaggccgccatcgctagggagcagcgcagtcggggg

SEQ ID NO: 56625 - DNA, 384 bp, Setaria italica
  Peptide Sequence Number=SeqID_122599
ccttcgtgcagtcttctcagagatccactctggaacaagctctttcaacagtgttagctgctcctcgacttcacctgtagatgtaaccactcaatgtcaaaatccacattgcagacaccagttaagcaacatcaaggagatagagattattagttcacacatacttctgtccacaatctttggactgcttgcaactatcttatgaatcagctcctgctttgtcatcacagaccgctgtcttgactggtagataagaaatataatatcaaagatacttggcagggaagcaatcaacttgtgccttttaacctgatcagcaaaaccagtttccttctcctccatagccctctgttccttctgcttttaccttggtaagtaaactaa

SEQ ID NO: 56626 - DNA, 197 bp, Setaria italica
  Peptide Sequence Number=SeqID_122600
ctcgacacgcaggccaagatgcaggtcatcggcaagtccatgcagtccatcgtcaagtcgggaggcgaggcggaggtagttcatgtgctcggtgcgcttgcggatggcgttctcggcgtagatgcgggcgccgtccatgttgcccttctcgatcgccttcttcaccttgagcttctgctccttctcctccttctcgc

SEQ ID NO: 56627 - DNA, 218 bp, Setaria italica
  Peptide Sequence Number=SeqID_122601
caaatgtgaggttatctgtgtgcaaatctgagtattcctcattattcttctctgattgcacatttccataatgcgaatgcttctggttcatacttttgatttattgaacttaccttctgtatactaatgttggtgtacctcttttgcagatgcgattcatgctatatgctgttgagccgcaatgtcacgcggactgctactcttatttggtagattcg

SEQ ID NO: 56628 - DNA, 220 bp, Setaria italica
  Peptide Sequence Number=SeqID_122602
cctatcccctgtgtgccttgcctatcacctgttgcgtgtctcagctcccgcctcgacgccgtcgtggcccgcctcgacacgcaggccaagatgcaggtcatcggcaagtccatgcagtccatcgtcaagtcgctcgactccgcgctcgccaccgggaacctccagaagatgtccgagaccatggacaatttcgagcgccagttcgtcaacatggaggtcc

SEQ ID NO: 56629 - DNA, 499 bp, Setaria italica
  Peptide Sequence Number=SeqID_122603
aaaaaagaaaaaactaaaaaagaaaaaatttaaaaagtaaactaaccaaagaactaactaggtaaatacaagggttagaatgcaagagcctcttggtagatcagatctttcatttgttcttcggacagtgcatgctgctcgaagtcgaagctgaagggcattgagcagacaggctcatcacttatgtcatgaagtgatgccaaataaggatgcgcaagtgcgccttcaacagttattctctgtctaggatcaaaagtcagcatcttctcaacaagatcaattgctaaaggttgaacatgaggaaatttctcaggaaaggactgcctagcatgacggggcagttggcggatatatcttcttgcattttcatttacgaagtccagatcagcctcatttggtgtcccgatgagctccattagtaaacgtagctgatggacatgatctcttccaggaaacaagggcttccggtccatcagttccataaatatacagcccacag

SEQ ID NO: 56630 - DNA, 238 bp, Setaria italica
  Peptide Sequence Number=SeqID_122604
ctggcagtgctcctctgataaagcttgatttgaacgaataatttgatgcagatcagtatccatcaattcatacgcaatatacacatcattgaatgcctccctctgtgaaggaggtatgatatcccttattgcaacaatctgcacccacaaaaaatgaatttgcatcagaaatagaatctttgtagctggaaggcatacccaaaactgcccaacaattttaaactatggtaacaagaat

SEQ ID NO: 56631 - DNA, 251 bp, Setaria italica
  Peptide Sequence Number=SeqID_122605
cggaccagcttccgcgcacggtcgttggcagcgccgctccgatcatagttgtcgaacaccgtgttgggcaggtggcgcgccgcgagcacgagcgagctgaacggcaaggggatggccttccacacggtcgacgtcgccaacctgaccgacgagctcggcaagtacgacgtcgtcttcctggccgcgctcgtcggcatggccgccgaggacaaggccaaggtggtggcgcacctcggcaggcacatggccga

SEQ ID NO: 56632 - DNA, 225 bp, Setaria italica
  Peptide Sequence Number=SeqID_122606
tggcggcctggcggaggaggaggtgttggatctggagcggggagagggaggaggaagagaatgcaggtggacgagggagctgtccatttgatgtggcgcaacgaggagctgtgcgcggtaataacaactcgttagtcgctatttgatcactttaaatttcgtgctatcgtgctatcgtccgtgcgtgtacttcttcttcttatttcccacaacgcatgacgtacg

SEQ ID NO: 56633 - DNA, 251 bp, Setaria italica
  Peptide Sequence Number=SeqID_122607
tgggaaaggttctgaacgatgtgaagccgtacctggccatgatcctgctgcaggtagggttcgccgggatgtacgtcgtcgccaccgccgtcatggcgcccttcgcgctctggttcgagaggagcgtgaggccaaagatgacctttaccatcttcctcaagatcatggggctcgccatactcgagcctgtgctcgatcagaacctgtactacatgggggcgaacctgacctccgccggcttcgcgtcggcg

SEQ ID NO: 56634 - DNA, 356 bp, Setaria italica
  Peptide Sequence Number=SeqID_122608
acttgcatggaagttcaagagatgcagccaccttctcgagagcaaggcatcttatgttacccaattcatgcctacatgttggacagcgattatgaacccttggtttgcatccagagcacaatgtatgaccattggagcactgatgaataggaggatacatggcactcaagcagactggacattccagaagttcacgcacactgctagacaccaccacattcggttttggtggatgctgaatatggtcgccagcgagttccgtaacgtctagtacctcagtctttgggggatcaataacctcagaacaggaattcatctaattattaacctagtcttagttaagttaccttaattta

SEQ ID NO: 56635 - DNA, 250 bp, Setaria italica
  Peptide Sequence Number=SeqID_122609
tttgcagttttttcccatgtaaaagaaaatatactttctctgcattgagtttttggtataattacagggcacaataacatatttttcatcaagatataagcatgtggcaccttacgtcgcgggaagctttcaattgagtctcctcagctgcagatttatcttgatccaatgagagattaggagtgctgattgtatgtactgctgaattcgacacataagaactggaactggtaggcttccttctaatttg

SEQ ID NO: 56636 - DNA, 152 bp, Setaria italica
  misc_feature (144)..(144): n is a, c, g, or t
  Peptide Sequence Number=SeqID_122610
gaggatacagcaacatctcctatcagtagccctaagttgattgagctgagggattcagatgccacccaccaccagaagaaaataatcccagtgatgagattttgcattctaaggtgaagtcaattatctatcagaacttttttntttcgcct

SEQ ID NO: 56637 - DNA, 310 bp, Setaria italica
  Peptide Sequence Number=SeqID_122611
cgatatggttacaacgtatcatccaaaatgtatttaacacagacaacaacccacatttttcttcctccttttattgctaatgtactggtgtctatacacaatgaatgatatctgttaatgcatttcctttaccagctttacaccttagcaccttctctaacaagccccaatggatgaatcattgtgtcttgacaacaggagatcaagtggtcagaggtgttagttaagaccaactggttaaacagtttgcttgctgatacaaattgatcttaactaacacctctgacaacaggagatcaagtggtcagag

SEQ ID NO: 56638 - DNA, 333 bp, Setaria italica
  Peptide Sequence Number=SeqID_122612
actacagtgtgagtagtgtcatacagtataagaatgatggttctcatcacccacatagcccctgggctctcaggaaaatcaggtgatttaggttttagagccataatccggccctcccaccaatttcctccttcctgtccttcttcatccctccaccaaactttgcacttatctctgtgggtccagttccgttccatagaagcttcataccttgttctttccacaagaaaatctggaaagttcactagctcaggcaaggtgatcataaatgttttgccaaaccccagtggaagtgcaatcaatgaattcgatggatagtttacagcagctttc

SEQ ID NO: 56639 - DNA, 245 bp, Setaria italica
  Peptide Sequence Number=SeqID_122613
tggaccacaaccctcctgctgggtcactgtacttgcaacgctttgaggatcgcatcttgacttcaccccacctaattgagttgttactgtggacagcagaaccatcatgcagatcaccaatctgtcaataaattcaagccttgacaaagacaagaaggaaatagtaccgtagttacaaacaagttaagttacaaggactacaaaccgaattacaatagaatacaagactaagaagacaaagaaga

SEQ ID NO: 56640 - DNA, 270 bp, Setaria italica
  Peptide Sequence Number=SeqID_122614
tttttcttcaaagataggagcttcaacggaagatgatgaggattactcagagaaaaaactgagtgcattgcgagcagcacgtctttgaggtcgcaatcccctggatttaggggatcttttccttttgcttgaacgtccattcctagacttcctacatctatgtggcctcgacactgtagttatgtccggctcatccaaaatctttttcctaactcataacctggagttctgactattttgttggctttcttttagaaaatttaatgctaa

SEQ ID NO: 56641 - DNA, 448 bp, Setaria italica
  misc_feature (405)..(405): n is a, c, g, or t
  Peptide Sequence Number=SeqID_122615
ggttgacccttggctactttctgggatttgttgttatatatgctgtagctcaacaaccaccttatgatggcctagtttctcagagaacttctagtacaaggaagaatttcggagtcctgaattggttacctaatctgccatagtaatgcattgcttacaatggtggtaactggctctttactgaatgaaacactgtcctctgtcctagattgaggttggactggactttggccgatggtgtctttcttctttgtaactttgggtacaattgataaggcatatgtgttcacaactagattgaccagtttttaatgtgaagtccctagactgtattgttctaaataaattcagtttaatatgggattatgaatattcacaaaaccttggtactataaataaaacgtncagctgaatagagagcgagcatgtgtactaatgattgaaattc

SEQ ID NO: 56642 - DNA, 417 bp, Setaria italica
  Peptide Sequence Number=SeqID_122616
gtatgaacaaatttttaaaccaacgataaaaacaaataaacgttaagaaatcaactccatgccaagaaagatcgaaaatggaattgattgacagaaacattgctcgttcaaccgcgtcttaccagccaaggaaatcatacatattgcggtttccctcaagcatcgagttcagctcgtcttttgtcaaagcattcggatgagttcgaccatacttgctaaatatagcatcgaactttgatggatcaaacctgtgcaagattgagcaagtataaactagttagaaattctgtggctggaatggtacagtataaaatttgtagcctcctgtacagtatagacattgatggatcttgtggaaatcaacctctgcaaatggagagtactgaatgtgttatgcgtacgtacctcccttcagta

SEQ ID NO: 56643 - DNA, 264 bp, Setaria italica
  Peptide Sequence Number=SeqID_122617
agtgggataactcaggacgaggttgatcagtatagagcccacgactgatacagggagtccacaccctattgctcggagacctggaaagcaaggaagcacaaacataaaacatcacgaaaaataacgtctacaacatagaaaaaataaacatttgcaacataaaaaaatcaccatttgcaacatcaaaaaatatgttgaaaaaaatgtattagccatttgttgatgatgtgaaaaaaatcgccgcaatatctgtttcgtgttgca

SEQ ID NO: 56644 - DNA, 257 bp, Setaria italica
  Peptide Sequence Number=SeqID_122618
cccttcagtatcataggcttcagaatcgctcccgtgcttacccttgtggatgttctttatatggatggagaacaaaggtgacggtaaccatcccggctgagtgggataactcaggacgaggttgatcagtatagagcccacgactgatacagggagtccacaccctattgctcggaggcttggtgggcgtcgaaatcccgctcgattgagatccattctttgggtcgggggatggagttccagttcctggggtccag

SEQ ID NO: 56645 - DNA, 257 bp, Setaria italica
  Peptide Sequence Number=SeqID_122619
tcgggtccaccgcctcgagagcccgcgcgagatatggcttggggagctgctgctgcaggtcggggttgagcctccgctcccgggtgacgggcgcgtggggcgcctccgtctcctgggactggtcctccggcggcgacgagaacgacgacgacgacatgctcactcgcgggctcaacttgcaggacctgcggatcgaacgatcagacgaattaaacaatcggtttggaaagcgaactcggaaggatcgagcagtgcag

SEQ ID NO: 56646 - DNA, 356 bp, Setaria italica
  Peptide Sequence Number=SeqID_122620
agaagaataagtaattagaaggcaatgccattcctggttgagtaggcgctaacataacggctctgaagtgtgagagtattttgccctcaagatagtaaaggcagggcattctcattcttaatgacagaaataaaaaaggtgatatttgtcagatcatcaagggtccatactggaactggaatacagtgtacagggggcatctccggcgcctagttagctgtcgaggcggttttgttcatacaatttgtgaccattacagcggggcattgtttacttacccccaactgcttgtgcttctgagcttttcgacagaagctgtgacatttgctgacctagacaaaaaaaaaaaaaaaaaa

SEQ ID NO: 56647 - DNA, 212 bp, Setaria italica
  Peptide Sequence Number=SeqID_122621
catggagcttgagatcatatctgtgctcgattgtgactgaaatcttagataacatggtgagaagagatcaagagaatatgtgcagcataccccttctcaggcgcaacgccgaggaccatggccgccggggcggcgctcttctcggccaagtcagggtacatctttccgcatccactgccacagccgcagctcgagccacagttgcagcttcc

SEQ ID NO: 56648 - DNA, 324 bp, Setaria italica
  Peptide Sequence Number=SeqID_122622
tctaaactaaattctaaagtagtctacctattagtattactattgtttagtctaattttgtattaattgcttcactgttcaccacatctggtgaaatgtaagagaagtacagctcttgcagatctttgcataattcgagacacatattagaacaaaatcagatctgcatatccatggatactcacaattaagtactaccataggaacgagaagctctttgctgcggctacggggccagatttttctaccgattttcagatcttgacttcaaatgaattcctcgagcacaaaaaccctactggattttacccgtcgtggacgcgt

SEQ ID NO: 56649 - DNA, 468 bp, Setaria italica
  misc_feature (99)..(99): n is a, c, g, or t
  Peptide Sequence Number=SeqID_122623
accagtatgtgcacaatgcccttcttgcatgcgcagttgtatcatggtatggaggtggagaactgatgacgttgacgatccttgcgttgcaggcttcgngcggggcggccgggtgtcggccaggaacccgctgatgacgaggaacctggagaggaacggcaggatcacctgcatgacgtttccccgggactggctgcggagggacctgagcgtgatcggcttcggcctcatcgggtggatcggcccgtccagcgtccccgtcatcaacggcaacagcctcacgggcctcttcttctccagcatcggcgaggagctcgcccacttccccacgcccccgccagtcacctcccagttctggctgtggatggtgacatggcacctgggcctgttcatcgtgctcaccttcggccagatcggcttcaagggcaggaccgaggactacttcgagaagtgaagcggctgtagtct

SEQ ID NO: 56650 - DNA, 367 bp, Setaria italica
  Peptide Sequence Number=SeqID_122624
taacggaacttaacggaacctaacaaataacgggtaaggaaataacggacccgtaccaagacgtaccccgtcaatcaacggcaacagcctcacgggcctcttcttctccagcatcggcgaggagctcgcccacttccccacgcccccgccagtcacctcccagttctggctgtggatggtgacatggcacctgggcctgttcatcgtgctcaccttcggccagatcggcttcaagggcaggacccgaggactacttcgagaagtgaagcggctgagctccatctgctgaagcggcgtgcgtgccgcatcgaaccttgctttgtatagggctctgatctggctgaattcatgtgtggtgctgcttttg

SEQ ID NO: 56651 - DNA, 234 bp, Setaria italica
  Peptide Sequence Number=SeqID_122625
gttcctagttctaccttccctagtttcttggtcttgttggatggtgacatggcacctgggcctgttcatcgtgctcaccttcggccagatcggcttcaagggcaggaccgaggactacttcgagaagtgaagcggctgagctccatctgctgaagcggcgtgcgtgccgcatcgaaccttgctttgtatagggctctgatctggctgaattcatgtgtggtgctgcttttgtga

SEQ ID NO: 56652 - DNA, 509 bp, Setaria italica
  Peptide Sequence Number=SeqID_122626
ttaatattattaatcagtcatcaatttcttgctgttaaggtattttattttttcttctttggtgtcatgttatgaatatcttcttagtgttaattataattttgttactgtggactgtctttctagggcctgtttaggataaggagaaattgggatccaaatgcctcaggatataatgtgttaataacatatatacattgcttataacaaattacacacctttgcacctgcctcttgatctcatgctcatcttaggaggatttttttttaaatctcagacagcaacatgtaggtcttttctctctgaaaacctgttgtctttcaagatggaatgcttctgcagtacacatggcatgggtttgctctgttaattcgattgcaataacactttttttgtgcttgttaatcatgcaggtgcgtggtgcaatggagaagtatccaccataccagtctatttttccaggatttcatatggagaaagccagatgtttggattaaggtcctttcta

SEQ ID NO: 56653 - DNA, 380 bp, Setaria italica
  Peptide Sequence Number=SeqID_122627
tttgttaagttccgttacttagttaagttagttctttgttttaacttatttactaattaaactagttattgggactgagttgacaagagatgaccgcaggaagctgtactccaactttggtctattgtatccatatggtcatgaggaactggctgtctgtgaagatgttgaccaggtgcgtggtgcaatggagaagtatccaccataccagtctattttttccaggatttcatatggagaaagccagatgttggataaggccttctatgaggaggaagtgcgaaggctatgcttgtcctttgagcagcagttccactacggtgtcttcttcgcttacatcaaggctacgcgagcaggagataaggaacctgatgtggatc

SEQ ID NO: 56654 - DNA, 319 bp, Setaria italica
  Peptide Sequence Number=SeqID_122628
tgtttaactatttactaattaaactagttatttgggtacttgtagttgtacaagagatgaccgcaggaagctgtactccaactttggtctattgtatccatatggtcatgaggaactggctgtctgtgaagatgttgaccaggtgcgtggtgcaatggagaagtatccaccataccagtctattttttccaggatttcatatggagaaagccagatgttggataaggccttctatgaggaggaagtgcgaaggctatgcttgtcctttgagcagcagttccactacggtgtcttcttcgcttacatcaggctacgcgag

SEQ ID NO: 56655 - DNA, 270 bp, Setaria italica
  Peptide Sequence Number=SeqID_122629
ctcatggaccatatggatacaatagaccaaagttggagtacagcttcctgcggtcatctcttgtcatgaggaactggctgtctgtgaagatgttgaccaggtgcgtggtgcaatggagaagtatccaccataccagtcttatttttccaggatttcatatggagaaagccagatgttggataaggccttctatgaggaggaagtgcgaaggctatgcttgtcctttgagcagcagttccactacggtgtcttcttcgcttacatcaggct

SEQ ID NO: 56656 - DNA, 175 bp, Setaria italica
  Peptide Sequence Number=SeqID_122630
taggaagaaaagaccaagatgttggataaggccttctatgaggaggaagtgacgaaaggactaatagcttgtcctttgagcagcagttccactacggtgtcttcttcgcttacatcaggctacgcgagcaggagataaggaacctgatgtggatctctgaatgtgtcgctcagaa

SEQ ID NO: 56657 - DNA, 141 bp, Setaria italica
  misc_feature (135)..(135): n is a, c, g, or t
  Peptide Sequence Number=SeqID_122631
aatagaccaaagttggagtacagcttcctgcggtcatctgttgtccttattgtaactgggacattgcatgagagagatgttaatgaactgttggagaaatgccacccattgggcatgtttgacagcattgcactnagcacg

SEQ ID NO: 56658 - DNA, 309 bp, Setaria italica
  Peptide Sequence Number=SeqID_122632
cttctttgggttctatgagttctttgagttcaatggacattcctaacatccttattggagaagatggaacggaattgattatgaactgcaatctgactctggtagcccagacgtatctggtgctcctcccttgagcaacgtcgtgcttttaaaatagaacttcagaaaggaatttccttgtttaacagaaagccttcaaagggaattgatttcttgttaaagtaagaagatagggcattcgccagaagatgttgcttcttcttgagaaatactgctggtttaaatgcaacaatgattggagactattgg

SEQ ID NO: 56659 - DNA, 275 bp, Setaria italica
  Peptide Sequence Number=SeqID_122633
atgggcaggtcgagcggcggcgccatggtggcctcgagctcggacccgccgtgttcgtgtcgttgaacgccggcaggaacgggagcatcggctgcggaccggtgcggcctgggtggccggaggacctggatgaccggcctaccgggccgttgaaggtgttgccgcccatgccggcgccggctccggctccggcccctgcactggctgtggtggtggggcagccaggggcgttcttgtactggaagatggcggtggcggtggtgttgtcgaagggg

SEQ ID NO: 56660 - DNA, 232 bp, Setaria italica
  Peptide Sequence Number=SeqID_122634
cttgcttttactgaagtagattcatctgaaccccatcttcctttccatctcctcctaaagtgaggaagttacaaaggatgagacacagaagtgctgtgcaatgtactccgcatgtccatgaggatttccgtggttcagagccagaactcaagctacaaagtgcacctacttccccaatcattgatccacatctttctccatgtggtagcatgattgcttttgtaagggatga

SEQ ID NO: 56661 - DNA, 262 bp, Setaria italica
  Peptide Sequence Number=SeqID_122635
ggcggcggggctccaggaggggcaatctctccgccgaggagctgctgaggcgggagcgtgcccgcgagcatggcctcggggtcacgtactacgagtggagcttcggctcggacagtagccccgacggtatcgtcgtgcccctcccgtccggggtttacttccaggatttccgtggttcagagccagaactcaagctacaaagtgcacctacttcccaatcattgatccacatctttctccatgtggtagcatgattgctttt

SEQ ID NO: 56662 - DNA, 349 bp, Setaria italica
  misc_feature (216)..(216): n is a, c, g, or t
  Peptide Sequence Number=SeqID_122636
aacaatctaaacaagatcgtcaatacaatatagccaaatatctatcagatcgacaacctttactgcctatgccacaaacaatatcgtccagcatccattcatgttagcatgaacaacatctaccaaaaacagcatcaattcatgtttgcataacctgaagaggcaatcctagctccccagacggtcatcgtcttgtccatgagattcaagcccgtnatctgcaagccgttctgctcctccccgtcatctcccacatacttaacctgcagaggaacgagataacatgtgatcggcatatagcagttatatacaagcatacagttgctatattaccttttcattggcatat

SEQ ID NO: 56663 - DNA, 412 bp, Setaria italica
  Peptide Sequence Number=SeqID_122637
gagttattaaattgttgcagacagtgatctgcagaaatgcaattgtacgagtgggaggcagcccatctgcagttgactgtttgcagcaatttgtagcagttttttgcttatgttcagtcactaggacgtgttcagatataacagcagatgctacagaaaggaaacctgagatgcacaggaagctgtcagcaaagaaaaatgcaccaaccttattccatttcctcgccctctcgtaccaatctataatactgcaccaataaacaggtaaccagaaatgaggaccaaataagaatttgctctaacgttctgaatttgagttatttggaattgatctgaacacgaacttattaagcgtgcaccggctcgtgagatcgaacatgtaaaggatcgcaacggcatccttgcacgcgat

SEQ ID NO: 56664 - DNA, 307 bp, Setaria italica
  Peptide Sequence Number=SeqID_122638
catgcgaggaatcagtagccttgatggacttttccatgtttcgaccgacggggcgaggtcgtcgctcgctcgctggctcatggcggaggaggtcagcaggagcagagcaagaggaagacacgatccgaccccaagggtcgtgtgcgctgcctaattatctgttaggaggaagaagtggaggccgtcagaagtctatgatgggctcgccgatggtgaggttgcgctccaccgtccacggcaggttgaagagcttcgccgtgatgaacttgaagatcttgttcacgttgtattgtttgttgtcgttcgt

SEQ ID NO: 56665 - DNA, 238 bp, Setaria italica
  Peptide Sequence Number=SeqID_122639
ggcttaagtagtgttcaatctgcttgcaatctggaccatccaagtagcatcgccctatgctaagtatccaactttgaagtgatgattccaccagcacatgcaacaggatcagattaacaaggaagaagcaaactgatgacctgcaatgacaaaaaataatataacaatagaggttgcaatttttttccagaacagccagcggtagaaatatgatcctagcgtcacatagatatgttag

SEQ ID NO: 56666 - DNA, 235 bp, Setaria italica
  Peptide Sequence Number=SeqID_122640
tagtcactgcagaaaggaagatcacacagaattgcatgatgcacaacactctgtccatcagcttcccatcattccctgctcgaaatcctctaactctcatcattaaactaccatgaggtcaagcgttcagatttctcttgagtaatgtcaatgttagaggcccatgcatcgcaatgatttcaactcccagcttgtggcagagaattaaaacaaaggaacctaggcggaggaaggg

SEQ ID NO: 56667 - DNA, 225 bp, Setaria italica
  Peptide Sequence Number=SeqID_122641
ttgttcagtcacagtcatagtcatagcaatacatcatagctatacactcctagtaggtggctagtaggcaaaaagtctagtagaaaacaaactattgcctgccaagaatccaagatgctgctactgtgaccgataatggctgagagagtgatgggaattgcagggcagatcctgctcgacgggcatgatctcaagagcctgaagctccggtggctccgccagcag

SEQ ID NO: 56668 - DNA, 254 bp, Setaria italica
  Peptide Sequence Number=SeqID_122642
cagcgttcttgactgatttcattgctccgatgatggtgatgatgcagacgggcggacccggctgggaggtgccgctggggaggagggactcgctgacggcgagcctgagcggctccaacaacctcatcccggctcccaacgactcgctcccgaccatcatcggcaagttcgccaaccaaggcctcgacgtcgtcgacctcgtcgccctctccggtggccacaccatcggcgactcccggtgcgtgagcttccgg

SEQ ID NO: 56669 - DNA, 394 bp, Setaria italica
  Peptide Sequence Number=SeqID_122643
aacagaacttgtacatcatttgtcaagtactgtactagatatgggatactatcatttattgattctagatgatatatccccacaatggttgtacatttaactgatagtgttttattgagtcaagaaatccatctagtcacttatgttaccttttctttttccaatatttaataaatctgttattgatcttacgttgaatttttttttacaggcgccaaaggcagtgttttggttgatgtccttatgcaagtacatggacgtctcaggggatgtagtcgagtcgtgcttgcccgcttctgctcttgctatcctccagtcatgaatcttctgttgctgtacacttgaacatagttaagcaaagcacagagatcaggaataattaagactacgacaa

SEQ ID NO: 56670 - DNA, 330 bp, Setaria italica
  Peptide Sequence Number=SeqID_122644
gttaggtgggggatcgtcggacctggaactcgaaggttgatgctaaacgccagggggatctaaccaagatggatgatcttctgggccctcctatgtctattcccctgatgggttggttatcatataagcaaatggtgaagatgttgcactcatcatgggggtcactagttgagaaattggctacaattggacaactgcagttggttcggactcttatatccttcaaactgagatcagcatgcaaggtaaggaaatttaaggccaaaccttctattttaccacagcctaaaacatctcccaaggccatctgatggcactcatgggagattc

SEQ ID NO: 56671 - DNA, 234 bp, Setaria italica
  Peptide Sequence Number=SeqID_122645
atcagcatgcaagatcaaagcaaacactataacctcggctgttgaggtcttggtgtcttcactttatatgcataaaagagtgtttgagagaggagatgaggatgaaactgtgagattctttctgcaaaatataaaagagaagcagaactttttgtgttgtcaagatatgtgcttgatgttcatctaggcaatttgacaagcccattaaagaggtccacggctgatttctctgcc

SEQ ID NO: 56672 - DNA, 248 bp, Setaria italica
  Peptide Sequence Number=SeqID_122646
cagcttgatcagattgtgaatcgttgaagcctgctttgtatgcggccaaattggtttcgccaatgatggacacgacaaggtttttagttatttcatcaactactgtagctcttgatttcgtgtaggttggctggttataataaccttcctgaaagttgattatttatatgaatactattaatttggacaaggattgtcacgaaactataataatgtaagatgaagtccagtatatatgtttggagaac

SEQ ID NO: 56673 - DNA, 422 bp, Setaria italica
  Peptide Sequence Number=SeqID_122647
cttcaagtcttgaatgatcctgagagaaagtcagactctggagccctgcaacgcatataacccctgatgaggtttggttgcgtgcgaagttctaccctgttctgtagacataatgccatagttcctgctagtgaagttagtattggaacagaaggaagagataacagggacttcttgcatcttccaaccagcttcttccttaaaaaaactagaagaagccggcaaggagataatggtgttctactgctctttgcagagcaccaggaagccaggataattagtgtgggaaccagttggctagagcatagaaggaaataagtatgcaaggatatgcaagatgcatgaaatgcaggtaccctacaaatatttgacatctgattggggactaggatgcatgctggagatgggactgctgctttggc

SEQ ID NO: 56674 - DNA, 351 bp, Setaria italica
  Peptide Sequence Number=SeqID_122648
aatgcaggggcactatgtgaacctaagctgtgtggagatgcagcagatatggtatgctggatatgcaacaaggagaatgcatagtgaagttagtattggaacagaaggaagagataacagggacttcttgcatcttccaaccagcttcttccttaaaaaaactagaagaagccggcaaggagataatggtgttctactgctctttgcagagcaccaggaagccaggataattagtgtgggaaccagttggctagagcaaggagataaatggtgttctactgctcttgcagagcaccgaggaagccaggataattagtgtgggaaccagttggctagagcatagaaggaaat

SEQ ID NO: 56675 - DNA, 369 bp, Setaria italica
  Peptide Sequence Number=SeqID_122649
gccactgtaagttcagaacatgtactataggaatagactaaatagaatagacaaatagactaaaattctacacctaacaaaccaaggaagcatataggtgaatactatcaactgccatccaccccatccttaacctagaatccaccttcacaacaaccaacatggcagtttcacttttaactaactttctgagatccttcacctaggaactacacaaccatgatcctgaccatatcttacaaccaccaggtatttatgaccattaccctatacactactatgcaggaagaaaagctgtcagttgaagataacctatgtacacaggaaccacccttccatcctcctagtattcaacgatctgctatatcc

SEQ ID NO: 56676 - DNA, 285 bp, Setaria italica
  Peptide Sequence Number=SeqID_122650
agataactaatagtctaggtccagcatataatagcttcactgctagtgctgaaactacaaggctccaaaggcatgtaacactagcaggaactatggcattatgtctacagaacagggtagaacttcgcacgcaaccaaacctcatcaggggttatatgcgttgcagggctccagagtctgactttctctcaggatcattcaagacttgaagaaaatcagaacccattaaagttggttcctattgtaacttgtagttgggtaattgtaattgtagtaattgtcgta

SEQ ID NO: 56677 - DNA, 382 bp, Setaria italica
  Peptide Sequence Number=SeqID_122651
tgccactaaccttgctgagatcttgaagacacttgtctgtttcagcaggatgaacgttatctgctccacctcccatgccaccaaaaactaaagaaccattgacaaaaaccctgaagttgttctgaggagttgagaaaaatgacttgatggcaatgcatatcctttcttttgacccagaaaatagatcaagaggattgtattcactaggcgtcgatatctgaaatgtgtgcaagaatgtgttgggtatcaacctgatttccaaaaaccaaaagagataatatagtattacaagagtgccataaaataaacacgaaaagcatgtaggtttttgtcatataaattgtatcaaacaaacgcaatgtttcttttcaatgagcaagag

SEQ ID NO: 56678 - DNA, 254 bp, Setaria italica
  Peptide Sequence Number=SeqID_122652
cttctcagggtcagtttggaactctgcctcctttcttatttgagctagcagtaaccctgcatctttcaaccctcatatatctgttaccaattttgaatccatcaagctcaatagacttcactgcatcttcgtctgactcgaagaccacgccgccggggtcgggggcgtcgtcgcggcgcccggagacgtcggcggcgagcgccaccgacgcgtagacggcgaggtggaggtatatggtggcgtgctcgaggctg

SEQ ID NO: 56679 - DNA, 229 bp, Setaria italica
  misc_feature (10)..(10): n is a, c, g, or t
  misc_feature (61)..(61): n is a, c, g, or t
  Peptide Sequence Number=SeqID_122653
cgtcgtccancttcacctgcttgagaattctctcgtggaccaccgccgccgcttcgtcatntccctgcagctgcatggattctgcgtcatctttgtttaccagcttcctatgccctcctgccatggaggacagcaagagcgaagcgaagacgacggcaacaagatagctggacttcctgggctccatggcgctcatggagcatgcaaccagctaacctgtcctgcgttt

SEQ ID NO: 56680 - DNA, 200 bp, Setaria italica
  Peptide Sequence Number=SeqID_122654
ttgagctggctcctcttcttggatgagcttcactctttggatgctaccaccagcagccccagtgcagcgatcagcacgtaccgatagcccgccccatgatgtgctgttgctgaatccaaagctgcccatgtgcatatagcattcggtcatcatgaagattgttgtcaccttttgtgaggatatcaaatcctgccgtatca

SEQ ID NO: 56681 - DNA, 505 bp, Setaria italica
  Peptide Sequence Number=SeqID_122655
ccctgctcagcaacacatttaggaaatcataaaatgcatgcctatctacaaattgacttattttttacatcataggtaccatcatgaccatatcttcacctatcctattcctgacacagtcagctttagaataccaggataataggctccagcagagaaaagttcgcccaacatatatttgcaaatattaaaagttgagtttcccgaccggctaggtatgtcaatccgtattggagatgaaggcggagagatccctgaaacttttggttcactgctgtcatctgaacctccaaattcagtaatgtattcaacccttggagccttcggcttgcttcgataactgctttcagcatgtatgccacgtccatgacgtctagaataggatggtgaacgagatcttgaccgtgaccttgatcttctgccctcgaatatgcttcaataatagaatagggacttactacctttagttaccctaataaaggaatacaacgaataaagaataaca

SEQ ID NO: 56682 - DNA, 411 bp, Setaria italica
  Peptide Sequence Number=SeqID_122656
tccaaattcagtaatgtattccaacccttggagccttcggcttgcttcgataactgctttcagcatgtatgccacgtccatgacgtctagaataggatggtgaacgagatcttgaccgtgaccttgatctgtcaacacaaaatatttgtgcagactaaagaaagcgaatacttttgtcaaaacaatactacaatgaacatggaatttaccttctgcccctcgaatatgcttcatatgatgggcttctcctttgttccctataaggatcacgataagatacccttcccacagaacgtgctgcctcccgctctttttccctctcaatttgagaagcttttcttctttctctacggctcaattttttaatggaaggatcgcctttaataatttctttctgccgcttctcttcct

SEQ ID NO: 56683 - DNA, 249 bp, Setaria italica
  Peptide Sequence Number=SeqID_122657
ctgtagctaactaatagctcttccactgggcgccctgaggctgcttctcctctgacggagcaggaggtgggggagcaatggcggctgaggatgggagagaggagaagaggggcgcggaagcggcggtcgcgaggaaggcgaagaagcagggagggttcaggactatgcccttcatcctagatgcacctgccgctcgtccacgcctccaacatcatcaccaactacaacggcacggcgaacctcaccccg

SEQ ID NO: 56684 - DNA, 384 bp, Setaria italica
  misc_feature (367)..(367): n is a, c, g, or t
  Peptide Sequence Number=SeqID_122658
ttctttcttttgttagttaagttcttatttcttactattgaagtacacaggtctgtccaaattcttagggacaaacaggagttagctgaagctcagaaggaattggacagacctgtgtacttcatgtagatgcttctcaagagacttcagcctatgatcagtcacatcacgaagcacatcgcttcgaagttcacctatggacctctcaagcttatagcaatagatctccaattgtgaaagccgactagtgattccctcaagagatcgtagcaaattatcagcatactttttcatgcatttctcaacagcaagaaagtacatcctccttgctataactttcttgttcataagctttcacaaacggtcncccaatctgctttcatg

SEQ ID NO: 56685 - DNA, 387 bp, Setaria italica
  misc_feature (10)..(10): n is a, c, g, or t
  Peptide Sequence Number=SeqID_122659
tttgttggtntactaggttaggggtctaggggtcttgtatttgtttgtcgtctaggttagattccttgtactgttggactgcttcagaagctctaggtgcaagtgatgtctggttcacctgatgtggcaaaacaagggccaactgctggcctgatgtatcaggcttttcttcaagcttcttgggctcaggaatagatggtgttggtgcatcttccttctttttagatgtatcttgtgtaagttgaaatttggccaattccttctgagcttcagctaactcctgtttgtccctaagaatttggacagacctgtgtacttcatgtagatgcttctcaagagacttcagcctatgatcagtcacatcacgaagcacatcgcttcgaagtt

SEQ ID NO: 56686 - DNA, 292 bp, Setaria italica
  misc_feature (2)..(2): n is a, c, g, or t
  Peptide Sequence Number=SeqID_122660
anagaaagactactaaggtagacaaaggaatactaacctgcgcaacatagcggtcctgctgtggcacaggaggggcaggggctgattgttgcgcaggtagatccttgtactgttggactgcttcagaagctctaggtgcaagttgatgtctggttcacctgatgtggcaaaacaagggccaactgctggcctgatgtatcaggcttttcttcaagcttcttgggctcaggaatagatggtgttggtgcatcttccttctttttagatgtatcttgtgtaagttgaaatttgg

SEQ ID NO: 56687 - DNA, 228 bp, Setaria italica
  Peptide Sequence Number=SeqID_122661
tttctccatagggatggccacgcatcatatgcgaccctggatggctcatgccaccaccacctgggggcatctgtggtgtctggactgctggagggccgctgggcaggtagccgtaacctgcaccgtagccttgcggattgctctgtggtgcgtattgtgcaggtccacctccaagcaaagggtcatatgccggtggacctgcacaatacgcaccacagagcaatccgc

SEQ ID NO: 56688 - DNA, 267 bp, Setaria italica
  Peptide Sequence Number=SeqID_122662
ggaatattcttctgccagatttggcatgtaggaagagcttctgatatggagaaagagcccatctcaagcacaaggactcagaagaggtatagactccatgattgcttgtgaaactggaaggttcaggttttcgcacagaattgtgctggcacctttaacaagaaacagatcatatggcaatcttccacaatcacatgccatgctgtactactcacagagggctacagagggaggtcttctgattgcggaagccacaggggtgtcaat

SEQ ID NO: 56689 - DNA, 228 bp, Setaria italica
  Peptide Sequence Number=SeqID_122663
gggtggaatattcttctgccagatttggcatgtaggaagagcttctgatatggagaaagagcccatctcaagcacaggtaagccagtagaaatgaatgaagatgaccacatggacttccccatcccaagatgcttagctgtagaagagatccccaatgtagtcaatcgcttcagagttgctgcaagaaatgctatggatgctgtatcataatggacaaaaatactggt

SEQ ID NO: 56690 - DNA, 244 bp, Setaria italica
  Peptide Sequence Number=SeqID_122664
cccttctaggcctagctaaacgaatgcctatttagaacaatgaaatctttgaacaggtttaattttctaatgaactgggaacattttctcatttcgaataatatatgcacgtgcacaccatgcaggtcctcgagatgggcatcatcgtgcactcggtggtgatcggcctgggcatgggcgcgtcccagagcgtgtgcacgatccgccctctggtggccgccatgtgcttccaccagctgttcga

SEQ ID NO: 56691 - DNA, 210 bp, Setaria italica
  Peptide Sequence Number=SeqID_122665
taccgggagaacagccccacggcgctcatcgtggtgggcatcctcaacgccgcctccgcggggctgctccactacatggcgctcgtggagctcctggcggcggacttcatggggcccaagctccaagggcaagcgtcaaggactaccaagactacctactaccttaacgaaccgaaccgtaacctaacctaacggaacgaaaccggtaaa

SEQ ID NO: 56692 - DNA, 188 bp, Setaria italica
  Peptide Sequence Number=SeqID_122666
cctatcccctgtgtgccttgcctatccccggttgcgtgtctcaggcgcagggcatgcggatcaactactacccgccgtgcccgcaggcgcacgacaaggtgctgggcctgtcgccgcactccgacgccgtcgggctcacgctgctgctgcaggcgagccccgtggccggcctgcagatcaggcgggag

SEQ ID NO: 56693 - DNA, 256 bp, Setaria italica
  Peptide Sequence Number=SeqID_122667
aatggatcacctgcagtaattagtacgatataatactgatgaaagacgactttggtcattctgacactacgtaccaagggaagcagttgagcagtcaaacgttcactaaagaggacctggtaaacagttttggcaaccctttttaactgtcacttgcagctgcaacaaggcatcttccacacacatacctcggatcagctttgctactagattcaccttctttgggctctaaaacagccaaaaagcttaagaaaat

SEQ ID NO: 56694 - DNA, 246 bp, Setaria italica
  Peptide Sequence Number=SeqID_122668
gtatgaatacaagaacatcatgaagcactagagttagagggaaatcacgcgcgcaccaaaccggacggagcattttcgctgctgctacagatggctgtgagtacaccgccatcgcgcctccccaccgtcttcgacgccgcgctaagccgacgaagaacggcgcgagcaccagccacccgccagcctgccatcgcccgatgatcgccacgggcctccgcgccgccgccgccgccgccgccgcctatc

SEQ ID NO: 56695 - DNA, 327 bp, Setaria italica
  misc_feature (76)..(76): n is a, c, g, or t
  Peptide Sequence Number=SeqID_122669
ctgaacccaagcaatttaaggacaaagaaaatgtgattgcattccttgacagcatactcaatcaaggtggagaacncatggttgtgctgcaagatgaataacggtactgccccaaatcccaaaggctacaaatatcttcttctatgtgacttgcccatatttcagaattgccatcacgatgagatcacagacatctacagcataaatttctttaaaccttgaggtttaataactgagcataatgaacgtaatggtaaatggaagcttcaattcttgttgaaattattactaccttcgttcttatttgttttttcttttgttctttta

SEQ ID NO: 56696 - DNA, 535 bp, Setaria italica
  Peptide Sequence Number=SeqID_122670
ccagcgcggcgtcgtgggtccagagcaacgtgcggccctactacccggccgtgaacatcaagtacatcgccgtcgggaacgaggtcgcgggcagcgccacgcagagcatcctcccggcgatgcgcaacctgaacgccgccctcaccgccacggggctcgggagcatcaaggtgtccacgtcggtgcagtccaacgtcatcgccaactccttcccgccgtccagcggcgtgttcgcgcagggctacatggtggagatcgcccggtacctggcgagcaccggcgcgccgctgctggccaacgtgtacccctacttcgcctaccggggcaacccgcgggacatcagcctcggctacgcgacgttccagccgggcacgacggtgagggacggcggcaacgggctgacctacacgaacctgttcgacgccatggtggacgccaccgtcgcggcgctggagaaggctggggcgcccaacgttgaggtattcgttctattcttccgttagttagttcgggtttggttccgtttcggttcctt

SEQ ID NO: 56697 - DNA, 441 bp, Setaria italica
  Peptide Sequence Number=SeqID_122671
ccgacaggcaagccctcgacgccctgcgcggctccggcatggccctcatcctcgacacaggcaacgacgtcctcggcaagctcgcatccagcccctccagcgcggcgtcgtgggtccagagcaacgtgcggccctactacccggccgtgaacatcaagtacatcgccgtcgggaacgaggtcgcgggcagcgccacgcagagcatcctcccggcgatgcgcaacctgaacgccgccctcaccgccacggggctcgggagcatcaaggtgtccacgtcggtgcagtccaacgtcatcgccaactccttcccgccgtccagcggcgtgttcgcgcagggctacatggtggagaatcgcccggtaacctaggacgaagacaaccggacgacgaccgactagactaggaccaaacgtagtaacccctaacttacgacctaaccga

SEQ ID NO: 56698 - DNA, 400 bp, Setaria italica
  misc_feature (28)..(28): n is a, c, g, or t
  Peptide Sequence Number=SeqID_122672
cgtagaaagatttgggagtgcccagcanagggtttcaacaatggcgaggcagcaagttgcttccatgcttgcagttgctctgatccttggagcatttgcttccattcctacaaccgtgcaatccatcggcgtgtgctacggcgtcctgggcaacaacctcccgtcacggagcgacgtggtgcagctctacaggtccaggggcatcaacgggatgcgcatctacttccccgacaggcaagccctcgacgccctgcgcggctccggcatggccctcatcctcgacacaggcaacgacgtcctcggcaagctcgcatccagcccctccagcgcggcgttcgttgggttcctagtagtctaacgttgtcggtcccttacttacccggtccgttgtaacattcta

SEQ ID NO: 56699 - DNA, 351 bp, Setaria italica
  Peptide Sequence Number=SeqID_122673
cggctccggcatggccctcatcctcgacacaggcaacgacgtcctcggcaagctcgcatccagcccctccagcgcggcgtcgtgggtccagagcaacgtgcggccctactacccggccgtgaacatcaagtacatcgccgtcgggaacgaggtcgcgggcagcgccacgcagagcatcctcccggcgatgcgcaacctgaacgccgccctcaccgccacggggctcgggagcatcaaggtgtccacgtcggtgcagtccaacgtcatcgccaactcctttcccgtccgttcctagtcggcgttgtttcgtcgtctagggtcttactattggttggtagtattcgttccctt

SEQ ID NO: 56700 - DNA, 265 bp, Setaria italica
  Peptide Sequence Number=SeqID_122674
tcgttagtaaagtattttgggtagttgtccctagtctagtagggttttctaactaattggtcgtaggtctagtctaagtttgtctttccattgcttgcagttgctctgatccttggagcatttgcttccattcctacaaccgtgcaatccatcggcgtgtgctacggcgtcctgggcaacaacctcccgtcacggagcgacgtggtgcagctctacaggtccaggggcatcaacgggatgcgcatctacttccccgacaggcaag

SEQ ID NO: 56701 - DNA, 363 bp, Setaria italica
  Peptide Sequence Number=SeqID_122675
acgcgacgtccagccgggcacgacggtgagggacggcggcaacgggctgacctacacgaacctgttcgacgccatggtggacgccaccgtcgcggcgctggagaaggctggggcgcccaacgtgaggatcgtcatctccgagagcgggtggccgtcggccggcgggttcggggcgagcgtggagaacgcgcggaactacaaccaggggctgatcgaccacgtcgggcgcggcacgcccaagaggtccggcgcgatggagaccttcatcttcgccatgttcaacgagaaccagaagagcggggattcccacggtagtaggtaactttcgggtcttctttcttacccctaactaagtctagtcct

SEQ ID NO: 56702 - DNA, 274 bp, Setaria italica
  Peptide Sequence Number=SeqID_122676
taaacggaaacaaaagaaacgaaaccaaaacgaacaaagaaagaacaatacctacccggacgaatagacgacaaacctgaaacgccgccctcaccgccacggggctcgggagcatcaaggtgtccacgtcggtgcagtccaacgtcatcgccaactccttcccgccgtccagcggcgtgttcgcgcagggctacatggtggagatcgcccggtacctggcgagcaccggcgcgccgctgctggccaacgtgtacccctacttcgcctaccgggg

SEQ ID NO: 56703 - DNA, 520 bp, Setaria italica
  Peptide Sequence Number=SeqID_122677
accggcgcgccgctgctggccaacgtgtacccctacttcgcctaccggggcaacccgcgggacatcagcctcggctacgcgacgttccagccgggcacgacggtgagggacggcggcaacgggctgacctacacgaacctgttcgacgccatggtggacgccaccgtcgcggcgctggagaaggctggggcgcccaacgtgaggatcgtcatctccgagagcgggtggccgtcggccggcgggttcggggcgagcgtggagaacgcgcggaactacaaccaggggctgatcgaccacgtcgggcgcggcacgcccaagaggtccggcgcgatggagaccttcatcttcgccattttcaacgagaaccagaagagcggggatcccacggagaggaacttcgggctcttctaccccaacaagcagcccgtgtactcgatccggttccagtaagaagtagcatgtcggatcgatcgataccaataaacccatgctatgctatgctatgctatgcatgaagatg

SEQ ID NO: 56704 - DNA, 519 bp, Setaria italica
  Peptide Sequence Number=SeqID_122678
cggcgcgccgctgctggccaacgtgtacccctacttcgcctaccggggcaacccgcgggacatcagcctcggctacgcgacgttccagccgggcacgacggtgagggacggcggcaacgggctgacctacacgaacctgttcgacgccatggtggacgccaccgtcgcggcgctggagaaggctggggcgcccaacgtgaggatcgtcatctccgagagcgggtggccgtcggccggcgggttcggggcgagcgtggagaacgcgcggaactacaaccaggggctgatcgaccacgtcgggcgcggcacgcccaagaggtccggcgcgatggagaccttcatcttcgccatgttcaacgagaaccagaagagcggggatcccacggagaggaacttcggggctcttctaccccaacaagcagcccgtgtactcgatccggttccagtaagaagtagcatgtcggatcgatcgataccaataaacccatgctatgctatgctatgctatgcatgaagatg

SEQ ID NO: 56705 - DNA, 484 bp, Setaria italica
  Peptide Sequence Number=SeqID_122679
cagccgggcacgacggtgagggacggcggcaacgggctgacctacacgaacctgttcgacgccatggtggacgccaccgtcgcggcgctggagaaggctggggcgcccaacgtgaggatcgtcatctccgagagcgggtggccgtcggccggcgggttcggggcgagcgtggagaacgcgcggaactacaaccaggggctgatcgaccacgtcgggcgcggcacgcccaagaggtccggcgcgatggagaccttcatcttcgccatgttcaacgagaaccagaagagcggggatcccacggagaggaacttcgggctcttctaccccaacaagcagcccgtgtactcgatccggttccagtaagaagtagcatgtcggatcgatcgataccaataaacccatgctatgctatgctatgctatgcatgaagatgatgatgggagatgcatgcatcttctaaaataatgatatgattaagcagtgg

SEQ ID NO: 56706 - DNA, 526 bp, Setaria italica
  Peptide Sequence Number=SeqID_122680
tgttaaccccttaactttcgtccttaccggggtctaacccgtcgggtactattcagcctcggctacgcgacgttccagccgggcacgacggtgagggacggcggcaacgggctgacctacacgaacctgttcgacgccatggtggacgccaccgtcgcggcgctggagaaggctggggcgcccaacgtgaggatcgtcatctccgagagcgggtggccgtcggccggcgggttcggggcgagcgtggagaacgcgcggaactacaaccaggggctgatcgaccacgtcgggcgcggcacgcccaagaggtccggcgcgatggagaccttcatcttcgccatgttcaacgagaaccagaagagcggggatcccacggagaggaacttcgggctcttctaccccaacaagcagcccgtgtactcgatccggttccagtaagaagtagcatgtcggatcgatcgataccaataaacccatgctatgctatgctatgctatgcatgaagatgatgatgggagagtgcatg

SEQ ID NO: 56707 - DNA, 488 bp, Setaria italica
  Peptide Sequence Number=SeqID_122681
agcaaacgggctgacctacacgaacctgttcgacgccatggtggacgccaccgtcgcggcgctggagaaggctggggcgcccaacgtgaggatcgtcatctccgagagcgggtggccgtcggccggcgggttcggggcgagcgtggagaacgcgcggaactacaaccaggggctgatcgaccacgtcgggcgcggcacgcccaagaggtccggcgcgatggagaccttcatcttcgccatgttcaacgagaaccagaagagcggggatcccacggagaggaacttcgggctcttctaccccaacaagcagcccgtgtactcgatccggttccagtaagaagtagcatgtcggatcgatcgataccaataaacccatgctatgctatgctatgctatgcatgaagatgatgatgggagatgcatgcatcttctaaataatgatatgattaagcagtggtaataaagtgcaacgtgcacgtatgacgtat

SEQ ID NO: 56708 - DNA, 463 bp, Setaria italica
  Peptide Sequence Number=SeqID_122682
tgttcgacgccatggtggacgccaccgtcgcggcgctggagaaggctggggcgcccaacgtgaggatcgtcatctccgagagcgggtggccgtcggccggcgggttcggggcgagcgtggagaacgcgcggaactacaaccaggggctgatcgaccacgtcgggcgcggcacgcccaagaggtccggcgcgatggagaccttcatcttcgccatgttcaacgagaaccagaagagcggggatcccacggagaggaacttcgggctcttctaccccaacaagcagcccgtgtactcgatccggttccagtaagaagtagcatgtcggatcgatcgataccaataaacccatgctatgctatgctatgctatgcatgaagatgatgatgggagatgcatgcatcttctaaataatgatatgattaagcagtggtaataaaagtgcaacgtgcacgtatgacgtat

SEQ ID NO: 56709 - DNA, 433 bp, Setaria italica
  Peptide Sequence Number=SeqID_122683
acacgaacctgttcgacgccatggtggacgccaccgtcgcggcgctggagaaggctggggcgcccaacgtgaggatcgtcatctccgagagcgggtggccgtcggccggcgggttcggggcgagcgtggagaacgcgcggaactacaaccaggggctgatcgaccacgtcgggcgcggcacgcccaagaggtccggcgcgatggagaccttcatcttcgccatgttcaacgagaaccagaagagcggggatcccacggagaggaacttcgggctcttctaccccaacaagcagcccgtgtactcgatccggttccagtaagaagtagcatgtcggatcgatcgataccaataaacccatgctatgctatgctatgctatgcatgaagatgatgatggagatgcatgcatcttctaaataatgatatgattaag

SEQ ID NO: 56710 - DNA, 502 bp, Setaria italica
  Peptide Sequence Number=SeqID_122684
gggcaacccgcgggacatcagcctcggctacgcgacgttccagccgggcacgacggtgagggacggcggcaacgggctgacctacacgaacctgttcgacgccatggtggacgccaccgtcgcggcgctggagaaggttggggcgcccaacgtgaggatcgtcatctccgagagcgggtggccgtcggccggcgggttcggggcgagcgtggagaacgcgcggaactacaaccaggggctgatcgaccacgtcgggcgcggcacgcccaagaggtccggcgcgatggagaccttcatcttcgccatgttcaacgagaaccagaagagcggggatcccacggagaggaacttcgggctcttctaccccaacaagcagcccgtgtactcgatccggttccagtaagaagtagcatgtcggatcgatcgataccaataaacccatgctatgctatgctatgctatgcatgaagatgatgatgggagatgcatgcatcttctaaat

SEQ ID NO: 56711 - DNA, 519 bp, Setaria italica
  misc_feature (418)..(418): n is a, c, g, or t
  Peptide Sequence Number=SeqID_122685
aacgggactagaacctaacaacgaacctgttcgacgccatggtggacgccaccgtcgcggcgctggagaaggctggggcgcccaacgtgaggatcgtcatctccgagagcgggtggccgtcggccggcgggttcggggcgagcgtggagaacgcgcggaactacaaccaggggctgatcgaccacgtcgggcgcggcacgcccaagaggtccggcgcgatggagaccttcatcttcgccatgttcaacgagaaccagaagagcggggatcccacggagaggaacttcgggctcttctaccccaacaagcagcccgtgtactcgatccggttccagtaagaagtagcatgtcggatcgatcgataccaataaacccatgctatgctatgctatgctatgcatgaagatgatgatggganatgcatgcatcttctaaataatgatatgattaagcagtggtaataaaagtgacaacgtgacacgtatgacgtatgaaataaaggaaaaaaataaaaaaaaa

SEQ ID NO: 56712 - DNA, 490 bp, Setaria italica
  Peptide Sequence Number=SeqID_122686
ctgacctacacgaacctgttcgacgccatggtggacgccaccgtcgcggcgctggagaaggctggggcgcccaacgtgaggatcgtcatctccgagagcgggtggccgtcggccggcgggttcggggcgagcgtggagaacgcgcggaactacaaccaggggctgatcgaccacgtcgggcgcggcacgcccaagaggtccggcgcgatggagaccttcatcttcgccatgttcaacgagaaccagaagagcggggatcccacggagaggaacttcgggctcttctaccccaacaagcagcccgtgtactcgatccggttccagtaagaagtagcatgtcggatcgatcgataccaataaacccatgctatgctatgctatgctatgcatgaagatgatgatgggagatgcatgcatcttctaaataatgatatgattaagcagtggtaataaaagtgcaacgtgcacgtatgacgtatgaataaaggac

SEQ ID NO: 56713 - DNA, 486 bp, Setaria italica
  Peptide Sequence Number=SeqID_122687
aacgaccaataggtaggaacgccaccgtcgcggcgctggagaaggctggggcgcccaacgtgaggatcgtcatctccgagagcgggtggccgtcggccggcgggttcggggcgagcgtggagaacgcgcggaactacaaccaggggctgatcgaccacgtcgggcgcggcacgcccaagaggtccggcgcgatggagaccttcatcttcgccatgttcaacgagaaccagaagagcggggatcccacggagaggaacttcgggctcttctaccccaacaagcagcccgtgtactcgatccggttccagtaagaagtagcatgtcggatcgatcgataccaataaacccatagactaatgctaatgctatgctatgcatgaagatgatgaatgggagatgcatgcatcttctaaaataatgatatgattaagcagtggtaataaaaagtgcaaacgtgcacgtatgacgtatgaataaaggacaaga

SEQ ID NO: 56714 - DNA, 464 bp, Setaria italica
  Peptide Sequence Number=SeqID_122688
taccaattgtttggacgccaccgtcgcggcgctggagaaggctggggcgcccaacgtgaggatcgtcatctccgagagcgggtggccgtcggccggcgggttcggggcgagcgtggagaacgcgcggaactacaaccaggggctgatcgaccacgtcgggcgcggcacgcccaagaggtccggcgcgatggagaccttcatcttcgccatgttcaacgagaaccagaagagcggggatcccacggagaggaacttcgggctcttctaccccaacaagcagcccgtgtactcgatccggttccagtaagaagtagcatgtcggatcgatcgataccaataaacccatgctatgctatgctatgctatgcatgaagatgatgatgggagatgcatgcatcttctaaataatgatatgattaagcagtggtaataaaagtgcaacgtgcacgtatgacgtatagaat

SEQ ID NO: 56715 - DNA, 436 bp, Setaria italica
  Peptide Sequence Number=SeqID_122689
gcctaccggggcaacccgcgggacatcagcctcggctacgcgacgttccagccgggcacgacggtgagggacggcggcaacgggctgacctacacgaacctgttcgacgccatggtggacgccaccgtcgcggcgctggagaaggctggggcgcccaacgtgaggatcgtcatctccgagagcgggtggccgtcggccggcgggttcggggcgagcgtggagaacgcgcggaactacaaccaggggctgatcgaccacgtcgggcgcggcacgcccaagaggtccggcgcgatggagaccttcatcttcgccatgttcaacgagaaccagaagagcggggatcccacggagaggaacttcgggctcttctaccccaacaagcagcccgtgtactcgatccggttccagtaagaagtagcatgtcggatcgatcgat

SEQ ID NO: 56716 - DNA, 457 bp, Setaria italica
  Peptide Sequence Number=SeqID_122690
tccatgttggacgccaccgtcgcggcgctggagaaggctggggcgcccaacgtgaggatcgtcatctccgagagcgggtggccgtcggccggcgggttcggggcgagcgtggagaacgcgcggaactacaaccaggggctgatcgaccacgtcgggcgcggcacgcccaagaggtccggcgcgatggagaccttcatcttcgccatgttcaacgagaaccagaagagcggggatcccacggagaggaacttcgggctcttctaccccaacaagcagcccgtgtactcgatccggttccagtaagaagtagcatgtcggatcgatcgataccaataaacccatgctatgctatgctatgctatgcatgaagatgatgatgggagatgcatgcatcttctaaataatgatatgattaagcagtggtaataaaagtgacaacgtgcacgtatgacgtatg

SEQ ID NO: 56717 - DNA, 471 bp, Setaria italica
  Peptide Sequence Number=SeqID_122691
gtcctaccggggcaacccgcgggacatcagcctcggctacgcgacgttccagccgggcacgacggtgagggacggcggcaacgggctgacctacacgaacctgttcgacgccatggtggacgccaccgtcgcggcgctggagaaggctggggcgcccaacgtgaggatcgtcatctccgagagcgggtggccgtcggccggcgggttcgggcgagcgtggagaacgcgcggaactacaaccaggggctgatcgaccacgtcgggcgcggcacgcccaagaggtccggcgcgatggagaccttcatcttcgccatgttcaacgagaaccagaagagcgggggatccccacggagaggaacttcgggctcttctaccccaacaagcagcccgtgtactcgatccggttccagtaagaagtagcatgtcggatcgatcgataccaataaacccatgctatgctatgctatgcta

SEQ ID NO: 56718 - DNA, 477 bp, Setaria italica
  Peptide Sequence Number=SeqID_122692
gacgttccagccgggcacgacggtgagggacggcggcaacgggctgacctacacgaacctgttcgacgccatggtggacgccaccgtcgcggcgctggagaaggctggggcgcccaacgtgaggatcgtcatctccgagagcgggtggccgtcggccggcgggttcggggcgagcgtggagaacgcgcggaactacaaccaggggctgatcgaccacgtcgggcgcggcacgcccaagaggtccggcgcgatggagaccttcatcttcgccatgttcaacgagaaccagaagagcggggatcccacggagaggaacttcgggctcttctaccccaacaagcagcccgtgtactcgatccggttccagtaagaagtagcatgtcggatcgatcgataccaataaacccatgctatgctatgctatgctatgcatgaagatgatgatgggagatgcatgcatcttctaaataatgatat

SEQ ID NO: 56719 - DNA, 418 bp, Setaria italica
  misc_feature (396)..(396): n is a, c, g, or t
  Peptide Sequence Number=SeqID_122693
gtgtacccctacttcgcctaccggggcaaccccgcgggacatcagcctcggctacgcgacgttccagccgggcacgacggtgagggacggcggcaacgggctgacctacacgaacctgttcgacgccatggtggacgccaccgtcgcggcgctggagaaggctggggcgcccaacgtgaggatcgtcatctaccgagagcgggtggccgtcggccggcgggttcggggcgagcgtggagaacgcgcggaactacaaccaggggctgatcgaccacgtcgggcgcggcacgcccaaagaggtccggcgcgatggagaccttcatcttcgccatgttcaacgagaaccagaagagcggggatcccacggagaggaacttcgggctcttctaccccaanaagcagcccgtgtactcgatcc

SEQ ID NO: 56720 - DNA, 457 bp, Setaria italica
  Peptide Sequence Number=SeqID_122694
ccatgttggacgccaccgtcgcggcgctggagaaggctggggcgcccaacgtgaggatcgtcatctccgagagcgggtggccgtcggccggcgggttcggggcgagcgtggagaacgcgcggaactacaaccaggggctgatcgaccacgtcgggcgcggcacgcccaagaggtccggcgcgatggagaccttcatcttcgccatgttcaacgagaaccagaagagcggggatcccacggagaggaacttcgggctcttctaccccaacaagcagcccgtgtactcgatccggttccagtaagaagtagcatgtcggatcgatcgataccaataaacccatgctatgctatgctatgctatgcatgaagatgatgatggagatgcatgcatcttctaaataatgatatgattaagcagtggtaataaaagtgcaacgtgcacgtatgacgtatgaat

SEQ ID NO: 56721 - DNA, 428 bp, Setaria italica
  Peptide Sequence Number=SeqID_122695
ccaacgtgtacccctacttcgcctaccggggcaacccgcgggacatcagcctcggctacgcgacgttccagccgggcacgacggtgagggacggcggcaacgggctgacctacacgaacctgttcgacgccatggtggacgccaccgtcgcggcgctggagaaggctggggcgcccaacgtgaggatcgtcatctccgagagcgggtggccgtcggccggcgggttcggggcgagcgtggagaacgcgcggaactacaaccaggggctgatcgaccacgtcgggcgcggcacgcccaagaggtccggcgcgatggagaccttcatcttcgccatgttcaacgagaaccagaagagcggggatcccacggagaggaacttcgggctcttctaccccaacaagcagcccgtgtactcgatccggttccag

SEQ ID NO: 56722 - DNA, 431 bp, Setaria italica
  Peptide Sequence Number=SeqID_122696
aaggctggggcgcccaacgtgaggatcgtcatctccgagagcgggtggccgtcggccggcgggttcggggcgagcgtggagaacgcgcggaactacaaccaggggctgatcgaccacgtcgggcgcggcacgcccaagaggtccggcgcgatggagaccttcatcttcgccatgttcaacgagaaccagaagagcggggatcccacggagaggaacttcgggctcttctaccccaacaagcagcccgtgtactcgatccggttccagtaagaagtagcatgtcggatcgatcgataccaataaacccatgctatgctatgctatgctatgcatgaagatgatgatgggagatgcatgcatcttctaaataatgatatgattaagcagtggtaataaaagtgcaacgtgcacgtatgacgtatgaataaagg

SEQ ID NO: 56723 - DNA, 438 bp, Setaria italica
  Peptide Sequence Number=SeqID_122697
gtgtacccctacttcgcctaccggggcaacccgcgggacatcagcctcggctacgcgacgttccagccgggcacgacggtgagggacggcggcaacgggctgacctacacgaacctgttcgacgccatggtggacgccaccgtcgcggcgctggagaaggctggggcgcccaacgtgaggatcgtcatctccgagagcgggtggccgtcggccggcgggttcggggcgagcgtggagaacgcgcggaactacaaccaggggctgatcgaccacgtcgggcgcggcacgcccaagaggtccggcgcgatggagaccttcatcttcgaccaatagttacaaacgaagaaaccaagaaagaagacgggaatacccaacggaagaaaggaaaacttaacgggaactaacttaactaaaccccaaaacaaaagaacaagaaca

SEQ ID NO: 56724 - DNA, 473 bp, Setaria italica
  misc_feature (75)..(75): n is a, c, g, or t
  Peptide Sequence Number=SeqID_122698
gttcgacgccatggtggacgccaccgtcgcggcgctggagaagggctggggcgcccaacgtgaggatcgtcatcnccgagagcgggtggccgtcggccggcgggttcggggcgagcgtggagaacgcgcggaactacaaccagggggctgatcgaccacgtcgggcgcggcacgcccaagaggtccggcgcgatggagaccttcatcttcgccatgtcaacgagaaccagaagagcggggatcccacggagaggaacttcgggctcttctaccccaacaagcagcccgtgtactcgatccggttccagtaagaagtagcatgtcggatcgatcgataccaataaacccatgctatgctatgctatgctatgcatgaagatgatgatgggagatgcatgcatcttctaaataatgatatgattaagcagtggtaataaaagtgcaacgtgcacgtatgacgtatgaataaaaaa

SEQ ID NO: 56725 - DNA, 440 bp, Setaria italica
  Peptide Sequence Number=SeqID_122699
tcgccaactccttcccgccgtccagcggcgtgttcgcgcagggctacatggtggagatcgcccggtacctggcgagcaccggcgcgccgctgctggccaacgtgtacccctacttcgcctaccggggcaacccgcgggacatcagcctcggctacgcgacgttccagccgggcacgacggtgagggacggcggcaacgggctgacctacacgaacctgttcgacgccaatggtaggaacgccaccgtcgcggcgctggagaaggctggggcgcccaacgtgaggatcgtcatctccgagagcgggtggccgtcggccggcgggttcggggcgagcgtggagaacgcgcggaactacaaccaggggctgatcgaccacgtcgggcgcggcacgcccaagaggtccggcgcgatggagaccttcatcttcgccatgttcaac

SEQ ID NO: 56726 - DNA, 462 bp, Setaria italica
  Peptide Sequence Number=SeqID_122700
tggtggacgccaccgtcgcggcgctggagaaggctggggcgcccaacgtgaggatcgtcatctccggagagcgggtggccgtcggccggcgggttcggggcgagcgtggagaacgcgcggaactacaaccagggggctgatcgaccacgtcgggcgcggcacgcccaagaggtccggcgcgatggagaccttcatcttcgccatgttcaacgagaaccagaagagcggggatcccacggagaggaacttcgggctcttctaccccaacaagcagcccgtgtactcgatccggttccagtaagaagtagcatgtcggatcgatcgataccaataaacccatgctatgctatgctatgctatgcatgaagatgatgatgggagatgcatgcatcttctaaataattatatgattaagcagtggtaataaaagtgcaacaatcttgtcctttattcatacgtcat

SEQ ID NO: 56727 - DNA, 419 bp, Setaria italica
  Peptide Sequence Number=SeqID_122701
gacgtttccagccgggcacgacggtgagggacggcggcaacgggctgacctacacgaacctgttcgacgccatggtggacgccaccgtcgcggcgctggagaaggctggggcgcccaacgtgaggatcgtcatctccgagagcgggtggccgtcggccggcgggttcggggcgagcgtggagaacgcgcggaactacaaccaggggctgatcgaccacgtcgggcgcggcacgcccaagaggtccggcgcgatggagaccttcatcttcgccatgttcaacgagaaccagaagagcggggatcccacggagaggaacttcgggctcttctaccccaacaagcagcccgtgtactcgatccggttccagtaagaagtagcatgtcggatcgatcgataccaataaacccatgctatgcta

SEQ ID NO: 56728 - DNA, 396 bp, Setaria italica
  Peptide Sequence Number=SeqID_122702
ccatggtggacgccaccgtcgcggcgctggagaaggctggggcgcccaacgtgaggatcgtcatctccgagagcgggtggccgtcggccggcgggttcggggcgagcgtggagaacgcgcggaactacaaccaggggctgatcgaccacgtcgggcgcggcacgcccaagaggtccggcgcgatggagaccttcatcttcgccatgttcaacgagaaccagaagagcggggatcccacggagaggaacttcgggctcttctaccccaacaagcagcccgtgtactcgatccggttccagtaagaagtagcatgtcggatcgatcgataccaataaacccatgctatgctatgctatgctatgcatgaagatgaatgatgggagatgcatgcatctt

SEQ ID NO: 56729 - DNA, 388 bp, Setaria italica
  Peptide Sequence Number=SeqID_122703
cttcgcctaccggggcaacccgcgggacatcagcctcggctacgcgacgttccagccgggcacgacggtgagggacggcggcaacgggctgacctacacgaacctgttcgacgccatggtggacgccaccgtcgcggcgctggagaaggctggggcgcccaacgtgaggatcgtcatctccgagagcgggtggccgtcggccggcgggttcggggcgagcgtggagaacgcgcggaactacaaccaggggctgatcgaccacgtcgggcgcggcacgcccaagaggtccggcgcgatggagaccttcatcttcgccatgttcaacgagaaccagaagagcggggatcccacggagaggaacttcgggctcttctaccccaacaagcag

SEQ ID NO: 56730 - DNA, 453 bp, Setaria italica
  Peptide Sequence Number=SeqID_122704
accaatagttaggaacgaccaaccgtacgcggcgctggagaaaggctggggcgcccaacgtgaggatcgtcatctccgagagcgggtggccgtcggccggcgggttcggggcgagcgtggagaacgcgcggaactacaaccaggggctgatcgaccacgtcgggcgcggcacgcccaagaggtccggcgcgatggagaccttcatcttcgccatgttcaacgagaaccagaagagcggggatcccacggagaggaacttcgggctcttctaccccaacaagcagcccgtgtactcgatccggttccagtaagaagtagcatgtcggatcgatcgataccaataaacccatgctatgctatgctatgctatgcatgaagatgatgatggagatgcatgcatcttctaaataatgatatgattaagcagtgtaataaaagtagcaacgtgcacgt

SEQ ID NO: 56731 - DNA, 420 bp, Setaria italica
  misc_feature (420)..(420): n is a, c, g, or t
  Peptide Sequence Number=SeqID_122705
taaacaaacgaaaacctaagttaacgaaacgaaccaataggtaggaacgccaccgtcgcggcgctggagaaggctggggcgcccaacgtgaggatcgtcatctccgagagcgggtggccgtcggccggcgggttcggggcgagcgtggagaacgcgcggaactacaaccagggggctgatcgaccacgtcgggcgcggcacgcccaagaggtccggcgcgatggagaccttcatcttcgccatgttcaacgagaaccagaagagcggggatcccacggagaggaacttcgggctcttctaccccaacaagcagcccgtgtactcgatccggttccagtaagaagtagcatgtcggatcgatcgataccaataaacccatgctatgctatgctatgctatgcatgaagatgatgatgggan

SEQ ID NO: 56732 - DNA, 470 bp, Setaria italica
  Peptide Sequence Number=SeqID_122706
ttaagttaacttaagtaaaccttaaactaaacgtaaaccttagtttacgtaacgtacctaataggtggaacgccaccgtcgcggcgctggagaaggctggggcgcccaacgtgaggatcgtcatctccgagagcgggtggccgtcggccggcgggttcggggcgagcgtggagaacgcgcggaactacaaccaggggctgatcgaccacgtcgggcgcggcacgcccaagaggtccggcgcgatggagaccttcatcttcgccatgttcaacgagaaccagaagagcggggatcccacggagaggaacttcgggctcttctaccccaacaagcagcccgtgtactcgatccggttccagtaagaagtagcatgtcggatcgatcgataccaataaacccatgctatgctatgctatgctatgcatgaagatgatgatgggagatgcatgcatcttataaatatgatatga

SEQ ID NO: 56733 - DNA, 390 bp, Setaria italica
  Peptide Sequence Number=SeqID_122707
tcgcggcgctggagaaggctggggcgcccaacgtgaggatcgtcatctccgagagcgggtggccgtcggccggcgggttcggggcgagcgtggagaacgcgcggaactacaaccaggggctgatcgaccacgtcgggcgcggcacgcccaagaggtccggcgcgatggagaccttcatcttcgccatgttcaacgagaaccagaagagcggggatcccacggagaggaacttcgggctcttctaccccaacaagcagcccgtgtactcgatccggttccagtaagaagtagcatgtcggatcgatcgataccaataaacccatgctatgctatgctatgctatgcatgaagatgatgatgggagatgcatgcatcttctaaataatgata

SEQ ID NO: 56734 - DNA, 403 bp, Setaria italica
  Peptide Sequence Number=SeqID_122708
catctccgagagcgggtggccgtcggccggcgggttcggggcgagcgtggagaacgcgcggaactacaaccagggggctgatcgaccacgtcgggcgcggcacgcccaagaggtccggcgcgatggagaccttcatcttcgccatgttcaacgagaaccagaagagcggggatcccacggagaggaacttcgggctcttctaccccaacaagcagcccgtgtactcgatccggttccagtaagaagtagcatgtcggatcgatcgataccaataaacccatgctatgctatgctatgctatgcatgaagatgatgatgggagatgcatgcatcttctaaataattatatgattaagcagtggtaataaaagtgcaacaatcttgtcctttattcatacgtcat

SEQ ID NO: 56735 - DNA, 405 bp, Setaria italica
  Peptide Sequence Number=SeqID_122709
gacggtgagggacggcggcaacgggctgacctacacgaacctgttcgacgccatggtggacgccaccgtcgcggcgctggagaaggctggggcgcccaacgtgaggatcgtcatctccgagagcgggtggccgtcggccggcgggttcggggcgagcgtggagaacgcgcggaactacaaccaggggctgatcgaccacgtcgggcgcggcacgcccaagaggtccggcgcgatggagaccttcatcttcgccatgttcaacgagaaccagaagagcggggatcccacggagaggaacttcgggctcttctaccccaacaagcagcccgtgtactcgatccggttcagtaagagtagcatgtcggatcgatcgataccaataaacccatgctatgctatgctatg

SEQ ID NO: 56736 - DNA, 331 bp, Setaria italica
  Peptide Sequence Number=SeqID_122710
aacttcgcctaccggggcaaacccgcgggacatcagcctcggctacgcgacgttccagccgggcacgacggtgagggacggcggcaacgggctgacctacacgaacctgttcgacgccatggtggacgccaccgtcgcggcgctggagaaggctggggcgcccaacgtgaggatcgtcatctccgagagcgggtggccgtcggccggcgggttcggggcgagcgtggagaacgcgcggaactacaaccaggggctgatcgaccacgtcgggcgcggcacgcccaagaggtccggcgcgatggagaccttcatcttcgccatgttcaacgag

SEQ ID NO: 56737 - DNA, 421 bp, Setaria italica
  Peptide Sequence Number=SeqID_122711
tccattgtttggtacgtccaccgtcgcggcgctggagaaggctggggcgcccaacgtgaggatcgtcatctccgagagcgggtggccgtcggccggcgggttcggggcgagcgtggagaacgcgcggaactacaaccaggggctgatcgaccacgtcgggcgcggcacgcccaagaggtccggcgcgatggagaccttcatcttcgccatgttcaacgagaaccagaagagcggggatcccacggagaggaacttcgggctcttctaccccaacaagcagcccgtgtactcgatccggttccagtaagaagtagcatgtcggatcgatcgataccaataaacccatgctatgctatgctatgctatgcatgaagatgatgatggagatgcatgcatcttctaaataatgatatgattaagc

SEQ ID NO: 56738 - DNA, 424 bp, Setaria italica
  Peptide Sequence Number=SeqID_122712
tggtggacgccaccgtcgcggcgctggagaggcgtggggccgcccaacgtgaggatcgtcatctccgaggaggccggggtcgggccggtcgggccgggcggggttcggggcgagcgtggagaacgcgcggaactacaaccagggggctgatcgaccacgtcgggcgcggcacgcccaagaggtccggcgcgatggagaccttcatcttcgccatgttcaacgagaaccagaagagcggggatcccacggagaggaacttcgggctcttctaccccaacaagcagcccgtgtactcgatccggttccagtaagaagtagcatgtcggatcgatcgataccaataaacccatgctatgctatgctatgctatgcatgaagatgatgatgggagatgcatgcatcttctaaataatgatatgattaa

SEQ ID NO: 56739 - DNA, 420 bp, Setaria italica
  Peptide Sequence Number=SeqID_122713
tctacgtaaccttgtttcgtacgtcctattggttggtacgtcctaccgttcgtcggtcgtcttggtagaaggctggggcgcccaacgtgaggatcgtcatctccgagagcgggtggccgtcggccggcgggttcggggcgagcgtggagaacgcgcggaactacaaccaggggctgatcgaccacgtcgggcgcggcacgcccaagaggtccggcgcgatggagaccttcatcttcgccatgttcaacgagaaccagaagagcggggatccccacggagaggaacttcgggctcttctaccccaacaagcagcccgtgtactcgatccggttccagtaagaagtagcatgtcggatcgatcgataccaataaacccatgctatgctatgctatgctatgcatgaagatgatgatgggaga

SEQ ID NO: 56740 - DNA, 379 bp, Setaria italica
  Peptide Sequence Number=SeqID_122714
cgtcggccggcgggttcggggcgaagcgtggagaacgcgcggaactacaaccaggggctgatcgaccacgtcgggcgcggcacgcccaagaggtccggcgcgatggagaccttcatcttcgccatgttcaacgagaaccagaagagcggggatcccacggagaggaacttcgggctcttctaccccaacaagcagcccgtgtactcgatccggttccagtaagaagtagcatgtcggatcgatcgataccaataaacccatgctatgctatgctatgctatgcatgaagatgatgatgggagatgcatgcatcttctaaataatgatatgattaagcagtggtaataaaaagtgcaacgtgcacgtatgacgtatgaat

SEQ ID NO: 56741 - DNA, 406 bp, Setaria italica
  Peptide Sequence Number=SeqID_122715
taactaacgtaaaccttgtttacgtaacgccatggtggacgccaccgtcgcggcgctggagaaggctggggcgcccaacgtgaggatcgtcatctccgagagcgggtggccgtcggccggcgggttcggggcgagcgtggagaacgcgcggaactacaaccaggggctgatcgaccacgtcgggcgcggcacgcccaagaggtccggcgcgatggagaccttcatcttcgccatgttcaacgagaaccagaagagcggggatcccacggagaggaacttcgggctcttctaccccaacaagcagcccgtgtactcgatccggttccagtaagaagtagcatgtcggatcgatcgataccaataaacccatgctatgctatgctatgctatgcatgaagatgatgat

SEQ ID NO: 56742 - DNA, 434 bp, Setaria italica
  Peptide Sequence Number=SeqID_122716
tacctaattagtttggtacgtcctaccgttcgtcggcgctggagaaggctggggcgcccaacgtgaggatcgtcatctccgagagcgggtggccgtcggccggacgggttacggggacgaagacgtggagaacgcgcggaactacaaccaggggctgatcgaccacgtcgggcgcggcacgcccaagaggtccggcgcgatggagaccttcatcttcgccatgttcaacgagaaccagaagagcggggatcccacggagaggaacttcgggctcttctaccccaacaagcagcccgtgtactcgatccggttccagtaagaagtagcatgtcggatcgatcgataccaataaacccatgctatgctatgctatgctatgcatgaagatgatgatgggagatgcatgcatcttctaaataatgatatgattaagc

SEQ ID NO: 56743 - DNA, 385 bp, Setaria italica
  misc_feature (249)..(249): n is a, c, g, or t
  Peptide Sequence Number=SeqID_122717
aaacaaaacgaaaaacctaagttaacgaaacgaccaataggtggacgccaccgtcgcggcgctggagaaggctggggcgcccaacgtgaggatcgtcatctccgagagcgggtggccgtcggccggcgggttcggggcgagcgtggagaacgcgcggaactacaaccaggggctgatcgaccacgtcgggcgcggcacgcccaagaggtccggcgcgatggagaccttcatcttcgccatgttcaacgngaaccagaagagcggggatcccacggagaggaacttcgggctcttctaccccaacaagcagcccgtgtactcgatccggttccagtaagaagtagcatgtcggatcgatcgataccaataaacccatgctatgcta

SEQ ID NO: 56744 - DNA, 391 bp, Setaria italica
  Peptide Sequence Number=SeqID_122718
ttcggggcgagcgtggagaacgcgcggaactacaaccaggggctgatcgaccacgtcgggcgcggcacgcccaagaggtccggcgcgatggagaccttcatcttcgccatgttcaacgagaaccagaagagcggggatcccacggagaggaacttcgggctcttctaccccaacaagcagcccgtgtactcgatccggttccagtaagaagtagcatgtcggatcgatcgataccaataaacccatgctatgctatgctatgctatgcatgaagatgatgatgggagatgcatgcatcttctaaataaatgatatgattaagcagtggtaataaaaagtgcaacgtgcacgtatgacgtatgaataaaggacaagattagttgcaattttt

SEQ ID NO: 56745 - DNA, 329 bp, Setaria italica
  Peptide Sequence Number=SeqID_122719
acggcggcaacgggctgacctacacgacctgttcgacgccatgggtggacgccaccgtcgcggcgctggagaaggctggggcgcccaacgtgaggatcgtcatctccgagagcgggtggccgtcggccggcgggttcggggcgagcgtggagaacgcgcggaactacaaccaggggctgatcgaccacgtcgggcgcggcacgcccaagaggtccggcgcgatggagaccttcatcttcgccatgttcaacgagaaccagaagagcggggatcccacggagaggaacttcgggctcttcttacccctaactaagtctagtcccgttgtt

SEQ ID NO: 56746 - DNA, 377 bp, Setaria italica
  Peptide Sequence Number=SeqID_122720
ggagaacgcgcggaactacaaccagggggctgatcgaccacgtcgggcgcggcacgcccaagaggtccggcgcgatggagaccttcatcttcgccatgttcaacgagaaccagaagagcggggatcccacggagaggaacttcgggctcttctacccaacaagcagcccgtgtactcgatccggttccagtaagaagtagcatgtcggatcgatcgataccaataaacccatgctatgctatgctatgctatgcatgaagatgatgatgggagatgcatgcatcttctaaataatgattatgattaagcagtggtaataaaagtgcaacgtgcacgtatgacgtatgaataaaggacaagattgttgcaaaaaaaaa

SEQ ID NO: 56747 - DNA, 332 bp, Setaria italica
  Peptide Sequence Number=SeqID_122721
cacgacggtgagggacggcggcaacgggctgacctacacgaacctgttcgacgccatggtggtacgcctaccgtcgcggcgctggagaaggctggggcgcccaacgtgaggatcgtcatctccgagagcgggtggccgtcggccggcgggttcggggcgagcgtggagaacgcgcggaactacaaccaggggctgatcgaccacgtcgggcgcggcacgcccaagaggtccggcgcgatggagaccttcatcttcgccatgttcaacgagaaccagaagagcggggatcccacggagaggaacttcgggctcttctaccccaacaagcagcc

SEQ ID NO: 56748 - DNA, 378 bp, Setaria italica
  Peptide Sequence Number=SeqID_122722
ccaatgttggacgccaccgtcgcggcgctggagaaggctggggcgcccaacgtgaggatcgtcatctccgagagcgggtggccgtcggccggcgggttcggggcgagcgtggagaacgcgcggaactacaaccagggctgatcgaccacgtcgggcgcggcacgcccaagaggtccggcgcgatggagaccttcatcttcgccatgttcaacgagaaccagaagagcggggatcccacggagaggaacttcgggctcttctaccccaacaaagcagcccgtgtactcgatccggttccagtaagaagtagcatgtcggatcgatcgataccaataaacccatgctatgctatgctatgctatgcatgaagatgatgat

SEQ ID NO: 56749 - DNA, 195 bp, Setaria italica
  Peptide Sequence Number=SeqID_122723
cgccccagccttctccagcgccgcgacggtggcgtccaccatggcgtcgaacaggttcgtgtaggtcagcccggtacctggcgagcaccggcgcgccgctgctggccaacgtgtacccctacttcgcctaccggggcaacccgcgggacatcagcctcggctacgcgacgttccagccgggcacgacggtgtagt

SEQ ID NO: 56750 - DNA, 195 bp, Setaria italica
  Peptide Sequence Number=SeqID_122724
ccgccccagccttctccagcgccgcgacggtggcgtccaccatggcgtcgaacaggttcgtgtaggtcagcccggtacctggcgagcaccggcgcgccgctgctggccaacgtcgtacccctacttcgcctaccggggcaacccgcgggacatcagcctcggctacgcgacgttccagccgggcacgacggtgag

SEQ ID NO: 56751 - DNA, 392 bp, Setaria italica
  Peptide Sequence Number=SeqID_122725
ccagccgggcacgacggtgagggacggcggcaacgggctgacctacacgaacctgttcgacgccatggtggacgccaccgtcgcggcgctggagaaggctggggcgcccaacgtgaggatcgtcatctccgagagcgggtggccgtcggccggcgggttcggggcgagcgtggagaacgcgcggaactacaaccaggggctgatcgaccacgtcgggcgcggcacgcccaagaggtccggcgcgatggagaccttcatcttcgccatgttcaacgagaaccagaagagcggggatcccacggagaggaacttcgggctcttctaccccaacaagcagcccgtgtacttcgtattccggtttccttagtttaagtttaagttttagtttcttt

SEQ ID NO: 56752 - DNA, 366 bp, Setaria italica
  Peptide Sequence Number=SeqID_122726
aaacgcgcggaactacaaccaggggctgatcgaccacgtcgggcgcggcacgcccaagaggtccggcgcgatggagaccttcatcttcgccatgttcaacgagaaccagaagagcggggatcccacggagaggaacttcgggctcttctaccccaacaagcagcccgtgtactcgatccggttccagtaagaagtagcatgtcggatcgatcgataccaataaacccatgctatgctatgctatgctatgcatgaagatgatgatgggagatgcatgcatcttctaaataatgatatgattaagcagtggtaataaaagtgcaacgtgcacgtatgacgtatgaataaaggacaagattgttagac

SEQ ID NO: 56753 - DNA, 329 bp, Setaria italica
  Peptide Sequence Number=SeqID_122727
ggtccggcgcgatggagaccttcatcttcgccatgttcaacgagaaccagaagagcggggatcccacggagaggaacttcgggctcttctaccccaacaagcagcccgtgtactcgatccggttccagtaagaagtagcatgtcggatcgatcgataccaataaacccatgctatgctatgctatgctatgcatgaagatgatgatgggagatgcatgcatcttctaaataatgatatgattaagcagtggtaataaaagtgcaacgtgcacgtatgacgtatagaataaaggacaagattgttagaaaacaaaaaaaaaaaaaaaaaa

SEQ ID NO: 56754 - DNA, 354 bp, Setaria italica
  Peptide Sequence Number=SeqID_122728
cgacggaactaacaaccaggggctgatcgaccacgtcgggcgcggcacgcccaagaggtccggcgcgatggagaccttcatcttcgccatgttcaacgagaaccagaagagcggggatcccacggagaggaacttcgggctcttctaccccaacaagcagcccgtgtactcgatccggttccagtaagaagtagcatgtcggatcgatcgataccaataaacccatgctatgctatgctatgctatgcatgaagatgatgatgggagatgcatgcatcttctaaataatgatatgattaagcagtggtaataaaaagtgacaacgtgcacgtatgacgtatgaataaaggacaa

SEQ ID NO: 56755 - DNA, 350 bp, Setaria italica
  Peptide Sequence Number=SeqID_122729
gtggagaacgcgcggaactacaaccaggggctgatcgaccacgtcgggcgcggcacgcccaagaggtccggcgcgatggagaccttcatcttcgccatgttcaacgagaaccagaagagcggggatcccacggagaggaacttcgggctcttctaccccaacaagcagcccgtgtactcgatccggttccagtaagaagtagcatgtcggatcgatcgataccaataaacccatgctatgctatgctatgctatgcatgaagatgatgatgggagatgcatgcatcttctaaataatgatatgattaagcagtggtaataaaagtgcacgtgcacgtatgacgtatgaat

SEQ ID NO: 56756 - DNA, 279 bp, Setaria italica
  Peptide Sequence Number=SeqID_122730
gccaccgtcgcggcgctggagaaggctggggcgcccaacgtgaggatcgtcatctccgagagcgggtggccgtcggccggcgggttcggggcgagcgtggagaacgcgcggaactacaaccagggggctgatcgaccacgtcgggcgcggcacgcccaagaggtccggcgcgatggagaccttcatcttcgccatgttcaacgagaaccagaagagcggggatcccacggagaggaacttcgggctcttctaccccaacaagcagcccgtgtaactcga

SEQ ID NO: 56757 - DNA, 271 bp, Setaria italica
  Peptide Sequence Number=SeqID_122731
cggggcgagcgtggagaacgcgcggaactacaaccaggggctgatcgaccacgtcgggcgcggcacgcccaagaggtccggcgcgatggagaccttcatcttcgccatgttcaacgagaaccagaagagcggggatcccacggagaggaacttcgggctcttctaccccaacaagcagcccgtgtactcgatccggttccagtaagaagtagcatgtcggatcgatcgataccaataaacccatgcatagcatagcatagcatagcatggg

SEQ ID NO: 56758 - DNA, 266 bp, Setaria italica
  Peptide Sequence Number=SeqID_122732
gccaccgtcgcggcgctggagaaggctggggcgcccaacgtgaggatcgtcatctccgagagcgggtggccgtcggccggcgggttcggggcgagcgtggagaacgcgcggaactacaaccaggggctgatcgaccacgtcgggcgcggcacgcccaagaggtccggcgcgatggagaccttcatcttcgccatgttcaacgagaaccagaagagcggggatcccacggagaggaacttcgggctcttctacccccaacaagcagc

SEQ ID NO: 56759 - DNA, 313 bp, Setaria italica
  Peptide Sequence Number=SeqID_122733
aagaggtccggcgcgatggagaccttcatcttcgccatgttcaacgagaaccagaagagcggggatcccacggagaggaacttcgggctcttctacccacaagcagcccgtgtactcgatccggttccagtaagaagtagcatgtcggatcgatcgataccaataaacccatgctatgctatgctatgctatgcatgaagatgatgatgggagatgcatgcatcttctaaataatgatatgattaagcagtggtaataaaagtgcaacgtgcacgtatgacgtatgaataaaggacaagattgttgcaaaaaa

SEQ ID NO: 56760 - DNA, 338 bp, Setaria italica
  misc_feature (16)..(16): n is a, c, g, or t
  Peptide Sequence Number=SeqID_122734
aaaagggaaactaaanaaatacgaccacgtcgggcgcggcacgccaagaggtccggcgcgatggagaccttcatcttcgccatgttcaacgagaaccagaagagcggggatcccacggagaggaacttcgggctcttctaccccaacaagcagcccgtgtactcgatccggttccagtaagaagtagcatgtcggatcgatcgataccaataaacccatgctatgctatgctatgctatgcatgaagatgatgatgggagatgcatgcatcttctaaataatgatatgattaagcagtggtaataaaagtgcaacgtgcacgtatgacgtatagaaaa

SEQ ID NO: 56761 - DNA, 280 bp, Setaria italica
  Peptide Sequence Number=SeqID_122735
cgcgatggagaccttcatcttcgccatgttcaacgagaaccagaagagcggggatcccacggagaggaacttcgggctcttctaccccaacaagcagcccgtgtactcgatccggttccagtaagaagtagcatgtcggatcgatcgataccaataaacccatgctatgctatgctatgctatgcatgaagatgatgatgggagatgcatgcatcttctaaataatgatatgattaagcagtggtaataaaagtgcaacgtgcacgtatgacgtatgaat

SEQ ID NO: 56762 - DNA, 312 bp, Setaria italica
  Peptide Sequence Number=SeqID_122736
tcgggacgacggacaacgcccaaagaaggtccggcgcgatggagaccttcatcttcgccatgttcaacgagaaccagaagagcggggatcccacggagaggaacttcgggctcttctaccccaacaagcagcccgtgtactcgatccggttccagtaagaagtagcatgtcggatcgatcgataccaataaacccatgctatgctatgctatgctatgcatgaagatgatgatgggagatgcatgcatcttctaaaataatgatatgattaagcagtggtaataaaaagtgcaacgtgcacgtatgacgtat

SEQ ID NO: 56763 - DNA, 291 bp, Setaria italica
  misc_feature (247)..(247): n is a, c, g, or t
  Peptide Sequence Number=SeqID_122737
gcaacgggctgacctacacgaacctgttcgacgccatggtggacgccaccgtcgcggcgctggagaaggctggggcgcccaacgtgaggatcgtcatctccgagagcgggtggccgtcggccggcgggttcggggcgagcgtggagaacgcgcggaactacaaccaggggctgatcgaccacgtcgggcgcggcacgcccaagaggtccggcgcgatggagaccttcatcttcgccatgttcaacgngaaccagaagagcggggatcccacggagaggaacttcggggctc

SEQ ID NO: 56764 - DNA, 275 bp, Setaria italica
  Peptide Sequence Number=SeqID_122738
acacgaacctgttcgacgccatggtggacgccaccgtcgcggcgctggagaaggctggggcggcccaaccgtgaggatcgtcatctccgagagcgggtggccgtcggccggcgggttcggggcgagcgtggagaacgcgcggaactacaaccaggggctgatcgaccacgtcgggcgcggcacgccccaagaggtccggcgcgatggagaccttcatcttcgccatgttcaacgagaaccagaagagcggggatcccacggagaggaacttcggg

SEQ ID NO: 56765 - DNA, 262 bp, Setaria italica
  Peptide Sequence Number=SeqID_122739
tacctaatagttggacgccaccgtcgcggcgctggagaaggctggggcgcccaacgtgaggatcgtcatctccgagagcgggtggccgtcggccggcgggttcggggcgagcgtggagaacgcgcggaactacaaccaggggctgatcgaccacgtcgggcgcggcacgcccaagaggtccggcgcgatggagaccttcatcttcgccatgttcaacgagaaccagaagagcggggatcccacggagaggaacttcgggctc

SEQ ID NO: 56766 - DNA, 246 bp, Setaria italica
  misc_feature (209)..(209): n is a, c, g, or t
  Peptide Sequence Number=SeqID_122740
taacgaacggacgactaggaagaaggctggggcgcccaacgtgaggatcgtcatctccgagagcgggtggccgtcggccggcgggttcggggcgagcgtggagaacgcgcggaactacaaccagggctgatcgaccacgtcgggcgcggcacgcccaagaggtccggcgcgatggagaccttcatcttcgccatgttcaacgagaaccngaagagcggggatcccacggagaggaacttcgggctc

SEQ ID NO: 56767 - DNA, 136 bp, Setaria italica
  misc_feature (113)..(113): n is a, c, g, or t
  Peptide Sequence Number=SeqID_122741
atcagcctcggctacgcgacgttccagccgggcacgacggtgagggacggcggcaacgggctgacctacacgaacctgttcgacgccatggtgggacgccaccgtcgcggcgntggagaaggcgtgggggcgccca

SEQ ID NO: 56768 - DNA, 285 bp, Setaria italica
  misc_feature (114)..(114): n is a, c, g, or t
  Peptide Sequence Number=SeqID_122742
taagtaaacgacgcggaactacaaccaggggctgatcgaccacgtcgggcgcggcacgcccaagaggtccggcgcgatggagaccttcatcttcgccatgttcaacgagaaccngaagagcggggatcccacggagaggaacttcgggctcttctaccccaacaagcagcccgtgtactcgatccggttccagtaagaagtagcatgtcggatcgatcgataccaataaacccatgctatgctatgctatgctatgcatgaagatgatgatggagatgcatgcat

SEQ ID NO: 56769 - DNA, 199 bp, Setaria italica
  Peptide Sequence Number=SeqID_122743
tgtactcgatccggttccagtaagaagtagcatgtcggatcgatcgataccaataaacccatgctatgctatgctatgctatgcatgaagatgatgatgggagatgcatgcatcttctaaataatgatatgattaagcagtggtaataaaagtgcaacgtgcacgtatgacgtatgaataaaggacaagattgttgcaa

SEQ ID NO: 56770 - DNA, 269 bp, Setaria italica
  Peptide Sequence Number=SeqID_122744
agacggggatcccacggagaggaacttcgggctcttctaccccaacaagcagcccgtgtactcgatccggttccagtaagaagtagcatgtcggatcgatcgataccaataaacccatgctatgctatgctatgctatgcatgaagatgatgatgggagatgcatgcatcttctaaataatgatatgattaagcagtggtaaataaagtgcaacgtgcacgtatgacgtatagaaaaaaaataaaaaaaaaaaaaaaaaaaaaaaaaaa

SEQ ID NO: 56771 - DNA, 254 bp, Setaria italica
  Peptide Sequence Number=SeqID_122745
aacgagaaccagaagagcggggatcccacggagaggaacttcggggctcttctaccccaacaagcagcccgtgtactcgatccggttccagtaagaagtagcatgtcggatcgatcgataccaataaaccccatgctatgctatgctatgctatgcatgaagatgatgatgggagatgcatgcatcttctaaataatgatatgattaagcagtggtaataaaagtgcaacgtgcacgtatgacgtatgtaataa

SEQ ID NO: 56772 - DNA, 231 bp, Setaria italica
  Peptide Sequence Number=SeqID_122746
ccaggggctgatcgaccacgtcgggcgcggcacgcccaagaggtccggcgcgatggagaccttcatcttcgccatgttcaacgagaaccagaagagcggggatcccacggagaggaacttcgggctcttctaccccaacaagcagcccgtgtactcgatccggttccagtaagaagtagcatgtcggatcgatcgataccaataaacccatgctatgctatgctattcgat

SEQ ID NO: 56773 - DNA, 244 bp, Setaria italica
  Peptide Sequence Number=SeqID_122747
tgatcgaccacgtcgggcgcggcacgcccaagaggtccggcgcgatggagaccttcatcttcgccatgttcaacgagaaccagaagagcggggatcccacggagaggaacttcgggctcttctaccccaacaagcagcccgtgtactcgatccggttccagtaagaagtagcatgtcggatcgatcgataccaataaacccatgctatgctatgctatgctatgcatgaagatgatgatgggag

SEQ ID NO: 56774 - DNA, 168 bp, Setaria italica
  Peptide Sequence Number=SeqID_122748
gtcggccggcgggttcggggcgagcgtggagaacgcgcggaactacaaccaggggctgatcgaccacgtcgggcgcggcacgcccaagaggtccggcgcgatggagaccttcatcttcgccatgttcaacgagaaccagaagagcggggatcccacggagaggaactt

SEQ ID NO: 56775 - DNA, 186 bp, Setaria italica
  Peptide Sequence Number=SeqID_122749
tcggccggcgggttcgggcgagcgtggagaacgcgcggaactacaaccaggggctgatcgaccacgtcgggcgcggcacgcccaagaggtccggcgcgatggagaccttcatcttcgccatgttcaacgagaaccagaagagcggggatcccacggagaggaacttcgggctcttctaccccaact

SEQ ID NO: 56776 - DNA, 175 bp, Setaria italica
  Peptide Sequence Number=SeqID_122750
gaagagcgggaatccacggagaggaacttcgggctcttctaccccaacaagcagcccgtgtactcgatccggttccagtaagaagtagcatgtcggatcgatcgataccaataaacccatgctatgctatgctatgctatgcatgaagatgatgatgggagatgcatgcatcttc

SEQ ID NO: 56777 - DNA, 149 bp, Setaria italica
  Peptide Sequence Number=SeqID_122751
ccacggggctcgggagcatcaaggtgtccacgtcggtgcagtccaacgtcatcgccaactccttcccgccgtccctcaccgtcgtgcccggctggaacgtcgcgtagccgaggctgatgtcccgcgggttgccccggtaggcgaagtag

SEQ ID NO: 56778 - DNA, 115 bp, Setaria italica
  Peptide Sequence Number=SeqID_122752
tcggtgcagtccaacgtcatcgccaactccttcccgccgtccagcggcgtgttcgcgcagggctacatggtggagatcgccaggtaccgggcgatctccaccatgtagccctgcg

SEQ ID NO: 56779 - DNA, 387 bp, Setaria italica
  misc_feature (25)..(25): n is a, c, g, or t
  Peptide Sequence Number=SeqID_122753
ggtcctcacagttagatatgtatcngaagttcatcaatcatcatgatgcattgttttacctggtatcaattaagtttggcttcatcatgagtttgcatttcaagaccatgttacctgtttcattcttatatatgttgaaacgaacgtatatatgatactcattgaacttgtatctccccctgtacagctgtcctcaagaacacctctaaacaaaagcgcccgtacagctcgaagagcatccctcccgctgccaacatatggaacgccaagcaaccgcaccatcagcatcctggaccggctagactccccagacgtgtccgtcaatgcacctcgaatcgacagaatcgcggaattccctctggcttcatccgaggaccccttggcccc

SEQ ID NO: 56780 - DNA, 330 bp, Setaria italica
  Peptide Sequence Number=SeqID_122754
gcttcaagtccagttgaagtctagtccttctcgcaacatgtctccaatctatcagtctctgacagacaaagttaagaagatgacatttcctagcgatgtaactgattctgtgcgaagaagggtggcaagaagaaactcgttgggaaatgagaggactgtaacattctgcaaaccatctcctgagcggaactctattagctctactcggagcatcaaagaatatacaactactcagagtgtcaaagagttctccatcgacagcagtctagttgtcaatgacttggaaggagtactcttgggagtccttagaatgcctgatgtctttgttat

SEQ ID NO: 56781 - DNA, 500 bp, Setaria italica
  Peptide Sequence Number=SeqID_122755
acgctctaattcacgtcctgcacagacgcttgctgcaacttgtatggatgaccatgagcttacagaaagcatgcaaaagttgctcattgttatgcaaagattagatgaaaagattggacctatgctggaatcagatggagaactttttataaaaggtacattggttgcgacctaaattcttattctgctagtgaatattggggagtccttaaaaatttgggtgttcagatctattatctgatatatttcttgcaggaagaactttttaataaaattaattgctttgaaaccactgaacctattttctgcttctgatttctaatgcctacaattcaaaatgtccatgtctatggaatcaatttttcattcttgttcatagatctcctgctacatatctctttaattattagaaaagtaagctaagcgagtacttttccctcttaagatggggttggctgtcacgtgctggcttgtgggataagagtcatcttgtacctagt

SEQ ID NO: 56782 - DNA, 378 bp, Setaria italica
  misc_feature (366)..(366): n is a, c, g, or t
  Peptide Sequence Number=SeqID_122756
tttaacttaacttcggtaatttaacctaacttaattaactaaaactaaaaattgatgaatcatgcattcaatcggtttcttcctaatgatgtgggatggagagatctttttgagatggttatagtctctgcaaggaagccagagttttttccaactttcacatccattatacgaggttgtaacagacgatgggttgatgcgcccctgttttaaagcaaattcaggtgggctatactctggtggcagtgctcagatggttgaaaagtcactagagattcatggggatgagatattatatgttggagaccatatttacacagatgtaagccagtcaaaagttcatttacgatggaggacagcattaanctgcagagaact

SEQ ID NO: 56783 - DNA, 357 bp, Setaria italica
  misc_feature (1)..(35): n is a, c, g, or t
  Peptide Sequence Number=SeqID_122757
nnnnnnnnnnnnnnnnnnnnnnnnnnnnnnnnnnnaactaaacacatactgtatatagtacatacatcattattacattatttatttatacgcgcacgtatcaacccgaagactagagctcggtagatacaagcaggggagtacatcaactgatcaacacctcacggaaataaatacgcataccggcatacgcggcactaagtacgtatacgtacggtacggaaacaagcgacaccacggtgcctctgctgcataatagtgtcccctgtgaaagtagggaccaacgaccaaccgaagtaccaacaagacaaagacgacaagaaggaccggaccgacaacgacggacaagtagaccaa

SEQ ID NO: 56784 - DNA, 205 bp, Setaria italica
  Peptide Sequence Number=SeqID_122758
tgagctccttatatcacaccaaagtgcacaagctaacctaagctctctctcagcagtatacgctgacaatggcaagattcgctgcagctaccgtcctcgtttgtgcagcattgctcttgtgtgttgagcaaagtgcaggaagcttggcctctgccgatccactctccacacaagagcaatgctgcacaaacgaggacggtagctg

SEQ ID NO: 56785 - DNA, 466 bp, Setaria italica
  Peptide Sequence Number=SeqID_122759
ctctgactgtgaagacagcgaacactcggattccactccatcaaaatgatggtagctctgggaaagagattacgagagtccgagaaaggtcaagctggtatctatcaaatgcagaagtacaaataaactcatggaggattcccatctggcagaaatctaagatttgcttctatgtgatggaccatcctgctgcggagtcaggggaaacagttagcagtagcggtggagaaattgagattgagaagttacctcttcacgaggttgaaatcaggagaagggaattgctccctgtattcaagcagttccactatactgagcgaaattctagtgacaggtattgtcaatgaaactacctttatactcttggcttcttgtaacttttgtagatgagcagttatctggtattttgtcagatcaggttctgttttggtttttggcaaactttccattatttgaaaatatcaaa

SEQ ID NO: 56786 - DNA, 400 bp, Setaria italica
  Peptide Sequence Number=SeqID_122760
ctaatgtttgtccgtcggtcagtttttccgtctgatctttgccctttctcatgttgcaggttgaacttactatgctgctttacttaagatataatgaaaaacagtgcccacaacattcagtgtgcaatataatgtagaggatttggtgaaattttagtaggctttcatggaataaaggtgcgcacatattctcatggtaaagtttgtgcttgatgttcacgttccagaagtgaagttcttctctccaatctgaggccaggatccctccaggcaatttactaatccgcggattcacgattaagggagctggatgttgtcgagaagttgccattgcctgccgcgacgccgctccctttgtgttgatttgtacatatactgtaagacccatttgttttgtgcc

SEQ ID NO: 56787 - DNA, 226 bp, Setaria italica
  Peptide Sequence Number=SeqID_122761
tcatttgatggagtggaatccgagtgttcgctgtcttcacagtcagaagcatccatagccatcatacagtttctctggttggctaaatactgtcagcaatgtggctgcttctgcaagtggaaaactatctgtaccatctggttctgttactgctgtttccataattccatctaccagggttctttgccagttccatcgaaggctaatgctctggagcatctgttgg

SEQ ID NO: 56788 - DNA, 143 bp, Setaria italica
  Peptide Sequence Number=SeqID_122762
ttgacctcctcctgccaaggcctgtgaatgttccatgtttatttgtacaaaacaaatgggtcttacagttagcagtagcggtggagaaattgagattgagaagttacctcttcacgaggttgaaatcagtatagtggaactgc

SEQ ID NO: 56789 - DNA, 226 bp, Setaria italica
  Peptide Sequence Number=SeqID_122763
gctgccaaagactaagagcaagaagaagaaggaggcagcctcctctgcgatacccacgttggatcggctccatgagctgcaattcagtgtctaaagaaaaagaagctgtacgagacacaaattgagcagctatcgaattttcagttgcgagttcatgaccagattataatgcttgaaagtgcaaaggcaactactgatactgttgatgctttgcgctctggatcat

SEQ ID NO: 56790 - DNA, 232 bp, Setaria italica
  Peptide Sequence Number=SeqID_122764
cgggagcatccatggaagacgtccgcaaaaggggcaacggccgacggcgccaacggggcctccgccggcgggaagcgcgcgcgagtacctctggttgtccctttggcgagggctgccattttctccattgcttccctggcggctaccaggcagtttcaaagataaccaacctgggtggcccagcagttacacctcctggaagaatgatgatggacgggccacctacacccac

SEQ ID NO: 56791 - DNA, 208 bp, Setaria italica
  Peptide Sequence Number=SeqID_122765
tcctggttcaaatccaaacctctcttggctttgctgcatcccagtttgattgctattaatgttaccaatatcttccggctctgaaagctttctccgcttctttatcatcccacctcttctgctcttcttggatgatttacggttttggagcttgtcaaccttctgtactcgagttgaaaattttgagcattcccatacgtttcttctt

SEQ ID NO: 56792 - DNA, 149 bp, Setaria italica
  Peptide Sequence Number=SeqID_122766
gcttattagtcggtatagatcctgtcagctggttccagctaatatccagatggccaagtttggaggtgtattctctgcggttatcctggttgtgctgctcccctgcttggatgttgcattggggcagagcactgacacttcagaggtca

SEQ ID NO: 56793 - DNA, 261 bp, Setaria italica
  Peptide Sequence Number=SeqID_122767
ccgctgcctgttctacaaagctgtatacagctggaaaggccacatatttaagctttttaatttacagtactgctatacgctttagctgctaggattctgtgtctctggtactataaaacttactagatttaatggaatcaaacaatttgatcaacaagaaatgcccatgccttactgtggaactgataaatcctgcctttggtgggacaataaatctttcttcttggtttcaccattcttcacatgggagcaattgacaaa

SEQ ID NO: 56794 - DNA, 196 bp, Setaria italica
  Peptide Sequence Number=SeqID_122768
tttacagtactgctatacgctttagctgctaggattctgtgtctctggtactataaaacttactagatttaatggaatcaaacaatttgatcaacaagaaatgcccatgccttactgtggaactgataaatcctgcctttggtgggacaatactgagacacgcaacaggggaaaggcaaggcacacaggggatagg

SEQ ID NO: 56795 - DNA, 237 bp, Setaria italica
  Peptide Sequence Number=SeqID_122769
cgttgtcagcgggtgcagccgtcggtggcgcaggtgtaccagggcgtcacgtccatcccatggatggtcaagccgctctggggcctgttcaccgacgtgctccctgtcgccggataccggcgccggccgtatttcattcttgcagtatgcaggcttcatcggagttattgcaatgcttatagtctctctccacagcaagcttcatgcactgttcgccttgttggcattgatggccgg

SEQ ID NO: 56796 - DNA, 445 bp, Setaria italica
  Peptide Sequence Number=SeqID_122770
tgaatccatcagactttttcacccgctgctgctgattttgcttcctcaggtgcgtcaggtttattgcgctcctgctcatcttgtgcaccatcgatcttattcatctcgctgtttgatccatcagacatactgtccctgcttttaccccacaacacgctgtaaagtcctccaatcagcaggattccacccaaaatactgccctccaaaaaaacgaatagaacaaatattatgagcaaaaattaaaaaaattctactctacacgaactataatcaatgtaatcctttgctgccaattttacagttcttgtgcttggttacctgccgaggtgaacaatctctcccaagaagaatgaggagcaaaaacattgtgaagacggagtagagcgggagccaggctgcgaagaagacgggccccttcatctccacgatccacgcttgcaggtag

SEQ ID NO: 56797 - DNA, 178 bp, Setaria italica
  Peptide Sequence Number=SeqID_122771
ggcgttgcctgctgctgccaccagcgttgccgatgtaagtttcaggctaacactgtacatatttaagctcaatgtattcctggaaagagaagagacagaaaaaaatatatagctatacacgactgctgcaatgacgcattatgtaagtaatttacctgcagaatttattactatatgc

SEQ ID NO: 56798 - DNA, 193 bp, Setaria italica
  Peptide Sequence Number=SeqID_122772
gctgctccagggcgtgtggttcatggccatgggttcgcgctgtgggtgccggcgctcgtgccgagcgggtgccacggcgtcggcgtggaggaggaggggagtagcgctccgcatcgccgcgtctacggaggaggcggcgcgggggcgacggtgatggccaacctgcagttcagctgggcgctcgccgtcacga

SEQ ID NO: 56799 - DNA, 239 bp, Setaria italica
  Peptide Sequence Number=SeqID_122773
tatgagctcaatgacggtgtattccagtaccgaagctgctgtgtctattcccccgaaaaacacatcaagcaggatagctttcatgttctctctggtaaggccgtactcctgccgaacagagagcaagacgtgtatgaagtcgtcatcctcatttttggactcgtgccttttgctctcatggtcatcgatcagcctgtccagcagctcgtcccaccttctcctcaatctctcggacttgg

SEQ ID NO: 56800 - DNA, 395 bp, Setaria italica
  Peptide Sequence Number=SeqID_122774
acagttttgttgtactttacgagacgaatcttttgagcctaattagtcaatttttggacaataattcacaaatacaacgaaatgctacagttgcgcatttatgataaactcccaactttgacactcccaaattgggaactaaacaactcttcttcctcttcggcaaccaacaactgcagaggcattaaaacccccgcatttagtgcgtcgaatggtcgcggacagcgctttcatgctccgatccgtcgctgaacttctgtggttttaataacagtcagtagcccggttggtcagccaacctgtagagaggccggcaaatctgcagaactacagtctacagtggtcagtgtgttttcttcgttcatcgttctgtcaccaactcaccatagcacctg

SEQ ID NO: 56801 - DNA, 414 bp, Setaria italica
  Peptide Sequence Number=SeqID_122775
tcgtcaacgtcagggacgaaccgggcgaaaccccatgagtcggccaccggcgtggtctgcgccgccgagaggatggcctgaaggcagtcggccaccggcgtggtctgcgccgccgagaggatggcctgaaggcagtcgacatggccgaagtaggcagcgtggtgcaggcagctccgcgcgtgcaccgaatcgaacattaagatattggcgccggcctggaggagcctgagcacgcagtcgatcttgccgtgcatcgccgcgagcatcagcggagtctgcttgtgccgattcaccacgtccggcggcaccccgtgatccaagatcatggacagcacctgcagcgaaagcagcaagatgtcagaggccgaggagaagaactggaggagacggggatccatggcgtgggtgacgtgg

SEQ ID NO: 56802 - DNA, 184 bp, Setaria italica
  Peptide Sequence Number=SeqID_122776
caactgctggagctattgcatctgatgaggacattccgactctgtagatccgagaggatggcttgcaggcagtcgacatggccgaagtaggccgcgtggtgtaggcagctctgcgcgtgcaccgaatcgaacattaagataattaggaccgacaatacgaccgtagaagacaatacaagacgga

SEQ ID NO: 56803 - DNA, 227 bp, Setaria italica
  Peptide Sequence Number=SeqID_122777
actaacttaatttaagactacctaatactaataaaactacaacgaatagaacctaccaactccagacacatgcttggattggatcggatgtccatcttctcccggaaagccggcggtgacggctgcttcggctttaccttgccacatgccggcgctctgctctgctctgctctgcttcacaggtcgtgctcgggcttgtccaggctgccactgtcgcagtcgaccat

SEQ ID NO: 56804 - DNA, 158 bp, Setaria italica
  Peptide Sequence Number=SeqID_122778
taggtacggtttagtaacggtacttgtctttcggtcttttacctttgtcctactattgccggcgctctgctctgctctgctctgcttcacaggtcgtgctcgggcttgtccaggctgccactgtcgcagtcgaccatccggcttgagccgcgcccgat

SEQ ID NO: 56805 - DNA, 217 bp, Setaria italica
  Peptide Sequence Number=SeqID_122779
gattaaacttcaagttattgaaggaagccaagtaatcatgagtgttccaggtgctcactcaaggaaacctccccttgagagtatccttcactgaaatacttcagtgccccttctgtttatagctacactaatccttaacctgcaaaagaattactatcagaatatattccaggtcctaaacctccaaagatgcctcgagcttactactcaacaacta

SEQ ID NO: 56806 - DNA, 230 bp, Setaria italica
  misc_feature (10)..(10): n is a, c, g, or t
  Peptide Sequence Number=SeqID_122780
attacaatanatttttcaggatcctgagatggctcagagatgaggaggaacaacaaaaggaccagaagttagccaaaattgagtttctgattgttaaactatctcgtaagaacatcattttgtctcaaacaaggcagtattctttttataatataaactacaggtagtgattcagaaaattgctttaactctgaacagctgtaattgacatcgacacgagcggaatccac

SEQ ID NO: 56807 - DNA, 178 bp, Setaria italica
  Peptide Sequence Number=SeqID_122781
tgggttgatgcctttctttatgtccttgacaattgaaacaccatgcttgtctgcacgagtgatgtacacaaagaaatggtggctctaggaaccatgaacattgttggttcaatgacttcttgctacgtagccacgggttctttctcacggtcagcagttaattacatggctggctgca

SEQ ID NO: 56808 - DNA, 247 bp, Setaria italica
  Peptide Sequence Number=SeqID_122782
cgctcgcttctgggctgcctacatcgatgacaaggtacgcaacaaatcgctcaaagttccaaacgatcgcataaagcgccttaatttgctgcaagatggtttcgttgaccgatcgggtacgcgtgctgtggacctgcagatgctggccgcttggacccaggcgtcgaggggcaaaacagaggaggatagggctgagggaatgaagcagtctctcgccacggtggagaccctggagggagccctgagg

SEQ ID NO: 56809 - DNA, 240 bp, Setaria italica
  Peptide Sequence Number=SeqID_122783
cctccctcctcaggctccatttccatgactgctttgtcaatgtaactgtcttgactgacttctaatctcttaaccctgagtctctgataatgttctgtagatcgatgcagctctatgttgctgagttaccgaaatggtgtgaaatttcatatatgcagggatgtgatggttcaatacttttggaccgcagcgatggcgagaagtttgcacaacccaacctgaactcagttagagggtacg

SEQ ID NO: 56810 - DNA, 223 bp, Setaria italica
  Peptide Sequence Number=SeqID_122784
gaaagataaaaatgaatgctcttcaccggaaaaccttggaagagtggtccaagcatcgagttgctcagaaaaagggaaattagttgtaagtgataacattttcatcagtgatttaaagcctgtttaaaacatcataaagtggcatatttgtttgggctcattgtgtaagattgtaacattcctgatttcaaataatacaatgtacatggaaaaaaaaaaaaaa

SEQ ID NO: 56811 - DNA, 405 bp, Setaria italica
  Peptide Sequence Number=SeqID_122785
tgcacgtacctatttatcccataataaggaaaaacacatgcacaccaagctctaacagtctctgttcctactggttactcattgttttattgttttcctccattattgttggtcataggtcgtagcacataggatgttcatttatccattttacagtacgatttgaactctttctcgccagttgcgacttaaaggctacaaatgcctgaaatttctttggtcatgcctgttcatgctcttcttgcacattgcagattgcagaagtgggaagtgtactcaggttgtacgtccagtaaagaacaaggcatttcaaagctcatgggtcagttgtgttgccattgatgcaagtgaaagttggctggcttgtggcacgtctagtggtatatcagtttggagtcttctctc

SEQ ID NO: 56812 - DNA, 421 bp, Setaria italica
  misc_feature (153)..(153): n is a, c, g, or t
  Peptide Sequence Number=SeqID_122786
aatgctgcacatcttgattgcgacctgcatgtcttgattcttattcgtatgcagtatttaccttgcgagatatatgctgtcaatttgttgttaaatttattttgagtcattatatatataattggccagatccaggttttttattgtaaattntttcttgtcctcaaacatacgtacgcaaattccggttgtttgacggaatttcttgcatatataaataagaaaatctttgtttctttctcatgcatataattagatgccaggtccaggtaataacagtactactcataactcacctattataccacgtcagtatcttattgttactgctacatttatttttcagtaaaactcatctagttaataattttaattaacttaacggtaagtactaaattagtttttaaaataagacgggaca

SEQ ID NO: 56813 - DNA, 298 bp, Setaria italica
  Peptide Sequence Number=SeqID_122787
caccgaccaccggcgcagccgcgtacgccggagcggaaggaggagcgccgtacgccggctgcggcccgcctccgtaaccgtaggcgccggccgggtaccccaccggcggcgcggcgtacggcggctgggtacgggctcggatcgtggtggtaccgcgggggcggggcctcgcggatggcgacgcgggcgtcgagcttcccctgcggccggcccgagggccgcttgaggcggagagtgcgggagaccttgcccccgaccccggcgtcgtcgaggacgtcgcggagcgggaggcgcgcgg

SEQ ID NO: 56814 - DNA, 283 bp, Setaria italica
  misc_feature (11)..(11): n is a, c, g, or t
  misc_feature (94)..(94): n is a, c, g, or t
  Peptide Sequence Number=SeqID_122788
cttctcatganaaaggatcattgtcatcatctgatgccctaagtacttctcatgaaattcatgtctaaatgaggaatcagatgatgacaatgancctttctcatgagaagtacttagggcatcagaaataaaagttgctacaagagaaaacagaactccataggtgatctgaagctccacacttgtgttttgatttgcatcagctgcacagtctttcaatattgaaaatacatccttaacttccttggggctcattagtttaataagtgcagaaagagcaagg

SEQ ID NO: 56815 - DNA, 371 bp, Setaria italica
  misc_feature (240)..(240): n is a, c, g, or t
  Peptide Sequence Number=SeqID_122789
ggttgatgtgtttctcagttgcaagttgcaattggtgatgagatccggttgcaattgttgatatattcctgctgcaatttcctccaaaatatatgtgatacatatgttgtccttcgtgaataggttgacatcctgtgcttgctaaaattatcagctcccgctgcgtggttatcccaacataaattggtatcaggtcataattactactggaggtgaagaactcacattggccatggaagntagcgccatgtcaagtggagtcatggaggaagatcggatagttctaaattggaaggcagtagaagacagcgtgaacaacgcctcgatggtaaaagcgacttgcaaagctagagtaccgagatggcagcagg

SEQ ID NO: 56816 - DNA, 245 bp, Setaria italica
  Peptide Sequence Number=SeqID_122790
aaggatttatatgagccaattataagagatgaaattcctacaggagtcatggaggaagatcggatagttctaaattggaaggcagtaggtatgattcgtttatacatcaaccataatattttctaccatgttgctaatgacacagatgcattcaagttatcgcaaaattttgagtctatgtatgagcagaagacagcggtgaacaacgcctcgatggtaaagcgacttgcaaagctagagtaccg

SEQ ID NO: 56817 - DNA, 235 bp, Setaria italica
  misc_feature (13)..(13): n is a, c, g, or t
  Peptide Sequence Number=SeqID_122791
gcgagagagcaanagggatgtccgcaaggttgagaagcagcagatcctcatccttggtgcctccaatctgttgttccaccactctttgccttagtgcctccaatctggtgttccaccactctttggtgaggttgacatcctgtgcttgctaaaattatcagctcccgctgcgtggttatcccaacataaattggtatcaggtcataattactactggaggtgaagaactcacatt

SEQ ID NO: 56818 - DNA, 236 bp, Setaria italica
  Peptide Sequence Number=SeqID_122792
gaagaagggagattggagaggagaacttgcgagagagcaagagggattcgtccgcaaggttgagaagcagcagatcctcatccttggtgcctccaatctgttgttccaccactctttgccttagtgcctccaatctggtgttccaccactctttggtgaggtccttccataccctagcttgtagccccaaatcttgttgttgctgtccaagatagtgaaatcttgatgtatgtgaa

SEQ ID NO: 56819 - DNA, 254 bp, Setaria italica
  Peptide Sequence Number=SeqID_122793
cgcacacaacaaacaacaaacaaaatggcatgcgctgcaacgaaaagcaaatggaaaacaaaagtccatagattttgtggaagattttacaaatcaactcgccaatctaataccttctgtgctgattttgaaccaaaccagtgataaatggatgaagcttggacctgaggggtgccattgtcttctgggtgaactctcttcacaacagccttggatctagccactagttcatccacaccttccatcacaggtgg

SEQ ID NO: 56820 - DNA, 411 bp, Setaria italica
  Peptide Sequence Number=SeqID_122794
agatcttcaccagcaagagagacgagaccgcagccagaagaatgatgctcaacatcagaccaggcagggcatgctcgcgttgaacgccatggcttctgcctccgcacttgtcttggaggggagaggagaggagaggagcggaggaggaggaaggcgggggtggtggtgcttacctcggtactactccgtagcatcgccggtgaggaggttccgtccgtcgggtactccgtcagatcatgagagacggaggggcgtcggagggaggagagtggggaggactgaggagcgaggctgcgaggggggaaggagagtggggaggtggatgacgatggacaggaggagatcaggagatcctcagacacacgaaacaggcaggccaggccgaccttccttccgactactcacactgag

SEQ ID NO: 56821 - DNA, 417 bp, Setaria italica
  Peptide Sequence Number=SeqID_122795
agttctttacgtttagtttttttttttttttttttgtaacctaccgaatatggaattgaatgaatctggtcagtgtgtatatatacaaggattgaactacaatgattttcccatctgaacagcactgctcgtttacatcagagcagctcgtctaatgggcaccctgctttccaggttcattcatccatgatgtgatgagtggccaccagataatgtttctgatgatggcaacacaggttcctctgtaggtgggcgatggccgggcttcgggctgaggtcccgccaagctgcgcagccatgcgaaccatctgtcatccggccacaagggcctgtcgatccgaactaatgaagccaactaacaattactaggaatagactagaataataataacaaggtaagaaaggtaaggaaacgaa

SEQ ID NO: 56822 - DNA, 288 bp, Setaria italica
  misc_feature (165)..(165): n is a, c, g, or t
  misc_feature (237)..(237): n is a, c, g, or t
  Peptide Sequence Number=SeqID_122796
tgacaagacaccaaccggaacaagaaatgaaggggcacgagaaacgtacgtgaggatttggagttcctcgaggttgcgcggcaacttgaggaagctgtagtcggagtccggcatggaaaggtagactccgacgagcccggcggcgaaggcggcggcgaccccggngccgagcgcggcctcccacaccgggaacctctcctccctccccatcccctcctcctcctgctcttccccttnaaaaatccggggaccaggcgaggagaagagagagagagaacgagagagaga

SEQ ID NO: 56823 - DNA, 443 bp, Setaria italica
  Peptide Sequence Number=SeqID_122797
ccttcctgctaaatctcaagtaggcagcagctgctatcgttggtgccttcccaagtactcgcacaatttgcttatccctcacctgctggactctttgggtaacaaatcatataaaccaaatcctcgacttgcgcgggctctagatatcctattcattctgcatgcggaacatgaaatgaactgctccacagctgctgttaggcaccttgcttcaagtggtgttgatgtcttcactgctctttctggtggcgttggagctctatatggtccactgcatggtggtgcaaatgaggctgtacttaaaatgttaaatgagattggaagtgtggaaaacattccagatttcatcgaaggtgtaaagaacaggaagaggaagatgtctggttttggccaccgtgtgtataagaactacgatcctcgtgctaagtcatccggaaattggc

SEQ ID NO: 56824 - DNA, 466 bp, Setaria italica
  misc_feature (421)..(421): n is a, c, g, or t
  Peptide Sequence Number=SeqID_122798
cgacttgcgcgggctctagatatcctattcattctgcatgcggaacatgaaatgaactgctccacagctgctgttaggcaccttgcttcaagtggtgttgaagggagaatgggaggccttcctgctaatctcaagtaggcagcagctgctatcgttggtgccttcccaagtactcgcacaatttgcttatccctcacctgcttcgacttataaagatcttgacctctaagagcagggtttgcatcaggatggaagacagaaagggtgctcattgcactggcaaggacacccatggggtgagcatcatggggcattgattgtatgatatccagaagtccttggggaacagcagagtgctgtgaaatagcaaattcccagcttgccagttggctctgagtaggtaaattcccatacattaagnggtatgccacctctacaaatgaactgctttcagccaactcttacg

SEQ ID NO: 56825 - DNA, 351 bp, Setaria italica
  Peptide Sequence Number=SeqID_122799
acttcttgtacatgctggactctttgggtaacaaatcatataaaccaaatcctcgacttgcgcgggctctagatatcctattcattctgcatgcggaacatgaaatgaactgctccacagctgctgttaggcaccttgcttcaaggtaaatcactttctaaattcacctcaaagcagtgagtatggaactgtttcctaatgagatatattatgtctatagtggtgttgatgtcttcactgctctttctggtggcgttggagctctatatggtccactgcatggtggtgcaaatgaggctgtacttaaaatgttaaatgagattggaagtgtaggaaacattccaagtattt

SEQ ID NO: 56826 - DNA, 247 bp, Setaria italica
  Peptide Sequence Number=SeqID_122800
tactgcagtcaggatgttgccattaaagtagtgatgcctgagcgaatcagtgcggatatgtaccaagattttgcacaggaagtgtacattatgagaaaggttcgtcacaggaacgttgtgcagtttatcggtgcctgtacaagacaaccaaacttatatattgtaacagatttcatgtcaggagggagtgtctatgattacctccaataaaaagaacagtgctttcaagcttccagaaattctaaga

SEQ ID NO: 56827 - DNA, 242 bp, Setaria italica
  Peptide Sequence Number=SeqID_122801
aataacataattcaccgtgacctcaagactgtaaatcttctcatggatgaaaacaaggttgtaaaggttgcagattttggtgttgctcgtgtgaaagatcaatctggagtgatgactgcagagactggaacttaccgttggatggcacctgaggtgtacatcgtccacatgcatatttcataagaaagtaatgcctatttgtctgtcctaacaaacagatgctcttgttgaaacttcaggtc

SEQ ID NO: 56828 - DNA, 262 bp, Setaria italica
  Peptide Sequence Number=SeqID_122802
actatatctcattaagtcatcatggatagtccatactgtcagaaaggatgagaaatatgaagacgtacacctgaatccagtgccaacgactgttgtcagaaacactgtaacttatgctcaggaacaaaatactaaaacaggttcggttcacttaagctcagtttcctaatcaaacttcctatctactacacctatctcttactgccttggtatggatcttgatccgtttctgtaactcacttttgttagggtggtttggacg

SEQ ID NO: 56829 - DNA, 371 bp, Setaria italica
  Peptide Sequence Number=SeqID_122803
ctgtacttactcggtgtcggcataaatctgcaaccaccggatcgatatcgccgcaggcgatccatcggattacttaaaaccagcggcggcagcggggttatggctgatcacgacaggcaattaagcggcgacagttccgcgagagatgcagatcgatgctagttgctctgtccttgattatcacgcggatctgccgccgcctgtccggcctactagctcatcaactggtcgatgatcactggtggtgtagtagtatgaaattgtaaagcacatcacatgtagggtttcaggattactcatcactacccagtgcaaagtggttccggcgcatccatcttggagttttcccctacctaatcaaaccggcagtg

SEQ ID NO: 56830 - DNA, 188 bp, Setaria italica
  Peptide Sequence Number=SeqID_122804
tttatataataacaatctactgcatgtcttgattattacacaggcttcctactgaaggatattctgccatatttgactatttatttcattaacaatctactgcatgtcttgattattacacaggcttcctactgaaggctatcttgcatcatggagagtacagacaaggatgagaaaaatcttactgt

SEQ ID NO: 56831 - DNA, 270 bp, Setaria italica
  Peptide Sequence Number=SeqID_122805
tgttggtccctattcggtctattgtcttctattggttctattgggttccgtccgtccctattcttgtccccgtcgtccggggtaagtccggtcaccacccatcatgttaggcctcatcatggcctgttgaggcagcatgccgcccatcggcccaccgacaccgacggcgccgccgcccttcttccccgggcccggctggttcccgccgcccggggcgccacccttcgcattgtgcggctggaccaccgcccccgttcttaccgccgccgt

SEQ ID NO: 56832 - DNA, 249 bp, Setaria italica
  Peptide Sequence Number=SeqID_122806
gtatgatgcgtgggaaggggaggcggtggcatatgaggtgtgggaaggggaagtggtggcgtatgaggtgtgggagggagagcagtcatgtgctacaaaagaaagtgaaggctactgtatacacttctagttcacggcctcccagtgtttctgtccctcctcaaagaatgcatcaggcagtactcaccaggccaatcattaatcagtttgcgcatttacctcagcatatgatcgcccctccgcttttgg

SEQ ID NO: 56833 - DNA, 113 bp, Setaria italica
  Peptide Sequence Number=SeqID_122807
tccgaactgtcttttggtcattgtgccaagtaaggctgccaaacgtgtaatccccttgtaacctccacagatctgaagcaccccattactgtatcaagaacggtcacaaacgt

SEQ ID NO: 56834 - DNA, 380 bp, Setaria italica
  Peptide Sequence Number=SeqID_122808
ggatgaaagaaactaggccgtcaagacgaaaatgtcttgtctgtctaggtgctgtaacattgatcagtgcaacaggaccaacaattagtacaccaaacggactcgctgcggatatgatgaacaagcctgggatacagaaagctgtttgcagaaattgtaatggtagcggtgctgtgatatgtaagggcctcacatcacttgatcgctttgtgtgttccttgttgatgctgaatgacttatcagttctagactccataagattcacgttcttgaaaatcgctacagtcctatcaaatagagaatcctccttcaataggaaatagaactatataatacaatagttttgttgattgaaatagactaacagtacacagtatgcc

SEQ ID NO: 56835 - DNA, 251 bp, Setaria italica
  Peptide Sequence Number=SeqID_122809
ttcctttttcttggagtggattcattttcagctggattcaggtgatatgtgtggtggcacaggaaaatggaaagccctcaaccgaaagagggcaaaagatgtttacgaattcacagagtgcccgaattgctacggtacgcttgtgccttccatcgtcatttgattatggatgcatatggtttctgctcttctggtccatcgagcgattttagtttgatcatgcagaagatagtttagttagtttcaaatgc

SEQ ID NO: 56836 - DNA, 252 bp, Setaria italica
  Peptide Sequence Number=SeqID_122810
tatagttggaacctattgggcagattccccaagatccatgcttccaatctaccaagaactgatagcagctggtatgaagatatgggttttcagtggggatacagatgctgtagttcctgtaactgcaacaaggttggaggttggagtcaagtttacaaaggattaactctcgtaactatagcaggtgcaggacatgaagtcccgctgcaccggcctcgacaagctttgataatgttcagacactttttgaag

SEQ ID NO: 56837 - DNA, 197 bp, Setaria italica
  Peptide Sequence Number=SeqID_122811
ctctgaccaactgccttgctgtaattactgttcttgctccagatgaagttctagcgtattaatgtcgcatcgcatgcatatgggtgtttcagggcattgtgacgtcgagcatagcgtactacgtgcaaggcctggtgatccagaagaccgggccggtgttcgcgtcggcgttcagccccctgatgatgatcatcgtg

SEQ ID NO: 56838 - DNA, 494 bp, Setaria italica
  Peptide Sequence Number=SeqID_122812
ttgaacttggtgaattctgacatgtgcgtagcgtaggcttgcactgaggacacatcatgtgcagagaaagttgtctgtttccgtacgcacctgtgtcatggtggggcgccacgccgcggcggccctgacgcagagcgacgcgacgaacatgagccgcctcagctgcccggcgtcgtagccgtcgccgagccgcgggtccacgagcccttgcacgacgccgtcgctcaggtaaggcttggcccacgcgatgaggctcttgtgggagccgtccaccggcttgcgcccggagatgagctcgaggaggaagacgccgaaggcgaacacgttccgttcttctcgtccacgatgccgtgcgtgaagtactccggcgccaggcacccgaacgtgccctcgatgggcgcgatggcgtggtgcgtccactccgacggcagccaccgggcgaggccgaagtccgaaatctgaggctcgtagtcggcggtgaggaggatgtttgg

SEQ ID NO: 56839 - DNA, 208 bp, Setaria italica
  Peptide Sequence Number=SeqID_122813
gtggtctcctccgccgaggccgccagggaggtgatgaagacccacgacctcgccttctgcagccgccacctgagcgccaccatcggcatcatcagctgcggcggcaaggacatcatcttctccaactacaacgagcgctggcgcgagctccgcaagctgtgcatgctcgagctcttcagccagcgccgcgtgctctccttccgccccg

SEQ ID NO: 56840 - DNA, 151 bp, Setaria italica
  misc_feature (3)..(3): n is a, c, g, or t
  Peptide Sequence Number=SeqID_122814
gcntaacagtactgttcaggaggcttccaccaaatggtagccacactgcaactactcaccggcacatgctcaacctcagggttctggcacaagatctcgatgtcccgcagcttggagaagtagaaatctctctccttctccaggctatcaa

SEQ ID NO: 56841 - DNA, 240 bp, Setaria italica
  Peptide Sequence Number=SeqID_122815
gccgacggccgctgggtcgacgtccagcccctcgagaacgccatcgtcatcaacaccggcgaccagatcgaggtgagagaggatatattcttccagtattatattgccgttgaatgggacggtggacttgttgtggagctcgcgttgattagatcgcacttgattagtggcgagcagttgaattatggcctctaagtgcttgcttaatgacggctaatgcttagcgcccacgagagcctg

SEQ ID NO: 56842 - DNA, 315 bp, Setaria italica
  Peptide Sequence Number=SeqID_122816
gtgctggtctttagttacttctcacctataattttaatgttccattcattctaattattgtcatcttcttgtttggtttaaaagctctgaaaaactggaagagtctctggaatcagatgctggaaagaaatataattcaggagataaaataacaagtggttctaaatggacgagaacaaaccagaagtgaagcaatagattagctttagttctgaagtattgatgtcgcatccatttgctacatagatttggtgagatctactctcggagatgccatgcagtttttctacataccattatatttgttttttctta

SEQ ID NO: 56843 - DNA, 237 bp, Setaria italica
  Peptide Sequence Number=SeqID_122817
atgactccgctagggaagaagaagaaagacatatcgattgcaattgatagtgaagatgatctttccaatgtcaacgccaagaacatcatgaacccgacattcgagcaacttcctaaagaggtccgccagatgctggaggagcgcaagaagaagcgcgatgcagaggacttgcaagcggcgattgcgagttttgaagttgatcgaagaggcacggtcaagaagattaaggagatcgta

SEQ ID NO: 56844 - DNA, 237 bp, Setaria italica
  Peptide Sequence Number=SeqID_122818
tgctggaccttctgtcaggtttcatactctggtttacggcacatgctatgaaaagaccgaacaagtacagctatccgattggaagaggcgcatgcagccagtgaacatcatgaacccgacattcgagcaacttcctaaagaggtccgccagatgctggaggagcgcaagaagaagcgcgatgcagaggacttgcaagcgggcgattgcgtagttttgaagtttgatcgaagaggcac

SEQ ID NO: 56845 - DNA, 450 bp, Setaria italica
  Peptide Sequence Number=SeqID_122819
ccaaagacggataactgctgctgttcatattaactccgtttcagcttgggattctgcacctgcatccagattttgcccatgtttttcagctcaacgcttgcaggatatgttggcgacgacgaagcgaacgctagcactttcgattctgaaggctggcttaagactggggacctttgctacgtcgatcaggacgggttcctgttcgtggtggataggctgaaagagctcatcaagtacaagggctaccaggttccacctgccgagctggagcttgtcctgcaaacattgccagaagttgtcgaagctgcagtcatgccgtatcctcatgaggaggcagggcagataccgatagcgcttgttgtgaggaaacctggaagcaaggtcaccgaggctcaagtcatggaccatgtcgcgaagcgggtatcttcgtataagaagatccgcaaggtg

SEQ ID NO: 56846 - DNA, 223 bp, Setaria italica
  misc_feature (217)..(217): n is a, c, g, or t
  Peptide Sequence Number=SeqID_122820
ttgacatactagaacaaagactgccgactagcaggcacacaagtggtctgactgctcaattattatccgcagggttcttggcaggaataaaagtttaactgtatttgcaggtatcctgatgaggaggcagggcagataccgatagcgcttgttgtgaggcaacctggaagcaaggtcaccgaggctcaagtcatggaccacgtcgcgaagcgggtancttcgt

SEQ ID NO: 56847 - DNA, 128 bp, Setaria italica
  Peptide Sequence Number=SeqID_122821
gagatgccaccggccgtgtttcggtagaacgtagaggtgaagattgtggatcacataactggatatgttggcgacgacgaagcgaacgctagcactttcgattctgaaggctggcttaagactgggga

SEQ ID NO: 56848 - DNA, 230 bp, Setaria italica
  Peptide Sequence Number=SeqID_122822
ccttgcataaagcatggatcaataagttaatctccacagttgtggggaagaaacccttctgcaacatctgcaccaccacatcacatgattcctttaatttcccttccctcctaaatccatgcataacaacactgtatgtgatatcacttggagtccaccattcctcttcgctacttgtttaaacaaattacccaatagacttactagaaagtacttacccgaactttaga

SEQ ID NO: 56849 - DNA, 430 bp, Setaria italica
  Peptide Sequence Number=SeqID_122823
ccttggttaaactgagcagcaaggctgcttgatcctggatccgctccatagatagcaaaatgtctgtcttgtgaaagcatcatttgttgggatagaatctgctcaatgtcaaagccaagctcagggttgacagttgcaagtttcattgacaagaactcgacttgtcgttgcaatgactgcacatagttgataatctcatcaagcatgactgccttgccagtgatctgttagaaagaaagctgtaatgtgtagagtacaggagtctgagagaagttgcctgcaccaaaccaaaggagttaccttactgcatccaggaacaagatcttgaagaagtttcattctctcacttatcttttttctcctcagtctttctgcaaggctgtggctgttagtggcttggcctcgctttgcccgaatatgaacataatcc

SEQ ID NO: 56850 - DNA, 239 bp, Setaria italica
  Peptide Sequence Number=SeqID_122824
tgcccggtaagcctcgcagacggcctctttcatcagcttgtagtccctgtcctgcgcagccgctgatcagcagaagctcatgttagaaacccgtgtaaaactaaaagagccctgcagagaattgtgcaaaggctggggactgtaaaaaggacagggatcgaaactccttttggtgattaggaaagattcttcatgagaagtgattacgtggtggctgtattaaaattttaaggtaactt

SEQ ID NO: 56851 - DNA, 259 bp, Setaria italica
  Peptide Sequence Number=SeqID_122825
ccaaggttacaaggcagattttcgacagtataattgaagcgaaatgaatgctgatacagagaatgctgataaatcaagtaagaagaagaaggatagaagacttaaagtgaataaggatctattggaagatgaacggttcaaagaaatgtttgagaataaggatttccaaattgatgaagaatcaagggaataccttgcacttctattccttctaagttaggtaccttaccttaaaggttaagttaccccgttaccctta

SEQ ID NO: 56852 - DNA, 403 bp, Setaria italica
  misc_feature (341)..(403): n is a, c, g, or t
  Peptide Sequence Number=SeqID_122826
acgtagtaataataaaagaacgaagaacgaagaagaatacaagacttgcagcggaagcactcttgagattcaacctaacagcgttgggccctagcagtgttttagcttctaatttcccccctggtgtaatcattctttgaacaaaatgtgaagagcaccacgcatggcgtttggttacgccatcgcctgtttatctgcaagatcgcacgcaacgaaatgtggtgcctgccgtatatgctcaatcagacccttatcctctcaagcgagagggaagacctgtaatatcatttgtattgccattatatttgtagctgatatatgtatatttaagaataaccctnnnnnnnnnnnnnnnnnnnnnnnnnnnnnnnnnnnnnnnnnnnnnnnnnnnnnnnnnnnnnnn

SEQ ID NO: 56853 - DNA, 245 bp, Setaria italica
  Peptide Sequence Number=SeqID_122827
cggtacatgatgcgggcgttggggtacttggactggaggctggcgatctggatcttgtgccgggttgcaacaaggtggttggcaaggcagtcatgctggatgaaatcataaactatgtgcagtccttgcaacggcaagtcgagttcctgtccatgaaattggccactgtgaatccccagctggacttcaacaatttgcctaacctccttcctaaagatatacagcagtcctgcggcccgttgcag

SEQ ID NO: 56854 - DNA, 392 bp, Setaria italica
  Peptide Sequence Number=SeqID_122828
tgggcggctcggggggcttcgatgtgtctttcccctgcttcttgccgcccaaggactacatccatgtccgggcgaggcgcggtgaggcgacagacagccacagcctcgctgagagggtgagaagagaaaagatcagccagaggatgaagctgctgcaggatcttgtgccgggttgcaacaaggtggttggcaaggcagtcatgctggatgaaatcataaactatgtgcagtccttgcaacggcaagtcgagttcctgtccatgaaattggccactgtgaatccccagctggacttcaacaatttgcctaacctccttcctaaagatatacagcagtcctgcggcccgttgcagaactcgcatttcccactggagacctcaggtgcaccgctg

SEQ ID NO: 56855 - DNA, 209 bp, Setaria italica
  Peptide Sequence Number=SeqID_122829
aacgaaacgaaccgaacctaacgaacaaggttagggaactttactaggacaagatgatctccaaagtgtagttcacatggatatcgggcaaaatcaggaaattgcggccacctcctcaaacagctacaatggttcgttgcaaacagtccacatgaaaatggagctttgacatagctgaaattcagtccaaagctcggatcccgtgtaat

SEQ ID NO: 56856 - DNA, 220 bp, Setaria italica
  Peptide Sequence Number=SeqID_122830
acagctcgccgctcatgacggaggacatctccaccaagcacccctggttcatgcagtgcacggagcagcgcaggaagctcttcctcaagagcttcgcctacatcgtcaccgtcggcatggtcatcgcctacatggtcggcctcaacatgtcgtggaccgccatcaccaccaccatcgacctctcagctcagacaccaaagaacagaacagaaacctagcc

SEQ ID NO: 56857 - DNA, 218 bp, Setaria italica
  Peptide Sequence Number=SeqID_122831
ggctgatgacgtggaagatgatcatgagcacggcgctgagcagggcacctacctcaagaacgccggcatgttcaagcacctgggcacgctgctcgcctggaagagccagggaggccgcgacctgctctgccgcgtctgcatcgtcaccgcgctcgccagcgccctcttcaccaacgacacctgctgtgtcgtcctcaccgagttcgtgctcgagctcg

SEQ ID NO: 56858 - DNA, 268 bp, Setaria italica
  Peptide Sequence Number=SeqID_122832
agaaggaggccaacgggcaacgacgaggttagcatgacgctgaacatctcagcggacctttcgtctctgttcacatggaacacaaaacaggtgtttgttttttgtggcggctgagtatgagacttcacaaaatgctttgaatcaagtttccctttgggatggaattatacctgcaaaggagctattgtcctaagttttttgtattcctattacctacttaaacttaagtttacttagtttattttttatttttgttaccttaggggtt

SEQ ID NO: 56859 - DNA, 445 bp, Setaria italica
  Peptide Sequence Number=SeqID_122833
aataaaacatgatgatttcttgacacttttgggatgaggaaacctcgccaagactcaccacagatggccaacttataacattctctccaccaattgtttcaatggagggttcttcagatgaaattttttggcaagtggcacaagagcagacatatttatgccatagacatcacaccagaaatcaacactgccttcatatctttcaggatttgttatgggagccatgaagagcgtagcatgagaaggaagaataagacccccaggtttaagccatttatctcttgcaaataggacgcttggcagcatactctcatacagaagcatatagcccatccattctgatattattacatcaaccttttcctcaaggtcaacatcctcaacacgtccatggatgactacaacctgatcagttaggttgtttgcttttacaatttcacgagcc

SEQ ID NO: 56860 - DNA, 214 bp, Setaria italica
  Peptide Sequence Number=SeqID_122834
caagacacagcaagtcagcaaccggagctcatctcgatctcggtcagccatgacgaacggctacctcttccgggagtacatcggcgcgcagttcaccggcgtgcggttctccgacgtgcccatcaacgccttcgtcagcttccacttcatcctctccttcgccatcgactacacaccggtgaaccagcagcccacaccggtgccgacgaacggc

SEQ ID NO: 56861 - DNA, 144 bp, Setaria italica
  Peptide Sequence Number=SeqID_122835
agcggacagctcccaagaagagcagctacggcttcaagtacgagatccaggggcagcagatcattgccaaccattgatctgtgatcggatggcgcctctactcttgtcttgtccttattggttatttggttaacttaacttaaa

SEQ ID NO: 56862 - DNA, 366 bp, Setaria italica
  Peptide Sequence Number=SeqID_122836
ttgtcagcgccttttcatcaaatgagcagacatatgagtcactgataagttgaataacatgagtccagtccagtgcagatacttgggaggtcaacagggtccagtttccattgtttttgttaggctgagaagcaccgagtaacagtatgcagtagctaactgatgaaacttataaatataccatcacaccgtggttgaatcacacctaagcactggcttatcttcaaaactcctgcatggacaaaaataattacactgaacactgtaaaaaaatgatgcaataagacagtatgactacagagtttcatattgacaatgtttggaacacgtgttgctccaagttcattgcaacgcaacacaaaggtg

SEQ ID NO: 56863 - DNA, 242 bp, Setaria italica
  Peptide Sequence Number=SeqID_122837
agagccacccgctgcacctgcacggcttcgacttcttcgtggtcggccagggcttcggcaactatgactcgtccaaggacccggccaagttcaacctggtcgacccggtgcaaaggaacaccgtcggcgtgccggccggtggctgggtagccatcaggttcttcgccgataatcccggtgtctggttcatgcactgccattcttggtaggttgtctactacgtagtctttgggggtttgtaa

SEQ ID NO: 56864 - DNA, 264 bp, Setaria italica
  Peptide Sequence Number=SeqID_122838
tggtgaaggacacgttgttcatggacgcggcgaacctggtgccattgggccccaacgtctccgacgcctacaccttcaacggcctgccgggaccgacctacaacgcctgctcggccggcgacacgttcaggctgcgggtgcgtcccgggcgcacctacatgctgcggctcgtcaacgcggcgctcaacgacgagctcttcttcgcggtggccaaccacacgctcacggtggtcggggcggacgccagctacgtcaagccgttca

SEQ ID NO: 56865 - DNA, 198 bp, Setaria italica
  Peptide Sequence Number=SeqID_122839
ggtatgttcaagaaaacacttaatttacctagattcatactcaatggttggtattgtacattgcttggttgtttatgaatgataaacttgtattttctatcaggaacacccagacataagtaaaactgacaagaagaagatttgcagtctggtggatgtcaagaagctctccacagatgcatcgatgcacgccacgca

SEQ ID NO: 56866 - DNA, 243 bp, Setaria italica
  Peptide Sequence Number=SeqID_122840
aagggtaccgagtattagatagaagtgatacataggtgttttatgttcggtgtgtttgtaactaaacatgatttgctttcaccagatacgaatttcagatgcaatatggatcaattggctggtcagtgggtgcaactttgggatatgcccaggctgctaaggataagcgtgtcattgcatgtattggagatggcagttttcaggtacaaaacaatcaaagttatgctatccatatgaatttct

SEQ ID NO: 56867 - DNA, 419 bp, Setaria italica
  Peptide Sequence Number=SeqID_122841
cattggtaccagtcactccatgacggtaaagttccaccaaatgcagctgcaatcattgcagcccttcccatctgtgcgtatgaagctccaggttgttggaaggcatagagaccagctggatcaggataaccttgctgagaggtcctaggacgttgttctgtaggcaatgatggatttgtaaaatccctagaccggtcattgttgtagtggacttgcagttcgctgaggtttgaatattgaatgtctagctggcagcaaccatcatatatgtttcttccatgcaaagaaccaaatgcttcgacagcttcttggcgcgagtgatactggataagagcttgaaaacctgcatcaagtaagaaaagtatgaagaaccttaaagatgacaaatttgcttatatctggcaggaaatgaatgtgtg

SEQ ID NO: 56868 - DNA, 405 bp, Setaria italica
  Peptide Sequence Number=SeqID_122842
tgtcacggaggcatgtatgtcttccatctgcagaagagcttggttcttggcacgcagcatgacgatcttggataccagcccaaacggctgcagcagctggagtaaatcagactcggcaatctcgtgcccgacgttgcggatgtggattaccttggacggctcagccatcctcccgcactgtaacacatgcagcagttactaatcaacaccaggggggcacccagtatagaacatgggtgtacacatgcagacccgataatttttgccaaaaaaatcgaagttagaaggtataatacatgtatataatcgtaacagcgtcagatccaaatacacatagcttacattagggtttgggtgctccgctgcgcacagcaagaagggaaggggggaggggggggcgacgat

SEQ ID NO: 56869 - DNA, 197 bp, Setaria italica
  misc_feature (23)..(23): n is a, c, g, or t
  Peptide Sequence Number=SeqID_122843
catagagaccagctggatcaggntaaccttgctgagaggtcctaggacgttgttctgtaggcaatgatggatttgtaaaatccctagaccggtcattgttgtagtggacttgcagttcgctgaggtttgaatatatgatggttgctgccagctagacattcaatattcaaacctcagtggacttgcagttcgctgag

SEQ ID NO: 56870 - DNA, 249 bp, Setaria italica
  Peptide Sequence Number=SeqID_122844
aagagcttggttctttggcacgcagcatgacgatcttggataccagcccaaacggctgcagcagctggagtaaatcagactcggcaatctcgtgcccgacgttgcggatgtggattaccttggacggctcagccatcctcccgcactgtaacacatgcagcagttactggtgggtgatcgtcgccggcgaagggcccggtacagtcgagggaagggcgccgccgctcgcccagtcgtcgccgccaaggg

SEQ ID NO: 56871 - DNA, 241 bp, Setaria italica
  Peptide Sequence Number=SeqID_122845
taggcaatgatggatttgtaaaatccctagaccggtcattgttgtagtggacttgcagttcgctgaggctggatattcgagaatggaaaacaagaagaaattaagctatagaaagtgaggaagacaaatttcaaatatgataggatgctcatactttgaatattgaatgtctagctggcagcaaccatcatatatgtttcttccatgcaaagaaccaaatgcttcgacagcttcttggcgc

SEQ ID NO: 56872 - DNA, 207 bp, Setaria italica
  Peptide Sequence Number=SeqID_122846
ccattcacatgcaatctataagtgaatcagaaaatgtatatcaggtgaacgtgtgcgtggtgaaagagagagagagcaggaaaatctgaccagctgacttttgaaatgtgactatcttctccacaaatccataagctttgaatacttgatgtagaacctccaccgttataggatagatcatgtggtggatagtaactaagaggattc

SEQ ID NO: 56873 - DNA, 247 bp, Setaria italica
  Peptide Sequence Number=SeqID_122847
ctcgcaagggccaagagagcggcttaagacctttccctggaagagcggcttatatactctgcatctgggagaacgagatccggatcgtgttcccctccagtgtgctggcgtgtttcgacacgagggcctcggtcgcctcctcttccgtctcaaacatgacaagtagtccttgtccttctttgtccgtttcttacctttcgttaacttagttcttttttgttttgtttttgtttattttgtttacttt

SEQ ID NO: 56874 - DNA, 239 bp, Setaria italica
  Peptide Sequence Number=SeqID_122848
cacacgttactacattgaaatatattgtctgaagaaatctgaacagtaacattatgttgccttcatgcagaaaatggttatggccttgtcaaaagataaggctgtatggcatgctgtgatggagaacgaggtggtacaagaattcaagagatccttccaggatgccaaggaaactgatctcaatggacggtctactgctcctcctggattcatgatgtgggtcctggaaaacacccaag

SEQ ID NO: 56875 - DNA, 208 bp, Setaria italica
  Peptide Sequence Number=SeqID_122849
ccgtcggggtagaggtcgtggacggaggtggcgtcctcgttcagcctgctcaccttctccaggcagtcgatctcccccggctccaccagcaggctgctgttgatgccgtccttccacgcgataagctgcgcggatcccatggagttggtgctgtagagcctggcaccgtcaccgagagctactgggaggtggacgatctcccccggct

SEQ ID NO: 56876 - DNA, 336 bp, Setaria italica
  Peptide Sequence Number=SeqID_122850
tcagtttgagcctaaaaatttggaattacacttatagctacattcatgagtttcatgactgtttagtcagtgagacagtatgcctgcaactgttttgttgattatgtgcattctccttgatggattttttcagataaaagcaacatggttactaatcttactcccctatctaagctcttgttttctgtttgatgatctagatttaatcagttgtgcacttgtttgctgcgacattggtaggccattccagggatgcttctagcccttgtactcttcttcgacaaccggaagcacaaagatgtgaacgttccatcagatgtgtcttcttcaaagcgg

SEQ ID NO: 56877 - DNA, 303 bp, Setaria italica
  Peptide Sequence Number=SeqID_122851
tttttttggttagttcttaaatttgttttatttggtttctttcttagttttgttcctacttcagaaggcatctaatcctgttcatacagtagcaaaacaagcttagtctgcctgggttgcagttaattacaaagaagctggagcttccagtcaagctagtttcccgaggaattgtgggtgggattgttccaggaagcagtcctggtgattacatgatgcttggccttggagacatgatttaatcagttgtgcacttgtttgctgcgacattggtaggccattccagggatgcttcagcccttg

SEQ ID NO: 56878 - DNA, 263 bp, Setaria italica
  Peptide Sequence Number=SeqID_122852
ctcctcttctctgcgcccaagagaagagaaaaaactaatcgcgattagttgacgtgatttgaggaggaggaggaggggattattaaccgatactagtttcttggattatcctgtggatcgataggcgcaggcgcgtggcgatgatgcggcagggggccaggaatttcgcgaggaggttctcccggctcgccgcggcggccgagacggcgttcgaccacgtgccgctgccctacgacgggccgagcgccgccgagatcgcccgc

SEQ ID NO: 56879 - DNA, 324 bp, Setaria italica
  Peptide Sequence Number=SeqID_122853
agagtctaccatccgcaggcgtaatctccagacaaagactgggatgacatcttctgctgaaagtatcactgagagcctccgacggtctcgccagatgatggttcaggaagtggaaagaagtgcaagtaccttggcaacatttgatgaatcaacaagtgttcttcggaaggctgaaggtgaatatcaaggacaccgctctttgctgtcgcggacccgtggtttgctctccacgatgcaacggcaagatgttcttgataggtaggtaccctctggcgtaactggtcgtatagcctgcattcttgttttacagtcaagccatttaac

SEQ ID NO: 56880 - DNA, 456 bp, Setaria italica
  Peptide Sequence Number=SeqID_122854
atgtctcagaaggcactaactgcagcccgaccaaatgcttcagctgatataattcgtcacatctgttccctgattggttcaacctacccaacgtaaaacttatttagacactacaattcatggcatgaatgcattctgtattcttgtttgagcacagcataaaggcatcttgtcttgatgtggaaaatgaaaatctaatacctttcataattaacttgaatgataacagagtgatttgggcccaaaaatatcgggaactagtgcctccagcaacactgatatggtgaaggtagaacgtctccatagctggcgtggacacagcatatgatgaccaaactatacatccttgacactcacatagccctgtacccttgattagatgattgatttagcttctccatgaaaactgcaaactgcaatgctcttgatctcattttccataagtgatctcactat

SEQ ID NO: 56881 - DNA, 397 bp, Setaria italica
  Peptide Sequence Number=SeqID_122855
ttctagcagtctcacatctgcagttcatgaaatttttggtgatgagaaattgatggcagacatgtctcagaaggcactaactgcagcccgaccaaatgcttcagctgatataattcgtcacatctgttccctgattggttcaacctacccaacgtaaaacttatttagacactacaattcatggcatgaatgcattctgtattcttgtttgagcacagcataaaggcatcttgtcttgatgtggaaaatgaaaatctaatacctttcataattaacttgaatgataacagagtgatttgggcccaaaaaatatcgggaactagtgcctccaggtagctttctattgtctctgaccttcttaatattttctttgttcatgtaaatgtcttcataaatg

SEQ ID NO: 56882 - DNA, 322 bp, Setaria italica
  Peptide Sequence Number=SeqID_122856
cattgtacaaggatcacacagttctagttttgtttattctataacttatccgttttctaaatcattcagtcgattggattgctacatataattcttctaatctgcattgcttgttctaggattcatgctatgattccaacgtgataaacagttttcatgtatatcaatgccatgtatttctgcgttgcatctgtttaatactctgtgtaccagagtgattctcatattttgaattgatccttcttgtgaagatttttgcatgaactggaaatggcatatgctgcttctgatgttgtaatttctcgagctggtgcaatgaaca

SEQ ID NO: 56883 - DNA, 225 bp, Setaria italica
  Peptide Sequence Number=SeqID_122857
attgacgtggacctctcatctattttcaacgttgaatttaacgaattgtcagcttctaagcgcgcgtatatatgtatttaccctgcgaagatggacgtaatgcaaaccgcggaaccaaccgccaacccggccaactcacccacctgcatccacgacagcacaaggagaacacgtcaggttgggttcacaacgaagaaaaaaaaaacttaacagctcgctgtgcct

SEQ ID NO: 56884 - DNA, 317 bp, Setaria italica
  Peptide Sequence Number=SeqID_122858
tccgactcagtctatactatttcttacttggatatttctcaagaccaagtacgggctcaggaagttctttggcgtgggagtttgtgtggctggccttatactggttgtattttcagatgtccatgcctctgaccgagctagtaagaatatgcttctcccaagctattttgagtcccattcaatataacaatatatacattttctttcagcaaatgtttcatgaactctgtcctggacataagtaaaattgttcgatttttgtccttaaaattcaagagcataacatctattacgttctgaaatgcctcgcagaagga

SEQ ID NO: 56885 - DNA, 274 bp, Setaria italica
  Peptide Sequence Number=SeqID_122859
atttaataatcaaacaaatagtgcatttgtagaaagaaacaaacgtatggaaaagtctgctgctatgtcttacctttttcatagaatgtaactcccgtccaaaaggctctaggaacttcaaatctatatcaaggggccaaacctgcataaagaaaaaaggtatttaataatgtataacaaatttatagttcatcaaatgtaaaaggctggacaggcaatgtattccagtactcaaacaccataatatgaactgatttatagaatgtattttgca

SEQ ID NO: 56886 - DNA, 248 bp, Setaria italica
  Peptide Sequence Number=SeqID_122860
atcacgaaacagccttaagaccatcgaataactaatatctacaccgatcacatatgaatcacggtggaatttctaacatactaggagcaagatgtaccttgaggcccatgagccttagtggcgcctgctgcccgggtacgatgcactctggcccggctgcctcagcgaacgcctccatggccagcccctccccgatcggatccggatgctgcggagaaaccaaccagcctccagaattagcctcccca

SEQ ID NO: 56887 - DNA, 256 bp, Setaria italica
  Peptide Sequence Number=SeqID_122861
gttaacgccgagcaaccatacaccgtgcctaccatgccgggtggaggaagaaaagatgccgccgccggcgaagctattcacgtcgtgatgctcccctggctcgccttcggccatatcagcccgttcgcgcagctggcgcggaagctggtctccgtcgagggcgcgcacatccgcgtgacgttcctgacggccgacgggaacctgccgcgcgtgcaggccatgctggcgccggccgccggcgcggcggccgtcgtcg

SEQ ID NO: 56888 - DNA, 347 bp, Setaria italica
  Peptide Sequence Number=SeqID_122862
tacaacagctagcatagcagtcctcaggatatatccatcatgataatctagcatgactgaagggaaatcacaatgcaatttttgtttcgttctcatgattgcacttgtattcatatatttatacctacctagtctgttataattatcttatattttcccacattcaaacccttatggattattttatatttttcatgtccattgttccagtcaatgcttgttttcttcaatccggtgaaatttggggtaacattcacccttggcaacttgatggcccttggaaggtctgtttcacaagctgtcaaaattctgcttaacatatatttgttctgctttggatctttggg

SEQ ID NO: 56889 - DNA, 375 bp, Setaria italica
  Peptide Sequence Number=SeqID_122863
tatctcattatggaatgtgcattgtattgttggtcaaacctctttgcatcacaactaaccatgattggcatgtttaatcaggagcacatggccttaaatctgatgtccgtgacatcacaaatcacattgagaacctctcattgagtgaacttctcgatggtacttacaagtattccagcttaggaagagataaaggaaagaaggtattgcgtacgaaagatgaactcctagtctctgtcagaaaagcgttttctatgctttcagatatggactattgcaatggaaaagatgctaatctcatcctgagccctaaacttccttctgcaagcacttctagctatgacatcaaagagcaatgtggtgacaagccacccc

SEQ ID NO: 56890 - DNA, 417 bp, Setaria italica
  misc_feature (392)..(392): n is a, c, g, or t
  Peptide Sequence Number=SeqID_122864
tgtgatgggcgatataatttatgtggcatggaatcaacttccggatcactcgtacaaaatattcactcaagaaaaattgggagtgagaatggttctcagcaactgcaatccctggaccatggtgactcttcagatggtttccagaagcatgacagtgaacattctcttttaaaaaacaccgcaagtatcgccaaagatacagcgcgctgctgagatcttatgtgatatgagaagaagcactgaatcatggggttgctttgtatcaagcataagacctcgctcggacctgacaggagaggcaccatcttcaataggcacaggccaccttatagtccccttactagggttattcaagcgtgcagatcattcttcctgtcaactatttctggtanagtgattgctcccattccaagttgc

SEQ ID NO: 56891 - DNA, 325 bp, Setaria italica
  Peptide Sequence Number=SeqID_122865
ctgaaatcctctttatgtacatgtgcttttgagcaaagtgtatcgctattcaaggtaaggttgggacgacatctccaggaatgcagaaaggcacgagacaggcaagcagaacgagcagcatcacgtagtggcataagggaatgtatgtggcacaagatgtcctgaatgcttaaacaaaccaatgcccaggagatggaatcaaataatttgacagacgcagtgtaagatagatgtaaaacttcataactctggaagttcgggacagcttgggaatcaccatcttctcttgttgataggtcgtagtccttttcgttattctactgga

SEQ ID NO: 56892 - DNA, 208 bp, Setaria italica
  Peptide Sequence Number=SeqID_122866
aattcttgggaactggattgcatgaaacaaacagaagtgctacaaagtcaatggagcatctaaatgatcttttccctaataaaattatcattgaacttccccagaatgaagcacagctatcaaatttgaagaaacaactagaacgcgacactgaaacccttaaagctaaagccaatgttcttaatattcataagtttctgaccagcag

SEQ ID NO: 56893 - DNA, 232 bp, Setaria italica
  Peptide Sequence Number=SeqID_122867
tcctgaatcctctgaaacgctatagcataatccaagctgaaatgctgtaattcatggtgtttcgcagctaatgatcgccaggtcgggaaagcagacgagaggtgacttacagatacacgagctggctgagctggccgatgctgttgctgagcgtgccctgaatgttgacacttgacagcctcagcgattggaccctgccgttgctgcactcgaccccgtcccaacccccgtc

SEQ ID NO: 56894 - DNA, 265 bp, Setaria italica
  Peptide Sequence Number=SeqID_122868
gtgtttctgaattggttgggcggagaaaagaagcaaatttttgttggctcttggggttgagtttgcagggttcaaactcgtgatcattggaacatcgaggagtcgaggtacatttgctcaggctggtggtgtatgctataatgttctcctgctggacgctgcagtagggttttccagaaaaatccgggtccacgctgcacaccgggttcccggatagcctgtatggagatttagcatacatgaaatgaggtgtttctgaattggg

SEQ ID NO: 56895 - DNA, 236 bp, Setaria italica
  Peptide Sequence Number=SeqID_122869
attcgaggaccagctcgacgggaagctcgtccattggctcttgagggaattgagcgcggaagcatcttgaggattgatggcgcagaaggccgccggaacgccggccgtggaggaggcggcgagggcggccatctctgctctgctgctggtgcggatgcgtccggcgcgcgcgcttggcgtgggtggagctgaggagaaagagacgacgtaccttcttgggtattcgggtcggtcgt

SEQ ID NO: 56896 - DNA, 220 bp, Setaria italica
  Peptide Sequence Number=SeqID_122870
agctagtggagatagaactgggtggggtgcagttgttgtagcacaacttgttgctcttattgtagctggtactgtccaccgcgtctgtatcacaacatgcttcctattttccgctggactcctttacgaggttgacaagctctccggcatgatcctcgcgaggagtgagtccgaaggagggtgttggactgcggagatttcgcttttcgatctacaaacg

SEQ ID NO: 56897 - DNA, 177 bp, Setaria italica
  Peptide Sequence Number=SeqID_122871
caacccccgtccgcaggggtcgctattcgaggaccagctcgacgggaagctcgtccattggctcttgagggaattgagcgcggaagcatcttgaggattgatggcgcagaaggccgccggaacgccggccgccagcagcaccagcaccagcatcaccagcggcggcgtgggccgccg

SEQ ID NO: 56898 - DNA, 371 bp, Setaria italica
  Peptide Sequence Number=SeqID_122872
accacgacgaccgcgtggtgccgtcgcacacgctcaagttcctcgcggtacgtacgtgatactacagtccagttgggggtctgcctctgttctttctttccacctaggagggctcgttcccgtctcaacctatccaatccgccaatcctgcagacgctgcagcacgtcctgcgcgcgggcgcggagggcagcccgcagacgaaccccatcatcggccggatcgagcgcaagagcggccacggctgcggacgctccacgcagaagatcgtatgctctgcctctctcgagcgcctctgcaacggcgcaacgcctgatcttgtgctcgctccaatcccttacttgacctgaatcgctctgttctgtttgtcaga

SEQ ID NO: 56899 - DNA, 335 bp, Setaria italica
  misc_feature (317)..(317): n is a, c, g, or t
  Peptide Sequence Number=SeqID_122873
acttagtactactagtactactactactactacctaccccctaagattaagtacatgcatcgatcaattaataatctctctggcattttggtacgtgcgtgttctcacttttacttatgacgaagcgaaacctggttgatcatatcgtcgtctattctatctccaggctctgagctcgccgtacgtgggcggcagcaatgacggtggtggggccggctcctccatcagctctagctccaagcatcagcagcagctccacatccacgagtctagtgtgagtagtactgcgccacccaccgctgtagctcatggctacngtcctctctcctctccct

SEQ ID NO: 56900 - DNA, 514 bp, Setaria italica
  Peptide Sequence Number=SeqID_122874
attccactgcttccctctgcctccagattccaattcctccgagcggttgctgcgagcgaagcttcccggtttccggcgaatagtacggggacgacggacaaagggacggacaaagggtactagggacaaagggacggcgccaagcgccaccgtaaggtgctccgcgacaacatccagggcatcaccaagccggcgatccggaggctggccaggagggtcggcgtcaagcgcatctccggcctcatctacgaggagacccgcggagtgctcaagatcttcctcgagaacgtcatccgcgacgccgtcacctacaccgagcacgcccgccgcaagaccgtcaccgccatggacgtcgtctacgcgctcaagcgccagggccgcaccctctacggcctttggcggcctagatcgggttcctcttctggtggcggactacatgtggtggtggtggtgtgttctgggcatagtgtagtcagtgctctgtgtatggatgctgtgttctgtggtggttgtg

SEQ ID NO: 56901 - DNA, 498 bp, Setaria italica
  Peptide Sequence Number=SeqID_122875
gcttccctctgcctccagattccaattcctccgagcggttgctgcgagcgaagcttcccggtttccggcgatgtcggggcgcggcaagggcggcaagggtctgggcaagggcggcgccaagcgccaccgtaaggtgctccgcgacaacatccagggcatcaccaagccggcgatccggaggctggccaggaggggcggcgtcaagcgcatctccggcctcatctacgaggagacccgcggagtgctcaagatcttcctcgagaacgtcatccgcgacgccgtcacctacaccgagcacgcccgccgcaagaccgtcaccgccatggacgtcgtctacgcgctcaagcgccagggccgcaccctctacggctttggcggctagatcggttcctcttctggtggcggactacatgtggtggtggtggtgtgttctgggcatagtgtagtcagtgctctgtgtatggatgctgtgttctgtggtggttgtggtctaccctt

SEQ ID NO: 56902 - DNA, 191 bp, Setaria italica
  Peptide Sequence Number=SeqID_122876
cgggcgcatcagcctctagccgccgaagccgtagagggtgcggccctggcgcttgagcgcgtagacgacgtccatggcggtgacggtcttgcggcgggcgtgctcggtgtaggtgacggcgtgaagcgcatctccgggctcatctacgaggagacccgcggcgtactcaagatcttcctcgagaacgtcat

SEQ ID NO: 56903 - DNA, 185 bp, Setaria italica
  misc_feature (132)..(185): n is a, c, g, or t
  Peptide Sequence Number=SeqID_122877
ctgaatgtaatcttatctttctgaaatgaaggaatgcgtactggtcaacatgtatgaggattgaacatacctgcagcaaagaaatgatagtaatcatgttgcaaatttgtgcttaggaaaaaaaaaaaaaannnnnnnnnnnnnnnnnnnnnnnnnnnnnnnnnnnnnnnnnnnnnnnnnnnnnn

SEQ ID NO: 56904 - DNA, 358 bp, Setaria italica
  misc_feature (6)..(6): n is a, c, g, or t
  Peptide Sequence Number=SeqID_122878
attgtnagggtcccaggtattttgagagttgataagatttgctttcctaagtttggagcatgtgtttccatagagttgccatgtaagtctaaactgccaaagggagccccttgcatcctgcttccagggggttggttagtgccttccatttgctcaaaaggatcacccaaacacttacttgtaagggatacaagtgccacaaaacttcacatcgatatcatgttatcaccagaatcccatttctctgcatatccccaagagatctcatactaagcccaaaataattgagattttaggaagtttcaatcaaaggtgcagaacaaatttcatgacctatcgattttccccaagaagaaac

SEQ ID NO: 56905 - DNA, 350 bp, Setaria italica
  Peptide Sequence Number=SeqID_122879
aaaaggtaccacgacatagttcaattacggccttacagacacagcacatcaagcctgatactgctactgcccaagaggggaatgttacaagcaggaggcccaaccagtacaccacacagaactaagtaatatgcacagaaatggttatccgagtactctgataacccgccacctttaactcttccagaagcgcaactccgttctgaatcagaagccatctgcgaccttcagaatagaagctttgatcaaccaaaggtcatgcatgattggcctggccttttagcttaagctctaacttcttagtcttcctttactagtacttaagactacaaagttaaccaaattaagaa

SEQ ID NO: 56906 - DNA, 386 bp, Setaria italica
  Peptide Sequence Number=SeqID_122880
tcgttggtggtaactaattagtagctagtggtagtatagccttttcatgcttcagtaatgggtttattaataacaaactggaactggattcctaaatgggtagccatccaaagaacatacaagataactgctctttccatcaccccagacatggattctttcacaagagctatatgtatctaatgattgtagcatatcacagagacaacaagcatcatattcacatagctaacattcaaacatgattgggataagaggatatctccgcaccaataaacagagcaaaattgtacagctcataccagaatcccatttctctgcatatccccaagagatctcatactaagcccaaaataattgagattttaggaagtttcaatcaaagg

SEQ ID NO: 56907 - DNA, 121 bp, Setaria italica
  Peptide Sequence Number=SeqID_122881
gctgtgtctgtaaggccgtaacttgaactatgtcgtggtactgctactgcccaagaggggatgttacaagcaggaggcccaaccagtacaccacacagaactaagtaatatgcacagaaat

SEQ ID NO: 56908 - DNA, 225 bp, Setaria italica
  Peptide Sequence Number=SeqID_122882
tctactacccagcaaagatgatagggtggacttgccacacccgcttgttccacacaagagtattgtcactgattcctttctctctttaattctgatcggaacagtggaaggaaggcaaaaaagaaatgttacgacagataatttcacttaaacaaagcatgtcaaacatacatggaaatagacatgatggacatgtgtattaaatgggcagataaatatatatgt

SEQ ID NO: 56909 - DNA, 123 bp, Setaria italica
  Peptide Sequence Number=SeqID_122883
ccatcacgagggtcgtctgcttcttcttcgctgccatagactgagtactccttcataagctgataaggttaaagcattgttagattgcaagtactgcatatggcacattatttcacatgcaaa

SEQ ID NO: 56910 - DNA, 333 bp, Setaria italica
  Peptide Sequence Number=SeqID_122884
ctccacactatcaaccctcaggtcttctacacttccagtattggctagtttccacctgtgtcactcatccaggcactgatcccaaaaggaccaaactgtagattgactgcctctgccttcccaatttgtgagggatccaacattgggttttcagcagacttcttgctgtttgtaatatcattgagatccccattgccatcactcgtacctacatgccaagctttggtggatgaggaatacaggaaccagtgtgcagctaacaccttgggttctaagggcatgtttcagttgatccagaggaaggggtcctcaaggaatctgatggctctccta

SEQ ID NO: 56911 - DNA, 188 bp, Setaria italica
  Peptide Sequence Number=SeqID_122885
ggggcttgatatcatgatgctgttaactgactaaatatcaacaacaatggatgtgacccataggccaagggtattcaacagtgtgaatccagccaggaaatgatgtcgttaattgcggttgaaatcccgcaccacctcctccctcttccagtcttcctcctcctcctccttcccagcctctgctcgtt

SEQ ID NO: 56912 - DNA, 188 bp, Setaria italica
  Peptide Sequence Number=SeqID_122886
cgtgaggaagattggaggcacggcggtgacgccggactcgacgagcccgcggacgccggctcgggactcgtggaacgaggccagcgcggcctcggcgtcgtagtggagcggctggagcaggcgatgcaggtggaagggtggctcatggcgtgccactactacccgccgtgcccggagccggcgcgggt

SEQ ID NO: 56913 - DNA, 361 bp, Setaria italica
  Peptide Sequence Number=SeqID_122887
ccgaggaaatgccatcagttgaacagttcctgtggatgtgcaaatcctcggatacggaacatgtcagcaactgatggactccattgaaatccgcacaagccttaatagatcattcacacttcggaagttgaaatccagaactgttcttactgaagaaagaccatctgctctattttcatgattgccagcagcagaagaaattgccaattgtgacttccgagttgcctcaaaggcaccattgacatcattcgtataagctagtaaccgcatcaagtgtggttgattacgagcggccagcaacaaatgattcccagccacttgtggtgaattagcatccttgcttgaagagcccttggataat

SEQ ID NO: 56914 - DNA, 396 bp, Setaria italica
  Peptide Sequence Number=SeqID_122888
gaagatgagctccgcacggctcagttgcatcccttatctaatccaaatcatccaagtggatgtgcaactatgtatactaattgggtaccatccacttggatgatttggattagataagggatgcaactgaagatgagctccgcacggctcaacacttctaatagttttgaggtagaaggaggcgcttcactgccagcagttgataagctactatcaactacattgttatttggaaagtggctcgctcctgagcgttctcttcctacatgatgtaaattatgtggttctccatcaaggctggcttatggctgaagagtcagtatcatagtttccttgagcagtacaagatggtgtgtagccacttgacaattagttggttttgttgtcctctccatc

SEQ ID NO: 56915 - DNA, 379 bp, Setaria italica
  Peptide Sequence Number=SeqID_122889
ctatacagaatggagaagcatgacattgttggtcaccttcatttttgcaccatagcagatctattcaatgttctagaactcgatttcatttgacacacttccgggaacaggcaaccacagaaatgtacaatccaattaatgaacacaatattagtaaaggtacctgcatgaactttatccagaagacgtggcatcatcgcaagggtgaaagaaaaaaaaactgctagctgatttgttggttagctacaattagttggttttgttgtcctctcccatcaaaattgtcaagtggctacacaccatcttgtactgctcaaggaaactatgatactgactcttcagccataagccagccttgatggagaaccacataatttac

SEQ ID NO: 56916 - DNA, 356 bp, Setaria italica
  Peptide Sequence Number=SeqID_122890
actagaattaccaagaagactaataggaaggacaaaaaggtgagaatcgacttgaagaggagccaacagaaaacaacttgggcggaaataaagatgctcgattgaaagaacgggccatcaagagtgactccttgacaatcaaagtggaacctcccaaagcggaggtgacagaatgcttagagaacagtagttttggcagttcagaaatggaattttcagcatcgaagggggaaccaaaacccaagacagaaaagggagagacaattttagaagagaggaatacaacaaatgacaaaaaacctaataattggataggaagcaagaaagaaaataaaacctgagagtaaatctaaatg

SEQ ID NO: 56917 - DNA, 250 bp, Setaria italica
  Peptide Sequence Number=SeqID_122891
aactagaagtccacccaaggcagcagcaaatgttacctcaaaatctccctttcaccagtcttttgaggtgcctaagtttattttggctgtgatcatctactgttgtagaacagtgttatcatgaacatgcactcgtttggcattgatgatgcaatgatttataatgtagggcatgtctcaaaacccttcggctgtgtcagttccatctgtcccccaaaataatggttctgtggtgccctttcctggtgta

SEQ ID NO: 56918 - DNA, 223 bp, Setaria italica
  Peptide Sequence Number=SeqID_122892
tgtttttgtaggcaaagccttggcctcatcaggaatatctccactagctaaatcagggttcctatctctgtcaaaacgatgtcgctcttctttcctaatattggataggaagcaagaaaagaaaataaaacctgagagtaaatctaatgcctctaactttgaaggcaacaacgttataaatgaaagagctccagttgtttcgcggagcatggggaaattcctt

SEQ ID NO: 56919 - DNA, 250 bp, Setaria italica
  Peptide Sequence Number=SeqID_122893
ttatgagaaaggagattgacatagaaacagttgctggtcaaaagatcgtatctgaagctctcaacatagcattgctgtctgattccagagctatggaggcaaaaggtgagaatcgacttgaagaggagccaacagaaaacaacttgggttttggttcccccttcgatgctgaaaattccatttctgaactgccaaaactactgttctctaagcattctgtcacctccgctttgggaggttccactttgat

SEQ ID NO: 56920 - DNA, 238 bp, Setaria italica
  Peptide Sequence Number=SeqID_122894
gagatcttgcacatttattatcttgtttcggataaggctctgtaggaaaacacatactaatctcactagcctgttttgcatatacttgtcctggtattgcaagaagaacggatgttggggttcataatatgccatacttttgatttgcataacaaatgaaattcacgtccttggggcaatcagattttgatctgaatgtcgtcgcatgatcgaatacagtttgagatgtagtcatgaa

SEQ ID NO: 56921 - DNA, 196 bp, Setaria italica
  Peptide Sequence Number=SeqID_122895
tggatgctgtagttttcaatagaattatggtattcagcatacgcatcttctccttagccgccattctttgtgtatttggagtccttccattgaatatttggacaagatatgcatcatgttcgtattccctcagcatcattagagacatttacaataggaaatgtgcaagaaagatcgagatggctctgggtccatt

SEQ ID NO: 56922 - DNA, 229 bp, Setaria italica
  Peptide Sequence Number=SeqID_122896
ccccttttagaggcagatacatgttcagttcacattgctagaactagtagggttgaaccgaagaagtaagcaatctgcacaaactgccacaaatgcaccacagcaccagcgatgaacttcactttctgcacacaattgcggtgtatgctgctgatggtgcttcttccaataatcagtttcacgcatgtgcttgctgtctcaccatgagtggacgaatacgctccgcttc

SEQ ID NO: 56923 - DNA, 248 bp, Setaria italica
  Peptide Sequence Number=SeqID_122897
aaactgccacaaatgcaccacagcaccagcgatgaacttcactttctgcacctgcagtatgaactatgttgatgtccaaatatctgaagagattgcccacaagatcatgttgaatcataagatctgttaagattttcccttttggtttttgttttatttttcaagaaaaatgagccttttcacataagccaatccaggtataggtggcacaacattgccatgaaataaggagacaaaaatataatagt

SEQ ID NO: 56924 - DNA, 517 bp, Setaria italica
  misc_feature (477)..(477): n is a, c, g, or t
  Peptide Sequence Number=SeqID_122898
ttactactaattcgggttgtactttgtaaggtagttacgtaggtcttattcgttacgtttgttttcggtccagaatcctcaactaagggtgaactcaacaaaatcaatgactggccatcttataggagcagccggtggaattgaagcagttgcttctatacaagctataagaactggttgggtccatccaaatctgaatttagaaaatccagaggacgttgtggatgtgggtgttttggtaggaccgaagaaggagagatgtgaagtgaatgtggccctatccaactcattcggatttggtgggcacaactcatcaattctcttcgcacccctttaagtgaacatggccaacaaactgccatcttcctcgtcgtccaacagcttcatacatctagacctgcatatagaagactagtggactctgtgacttcctctacaccacaccatactaatgatggaggtccaagctgagggganaacgctgtgccataccaaggttaaacacgtgaaaactcga

SEQ ID NO: 56925 - DNA, 497 bp, Setaria italica
  misc_feature (414)..(497): n is a, c, g, or t
  Peptide Sequence Number=SeqID_122899
tattctttccttcgttcgttcctaactagtctttctattacatctagacctgcatatagaagactagtggactctgtgacttcctctacaccacacatactaatgatggaggtccaagctgaggggagaacgctgtgccatacaaggttaaactacgtgaaaactcgagggccctgcaaggttaaactatatcaaaattgcaaatatatccatccaacgacttactgtatctgggccagtgttttcgccttcaccgtgaatgcccattgtcagtactatttcctagatttcggttagtcccggagctgatcctcacccttgcggaggtgctgggattttatgttgtattgatgttgtgaacaatgtcgttattagccatgaaatgctagtttcactgtaagcattcgctgggcnnnnnnnnnnnnnnnnnnnnnnnnnnnnnnnnnnnnnnnnnnnnnnnnnnnnnnnnnnnnnnnnnnnnnnnnnnnnnnnnnnnn

SEQ ID NO: 56926 - DNA, 384 bp, Setaria italica
  Peptide Sequence Number=SeqID_122900
ccagttatactaaaccaagtgtagtaaatattatatcacgggcacaatggtgctttgcaatgaacatgaggcgttcgggtttattctcatagccatgaacacttcgttaccatttaccacaactgctgtttcggtgtttttggctttcaatgcaagcatggtgggctcatcatggggaattcctcttcgttgttcattgcaggctataagaactggttgggtccatccaaatctgaatttagaaaatccagaggacgttgtggatgtgggtgttttggtaggaccgaagaaggagagatgtgaagtgaatgtggccctatccaactcattcggattttggtgggcacaactcatcaattctcttcgcaccctttaagtgaacat

SEQ ID NO: 56927 - DNA, 228 bp, Setaria italica
  Peptide Sequence Number=SeqID_122901
aaagtcgatgacgggccatctcctaggtgctgcgggtggaatagaagctgtcgctgctatacaagctataagaacgtgtgagagcttcaaattccttcaaatcacccatacttgctatggatctgggttggatgggcccaaattattcaatctctactgcttgtgctactagcaacttctgcattctgaatgcagctaatcatatcagaaaaggggaagctgatgtga

SEQ ID NO: 56928 - DNA, 257 bp, Setaria italica
  Peptide Sequence Number=SeqID_122902
cttggattgggaggttttgtggcctgcagagctctttcacagagaaacagtgatccaacaaaagcttctcggccttgggacgtggatcgtgatggatttgtcatgggagaagggtctggtgtgcttgttttggaagaacttgaacacgcaaaggttttattcatgcaattttctcgagtccattgtcttgttggtttaggctgatattgttcaaatgctaagagcttctaatttggatttctgcagcaaagaggtgc

SEQ ID NO: 56929 - DNA, 232 bp, Setaria italica
  Peptide Sequence Number=SeqID_122903
acccgccagcacctaggagatggcccgtcatcgactttgttgagttcactcttagctgaggattttggccaaaacaacgtgtgagaactggttggctacatccaaatatcaatttggataatccggagaaaaatgtggatgtcagcttgctggtgggtcaacagaaggaaaggtgtgatgtgaaggtggcactgtcgaactcatttggatttggcgggcacaactcgtcgat

SEQ ID NO: 56930 - DNA, 261 bp, Setaria italica
  Peptide Sequence Number=SeqID_122904
caaaattgccctcatctccacctgcaactccacccccatagccaccaccacccctgttaccatagcgtatcagtagaaatgaggtgaagtgatcatcaggatcaattccagaacaatctgtagtggctggtgtttttctgttaactttataggtctcttctgtctaaataacggaacgaggcacgttgttttgagtttgccgaactatcgaagtgtgcttttttgacaggaatgtttgccatcgtttgccagaagtgcaaa

SEQ ID NO: 56931 - DNA, 409 bp, Setaria italica
  Peptide Sequence Number=SeqID_122905
cgcgccggtcggcttgggcaggctgagcccccttgtgccagccgcacccgccgctgcgccatctccacctgccccatcaggtgggcaagcccttcctcctcgtcggcctcctccgacgcggcctcgtcgtcgtcgtccttgcgcgccggcgccgccttccggtacgccatgtacagcaccagctgcgccgtgcccaggacgaagccgatggcgttggggacctgtgcggcgcgtacgtgccaccggcacgtacggcgtcaggttcagatgttttgggaatagaaatagtgatcgagacacgtactccgatgaagtagtctttgacgagcacagaatagacgctccagacgccgccgttgaggaagaggaagaaggacagggagaagggcatgtactcgacgctccgggt

SEQ ID NO: 56932 - DNA, 365 bp, Setaria italica
  Peptide Sequence Number=SeqID_122906
caggagaaagaatatgtagtgcggctgtcatctcatcatttgcacatgacaataacttttccttggcaacattgttttacacctgcttcgttctagtggcctccatgcagctaatctttgtgaaccggggatcctctgcttgatcaatggtgcctgtgccgatccttttcacgagatgagtgcgaactgtagtagtcaccccggtctcgtgacgactggcgccttgacttctccttgtctgaatgtcctgaacttctttccctagaacgacgtctcctgtccctttcacgatccgagtcacggcccctactatcacgatcagaatccctacccctgccatcacggtccctacccctgccatcacg

SEQ ID NO: 56933 - DNA, 221 bp, Setaria italica
  Peptide Sequence Number=SeqID_122907
gtcgatcccatccttccgcgacggcgagtcccgcagctgctcgtccgtcaggtagaaggtgtcaatcgcagtgtagatcatcctctactccggccgcctcgccgagccgcctcccccaccgttccccgggcggtgtggcacggtgagggcggaggaacgaagaggacaaagagtgggagcggtcgtcgtcttgagtcggcaaaaattgggccatgtgtggg

SEQ ID NO: 56934 - DNA, 440 bp, Setaria italica
  Peptide Sequence Number=SeqID_122908
taagagaagttccttctcaatctcaaggtctggcttgggaattcactagctatcaagtttcacctaaatttcgatcaagtatatagcttgtgatatatacatgcatcagtaagtgaatgaatgaaccatataccgatcatttgctttgaagtgccaatttatattaaactaaaattatcctttcttccatgttcacccccagtttctaaaatttaaacaatgtctacttaaagaaaacaataaaagaaactgcaaagttagtagaaacatgaagactgtcgactgtcagaagagctaggataccggtgacaagatctgctttagaacacgagtcaccactacatcaacaggttgaagttcagtgacagcagcgccaggctctccatgaattccaagaccgagctcttattttgtttcttggaccttaaaacgtaattcta

SEQ ID NO: 56935 - DNA, 200 bp, Setaria italica
  Peptide Sequence Number=SeqID_122909
cacctaatccattagtcagaagaataaccctgtcgcctcttgtaataggaacatattgagtttccggtgacaagatctgctttagaacacgagtcaccactacatcaacaggttgaagttcagtgacagcagcgccaggctctccatgaattccaagaccgagctctatttgttctggacctaaacgatcagacgtctcc

SEQ ID NO: 56936 - DNA, 233 bp, Setaria italica
  Peptide Sequence Number=SeqID_122910
ggtgcaatgagtttatctacaaaccgttttttgtcatggatgatatttgcttgaagcacagaggttggacagcagctcaccaaagctaatcttctatagctcaatttgatggtgtcgtcagatgcgtcatagtcaacctccagaactttgtagtagtcctgcaatcacaatgaagttcatgaaataaatgcagtgaataagagatgaattactgtagctgtgtgggaaccata

SEQ ID NO: 56937 - DNA, 225 bp, Setaria italica
  Peptide Sequence Number=SeqID_122911
aaaagagtagatttccagtaatgattaatatcttgtccaaccaaaggctgccggtagcgacgtcggctcacagaggtttcggtgatgcaagctggtctacactctgactaacatgaaggtttatgatttaaatagtccttctagtgtttagcttcttttgagctgttgatcaatggggcttcaattccctcaaatgccgagacctattttggaggggtgacctat

SEQ ID NO: 56938 - DNA, 152 bp, Setaria italica
  Peptide Sequence Number=SeqID_122912
ccatccaaaattccatttgctcatgggatgggtatcatatcggatgaaatatatgagtcatacaagaagagctgcagtgttggcgacaacagccaccaaagcattgagctgagacacgcaacaggggaaaggcaaggcacacaggggatagg

SEQ ID NO: 56939 - DNA, 249 bp, Setaria italica
  Peptide Sequence Number=SeqID_122913
ggttaccaggccatagcttagaggtgataaacaaatcttcacgcttaaccacgccatcctcaaataatttcttcaaagcaactccaacctatgagagagagcatatttcaatttattgggtttattgggggaacaactgactatttatgacctgtgcaatgagtcatcggagttgcatccttctcgtgtatcttacatgttcatgcatttatgtacagatgtaacaggtcaggttgtaggaaaagtgac

SEQ ID NO: 56940 - DNA, 272 bp, Setaria italica
  Peptide Sequence Number=SeqID_122914
ctgaagaaccttgtacgtacaaccctttggccctcctgaaaacgatgcgaacgcaacaggtacaggtctaatcttcagctccttggttttcaaagagcaatatagcaacaggtgcacgattgcaacaaccaattagatgcgcctaaacatacacaaccacaaaaaattgtaccaaaccaggttaaaattgctgtgcagtgaggtaattaccgtaccttgacaagctccccaagcaccctgtcggcaagcatagcagccttctcggggaaaaa

SEQ ID NO: 56941 - DNA, 289 bp, Setaria italica
  misc_feature (69)..(69): n is a, c, g, or t
  Peptide Sequence Number=SeqID_122915
caattcacttgaataaaaattctgatgaaccaaacccaagaacaggcaaggcttgttgctgatggcagnttccccggttcaggctacttcagagctgagctcgctcgagaacgccgtctacttcgcacgcttgatttcagtagctcatcgtaacctgcttgttccacggttaatttccaagagaattgacccgcgtgtatctctgtaaccttcttcattgatgtctgtctcgtcagtaccctttctgtgacctgtagctctgcttgtatgagtgtcaaaaactgaccca

SEQ ID NO: 56942 - DNA, 261 bp, Setaria italica
  misc_feature (27)..(27): n is a, c, g, or t
  Peptide Sequence Number=SeqID_122916
gtggtgttggtgtggatggcaagcaanagggaggaggggagagagagagagaaggggcggtaggtgaaatcggaggcgtcaggagtgggagggaggagaggaggagccacgtcagcttgacagcagtgcacgtgcggtcggctgcggcggcggcggcgggccacgacgatgagaagctgaaggggatcccggccggcgtccgtggcagccagaccaacaactacttccgggcgcaggggcagaactgcggcaacttcctcg

SEQ ID NO: 56943 - DNA, 193 bp, Setaria italica
  Peptide Sequence Number=SeqID_122917
cttaatagggaatagtcacgggttaaaagacagctagtactacccgaaaaaaaaagaacaataccaacctcagctgcctcaggaattcgtccaaaatacaccatcctcccattcgctagcaggcacagcccattgaagaggtcgaacacctcggcgctcggctggtgaacggcggcgaccaccgttatcccag

SEQ ID NO: 56944 - DNA, 192 bp, Setaria italica
  Peptide Sequence Number=SeqID_122918
ctctcggcgtacccgggccggtcgaacgacagcaggtagatgcccagctcctgcaacagcccctggcctcctccttggggacgccggattccagatacgccaggtgcctgccgtccctgagcctcgttctgggcgcggtcaccggaggcccgcccggcgcgccggggaccttcgacggcggcggctggatct

SEQ ID NO: 56945 - DNA, 135 bp, Setaria italica
  Peptide Sequence Number=SeqID_122919
tctgcattttgttaccttagctgttcaatttcacctagtaagcttccaatgggaggttaagctccactggcaatgaaagttcgatctgtaagatgtgagatttaccaagggtgcaaggatgtgccatcacgcagt

SEQ ID NO: 56946 - DNA, 236 bp, Setaria italica
  Peptide Sequence Number=SeqID_122920
cgactgagggtggcagtggctggctgcactagctcatcccctgtggaaaatacagcaatggttggtcgaaggtatacctgcacatgcaaattcagaatgccacgttgcaactgtgtctcttttctatactcaacaacgctaactgaccttgacagtagttacacccactgttgcaagtagcccaatttctgctggaccaatgagctcaccagacttgagcactatcgaatccttct

SEQ ID NO: 56947 - DNA, 214 bp, Setaria italica
  Peptide Sequence Number=SeqID_122921
gtacacctgcatggaccattcaccaggaagtagcccatgtgagtaggaaacaggaatgtgcaacactataacctgaagaataagatcatattacctaatgtcagaatgaggttaacacagtcaatgtcactccattgtaccagaatgcccttgatcttgtccacttcatcaggaacaacagcagtagcaaccacggttgctccacccagtttct

SEQ ID NO: 56948 - DNA, 181 bp, Setaria italica
  Peptide Sequence Number=SeqID_122922
tcagattcgtgattccaaccactttgcatttctgctgaacggcagcagctagaagcatggcgcggttggaatcacgaatctgaccacgactggaggtggatctgaagcagcgggtggtttatttgaaggatagctgattatgtctgaaataagtatagcttggatagatgttccactgcca

SEQ ID NO: 56949 - DNA, 205 bp, Setaria italica
  Peptide Sequence Number=SeqID_122923
tggagtactctgcagtgctaccaatttgtcccgttggtagtaactgtgtttctgaaacgcgtagctgttctccagggctcggaacacggtgggctcctcctccatcaccttggccagctccggcgccacgtgcacgtacaccacccagtcgccgtcgccgcgcgcactcggcatcggcatcacgtacccagcgccggcgggccac

SEQ ID NO: 56950 - DNA, 265 bp, Setaria italica
  Peptide Sequence Number=SeqID_122924
ggttcttttggacttagattagtgggttaccaaggtccctaaaaactaatatgcattatcacttaagtttttcttcaattaatctgtttaagatgtcttagcatataaccgtcatgagatgataaggcatcatagttgagttaatgtttttgtgatcttaatctcagtgtgatctttctggtagcgaaacttggctacttatgatgtattgattgttaactgagaagttgagaaaattgtattgagcatttcaacaaatttgacg

SEQ ID NO: 56951 - DNA, 252 bp, Setaria italica
  Peptide Sequence Number=SeqID_122925
gttccgggagctcgggttcaggctgtacgcgacgatcttggagagcctgggtctggagccgagctacatgaaggagacgctgggcgagcaggagcagcacatggccgtcaacttttacccgtcgtgccccttgccggagctcacctacggcctcccaacccacaccgatgatgatgtatggatgcgtgcagcctcgccgatgcgccgccgccgccgcgtgcccagtgaggaagaaattaaaggggcagtggg

SEQ ID NO: 56952 - DNA, 380 bp, Setaria italica
  Peptide Sequence Number=SeqID_122926
ggcgaccagctgcaggcgctgagcaacggcgcgtacaagagcgtgtggcaccgcgcggtggtgaacgcggcgcgagagcgcatgtcggtggcatctttcctgtgcccgtgcaacagcgcggtgatcagccccgcggcggggctcgtcggcgacggggacccgcccgtgtaccggagctacacctacgacgagtactacaagaggttctggagcaggaacctggaccaggaacactgcctggagctcttcagaagcgcccagctccagtaactatctggcgcatttgaggctttgcttataaagtagtacgtacgtttgttcggtttgtttcatggaacattatcattcatcgtacgctggccagcagccaattccgtgcc

SEQ ID NO: 56953 - DNA, 394 bp, Setaria italica
  Peptide Sequence Number=SeqID_122927
tgatagccaggtcacggcaagaattggccaccctattactggatatggtcaggaaactaggaaccgtgcagctacggcaaacgaaattccaaataagattggacagatgaggatggtgttgaacatgtggaggtgaactttctcatccgtgggccacatggagctggaaaggtctattcagagatgttcaaagataactctgaccggacatggaagttcacgtaccttgttgttgaaatcgtgtctccacaacatggaaaaacacaactgatgttagaatcttacttaccagcgtaaggatgcaagtaacaaaagcagttagcagtggcatgatgttgtaaggttcgatctcccggataacttcatatttataccatcattttacattatatac

SEQ ID NO: 56954 - DNA, 432 bp, Setaria italica
  Peptide Sequence Number=SeqID_122928
agttagttactaccgttacccgggtaccaatagaccggaagaccgaatagaaggtaactgtacggtcttctcgaccatgcgcatgtcgacgcggccggagaggtacatgtacttgccgaggatgtcgccgtggcggttctcctcggcggtccaggtgcgcgtccagacggcccaggggcatgcgctggcgccggtctcgtcgcggacgccgtcgagcgtgttgatcatggtctggtacgtgggcagcgcctcctccgtgatcatgtcgcccaccagcacgacgaagtactcgtcgggcagccccgcggcgcgcgcgcggagctcccggacctcgtgctcgaacatctccgacgacgagtccggcaggaagtccgtcggctgccagcactcctccacgggcttgagcagcggcagcaagcgaccgcgccgccc

SEQ ID NO: 56955 - DNA, 236 bp, Setaria italica
  Peptide Sequence Number=SeqID_122929
tttacctggcatgcatgagccgatcatgccaacattcttttgcttatccttcatttgttttagtgcagtcttatcggttgctacgtgcgaatgtaaccggtctgaccagcttccgccttttggtgtttcctgtgctagttcttacattgactagttcctaaatcatttgggttattatgttgtattcggcaatccactcgttatatgaataaagttaatttactttaaaaaaaaaa

SEQ ID NO: 56956 - DNA, 256 bp, Setaria italica
  Peptide Sequence Number=SeqID_122930
ttttatttatagcatatggtatttttggtcagaataatcatgtacataaacatgtactccaaataaaagggcacacaccaaaaagccactagatcgattcaaggaacacgccaaagcttttgatggatgggtagagacgacactacagagaccacaggacagaatcctccaatttgtttcaaccctccacgagccacctatcctgaccagcttccgccttttggtgtttcctgtgctagttcttacattgactagt

SEQ ID NO: 56957 - DNA, 335 bp, Setaria italica
  misc_feature (73)..(73): n is a, c, g, or t
  misc_feature (317)..(317): n is a, c, g, or t
  misc_feature (325)..(325): n is a, c, g, or t
  Peptide Sequence Number=SeqID_122931
gtaaaaaatgcatgctcaatgcatgggcatgtggtgtacaccagggctttaatttagactaaattacttgcanctttgggcaagattaatcttcagcaacttctgctgctgctgcagatattagtgatgccgactggatcttcccggcatgctccagcctcatcagaattactccccttgcgtaacgagactggatggatatatactttaaaccttaagaaattaactaaatttaaaacaaaagtaaagaaaccgaaactaaactaaaggaaactaaaaactaaaaaaacaaaaacctaaagaaactaaaacgtaanaaattaanaaacaaataa

SEQ ID NO: 56958 - DNA, 459 bp, Setaria italica
  Peptide Sequence Number=SeqID_122932
aacaggaaaccagtaaaaatgcatgctcaatgcatgggcatgtggtgtacaccagggctttaatttagactaaattacttgcatctttgggcaagattaatcttcagcaacttctgctgctgctgcagatattagtgatgccgactggatcttcccggcatgctccagcctcatcagaattactccccttgcgtaacgagactggatggatatatctttaaccttgattctatttacagtgccgctctggctaactaaaacaaccaccgagtgaaagaccagcaacaaatacagcagccaggcggcaatcctctggaagcttgtagcctgcccaaaacctcaaggttgaatcttgattgccggaatgcatttaagggcacccgttcccaagaccgtttcagctatgaaagtagccaaggaggactcagatctctggacctgctgttataagtttcaggc

SEQ ID NO: 56959 - DNA, 232 bp, Setaria italica
  Peptide Sequence Number=SeqID_122933
gataagaaggcttaagacagtattatcacgctactgagtacagtgggcaaagcctacatctagacaggttaatggccaccggagatctatccaccaaatcatcagctactaactatgcctacatctagacaggttaatggccaccggagatctatccaccaaatcatcagctactaactatgccttggcccttggcatgggattacagaattcctggcaacaggaaaccagt

SEQ ID NO: 56960 - DNA, 181 bp, Setaria italica
  Peptide Sequence Number=SeqID_122934
cggcaccgacacctgctcctagatccgcacctaccccagcacctagggctccacaggcgccatctccaactcctgcaccgacacctgtgccaatgctcgcacccacgccagtcccatgcccaccctaactcccccaccagcgacctcccccgccaccaccaccaccgacctcccccgccac

SEQ ID NO: 56961 - DNA, 251 bp, Setaria italica
  misc_feature (3)..(3): n is a, c, g, or t
  Peptide Sequence Number=SeqID_122935
ctnacccaatctattgtgacaaatttcaggtaggacaagcgatacttctgctctgtttctagctcatgctcaatgtccttgtaggtatcgaagatacactcaagaataatcttcaagtttgctggaaggtcctggcccacctttgtgtcccaactggacatgataattttcgaccatacacacataatgataatcacgcccacaataatgttagtaattaatttactggagacagagaaatgaaatgttta

SEQ ID NO: 56962 - DNA, 159 bp, Setaria italica
  Peptide Sequence Number=SeqID_122936
acatgctccactccttactgaaagttgcaagtgttcttcaacagttgctgggacatatctttggtcacgccatttaacctcagtggtgtaagctctcacccaatctattgtctttctatgcacctggtaaacagttcacattcctctgaagttccatag

SEQ ID NO: 56963 - DNA, 233 bp, Setaria italica
  Peptide Sequence Number=SeqID_122937
agtgaattgaagcacggactctatacattaactttaagcgtactattatagtattatagaggtatgcagaattcagaacgagaatgcatttaagaaataccaacctgtctccaattcccattatatatgtaattacagagtaaccagcacagctttttatgaaagttggttataccaaaaggaccacttcttcatcgaggagtacggaacctctggtaagtactacgtaatac

SEQ ID NO: 56964 - DNA, 430 bp, Setaria italica
  Peptide Sequence Number=SeqID_122938
tcctggatataaataaagcaatgaagggaagtgttagcgtttactgttgtacaaccaccagtgatagatatcaacgtagttcttctgggctggtacaggtaaactgacaaaaggccatatatttatgtctccgagtagttgagtataccaaacaagtaagaagccacataaatataattgtgtagcaaattcaatattttcttaggatgggtaacaatgcaaccaaaactacgaaggcgaaggaaacaataagagccaactcgtgaaattttgcctttgattttggttacagaatacttctatttttgtcctttttatttttgtagtcaggcaagcaaggatgaaaaaagaattttacctcattcttggtaaaaagatcataatcatcagtgaagtacttttgtgtctcctgtcccaattctagcatttc

SEQ ID NO: 56965 - DNA, 433 bp, Setaria italica
  misc_feature (243)..(243): n is a, c, g, or t
  Peptide Sequence Number=SeqID_122939
acctacaagttttaatagtaaggaagaataagactaggggtaagaaggaatacgctgctatgaaatgataaaggttcttgagattggtagcaggtccaacttacatttaacttttggatcattagcaatgaaaaatcttgagttactcacagctggctcctgtagcaacggatcacagcttcggtttgatgggctaaaacatctctccaaactcaaggatgtccgagttattggttccaaagntgaaacgctgaagaaaaatttgaaggaccaatttgccgaccatacaagcaaacctgctttgaagctggaggaagtcattccgccgacccaggcatcgactggacgaaacgatcaacactactattcatttccctttaactgtaccactcgataaaaccttgtgacgccatcacaatgcctatgaatactg

SEQ ID NO: 56966 - DNA, 326 bp, Setaria italica
  Peptide Sequence Number=SeqID_122940
acgacgtacgtagacgaccaacctgcaagaaggggtgggggctgcacgcagcggaggccctcggtcgcaggcagtttgtctgcgagtacgccggcgagttcttgacaactgaagaagcacggaggcggcacaggctgtatgatgagcttgcctctgctgggaagctctctcctgcactcattgtgattcgagagcacctgccttctggaaaagcatgcttaagagtcaacattgatgcaaccaaagtgggaaatgttgctcgctttatcaaccattcatgtgatggaggcaaccttcatcctgttctggtgaggagctccggttcg

SEQ ID NO: 56967 - DNA, 441 bp, Setaria italica
  Peptide Sequence Number=SeqID_122941
ttagtacttagtcctaaattaacttcaaattagtttaatgcagttatgttggaacctactatggccgtattggttagaagttagaacttccagttatgctgtgagttaatgatgctgacagtaaaaggagcataaccacaaatatctgaaacatactgcagagcacctatatgctcagcattctatcttgttttatgggtacttctgatctctatattttaggcctgtggtgcgtgacttggtggatgatgtcatcgttgtggatgacaatgccattgtggacgctatgaaaatgtgctacgagatcctgaaggtggctgttgaacccagtggtgcaattggccttgccgcggttatgtctgacgagttcaagcaaagctctgcttggcatgggagcagcaagatagggatcatcgtctctggaggtaatgtcgacctcgg

SEQ ID NO: 56968 - DNA, 457 bp, Setaria italica
  Peptide Sequence Number=SeqID_122942
accgaccgactagaccccgaaccccttcttgcattgcaccgtcgaaggatgtgggatttgcctcgaattgtttgtaggagttcaatacttgtacagtccgcaaattagcattcagtcgttcactgccaccaagaaccagtgtgtctgcacacacattgggagaaatacctaaaaaatgttctagtcagtattgaatgcatgaaagtattgacaagcagtttacctgcaaagaagtttctaattctgccctgtttcggagcttccagcagcttttgcttctacaagaagctccaaaagccaaaaatctcccccaaacggggttattacttccaaaagcaaaagttggaaaagctcgttttacactaccaacctaaaagctcatctcctgtaatttcccgagcttttccaccgaattgttttccctatctcttctcaagtctcaacccgtcactgccct

SEQ ID NO: 56969 - DNA, 162 bp, Setaria italica
  Peptide Sequence Number=SeqID_122943
cctccatgattgagctcttacaaagatcatgcatagatgattgtgtttgtgaccagtaagatacagactgtccacctttcttcaagcattgctgcaagatgccttccatttgatcatttaatttagcatgcgatgacatgtcctcctggaactggttctcta

SEQ ID NO: 56970 - DNA, 190 bp, Setaria italica
  Peptide Sequence Number=SeqID_122944
gtataaaatacatcagcctccatgattgagctcttactaaagatcatgcatagatgattgtgtttgtgaccagtaagatacagactgtccacctttcttcaagctgctctgaacaagattgctacgattttatcagggttgactgccaagaaaactgcaatggtttcagcatatgccggacagctgaatg

SEQ ID NO: 56971 - DNA, 170 bp, Setaria italica
  Peptide Sequence Number=SeqID_122945
tttatgcagtacaaatgaaaattacagaaagttgaagatatttcatagaaagtcagggaaaaagcatggtgcgacagggaaaccaaccttcggtgcataccgaaagcgctgacacaacaatgagcagaaaaacaagcaccgaagctctgcatactatcttcgaagtcatc

SEQ ID NO: 56972 - DNA, 222 bp, Setaria italica
  Peptide Sequence Number=SeqID_122946
cttgaagcgaggcttggcaaacgccggagtcggatcgtagcgtccgtagtcgtttgtcttaaccatgtcgcctgaggctgttgctcccttttcagatgcagcggcggtatgcaccgaagcaggaggaagggagctagcgaaagaaaatgttcacaaggtgcatcccgccgctgcatctgaaaagggagcaacagcctcaggcgacatggttaagacaaacga

SEQ ID NO: 56973 - DNA, 177 bp, Setaria italica
  Peptide Sequence Number=SeqID_122947
tccagaaaaactaatcctttttagtctctaaacaaattctcaacagaactttgctagtctttgacccatcaattttcttattcagttcataccttgtgaacattttctttcgctagctcccttcctcctgcttcggtgcataccgaaagcgctgacacaacaatgagcagaaaaaca

SEQ ID NO: 56974 - DNA, 393 bp, Setaria italica
  misc_feature (369)..(369): n is a, c, g, or t
  Peptide Sequence Number=SeqID_122948
atctcttttcttgcaatatcaacgtctgttgcctgaccttgaaaacgaccaattggctttagcaccagcagctaagagcaaagcagcttctccccatgcattaccaacacaaagggtgaaaaattggaacttttacatacctcatagcatcgtatactgcaagagcttctgtctcataacctaacttctcaccattcttggtggtaccggtggagttgatgtacaggtagatgggcttctcagcgtcgtcgtactggaggtagaggaactcggcgagcatgagctccgtgaccgacggcacgaggcacatccccaggtacacgatccggttcttgtacaggaacgaggccaaatccggcggcggctgcncccacgcggtccccctcaggaacg

SEQ ID NO: 56975 - DNA, 342 bp, Setaria italica
  Peptide Sequence Number=SeqID_122949
tacaaggtatgttatattgggcttcttactaaattatcaccgttgacaatcaagtcttgaacatggcagtatggcacacatgtatagtccttggtcgaaaatgcattttctaggcaataattctggttgtataaggctgttttgggtgagatttaggttagaattttatggatttcaacctcgttcttctctttcaggttgttcgttggggacggtctgtctatgcaaatattcagaaattcattcaattccagcttactgttaatgttgctgcacttgtgattaatgtggttgctgctgtgtcctctggtgatgtgcccctaaatgcagttgagcttctct

SEQ ID NO: 56976 - DNA, 260 bp, Setaria italica
  Peptide Sequence Number=SeqID_122950
gtcagcttatggaatggtaccagtagccttgtctcccccgttaacatggatgccactgttattattaggtgttgctgcctattgtacaaagttacatgcagattaacacccagcactttgcattcctgaagtgaacttatttgcgtttggaatacttgctgctgctgtatgctaaatcctgaagaggattactttccataatgattctagtatgctggtagacatggctcaaaaggaacaggagaaaaattttctaagtt

SEQ ID NO: 56977 - DNA, 245 bp, Setaria italica
  Peptide Sequence Number=SeqID_122951
agtagtatacagggactcaggcagacaggagcgcgtcaggttcaggcgctgacctcgagacactggagccagccgtcgcggcggccgagctcctcgaagaggaggaagcagtgctcggtgcggaccacccgcacgtgccggtccagcaccggcaccagccgctccttgccacctcccgtcctccgcagcagcgagcgcaccagctccgccgcctcagccgcctcgtccaccccttccgccgccgc

SEQ ID NO: 56978 - DNA, 360 bp, Setaria italica
  Peptide Sequence Number=SeqID_122952
cagaaacatcatcaccagtatcagttgatgatgatgtagagcttactgtggaggacctcctgagcatagctgaagagtatgtaaatgctgataaacagaagcagcatgaatttgaagccatgaagactaacagacgcaaagagaatttctcatgtccaactgaggcaggcacaggagtatcagcagtcaatgatccaccaaagaagggattgttgcagtgcacaacagccacaagaaatacaagatcgagtgagcatacagaggagaacaagagccatcaagagctgcaatgttcgtcaagatgcgaaacgacagaagatgttgctcaggatatgctaaacctgtttctcggtacctaca

SEQ ID NO: 56979 - DNA, 233 bp, Setaria italica
  Peptide Sequence Number=SeqID_122953
ggagctgcaggaggcgtctgtctgatcacaatgcccgccggcggaagcctcagccagatgcgtatgcctttgcctctgcaaggctgccttcatcattgtttgatgataggcggcaaataagttttgtctggaataaagctcctcttagccatgttaagtaccttttctactttcttccttatttgggttacttagtttcttttcttttatttttctttttgttttacttttta

SEQ ID NO: 56980 - DNA, 482 bp, Setaria italica
  Peptide Sequence Number=SeqID_122954
ctgtacaaccagacaaggcaacttcgatgcttctagaggcaatgatctaccattactatctttaggacaccgctcaggaacaacagaagcctggttatttctgatatctgttgatgaggacacaaaaggccatccttaccctgtgagcccatgaacttttcatcagatgtggatgtgggacatgaagatctgtagtgacttttttgacttttttggactttgtcctgtgagagctaccaagaggaggccctaattcagaactagtacctgagatcggtcgtgtgcagctttctctgggtaactgatatgaagtgtatcctcttgggatagaagagccgaatggaaccatcccagactgcaacccaaaatatggtgcaggaactgaatcattaggaagcaacttttgttcgaagccacgtatctccgggtgctgctccaactctgttaagacatgaataccttaaacaccaccagcaaggttg

SEQ ID NO: 56981 - DNA, 257 bp, Setaria italica
  Peptide Sequence Number=SeqID_122955
gtggcagaatgggctaaatgatataagccacttcacaccctttatctggtatgacttcaacttcccaccagtcagtaacggcacaagattggcctgctccttttcccacctttcttcttcggaagatggatcaaattgctgacgaaggtgttgaaactcaagctgaagagccagaggtagaagagaagaagaaaggacgtggccggaagaggaaagcaaagccacagtataatgataaggctaagcagcagtggcag

SEQ ID NO: 56982 - DNA, 249 bp, Setaria italica
  Peptide Sequence Number=SeqID_122956
atatttgaaatcaaccatatataatataaaagtgcacattgctcctgcatgcaaggacacaatacatgaacatgcagtaggtacttcattgtttttatgacgtaactgcatttaacttgccactctttcaggtcttcaacgaaataaacagtagggaaatggaaaagatcaacgtgttcagagggatattcaaaaactggatatttatcggtgtattatcagccactgtcttattccaagtgatcatag

SEQ ID NO: 56983 - DNA, 388 bp, Setaria italica
  misc_feature (366)..(366): n is a, c, g, or t
  Peptide Sequence Number=SeqID_122957
tgggtttccttgggttggtctattaattttgatgaactgtggcgtcttctgtatctactgatgacctctgtattgttgcagggtgaaggtaatgtctgggccggccccacacacgcaacttgacgcggaccttgctgctggaatgggaatgcctgacaatggcctgaagctcatgtccatgtgaaggaacaagggacctcttgttagtagttgttccatgtttttcttgctgtcatacatctgaagtttgcttggctcagtagctaatggagttcaggggtcaatgcctgtatcatgaatcagttacctatcaacgttggtgatgataatgtcttgtaccatttggctgcagattgtgtgttttcngctagcactatgatatagagtt

SEQ ID NO: 56984 - DNA, 247 bp, Setaria italica
  Peptide Sequence Number=SeqID_122958
actgggaggtcccgcgggttcggcttcgtcaccttctccactgagcagtcgatgctcgaagccatcgagaacatgaacggcaaggagctcgacggccgccgccgccgccgcagatcttcttgagatgggaggcaagtgcccgcaccgcaaggtcaagaagcgccgcctctcgcacaagacggctcgccgtggcaagttcctcctcaaggccgacgatgccgtctacgaggagctcgtcaagctggcc

SEQ ID NO: 56985 - DNA, 234 bp, Setaria italica
  Peptide Sequence Number=SeqID_122959
tgctgtcatacatctgaagtttgcttggctcagtagctaatgggaatgccgtgacaatggcctgaagctcatgtccatgtgaaggaacaaggggacctcttgttagtagttgttccatgtttttcttgctgtcatacatcttgaagtttgcttggctcagtagctaatggagttcaggggtcaatgcctgtatcatggaatcagttacctagtcaacgttggtgatgataatgt

SEQ ID NO: 56986 - DNA, 198 bp, Setaria italica
  Peptide Sequence Number=SeqID_122960
cttcccacaaagaaggaagcttacttaagacgcatgtcaacatgcttggcagcagatggaattgtaattaacatggttgttggtggtgagttggctacactcaaggctttagaagaaaccagtggtctgctcattgttgagactgtcataatatctctgaaacatgtattggcatctcagcaatgagcagaccactgg

SEQ ID NO: 56987 - DNA, 263 bp, Setaria italica
  Peptide Sequence Number=SeqID_122961
ctttgactaaatttatataataaaatattaagataccaaataaatactattagtttcttcattaaatatatttttatagtatatcatttgatgccatatgatttaagtcaaatataaaatgatttgactttcaaaaaattaaaataatttataatttaaaacggagatacctggtagcatgctccgcagccctggccgtccttgaacaggggctggttgccgcacgacgtcatggacatgaacgggtactggttcgtgtgctt

SEQ ID NO: 56988 - DNA, 271 bp, Setaria italica
  Peptide Sequence Number=SeqID_122962
cggtagtcggtgttgggcctccagttggccgggatgacgttgtaggcgacgagcgtcctgcgtgactcgccgcggatgcgcagggaaaagggcgcgcgcagcgggtggttggagtcgaggcgccagacggagccccaggagcggcgcatcggcgtccagtagcgggagccggactcgaggaggtccatctgcgacacggtgccttccttgttggcgtctgagacacgcaacaggggaataaaaggaaaacaaaaaggaacaacacagggga

SEQ ID NO: 56989 - DNA, 372 bp, Setaria italica
  misc_feature (15)..(15): n is a, c, g, or t
  Peptide Sequence Number=SeqID_122963
aagtttcgcacaganaggggcagtgatgtcatcattgtgcttgttgggaacaaaactgaccttgttgacaaaaggcaagtctcgatagaggaaggggaaggcaaggcaaaggaccttggtgtgatgtttattgaaaccagttgctaaagctgggttttaactattaaggctctgttccgtaagattgcggctgcacttcctgggatggagaccctctcatcagcgaagcaggaagacatggttgatgtgaacttgaggtccggcaatgcaaactcgtcccagtctcaggctcaggctagggggaatagacaagttagttaagttagacaagacccctagaacaacttagactagactacaatagaatactta

SEQ ID NO: 56990 - DNA, 161 bp, Setaria italica
  Peptide Sequence Number=SeqID_122964
cctatcccctgtgtgccttgcctatccccttttgcgtgtctcaggccccccacgggagcatcctcgggcggaggagcatccgcggccgcgggatcaacctttgtgagcacgacacagcattcggagatcagccgcagcagatcaatatgggtcgaccatgc

SEQ ID NO: 56991 - DNA, 225 bp, Setaria italica
  misc_feature (4)..(4): n is a, c, g, or t
  Peptide Sequence Number=SeqID_122965
ccgngtcccacaggctgccgtacacccgctgctgctgccacgtcggtacggcacgccctggtcctggtaattcttgaacgcacggatcgccttcccgtcaaccctgattctgattaggcagatcacatgatcgatcgatcgatgcatttgttagtcactgaacgatcgatcagaagctgatcgacgacgacgcgatcatgcattgcatcctattggatatgatgc

SEQ ID NO: 56992 - DNA, 221 bp, Setaria italica
  Peptide Sequence Number=SeqID_122966
ccgcggccgggcacggtagcgccagaggaggacgaggaacaggtacaggcacacggtgggcatggacccgcggctctcccacgtcgacagcgtgagccccgacgagctggacgaggagttcgacgggctcccctccagccgccccgccgacgtggtccggatgcggtacgaccggctgcgcgccgtggccgggcgcgcgcagacgctgctgggcgacgtcg

SEQ ID NO: 56993 - DNA, 283 bp, Setaria italica
  Peptide Sequence Number=SeqID_122967
actattcttttgtaacctaattaattgggtctacttttgtttctagtattctaagtacggtttgcccatagcaataggcctcatttgatccttgaaatcatcatgggcaagaaggttttgagctgcgagaaaactgttggcaccataggcatctagcctctttctcaaagaactgttccaatgattctttatagaattatcagtccttccaggaagagcttttgtctatttcttgcccaccttattcccatgcactcgatgagcattaatgagtgccctttcc

SEQ ID NO: 56994 - DNA, 269 bp, Setaria italica
  Peptide Sequence Number=SeqID_122968
ctagtgataagagaaggagaatggatataattttagtaagtcaagaagtggacctttgaggaggctgatatagttttccagcactaccttaaaatttgatgggtattcaggccacagattgtatccttcaagtgttttaccaagatctccgtatttaccaggtgcaataggagtcaagcaattaattgcttcgtgcatatcacgtttttccttggtaatattctctcctagtttttgataccccctatacccactttgacgtgtcatct

SEQ ID NO: 56995 - DNA, 275 bp, Setaria italica
  Peptide Sequence Number=SeqID_122969
cgcgacgtctcgtttaggagattcgcgctccttgaaaagtacactggtgttaggttcaagtactgttcaaggagcgcgacgtctcgtttaggagattcgctagtcgttaccgctagccccacggtgcctaatccaaagacagccacggtcgagccgggctccaccgccgccaccttccaagccgcaccaaccccggtggagacgccgcagctgagcaggcaggccatctccggcgggagggcggcgccgagcttgacgacgttggcgacgttcgt

SEQ ID NO: 56996 - DNA, 230 bp, Setaria italica
  Peptide Sequence Number=SeqID_122970
aagctggcaggaaaactgtggtaagtccaattaaattgttcactttaatttattcttttgccaaatttatatagctgtttcctgaaatgcctcaccaggtggctactgttttactgctattcacattatctggccctgttaaagcatcatcttatctgcttatgcatggagttgttggtctcatcatgggtactgtttggaggtgagaagtacaaaggttaaatttgaag

SEQ ID NO: 56997 - DNA, 248 bp, Setaria italica
  Peptide Sequence Number=SeqID_122971
cgtaaacattggcaagaattatgaacttgtagcaattcttgagcgagagaaaggccgaacttgcctatgatgtctccaacatggaagttcttcttcgtagtccagtcggtgtagttgatgttgccgaggatggtccagccggagctatcgccgaccttgtaggtgaccgccgacgaggtcgccgccatcgcgagcccaagcgtcagcaccaggaaacccttcatgcccatggccattgctgcacctgc

SEQ ID NO: 56998 - DNA, 371 bp, Setaria italica
  Peptide Sequence Number=SeqID_122972
cgaggtgtgccagattctatatggctacaagcagctgcttggaaacggtgggtgggagcagtgcatggccaccctagaaccagcagttgtgcagagattagctcgatatggagtatgatgcatggtggcaaagcacctgagaagctaaggtggttgtgattcattcaagcattacataccgcggagacagaggagccaaagagccatgagactagactgggttggtcaagcctgcctgtatgtcttgcctgtgagtgtgtgatgatgatgcattttattacatgtgttggcttcctgtgcccggctgcctactccattgtataacaacaagacaacaagacgtttaccaataccaagaagaagtttaagaa

SEQ ID NO: 56999 - DNA, 402 bp, Setaria italica
  Peptide Sequence Number=SeqID_122973
ttgaaggcgtggctgcaagtgtattgggcaaaccctagaaaggtctccaagaattccttactgttgcagctaagcaactgaaccctcaatccgtgaaggatgctgtctcagtagctaacaatgcttgttgggctattggtgaattggcaatcaagattggcaaagaaatcgaacctgtggtgatctcagttgttacttgcttgattcccattctaaaatctccagaggggttgaacaagtcacttattgaaaatagtgcaatcactcttgggaggcttagctgggtctgtccagacatcatggcccctcatatggaccatttcatgcaagcgtggtgccgtgccttgtgcatgattagagatgattttgagaaagaggatgcttttcatggcctgtgcgcaa

SEQ ID NO: 57000 - DNA, 245 bp, Setaria italica
  Peptide Sequence Number=SeqID_122974
ggtctgcttgttcggcatttgcaactcttgaagaggttatttgcatatcttggaatgctttctgttttcaggaagttgcataagaatcacttttatgcgtgcaagtaactttgcagcacctcatgtgtacatattggctttctgttttgcaggaagctgcagaagaattagtaccacacttggaagtaattttgcagcacctcatgtgtgcctatggaaaataccagagacgaaacctccggata

SEQ ID NO: 57001 - DNA, 132 bp, Setaria italica
  Peptide Sequence Number=SeqID_122975
gctcgttgcagggaggaagacgtgtgcgaggcagaggcgccggctgcgccggccacgggccctggcggcgcgccagcgtccaggcccaaggggcgccggcatacggggcccccaaggggcggccggaggagg

SEQ ID NO: 57002 - DNA, 240 bp, Setaria italica
  Peptide Sequence Number=SeqID_122976
gcagatctacttgctaattcgtcagatctgtacaatgcaatagcctttcccttatcagcttggttcgttcacagacgtcctcaacctcacagtcgccaggcattgctatctctccccaacactgggtccttcatggatggtgttcaaggcagcaagaatgactatgattccactcaagacaaacaaggcgctaccgtttctggtctggattcatacaaggacgtaggatttaatggcgtt

SEQ ID NO: 57003 - DNA, 247 bp, Setaria italica
  Peptide Sequence Number=SeqID_122977
tcctccccgacgcacagctcgcggcgcacctgcactgactccacctctttcgccgtacgattgatttctgcagactaaagacgtcctcaacctcacagtcgccaggcattgctatctctccccaacactgggtccttcatggatggtgttcaaggcagcaagaatgactatgattccactcaagacaaacaaggcgctaccgtttctggtctggattcatacaaggacgtaggatttaatggcgttc

SEQ ID NO: 57004 - DNA, 406 bp, Setaria italica
  Peptide Sequence Number=SeqID_122978
actcaaatgcctgcattttcttctcctttctcagaaagaaagagacctcattccctagtactctgttctagtcggcaaagaccttgtcttcgagctggaaggccttggtgaagaaggccggccagcagaggtaggtggagaggatgctgctgacagtggaggcacccatgagcatgttcatcaccacgatctgcagctggatggcctccagcggcgacgcgccgcccatgatgagccccgtcatggcgcccggcagcgcgatcagccccaccgtcttggcgttgtcgatcaccggggacagcgcgatcaccagcgacctcttcacctgctgcagtgtcgcctgacgcggcgtcgcacccagtagtctaagttgtctagttcttcctacctaggtttccttcttggt

SEQ ID NO: 57005 - DNA, 370 bp, Setaria italica
  Peptide Sequence Number=SeqID_122979
ttggttcttatttttgttagtttggttccttttaaaaccgttttccttttttcttttctttccttttcttctagtaaagtaaagtagtaccttctatttccctagtactctgttctagtcggcaaagaccttgtcttcgagctggaaggccttggtgaagaaggccggccagcagaggtaggtggagaggatgctgctgacagtggaggcacccatgagcatgttcatcaccacgatctgcagctggatggcctccagcggcgacgcgccgcccatgatgagccccgtcatggcgcccggcagcgcgatcagccccaccgtcttggcgttgtcgatcgaccggggacagcgcgatcaccagcgacctctt

SEQ ID NO: 57006 - DNA, 202 bp, Setaria italica
  Peptide Sequence Number=SeqID_122980
acgacatcgtcgtcaagaaccgggactacttcacggtcgtcgacgccgcctaaccgttgctcgccgtcgccacccggtcgtttggcttggctttaggcctggccagttgtaagtgtgctcttttatggtttgaagatatacttcgacacacacatacatatatatgtatatatagcacacacgcaagcatcatatcacaaac

SEQ ID NO: 57007 - DNA, 193 bp, Setaria italica
  Peptide Sequence Number=SeqID_122981
aaccagtactttccaaaccacaaatgagacaacaaaacttgcatgtttttttagtcagggctggagaagtgccagagaaggctacggaatccggcgaggctggctatggctatggctgcagctgcggctccggctgcagctgcagcccctgcagctgctgaagaggccgggatgtacacacacatgcctgact

SEQ ID NO: 57008 - DNA, 340 bp, Setaria italica
  misc_feature (10)..(10): n is a, c, g, or t
  Peptide Sequence Number=SeqID_122982
gctgacatanagggcttaagtaaaactactgtaccaaaacacatgcagacttttctttccccaagaccttgatgcatctgcagatgcgcagcttgagagtggtactactgtccaggataactgatcagcagagcaattgccttctgaaaggtttccatttgtttgttgcttagctaaatgtggagagtctgtctctatcatcaacctctcaacaggaatgcctcggagaacctcaagattttcattagttttcagagagcagccattaacacctataaacatcttctcaaaagaaaggagtctgtcacgatctgctgccgagttcagtaaaggagtgtga

SEQ ID NO: 57009 - DNA, 409 bp, Setaria italica
  misc_feature (132)..(132): n is a, c, g, or t
  Peptide Sequence Number=SeqID_122983
aaaggattttcttctgaagagctagttgatcatctagccaggtctgagaaggggccaccccatctgataaaataattcgaataaaagagttcagaaaataagtagtatacaatatttcgaaataagagttcngaaaaaaatctgcatccaagacaacaaagcagcagtggtgactaactgactatctattcctgtcaggtactaaagatgacaccaaagtcttgttggcagctaagacagtgagttatgctcagagataaacgtcaggacataggactcagaaaaggggtaccaaatcccaaagaaaagattttgagcttgcacatccctattttaccgacactccacataagatcagttttcttttgctgtcttaatctgacatatccagatgtgagcatccctagtt

SEQ ID NO: 57010 - DNA, 301 bp, Setaria italica
  Peptide Sequence Number=SeqID_122984
gaagaagaagaaaataaagaaacaaagcaggaattcacacgtcctgtgtgactgggtaaaacaacagcttggtgacaaggttgcgaaggtccaaatatcaaagcgtctaagttcatcaccgtgcgttcttgtatctggcaagtttggttggtctgccaacatggaaaggctcatgaaggcacaaacgcttggtgaacaacgtcaaagacttaggaaatttaatagaaggggggaaggaaggaatttttagaaaattaaaccctagaaccaaccctaattaatacaaaggaatttagaaaca

SEQ ID NO: 57011 - DNA, 179 bp, Setaria italica
  Peptide Sequence Number=SeqID_122985
gcgaaggtccaaataatcaaagacggtctaagttcatcaccgtgcgttcttgtatctggcaagtttggttggtctgccaacatggaaaggtaggattactgttcacttgtgcaattagatcattagaagaatcatgacctgtttcctgatgtatgtttcccaaaactaggctcatgaag

SEQ ID NO: 57012 - DNA, 198 bp, Setaria italica
  Peptide Sequence Number=SeqID_122986
agttctgacaggggggtgaaatcaatattatggggctaggggcattatttggttacaaatccttttatacgggttacttccatggcaatttttgtaggtgtagacttgcccgccacttccattttaatgttggatggggtagtggccttattctaattaaagtctattgtaagtattcgtaattgttcttatttctta

SEQ ID NO: 57013 - DNA, 285 bp, Setaria italica
  Peptide Sequence Number=SeqID_122987
tctaaaaagtagttctttctattattctagtacgtacttttgtattggcgagctgttttcccaggtacttgagctttgtgaaaggtgtagttgactcaaatgatctccctctgaatgtttctcgtgaaatccttcaagaaagtagaatagtcagaattatgcgtaagagactcgttagaaagacatttgacatgattgaagagatcgccgagaaggatgacaaagaggactacaaaaaattctgggagagctttggcaagttcatgaagcttggttgcattgagg

SEQ ID NO: 57014 - DNA, 425 bp, Setaria italica
  Peptide Sequence Number=SeqID_122988
aaagtccaaaggcagataagcagtatgtgtgggaggcagaggctgacagcagctcttatgttatcaaggaagaaaccaatcctgagaaaatgctgacacgtggaacacaaattactctttacttgagagatgatgataagtacgagtttgctgatcctgcaagaattcaaggcctagttaagaactactcgcagtttgtctcgttccctatatacacatggcaggagaaatcaagaacggttgaggttgaagaggaggaagaatcaaaagaaggtgaagaggctactgagggtgaaaagcagaaaaagaagaaaactataactgagaagtactgggactgggaattggctaatgagacgaagcccatatgggtaagctgatgccaacatatgtgataccataatctcaatattcctacacaagct

SEQ ID NO: 57015 - DNA, 477 bp, Setaria italica
  Peptide Sequence Number=SeqID_122989
gagtaaagaaataattgacgatggttcgaaatggataaatgtgagaaaagggacctgctgtatatgctgtgagactccaattgactcccttctgtacagatgcggacacatgtgcacatgctcaaaatgcgcgaacgaattggttcggggcggagggaaatgcccactgtgccgtgcgcccataatcgaggtgatccgagcatacttcatcatgtagatacgtggaagaaagcaagaagatagaggaaacatttgatatgattgaagagcttgctgaaaaagaagataaggaggactacaagaagttctgggaaagctttggcaagtttatcaagcttggttgcattgaggacacaggaaatcacaagcgccttgctccattgctgcgtttccactcttctaaaaatgagggtgatacgataagccttgaccaatatgtagagaacatgcctgagagtcaaaaggcgatatactaca

SEQ ID NO: 57016 - DNA, 182 bp, Setaria italica
  Peptide Sequence Number=SeqID_122990
cgagtctcccccagcatagagggctatttgaggcaaggaggtagctcgatatacacttcaatggtagcaacaattgcctcttggtgtttcacttgagattattgttgctaccattgaagtgtatatcgagtctccccagcatagagggagactcgatatacacttcaattgttgctaccatt

SEQ ID NO: 57017 - DNA, 275 bp, Setaria italica
  Peptide Sequence Number=SeqID_122991
ttcaaaggcgtccaggcagacccagctcgacttgggtaacaggtccgccttgtcgcctaggcgataaggcgtacaagggttaacataggtcgccttatcgcctttaaaacagtgccaaagcaaccagtactacaagaacgtgctggcgcaccgggtgctcttcacctccgacgcggcgctcctgacgtcgccggagacggcgaagatggtgtcggacaacgccaacatccccgggtggtgggaggacaggttcaagaaggccatggtgaagatgg

SEQ ID NO: 57018 - DNA, 224 bp, Setaria italica
  Peptide Sequence Number=SeqID_122992
ggaaatagtctgcaagggcggagtgtgcagcgccgtagacgttccggctgcgcgcgacgtcacggaaccagaggagcgcggcgtgaccgtccacgacattaccaccgaccgcggcatcgacgtccgcctctacctcccggcggccgcagctgccaaggcgccgcaccgtcggcgccgccctgtcctcctccacctccacggcggcggcttctgcgtcacccggc

SEQ ID NO: 57019 - DNA, 435 bp, Setaria italica
  Peptide Sequence Number=SeqID_122993
gcaactccacttccaagccagttatgcaccacagttttacgtatccaacttgtctccaaagttgttaaatgtctcttcccagttaatgatgtcataaccatgtgatattgctatctttttgtagctctcagtacaaaatatctgtaggcatcggattcattcatgccatgtttaatcaaccatgatttaatgcgtggtgtggtagtccagcaacctgaaatcataatatagcatgaatagattctaacatacataattttgctttacagattacagatttctgcaagcttacttgtgtttacttcatctcctcccaaatggacaaacttgaacttaaaaatcttgctgaaatctgaaagaattccattaatcacttggaatgtaaagtcgttgctgacatcgagcggttctttacatgtagctgatggccacaat

SEQ ID NO: 57020 - DNA, 298 bp, Setaria italica
  Peptide Sequence Number=SeqID_122994
gctaaactaattatgtaaaacaacaatatttccatgactggtgagtgaattgaagcaaaaaaatataccgaataatgcctaattttctaacagaatgatgattattctcctctatgaaatcatatatactgctacgactacgaatgtctactgccttagacaggaaccagggtctgaaggcgctgaacgaccataaccagctagtggtgcagcagcaacccctctttggtcagcaagcacctgaagcgtgccaatcttgcagtgactgatcctgcatcctttgcaagcttctcaatgg

SEQ ID NO: 57021 - DNA, 309 bp, Setaria italica
  Peptide Sequence Number=SeqID_122995
cgagcccttcagagctgaagacttcgaggacgcggggttacagacgtgctatctcttggatttcattgggccgaagaagttcgctttcgagctctcccagtttgtccccagtgtgatagcatttgatcaccggcaaagtacactagcaagaatccccaagttgggtcagtgcccaagcaatgttgagcttcatattgacacgtcaaaaagcagtgttcgatctgtatttgattatttctccaagaagctagcagggacaaaatctgactctcaaatgtgtgaaaacttgttcaaccaagaagatgagga

SEQ ID NO: 57022 - DNA, 195 bp, Setaria italica
  Peptide Sequence Number=SeqID_122996
taccactgccgacgatgctcagaaagagaagttgcttttgtatggaagaatcaaaagaaaggaacatatctactcttagattacaaactttccataatgacgattgcagtttatgaagtaagctgtttgcgatcttacaatcttctctaaacgagaaattgctttagatacaccttagaatgttactagtatagt

SEQ ID NO: 57023 - DNA, 488 bp, Setaria italica
  misc_feature (3)..(3): n is a, c, g, or t
  Peptide Sequence Number=SeqID_122997
ttnttaattagtttgtttctttgttttaggtttccttttgttttcttttgtttcctttaacctttgttctttatttagttctttgttaagttcttagttctttatttctactattattccttctaggttggggtcaaacattgtttggaagttctagcattacctgggagcgttgctgggattgatgttgttagtgactgtaaaggggtagttcactcatggttatctatgaagctttcatcggaagaggcgaacagtgctttcagagtattatctggttgcaaggtgaacaaagtttgtccactggagtttgacgaaccatcttcagtcgttaaggcatgtgcaaaggcatcttcgtcaacgccctcatgctgtgcagcattgcactcttacattggaactaggcagaagcaaatatttgtcacaaatctgcaagcaattaactgtgcgacgatgtttggatcaatgctacagaaagctggtgtagt

SEQ ID NO: 57024 - DNA, 208 bp, Setaria italica
  Peptide Sequence Number=SeqID_122998
ttgcttgccgccttctgatcgatcgagattcctcttcgtgttggttgggccgtgggtcgttgcgcgtccagtagcacggttgccaacgaagcgccgtcggtgaccgtgatggccaccttctggccctgggtgcagtgggaccccgccgcgcaggcgaagtacctcgtgccgaccttgtcgaacgtgaaggcggtgcggccgccgtcgt

SEQ ID NO: 57025 - DNA, 391 bp, Setaria italica
  Peptide Sequence Number=SeqID_122999
tttaaacaacaatacatcctccaaatactctagctccttatcaaaggtaaccacaaaggaggattacctttccaacttttggggaaaattggaggaatcacgaagagctcacattggatcatctggaggttctgtggatgctccaaaattctggaattatggttctacatccagattatttgagaatgataccgctatattctcattgggtactgatgagaaagttggcgagcctaccaaaaccaataatggtgaaacctctttacactttttgggctttctttacttcaaaatcgctctgcatgctttgattttttttggatagtttctactgatgcttcactttaccagctccccattaccttaattgcactctttaactgtgagcaac

SEQ ID NO: 57026 - DNA, 468 bp, Setaria italica
  Peptide Sequence Number=SeqID_123000
tttccaacttttggggaaaattggaggaatcacgaagagctcacattggatcatctggaggttctgtggatgctccaaaattctggaattatggttctacatccagattatttgagaatgataccgctatattctcattgggtactgatgagaaagttggcgagcctaccaaaaccaataatgggtctgaaaaaggttgcagcaacagaaccaatcagtgggtactccatacctatcacaccagccgaagatagaattgatggtattggtgaacctgtggaacttgcaaaggacaatgggaatgcatctgaaaattacaaacccgaataaaagtaagacaagaagggggaaacaaatagtagtacttaccaacaaagacaaataacaaaaggaatagactaactagaaccaacaatttaggtaagtaattagtttaaaagtacttaccctaacttagttactaagtta

SEQ ID NO: 57027 - DNA, 257 bp, Setaria italica
  Peptide Sequence Number=SeqID_123001
cgtataagctgaaatcagtggaagtgtaaactgtttgaactgatgccatgcatgagtttgtctttaacaaacctgtaaataggatcagagccaacttacacatccaggtgtcattgctggtttccaagctgggagattctgctgggtgaacctatagtaaactcccgatctcgccggcgggaaggcgcgcctcgtcgcgccaccggacgcggaggtgctagcttcgtccatcccctccccggcgagctcgctcgccg

SEQ ID NO: 57028 - DNA, 244 bp, Setaria italica
  Peptide Sequence Number=SeqID_123002
gtgcaggtgcggcggcgtcgtcgtcgacggggcggtggtcggcgccgaaggagcggacgtggtcgttgagggatcgcttgtgcttgaagtcggagccgcacgcacgagaagaactgcggcaagcgttggttctgcgcgtgcgtgcgccagtcgcccttgacggcgaagggcttggcgcagcggcggcagcagaagggcttggcgccgtgcttgcgcttgtagtgggtctgcagggtgcggaagt

SEQ ID NO: 57029 - DNA, 145 bp, Setaria italica
  Peptide Sequence Number=SeqID_123003
gagccgcaggcgcagaaccagcgcttgccgcagttcttctcgtgcgtgcgccagtcgcccttgacggcgaagggcttcccgcagcggcggcagccgaagtgcttgtccccgtgcttgcgcttgtagtgggtctgcagcgtgcgga

SEQ ID NO: 57030 - DNA, 238 bp, Setaria italica
  Peptide Sequence Number=SeqID_123004
atttcaccaaaccagaatggcgtgctttaatggatgaaatggctattgttgccacaaaggagtatcgatcaattgtatttgaagagccacgctttgttgaatattttctggaggttgtgacagtatagcaagatgggtagggcccccacctcttcccacagttccacctcgcccgtgaaacatagtcaacttaaccccatacaacttagcaaccttgatgagttcctcttgagctttg

SEQ ID NO: 57031 - DNA, 213 bp, Setaria italica
  Peptide Sequence Number=SeqID_123005
cgcggcgctggaaggcatcggcggcgtcgaggtcggagtgcgggtgcggggtggggaaggagtggatctggttgtgatcgcggcggagggagcggatggagcggccgatggaggcgagcggcgtggccggggaggaggaggaatcggagtacgtgtggtgtgacaggctagagctttgatctcttggttgaggtgagatcgatggcggaggcg

SEQ ID NO: 57032 - DNA, 141 bp, Setaria italica
  Peptide Sequence Number=SeqID_123006
ccgcgacgactgacctggacaactggtgaccggcggagctcttgggcttgacgatgaacttcatctgcaccatggggcagatgaagttcatcgtcaagcccaagagctccgcctgccgcgacgacggccggtcaccagttg

SEQ ID NO: 57033 - DNA, 349 bp, Setaria italica
  misc_feature (142)..(142): n is a, c, g, or t
  Peptide Sequence Number=SeqID_123007
atcctctcctcctgcaccaatgaggctttcctgtcgagctttgcaccacctcctatgtctgccactttctctgccgcatccaatgttgaaggcgcgcagtacacaacaggagcggcgatgcatggaaaagcgctgatcacanctttgtcagtgcagcgctccagcaagctctctgaattcagctcctctaagactgtgcttggaacaggatcaggacagaactcatcaggcgtaaagttgcacaggattcttgtcactaattgaagaccaattgaagggcagacctctttcctgatagatttttcaactgcttaatgaattgagtgatctcctgatgctcccaaaggac

SEQ ID NO: 57034 - DNA, 365 bp, Setaria italica
  Peptide Sequence Number=SeqID_123008
gttataaattggttgcttgaggtgtaatagcaggatcctagcacattgacaatctagctttgttccttagcaagcatcatcctgaaattccttacaaacaactacataacaattataacggaaaaactacttggaatgcacaaagaactgaatcagcacatacagagttcttcagctgcgcgcctgaaccaaagcttagatcaccagctggaattggcaggacttttgggtcaacgattgggtcagatataggatccgttggtatctcacttgctgattcacgaaggatggcattaaacattgcaacatccaaacgggctacacattgctccatcacctgataatgggagaactcatgagatctg

SEQ ID NO: 57035 - DNA, 323 bp, Setaria italica
  Peptide Sequence Number=SeqID_123009
gtgcttggaacaggatcaggacagaactcatcaggcgtaaagttgcacaggattcttgtcactaattgaagaccaattgaagggcagacctctttcctgatagatttttcaagaagcatgtcctttgggagcatcaggagatcactcaattcattaagcagttgaaaagatttttgattcagctgcacctcttctttcatcatcatcgtttcctatgtccgaatcatcatcgtcaatgccaaatttatctgtcagccatcttgaccagtttccaatctgcagtcattaattttgtataaattggttgcttgaggtgtaatagc

SEQ ID NO: 57036 - DNA, 276 bp, Setaria italica
  Peptide Sequence Number=SeqID_123010
cctatgtccgaatcatcatcgtcaatgccaaatttatctgtcagccatcttgaccagtttccaatagagttcttcagctgcgcgcctgaaccaaagcttagatcaccagctggaattggcaggacttttgggtcaacgattgggtcagatataggatccgttggtatctcacttgctgaattacaacgaaaggaataggacaattaaaacaattagacaaacaataaccaaaaacgggaactaaacaaacaaaatttaaagtaaacttaaacctaa

SEQ ID NO: 57037 - DNA, 259 bp, Setaria italica
  Peptide Sequence Number=SeqID_123011
ccagagcagtagattggcaaacatttcatttactagatagtaacttgcctatcccctgttgcgtgtctcaggagccccacgaagggcgcgccggcccggttcgcccggcgcacggctcgccacgtcttggtcgagatgaaccccgccgccggcgtcgccgccgccgtggccatgatgagcaccaccaccgccgccacggcctgcggcggcgtaactgcaccggctgccatcgcgtacgtgattcttcctcaacacttta

SEQ ID NO: 57038 - DNA, 255 bp, Setaria italica
  Peptide Sequence Number=SeqID_123012
atcgacgagggcacgaggcagcgatggtggggcgaaagccgatgcgccgccgccgagatcggcagccgccgcctccgccgccgcggtcgccgccgacctggacgagctgctgctcacggcgccgccgtcgtcggcgtcggagccccggagcttcccgtacgcggtgaagcagcagtgctgggagaaggcggagcgggtgcccgggcgcgacccggagaggtggcgccgcgacgcgctcggcaacatcgtcttccg

SEQ ID NO: 57039 - DNA, 468 bp, Setaria italica
  misc_feature (361)..(361): n is a, c, g, or t
  Peptide Sequence Number=SeqID_123013
cctaagcgtcgtttgcgcatggcactagatgttgcaaaggcatcaactatctccactgcctgaatcctcctattgtgcattgggatctgaagacaccaaacatgctggtagacaagaactggtccgtgaaggttagtacaccacccagatagcatagcatgatccagatccactgttctacttttgtttctttactttccttgattgatacaacttcaggtaggtgactttggcttgtccagatttaaggcgaacaccttcatatcatccaaatcagttgctggaacaccagaatggatggcaccagaatttctccgcggcgaaaccatccaacgagaagtgtgatgtttacagctttggngtgatcttgtgggagctcctgacaatgcagcaaccatggaatggcctaggccctgctcaggtagtaggtgccgttgcatttcagaacagaaggctccgattccgaaa

SEQ ID NO: 57040 - DNA, 416 bp, Setaria italica
  Peptide Sequence Number=SeqID_123014
gctgggatgatgatccaaggcagcggccttcgttttcaagcattgtggatacgctgaagaagttactcaaggctcttcttggaggctcatgaggacccttgcaagctgccttggctgccacttgtctccacctctgtttcgcgttccttttctgtctctgtcaatgcgatgatagcagaagcagcacaaatgcaatgctgcctcgagttcgataggtcactctctctttttctcctcatgcaaaaccataaaatcattgcttttgctctcccatgtcgccctggggtagccattgtacagcgatttcttgtgctaatagaagtttcacatgcctcagggttgggtgggtggtctgaatacctgctagtatccctgaatgttccaaatgattctattggttgtgcattaggactgaa

SEQ ID NO: 57041 - DNA, 277 bp, Setaria italica
  Peptide Sequence Number=SeqID_123015
cgacgcgtggctcctgtatggctgccgcggcggggtcggggtggtgatggtggtgcggcgggtgtgggtggtggtgcggcgggtggggatggggatggtgcggagggtgcgaagatgtgggtgaggtccgagaagaagagcagggccgggaggccgacgaggaggagctgcgcgcggtccatagcgccggcgccggggtggacggcttcggccttcggttgcttgctcgctgccttcgcgtctccggtctccggccctttccaagacgcggggttgt

SEQ ID NO: 57042 - DNA, 411 bp, Setaria italica
  Peptide Sequence Number=SeqID_123016
cattattgggtggctcgcaatatcatttgcaaaagattcctccttttgtttatgggccggctgctagaaggatttggtgttggtgtaatatcttatacagtacctgtatatattgcagaaattgccccacaggaccagaggggagctcttggtgctgtctttcagctctcagttacgattggtatattgctttcctacctgtttggcatgtttgttccctggagaattcttgctgttctaggcgttttaccttgtacaatcctgattcctgggttgttctttgttcctgaatctccaaggtggctggcaaaaaatggggaaagacggaagattttgagtactcacgtgacgtacgttcgtcgggggacgggtttactttacgaacgtacgtacgaactactaccaacgacg

SEQ ID NO: 57043 - DNA, 337 bp, Setaria italica
  misc_feature (226)..(226): n is a, c, g, or t
  Peptide Sequence Number=SeqID_123017
ggcctgaaactggggtttgccaccatttaatgattggattgatcacctcatcagcagtaactgaactcagcagtctttttgggcactgaaggtacagctatgacatgcattcccgcagcttttccagctgtaacacaaggaatcctcgattactaggcaatttgaaggagtggtgttcattctttttgcagcttccaaaaatatatctgggtatggcttccccttntctatttcatctccaccaacaattgcagagaaagactctttccaaccctgatggcaggaaattttggcttctatattaggtcttggcgagtttgaagccaaagcagtaggc

SEQ ID NO: 57044 - DNA, 299 bp, Setaria italica
  Peptide Sequence Number=SeqID_123018
aaattaagtaaataacttaaattaagtagaatagactaaataattaatccgtacaaaaaatggatcaataacactgctctcttcttaaattgcatcaaggaaagcatttccattactagttaaaatctgtgtttccacaagcgcgtccactgcatggtctttactagccttcaaggaatcctcgattactaggcaatttgaaggagtggtgttcattctttttgcagcttccaaaaatatatctgggtatggcttcccttctctatttcatctccaccaacaattgcagagaaagactc

SEQ ID NO: 57045 - DNA, 237 bp, Setaria italica
  Peptide Sequence Number=SeqID_123019
accttgctcacaacagaatctgtgtttaagagggtgccatccaaatctagaatcacatgggaaataagccgagaaatgggcttgggtgctgccattccaagcacagacaagttcaatgcagcaagacacaagttatttgggaggcacaaccataaggggcatcggagtcggagctgacctgcaagcggagccgcgcgccggaggaggaagaggaggccgatctctgcttgctgcggc

SEQ ID NO: 57046 - DNA, 242 bp, Setaria italica
  Peptide Sequence Number=SeqID_123020
gttgatgtgtgccatgacttgaagattctatctgctgtccttgattctactccatttgcattttccattaaattggctgctgctgcctcgaggaaagactacagctatcttgagaaatggctgacagaaaagttatctgtatacaggaaaggttttcttgaggaatgtgttaatttcctgaaaggaactatgagcaacacagattatatcttagtggctacgacacaacaacctcgagctta

SEQ ID NO: 57047 - DNA, 330 bp, Setaria italica
  Peptide Sequence Number=SeqID_123021
tgtactaggtcgtattgtctttcctacttacccgtcttcctagtacctatttgtattaattcttggttagcgtcgttgtttagattgtattacagcaaggaacacacccaaagtgcagcacttttaacgagaggtggaacaggaatatcttcatctgatttttttacactcctcttggcagtcattatcatgttagcaatcccttgaccaattataccacagacaaatccaactgagccatacaggacacccttgtaaaaaatcgttccaattctttgctgaactgtaaacctgctgcctggcctttcagcttcaaaaacgctgcttggc

SEQ ID NO: 57048 - DNA, 334 bp, Setaria italica
  Peptide Sequence Number=SeqID_123022
aggaatcatcaagttgtggcctcgtgggctcctgcctcttgggcaggtaattaagatgctgggaccagggtatgcctcggaccacccggcataccctgtagctccgccagtgtgcgagatagtgatgatttttctccctcagtgtttctgcagacctcgacgtcagaccagcaagcttcgtccatggccttgccctcgggccaggtagggttcaccagcacggtggagagagacgacaccacgacgaccctcttgaccttggcctcggagcacgccttgaggacgttcacggtgcccgccacggctggagcgagcagctcggcctcaggatcgg

SEQ ID NO: 57049 - DNA, 384 bp, Setaria italica
  Peptide Sequence Number=SeqID_123023
cccatcaggcatacagatgtcctaatgagttctatacaatttatattctatgttttagtttgtgttttggtgagtaccactaaaacacaaactaaaacatagaatataaattgtgttgaatttgtgctctaagggataactgctcctgttatactcagctgggacatcagacatagcagccattcaagatcctattcccatcaggcatacagatgtcctaatgagttctatacatcgtttttcttgatgatttttattgcattcaagattgtttagggtctttgagagtttgttgtaagtctggttgatttacattagccttagttttaagttttaaccttcaagttgaaatatgaactgtgttatatttagttcatgaatgaa

SEQ ID NO: 57050 - DNA, 249 bp, Setaria italica
  Peptide Sequence Number=SeqID_123024
taccataatagtatgcttcaggaggaattggaaaggctcaggaatctttaccctgatgttaccatcatttatgctgactattatggtgcttcattgaacatattccgggccccactccagtttggtgagtaccactaaaacacaaactaaaacatagaatataaattgtgttgaatttgtgctctaagggataactgctcctgttatatcagctgggacatcagacatagcagccattcaagatcctta

SEQ ID NO: 57051 - DNA, 184 bp, Setaria italica
  Peptide Sequence Number=SeqID_123025
cttggtttcggatgctaaggagaacacaagaacatgataaaagctgaatatctaggcatccactgtcatctagttcttggtttcggatgctaaggagaacacaaattttgatgtatctgtacaactattatgttaccatatttactttcattcacatgatgacataatagttgtacagatacat

SEQ ID NO: 57052 - DNA, 270 bp, Setaria italica
  misc_feature (24)..(24): n is a, c, g, or t
  Peptide Sequence Number=SeqID_123026
ggcccattcaccgcacaaaccacngttcacccaatctccaggtgcgctactgtgacaaagtaagcagcattcgccatccacatcatcatgcgctaactcatattccaacaagtatgtttcatagtgccttttcagtgtgttccctacaccctaaatgtatataaaaagaagcgcgtacaattagaactcagttaacatttgactagatcaataaggtaaaaagtgcatacaattagaactcaagttaaccctgtccttcaggatgaacct

SEQ ID NO: 57053 - DNA, 366 bp, Setaria italica
  Peptide Sequence Number=SeqID_123027
tgtccttgccataaaaaaaaagtttcaacacaacagagactgttgagctagaattctttgtccatacttcaatattcagaagtgcattcagaccgtcttctaaagagcccaataaacaaggatccaaggtgcatggcactccacagagaagtaatttcatggtgatttcttcatcatatatttttatagccggggtcactttcagaagaaccttcttcatcaacagtctcagtctcaggtgcacttatatttatttttggagcatcccccaggagacgaggaccaagtttacactttgcacatgattgtttcttacacaatataaacggaatgatgcatgagcaagctgaaaagcatcccatgtat

SEQ ID NO: 57054 - DNA, 252 bp, Setaria italica
  Peptide Sequence Number=SeqID_123028
tacccactggattttagcaccaactgtggtaaaatccgcttctattgctgggacactgctgggcaagaaaagtttggtggtctcagagatggctactagtaagtgataaatacatatttcatcaagtttatctgggttagaagttaattgaaagtgagatagtgtttgtgcatatcatgtgaagctttgtgtgacatcattccttgttttatgaaattatgtttgtaacaatgaattttgagtagtttcagc

SEQ ID NO: 57055 - DNA, 254 bp, Setaria italica
  Peptide Sequence Number=SeqID_123029
cgaagacgctccccgacttcacaagtccgtttcgaactctctagacgcctctctcgtcttcgtcgccgccccgttcggccgttccccatccccaaacccgcgttcccctctcgcgcgtcgcggaaatggcgttgccgaatcagcaggttgtggattaccccagcttcaagctcgtcatcgttggcgacggtggaactggtgattttctccgtcctttcctccgccttacatgatttttgattattcgttccggg

SEQ ID NO: 57056 - DNA, 342 bp, Setaria italica
  Peptide Sequence Number=SeqID_123030
aggaagctggcaggggaccagaaccttcactttgtcgaggctgttgctctgaagccaccagaagtgcagattgatatggccatgcaacaacagcatgaagctgagcttgctgcggccgcggcgcaacccctgccagatgacgatgatgacctgatcgagtagataatatcatggcccttgtcgatgatgtgcgagtgaacttttttataagaacccatagtggttcatccttagattttaggaagctggatgttctcttgatgtatctgatgaagaaatagaagttaatagaaaatttactaataccgaatagttagaccgaaggttaaaaaaaaaaaaaaa

SEQ ID NO: 57057 - DNA, 237 bp, Setaria italica
  Peptide Sequence Number=SeqID_123031
tcttatttcttttacttggggtagttttgtagtaagtaaattattgtagtccctacctatttggttgtttgaagtttcacccactggattttagcaccaactgtggtaaaatccgcttctattgctgggacactgctgggcaagaaaagtttggtggtctcagagatggctactatatccatggccagtgtgccatcatcatgtttgatgtcacttcaaggctgacatacaagaatg

SEQ ID NO: 57058 - DNA, 143 bp, Setaria italica
  Peptide Sequence Number=SeqID_123032
ctggatgttctccttgatgtatctgatgagaatgagttatgaaatttctatccgatgttgccgaggtttgttggtgactgaaaccaagtctcctttcgtagttaattactagtttcttgttcgttctacttaaaaaaaaaaaa

SEQ ID NO: 57059 - DNA, 214 bp, Setaria italica
  Peptide Sequence Number=SeqID_123033
ggatttgacgaatatcatcttcagatgccccttcctgatcagacactgcatagagaattgcgatgatgcaagggaggcaacaacaaacagcaataccaatgatacaagccagatgttgaccccatggggccttttggtggaataatgacagagtgcggcactaatcaacctattgagaaagtgcttgcagctgaagatgcagagtgttgtatct

SEQ ID NO: 57060 - DNA, 309 bp, Setaria italica
  misc_feature (104)..(104): n is a, c, g, or t
  Peptide Sequence Number=SeqID_123034
cccctcacaaattaagttaacaataacaagggaagaccctcaaaagaaaaaaaaagaaaaaaaattaacaaaaaaagagagagtgaattggagcagcagaaganaagggtgaagtggagtggatggatggatggatggatctatgcattcaccagatccaatgcaggtagccatccctgtcctcctcataattagtgcctcacctaccaataatactccaccaccgcacactcactgacacctctctctcttctttctctctcactctctcgtgctctctctgggtgttgcttctagttaagtcttgta

SEQ ID NO: 57061 - DNA, 248 bp, Setaria italica
  Peptide Sequence Number=SeqID_123035
ggatggatggatggatctatgcattcaccagatccaatgcaggtagccatccctgtcctcctcataattagtgcctcacctaccaataatactccaccaccgcacactcactgacacctctctctcttctttctctctcctcctcctcctcttcccccatttcatttctcccaagaaagctagctggctctcaaccgggctgggtgggcttcggttcttggttggacggacgtgcgctctcagaagga

SEQ ID NO: 57062 - DNA, 216 bp, Setaria italica
  Peptide Sequence Number=SeqID_123036
caatgctatggaattgcatcgctggtgaggttccattagcagcagcgtccatggggcactgcatgattcttgcagtgctgttgcaattgcaatgtacagatgaatggaagcagataagtcagttcggatttatccgatgagtcagttcatccgatcctcgcaggccgcagcgtcggcaccctcggggactgggtgggggcgcggagcggcggcgag

SEQ ID NO: 57063 - DNA, 374 bp, Setaria italica
  Peptide Sequence Number=SeqID_123037
gggatcccatctccatagcaatgccgcttttgaactttcaagagctgttggcaaaggagatgaatgtaatgttgagtcatcagcaatgctatggaattgcatcgctggtgaggttccattagcagcagcgtccatggggcactgcatgattcttgcagtgctgttgcaattgcaatgtacagatgaatggaagcagataagtcagtctgacaagaaaatacaagtggcagttagccagttggacacttgacatacagattaagcagcatatcaacttcacagtcaagtgaaagtgcagagatgattaatgaagaagttaagacaaactggaaggagaacaacaacgacaataaagaatttagattaaccacatt

SEQ ID NO: 57064 - DNA, 159 bp, Setaria italica
  Peptide Sequence Number=SeqID_123038
gggcggcatggagcatcgaaatcgcagggaattaagcgagaaacagtccgatcgccgtactcggatttatccgatgagtcagttcatccgatcctcgcaggccgcagcgtcggcaccctcggggactgggtgggggcgcggagcggcggcgaggtgtcg

SEQ ID NO: 57065 - DNA, 372 bp, Setaria italica
  Peptide Sequence Number=SeqID_123039
ccttgattgatcaagtcagcatgcagcaggagaagattgtagcgttggaagagatgaagatacggcaagatgaagaacgtgcacagctgaagattctgatacaggatcttgaaaaaaggagtgtgcaaaagttactaaacaagaatgtggttcctgttgctgctgttgtcataatggcttgcaatcgaccggactatttggagagaacagttgaatctatcctgaagtatcagacatcagttgcttcaaagtttccgctttttatctctcaggatggaacaaatggagctgtgaaaaagaaagctttggattataaacaaataacatatatgcagcatatggaccttgaacctgtgcgagctgaaaggccag

SEQ ID NO: 57066 - DNA, 261 bp, Setaria italica
  Peptide Sequence Number=SeqID_123040
accacacgccacgcgactcgatctgtctttttctagaggctgtagacagatctgagggaagggaagcacagggacgggaggaggaggaggaggaggagctcggccgccatccgttttactcacgggaagatcgacgtgcaccaccaatactcctgccttgagatggtttcctttatttttcagaccaagttgagattgtttcctttattttttgtgcacgagagaagtgacgaaaattaattaaacatcgtaaaccacgca

SEQ ID NO: 57067 - DNA, 491 bp, Setaria italica
  Peptide Sequence Number=SeqID_123041
taacacagctattccgattccattggagaggcatggcactagccacctcttttccaaatttggttaaaaacttatcctccctaaggtaactcagatcctccgaattccagtcaatatgaacatcatttaacttgatgggctccaaatattgctcaaagaattgtcccaagcttgatccatgtttgccaaaattgtatgttctacagatttccgggtgtatgaattgccggtttccatgtacctcctttagcctcacccaatcatcccaataagctttaggccactttggtgacagttcaatccaagtggactttgttaacatccatccaagcccaggaaagaaatccgagcggtaaagtgcttttgggtcgttgacaaactgcttttgcccattgtcgttccaagaagaaacagccataatcgtccttaaatgccacaattattagaacaaaaggaagtgattagagaaattatatatcgaattcctcaga

SEQ ID NO: 57068 - DNA, 250 bp, Setaria italica
  Peptide Sequence Number=SeqID_123042
gcgccgcccgtgccgctccttctcagcgcgagcagcttctcgccggcgaccacacgccacgcgaggctgtagacagatctgagggaagggaagcacagggacgggaggaggaggaggaggaggagctcggccgccatccgttttactcacgggaagatcgacgtgcaccaccaatactcctgccttggcggagatggctcgaagcccctgcgacctccgccttctcctccttgctgccgctgcagtcttt

SEQ ID NO: 57069 - DNA, 362 bp, Setaria italica
  Peptide Sequence Number=SeqID_123043
tattaacaaattatggaaaatgttggaaacgaaaatatgtaataataaacagccacatcatggatgtcagaccttctagaatgattacacgagcaaagttatgcttaatgaatagctgatccaatgcccacttataatgtttagcaatcttgtaatatgctgtcaattctcctggcctttcagctcgcacaggttcaaggtccatatgctgcatatatgttatttgtttataatccaaagctttctttttcacagctccatttgttccatcctgagagataaaaagcggaaactttgaagcaactgatgtctgatacttcaggatagattcaactgttctctccaaatagtccggtcgattg

SEQ ID NO: 57070 - DNA, 380 bp, Setaria italica
  Peptide Sequence Number=SeqID_123044
ggttgtgctcgtcgccgccgccagtcgtcgccgccgccggctcgagctcctcggcgtaaatgctgggatcgaagtttgtcaccgcgtccttgccgttgcacttgatggcccgcgcggtcgtacgccctgcactcacccgacaagcaatccccacagacacggggcatcatcaatcagttcaccaccgcccatggcgaggcgcctcgcgagcgcgctcacagtgcgggtccaattattttacctggcggcttcctcctcggtgtcgaacaggcccaagtagacgtacctgcagtgacacagaccggaggggtgacagccatgaatgggggtgagaggcgcagcgacagagaaagaagagccgatgatgatgatgcggggga

SEQ ID NO: 57071 - DNA, 172 bp, Setaria italica
  Peptide Sequence Number=SeqID_123045
tcaaggctgcccctcttgctcccggccgagcttcccagcgacaggtccaggttgtgctcgtcgccgccggagcacgtggacgaactcctccttgctcaggttgcccatctgctgcttcatgtcgtcttcgtaatcctccaggttgaaattgatgtcggcctccacgcggcgg

SEQ ID NO: 57072 - DNA, 179 bp, Setaria italica
  misc_feature (94)..(94): n is a, c, g, or t
  Peptide Sequence Number=SeqID_123046
ctacgagtgaaaggttataacaacgtttttgctattggtgacatcacagatattcctgtaagtctatacgttaaacttactgttcttatttttncaactgttgttttcttcacaccgattcctcttgtttcttaaaccagcaagaattgaattgcatagaagtagcaatcaccctaatt

SEQ ID NO: 57073 - DNA, 231 bp, Setaria italica
  Peptide Sequence Number=SeqID_123047
atgatgcatcgcaggtaggggaggtctggcgaggtcggattcgttcatcagttgggatgtgccaacgacggagtggatctcggtggttgccttcttgagcacacccaggttgctgagcaggagagccattgcccactcaactgtgctggaggacgtgtcggtccctgcttgtagcaagctctgtgcatgaacatatacatgtcgacaaaaatattattatttgacaaatca

SEQ ID NO: 57074 - DNA, 214 bp, Setaria italica
  Peptide Sequence Number=SeqID_123048
tgcatagctgtgattgtatcctaacagattgctaatgtaatgatgttagtagagacgagagctgctcatctgtcgataagattcattacattagcaatctgttaggatacaattgcatagctgtgattgttttcgaatatttcccttttgttgataggttaccatgtacatgatatgtatgacttgaaaccacttcacaacagaacacacatcc

SEQ ID NO: 57075 - DNA, 405 bp, Setaria italica
  Peptide Sequence Number=SeqID_123049
ccattatcaattgtttgattgtaaaatgacccttgcacaaaaatgttcatgcatctatgtaatcacctgattggagaattatcagtatccctttcatttatttgttgggcactttctatggtgagtctctcatttctgttcttaatctttttttaggcacatgagttggtcagtggactgcttggtatgtttcgagatagtgtattcacagttttacttcaagctgctgttcatgtgaaagaaaaaaaggttacagaaagctgaagaagttcttagccagtacgctgagaagcatcctgagaattctacagggatcctccttgcactcgctcaaaattgctgctaatgccaaccatttcagcttgctgctgactcactgtccaaaaatacctgaaatccagcaca

SEQ ID NO: 57076 - DNA, 380 bp, Setaria italica
  Peptide Sequence Number=SeqID_123050
tggtaagaaactgcagctattctccagctggaatcccagattttgtaccggctaggaagaatgaatgattgcatgaatagctatgagaagcttaaaaaatttaagattgactcaatggatctgaagataaatatcattgctgctctggttgctgctgggagggcttctgaggtacaggcagctatgaaggcgctaaaggttgatcttaccacaagagcactcagggatgctcgtagctttgagctggcatacaattctgcttgctccttgatagaaaacagaagtattcagaagctaaggagcagttggacttggctaaaaggtgaatttcctggtgctgtgattgctaaaatgaatgtgttccttcagttggctaaact

SEQ ID NO: 57077 - DNA, 218 bp, Setaria italica
  Peptide Sequence Number=SeqID_123051
atatggtaaacgggaagtcagacgattcctcaccacttgctgattcatcatcacttgctgtggcaacaacaaaccttatttcactaaaaggtacaaaagataccgcagatagcttgaagaagcttgatcggcttattgaaaaatctaatgctccaaaccagttgcaacttattgactgagacacgcaacggggataggcaaggcacacaggggatagg

SEQ ID NO: 57078 - DNA, 348 bp, Setaria italica
  Peptide Sequence Number=SeqID_123052
caaaggagttaatgttgagagcttggcaatggcttaagcttcttctcgtattgttcagccttctccaggctagtagcgactgcagctcgcactaacctggagaaggctgaacaatacgagaagaagcttaagccattgccaggcctcaaaggagttaatgttgagagcttggagaagacatctggcgcaaggcacgttgaagggccccaagacatgaaggtagacacaccagaggaagtgaagaagcaaaaggcaaggaagaggaagcggaagcctagatacccgaaggcttcgatccagcaaatcctggctcgcaaccggatcctggagagatggctgcccaggaga

SEQ ID NO: 57079 - DNA, 139 bp, Setaria italica
  Peptide Sequence Number=SeqID_123053
gttcatgtgaagaaaaaagatccagaaagctgaagaagttcttagccagtacgctgagaagcatcctgagaattctaaaggggtcctccttgcaacttagactacaagaattagactagactaaacgaccaaaccaata

SEQ ID NO: 57080 - DNA, 497 bp, Setaria italica
  Peptide Sequence Number=SeqID_123054
gtgtgttatgctactattttgaacaaatcatactatggaacgccagttccaaaaccctttgcatgcgtccgcacgtatttccattattttttgagaatccatatagataataatgaacttcgtaaaatgtctataatttagcatatataagtgaccgatcgatgtggcattattgaccaattgaattcaaatttcctaattttctttctgctagcagtgacactgaacctgcagccgagcaaaatgatttcatcaaaggcatatcaaatttcctctcttacaagaggtacgttgtctctattcccactctacttcctgattccattcctaaataccacgtatgtacttgttagtgtactattctgaacaaagcatctcatgtttgcaacgctagttccacaaccagtgcgtccgctcaaatttgcattacttggaaaatccagagacaattgaactttgtgaaatgcatataatttatcaatacttcagaggtgacc

SEQ ID NO: 57081 - DNA, 365 bp, Setaria italica
  Peptide Sequence Number=SeqID_123055
gactcgaggcgcacatctatatgttggataggtggaccaacagtcccaagcatggggtattcatttggtattgaaactatagagcccgcacaagtttccgtcagtccatagccttgaataacataagcacatgtcactaccctcaaaaaattcttccaccggtacagccaaaggggcaccaccagacacaataactcttaattttccaccaagcctttctttcaccttaaagataagaattgagttagaacaacaatgtactgtcaaagctgttgatatttccagttacatcttgtatgtagttacctaaaaagtttgtctttatttcttaaattttacctttaactttttgtttttacctttta

SEQ ID NO: 57082 - DNA, 252 bp, Setaria italica
  Peptide Sequence Number=SeqID_123056
gaaaatggacaggccatggtttttagtcttcctctttatggtcatttgtgactcctccaaagcttatgatcgttttcagatactttgaagtggcatggcaagttttcaggagctgccatcattgtaagaattaacaaacaactgtcacatacttagtataaagcaactgcggagctagtccagagaacaatagtaccacactgcgataatcactacactacatgcacatttcctcgaaacaaatttcgcgaa

SEQ ID NO: 57083 - DNA, 218 bp, Setaria italica
  Peptide Sequence Number=SeqID_123057
cctatcccctcgtgtgccttgcctatccactgttgcgtgtctcagatgttggggtgatgaggtcacgctcgatatcaaacggtaaaggatcgagatgtatagcttttatcaactcaaagcctctcagcttcttttccttcccgatctttatgagttctgcgagaatatggtctttggctctaggatttttgcatagttcagcaaaacttccggtaata

SEQ ID NO: 57084 - DNA, 198 bp, Setaria italica
  Peptide Sequence Number=SeqID_123058
ataatgatggaaaagcaggaatcaacacttggggatctttccatgcaagaatgcctgcgaggaagctggatatgtttgttgtgccaaggagagattggattgtttcagcggagctgtagtacattaacttcccaataatcgataagcacttgtgacgtatcggtgcatttacactagaaccatacacctgtgtcatcg

SEQ ID NO: 57085 - DNA, 219 bp, Setaria italica
  Peptide Sequence Number=SeqID_123059
cccgaagcaaactagcgcagaagtttccgaagctgttggacatcaatgtcaacagttgaaattgtctaaagccagaaaacttcctcttacaggataaagatgatgacttgtcgataaaagtaatcgactttggtctctctgtgttcttcaaaccaggtgatgttttcactgaagtagtgggaagcccatattacattgctccagaggtactgcagaagc

SEQ ID NO: 57086 - DNA, 197 bp, Setaria italica
  Peptide Sequence Number=SeqID_123060
atttgcactgtcatgaatttatccacgttccacatttgttcagtgtgaccaaatgatgtgccgcttgcgattcgcatttcaggcctcggatcatccattcaatctcaatgcccagaagatcaatgaaagaatcaaagacaggattctgggagagctcgactacctgaggtggggagttcccctcattttcctctacc

SEQ ID NO: 57087 - DNA, 371 bp, Setaria italica
  Peptide Sequence Number=SeqID_123061
caggaagtggcatatttgcagctggaggcgaggttgaagaggatgaatctgccaatgcctctgctactcccatccgaaacggctccaaagaactaccaggcaattagtactataagccacatctcatttgccgaggaagaaagcgtttctccaaagaagccgacttccatagctgaggttgcaaagcagcgcgagctaagtggcacgcttctgagcgaggatgacagcaagatgaagagacagatatctgacttgaaatccaaggagctcagcggccacgacatcttcgctcctcctgaggacccgcggccacgcaacttcggtagtaacggtcttcgtacctttcttacttagttacttaccgggttctt

SEQ ID NO: 57088 - DNA, 223 bp, Setaria italica
  Peptide Sequence Number=SeqID_123062
ggcacgcttctgagcgaggatgacagcaagatgaagagacagatatctgacttgaaatccaaggagctcagcggccacgacatcttcgctcctcctgaggacccgcggccacgcaactcggagaacggctcgacctctactagtactaccgggtctaaaaacgtctttattgtttaagttcttaacttttcttaagtttttggtttgttaagttccgttactt

SEQ ID NO: 57089 - DNA, 237 bp, Setaria italica
  Peptide Sequence Number=SeqID_123063
tgccaagagaggtacctggatggttgttttccattgttgttggactgtgggaacaatcttggaggctcttcttgcatgggctgtcatgccaggacttggatggaggtggttgcttgcattgtcctcggcaccatgctttgtccttctcattttctttcctctaaccacctgaatcgccaaggtatctttgctcaagaggtagaacaatggatgcttacagtcatcttggaaagaata

SEQ ID NO: 57090 - DNA, 329 bp, Setaria italica
  Peptide Sequence Number=SeqID_123064
cgtactggaagctcctcgtctgcttgccgtcgccgtacaccgtcaggggctccttcctcagcgcctgagcgacgaagttgctgacgacgcggccgtcgtcgatgcacatgcgcggcccgtaggtgttgaagatccgagcaatccgaacctcgaggttggcgccgcggtggtagtccatggtcagcgtctccgccgtccgcttcccctcgtcgtagcagctccgaacacctgctccgacaatcatcagtcagtcagcaagctcaatcatgcatcaacccaaaacacaacgaactttgtctgcctcctacaaattaaagaaaaattggaaa

SEQ ID NO: 57091 - DNA, 127 bp, Setaria italica
  Peptide Sequence Number=SeqID_123065
acattgtaattgatgttgatcttggttgtgatcaggaggccagtacaggtgataaggccgttgcacctccttggactgagttgatgctccctgtacatgacacacaaacgaaacaggtcatctaaaa

SEQ ID NO: 57092 - DNA, 258 bp, Setaria italica
  Peptide Sequence Number=SeqID_123066
caaaaaccattacatgaaggatgtgtcattatatcccccttccatctaaatatcagcgcaacagggatacgaatactgtctgtcactatcctctggttagcaatcaactagtagggagctgggaaactcacgggccagcagggagcaagtaaaccccacccaggtacctcacaaagtaagcagaattagatcgttgtattcccttaattttcttgttcgttgtattttattcgttactttagtttacctaattcgtaa

SEQ ID NO: 57093 - DNA, 142 bp, Setaria italica
  Peptide Sequence Number=SeqID_123067
tttacctaagtactttagggaactaacaaaccttaactaaccgaaacgaaagacaataggaagggctgccggcgctcggcccaggcggccgaccctgcgtctggcagttcaacttccgagggttcgacccgcggaccgacgt

SEQ ID NO: 57094 - DNA, 260 bp, Setaria italica
  Peptide Sequence Number=SeqID_123068
agatgaaataattcacgaacatttaagaaaaattaaggatgtgctgagaattatgtaccttttgtgaagatcccttgccatgaatttgcaaccatcaggaacataggattgcatgttcagtgctatattgggattatgaacgctttgacgaacgtggaccatgcccaccggtttcttattctcgtcgtaaagttttgctctgctttcacaaagtagtaagtaagcaccggggctgcctgaccgtcgttgtgacggcagtg

SEQ ID NO: 57095 - DNA, 400 bp, Setaria italica
  Peptide Sequence Number=SeqID_123069
gggatgtcttatgatgatccagaagactgggactataggcagttagataatccagccatttgttgcacggcattgttcatgacaatggcttcggccaccttgtccggataaatggcagagagggtggttccggtcttctgacagggactcaactgatggatttctgggatcggctctgcagatacctcagagtcaggtaaagccaacttgcttcaatgatttcctttacacacacagcatgatgttgagattgtctactgtgctctgttttttggcacaagcaacacagggtgtggtgtaaccgtggaactgtggaagtcttgcacggccagctttgatctcttagtacctcttttctctttgttgcaactgatacaccatcaagattagctcagtttac

SEQ ID NO: 57096 - DNA, 224 bp, Setaria italica
  Peptide Sequence Number=SeqID_123070
ggtcttctgacagggacgtcaactgatggatttctgggatcggctctgcagatacctcagagtcagaaaggtctcgttgatggatgtctctaagaagtatggaactgactaccggatattacatgctgtcaccactggtcattcttggtatggccaatggggattcaaactcagcaagggaagctttggaatcacatcaaaagaatactttgaagctatagaca

SEQ ID NO: 57097 - DNA, 255 bp, Setaria italica
  Peptide Sequence Number=SeqID_123071
gcccaggacaaattatcactgaaatggtagttacacttacacaaggattataatgcacatataacaaatggataaattttgatagcacaaatgcaatgattggaaatccacacggaaaaatttagccatacccagaactcaccggatcaaagtcctccctaagaacaccccggcttggtgaagccttcttgacctctgcaatcagagcaggcaagccagtccgatcatacgacgccttgagcgccccaacgaagt

SEQ ID NO: 57098 - DNA, 385 bp, Setaria italica
  Peptide Sequence Number=SeqID_123072
ttcttgtacttaattgtacttagtattagtattattactagtttgtaattcgtattcgtattccttctttatttttttgttgtagttctacctattgtctatggttcctagcaccgtttgattagcttgttggtatatgtgtgtcaggtatacattgtgcagctctccatatatgtctatcaccttttacgctttgatttgagggttgacgtctgggagttgttgtgccaattcctcttcctctggttgatgaaccagttgttgatttgtttcagctgcaggccagtctcttcaacaagcttcgccttatcgtcttccgtggggtatgggccacttggagtgctgctgccaccattgcttgaggatgctggtggtgtccccgagg

SEQ ID NO: 57099 - DNA, 234 bp, Setaria italica
  Peptide Sequence Number=SeqID_123073
ctgggattgacgtagatggagacgacgccggccccgtcgccgtcgtcggccgccaccgctgcggagacgagcgagaggtggccgtcgtggaggaagcccatggtggggacgagagcgacgaccttgccctccgcgcgacggcggcgtgaccacgcgcgcatcgccgccttgtcacggatcacctcctcctcatcagtctgccgtggaggaagcccatggtggggacgagagcga

SEQ ID NO: 57100 - DNA, 290 bp, Setaria italica
  Peptide Sequence Number=SeqID_123074
cgttcccgatgaagagacaattgatgatatgatagagactggaaaaagtgagcaaaatcttcaaagatgcgatccaacaaggaagaggccagatactcgacaccgttgctgaaatacaggagcgacatgatgctgtaagggatctagagaggaagcttcttgagttgcaacagatattcatggatatggcagttcttgttgaggcccaaggagacatgaatacaaacaaacaattagaagaacaacaatagtttacgaaatagactaaccaaatacaacaataacaaaca

SEQ ID NO: 57101 - DNA, 188 bp, Setaria italica
  Peptide Sequence Number=SeqID_123075
gagcagtgaaaaagaaattgaaggagcggatggatgattttcaggctttaagagaagcaattaggcaagagtaccgtgaggttgttgaaagaagggtttttactgtaactggtaatcgtcccgatgaagagacaattgatgagttattctttttccagttcatctaacttttgtcttcgcctgacgag

SEQ ID NO: 57102 - DNA, 245 bp, Setaria italica
  Peptide Sequence Number=SeqID_123076
gttgaatttctttgagttatctaatggtagatattcaattttttctttgttttaattctctggatcttgtcttgtgttacagggcagatgaggaggtatctgatccaaaggcgctcctagaggatcgcacaaaggctaagtgtgtgtcacagtggtacgaatatcagaaatgtgtcaagagaattgaaaacgacgagactgggcagaagcactgtactggccagtacttcgattactggaaatgt

SEQ ID NO: 57103 - DNA, 258 bp, Setaria italica
  Peptide Sequence Number=SeqID_123077
ccgtcatctcctcccgcacctcaccttcgtccttgtcactgattcaagaccagcagcgcgcacggagggttgagcttggctcagtggatgtcaatcgagcacggggacggcggaatagagcatggggacggtggaatcgagctcgtggtggatttccatggcggcagcggtggccggaggcaaggaggacgccggtgacgcaggggcggaggggacagaagcggcgcggaaagctccgaccaggagcgggtggccttc

SEQ ID NO: 57104 - DNA, 202 bp, Setaria italica
  Peptide Sequence Number=SeqID_123078
attggcagagcctgcccacaacttaaacgcttcagattgaatgagcgctggtctattcttcaaagtgagtttgcacccctatgagggcatggatgatgacaatagtatcacacacgttgccatgcaacgtgcaaaatgtaacttcaagctcctcgagctgaggtaaacaattaattgcctctgcaaaaccttcattagagac

SEQ ID NO: 57105 - DNA, 107 bp, Setaria italica
  Peptide Sequence Number=SeqID_123079
tcgaaatgtgctaggatacgagatctgaagcttcctcatgactccatctccgacttcatggcatcgtccatttggatgttgtagcactggcgtatgtcaagagattc

SEQ ID NO: 57106 - DNA, 182 bp, Setaria italica
  Peptide Sequence Number=SeqID_123080
taatctgcatcgattagtgtattttaaacagttttaagttaaatgttcacagaatataagcatacaacagagttataacacatactttgattaactcatcatagataaactgggcacactgaaggcttggatcgagcagacgacctatctgctttcgcacaagaatttcaaatggcacctcg

SEQ ID NO: 57107 - DNA, 271 bp, Setaria italica
  Peptide Sequence Number=SeqID_123081
gatttctccattgaccatctggctataatgaattcttgattgctcatcaccctgtaacaaggttggtctaggcacaccatacctctgagcatccctggagggagcattcaaaggcaatggcgaattgcttcctataaccataccaggagaaacctaggtaaatactaggaaattacaacattaggaaggtaaggaaagaagtaaggaaccaaataagaaaccaatagaattagttttagaaagaagactaaaacctaactttagttagtta

SEQ ID NO: 57108 - DNA, 236 bp, Setaria italica
  Peptide Sequence Number=SeqID_123082
tccatgtcatctttgatgtcttgaaggcaggttagatccagtttcacctgttgcaagtcaagggtatttcacatctgattagagaatggatgtctttcaaaatggaacagtatatgtagcgactcacagaccatcacaaacatggagccttcaggtttgctcgggcaagtaatggcactgatgcccttcagcttctcccagcatatatcagatgtttctctaagaattttgtacgg

SEQ ID NO: 57109 - DNA, 190 bp, Setaria italica
  Peptide Sequence Number=SeqID_123083
attgggttgcgggaacgctgtgcgattacactcaagaccttaaggaatggtagtgaatcttggcaggtacatagtctcccatgcaagaataacagctaccagctcaagaagggttcgttggttagtcctgctctctccattttttttctgccagggaaaaatgattcattaaattttaactaggtaaaac

SEQ ID NO: 57110 - DNA, 262 bp, Setaria italica
  Peptide Sequence Number=SeqID_123084
cggcagcgggcgcaacggaaaaataatcccccgagctggagaagccgcggagacccgcgccccgccggcttgcccgtcgcctagttgtccatggcggccgcgatgggcgccgtgatccggcggatgcacgcggcggcggcggcggcgcatcccccgcgcctgacgaagctcgcgctgcacccgcccaaatccgtgagtctcctccaccttagatcctatctaccttagccgattcctgcgagtttgaactgctcgcgtggtg

SEQ ID NO: 57111 - DNA, 437 bp, Setaria italica
  Peptide Sequence Number=SeqID_123085
gcccgtgcctatttaatataggtttttatgtaatgcccaagaaatttgtactcgctcagtggttgcagacccaggaatgtaggtttttatgtaatgcccaataaatttgtacccgctcagtggttgcagacccaggaacactaaagaataatcaaacaacctatcgcctaatggttgcaaaaatgcataatcttcctttaactatacctcattgatgaagcagcaacagcatgtgaggacaaacctagttctagatggttgtgcatgtcatcaaagttagaacatgaggctgacgctcacgctccaatcgagctcttccttaactcagcttttttagcaattgaatagatcgattcactcaacagattgttgatccagtgtatttttgaagtacatctacaatgctaattgatttggtcgtcagcagcatgccagct

SEQ ID NO: 57112 - DNA, 247 bp, Setaria italica
  Peptide Sequence Number=SeqID_123086
acacgctcattgatgaagcagcaacagcatgtgaggacaaacctagttctagatggttgtgcatgtcatcaaaagttagaacatgaggctgacgctcacgctccaatcgagctcttccttaacagctcctcgcagagctccttgaggggccgccggaatacggcgtggtcggggaagtcggcgaacctgtagaacgagacgaccaccagcgcgggggcctctccatccacggcccctcctcccacgg

SEQ ID NO: 57113 - DNA, 170 bp, Setaria italica
  Peptide Sequence Number=SeqID_123087
tatgatcctgaatcatgcattgtgccatcaatatcctcgccaatgtgctcattttcctgccatccatgcagccacacatgcaaggatattgatggcacaatgcatgattcaggatcataaattccccaacagataacaaatcaaccataaatctgagtagcctcatgatg

SEQ ID NO: 57114 - DNA, 451 bp, Setaria italica
  Peptide Sequence Number=SeqID_123088
cgcgaataggtttatgtgttgggatacgaggtaggctacactagtgcagttcaaaaattctaccgcgtataaccaggaagaactgccgtataaggatcacgggattaccactcgacgcactactggtgcggaagatgtagatatgcgtcgatgcagtgaagacgatcacatagtcgtacgtagtcgatcaacgtagtcgtacgtagtcgatcaacgtagtcgtacgtagtcgatcacgtccagcagctcctcagcagctcgtccacgtgcagcaagatcatctccggtaccgcggctcgtcgtcagctcgtcgtggctcgtcggcggctcgtcgatggctcgtccaagtgctgcaggcgcaccacctccaaggtatccacacgtgcaggaggaagtgtcgcaagtcggactgctagatccgtgagttgcaacaggcgagggcgtgggaggc

SEQ ID NO: 57115 - DNA, 348 bp, Setaria italica
  Peptide Sequence Number=SeqID_123089
atgcagtgaagacgatcacgtagtcgtacgtagtcgatcaacgtagtcgtacgtagtcgatcacgtccagcagctcctcagcagctcgtccacatgcagcaagatcgcctccggtgccgcggctcgtcgtggctcgtcggcggctcgtccaagtgctgcaggcgcaacacctccaaggtatccacacgtgcagggaggaagcgtcgcaagccagactgctagatccgtgagttgcaacaggcgagggcgtgggaggcgcggcagatgagtttcgccaaaaaggtgtaaaccctagggcgcccccaccctctatttatagaggttcctgatgggcctctgggtccgagg

SEQ ID NO: 57116 - DNA, 395 bp, Setaria italica
  Peptide Sequence Number=SeqID_123090
tttgtgttctgttgtagatctttgtggtagcttacagtcaatgtagagtccgtagagacacctgttgggatacgaggtaggcactcgacgcactactggtgcggaagatgtagatatgcgtcggtgcagtgaagacgatcacgtagtcgtacgtagtcgatcaacgtagtcgtacgtagtcgatcacgtccagcagctcctcagcagctcgtccacgtgcacagcaagatcgcctccggtgccgcggctcgtcgtcggctcgttgtcggctcgtcgtggctcgtcggcggctcgtcgatgactcgtccaagtgctgcaggcgcaacacctcaaaggtatccacacgtgcagggaggaagcgtcgcaagccggattgctagatccgcgagttgcaa

SEQ ID NO: 57117 - DNA, 160 bp, Setaria italica
  Peptide Sequence Number=SeqID_123091
ggtgtagtgctgctaggtgccatttaatcactcgacgcactactggtgcggaagatgtagatatgcgtcgatgcagtgaagacgatcacgtagtcgtacgtagtcgatcacgtcaacgtccagcagctcctcagcagctcgtccacgtgcagcaagatcg

SEQ ID NO: 57118 - DNA, 190 bp, Setaria italica
  Peptide Sequence Number=SeqID_123092
tagtacttagtaaattaaggtaagtacgtaagtacttaaggttactaacccttctttgagagggagtaaggatcaataatggcatccttgaagatccatggtgctgtggcagttgtagcggtgatcttcctcgccgccgtggtcccttctgcatcgacgacggtcgacgagcctgctacgtataagccca

SEQ ID NO: 57119 - DNA, 239 bp, Setaria italica
  Peptide Sequence Number=SeqID_123093
gcttagttctcgtagcttcgtgttcccagatggaggattcggtgggtgaggaggagaggagggagcaggggaagacggtggcgcagccgaaagcgcatcaagaagaagcggcggcgaggccaatgccgccgcggcgtctgatggcgaggcgctgaagagagatggtagcggcgagccaggtgacgaggacgggttcctgagcgcgatggcgtccaagatcggcgcggcgatgtccggtg

SEQ ID NO: 57120 - DNA, 383 bp, Setaria italica
  Peptide Sequence Number=SeqID_123094
tattattgtctaagtaaaggttgtctaattctttcttctaaattaattgttgtattgttctacttagtagtagtagtttaaattatatcaactgctctagttctaatgtgcccgagacattaagatcaacaatctcagatgatttggctagtactgaaacctttagtccaccacttcctgccttggacaatagtgcaaacaattcacctttcagtgtgcgaggacgtaagccatatttgaccatttgatttttctccttgttaaagaaatcccgattcagcatatgttgtttggacccaagcccgaagcaacaaggacttgtcgcagtatttcaacccaagtaagagaattcagtgatctgatccagaattacatcgaattct

SEQ ID NO: 57121 - DNA, 382 bp, Setaria italica
  Peptide Sequence Number=SeqID_123095
tctccaacctccggccgcgacgacgacggcaacaagccgtggagcttcgcgggggtctcaggcgatccggacccgttcccccatgaggaagccgccgccgacgctggagaggcgctgccggtaggtcccgcggccgtcgccgacgagccctgggcgaagggcttcggcgtggaggacggcgatagtggggacgtgttcgaggggatctacaaggaggcggcgtcggcggccccggcgagcggagaggcggctccggcagggcgacgaggagcagtggacactgagtggggatgagaaggatccctttgccgatgctgtgcttggggaggggatcggatgggattcaaggtgagggtggtgggctcgatgagctcgatgcggt

SEQ ID NO: 57122 - DNA, 242 bp, Setaria italica
  Peptide Sequence Number=SeqID_123096
caaaccgacgccctccaaccaacaagggacgttgcgagcttgttgccctggtgccactactcggtcgatcccacacctgctgtgggcccgcggtatcatgcagagaggccggcgatctgtcgacttctctctgaatagaagcccgtgatcaagagaatccgtggataagatatttctacctgcatatcatagcactacaaaaatcatgagagatcttcaaggttgagcaaacgaaactagca

SEQ ID NO: 57123 - DNA, 235 bp, Setaria italica
  Peptide Sequence Number=SeqID_123097
aaacaccctcaaaccgcgccctcaaccaacaagggagttgcgagcttgttgccctggtgccactactcggtcgatcccacacctgaaacaaaggcaagaaatgtgtccggagctagtctcacatcgcctgctgtgggcccgcggtatcatgcagagaggccggcgatctgtcgacttctctctgaatagaagcccgtgatcaagagaatccgtggataagatatttctacgcgaa

SEQ ID NO: 57124 - DNA, 205 bp, Setaria italica
  Peptide Sequence Number=SeqID_123098
caaccaaccgggggcgaagaacaaggcgaagcacggaggacgcacgcgaagatgctgcagatggcgacggattgtagagagcggcgaccggcgagcgtccgatcgaggtttcgcccgccgcaagacttccacgggcttatctgagcagaggaggaggccggaagaaggaagagctgactggtcacactgttctgcagacagaaag

SEQ ID NO: 57125 - DNA, 240 bp, Setaria italica
  Peptide Sequence Number=SeqID_123099
agtggaagcagcagtctgcttgttcttcatccgctccgcgtcttcctggagctcctgctgccgcatcccgatctgcgcctcgatcaccctctgctcctcaagctgctctatgcccttctcctccttggtcttcacgccgcggtactccactgcgtaattcagtgttttgcagtacgggcatctaacaagtcaagtcaaggggcaactgaacaataactggcacaatttactagcaccggg

SEQ ID NO: 57126 - DNA, 236 bp, Setaria italica
  Peptide Sequence Number=SeqID_123100
cgggaggtcggacagttgtgacggagaactgctagctcatcgagcagtgaaagaatttggaaccatgtgtttataggcctctagtccagctttatgtgctattcatagttcgaactgaggcggctgaattggcagcaatggcctccgctgtaacatcagacccagcatgactagtaccgtcctcagcgatctctgaccactgatcattagaagactcggcaccctctactatttgg

SEQ ID NO: 57127 - DNA, 157 bp, Setaria italica
  Peptide Sequence Number=SeqID_123101
cataaaactatttgcagataattaactgcacaagtattattcataatccagacgctgcgtcatgagatacagcggcatcagaagtcaaaacaaggagtagagagatgcctactccaagttgccaatttacttctgcccacgattgcagcggctgccg

SEQ ID NO: 57128 - DNA, 162 bp, Setaria italica
  Peptide Sequence Number=SeqID_123102
tcatgacgcagcgtctggattatgaataatacttgtgcagttaattatctgcaaatagttttatgtgatgtcacgtcctatcctccaagtcatgagatacagcggcatcagaagtcaaaacaaggagtagagagatgcctactccaagttgccaatttactt

SEQ ID NO: 57129 - DNA, 435 bp, Setaria italica
  Peptide Sequence Number=SeqID_123103
gccctttgttaataaaagtatataaacctggagttgtccttgagggtgcatgctaaagtgtgtatccattgagctttaagtatctttctcggcttgcctgatgcaacatatcaaatgattatcgttatttatatgtcgacctatctttagtctgttttcatttttttaattgttcttctgtaatagaggtgtgatctgatcttctgtttgaaacctgttcacaggatgctgcaaaggtcatcaaagccagaattgcggagaacccaaattcaatgaacttcaatgtcatggctctttcgaagcagtgaagtaaattgtgatggataggttttctttggcagaagacaggcccccttttcttttaagttgtgctggttacagctggttacttgtctaccgtaattagtaattgttttgtaattagggtaaactaaa

SEQ ID NO: 57130 - DNA, 431 bp, Setaria italica
  Peptide Sequence Number=SeqID_123104
attgccaagtgttgctgcgttgttcctcgatgacaggagtgcgtgacatctgcggaggataagaagatatccaatttgcccacaaatttgcaactttaacaatatagtgattgtcattccacatgatcaacttcattcctggtacagaactgggtggcaggaggcttagtctacatgttgtcttgttggtgggaagaaaattttgtaggctgggcacctcaagttcattaatattgtttatggactccaaaagagctttagccacagatgcatctacgtgattgctgtcaacaacccttttaagagccatttctaaaccacttgtccaagcattaatacatctgtccaaacaaaccagcattttactcaacattccaggatctgcagatcctggaatgttgagtaaaataaaatctgtgcaaactctatat

SEQ ID NO: 57131 - DNA, 249 bp, Setaria italica
  Peptide Sequence Number=SeqID_123105
tcacctgttgagctactagaacggttttcatctgtttcaaatgaagagttcatttcattgttagaaaacaaatcatacgaattctgcacactttctgcagagctttcttcaatgcgaataacatctgcccgaacactctcttcgtacaggttgagtatggctgaattattaggcggagagtaaccagaggccttcacacattctcccgtggactcatgagtcccaatatcaacagtagtttgacgaaaa

SEQ ID NO: 57132 - DNA, 169 bp, Setaria italica
  Peptide Sequence Number=SeqID_123106
taaaaccaacatagctgaaagtttatagttgaattccatctgtgaagataaacgatcatccaaaaacaaacgataaagctttactgattgtgcaaaatatttataccttcagaaatcactcggtcgcagacatttgtatgacaagattcttgccaaatcgctaagaaac

SEQ ID NO: 57133 - DNA, 269 bp, Setaria italica
  Peptide Sequence Number=SeqID_123107
gtcctcctcgcaaagttcacattgccacaactcgcatcagggcaaacccaatcgccctcgcgtcctcccccgcggccaccaccgcctcggccacctccacctccacctcggcctccgccaccaaagccgccgcctccgcctccacctctacctcccccaccgccgtagccgccgccgccgccgcggtagtcgtcggatccgtaagaccccgacatgggctcacgacgcgcctagggtttgggaccgttcgagaagacgggggaacagag

SEQ ID NO: 57134 - DNA, 144 bp, Setaria italica
  Peptide Sequence Number=SeqID_123108
ggcagcgccggtggatgcgttgcggcggcggcggtggatgcggcgcggctagggcggcgtcggatccgtaagaccccgacatgggctcacgacgcgcctagggtttgggaccgttcgagaagacgggggaacagagtgttcgtg

SEQ ID NO: 57135 - DNA, 448 bp, Setaria italica
  Peptide Sequence Number=SeqID_123109
ataaacaataaccgtgttacttccattcagaagacagcaagtacaatatgaatatatatcagatggctctaaaatactactgtagcatatattcttgtttccttcagagactgtttgattgctaacttattctgatgtctggtgatactttgtagactgtagtattcaacagagaagcctccatgggtttaaaatgtgtgcgcatcctaaacctccacggacgctttcctgttcttcttcttcttcaccttgagccggattttagggcgggaggcgtcgccgtccgtttgcccgtcggtgtcgtccccggagaaggacatggatgcggctgctgatgcctcctggtcctcggccttggactggaggcgcttacaatagaagacaaactaacgggaacaaaccaaacccaaaagttaaaggaaaacaaaacgaaaaagtaaaagaaaaa

SEQ ID NO: 57136 - DNA, 284 bp, Setaria italica
  Peptide Sequence Number=SeqID_123110
ccggactggccgctggacgagttcttcggcttctcggagttcaacgccggcctcggcttcaccgaaaatggaacgtccaaggtcagtactgattttttttttcagcatgtgaccactgaatggacctcccaatttctcaaattttatctgcagagttttcttggcacgcattttccgttggaaatttgagtaaatcctgttaaatttcaagcctctactccagtagtttatttatcttgttgctcatgtaaagattccctgtaatttttttggcaacaggttgc

SEQ ID NO: 57137 - DNA, 233 bp, Setaria italica
  Peptide Sequence Number=SeqID_123111
aaactaaaggaaaagtaaaaggtaaagtaaactaagggtaagtagtaaggacttagacaacgaaacaaagatttgctggcgtgtacttccatggtgaggagtcagtagctcgtaggacaagatcgagagtgagggttgcttggagaagatcagatgaagcagacagagatagcacttgtagttcctagtcgatgaacctgattaactaggagatttctgtgtgactatgtacg

SEQ ID NO: 57138 - DNA, 424 bp, Setaria italica
  Peptide Sequence Number=SeqID_123112
aggttctttatatttcaactgcttcattgagtggtaattatgtggccttcatatgtttactcctgtctgttaaataggacacaatggtagcataaatggccagggtgaagtttggtggatgaagcatcggagaagaatgttgaataacacgagacctcctcttgtgcagctgatgtggtccaaggacattattgttgcaaacataacattgcggaattcacctttctggcactttcatccatatgattgcacaaacgtgactgtttcaaatgttactatcttatctcctatttctggcgctccaaacacagatggcatagatccagattcttgtcaggatgtgctcattgagaattgctacatatctgttggtgattgtattgtctaattagtcttgttaaagtagttggtcttgggtatctaa

SEQ ID NO: 57139 - DNA, 233 bp, Setaria italica
  Peptide Sequence Number=SeqID_123113
cgtgtctcagtccagatgttcatttagataactactctacaaaaatcatttcagtccaatagcaagacatgagcaggtcttccagcggtttatcaccttcgtacagatagacccatctgatgttaaagcccgggataggtgcgacagaggataccctgagagagagcgcggcagctcgagtccgtgctcagccgcgacgtcagcctggccgccgccaccgcgctgtgcagcgg

SEQ ID NO: 57140 - DNA, 486 bp, Setaria italica
  Peptide Sequence Number=SeqID_123114
aaaagtgctcttgtgcttgtacggttgtaccgcacctttatcaagtgacaagtggggggttcgtgcggagtccaccagcgaagaatcctgatcggcgtcgtcctctccgcctccggtgccaacacgcctgaaatcctctccaacctctcccgcaccttctctcctgcccgccgacggtcaccatctggatttgctgctcgcccccatcgcacaagagccctccacctagttcgcggggcgggctcggaggagagtgagcgatggctcaccaggtgctcctcggtaccctgcgcgccaacgtgctcaccaatcccacccgcgccggcggaggcggccgcgcagcgtctccaggatcgtccgcaagaataggcagagggcattccggtggcagccatctcagatgattatcttccgatgcgaagtactgaagcgaaaaatcggacatcaaaagatgacatcacaagcctcagactaatcacagcggtc

SEQ ID NO: 57141 - DNA, 215 bp, Setaria italica
  Peptide Sequence Number=SeqID_123115
agcgtctccaggatcgtccgcaagaataggcagagggcgatttccggtggcagccatctcagatgattatcttccgatgcgaagtactgaagcgaaaaatcggtaacttcctgaagataattggttcctaattgaatagatttgctggtggatggtcatagtatagtgcctgtcagtcatgcattaaagatcttaacaactgtctgctctagttg

SEQ ID NO: 57142 - DNA, 192 bp, Setaria italica
  Peptide Sequence Number=SeqID_123116
aggatcgtccgcaaggtcagcaagtgccatcacctgcacggaataggcagagggcgatttccggtggcagccatctcagatgattatcttccgatgcgaagtactgaagcgaaaaatcggacatcaaaagatgacatcacaagcctcagactaatcacagcggtcaaaccccctatttaccagatgggagat

SEQ ID NO: 57143 - DNA, 189 bp, Setaria italica
  Peptide Sequence Number=SeqID_123117
agacggatgttcgtgccgttcgtgccctccggcgacccgccctgcgtcatggccatgttccaggtgagacagtgcgcacacacacacatgaatccatgctccatggtcgatccagcatctctgcgcttttaatcctgtgtaagtagcttcgatgcccacgggtcgtaatcagtcgcgctctttagctat

SEQ ID NO: 57144 - DNA, 220 bp, Setaria italica
  misc_feature (197)..(197): n is a, c, g, or t
  Peptide Sequence Number=SeqID_123118
ctggccaagcatgataataaagaatctttgctccgattccatgttggatctgcaaatcaacatggaatcggagcaaagattctttgtggtgaaggagcattggagctctatctggccaagcatgataataaagaatcaatgcatcaacagctggagaaatcgaatggggaatctgagatcgatgcagaagccccctntagagtggccagcatgtagggtt

SEQ ID NO: 57145 - DNA, 187 bp, Setaria italica
  Peptide Sequence Number=SeqID_123119
acctttattgcataggggtagggaatgtgcattgatacatgcaaagaacaaagtggttactgtgcatgacaattagtgaagtgaccaggcattgggtgaaggatgattaacatgaatttgtttgtgttgatcaaaactactcatcatcaacagctggagaaatcgaatggggaatctgagatcgatg

SEQ ID NO: 57146 - DNA, 359 bp, Setaria italica
  Peptide Sequence Number=SeqID_123120
cgggcgcatatcaacgatggaatgttgaacctggttgctgacaactggaattccattttctagaattatttgtagtctttctgtatcgaagtttgtcagagctacagtctttatcttgccttcagaattctcggaacaaaaaaggtgttatgtaagaattgattcatactaagaaggcatgaatgcataacagataagagcactatctggtttaagtttagaaattagaatgttaccttcctccttcaggtctgtgatgtgctttagtgcatccaaatatccaggatttgtgtaatcccacagtggaactgcaacatgtccaatgcagcaacatccatccctcttccgagatctgttga

SEQ ID NO: 57147 - DNA, 210 bp, Setaria italica
  Peptide Sequence Number=SeqID_123121
ttttttttttttttttctaaggatacaggtggtgagttcttcctgaaatccagctttcataaaagtggactccaacaactcaaactcctcctccatctgtaacattccattgcttcaataagaatacaactaaataacaatgcagattaatgaccaagcctaattttatgtgattatggtgcaatagaaaaattatcaaatgacaatgag

SEQ ID NO: 57148 - DNA, 230 bp, Setaria italica
  Peptide Sequence Number=SeqID_123122
gtcaaattggagcttcatttacacatgacaggagggtggaggtgcaaacattcgtgcacctggttgctgaatatgggcagaggttactcgtgtacaatcactttagcagaacaacactagatgatgcacttcatgatgcagaggaaactggaagtgctctgtcatggaatgctcgccttcaggttgctcttggttcaggaaaagccttagagtatctgcatgaaagctta

SEQ ID NO: 57149 - DNA, 262 bp, Setaria italica
  Peptide Sequence Number=SeqID_123123
cggcacaccggttgactgcgtctcgttggcattatctgggaggctgtttccttggtcagcgcctgctttggtagtgggcttgtttattctttagcattgttatctttgagggtaatttgatttgttgtttaaaccataacatttttttggttcatacaggtgatcagtggtattaacgcgggacctaattgtggatatgagatgttccactcttctgccattgccgctgcaagggaggccttagtgtatggcgtgccttcaa

SEQ ID NO: 57150 - DNA, 366 bp, Setaria italica
  Peptide Sequence Number=SeqID_123124
aagatcctcctccaagtttttgcgcatctcatttgaatcctcactataatagccttcttctcttgagttagctagacaagtatgcagaatacgctgcaacgttgatggaaggcgatcttcctcaggcaaggactgtgcttgtaaaatgaatcgtttctgtgaattgtccaaatccaattctcttgccgacttgtattctgcatacttctgatgcacaacttcactatccaaaatcttttgtaattcctcacacttgcaaactttgcatgcccgcgccaaattttccatgtcgtccacagttccttcctgtctttccagtctgtcttgaacttcttttcaaagaaaggagatcgggcacaaaggatg

SEQ ID NO: 57151 - DNA, 250 bp, Setaria italica
  misc_feature (1)..(76): n is a, c, g, or t
  Peptide Sequence Number=SeqID_123125
nnnnnnnnnnnnnnnnnnnnnnnnnnnnnnnnnnnnnnnnnnnnnnnnnnnnnnnnnnnnnnnnnnnnnnnnnnnnacggttaaataaatatcattgcaggacatcccgtgtctaaagtacgattagttttaaacacatgacaagacccctgaaatcatgccagcgattaacaagttcttcactgagccaaagtgaagcattttgcttggctgttgactgctctgcttaaatggcttattgttcgtattt

SEQ ID NO: 57152 - DNA, 441 bp, Setaria italica
  Peptide Sequence Number=SeqID_123126
ataatgtgcagaggagataaccgatgaaaatagcattgtgtttaagttgatccataggatttgtcttgtatgcttcatgtttatgaggttcactggtcgttttgaacacaattgtgcttaacgtgtaatatcgctgcgtcggcctactattaaacaggcaagatacctgcaactgtcaagaatgcttgcacttgagaaactcattcttgattacaatgcttttttctggtagcatccctccaagtttggcggactgcatagagctgaagtggatgtcacttgccagcaaccggcttcccggtccagtacctccctggtttggtcgatttctgaagcttcaaatcttgaggctaaatattgctaagggcctgcatctcagactttggcatagctaaaatactgagctcttgattcatcaagctgtacaaggcttcctgggat

SEQ ID NO: 57153 - DNA, 215 bp, Setaria italica
  Peptide Sequence Number=SeqID_123127
taggtttgtctagtattattgttattgtattgtctagtcttgtttgcacttgctgactgcatggttgaacttggtattgcaatcgatgggggaaaagacagtctttccatggcagctcaatgtgatggtgaggtcgtcaaggctcctggaaatctggttattagtacttatgtcacatgtcctgatataacattgacagtaactcctgatttgaa

SEQ ID NO: 57154 - DNA, 106 bp, Setaria italica
  Peptide Sequence Number=SeqID_123128
ctctggcatgccatgcagacaagggaggactggatgactgcgtgctttaccgatggcatcgccttccaatgcaggcacggatcccagtctgcctccttgagcacct

SEQ ID NO: 57155 - DNA, 185 bp, Setaria italica
  Peptide Sequence Number=SeqID_123129
aaaaaaaatcacacatctgttcattgcacggtcgtttccaaaagaaaaggtaacctaaatattgactcacggttttgaggcggctcaggccttcatactcaggctttgtttttgccgaacaaacctagcacctcctcccttgcacggtcctgccactctgggtgcatgcttaatacaaccattgt

SEQ ID NO: 57156 - DNA, 231 bp, Setaria italica
  Peptide Sequence Number=SeqID_123130
agcgccagaggcaatggcagcaatacaagacttaccctacaagtagacaactacttccaaatccccaattttccgtgcatcagtgcttcttcccagatgcatctccacctcctgcagcttctgccactcagcgggatcagactgctgaagatgacctgcctgggtgaagttcctccgggccttatcaatcatccccaaccgcaggcagacgccggcgaggcggctgtgggc

SEQ ID NO: 57157 - DNA, 325 bp, Setaria italica
  Peptide Sequence Number=SeqID_123131
tgtttcggtactttaaagtttactatttcctttgggtactaggtttattgttgtttgttactatttgtctactagtaacttacttgattaatttcacttgattacgattggttgttcggttattcgattgcacattattgggaaaaaccttcattttcagggattctgacgtatgttgcttgcaaccttttgggaccataatgctgtgccgtcttttgggacaggctttatggcacagggcacaaaaaatgttttctggcatgcccaacagaacaggtggttgttgttttccgaccttttggagatggtttgacggcatgtcgga

SEQ ID NO: 57158 - DNA, 231 bp, Setaria italica
  Peptide Sequence Number=SeqID_123132
cgcaagcttgagtgtgtcgaggtgattcagacaagagaggctgtacaaaagcttgatatttgtggtgacaaaatccttgtactgacgcagaacaatgttctcaaggtactcattgacttactatgcactagaagataacaaatagcatgcataacaataatgatgttttttactttcattcttcttgttgtcacagttctcttgtgcatcaagaagcagccaaacattgta

SEQ ID NO: 57159 - DNA, 396 bp, Setaria italica
  Peptide Sequence Number=SeqID_123133
tactaaaagaggccgagcctagaggctgccacggccgaggttgaggccagggagaccgagacggaggctgtcgcagccgagacggagacgaaggaagccgagcccgtggcagctccggctgaggccgagaccaaggaagcagagcccgagctacctaaccggcgagttccccggcgactacggctgggacaccgccgggctctcggccgaccccgagaccttcgccaagaaccgcgagctggaggtcatccactcccgctgggccatgctcggcgcgctcggctgtgtcttccccgagctgctcgcccgcaacggcgtcaagttcggcgaggccgtctggttcaaggcgggttcccagatcttcagcgagggtggccttgactacctcggcaaccc

SEQ ID NO: 57160 - DNA, 344 bp, Setaria italica
  Peptide Sequence Number=SeqID_123134
atcaacacgtacactagtaggctgcaactcaaactccacaaccgcagctgcctgagacttcttgagatgcgtgacatcttgcatatgctgctgctcaggctatctcccaccaatagtcagccctgctcctagatgttttattcttccacttgaggttctgcccctgcaggttcttcaattcccttggaaacaatggtactgcacatgccaaataaaaaagttagataattgaagccaatttattcaaatcaagaataaaagtaatctattcagatggacaaagtgactaagtgtctacgcacatgttaatacgtaatatgcaatgaccaattttttgaagaatg

SEQ ID NO: 57161 - DNA, 491 bp, Setaria italica
  Peptide Sequence Number=SeqID_123135
ccatcctaaatgagactattcttcatctgaactctcgtaagctaaaccaagcaagcttccagctgtgttctgttgcttagccaccgatggctcatctggccttggcactgtatactcagcattgacagtcccatgagatgatcccttctcacccaaaggtggttccaattgattctgcgatgaagataacttgctgacagaatcttcttcacattgattagtcttattgctatctgctggctgtgaagggctgctaacttttggccgctttggtttgatcccaacaatgtgcttcaagagatcctgttgccttatatcacttttaggcttaggttcaacacgaagagccactgggacagcaggtgtagaatcagctaagattgctgctttgtaatgtcagtgttaaggaaagcaaagagaggtaactttctactattatttttctaatttctagtatttctattttggtttggtaattagttggtaaacta

SEQ ID NO: 57162 - DNA, 284 bp, Setaria italica
  Peptide Sequence Number=SeqID_123136
cgatcttgtccttcccttcccaaacttcctatctgcacatgcacacagggccgaacacctcactcaggaattcgatgcgaaaatccgaaggggaaaaaacaggggtggggtaactcaggaatcggtgggagcgaaaggaggcgcacacctttggggtcgctgagattggtgtactcgcggacctcgcgcccggacatggctggggtgcctggggcagacgaccggcgggggcgaaaccctaaccctggctccgagcggaagcttcgagactagtcgcgcgggcg

SEQ ID NO: 57163 - DNA, 384 bp, Setaria italica
  Peptide Sequence Number=SeqID_123137
taaaaaccaataacaaaaagaaacggggaaaagaactaagacaaaattagaatagtacaagtaatttcttcttctccgtgcactcggaaactcgcgacatctgtggagagactacctgtccagcaactggcaacttcgtgctctctcatgggcagacattaccgagtttcactccaccgggttcttacaccatcaccatgaagatgctgggggacaacaacgaggaactgagctgcatctcgtttgggttcagcatcgggtgggttgcttccagctgaatggatgcatctgaggcgagcaccggaatacccaatggatgtaattatgaaccacactgtatcctatgactcccagtagtgctgaggtcttatgtacgcttcgagg

SEQ ID NO: 57164 - DNA, 252 bp, Setaria italica
  Peptide Sequence Number=SeqID_123138
cgagcagagagtccacgagtcgccatggcgagcaagcagagcctcggccgccacctccgtcgagtactgcaataaggggaagaagtacccggtgaaggtgagcggggtggagatcgtgcccgatccggtccagcccggccagcccgccaccttcaaaatctccgcttccactgataaaaccatcaagacggggaagctgcaaattgatgtcaagtatttcttcttctccgtgcactcggaaactcgcgacat

SEQ ID NO: 57165 - DNA, 246 bp, Setaria italica
  misc_feature (223)..(223): n is a, c, g, or t
  Peptide Sequence Number=SeqID_123139
gcgtcgtcaagctcatgggccggaacagcggcttcatcgccatgtacgccacgctcgccagcccatgagcttgacgacgccgacgccgttctcggcgctctcggcctcgacgtgcgccgcgttgatggcgcgctgcgcctcctcgacggcggtgtcgaacccgaacgacttgtcgatgacggcgatgtcgttgtcgatggtcttgggcacgccgaccacggcncacctgacgcccgcgccgccgga

SEQ ID NO: 57166 - DNA, 221 bp, Setaria italica
  Peptide Sequence Number=SeqID_123140
tagaattgtaactcactacttttatagtattgctttgcttcatggttattcaacaactaaattcttactaatcaaataaaaattgacggcaatggcacgtaggggatgaaaaattaaaatcaatggcacttaagggattgctatattttcaatggcacagaagggacgactaagtttggatggtatagagggaattttctctaaaaaaacatccagtggtg

SEQ ID NO: 57167 - DNA, 336 bp, Setaria italica
  Peptide Sequence Number=SeqID_123141
cggcggttcgggaggtggatgctctggtcaccgaggattggctccacgcaggacctcatcgcacagtgagtgcaaatttttgattcgctgactggggattgggctttcccctgttcttattgtactttgcctcggcgtctgctcgtgtttgcaggaacttcgcaaagctgccggtgggcgttgtctgcgttgctgacgtgcagttcaaagggagaggacgttcgaagaatgtgtgggaatcaccaccaggttgtctcatgctctctttcacatcacagatgcaggatgcacggaagttgccccttatgcaatatgttgtctgcctttctatgaccg

SEQ ID NO: 57168 - DNA, 378 bp, Setaria italica
  Peptide Sequence Number=SeqID_123142
ccaccctccggccatctccttccccaagcgaccatcaaaacggaatcctggaacttcgcaaagctgccggtgggcgttgtctgcgttgctgacgtgcagttcaaagggagaggacgttcgaagaatgtgtgggaatcaccaccaggttgtctcatgttctctttcacatcacagatgcaggatgcacggaagttgccccttatgcaatatgttgtctgcctttctatgaccgaagccatcaaggaactatgccgtgctaagggactgccagaacttgatgtaaggataaagtggcctaatgatctctatctgaaaggattaaaagttggcggcattctatgtacctcgtcttatgaaccaaaagtctacaatatctgt

SEQ ID NO: 57169 - DNA, 502 bp, Setaria italica
  Peptide Sequence Number=SeqID_123143
tgggttggcttctctcccctccggttcggttcggttcggttcgggttcgtgaggtgttccgttcgggggtgagaggcagagatggcggcgtcggatgttgagtaccgctgcttcgtcggcggcctcgcctgggccaccgacgacaactcgctccacaacgccttcagccccttcggcgaggtcctggagtccaagatcatcctcgatcgcgacacccagaggtcccgcggcttcggcttcgtcacgttcgcgagcgagcaggcgatgcgcgacgccatcgaggggatgaacggcaaggagctcgacggccgcagcatcaccgtcaacgaggcccagtcccgcggcggtccgcgctcagcagctgcagcagcaccgccggagccgccaccacgctcgtggcgtacggcaggtcgccgcaggaccaggagctcctggcctccgcggccggttccgtcgccctgggggagggcgtgtcggccggggagttcgccgttcgcgtctt

SEQ ID NO: 57170 - DNA, 219 bp, Setaria italica
  Peptide Sequence Number=SeqID_123144
tctacttcatcactcaagatagccaacaatgaaactgcatattcctgctgctgctcactagaaagcccaagtctagtattgcaaagaaagctgtggtggatgcaggaggccttcctattctgattggagctgttgtagctccctcaaaagaatgcatgcagggtgagacatgtcattctctacaaagccatgctgtccatgctttatcaaatatttgtg

SEQ ID NO: 57171 - DNA, 267 bp, Setaria italica
  Peptide Sequence Number=SeqID_123145
cgaagccgatcgctctcccgccggcgccaatccgcggcggcggctgctgtttctgggcggccagtccgagccccgtcgcggcggcgcggctcagggtctccgcctccgccgcctcgtcggacgtgccggatttcctctcgtccaattggtcagtaccaccgtttcaacttcccttgcccctcgctgcatcttgctctgcgcgtgtgagaggtcgactaggttgagtacacgttacgagatttgggaagattaggttgcgtaatcagg

SEQ ID NO: 57172 - DNA, 244 bp, Setaria italica
  Peptide Sequence Number=SeqID_123146
gagggatgttctatggagaatacaggggaaaaccgcgaattctacaatggtgaaggcgaaagaactgcgtgtcttgctgtttttgtgtaatctgagatgtaaactaaaggcaatcagggaaagatatgcagagaatcacatgaaagtcaaagtgactgttttcagtgtcagtcgcaagcctatgcagtttctatcactgtttatcttgctctcgtcacgtttccggtctaaatcaaatggaaag

SEQ ID NO: 57173 - DNA, 437 bp, Setaria italica
  Peptide Sequence Number=SeqID_123147
tctaagtaaggtcctattgtagtctattcctagttgtctaaagttattgttattgcaaacatttcatgtgtaccacgactgaagtgaagtgccgggagcacgccgaggctaagcatccaaagtcagacgtgtaccagtgcttcccccatttgaagaagtgaaagcctgtacaagcagccagggtgccatggccatgaagttcaaaaaaacgtgtctgtcagctgtgcggtttgatcacccgtcagtataggggctccccgttaccgttactgagggagttcgttccgtggtatctgtcgtctatcatgcgtcctgtcctatgttaactaacctacataagaaagtgatgtggtgtctaatgaaactgttgtctgctggtaaaacctggtttcggaatgatgagtttcatgtgcaagcttgatcttttgtttgtgccc

SEQ ID NO: 57174 - DNA, 225 bp, Setaria italica
  Peptide Sequence Number=SeqID_123148
accacgactgaagtgaagtgccgggagcacgccgaggctcatggccttcttgttggtatcaagctggccatgagcatccagtgcaaagtatgtatgcaaacattcatgtgtaccacgactgaagtgaagtgccgggagcacgccgaggctaagcatccaaagtcagacgtgtaccagtgcttcccccatttgaagaagtgaaagcctgtacaagctgacagacac

SEQ ID NO: 57175 - DNA, 274 bp, Setaria italica
  Peptide Sequence Number=SeqID_123149
tcggcgatccaaccaccatgggcggcggcaacggccagaagtccaggatggcccgcgagaggaacgccgagaagaacaaggccgccaaggggagccagcttgataccaacaagaaggccatgagcatccagtgcaaagtatgtatgcaaacattcatgtgtaccacgactgaagtgaagtgccgggagcacgccgaggtcttaagtcttatttccttaaagtttctttagtttacgttttgttttaccaagtgacttccccatttgaaagaagt

SEQ ID NO: 57176 - DNA, 126 bp, Setaria italica
  Peptide Sequence Number=SeqID_123150
aacaagaaggccatgagcatccagtgcaagtatgtatgcaacattcatgtgtaccacgactgaagtgaagtgccgggagcacgccgaggctaagcatccaaagtcagacgtgtaccagtgcttccc

SEQ ID NO: 57177 - DNA, 233 bp, Setaria italica
  Peptide Sequence Number=SeqID_123151
agacctctctgtcttttgaccttaatgcactgcattgttgcggtatcatactttgttttgtcggggcactcggtgcaatggtagcttcccacagtgttattgcataatagctctttgcagattccaggtgtagttttgcactcgtcaatatcttataggttgagtcgttgaaatccaagcacatactgttgacgctaacacatccatatgcagacacattcttctgcgcctgc

SEQ ID NO: 57178 - DNA, 241 bp, Setaria italica
  Peptide Sequence Number=SeqID_123152
ttgcttctgtgtacttataggtcatcttattctctcatacctcaacactggttcccggacttgcttcaccttcggccgtagacttctaatttcagtccactcctgccgagtctgttcccaaaggatgcgtcctgcaataatatttaatattttgaatttcaggtaaccatactgaggcacttactacgaaaaggtgcctacctaatttcctactttgttactccagacaaaagaaaatcaa

SEQ ID NO: 57179 - DNA, 241 bp, Setaria italica
  Peptide Sequence Number=SeqID_123153
ctgtgggcctggatgttgtggagatgcaagggtttcctctgtgcggtgctcaatctcattctctgaagcttcttcatgctgactggacaaccatcgatagacattttccatggcccggcgctcgcccgcgaggaaggacgccttctggtgcgccacggcatgcgtgtacacctgggacagcgcgttcgcggcgcccggaacgccaggtgcatctcctcctccacctcttcctccggcctcc

SEQ ID NO: 57180 - DNA, 345 bp, Setaria italica
  Peptide Sequence Number=SeqID_123154
cgcccaagcaggatcatgatccaactgtaaccactgtgggtggtgagttgctgagtgctgacccatttgctcaagtggtgccatgcatgcccccagtgccacatgaaaataactactcgtgcaccaccaaagctggtagctggaccatggtaccaatgtaccatctgatctacccagagctggaattccaccatgctctgcgtctgctcattcaagtcaatccaggggtgtcaggctcatcagatatttatattcctcgacagcttttcagaacatgttctcctgggcggctgtcgtggctttagccgaatattccaaccactaaaaattactccgcctcactca

SEQ ID NO: 57181 - DNA, 441 bp, Setaria italica
  Peptide Sequence Number=SeqID_123155
caaaaaagtacagtaaccactgataagaagataatgaggcatgataggctacactattcaagttaaaatcatgcatcgttcttactggcaccatagtccaagatcagaagtttagaacaatctggagtagtattatatactgtacctatcctcatcataagatgatgagcgtttgagtgcgctgattcctctcccagactcatcctgcttcttggtctcgaccaagctcccgctgaaacattcagactctggagctctcatcccgattgttcttgcgttacaagggattttgtcaaggtgtcgcaatgccacgggagtagagaacactggagaagggaactcaacttgtgtaaacctaggcctgtaggttgggatgatcccaaagcctcggtgttctttcacagatatagattccactaagttgtatttaagttctttgtt

SEQ ID NO: 57182 - DNA, 385 bp, Setaria italica
  misc_feature (326)..(326): n is a, c, g, or t
  Peptide Sequence Number=SeqID_123156
ttgtttagttttctttttggttcttattttctaaggttgttattttcgttggtacttgtaaagtattactaaaaactaccttcttacttattactagttggtttgggcaacatctcagctgtggttctacttcccttttttgtgtattccctgaaacttggattaactggagctgcacttgctactattgcttcacaatatcttggtatgttcctacttctctggtctttaagcagaagagcagttctactgccaccaaaaatcgaagacctagagtttgttgggtacatcaaatctggtggcatgctgttagggagaaccctttnagttctgataacaatgacccttgggactgcaatggctgctaggcaaggtgcactagcta

SEQ ID NO: 57183 - DNA, 288 bp, Setaria italica
  misc_feature (217)..(217): n is a, c, g, or t
  Peptide Sequence Number=SeqID_123157
ctaatcaatgacatgttgtagtctgcctaaaaattggatgttggatcagatcatatgttcgttcatccaggttatgggaaatactgagatgctgaaagcttgtaagtaaaagcttcaggattacttcagacactttactttataattcacctttgcagcgatgctgctgttgtcatgctttctggacaattggcggatggattcacaacaatctttntcggggaactgatggaccgttttgggcatttctaaacttgttggttcttatttgtttcgggtttagtttta

SEQ ID NO: 57184 - DNA, 263 bp, Setaria italica
  Peptide Sequence Number=SeqID_123158
tcacatgtaattgttcctttatttcattactttccctatgtttatgtctatggtttcagcattttattttttctaaaagggtggcaaaaggtttcaatgtttcatttgcgggtgtctttttcatatttataaggtcaatggtgaactgcatgacatcaagtccaactagccgggtttcacttgtaagctgtcgtaatgccttcacaatggttgcaaatcttagcctgtatggcattgctttgctgatatttactctattgcta

SEQ ID NO: 57185 - DNA, 195 bp, Setaria italica
  Peptide Sequence Number=SeqID_123159
agtggcaatttcaaactgtggcatgcgggaggatctattttagtggcaatttccttctcatctgttttcggtagctgtgtcccttgcaaacttatggggactaattcatctactttggagactgttggatacagcacatttgcctctatccaacagtctccaaacttatggggactaattcatcttacttttggt

SEQ ID NO: 57186 - DNA, 368 bp, Setaria italica
  Peptide Sequence Number=SeqID_123160
cctatatatactcgagtcctatcaaggaaatacccatatcacaccaaatgtagggacagcatttggctattcagttacaagacttggcttgggcttagttccagctgcctgttcactgctttcagcgatagtagcttataccatggacctccctgatactcggcgaagacctttggtggagccccttctagcatgattttgctggtggcactgctactcggcgaagacctttggtggagccccttctagcatgattttgctggtggcactgctacagtttgactgtcaacatttggtcatcagtaatagacacatggttacgcgatggaatgactctagtgctggagcctgaagctactaatgatatt

SEQ ID NO: 57187 - DNA, 390 bp, Setaria italica
  Peptide Sequence Number=SeqID_123161
catggtggggatgatgatcccgcatttgtccatgatgaatgcctttgtgttggtaaaaaagagttaaagatggtgatccccgtaagaaagggagcatgattgagcgtttttttctgccggcttctggaatctagatgtagttgaaagcaaggaatagaagatctgttgctgcgtggtcgatgttatcattgtgcgaagatgaggatttgttagttagtccagtcatttttttttccagctttgaaagcatctgtcatttggtctcctgatttggtgtgatcgcgtgaagattcctctctgatcgccctttgtttcgatgcttctaatcctgtgcaaggaaggtgagccggatcactggcctcagtaagataaatctgctgccgactcagt

SEQ ID NO: 57188 - DNA, 244 bp, Setaria italica
  Peptide Sequence Number=SeqID_123162
acggcatcacttctcttcatcaggatcaccctttgacttctcttccttaccattgtcttctgcttcatcttctgaagcttcctcaccatcatcatcatcagacatactatttattacctcctcgatgatgcgcttcacttctgcttttctgtccatgaggtccatttcaaaatgggtccctaattgtctgagaatatcagccagagttgctgtgttgaagtcaacttccttcaaaatgctgaca

SEQ ID NO: 57189 - DNA, 238 bp, Setaria italica
  Peptide Sequence Number=SeqID_123163
aggatcaccctttgacttctcttccttaccattgtcttctgcttcatcttctgaagcttcctcaccatcacaacaaattggtgacctaccagtacaagattgttaaccatttcacagccatatacacctagttgttgtgcttgactaggtagtgacctgtagcctagttgctggtcatgtacaatagctgtgcgtttaatagctttgttgcttaggtagctagcctgactgtaatatg

SEQ ID NO: 57190 - DNA, 334 bp, Setaria italica
  Peptide Sequence Number=SeqID_123164
ttttaagtttaagttaagtttagttatttgttccgtttggttatttcggttattgttgtctattcggtattgttgtcagtgatcagtctcttgttatgtcagtggtttggattgatcttgcaaggactatcttgttggttctgtacaattggggcaccatcacaacaaattggtgacctaccagtacaagattgttaaccatttcacagccatatacacctagttgttgtgcttgactaggtagtgacctgtagcctagttgctggtcatgtacaatagctgtgcgtttaatagcttgttgcttaggtagctagcctgactgtatatgcacaat

SEQ ID NO: 57191 - DNA, 359 bp, Setaria italica
  Peptide Sequence Number=SeqID_123165
attgaaaacagaagctaatgcataagcagctggcagtttcaataagtatctacacaatccagagttctcacacgagaatcaactggataaaatacttgatggtattcttgagaggtgtttctcaactgtattagccagcaaccactcaaagataccccactcttctgttgacacctcaaatgatgctaatttcttagacgtgttgtcattgacgttgcttccttgattttagagaggaagatcggcatcatgattgagaagaaacgctgcttatataatggctttattcttgcatgaaattttttatttaggcagacttctgaatcactcatcattacatggaatgcaccagctgcgga

SEQ ID NO: 57192 - DNA, 188 bp, Setaria italica
  Peptide Sequence Number=SeqID_123166
taaagatggcactgcctgtctatgaagaatcaaatacctttagttctatacttgatatattgtaaagattggcactgcctgtctatgaagaatgaaggtggcaatgtactgcattgggttccatggagttgtctgttcacaaggcgcaaacatcactcccctgtgccattaacagaacaagttctcag

SEQ ID NO: 57193 - DNA, 299 bp, Setaria italica
  misc_feature (109)..(109): n is a, c, g, or t
  Peptide Sequence Number=SeqID_123167
cagcatgcaatctcgcaaagatgacacaacaaaggaagaaaaagaagcaaaaaaaaaaacttgtctcagttattcaggatcatcatgccttctcctccactaacatccncttttcgttcatcgtctagcgcaaattgtccactgtttcgtcgaaaagcatctcctggtaccggcactcgctgctgcagaatgctttgtcacctcgatagatgaagatgtcactgccatagccaagttgcttgttgcattgcgttggtctaagtagtcttctattgtaagtccttacttcgtccttactt

SEQ ID NO: 57194 - DNA, 232 bp, Setaria italica
  misc_feature (13)..(13): n is a, c, g, or t
  Peptide Sequence Number=SeqID_123168
ccactaacatccncttttcgttcatcgtctagcgcaaattgtccactgtttcgtcgaaaagcatctcctggtaccggcactcgcgatagatgaagatgtcactgccatagccaagttgcttgttgcatgcgtggcaagagctcatgaagccactcgccacagccgcaaagccgccatcgccagcgccggcccctttgtccatcttctcgacgagcacatccccgcagctctc

SEQ ID NO: 57195 - DNA, 158 bp, Setaria italica
  Peptide Sequence Number=SeqID_123169
gctagacgatgaacgaaaagaggatgttagtggaggagaaggcatgatgatcctgaataactgagacaagttgcttgttgcatgcgtggcaagagctcatgaagccactcgccacagccgcaaagccgccatccgccagcgccggcccctttcgtcca

SEQ ID NO: 57196 - DNA, 262 bp, Setaria italica
  misc_feature (255)..(255): n is a, c, g, or t
  Peptide Sequence Number=SeqID_123170
tgtatgcctgcactgcactcgcagttaatgttgtttgatacttgtcaggctagtgaacaaggaccttgatttcccatttttggctcttctaatttcaggtatatgctaattacagtactatgtctcagccgtatccgtatacgctactattttcttaatttcccgtggatcaataggtcttgataagattctcaatggcttcgcaatttggattactccgatggttttgacccaggacccagctgaaaaaaaacntttggaa

SEQ ID NO: 57197 - DNA, 504 bp, Setaria italica
  Peptide Sequence Number=SeqID_123171
taactttgaccaagtttataaaaaatttcgtgattgatgtaatggaactaatttgatgttgtagatattagtccttttctctatgaacttggtcaaacttaaaggagtttgacttaggacaaaactaaaacgacctacattttgaaacggagggagtaccatacactccactatagaccctaggctagtaggctgtactattctcttttgtatgtcatattgaagtatgtcccctaattgttgtagctgtctttacaactttattcttaattatttccatattccttagcaacaaccagttatactatgttgctgcatttgcataggcgtcatgatcgcttggactgggattgagcactttgttgcaggaagatttgaggacccactgctgctgatgagcctgatgatatgcagtatgagctgcggccaagatggcctcttggtgaagaatattcggaaggaagaagtgttggcacgatcgctgaagactgctcgggtccatcc

SEQ ID NO: 57198 - DNA, 143 bp, Setaria italica
  Peptide Sequence Number=SeqID_123172
acagcctactagcctagggtctatagtggagtgtactattctcttttgtatgtcatattgaagtatgtcccctaattgttgtagctgtctttacaactttattcttaattatttccatattcttcaccaagaggccatcttgg

SEQ ID NO: 57199 - DNA, 253 bp, Setaria italica
  Peptide Sequence Number=SeqID_123173
gcacacgcattagtttccagttaatagttagtttagaataacttagtacaggctagtgaacaaggaccttgatttcccatttttggctcttctaatttcaggaggacacaatctccttgttcttgctcatagccttgggcaatatgttcaactggggactactatagatgatgcgattggtgaggcgtatgacaaatctgcaagatggttgggccttgatatgcggaaaggcgggggtcctgctcttgaagag

SEQ ID NO: 57200 - DNA, 250 bp, Setaria italica
  Peptide Sequence Number=SeqID_123174
gaaggggctgccccatcaaaaactcccttgtttctggtgattccatagcatccaagctcctagtataaccgtgctattaaatccttttctttgagctttgcctacttttttatatgatttcctccaccaatcagcaaagctcttttcattccttcttggtactatactctctaggccaagaagagctagcagattataccaccatttgtttcgtctgtacacagttatctaaaagaattttgcatgattt

SEQ ID NO: 57201 - DNA, 391 bp, Setaria italica
  Peptide Sequence Number=SeqID_123175
cgtatctggtaactaaggtttcttaagagctagattcaccgcaatgcagatactgagtaagcactgagtacattttaatataaaatcagtgtcatgcctccctcattttttcctgaataagcataagagaacccatttaatactctaacaacactgttttcttccagcgtgttcctgcaggttgatctagttgtaataggtaaccatgtgcaaaggacacacaaatccaccttgttcacatttgcatcaggccacccagctgtgctgttgagatggaacggcgcctcgccctccgccgctcgtactcagggtcatcagtgggcagctcgtaccggcacaccgggcacgtagtttccgttatggtcaagtccacggtccctaattgtctagt

SEQ ID NO: 57202 - DNA, 173 bp, Setaria italica
  Peptide Sequence Number=SeqID_123176
tgttgctccaataatatgtatttacaaatgttacgacaattgttcttaccattcaactcccaagaacaaacagctaaatcctgaaaaatctcatctcaacagcacagctgggtggcctgatgcaaatgtgaacaaggtggatttgtggtaggtgttggatgcaattccattgt

SEQ ID NO: 57203 - DNA, 387 bp, Setaria italica
  Peptide Sequence Number=SeqID_123177
tactagtttagacaagtaattagtacaagttagtaaactttacaacaattaggaactaaaaagtaggatacttacctgccaaaattgacacccatttgaaccctacggaaggaagctgtttttgatgcctaattttccttccaaggttggttactcattcagctgaaaagtggtggaaaatagtttagaacatgccggagcagagggatttcatacgcttttggtggaaagaaaaacttcacaatttcatacaattatttgaccactacatggagaaaaagctcacaatttcattcgatcatttgagtaagtcacttccttttcctttcagaggaatcgaaccttcttcctctaccgtggatataaagaaggcataccgcaaagcag

SEQ ID NO: 57204 - DNA, 268 bp, Setaria italica
  Peptide Sequence Number=SeqID_123178
ttaatactcttcttggaagaaacaactgcaaagaaaatatgtccatgccatcagagaaggtagagagtatccgtagcaatctgaatcgagccaatcttcggttttcttctctgggaacgggatgccaaggaaaggggggccccattaaatgtgtatatgatattgtaagtctttgtcctttacaattttaaattacctacagcatgcatattatattctctgtagtccctattaatttaaattttgtcacaattcagctttataagtt

SEQ ID NO: 57205 - DNA, 386 bp, Setaria italica
  Peptide Sequence Number=SeqID_123179
tattttgttttcttaattgtccttctattctattaattgttctagtttcttggttgttgttcttcaggatttgcacttttgcagaccgtatcagtaccattacccctatgaagttcttggtgttaatgcctcaccagtcatcactgatgtcagtttttggtgttcattgggttctggtgtggagagcgcagagtacatgaggcaagcttttgtttgtaaaggtgttgttcatatatctgatgttgtgcatagtgtcttggagcagtttggtttttggaatggaatcaacaagactggaatactgtaaatagaggcatacgttttctgtaccctgcccccgtagtgtggcggaagcatgcggagggtgacagaagcaaatggttttt

SEQ ID NO: 57206 - DNA, 241 bp, Setaria italica
  Peptide Sequence Number=SeqID_123180
cgttgtggattcccttctttaaggactttcacaagtagaggaattgctcctgaagaacttatgataggcttattggtggatgaggccgaaagtgtaagcactgcagcagttgcatactcctgcaaattcagatcacttgattgcaagtaaccaagcaggggctcaagtgctccagcatccactatctttgttttattcctctcgtccctgacggcgaggttgagcagcgcgaggagcgcag

SEQ ID NO: 57207 - DNA, 209 bp, Setaria italica
  Peptide Sequence Number=SeqID_123181
atttaggccagcattatttatccagatgtcaactgagccaagctcattaatagcaaaattcactaacttcttcacatctggaggatcaagtacaccactgacagctgtctatggttcaactaaatgtggactgaggcagttccaagcatcacttctgaaggaaagcagaagatcaaaagttggagtgcacactgcctctcctggtatgg
